(19) United States
(12) Patent Application Publication
(10) Pub. No.: US 2025/0333767 A1
(43) Pub. Date: Oct. 30, 2025

(54) ENGINEERED CLASS 2 TYPE V CRISPR SYSTEMS

(71) Applicant: Scribe Therapeutics Inc., Alameda, CA (US)

(72) Inventors: Wenyuan ZHOU, Dublin, CA (US); Fred DEITER, Alameda, CA (US); Manuel MOHR, Berkeley, CA (US); Benjamin OAKES, El Cerrito, CA (US); Sean HIGGINS, Alameda, CA (US); Sarah DENNY, San Francisco, CA (US); Gayathri VIJAYAKUMAR, Oakland, CA (US); Trent GOMBERG, San Diego, CA (US); Addison WRIGHT, El Cerrito, CA (US)

(21) Appl. No.: 18/869,765

(22) PCT Filed: Jun. 1, 2023
(86) PCT No.: PCT/US2023/067791

§ 371 Date: Nov. 26, 2024

Related U.S. Application Data
(60) Provisional application No. 63/348,413, filed on Jun. 2, 2022.
(60) Provisional application No. 63/350,400, filed on Jun. 8, 2022.
(60) Provisional application No. 63/350,770, filed on Jun. 9, 2022.

(51) Int. Cl. C12N 15/90; C12N 9/22; C12N 15/11

(52) U.S. Cl. CPC C12N 15/907; C12N 9/226; C12N 15/11; C12N 2310/20; C12N 2310/531

(57) ABSTRACT

Provided herein are systems of engineered Class 2, Type V nucleases and guide ribonucleic acid scaffolds useful for the editing of target nucleic acids. Also provided are methods of making and using such systems to modify nucleic acids.

### CROSS-REFERENCE TO RELATED APPLICATION

[0001] This application claims priority to U.S. provisional patent application Nos. 63/348,413, filed on Jun. 2, 2022, 63/350,400, filed on Jun. 8, 2022, and 63/350,770, filed on Jun. 9, 2022, the contents of each of which are incorporated by reference in their entirety.

### INCORPORATION BY REFERENCE OF SEQUENCE LISTING

[0002] The contents of the electronic sequence listing (SCRB_041_03WO_SeqList_ST26.xml; Size: 90,175,867 bytes; and Date of Creation: May 23, 2023) are herein incorporated by reference in their entirety.

### BACKGROUND

[0003] The CRISPR-Cas systems of bacteria and archaea confer a form of acquired immunity against phage and viruses. Intensive research over the past decade has uncovered the biochemistry of these systems. CRISPR-Cas systems consist of Cas proteins, which are involved in acquisition, targeting and cleavage of foreign DNA or RNA, and a CRISPR array, which includes direct repeats flanking short spacer sequences that guide Cas proteins to their targets. Class 2 CRISPR-Cas are streamlined versions in which a single Cas protein bound to RNA is responsible for binding to and cleavage of a targeted sequence. The programmable nature of these minimal systems has facilitated their use as a versatile technology that is revolutionizing the field of genome manipulation.

[0004] To date, only a few Class 2 CRISPR/Cas systems have been discovered that have been widely used. Of these, Type V are unique in that they utilize a single unified RuvC-like endonuclease (RuvC) domain that recognizes 5′ PAM sequences that are different from the 3′ PAM sequences recognized by Cas9, and form a staggered cleavage in the target nucleic acid with 5, 7, or 10 nt 5′ overhangs (Yang et al., PAM-dependent target DNA recognition and cleavage by C2c1 CRISPR-Cas endonuclease. Cell 167:1814 (2016)). However, wild-type Type V Cas nuclease and guide sequences have low editing efficiency. Thus, there is a need in the art for additional Class 2, Type V CRISPR/Cas systems (e.g., Cas protein plus guide RNA combinations) that have been optimized and offer improvements over earlier generation systems for utilization in a variety of therapeutic, diagnostic, and research applications.

### SUMMARY

[0005] The present disclosure relates to systems of engineered CasX proteins and engineered guide ribonucleic acid scaffolds (ERS) with linked targeting sequences used to modify a target nucleic acid of a gene in eukaryotic cells. In some embodiments, the present disclosure provides engineered CasX proteins comprising one or more, or multiple modifications relative to one or more domains of a CasX protein from which it was derived. These engineered CasX exhibit one or more improved characteristics as compared to a reference CasX or the CasX variant from which it was derived, and the engineered CasX retains the ability to form a ribonucleoprotein (RNP) complex with an ERS and retains nuclease activity.

[0006] In another aspect, the present disclosure provides engineered guide ribonucleic acid scaffolds (ERS), including single-guide compositions, capable of binding a Class 2, Type V protein, including the engineered CasX of the disclosure, wherein the ERS comprise one or more, or multiple modifications in one or more regions compared to a parental gRNA; e.g., a reference gRNA or a gRNA variant. In some embodiments, the modified regions of the scaffold of the gRNA include one or more of: (a) the 5′ end of the scaffold; (b) the extended stem; (c) the scaffold stem; (d) the triplex; (e) the triplex loop; and (f) the pseudoknot stem.

[0007] In some embodiments, the present disclosure provides systems of gene editing pairs comprising the engineered CasX proteins and ERS of any of the embodiments described herein, wherein the gene editing pair exhibits at least one improved characteristic as compared to a gene editing pair of a CasX and gRNA from which the engineered CasX proteins and ERS were derived.

[0008] In some embodiments, the present disclosure provides polynucleotides and vectors encoding the engineered CasX proteins, ERS and gene editing pairs described herein. In some embodiments, the vectors are viral vectors such as an Adeno-Associated Viral (AAV) vector. In other embodiments, the vectors are CasX delivery particles (XDP) that comprise RNPs of the gene editing pairs.

[0009] In some embodiments, the present disclosure provides methods of making the engineered CasX proteins. In other embodiments, the disclosure provides methods of making the ERS.

[0010] In some embodiments, the present disclosure provides kits comprising the polynucleotides, vectors, engineered CasX proteins, ERS and gene editing pairs, and LNP compositions described herein.

[0011] In some embodiments, the present disclosure provides methods of editing a target nucleic acid, comprising contacting the target nucleic acid with the engineered CasX protein and ERS embodiments described herein, wherein the contacting results in editing or modification of the target nucleic acid.

[0012] In some embodiments, the present disclosure provides methods of editing a target nucleic acid in a population of cells, comprising contacting the cells with one or more of the gene editing pairs described herein, wherein the contacting results in editing or modification of the target nucleic acid in the population of cells.

[0013] In another aspect, provided herein are gene editing pairs, compositions comprising gene editing pairs, or vectors comprising or encoding gene editing pairs, for use in a method of treatment, wherein the method comprises editing or modifying a target nucleic acid; optionally wherein the editing occurs in a subject having a mutation in an allele of a gene wherein the mutation causes a disease or disorder in the subject, preferably wherein the editing changes the mutation to a wild type allele of the gene or knocks down or knocks out an allele of a gene causing a disease or disorder in the subject.

[0014] In another aspect, the present disclosure provides compositions of engineered CasX, ERS, and gene editing pairs for use in the manufacture of a medicament for use in the treatment of a subject with a disease.

### BRIEF DESCRIPTION OF THE DRAWINGS

[0015] The novel features of the invention are set forth with particularity in the appended claims. A better understanding of the features and advantages of the present invention will be obtained by reference to the following detailed description that sets forth illustrative embodiments, in which the principles of the invention are utilized, and the accompanying drawings of which:

[0016] FIG. 1 is a graph illustrating the results of the CcdB bacterial selection assay to determine the true fitness values (represented as log 2 enrichment scores) for the new CasX variants (top graph), which were designed via machine learning to contain the indicated number of single mutations relative to CasX 515, and for the randomly mutated CasX molecules (bottom graph), as described in Example 1.

[0017] FIG. 2 is a graph illustrating the results of the stringent CcdB bacterial selection assay to determine the true fitness values (represented as log 2 enrichment scores) for the new machine-learning derived CasX variants (top graph) and for the randomly mutated CasX molecules (bottom graph), as described in Example 1.

[0018] FIG. 3A is a bar graph showing the average on-target editing efficiency for the indicated CasX variants for two biological replicates, as described in Example 2. Standard error of the mean was also determined and illustrated.

[0019] FIG. 3B is a bar graph showing the average off-target editing efficiency for the indicated CasX variants for two biological replicates, as described in Example 2. Standard error of the mean was also determined and illustrated.

[0020] FIG. 4 is a bar graph showing the average on-target editing efficiency for the indicated CasX variants across a series of four different PAM sequences, as described in Example 2. Standard error of the mean was also determined and illustrated.

[0021] FIG. 5 is a bar graph showing results from the CcdB survival assay, plotting mean log 2 enrichment values as an assessment for nuclease activity for the indicated CasX protein variants, as described in Example 2. Standard error of the mean was also determined and illustrated.

[0022] FIG. 6A is a boxplot showing the average on-target editing activity for selected CasX variants in the PASS assay, as described in Example 3. Forty on-target, TTC PAM spacer-targets are shown, where each was averaged across six replicates.

[0023] FIG. 6B is a boxplot showing the average off-target editing activity for selected CasX variants in the PASS assay, as described in Example 3. Eighty off-target, TTC PAM spacer-targets are shown, where each was averaged across six replicates.

[0024] FIG. 7A is a pointplot showing CasX 491 average editing activity and 95% estimated confidence intervals for TTC-PAM spacers and their editing rates at either perfectly complementary on-target sites or mismatched off-target sites, as described in Example 3. On-target editing rates are plotted as squares, while off-target editing rates are plotted as circles. Regions highlighted in gray are defined as allele-specific, where the on-target editing rate is >20%, and the off-target editing rate is <20% of the on-target editing rate.

[0025] FIG. 7B is a pointplot showing CasX 515 average editing activity and 95% estimated confidence intervals for TTC-PAM spacers and their editing rates at either perfectly complementary on-target sites or mismatched off-target sites, as described in Example 3.

[0026] FIG. 7C is a pointplot showing CasX 812 average editing activity and 95% estimated confidence intervals for TTC-PAM spacers and their editing rates at either perfectly complementary on-target sites or mismatched off-target sites, as described in Example 3.

[0027] FIG. 8A is a schematic illustrating versions 1-3 of chemical modifications made to gRNA scaffold 235, as described in Example 8. Structural motifs are highlighted. Standard ribonucleotides are depicted as open circles, and 2′OMe-modified ribonucleotides are depicted as black circles. Phosphorothioate bonds are indicated with * below or beside the bond. For the v2 profile, the addition of three 3′ uracils (3′UUU) is annotated with “U”s in the relevant circles.

[0028] FIG. 8B is a schematic illustrating versions 4-6 of chemical modifications made to gRNA scaffold 235, as described in Example 8. Structural motifs are highlighted. Standard ribonucleotides are depicted as open circles, and 2′OMe-modified ribonucleotides are depicted as black circles. Phosphorothioate bonds are indicated with * below or beside the bond.

[0029] FIG. 9 is a plot illustrating the quantification of percent knockout of B2M in HepG2 cells co-transfected with 100 ng of CasX 491 mRNA and with the indicated doses of end-modified (vi) or unmodified (v0) B2M-targeting gRNAs with spacer 7.37, as described in Example 8. Editing level was determined by flow cytometry as the population of cells with loss of surface presentation of the HLA complex due to successful editing at the B2M locus.

[0030] FIG. 10 is a schematic illustrating versions 7-9 of chemical modifications made to ERS 316, as described in Example 8. Structural motifs are highlighted. Standard ribonucleotides are depicted as open circles, and 2′OMe-modified ribonucleotides are depicted as black circles. Phosphorothioate bonds are indicated with * below or beside the bond.

[0031] FIG. 11A is a schematic of gRNA scaffold 174, as described in Example 8. Structural motifs are highlighted.

[0032] FIG. 11B is a schematic of gRNA scaffold 235, as described in Example 8. Highlighted structural motifs are the same as in FIG. 6A. The differences between scaffold 174 and scaffold 235 lie in the extended stem motif and several single-nucleotide changes (indicated with asterisks). ERS 316 maintains the shorter extended stem from scaffold 174 but harbors the four substitutions found in scaffold 235.

[0033] FIG. 11C is a schematic of ERS 316, as described in Example 8. Highlighted structural motifs are the same as in FIG. 6A. ERS 316 maintains the shorter extended stem from scaffold 174 (FIG. 6A) but harbors the four substitutions found in scaffold 235 (FIG. 6B).

[0034] FIG. 12 is a plot displaying a correlation between indel rate (depicted as edit fraction) at the PCSK9 locus as measured by NGS (x-axis) and secreted PCSK9 levels (ng/mL) detected by enzyme-linked immunosorbent assay (ELISA) (y-axis) in HepG2 cells lipofected with CasX 491 mRNA and PCSK9-targeting gRNAs containing the indicated scaffold variant and spacer combination, as described in Example 8.

[0035] FIG. 13A is a plot depicting the results of an editing assay measured as indel rate detected by NGS at the human B2M locus in HepG2 cells treated with the indicated doses of LNPs formulated with CasX 491 mRNA and the indicated B2M-targeting gRNA, as described in Example 8.

[0036] FIG. 13B is a plot illustrating the quantification of percent knockout of B2M in HepG2 cells treated with the indicated doses of LNPs formulated with CasX 491 mRNA and the indicated B2M-targeting gRNA, as described in Example 8. Editing level was determined by flow cytometry as population of cells that did not have surface presentation of the HLA complex due to successful editing at the B2M locus.

[0037] FIG. 14A is a plot depicting the results of an editing assay measured as indel rate detected by NGS at the mouse ROSA26 locus in Hepa1-6 cells treated with the indicated doses of LNPs formulated with CasX 676 mRNA #2 and the indicated ROSA26-targeting gRNA with either the v1 or v5 modification profile, as described in Example 8.

[0038] FIG. 14B is a plot illustrating the quantification of percent editing measured as indel rate detected by NGS at the ROSA26 locus in mice treated with LNPs formulated with CasX 676 mRNA #2 and the indicated chemically-modified ROSA26-targeting gRNA, as described in Example 8.

[0039] FIG. 15 is a bar graph showing the results of the editing assay measured as indel rate detected by NGS as the mouse PCSK9 locus in mice treated with LNPs formulated with CasX 676 mRNA #1 and the indicated chemically-modified PCSK9-targeting gRNA, as described in Example 8. Untreated mice served as experimental control.

[0040] FIG. 16A is a schematic illustrating versions 1-3 of chemical modifications made to ERS 316, as described in Example 8. Structural motifs are highlighted. Standard ribonucleotides are depicted as open circles, and 2′OMe-modified ribonucleotides are depicted as black circles. Phosphorothioate bonds are indicated with * below or beside the bond.

[0041] FIG. 16B is a schematic illustrating versions 4-6 of chemical modifications made to ERS 316, as described in Example 8. Structural motifs are highlighted. Standard ribonucleotides are depicted as open circles, and 2′OMe-modified ribonucleotides are depicted as black circles. Phosphorothioate bonds are indicated with * below or beside the bond.

[0042] FIG. 17A is a diagram of the secondary structure of guide RNA scaffold 235, noting the regions with CpG motifs, as described in Example 9. CpG motifs in (1) the pseudoknot stem, (2) the scaffold stem, (3) the extended stem bubble, (4) the extended step, and (5) the extended stem loop are labeled on the structure.

[0043] FIG. 17B is a diagram of the CpG-reducing mutations that were introduced into each of the five regions in the coding sequence of the guide RNA scaffold, as described in Example 9.

[0044] FIG. 18 provides the results of an editing experiment in which AAV vectors with various CpG-reduced or CpG-depleted guide RNA scaffolds were used to edit the B2M locus in induced neurons, as described in Example 9. The AAV vectors were administered at a multiplicity of infection (MOI) of 4e3. The bars show the mean±the SD of two replicates per sample. “No Tx” indicates a non-transduced control, and “NT” indicates a control with a non-targeting spacer.

[0045] FIG. 19 provides the results of an editing experiment in which AAV vectors with various CpG-reduced or CpG-depleted guide RNA scaffolds were used to edit the B2M locus in induced neurons, as described in Example 9. The AAV vectors were administered at an MOI of 3e3. The bars show the mean±the SD of two replicates per sample. “No Tx” indicates a non-transduced control.

[0046] FIG. 20 provides the results of an editing experiment in which AAV vectors with various CpG-reduced or CpG-depleted guide RNA scaffolds were used to edit the B2M locus in induced neurons, as described in Example 9. The AAV vectors were administered at an MOI of 1e3. The bars show the mean±the SD of two replicates per sample. “No Tx” indicates a non-transduced control.

[0047] FIG. 21 provides the results of an editing experiment in which AAV vectors with various CpG-reduced or CpG-depleted guide RNA scaffolds were used to edit the B2M locus in induced neurons, as described in Example 9. The AAV vectors were administered at an MOI of 3e2. The bars show the mean±the SD of two replicates per sample. “No Tx” indicates a non-transduced control.

[0048] FIG. 22 is a bar graph showing the quantification of percent knockout of B2M in HEK293 cells transfected with CpG-depleted AAV plasmids containing the indicated gRNA scaffolds with spacer 7.37, as described in Example 10. The dotted line annotates the ˜41% transfection efficiency.

[0049] FIG. 23A is a bar plot showing percent editing at the AAVS1 locus in human iNs transduced with AAVs expressing the CasX:gRNA system using the indicated gRNA scaffolds (AAV construct ID #262-274) at the MOI of 3E4 vg/cell, as described in Example 10.

[0050] FIG. 23B is a bar plot showing percent editing at the AAVS1 locus in human iNs transduced with AAVs expressing the CasX:gRNA system using the indicated gRNA scaffolds (AAV construct ID #262-274) at the MOI of 1E4 vg/cell, as described in Example 10.

[0051] FIG. 23C is a bar plot showing percent editing at the AAVS1 locus in human iNs transduced with AAVs expressing the CasX:gRNA system using the indicated gRNA scaffolds (AAV construct ID #262-274) at the MOI of 3E3 vg/cell, as described in Example 10.

[0052] FIG. 24A is a bar plot showing the quantification of percent knockout of B2M in HEK293 cells transfected with CpG-depleted AAV plasmids containing the indicated gRNA scaffolds with spacer 7.37 (AAV construct ID #275-289) at the MOI of 1E4 vg/cell, as described in Example 10.

[0053] FIG. 24B is a bar plot showing the quantification of percent knockout of B2M in HEK293 cells transfected with CpG-depleted AAV plasmids containing the indicated gRNA scaffolds with spacer 7.37 (AAV construct ID #275-289) at the MOI of 3E3 vg/cell, as described in Example 10.

[0054] FIG. 24C is a bar plot showing the quantification of percent knockout of B2M in HEK293 cells transfected with CpG-depleted AAV plasmids containing the indicated gRNA scaffolds with spacer 7.37 (AAV construct ID #275-289) at the MOI of 1E3 vg/cell, as described in Example 10.

[0055] FIG. 25 is a diagram of the secondary structure of guide RNA scaffold 316, noting the regions and domains in which mutations were designed for screening in a library, as described in Example 11. The (1) 5′ end, (2) pseudoknot stem, (3) triplex loop, (4) triplex (including adjacent sequence between the extended stem and the start of annotated triplex), (5) scaffold stem (including adjacent sequences from the end of pseudoknot and start of extended stem), and (6) extended stem are labeled on the structure.

[0056] FIG. 26 shows the results of an editing experiment in which HEK293T cells were transduced with lentiviral particles expressing CasX 515 and a gRNA made up of either scaffold 174, scaffold 235, ERS 316, ERS 382, or ERS 392 targeting the B2M locus or a non-targeting (“NT”) control, as described in Example 12. The lentiviruses were transduced at an MOI of 0.1. The bars show the mean of three samples, and the error bars represent the standard error of the mean (SEM).

[0057] FIG. 27 shows the results of an editing experiment in which HEK293T cells were transduced with lentiviral particles expressing CasX 515 and a gRNA made up of either scaffold 174, scaffold 235, ERS 316, ERS 382, or ERS 392 targeting the B2M locus or a non-targeting (“NT”) control, as described in Example 12. The lentiviruses were transduced at a MOI of 0.05. The bars show the mean of three samples, and the error bars represent the SEM.

[0058] FIG. 28 is a western blot showing the levels of CasX expression (top western blot) in HEK293 cells transfected with AAV plasmids containing a CpG+ CasX 515 sequence (lane 1) or CpG− v1 CasX 515 sequence (lanes 2-3), as described in Example 13. Lysate from untransfected HEK293 cells were used as a ‘no plasmid’ control (lane 4). The bottom western blot shows the total protein loading control. Three technical replicates are shown.

### DETAILED DESCRIPTION

[0059] While preferred embodiments of the present invention have been shown and described herein, it will be obvious to those skilled in the art that such embodiments are provided by way of example only. Numerous variations, changes, and substitutions will now occur to those skilled in the art without departing from the invention. It should be understood that various alternatives to the embodiments of the invention described herein may be employed in practicing the invention. It is intended that the following claims define the scope of the invention and that methods and structures within the scope of these claims and their equivalents be covered thereby.

[0060] Unless otherwise defined, all technical and scientific terms used herein have the same meaning as commonly understood by one of ordinary skill in the art to which this invention belongs. Although methods and materials similar or equivalent to those described herein can be used in the practice or testing of the present embodiments, suitable methods and materials are described below. In case of conflict, the patent specification, including definitions, will control. In addition, the materials, methods, and examples are illustrative only and not intended to be limiting. Numerous variations, changes, and substitutions will now occur to those skilled in the art without departing from the invention.

### Definitions

[0061] The terms “polynucleotide” and “nucleic acid,” used interchangeably herein, refer to a polymeric form of nucleotides of any length, either ribonucleotides or deoxyribonucleotides. Thus, terms “polynucleotide” and “nucleic acid” encompass single-stranded DNA; double-stranded DNA; multi-stranded DNA; single-stranded RNA; double-stranded RNA; multi-stranded RNA; genomic DNA; cDNA; DNA-RNA hybrids; and a polymer comprising purine and pyrimidine bases or other natural, chemically or biochemically modified, non-natural, or derivatized nucleotide bases.

[0062] “Hybridizable” or “complementary” are used interchangeably to mean that a nucleic acid (e.g., RNA, DNA) comprises a sequence of nucleotides that enables it to non-covalently bind, i.e., form Watson-Crick base pairs and/or G/U base pairs, “anneal”, or “hybridize,” to another nucleic acid in a sequence-specific, antiparallel, manner (i.e., a nucleic acid specifically binds to a complementary nucleic acid) under the appropriate in vitro and/or in vivo conditions of temperature and solution ionic strength. It is understood that the sequence of a polynucleotide need not be 100% complementary to that of its target nucleic acid sequence to be specifically hybridizable; it can have at least about 70%, at least about 80%, or at least about 90%, or at least about 95% sequence identity and still hybridize to the target nucleic acid sequence. Moreover, a polynucleotide may hybridize over one or more segments such that intervening or adjacent segments are not involved in the hybridization event (e.g., a loop structure or hairpin structure, a ‘bulge’, and the like).

[0063] A “gene,” for the purposes of the present disclosure, includes a DNA region encoding a gene product (e.g., a protein, RNA), as well as all DNA regions which regulate the production of the gene product, whether or not such regulatory sequences are adjacent to coding and/or transcribed sequences. Accordingly, a gene may include regulatory element sequences including, but not necessarily limited to, promoter sequences, terminators, translational regulatory sequences such as ribosome binding sites and internal ribosome entry sites, enhancers, silencers, insulators, boundary elements, replication origins, matrix attachment sites and locus control regions. Coding sequences encode a gene product upon transcription or transcription and translation; the coding sequences of the disclosure may comprise fragments and need not contain a full-length open reading frame. A gene can include both the strand that is transcribed as well as the complementary strand containing the anticodons.

[0064] The term “downstream” refers to a nucleotide sequence that is located 3′ to a reference nucleotide sequence. In certain embodiments, downstream nucleotide sequences relate to sequences that follow the starting point of transcription. For example, the translation initiation codon of a gene is located downstream of the start site of transcription.

[0065] The term “upstream” refers to a nucleotide sequence that is located 5′ to a reference nucleotide sequence. In certain embodiments, upstream nucleotide sequences relate to sequences that are located on the 5′ side of a coding region or starting point of transcription. For example, most promoters are located upstream of the start site of transcription.

[0066] The term “adjacent to” with respect to polynucleotide or amino acid sequences refers to sequences that are next to, or adjoining each other in a polynucleotide or polypeptide. The skilled artisan will appreciate that two sequences can be considered to be adjacent to each other and still encompass a limited amount of intervening sequence, e.g., 1, 2, 3, 4, 5, 6, 7, 8, 9 or 10 nucleotides or amino acids.

[0067] The term “regulatory element” is used interchangeably herein with the term “regulatory sequence,” and is intended to include promoters, enhancers, and other expression regulatory elements. It will be understood that the choice of the appropriate regulatory element will depend on the encoded component to be expressed (e.g., protein or RNA) or whether the nucleic acid comprises multiple components that require different polymerases or are not intended to be expressed as a fusion protein.

[0068] The term “accessory element” is used interchangeably herein with the term “accessory sequence,” and is intended to include, inter alia, polyadenylation signals (poly(A) signal), enhancer elements, introns, posttranscriptional regulatory elements (PTREs), nuclear localization signals (NLS), deaminases, DNA glycosylase inhibitors, additional promoters, factors that stimulate CRISPR-mediated homology-directed repair (e.g. in cis or in trans), activators or repressors of transcription, self-cleaving sequences, and fusion domains, for example a fusion domain fused to an engineered CasX protein. It will be understood that the choice of the appropriate accessory element or elements will depend on the encoded component to be expressed (e.g., protein or RNA) or whether the nucleic acid comprises multiple components that require different polymerases or are not intended to be expressed as a fusion protein.

[0069] The term “promoter” refers to a DNA sequence that contains a transcription start site and additional sequences to facilitate polymerase binding and transcription. Exemplary eukaryotic promoters include elements such as a TATA box, and/or B recognition element (BRE) and assists or promotes the transcription and expression of an associated transcribable polynucleotide sequence and/or gene (or transgene). A promoter can be synthetically produced or can be derived from a known or naturally occurring promoter sequence or another promoter sequence. A promoter can also include a chimeric promoter comprising a combination of two or more heterologous sequences to confer certain properties. A promoter of the present disclosure can include variants of promoter sequences that are similar in composition, but not identical to, other promoter sequence(s) known or provided herein. A promoter can be classified according to criteria relating to the pattern of expression of an associated coding or transcribable sequence or gene operably linked to the promoter, such as constitutive, developmental, tissue-specific, inducible, etc. A promoter can also be classified according to its strength. As used in the context of a promoter, “strength” refers to the rate of transcription of the gene controlled by the promoter. A “strong” promoter means the rate of transcription is high, while a “weak” promoter means the rate of transcription is relatively low.

[0070] A promoter of the disclosure can be a Polymerase II (Pol II) promoter. Polymerase II transcribes all protein coding and many non-coding genes. A representative Pol II promoter includes a core promoter, which is a sequence of about 100 base pairs surrounding the transcription start site, and serves as a binding platform for the Pol II polymerase and associated general transcription factors. The promoter may contain one or more core promoter elements such as the TATA box, BRE, Initiator (INR), motif ten element (MTE), downstream core promoter element (DPE), downstream core element (DCE), although core promoters lacking these elements are known in the art.

[0071] A promoter of the disclosure can be a Polymerase III (Pol III) promoter. Pol III transcribes DNA to synthesize small ribosomal RNAs such as the 5S rRNA, tRNAs, and other small RNAs. Representative Pol III promoters use internal control sequences (sequences within the transcribed section of the gene) to support transcription, although upstream elements such as the TATA box are also sometimes used. All Pol III promoters are envisaged as within the scope of the instant disclosure.

[0072] The term “enhancer” refers to regulatory DNA sequences that, when bound by specific proteins called transcription factors, regulate the expression of an associated gene. Enhancers may be located in the intron of the gene, or 5′ or 3′ of the coding sequence of the gene. Enhancers may be proximal to the gene (i.e., within a few tens or hundreds of base pairs (bp) of the promoter), or may be located distal to the gene (i.e., thousands of bp, hundreds of thousands of bp, or even millions of bp away from the promoter). A single gene may be regulated by more than one enhancer, all of which are envisaged as within the scope of the instant disclosure.

[0073] As used herein, a “post-transcriptional regulatory element (PTRE, or TRE),” such as a hepatitis PTRE, refers to a DNA sequence that, when transcribed creates a tertiary structure capable of exhibiting post-transcriptional activity to enhance or promote expression of an associated gene operably linked thereto.

[0074] “Recombinant,” as used herein, means that a particular nucleic acid (DNA or RNA) is the product of various combinations of cloning, restriction, and/or ligation steps resulting in a construct having a structural coding or non-coding sequence distinguishable from endogenous nucleic acids found in natural systems. Generally, DNA sequences encoding the structural coding sequence can be assembled from cDNA fragments and short oligonucleotide linkers, or from a series of synthetic oligonucleotides, to provide a synthetic nucleic acid which is capable of being expressed from a recombinant transcriptional unit contained in a cell or in a cell-free transcription and translation system. Such sequences can be provided in the form of an open reading frame uninterrupted by internal non-translated sequences, or introns, which are typically present in eukaryotic genes. Genomic DNA comprising the relevant sequences can also be used in the formation of a recombinant gene or transcriptional unit. Sequences of non-translated DNA may be present 5′ or 3′ from the open reading frame, where such sequences do not interfere with manipulation or expression of the coding regions, and may indeed act to modulate production of a desired product by various mechanisms (see “enhancers” and “promoters”, above).

[0075] The term “recombinant polynucleotide” or “recombinant nucleic acid” refers to one which is not naturally occurring, e.g., is made by the artificial combination of two otherwise separated segments of sequence through human intervention. This artificial combination is often accomplished by either chemical synthesis means, or by the artificial manipulation of isolated segments of nucleic acids, e.g., by genetic engineering techniques. Such is usually done to replace a codon with a redundant codon encoding the same or a conservative amino acid, while typically introducing or removing a sequence recognition site. Alternatively, it is performed to join together nucleic acid segments of desired functions to generate a desired combination of functions. This artificial combination is often accomplished by either chemical synthesis means, or by the artificial manipulation of isolated segments of nucleic acids, e.g., by genetic engineering techniques.

[0076] Similarly, the term “recombinant polypeptide” or “recombinant protein” refers to a polypeptide or protein which is not naturally occurring, e.g., is made by the artificial combination of two otherwise separated segments of amino sequence through human intervention. Thus, e.g., a protein that comprises a heterologous amino acid sequence is recombinant.

[0077] As used herein, the term “contacting” means establishing a physical connection between two or more entities. For example, contacting a target nucleic acid with a guide nucleic acid means that the target nucleic acid and the guide nucleic acid are made to share a physical connection; e.g., can hybridize if the sequences share sequence similarity.

[0078] “Dissociation constant”, or “K_{d}”, are used interchangeably and mean the affinity between a ligand “L” and a protein “P”; i.e., how tightly a ligand binds to a particular protein. It can be calculated using the formula K_{d}=[L][P]/[LP], where [P], [L] and [LP] represent molar concentrations of the protein, ligand and complex, respectively.

[0079] The disclosure provides systems and methods useful for editing a target nucleic acid sequence. As used herein “editing” is used interchangeably with “modifying” and “modification” and includes but is not limited to cleaving, nicking, deleting, knocking in, knocking out, and the like.

[0080] By “cleavage” it is meant the breakage of the covalent backbone of a target nucleic acid molecule (e.g., RNA, DNA). Cleavage can be initiated by a variety of methods including, but not limited to, enzymatic or chemical hydrolysis of a phosphodiester bond. Both single-stranded cleavage and double-stranded cleavage are possible, and double-stranded cleavage can occur as a result of two distinct single-stranded cleavage events.

[0081] The term “knock-out” refers to the elimination of a gene or the expression of a gene. For example, a gene can be knocked out by either a deletion or an addition of a nucleotide sequence that leads to a disruption of the reading frame. As another example, a gene may be knocked out by replacing a part of the gene with an irrelevant sequence. The term “knock-down” as used herein refers to reduction in the expression of a gene or its gene product(s). As a result of a gene knock-down, the protein activity or function may be attenuated or the protein levels may be reduced or eliminated.

[0082] As used herein, “homology-directed repair” (HDR) refers to the form of DNA repair that takes place during repair of double-strand breaks in cells. This process requires nucleotide sequence homology, and uses a donor template to repair or knock-out a target DNA, and leads to the transfer of genetic information from the donor to the target. Homology-directed repair can result in an alteration of the sequence of the target sequence by insertion, deletion, or mutation if the donor template differs from the target DNA sequence and part or all of the sequence of the donor template is incorporated into the target DNA.

[0083] As used herein, “non-homologous end joining” (NHEJ) refers to the repair of double-strand breaks in DNA by direct ligation of the break ends to one another without the need for a homologous template (in contrast to homology-directed repair, which requires a homologous sequence to guide repair). NHEJ often results in the loss (deletion) of nucleotide sequence near the site of the double-strand break.

[0084] As used herein “micro-homology mediated end joining” (MMEJ) refers to a mutagenic DSB repair mechanism, which always associates with deletions flanking the break sites without the need for a homologous template (in contrast to homology-directed repair, which requires a homologous sequence to guide repair). MMEJ often results in the loss (deletion) of nucleotide sequence near the site of the double-strand break.

[0085] A polynucleotide or polypeptide has a certain percent “sequence similarity” or “sequence identity” to another polynucleotide or polypeptide, meaning that, when aligned, that percentage of bases or amino acids are the same, and in the same relative position, when comparing the two sequences. Sequence similarity (sometimes referred to as percent similarity, percent identity, or homology) can be determined in a number of different manners. To determine sequence similarity, sequences can be aligned using the methods and computer programs that are known in the art, including BLAST, available over the world wide web at ncbi.nlm.nih.gov/BLAST. Percent complementarity between particular stretches of nucleic acid sequences within nucleic acids can be determined using any convenient method. Example methods include BLAST programs (basic local alignment search tools) and PowerBLAST programs (Altschul et al., J. Mol. Biol., 1990, 215, 403-410; Zhang and Madden, Genome Res., 1997, 7, 649-656) or by using the Gap program (Wisconsin Sequence Analysis Package, Version 8 for Unix, Genetics Computer Group, University Research Park, Madison Wis.), e.g., using default settings, which uses the algorithm of Smith and Waterman (Adv. Appl. Math., 1981, 2, 482-489).

[0086] The terms “polypeptide,” and “protein” are used interchangeably herein, and refer to a polymeric form of amino acids of any length, which can include coded and non-coded amino acids, chemically or biochemically modified or derivatized amino acids, and polypeptides having modified peptide backbones. The term includes fusion proteins, including, but not limited to, fusion proteins with a heterologous amino acid sequence.

[0087] A “vector” or “expression vector” is a replicon, such as plasmid, phage, virus, or cosmid, to which another DNA segment, i.e., an expression cassette, may be attached so as to bring about the replication or expression of the attached segment in a cell.

[0088] The term “naturally-occurring” or “unmodified” or “wild type” as used herein as applied to a nucleic acid, a polypeptide, a cell, or an organism, refers to a nucleic acid, polypeptide, cell, or organism that is found in nature.

[0089] As used herein, a “mutation” refers to an insertion, deletion, substitution, duplication, or inversion of one or more amino acids or nucleotides as compared to a wild-type or reference amino acid sequence or to a wild-type or reference nucleotide sequence.

[0090] As used herein the term “isolated” is meant to describe a polynucleotide, a polypeptide, or a cell that is in an environment different from that in which the polynucleotide, the polypeptide, or the cell naturally occurs. An isolated genetically modified host cell may be present in a mixed population of genetically modified host cells.

[0091] A “host cell,” as used herein, denotes a eukaryotic cell, a prokaryotic cell, or a cell from a multicellular organism (e.g., a cell line) cultured as a unicellular entity, which eukaryotic or prokaryotic cells are used as recipients for a nucleic acid (e.g., an AAV vector), and include the progeny of the original cell which has been genetically modified by the nucleic acid. It is understood that the progeny of a single cell may not necessarily be completely identical in morphology or in genomic or total DNA complement as the original parent, due to natural, accidental, or deliberate mutation. A “recombinant host cell” (also referred to as a “genetically modified host cell”) is a host cell into which has been introduced a heterologous nucleic acid, e.g., an AAV vector.

[0092] The term “tropism” as used herein refers to preferential entry of the CasX delivery particle (referred to herein as XDP) into certain cell or tissue type(s) and/or preferential interaction with the cell surface that facilitates entry into certain cell or tissue types, optionally and preferably followed by expression (e.g., transcription and, optionally, translation) of sequences carried by the XDP into the cell.

[0093] The terms “pseudotype” or “pseudotyping” as used herein, refers to viral envelope proteins that have been substituted with those of another virus possessing preferable characteristics. For example, HIV can be pseudotyped with vesicular stomatitis virus G-protein (VSV-G) envelope proteins (amongst others, described herein, below), which allows HIV to infect a wider range of cells because HIV envelope proteins target the virus mainly to CD4+ presenting cells.

[0094] The term “tropism factor” as used herein refers to components integrated into the surface of an XDP that provides tropism for a certain cell or tissue type. Non-limiting examples of tropism factors include glycoproteins, antibody fragments (e.g., scFv, nanobodies, linear antibodies, etc.), receptors and ligands to target cell markers.

[0095] A “target cell marker” refers to a molecule expressed by a target cell including but not limited to cell-surface receptors, cytokine receptors, antigens, tumor-associated antigens, glycoproteins, oligonucleotides, enzymatic substrates, antigenic determinants, or binding sites that may be present in the on the surface of a target tissue or cell that may serve as ligands for an antibody fragment or glycoprotein tropism factor.

[0096] The term “conservative amino acid substitution” refers to the interchangeability in proteins of amino acid residues having similar side chains. For example, a group of amino acids having aliphatic side chains consists of glycine, alanine, valine, leucine, and isoleucine; a group of amino acids having aliphatic-hydroxyl side chains consists of serine and threonine; a group of amino acids having amide-containing side chains consists of asparagine and glutamine; a group of amino acids having aromatic side chains consists of phenylalanine, tyrosine, and tryptophan; a group of amino acids having basic side chains consists of lysine, arginine, and histidine; and a group of amino acids having sulfur-containing side chains consists of cysteine and methionine. Exemplary conservative amino acid substitution groups are: valine-leucine-isoleucine, phenylalanine-tyrosine, lysine-arginine, alanine-valine, and asparagine-glutamine.

[0097] The term “antibody,” as used herein, encompasses various antibody structures, including but not limited to monoclonal antibodies, polyclonal antibodies, multispecific antibodies (e.g., bispecific antibodies), nanobodies, single domain antibodies such as VHH antibodies, and antibody fragments so long as they exhibit the desired antigen-binding activity or immunological activity. Antibodies represent a large family of molecules that include several types of molecules, such as IgD, IgG, IgA, IgM and IgE.

[0098] An “antibody fragment” refers to a molecule other than an intact antibody that comprises a portion of an intact antibody and that binds the antigen to which the intact antibody binds. Examples of antibody fragments include but are not limited to Fv, Fab, Fab′, Fab′-SH, F(ab′)2, diabodies, single chain diabodies, linear antibodies, a single domain antibody, a single domain camelid antibody, single-chain variable fragment (scFv) antibody molecules, and multispecific antibodies formed from antibody fragments.

[0099] As used herein, “treatment” or “treating,” are used interchangeably herein and refer to an approach for obtaining beneficial or desired results, including but not limited to a therapeutic benefit and/or a prophylactic benefit. By therapeutic benefit is meant eradication or amelioration of the underlying disorder or disease being treated. A therapeutic benefit can also be achieved with the eradication or amelioration of one or more of the symptoms or an improvement in one or more clinical parameters associated with the underlying disease such that an improvement is observed in the subject, notwithstanding that the subject may still be afflicted with the underlying disorder.

[0100] The terms “therapeutically effective amount” and “therapeutically effective dose”, as used herein, refer to an amount of a drug or a biologic, alone or as a part of a composition, that is capable of having any detectable, beneficial effect on any symptom, aspect, measured parameter or characteristics of a disease state or condition when administered in one or repeated doses to a subject such as a human or an experimental animal. Such effect need not be absolute to be beneficial.

[0101] As used herein, “administering” means a method of giving a dosage of a compound (e.g., a composition of the disclosure) or a composition (e.g., a pharmaceutical composition) to a subject.

[0102] A “subject” is a mammal. Mammals include, but are not limited to, domesticated animals, non-human primates, humans, dogs, rabbits, mice, rats and other rodents.

[0103] As used herein, “treatment” or “treating,” are used interchangeably herein and refer to an approach for obtaining beneficial or desired results, including but not limited to a therapeutic benefit and/or a prophylactic benefit. By therapeutic benefit is meant eradication or amelioration of the underlying disorder or disease being treated. A therapeutic benefit can also be achieved with the eradication or amelioration of one or more of the symptoms or an improvement in one or more clinical parameters associated with the underlying disease such that an improvement is observed in the subject, notwithstanding that the subject may still be afflicted with the underlying disorder.

[0104] The terms “therapeutically effective amount” and “therapeutically effective dose”, as used herein, refer to an amount of a drug or a biologic, alone or as a part of a composition, that is capable of having any detectable, beneficial effect on any symptom, aspect, measured parameter or characteristics of a disease state or condition when administered in one or repeated doses to a subject such as a human or an experimental animal. Such effect need not be absolute to be beneficial.

[0105] As used herein, “administering” is meant a method of giving a dosage of a compound (e.g., a composition of the disclosure) or a composition (e.g., a pharmaceutical composition) to a subject.

[0106] A “subject” is a mammal. Mammals include, but are not limited to, domesticated animals, non-human primates, humans, rabbits, mice, rats and other rodents.

[0107] All publications, patents, and patent applications mentioned in this specification are herein incorporated by reference to the same extent as if each individual publication, patent, or patent application was specifically and individually indicated to be incorporated by reference.

### I. General Methods

[0108] The practice of the present invention employs, unless otherwise indicated, conventional techniques of immunology, biochemistry, chemistry, molecular biology, microbiology, cell biology, genomics and recombinant DNA, which can be found in such standard textbooks as Molecular Cloning: A Laboratory Manual, 3rd Ed. (Sambrook et al., Harbor Laboratory Press 2001); Short Protocols in Molecular Biology, 4th Ed. (Ausubel et al. eds., John Wiley & Sons 1999); Protein Methods (Bollag et al., John Wiley & Sons 1996); Nonviral Vectors for Gene Therapy (Wagner et al. eds., Academic Press 1999); Viral Vectors (Kaplift & Loewy eds., Academic Press 1995); Immunology Methods Manual (I. Lefkovits ed., Academic Press 1997); and Cell and Tissue Culture: Laboratory Procedures in Biotechnology (Doyle & Griffiths, John Wiley & Sons 1998), the disclosures of which are incorporated herein by reference.

[0109] Where a range of values is provided, it is understood that endpoints are included and that each intervening value, to the tenth of the unit of the lower limit unless the context clearly dictates otherwise, between the upper and lower limit of that range and any other stated or intervening value in that stated range, is encompassed. The upper and lower limits of these smaller ranges may independently be included in the smaller ranges, and are also encompassed, subject to any specifically excluded limit in the stated range. Where the stated range includes one or both of the limits, ranges excluding either or both of those included limits are also included.

[0110] Unless defined otherwise, all technical and scientific terms used herein have the same meaning as commonly understood by one of ordinary skill in the art to which this invention belongs. All publications mentioned herein are incorporated herein by reference to disclose and describe the methods and/or materials in connection with which the publications are cited.

[0111] It must be noted that as used herein and in the appended claims, the singular forms “a,” “an,” and “the” include plural referents unless the context clearly dictates otherwise.

[0112] It will be appreciated that certain features of the disclosure, which are, for clarity, described in the context of separate embodiments, may also be provided in combination in a single embodiment. In other cases, various features of the disclosure, which are, for brevity, described in the context of a single embodiment, may also be provided separately or in any suitable sub-combination. It is intended that all combinations of the embodiments pertaining to the disclosure are specifically embraced by the present disclosure and are disclosed herein just as if each and every combination was individually and explicitly disclosed. In addition, all sub-combinations of the various embodiments and elements thereof are also specifically embraced by the present disclosure and are disclosed herein just as if each and every such sub-combination was individually and explicitly disclosed herein.

### II. Systems for Genetic Editing and Gene-Editing Pairs

[0113] In a first aspect, the present disclosure provides systems comprising engineered CasX nuclease proteins and engineered guide ribonucleic acid scaffolds (ERS) for use in modifying or editing a target nucleic acid of a gene, inclusive of coding and non-coding regions (a eCasX:ERS system). Generally, any portion of a gene can be targeted using the programable systems and methods provided herein.

[0114] As used herein, a “system”, used interchangeably with “composition”, can comprise an engineered CasX nuclease protein and one or more ERS (with linked targeting sequences) of the disclosure as gene editing pairs, nucleic acids encoding the engineered CasX nuclease proteins and ERS, as well as vectors or particle delivery formulations comprising the nucleic acids or engineered CasX proteins and ERS of the disclosure.

[0115] In some embodiments, the disclosure provides systems specifically designed to modify the target nucleic acid of a gene in eukaryotic cells; either in vitro, ex vivo, or in vivo in a subject. The engineered CasX of the disclosure are Class 2, Type V CRISPR nucleases. Although members of Class 2 Type V CRISPR-Cas nucleases have differences, they share some common characteristics that distinguish them from the Cas9 systems. Firstly, the Type V nucleases possess an RNA-guided single effector containing a RuvC domain but no HNH domain, and they recognize a TC motif PAM 5′ upstream to the target region on the non-targeted strand, which is different from Cas9 systems which rely on G-rich PAM at 3′ side of target sequences. Type V nucleases generate staggered double-stranded breaks distal to the PAM sequence, unlike Cas9, which generates a blunt end in the proximal site close to the PAM. In addition, Type V nucleases degrade ssDNA in trans when activated by target dsDNA or ssDNA binding in cis. In some embodiments, the disclosure provides engineered CasX proteins designed with multiple mutations relative to a CasX from which it was derived, wherein the engineered CasX has improved properties, while retaining the ability to complex with a guide ribonucleic acid and retaining nuclease activity.

[0116] Provided herein are systems comprising an engineered CasX protein and an engineered guide ribonucleic acid scaffold (ERS) that, together with a targeting sequence linked to the 3′ end of the scaffold are referred to herein as a gene editing pair. An ERS and an engineered CasX protein can bind together via non-covalent interactions to form a gene editing pair complex, referred to herein as a ribonucleoprotein (RNP) complex (it being understood that, in all cases for use in editing a target nucleic acid, the ERS would have a linked targeting sequence). In some embodiments, the use of a pre-complexed RNP of an engineered CasX and ERS confers advantages in the delivery of the system components to a cell or target nucleic acid for editing of the target nucleic acid. In the RNP, the ERS can provide target specificity to the RNP complex by including a targeting sequence (or “spacer”) having a nucleotide sequence that is complementary to and capable of binding to a sequence of a target nucleic acid. In the RNP, the engineered CasX protein of the pre-complexed RNP provides the site-specific activity and is guided to a target site (and further stabilized at a target site) within a target nucleic acid sequence to be modified by virtue of its association with the ERS. The engineered CasX protein of the RNP complex provides the site-specific activities of the complex such as binding, cleavage, or nicking of the target nucleic acid sequence by the engineered CasX protein. Provided herein are systems and cells comprising the engineered CasX proteins, ERS, and gene editing pairs of any combination of the engineered CasX and ERS embodiments described herein, as well as delivery modalities comprising or encoding the engineered CasX and ERS. Each of these components and their use in the editing of the target nucleic acid of a gene is described herein, below.

[0117] In some embodiments, the disclosure provides systems of gene editing pairs comprising an engineered CasX protein selected from any one of the engineered CasX proteins selected from the group consisting of SEQ ID NOS: 247-294, 24916-49628, 49746-49747, and 49871-49873, or a sequence having at least about 85%, at least about 90%, or at least about 95%, or at least about 95%, or at least about 96%, or at least about 97%, or at least about 98%, or at least about 99% sequence identity thereto and an ERS selected from the group consisting of SEQ ID NOS: 156, 739-907, 11568-22227, 23572-24915, and 49719-49735, or sequence variants having at least 60%, or at least 70%, at least about 80%, or at least about 90%, or at least about 95%, or at least about 96%, or at least about 97%, or at least about 98%, or at least about 99% sequence identity thereto, wherein the ERS comprises a targeting sequence complementary to the target nucleic acid. In some embodiments, the guide ribonucleic acid is an ERS selected from the group consisting of SEQ ID NOS: 156, 739-907, 11568-22227, 23572-24915, and 49719-49735, wherein the ERS comprises a targeting sequence complementary to the target nucleic acid, or a sequence with at least at least 1, 2, 3, 4, or 5 mismatches thereto.

[0118] In some embodiments, the disclosure provides systems of gene editing pairs comprising an engineered CasX protein selected from the group consisting of SEQ ID NOS: 24916-49628, 49746-49747, and 49871-49873, or a sequence having at least about 85%, at least about 90%, or at least about 95%, or at least about 95%, or at least about 96%, or at least about 97%, or at least about 98%, or at least about 99% sequence identity thereto wherein the engineered CasX comprises a sequence having one or more mutations relative to the sequence of SEQ ID NO: 228, wherein the mutations result in an improved characteristic compared to unmodified SEQ ID NO: 228. In some embodiments, the disclosure provides systems of gene editing pairs comprising an engineered CasX protein selected from the group consisting of SEQ ID NOS: 49746-49747, and 49871-49873, or a sequence having at least about 85%, at least about 90%, or at least about 95%, or at least about 95%, or at least about 96%, or at least about 97%, or at least about 98%, or at least about 99% sequence identity thereto wherein the engineered CasX comprises a sequence having one or more mutations relative to the sequence of SEQ ID NO: 228, wherein the mutations result in an improved characteristic compared to unmodified SEQ ID NO: 228, wherein the improved characteristic is one or more of improved editing activity of the target nucleic acid, improved editing specificity for the target nucleic acid, improved editing specificity ratio for the target nucleic acid, decreased off-target editing, increased percentage of a eukaryotic genome that can be efficiently edited, improved ability to form cleavage-competent RNP with an ERS, and improved stability of an RNP complex. In some embodiments, the ERS of the gene editing pair is selected from the group consisting of SEQ ID NOS: 156, 739-907, 11568-22227, 23572-24915, and 49719-49735, or sequence variants having at least 60%, or at least 70%, at least about 80%, or at least about 90%, or at least about 95%, or at least about 96%, or at least about 97%, or at least about 98%, or at least about 99% sequence identity thereto, and wherein the ERS comprises a targeting sequence complementary to the target nucleic acid. In some embodiments, the guide ribonucleic acid is an ERS selected from the group consisting of SEQ ID NOS: 156, 739-907, 11568-22227, 23572-24915, and 49719-49735, wherein the ERS comprises a targeting sequence complementary to the target nucleic acid, or a sequence with at least at least 1, 2, 3, 4, or 5 mismatches thereto. In some embodiments, the disclosure provides systems of gene editing pairs comprising an engineered CasX protein comprising a pair of mutations as depicted in Table 22, or further variations thereof. In some embodiments, the disclosure provides systems of gene editing pairs comprising an engineered CasX protein comprising a pair of mutations as depicted in Table 22, or sequence variants having at least 60%, or at least 70%, at least about 80%, or at least about 90%, or at least about 95%, or at least about 96%, or at least about 97%, or at least about 98%, or at least about 99% sequence identity thereto and an ERS comprising one or more mutations of Table 44, Table 45 and Table 47 or an ERS selected from the group consisting of SEQ ID NOS: 156, 739-907, 11568-22227, 23572-24915, and 49719-49735, or sequence variants having at least 60%, or at least 70%, at least about 80%, or at least about 90%, or at least about 95%, or at least about 96%, or at least about 97%, or at least about 98%, or at least about 99% sequence identity thereto. In some embodiments of the system, the RNP of the gene editing pair is capable of binding and cleaving the double strand of a target nucleic acid, including a coding sequence, a complement of a coding sequence, a non-coding sequence, and to regulatory elements. In some embodiments of the system, the RNP of the gene editing pair is capable of binding a target nucleic acid and generating one or more single-stranded nicks in the target nucleic acid.

[0119] In other embodiments, the disclosure provides systems of a gene editing pair comprising the engineered CasX protein, a first ERS with a targeting sequence as described herein, and a second ERS, wherein the second ERS has a targeting sequence complementary to a different or overlapping portion of the target nucleic acid compared to the targeting sequence of the first ERS, introducing multiple breaks in the target nucleic acid that result in permanent indels or mutations in the target nucleic acid, or an excision of the intervening sequence between the breaks.

[0120] In some embodiments, the gene editing pair of an engineered CasX and an ERS has one or more improved characteristics compared to a gene editing pair comprising a CasX variant from which the engineered CasX was derived (e.g., CasX 515, SEQ ID NO: 228) and the gRNA variant from which the ERS was derived (e.g., gRNA scaffolds 174, 175, 221 or 235. In the foregoing embodiment, the one or more improved characteristics can be assayed in an in vitro assay under comparable conditions for the gene editing pair and the CasX variant and gRNA variant from which it was derived, or in vivo in a subject. Exemplary improved characteristics, as described herein, may, in some embodiments, include increased RNP complex stability, increased binding affinity between the engineered CasX and ERS, improved kinetics of RNP complex formation, higher percentage of cleavage-competent RNP, increased editing activity for the target nucleic acid, increased editing specificity, decreased off-target editing, and enhanced utilization of non-canonical PAM sequences.

[0121] In some embodiments, the disclosure provides compositions of gene editing pairs of any of the embodiments disclosed herein for use in the manufacture of a medicament for the treatment of a subject having a disease.

[0122] In other embodiments, the disclosure provides vectors encoding or comprising the engineered CasX and/or ERS for the production and/or delivery of the systems. Also provided herein are methods of making engineered CasX proteins and ERS, as well as methods of using the engineered CasX and ERS, including methods of gene editing and methods of treatment. The engineered CasX proteins and ERS components of the systems and their features, as well as delivery modalities and the methods of using the systems are described more fully, below.

### III. Engineered Ribonucleic Acid Scaffolds (ERS) and Targeting Sequences of the Systems for Genetic Editing

[0123] In another aspect, the disclosure relates to engineered guide ribonucleic acid scaffolds (ERS) that, when linked with targeting sequences complementary to (and are therefore able to hybridize with) a target nucleic acid sequence of a gene, have utility, when complexed with an engineered CasX nuclease protein, in genome editing of a target nucleic acid in vitro, ex vivo, or in vivo in a subject. The ERS of the disclosure are guide ribonucleic acid scaffolds that are modified relative to reference gRNA and gRNA variants by approaches described herein.

[0124] Collectively, the CasX guide ribonucleic acids of the disclosure, including all ERS of the embodiments, reference gRNA and gRNA variants, comprise distinct structured regions, or domains; the RNA triplex, the scaffold stem loop, the extended stem loop, the pseudoknot, and the targeting sequence that, in the embodiments of the disclosure is specific for a target nucleic acid and is located on the 3′end of the guide scaffold. The 5′ end, RNA triplex, the scaffold stem loop, the pseudoknot and the extended stem loop, together with the unstructured triplex loop that bridges portions of the triplex, together, are referred to as the “scaffold” of the guide RNA and ERS. In some cases, the scaffold stem further comprises a bubble. In other cases, the scaffold further comprises a triplex loop region. In still other cases, the scaffold further comprises a 5′ unstructured region. In some embodiments, the ERS of the disclosure for use in the systems comprise a scaffold stem loop having the sequence of CCAGCGACUAUGUCGUAGUGG (SEQ ID NO: 49737).

[0125] The properties and characteristics of CasX guide ribonucleic acids and their domains are described in WO2020247882A1, US20220220508A1, and WO2022120095A1, incorporated by reference herein. Each of the structured domains contribute to establishing the global RNA fold of the guide and retain functionality of the guide; particularly the ability to properly complex with the CasX nuclease. For example, the guide scaffold stem interacts with the helical I domain of CasX nuclease, while residues within the triplex, triplex loop, and pseudoknot stem interact with the OBD of the CasX nuclease. Together, these interactions confer the ability of the guide to bind and form an RNP with the CasX that retains stability, while the spacer (or targeting sequence) directs and defines the specificity of the RNP for binding a specific sequence of DNA. The individual domains are described more fully, below.

[0126] In the embodiments, the ERS are single guide constructs, rather than the double stranded duplex of wild-type guides, wherein the “activator” and the “targeter” are covalently linked together by intervening nucleotides.

[0127] The targeting sequence linked to the 3′ end of an ERS includes a nucleotide sequence (referred to interchangeably as a guide sequence, a spacer, a targeter, or a targeting sequence) that is complementary to (and therefore hybridizes with) a specific sequence (a target site) within the target nucleic acid sequence (e.g., a strand of a double stranded target DNA, a target ssRNA, a target ssDNA, etc.), described more fully below. The targeting sequence linked to an ERS is capable of binding to a target nucleic acid sequence, including, in the context of the present disclosure, a coding sequence, a complement of a coding sequence, a non-coding sequence, and to accessory elements. The protein-binding segment (or “activator” or “protein-binding sequence”) interacts with (e.g., binds to) a CasX protein as a complex, forming an RNP (described more fully, below).

[0128] Site-specific binding and/or cleavage of a target nucleic acid sequence (e.g., genomic DNA) by the engineered CasX protein can occur at one or more locations (e.g., a sequence of a target nucleic acid) determined by base-pairing complementarity between the targeting sequence of the ERS and the target nucleic acid sequence. Thus, for example, the ERS of the disclosure with a linked targeting sequence have sequences complementarity to and therefore can hybridize with the target nucleic acid that is adjacent to a sequence complementary to a TC PAM motif or a PAM sequence, such as ATC, CTC, GTC, or TTC. Because the targeting sequence of a guide sequence hybridizes with a sequence of a target nucleic acid sequence, a targeter can be modified by a user to hybridize with a specific target nucleic acid sequence, so long as the location of the PAM sequence is considered. By selection of the targeting sequences of the ERS, defined regions of the target nucleic acid sequence or sequences bracketing a particular location within the target nucleic acid can be modified or edited using the systems described herein. In some embodiments, the targeting sequence of the ERS has between 15 and 20 consecutive nucleotides. In some embodiments, the targeting sequence has 15, 16, 17, 18, 19, or 20 consecutive nucleotides. In some embodiments, the targeting sequence consists of 20 consecutive nucleotides. In some embodiments, the targeting sequence consists of 19 consecutive nucleotides. In some embodiments, the targeting sequence consists of 18 consecutive nucleotides. In some embodiments, the targeting sequence consists of 17 consecutive nucleotides. In some embodiments, the targeting sequence consists of 16 consecutive nucleotides. In some embodiments, the targeting sequence consists of 15 consecutive nucleotides. In some cases, an ERS targeting sequence linked to an ERS scaffold of the disclosure is complementary to and hybridizes with a gene exon. In some embodiments, an ERS targeting sequence is complementary to and hybridizes with a sequence of a splice-acceptor site of an exon. In other embodiments, an ERS targeting sequence hybridizes with an intron. In other embodiments, an ERS targeting sequence hybridizes with an intron-exon junction. In other embodiments, an ERS targeting sequence hybridizes with an intergenic region of the gene. In other embodiments, an ERS targeting sequence hybridizes with a regulatory region. In some cases, the regulatory region is a promoter or enhancer. In some cases, the regulatory region is located 5′ of the transcription start site or 3′ of the transcription start. In some cases, the regulatory region is in an intron of the gene. In other cases, the regulatory region comprises the 5′ UTR of the gene. In still other cases, the regulatory region comprises the 3′UTR of the gene.

[0129] By selection of the targeting sequences of the gRNA, defined regions of the target nucleic acid sequence can be modified or edited using the CasX:gRNA systems described herein. In some embodiments, the gRNA and linked targeting sequence exhibit a low degree of off-target effects to the DNA of a cell. As used herein, “off-target effects” refers to effects of unintended cleavage, such as mutations and indel formation, at untargeted genomic sites showing a similar but not an identical sequence compared to the target site (i.e., the targeting sequence of the gRNA). In some embodiments, the off-target effects exhibited by the gRNA and linked targeting sequence are less than about 5%, less than about 4%, less than 3%, less than about 2%, less than about 1%, less than about 0.5%, less than 0.1% in cells. In some embodiments, the off-target effects are determined in silico. In some embodiments, the off-target effects are determined in an in vitro cell-free assay. In some embodiments, the off-target effects are determined in a cell-based assay.

[0130] In some embodiments, the systems of the disclosure comprises a first ERS and further comprises a second (and optionally a third, fourth, fifth, or more) ERS, wherein the second ERS or additional ERS has a targeting sequence complementary to a different or overlapping portion of the target nucleic acid sequence compared to the targeting sequence of the first ERS such that multiple points in the target nucleic acid are targeted, and, for example, multiple breaks are introduced in the target nucleic acid by the engineered CasX, which is then edited by non-homologous end joining (NHEJ), homology-directed repair (HDR), homology-independent targeted integration (HITI), micro-homology mediated end joining (MMEJ), single strand annealing (SSA) or base excision repair (BER). It will be understood that in such cases, the second or additional ERS is complexed with an additional copy of the engineered CasX protein. By selection of the targeting sequences linked to the ERS, defined regions of the target nucleic acid sequence bracketing a particular location within the target nucleic acid can be modified or edited using the systems described herein, including facilitating the insertion of a donor template or excision of a region or exon comprising a mutation of the targeted gene by a double-cut mechanism with paired engineered CasX and ERS having different targeting sequences such that the intervening nucleotides are excised.

a. Reference gRNA

[0131] As used herein, a “reference gRNA” refers to a CRISPR guide ribonucleic acid comprising a wild-type sequence of a naturally-occurring gRNA. In some embodiments, a CasX reference gRNA comprises a sequence isolated or derived from Deltaproteobacter. In some embodiments, a CasX reference guide RNA comprises a sequence isolated or derived from Planctomycetes. In still other embodiments, a CasX reference gRNA comprises a sequence isolated or derived from Candidatus Sungbacteria.

[0132] Table 1 provides the sequences of reference gRNAs tracr and scaffold sequences. In some embodiments, the disclosure provides ERS sequences wherein the gRNA has a scaffold comprising a sequence having one or more nucleotide modifications relative to a reference gRNA sequence having a sequence of any one of SEQ ID NOS: 4-16 of Table 1.

TABLE 1
Reference gRNA tracr and scaffold sequences

| SEQ ID NO | Nucleotide Sequence |
|---|---|
| 4 | ACAUCUGGCGCGUUUAUUCCAUUACUUUGGAGCCAGUCCCAGCGACUAUGUCGUAUGGACGAAG |
| | CGCUUAUUUAUCGGAGAGAAACCGAUAAGUAAAACGCAUCAAAG |
| 5 | UACUGGCGCUUUUAUCUCAUUACUUUGAGAGCCAUCACCAGCGACUAUGUCGUAUGGGUAAAGC |
| | GCUUAUUUAUCGGAGAGAAAUCCGAUAAAUAAGAAGCAUCAAAG |
| 6 | ACAUCUGGCGCGUUUAUUCCAUUACUUUGGAGCCAGUCCCAGCGACUAUGUCGUAUGGACGAAG |
| | CGCUUAUUUAUCGGAGA |
| 7 | ACAUCUGGCGCGUUUAUUCCAUUACUUUGGAGCCAGUCCCAGCGACUAUGUCGUAUGGACGAAG |
| | CGCUUAUUUAUCGG |
| 8 | UACUGGCGCUUUUAUCUCAUUACUUUGAGAGCCAUCACCAGCGACUAUGUCGUAUGGGUAAAGC |
| | GCUUAUUUAUCGGAGA |
| 9 | UACUGGCGCUUUUAUCUCAUUACUUUGAGAGCCAUCACCAGCGACUAUGUCGUAUGGGUAAAGC |
| | GCUUAUUUAUCGG |
| 10 | GUUUACACACUCCCUCUCAUAGGGU |
| 11 | GUUUACACACUCCCUCUCAUGAGGU |
| 12 | UUUUACAUACCCCCUCUCAUGGGAU |
| 13 | GUUUACACACUCCCUCUCAUGGGGG |
| 14 | CCAGCGACUAUGUCGUAUGG |
| 15 | GCGCUUAUUUAUCGGAGAGAAAUCCGAUAAAUAAGAAGC |
| 16 | GGCGCUUUUAUCUCAUUACUUUGAGAGCCAUCACCAGCGACUAUGUCGUAUGGGUAAAGCGCUU |
| | AUUUAUCGGA |

b. Engineered Ribonucleic Acid Scaffolds (ERS)

[0133] In another aspect, the disclosure relates to ERS for use in the systems of the disclosure that comprise multiple modifications relative to a gRNA variant scaffold of Table 2 from which it was derived. All ERS that have one or more improved functions, characteristics, or add one or more new functions when the ERS is compared to a gRNA variant from which it was derived, while retaining the functional properties of being able to complex with the engineered CasX as an RNP and guide the engineered CasX ribonucleoprotein holo complex to the target nucleic acid are envisaged as within the scope of the disclosure. It will be understood that although the present disclosure is focused on ERS and engineered CasX, an ERS also retain the ability to complex with reference CasX and CasX variants to form an RNP and an engineered CasX retains the ability to complex with reference gRNA and gRNA variants to form an RNP In some embodiments, the ERS has an improved characteristic selected from the group consisting of enhanced folding stability of individual regions within the scaffold, enhanced folding stability of the entire scaffold, enhanced transcriptional efficiency, enhanced binding affinity to the engineered CasX nuclease, increased editing when complexed as an RNP, increased cleavage activity when complexed as an RNP, and increased specificity of the RNP in complex with a target nucleic acid. In some cases of the foregoing, the improved characteristic can be assessed in an in vitro assay, including the assays of the Examples. In other cases of the foregoing, the improved characteristic is assessed in vivo. In some cases, the one or more of the improved characteristics of the ERS is relative to the reference gRNA of SEQ ID NO: 4 or SEQ ID NO: 5, or to gRNA variant 174, 175, 221, or 235 (SEQ ID NOS: 17, 18, 61, and 75, respectively).

[0134] In some embodiments, a new ERS can be created by subjecting a gRNA variant to one or more mutagenesis methods, such as the mutagenesis methods described herein in the Examples (e.g., Example 11, as well as in PCT/US2021/061673 and WO2020247882A1, incorporated by reference herein), which may include Deep Mutational Evolution (DME), deep mutational scanning (DMS), error prone PCR, cassette mutagenesis, random mutagenesis, staggered extension PCR, gene shuffling, substitution of a domain from one gRNA variant to another, or chemical modification in order to generate one or more ERS with enhanced or varied properties relative to the gRNA variant that was modified. The activity of the gRNA variant from which an ERS was derived may be used as a benchmark against which the activity of ERS is compared, thereby measuring improvements in function or other characteristics of the ERS. In other embodiments, a gRNA variant may be subjected to one or more deliberate, specifically-targeted mutations in order to produce an ERS; for example a rationally designed variant such as described herein in the Examples.

[0135] Table 2 provides exemplary gRNA variant scaffold sequences that, in some cases, provided the starting sequence from which the ERS were derived. In a particular embodiment, the gRNA variants 174, 175, 221, and 235 were subjected to mutagenesis to result in the ERS of SEQ ID NOS: 156, 739-907, 11568-22227, 23572-24915, and 49719-49735.

TABLE 2
Exemplary gRNA Variant Scaffold Sequences

| | Scaffold | |
|---|---|---|
| SEQ ID | variant | |
| NO | ID | Nucleotide sequence |
| 17 | 174 | ACUGGCGCUUUUAUCUGAUUACUUUGAGAGCCAUCACCAGCGACUAUGUCGUAGUG |
| | | GGUAAAGCUCCCUCUUCGGAGGGAGCAUCAAAG |
| 18 | 175 | ACUGGCGCCUUUAUCUCAUUACUUUGAGAGCCAUCACCAGCGACUAUGUCGUAUGG |
| | | GUAAAGCGCUUACGGACUUCGGUCCGUAAGAAGCAUCAAAG |
| 61 | 221 | ACUGGCACUUCUAUCUGAUUACUCUGAGAGCCAUCACCAGCGACUAUGUCGUAUGG |
| | | GUAAAGCCGCUUACGGACUUCGGUCCGUAAGAGGCAUCAGAG |
| 75 | 235 | ACUGGCGCUUCUAUCUGAUUACUCUGAGCGCCAUCACCAGCGACUAUGUCGUAGUG |
| | | GGUAAAGCCGCUUACGGACUUCGGUCCGUAAGAGGCAUCAGAG |

[0136] In some embodiments, an ERS of the disclosure comprises multiple modifications to the sequence of a previously generated gRNA variant, the previously generated variant itself serving as the sequence to be modified. In some cases, one or modifications are introduced to one or more regions of the scaffold wherein the regions are selected from the group consisting of 5′ end, pseudoknot stem I, triplex loop (including triplex regions I and II), pseudoknot stem II, scaffold stem loop, extended stem loop, and triplex region III. In some embodiments, one or more modifications are introduced into the 5′ end of the scaffold. In some embodiments, one or more modifications are introduced into the pseudoknot region of the scaffold. In some embodiments, one or more modifications are introduced into triplex loop region of the scaffold. In some embodiments, one or more modifications are introduced into scaffold stem loop region of the scaffold. In some embodiments, one or more modifications are introduced into the extended stem loop region of the scaffold. In other cases, one or modifications are introduced to the scaffold bubble. In still other cases, one or more modifications are introduced into two or more of the foregoing regions. Such modifications can comprise an insertion, deletion, or substitution of one or more consecutive nucleotides; i.e., 1, 2, 1 to 5, 1 to 10, 1 to 20, or 1 to 30 or more consecutive nucleotides in the foregoing regions, or any combination thereof. In turn, the modifications to the foregoing regions can be combined to engineer an ERS with multiple modifications. Exemplary methods to generate and assess the modifications are described in Examples 8-12, and representative modifications and resulting sequences are presented in Tables 29, 30, 37, 38, 40, 43, 44, 45, 46, 47, 50

[0137] In some embodiments, the ERS comprises a sequence having at least about 70% sequence identity to (i) ACUGGCACUUCUAUCUGAUUACUCUGAGAGCCAUCACCAGCGACUAUGUCGUAU GGGUAAAGCCGCUUACGGACUUCGGUCCGUAAGAGGCAUCAGAG (SEQ ID NO: 61); or (ii) ACUGGCGCUUCUAUCUGAUUACUCUGAGCGCCAUCACCAGCGACUAUGUCGUAGU GGGUAAAGCUCCCUCUUCGGAGGGAGCAUCAGAG (SEQ ID NO: 156); comprising one or more modifications in the sequence, wherein the one or more modifications result in an improved characteristic compared to unmodified SEQ ID NO: 61 or SEQ ID NO: 156. In some embodiments, the ERS comprises at least two modifications in the sequences of SEQ ID NO: 61 or SEQ ID NO: 156, wherein the modifications result in an improved characteristic compared to unmodified SEQ ID NO: 61 or SEQ ID NO: 156. In some embodiments, the modification(s) comprise: i) a substitution of 1 to 30 consecutive nucleotides in one or more regions of the scaffold; ii) a deletion of 1 to 10 consecutive nucleotides in one or more regions of the scaffold; iii) an insertion of 1 to 10 consecutive nucleotides in one or more regions of the scaffold; iv) a substitution of the scaffold stem loop from a heterologous RNA source; v) a substitution of the extended stem loop with an RNA stem loop sequence from a heterologous RNA source; or vi) any combination of (i)-(v). In some embodiments, the modifications comprise mutations in one or more regions selected from the group consisting of a 5′ end, a pseudoknot stem, a triplex loop, a scaffold stem loop, an extended stem loop, and a triplex region III. In some embodiments, the modifications comprise mutations in at least two regions of the ERS, wherein the regions are selected from the group consisting of a 5′ end, a pseudoknot stem I, a triplex loop, a pseudoknot stem II, a scaffold stem loop, an extended stem loop, and a triplex region III. In some embodiments, the mutations are selected from the group consisting of the mutations set forth in any one of Tables 44, 45, or 47. In some embodiments, the ERS comprises individual mutated regions selected from the sequences of SEQ ID NOS: 739-753 in the 5′ end region, SEQ ID NOS: 754-772 in the triplex loop region, SEQ ID NOS: 773-791 in the triplex region, SEQ ID NOS: 792-841 in the pseudoknot region, SEQ ID NOS: 842-869 in the scaffold stem region, or SEQ ID NOS: 870-907 in the extended stem region. In some embodiments, the ERS comprises paired combinations of individual mutated sequences from different regions. In some embodiments, the ERS comprises a sequence selected from the group consisting of SEQ ID NOS: 11,568-22,227 and 23,572-24,915, or a sequence having at least about 70%, at least about 80%, at least about 90%, at least about 91%, at least about 92%, at least about 93%, at least about 94%, at least about 95%, at least about 96%, at least about 97%, at least about 98%, or at least about 99% sequence identity thereto.

[0138] In some embodiments, the disclosure provides ERS wherein the scaffold has about 85-100 nucleotides, or any integer in between. In some embodiments, the disclosure provides ERS wherein the scaffold has about 85-95 nucleotides, or about 88-90 nucleotides, or about 89 nucleotides,

[0139] In some embodiments, the disclosure provides an ERS comprising a sequence selected from the group consisting of SEQ ID NOS: 156, 739-907, 739-907, 11568-22227, 23572-24915, and 49719-49735, or a sequence having at least about 70%, at least about 80%, at least about 90%, at least about 91%, at least about 92%, at least about 93%, at least about 94%, at least about 95%, at least about 96%, at least about 97%, at least about 98%, or at least about 99% sequence identity thereto, wherein the ERS comprises an improved characteristic compared to the sequence of SEQ ID NO: 17, when assayed in an in vitro cell-based assay under comparable conditions. In the foregoing, the improved characteristic is one or more functional properties selected from the group consisting of improved binding to a CasX nuclease to form a ribonucleoprotein (RNP), improved folding stability of the ERS, increased half-life in a cell, increased transcriptional efficiency, enhanced ability to synthetically manufacture the ERS, improved editing activity of a target nucleic acid by an RNP comprising the ERS, and improved editing specificity by an RNP comprising the ERS.

[0140] In some embodiments, the ERS comprises an exogenous extended stem loop that has little or no identity to the reference stem loop regions disclosed herein (e.g., SEQ ID NO:15). In some embodiments, the heterologous stem loop increases the stability of the ERS. In some embodiments, the heterologous RNA stem loop is capable of binding a protein, an RNA structure, a DNA sequence, or a small molecule. In some embodiments, an exogenous stem loop region replacing the stem loop comprises an RNA stem loop or hairpin in which the resulting ERS has increased stability and, depending on the choice of loop, confers non-covalent recruitment with certain cellular proteins or RNA. Non-limiting examples of such non-covalent recruitment components include hairpin RNA or loops such as MS2 hairpin, PP7 hairpin, Qβ hairpin, boxB, transactivation response element (TAR), phage GA hairpin, phage ΛN hairpin, iron response element (IRE), and U1 hairpin II that have binding affinity for the NCR MS2 coat protein, PP7 coat protein, Qβ coat protein, protein N, protein Tat, phage GA coat protein, iron-responsive binding element (IRE) protein, and U1A signal recognition particle, respectively, that are incorporated in the protein-encoding nucleic acids used to transfect the packaging host cell. Such exogenous extended stem loops can comprise, for example a thermostable RNA such as MS2 hairpin (ACAUGAGGAUCACCCAUGU (SEQ ID NO: 215)), Qβ hairpin (UGCAUGUCUAAGACAGCA (SEQ ID NO: 216)), U1 hairpin II (AAUCCAUUGCACUCCGGAUU (SEQ ID NO: 217)), Uvsx (CCUCUUCGGAGG (SEQ ID NO: 218)), PP7 hairpin (AGGAGUUUCUAUGGAAACCCU (SEQ ID NO: 219)), Phage replication loop (AGGUGGGACGACCUCUCGGUCGUCCUAUCU (SEQ ID NO: 220)), Kissing loop_a (UGCUCGCUCCGUUCGAGCA (SEQ ID NO: 221)), Kissing loop_b1 (UGCUCGACGCGUCCUCGAGCA (SEQ ID NO: 222)), Kissing loop_b2 (UGCUCGUUUGCGGCUACGAGCA (SEQ ID NO: 223)), G quadriplex M3q (AGGGAGGGAGGGAGAGG (SEQ ID NO: 224)), G quadriplex telomere basket (GGUUAGGGUUAGGGUUAGG (SEQ ID NO: 225)), Sarcin-ricin loop (CUGCUCAGUACGAGAGGAACCGCAG (SEQ ID NO: 226)) or Pseudoknots (UACACUGGGAUCGCUGAAUUAGAGAUCGGCGUCCUUUCAUUCUAUAUACUUUGG AGUUUUAAAAUGUCUCUAAGUACA (SEQ ID NO: 227)). In some embodiments, one of the foregoing hairpin sequences is incorporated into the stem loop to help traffic the incorporation of the ERS (and an associated CasX in an RNP complex) into a budding XDP in a packaging host cell (described more fully, below) when the counterpart ligand is incorporated into the Gag polyprotein of the XDP.

c. Guide 316

[0141] Guide scaffolds can be made by several methods, including recombinantly or by solid-phase RNA synthesis. However, the length of the scaffold can affect the manufacturability when using solid-phase RNA synthesis, with longer lengths resulting in increased manufacturing costs, decreased purity and yield, and higher rates of synthesis failures. For use in lipid nanoparticle (LNP) formulations, solid-phase RNA synthesis of the scaffold is preferred in order to generate the quantities needed for commercial development. While previous experiments had identified gRNA variant 235 (SEQ ID NO: 75) as having enhanced properties relative to gRNA variants 174 (SEQ ID NO: 17), its increased length rendered its use for LNP formulations problematic. Accordingly, alternative sequences were sought. In some embodiments, the disclosure provides an ERS wherein the ERS scaffold and linked targeting sequence has a sequence less than about 115 nucleotides, less than about 110 nucleotides, or less than about 100 nucleotides. In some embodiments, the disclosure provides an ERS wherein the ERS scaffold and linked targeting sequence has a sequence between 100-115 nucleotides, or any integer in between.

[0142] In some embodiments, an ERS was designed wherein the scaffold 174 (SEQ ID NO: 17) sequence, was modified by introducing one, two, three, four or more mutations at positions selected from the group consisting of U11, U24, A29, and A87. In some embodiments, the ERS comprises a sequence of SEQ ID NO: 17, or a sequence having at least about 70% sequence identity thereto, comprising an extended stem loop sequence of SEQ ID NO: 49739 and one or more mutations at positions selected from the group consisting of U11, U24, A29, and A87. In some embodiments, the ERS comprises a sequence of SEQ ID NO: 17, or a sequence having at least about 70% sequence identity thereto, comprising an extended stem loop sequence of SEQ ID NO: 49739 and two mutations at positions selected from the group consisting of U11, U24, A29, and A87. In some embodiments, the ERS comprises a sequence of SEQ ID NO: 17, or a sequence having at least about 70% sequence identity thereto, comprising an extended stem loop sequence of SEQ ID NO: 49739 and three mutations at positions selected from the group consisting of U11, U24, A29, and A87. In some embodiments, the ERS comprises a sequence of SEQ ID NO: 17, or a sequence having at least about 70% sequence identity thereto, comprising an extended stem loop sequence of SEQ ID NO: 49739 and four mutations at positions selected from the group consisting of U11, U24, A29, and A87. In one embodiment of the foregoing, the mutations consist of U11C, U24C, A29C, and A87G, resulting in the ERS 316 sequence ACUGGCGCUUCUAUCUGAUUACUCUGAGCGCCAUCACCAGCGACUAUGUCGUAGU GGGUAAAGCUCCCUCUUCGGAGGGAGCAUCAGAG (SEQ ID NO: 156), or a sequence having at least about 96%, at least about 97%, at least about 98%, at least about 99% sequence identity thereto.

[0143] In some embodiments, the ERS comprises a sequence of SEQ ID NO: 17, or a sequence having at least about 70% sequence identity thereto, comprising an extended stem loop sequence of SEQ ID NO: 49739 and one or more mutations at positions selected from the group consisting of U11, U24, A29, and A87, wherein the one or more mutations improve the editing ability of the ERS relative to SEQ ID NO: 17.

[0144] In one embodiment, an ERS scaffold was designed wherein the scaffold 235 sequence (SEQ ID NO: 75) was modified by a domain swap in which the extended stemloop of scaffold variant 174 (SEQ ID NO: 49739) replaced the extended stemloop of the 235 scaffold. In some embodiments, the disclosure provides an ERS comprising a sequence of SEQ ID NO: 75, or a sequence having at least about 70% sequence identity thereto, modified to comprise an extended stem loop sequence of SEQ ID NO: 49739. In some embodiments, the ERS modified to comprise the extended stem loop sequence of SEQ ID NO: 49739 further comprises one or more regions selected from the group consisting of: i) a 5′ end comprising a sequence of AC; ii) a pseudoknot stem I comprising a sequence of UGGCGCU; iii) a triplex loop comprising a sequence of SEQ ID NO: 49736; iv) a pseudoknot stem II comprising a sequence of AGCGCCA; and a triplex region III comprising a sequence of CAGAG. In the foregoing embodiments, the modifications result in the chimeric ERS 316 (see FIG. 11C and FIG. 25), having the sequence ACUGGCGCUUCUAUCUGAUUACUCUGAGCGCCAUCACCAGCGACUAUGUCGUAGU GGGUAAAGCUCCCUCUUCGGAGGGAGCAUCAGAG (SEQ ID NO: 156), having 89 nucleotides in the scaffold, compared with the 99 nucleotides of gRNA variant 235. In some embodiments, the shorter sequence length of the 316 scaffold confers the improvements of a higher fidelity in the ability to create the guide synthetically with the correct and complete sequence, as well as an enhanced ability to be successfully incorporated into an LNP. In addition to improvements in manufacturability, the 316 scaffold was determined to perform comparably or more favorably than gRNA variant 174 in editing assays, as described in the Examples. The resulting 316 scaffold had the further advantage in that the extended stemloop did not contain CpG motifs; an enhanced property described more fully, below. In some embodiments, the 316 scaffold was subjected to chemical modification to create additional ERS, described below. The sequences of the regions of ERS scaffold 316 are presented in Table 3.

TABLE 3
ERS 316 scaffold

| | | SEQ ID |
|---|---|---|
| Region of Scaffold | RNA Sequence* | NO |
| 5′ end | AC | — |
| Pseudoknot stem I | UGGCGCU | — |
| Triplex loop (including triplex | UCUAUCUGAUUACUCUG | 49736 |
| regions I and II) | | |
| Pseudoknot stem II | AGCGCCA | — |
| Linking nucleotides I | UCA | — |
| Scaffold stem loop | CCAGCGACUAUGUCGUAGUGG | 49737 |
| Linking nucleotides II | GUAAA | — |
| Extended stem loop | GCUCCCUCUUCGGAGGGAGC | 49739 |
| Linking nucleotides III | AU | — |
| Triplex region III | CAGAG | — |

*Bases that form the triplex (herein termed triplex regions I-III) are bolded and underlined.

c. Chemically-Modified ERS

[0145] In some embodiments, the present disclosure provides ERS having one or more chemical modifications in order to enhance the chemical stability of ERS. In some cases, the chemically modified ERS are utilized in LNP formations, wherein the ability of the incorporated RNA of the LNP is required to fold and assume and maintain its structural conformation, as well as resist nuclease degradation or induce an immune response when introduced into a target cell environment. Chemical modification of RNAs has been shown to improve stability, increase nuclease resistance by cellular RNase, increase duplex bond formation, and reduce immune responses by the selective modification of the nucleotides, resulting in enhanced editing in CRISPR systems (Basila, M., et al. Minimal 2′-O-methyl phosphorothioate linkage modification pattern of synthetic guide RNAs for increased stability and efficient CRISPR-Cas9 gene editing avoiding cellular toxicity. PLoS ONE 12(11): e0188593 (2017)). In some embodiments, the chemical modification is the addition of a 2′O-methyl group to one or more nucleotides of the sequence of the ERS and linked targeting sequence. In some embodiments, the chemical modification is the addition of a 2′O-methyl group on each terminal end, 5′ and 3′, of the ERS. In some embodiments, the chemical modification is substitution of a phosphorothioate bond between two or more nucleosides of the sequence. In some embodiments, the first 1, 2, or 3 nucleotides of the 5′ end of the scaffold (i.e., A, C, and U in the case of scaffolds 174, 235, and 316) are modified by the addition of a 2′O-methyl group and each of the modified nucleosides is linked to the adjoining nucleoside by a phosphorothioate bond. Similarly, the last 1, 2, or 3 nucleotides of the 3′ end of the targeting sequence linked to the 3′ end of the scaffold are similarly modified to produce an end-protected variant (collectively, the construct with the foregoing modifications termed “vi”). In other embodiments, the 5′ and 3′ ends, as well as nucleotides in select interior regions are similarly modified by the addition of a 2′O-methyl group. In another embodiment, ERS and linked targeting sequence were designed in which a 3′UUU tail was added, in addition to the v1 modifications, to the construct to mimic the termination sequence used in cellular transcription systems and to move the modified nucleotides of the v1 outside of the region of the targeting sequence involved in target recognition (termed “v2”). In another embodiment, ERS were designed in which, in addition to the v1 end-protection modifications, additional 2′OMe modifications were made at nucleotides identified to be potentially modifiable, based on structural analysis of the scaffold (termed “v3”). In another embodiment, ERS were designed in which the 2′OMe modifications of the v3 version in the triplex region of the scaffold were removed to reduce perturbation of the RNA helical structure and maintain backbone flexibility of the resulting scaffold (termed “v4). In another embodiment, ERS were designed in which the modifications included the end-protected modifications of the v1 version and 2′OMe modifications were introduced in the scaffold stem and extended stem regions of the scaffold (termed “v5”). In another embodiment, ERS were designed in which the modifications included the end-protected modifications of the v1 version and 2′OMe modifications were introduced only in the extended stem region of the scaffold (termed “v6”). Schematics of the configurations are show in FIGS. 8A, 8B, 10, 16A and 16B. In some embodiments, the disclosure provides ERS of the v1, v2, v3, v4, v5, v6, v7, v8, or v9 configurations having a sequence selected from the group consisting of the sequences set forth in Table 29 (SEQ ID NOS: 49750-49758, 49760-49768, and 49770-49749) of Example 8 (it being understood that for utilization in the systems of the disclosure, the non-targeting 20 nucleotides at the 3′ end are replaced with a targeting sequence complementary to the target nucleic acid to be modified). In a particular embodiment, the ERS comprises the sequence of SEQ ID NO: 49770 (it being understood that for utilization in the systems of the disclosure, the non-targeting 20 nucleotides at the 3′ end are replaced with a targeting sequence complementary to the target nucleic acid to be modified). In some embodiments, the ERS and linked targeting sequence of the v1, v2, v3, v4, v5, v6, v7, v8, or v9 configurations retain at least about 10%, at least about 20%, at least about 30%, at least about 40%, at least about 50%, at least about 60%, at least about 70%, at least about 80%, or at least about 90% of the editing of a target nucleic acid compared to the unmodified gRNA when assessed in comparable in vitro assays with a CasX nuclease. In some embodiments, the ERS and linked targeting sequence of the vi, v2, v3, v4, v5, v6, v7, v8, or v9 configurations exhibit reduced susceptibility of the ERS to degradation by cellular RNase compared to an unmodified ERS. In some embodiments, the chemically-modified ERS exhibit at least about 10%, at least about 20%, at least about 30%, at least about 40%, at least about 50%, at least about 60% less susceptibility to degradation by cellular RNase compared to an unmodified ERS.

e. CpG Depleted ERS

[0146] In the context of use of recombinant adenovirus associated vectors (AAV) for delivery of the ERS and engineered CasX of the embodiments, it was determined that unmethylated CpG dinucleotides in viral DNA can bind TLR9, an endosomal PRR in plasmacytoid dendritic cells (pDCs) and B cells, and result in immune responses in mammalian hosts (Faust, S M, et al. CpG-depleted adeno-associated virus vectors evade immune detection. J. Clinical Invest. 123:2294 (2013)). In particular, CpG dinucleotide motifs in AAV vectors are immunostimulatory because of their high degree of hypomethylation, relative to mammalian CpG motifs, which have a high degree of methylation. Accordingly, reducing the frequency of unmethylated CpG in rAAV vector genomes to a level below the threshold that activates human TLR9 is expected to reduce the immune response to exogenously administered rAAV-based biologics.

[0147] In some embodiments, the present disclosure provides ERS that are codon-optimized for depletion of CpG dinucleotides by the substitution of homologous nucleotide sequences from mammalian species, wherein the modified ERS substantially retain the functional property of driving expression of the ERS upon expression in a cell transduced with an AAV comprising the modified ERS. In some embodiments, the present disclosure provides ERS for inclusion in rAAV vectors wherein the encoding sequence for the ERS comprises less than about 10%, less than about 5%, or less than about 1% CpG dinucleotides, and retains the ability to result in transcription of an ERS capable of binding an engineered CasX. In some embodiments, the CpG-depleted ERS is encoded by a DNA sequence comprising a sequence selected from the group consisting of the sequences of Table 38 (SEQ ID NOS: 535-556). In some embodiments, the CpG-depleted ERS comprises a sequence selected from the group consisting of the sequences of Table 38 (SEQ ID NOS: 160-181).

[0148] In some embodiments, the administration of a therapeutically effective dose of an rAAV vector comprising the CpG-depleted ERS of the transgene to a subject results in a reduced immune response compared to the immune response of a comparable rAAV vector wherein the ERS has not been codon-optimized for depletion of CpG dinucleotides, wherein the reduced response is determined by the measurement of one or more parameters such as production of antibodies or a delayed-type hypersensitivity to the ERS, or the production of inflammatory cytokines and markers, such as, but not limited to TLR9, interleukin-1 (IL-1), IL-6, IL-12, IL-18, tumor necrosis factor alpha (TNF-α), interferon gamma (IFNγ), and granulocyte-macrophage colony stimulating factor (GM-CSF). In some embodiments, the rAAV vector comprising the CpG-depleted ERS of the transgene elicits reduced production of one or more inflammatory markers selected from the group consisting of TLR9, interleukin-1 (IL-1), IL-6, IL-12, IL-18, tumor necrosis factor alpha (TNF-α), interferon gamma (IFNγ), and granulocyte-macrophage colony stimulating factor (GM-CSF) of at least about 10%, at least about 20%, at least about 30%, at least about 40%, at least about 50%, at least about 60%, at least about 80%, or at least about 90% compared to the comparable rAAV that is not CpG depleted, when assayed in a cell-based vitro assay using cells known in the art appropriate for such assays; e.g., monocytes, macrophages, T-cells, B-cells, etc. In a particular embodiment, the rAAV vector comprising the CpG-depleted ERS of the transgene exhibits a reduced activation of TLR9 in hNPCs in an in vitro assay of at least about 10%, at least about 20%, at least about 30%, at least about 40%, at least about 50%, at least about 60%, at least about 80%, or at least about 90% compared to the comparable rAAV that is not CpG depleted.

f. Complex Formation with Class 2, Type V Protein

[0149] In some embodiments, upon expression, the ERS is capable of complexing as an RNP with an engineered CasX proteins comprising any one of the sequences of SEQ ID NOS: 247-294, 24916-49628, 49746-49747, and 49871-49873, or a sequence having at least about 50%, at least about 60%, at least about 70%, at least about 80%, at least about 85%, at least about 90%, at least about 91%, at least about 92%, at least about 93%, at least about 94%, at least about 95%, at least about 96%, at least about 97%, at least about 98%, or at least about 99% identity thereto.

[0150] In some embodiments, upon expression, the ERS is capable of complexing as an RNP with an engineered CasX protein comprising a pair of mutations as depicted in Table 22, or further variations thereof. In some embodiments, an ERS has an improved ability to form a complex with an engineered CasX protein when compared to a gRNA variant or a reference gRNA, thereby improving its ability to form a cleavage-competent ribonucleoprotein (RNP) complex with the engineered CasX protein. Improving ribonucleoprotein complex formation may, in some embodiments, improve the efficiency with which functional RNPs are assembled. In some embodiments, greater than 90%, greater than 93%, greater than 95%, greater than 96%, greater than 97%, greater than 98% or greater than 99% of RNPs comprising an ERS and its targeting sequence are competent for gene editing of a target nucleic acid.

### IV. Engineered CasX Proteins for Modifying a Target Nucleic Acid

[0151] The present disclosure provides engineered CasX nuclease proteins that have utility in genome editing of eukaryotic cells. The engineered CasX nucleases employed in the genome editing systems are Class 2, Type V nucleases. Although members of Class 2, Type V CRISPR-Cas systems have differences, they share some common characteristics that distinguish them from the Cas9 systems. Firstly, the Class 2, Type V nucleases possess a single RNA-guided RuvC domain-containing effector but no HNH domain, and they recognize TC motif PAM 5′ upstream to the target region on the non-targeted strand, which is different from Cas9 systems which rely on G-rich PAM at 3′ side of target sequences. Type V nucleases generate staggered double-stranded breaks distal to the PAM sequence, unlike Cas9, which generates a blunt end in the proximal site close to the PAM. In addition, Type V nucleases degrade ssDNA in trans when activated by target dsDNA or ssDNA binding in cis. In some embodiments, the engineered CasX nucleases of the embodiments recognize a 5′-TC PAM motif and produce staggered ends cleaved solely by the RuvC domain. In some embodiments, the present disclosure provides systems comprising engineered CasX proteins and one or more ERS (eCasX:ERS system) that are specifically designed to modify a target nucleic acid sequence in eukaryotic cells.

[0152] The term “CasX protein”, as used herein, refers to a family of proteins, and encompasses all naturally-occurring CasX proteins (“reference CasX”), as well as engineered CasX proteins with sequence modifications possessing one or more improved characteristics relative to a CasX protein from which it was derived, described more fully, below.

[0153] The reference CasX, CasX variants (e.g., CasX 515) and engineered CasX proteins of the disclosure comprise the following domains: a non-target strand binding (NTSB) domain, a target strand loading (TSL) domain, a helical I domain (which is further divided into helical I-I and I-II subdomains), a helical II domain, an oligonucleotide binding domain (OBD, which is further divided into OBD-I and OBD-II subdomains), and a RuvC DNA cleavage domain (which is further divided into RuvC-I and II subdomains). In some embodiments, the present disclosure contemplates engineered CasX having multiple mutations in the domains relative to the CasX from which it was derived, wherein the engineered CasX nevertheless retain the ability to form an RNP with an ERS and retains nuclease activity. All such engineered CasX retaining such properties are considered within the scope of the disclosure. In other embodiments, the RuvC domain may be modified or deleted in a catalytically-dead variant.

a. Reference CasX Proteins

[0154] For purposes of the disclosure, the sequences of naturally-occurring CasX proteins (referred to herein as a “reference CasX protein”) are provided for illustrative purposes; e.g., identification of domains and subdomains, as well as the ability to reference select amino acid positions. For example, reference CasX proteins can be isolated from naturally occurring prokaryotes, such as Deltaproteobacteria, Planctomycetes, or Candidatus Sungbacteria species. A reference CasX protein is a type II CRISPR/Cas endonuclease belonging to the CasX (interchangeably referred to as Cas12e) family of proteins that interacts with a guide RNA to form a ribonucleoprotein (RNP) complex.

[0155] In some cases, a reference CasX protein is isolated or derived from Deltaproteobacter having a sequence of:

| (SEQ ID NO: 1) | |
|---|---|
| 1 | MEKRINKIRK KLSADNATKP VSRSGPMKTL LVRVMTDDLK KRLEKRRKKP EVMPQVISNN |
| 61 | AANNLRMLLD DYTKMKEAIL QVYWQEFKDD HVGLMCKFAQ PASKKIDQNK LKPEMDEKGN |
| 121 | LTTAGFACSQ CGQPLFVYKL EQVSEKGKAY TNYFGRCNVA EHEKLILLAQ LKPEKDSDEA |
| 181 | VTYSLGKFGQ RALDFYSIHV TKESTHPVKP LAQIAGNRYA SGPVGKALSD ACMGTIASFL |
| 241 | SKYQDIIIEH QKVVKGNQKR LESLRELAGK ENLEYPSVTL PPQPHTKEGV DAYNEVIARV |
| 301 | RMWVNLNLWQ KLKLSRDDAK PLLRLKGFPS FPVVERRENE VDWWNTINEV KKLIDAKRDM |
| 361 | GRVFWSGVTA EKRNTILEGY NYLPNENDHK KREGSLENPK KPAKRQFGDL LLYLEKKYAG |
| 421 | DWGKVFDEAW ERIDKKIAGL TSHIEREEAR NAEDAQSKAV LTDWLRAKAS FVLERLKEMD |
| 481 | EKEFYACEIQ LQKWYGDLRG NPFAVEAENR VVDISGFSIG SDGHSIQYRN LLAWKYLENG |
| 541 | KREFYLLMNY GKKGRIRFTD GTDIKKSGKW QGLLYGGGKA KVIDLTFDPD DEQLIILPLA |
| 601 | FGTRQGREFI WNDLLSLETG LIKLANGRVI EKTIYNKKIG RDEPALFVAL TFERREVVDP |
| 661 | SNIKPVNLIG VDRGENIPAV IALTDPEGCP LPEFKDSSGG PTDILRIGEG YKEKQRAIQA |
| 721 | AKEVEQRRAG GYSRKFASKS RNLADDMVRN SARDLFYHAV THDAVLVFEN LSRGFGRQGK |
| 781 | RTFMTERQYT KMEDWLTAKL AYEGLTSKTY LSKTLAQYTS KTCSNCGFTI TTADYDGMLV |
| 841 | RLKKTSDGWA TTLNNKELKA EGQITYYNRY KRQTVEKELS AELDRLSEES GNNDISKWTK |
| 901 | GRRDEALFLL KKRFSHRPVQ EQFVCLDCGH EVHADEQAAL NIARSWLFLN SNSTEFKSYK |
| 961 | SGKQPFVGAW QAFYKRRLKE VWKPNA. |

[0156] In some cases, a reference CasX protein is isolated or derived from Planctomycetes having a sequence of:

| (SEQ ID NO: 2) | |
|---|---|
| 1 | MQEIKRINKI RRRLVKDSNT KKAGKTGPMK TLLVRVMTPD LRERLENLRK KPENIPQPIS |
| 61 | NTSRANLNKL LTDYTEMKKA ILHVYWEEFQ KDPVGLMSRV AQPAPKNIDQ RKLIPVKDGN |
| 121 | ERLTSSGFAC SQCCQPLYVY KLEQVNDKGK PHTNYFGRCN VSEHERLILL SPHKPEANDE |
| 181 | LVTYSLGKFG QRALDFYSIH VTRESNHPVK PLEQIGGNSC ASGPVGKALS DACMGAVASF |
| 241 | LTKYQDIILE HQKVIKKNEK RLANLKDIAS ANGLAFPKIT LPPQPHTKEG IEAYNNVVAQ |
| 301 | IVIWVNLNLW QKLKIGRDEA KPLQRLKGFP SFPLVERQAN EVDWWDMVCN VKKLINEKKE |
| 361 | DGKVFWQNLA GYKRQEALLP YLSSEEDRKK GKKFARYQFG DLLLHLEKKH GEDWGKVYDE |
| 421 | AWERIDKKVE GLSKHIKLEE ERRSEDAQSK AALTDWLRAK ASFVIEGLKE ADKDEFCRCE |
| 481 | LKLQKWYGDL RGKPFAIEAE NSILDISGFS KQYNCAFIWQ KDGVKKLNLY LIINYFKGGK |
| 541 | LRFKKIKPEA FEANRFYTVI NKKSGEIVPM EVNFNFDDPN LIILPLAFGK RQGREFIWND |
| 601 | LLSLETGSLK LANGRVIEKT LYNRRTRQDE PALFVALTFE RREVLDSSNI KPMNLIGIDR |
| 661 | GENIPAVIAL TDPEGCPLSR FKDSLGNPTH ILRIGESYKE KQRTIQAAKE VEQRRAGGYS |
| 721 | RKYASKAKNL ADDMVRNTAR DLLYYAVTQD AMLIFENLSR GFGRQGKRTF MAERQYTRME |
| 781 | DWLTAKLAYE GLPSKTYLSK TLAQYTSKTC SNCGFTITSA DYDRVLEKLK KTATGWMTTI |
| 841 | NGKELKVEGQ ITYYNRYKRQ NVVKDLSVEL DRLSEESVNN DISSWTKGRS GEALSLLKKR |
| 901 | FSHRPVQEKF VCLNCGFETH ADEQAALNIA RSWLFLRSQE YKKYQTNKTT GNTDKRAFVE |
| 961 | TWQSFYRKKL KEVWKPAV. |

[0157] In some cases, a reference CasX protein is isolated or derived from Candidatus Sungbacteria having a sequence of

| (SEQ ID NO: 3) | |
|---|---|
| 1 | MDNANKPSTK SLVNTTRISD HFGVTPGQVT RVFSFGIIPT KRQYAIIERW FAAVEAARER |
| 61 | LYGMLYAHFQ ENPPAYLKEK FSYETFFKGR PVLNGLRDID PTIMTSAVFT ALRHKAEGAM |
| 121 | AAFHTNHRRL FEEARKKMRE YAECLKANEA LLRGAADIDW DKIVNALRTR LNTCLAPEYD |
| 181 | AVIADFGALC AFRALIAETN ALKGAYNHAL NQMLPALVKV DEPEEAEESP RLRFFNGRIN |
| 241 | DLPKFPVAER ETPPDTETII RQLEDMARVI PDTAEILGYI HRIRHKAARR KPGSAVPLPQ |
| 301 | RVALYCAIRM ERNPEEDPST VAGHFLGEID RVCEKRRQGL VRTPFDSQIR ARYMDIISFR |
| 361 | ATLAHPDRWT EIQFLRSNAA SRRVRAETIS APFEGFSWTS NRTNPAPQYG MALAKDANAP |
| 421 | ADAPELCICL SPSSAAFSVR EKGGDLIYMR PTGGRRGKDN PGKEITWVPG SFDEYPASGV |
| 481 | ALKLRLYFGR SQARRMLINK TWGLLSDNPR VFAANAELVG KKRNPQDRWK LFFHMVISGP |
| 541 | PPVEYLDFSS DVRSRARTVI GINRGEVNPL AYAVVSVEDG QVLEEGLLGK KEYIDQLIET |
| 601 | RRRISEYQSR EQTPPRDLRQ RVRHLQDTVL GSARAKIHSL IAFWKGILAI ERLDDQFHGR |
| 661 | EQKIIPKKTY LANKTGFMNA LSFSGAVRVD KKGNPWGGMI EIYPGGISRT CTQCGTVWLA |
| 721 | RRPKNPGHRD AMVVIPDIVD DAAATGFDNV DCDAGTVDYG ELFTLSREWV RLTPRYSRVM |
| 781 | RGTLGDLERA IRQGDDRKSR QMLELALEPQ PQWGQFFCHR CGFNGQSDVL AATNLARRAI |
| 841 | SLIRRLPDTD TPPTP. |

b. Engineered CasX Proteins

[0158] The present disclosure provides highly-modified engineered CasX proteins having multiple mutations relative to a reference CasX or to one or more CasX variant proteins; e.g., CasX 515 or the CasX proteins of Table 9 (SEQ ID NOS: 492-500). The mutations can be in one or more domains of the parental CasX from which the engineered CasX was derived. The CasX domains and their positions, relative to reference CasX SEQ ID NOS: 1 and 2 are presented in Tables 4 and 5.

TABLE 4
Domain coordinates in Reference CasX proteins

| | Coordinates in | Coordinates in |
|---|---|---|
| Domain Name | SEQ ID NO: 1 | SEQ ID NO: 2 |
| OBD-I | 1-55 | 1-57 |
| helical I-I | 56-99 | 58-101 |
| NTSB | 100-190 | 102-191 |
| helical I-II | 191-331 | 192-332 |
| helical II | 332-508 | 333-500 |
| OBD-II | 509-659 | 501-646 |
| RuvC-I | 660-823 | 647-810 |
| TSL | 824-933 | 811-920 |
| RuvC-II | 934-986 | 921-978 |

TABLE 5
Exemplary Domain Sequences in Reference CasX proteins
Deltaproteobacter sp. (reference CasX of SEQ ID NO: 1)

| SEQ | | |
|---|---|---|
| ID | Domain | Sequence |
| 229 | OBD-I | EKRINKIRKKLSADNATKPVSRSGPMKTLLVRVMTDDLKKRLEKRRKKPEVMPQ |
| 230 | helical I-I | VISNNAANNLRMLLDDYTKMKEAILQVYWQEFKDDHVGLMCKFA |
| 231 | NTSB | QPASKKIDQNKLKPEMDEKGNLTTAGFACSQCGQPLFVYKLEQVSEKGKAYTNYFGRCNV |
| | | AEHEKLILLAQLKPEKDSDEAVTYSLGKFGQ |
| 232 | helical I-II | RALDFYSIHVTKESTHPVKPLAQIAGNRYASGPVGKALSDACMGTIASFLSKYQDIIIEH |
| | | QKVVKGNQKRLESLRELAGKENLEYPSVTLPPQPHTKEGVDAYNEVIARVRMWVNLNLWQ |
| | | KLKLSRDDAKPLLRLKGFPSF |
| 233 | helical II | PVVERRENEVDWWNTINEVKKLIDAKRDMGRVFWSGVTAEKRNTILEGYNYLPNENDHKK |
| | | REGSLENPKKPAKRQFGDLLLYLEKKYAGDWGKVEDEAWERIDKKIAGLTSHIEREEARN |
| | | AEDAQSKAVLTDWLRAKASFVLERLKEMDEKEFYACEIQLQKWYGDLRG NPFAVEAE |
| 234 | OBD-II | NRVVDISGESIGSDGHSIQYRNLLAWKYLENGKREFYLLMNYGKKGRIRFTDGTDIKKSG |
| | | KWQGLLYGGGKAKVIDLTFDPDDEQLIILPLAFGTRQGREFIWNDLLSLETGLIKLANGR |
| | | VIEKTIYNKKIGRDEPALFVALTFERREVVD |
| 235 | RuvC-I | PSNIKPVNLIGVDRGENIPAVIALTDPEGCPLPEFKDSSGGPTDILRIGEGYKEKQRAIQ |
| | | AAKEVEQRRAGGYSRKFASKSRNLADDMVRNSARDLFYHAVTHDAVLVFENLSRGFGRQG |
| | | KRTFMTERQYTKMEDWLTAKLAYEGLTSKTYLSKTLAQYTSKTC |
| 236 | TSL | SNCGFTITTADYDGMLVRLKKTSDGWATTLNNKELKAEGQITYYNRYKROTVEKELSAEL |
| | | DRLSEESGNNDISKWTKGRRDEALFLLKKRFSHRPVQEQFVCLDCGHEVH |
| 237 | RuvC-II | ADEQAALNIARSWLFLN SNSTEFKSYKSGKQPFVGAWQAFYKRRLKEVWKPNA |

Planctomycetes sp. (Reference CasX of SEQ ID NO: 2)

| SEQ | | |
|---|---|---|
| ID | Domain | Sequence |
| 238 | OBD-I | QEIKRINKIRRRLVKDSNTKKAGKTGPMKTLLVRVMTPDLRERLENLRKKPENIPQ |
| 239 | helical I-I | PISNTSRANLNKLLTDYTEMKKAILHVYWEEFQKDPVGLMSRVA |
| 240 | NTSB | QPAPKNIDQRKLIPVKDGNERLTSSGFACSQCCQPLYVYKLEQVNDKGKPHTNYFGRCNV |
| | | SEHERLILLSPHKPEANDELVTYSLGKFGQ |
| 241 | helical I-II | RALDFYSIHVTRESNHPVKPLEQIGGNSCASGPVGKALSDACMGAVASFLTKYQDIILEH |
| | | QKVIKKNEKRLANLKDIASANGLAFPKITLPPQPHTKEGIEAYNNVVAQIVIWVNLNLWQ |
| | | KLKIGRDEAKPLQRLKGFPSF |
| 242 | helical II | PLVERQANEVDWWDMVCNVKKLINEKKEDGKVFWQNLAGYKRQEALLPYLSSEEDRKKGK |
| | | KFARYQFGDLLLHLEKKHGEDWGKVYDEAWERIDKKVEGLSKHIKLEEERRSEDAQSKAA |
| | | LTDWLRAKASFVIEGLKEADKDEFCRCELKLOKWYGDLRGKPFAIEAE |
| 243 | OBD-II | NSILDISGFSKQYNCAFIWQKDGVKKLNLYLIINYFKGGKLRFKKIKPEAFEANRFYTVI |
| | | NKKSGEIVPMEVNENFDDPNLIILPLAFGKROGREFIWNDLLSLETGSLK |
| | | LANGRVIEKTLYNRRTRQDEPALFVALTFERREVLD |
| 244 | RuvC-I | SSNIKPMNLIGIDRGENIPAVIALTDPEGCPLSRFKDSLGNPTHILRIGESYKEKORTIQ |
| | | AAKEVEQRRAGGYSRKYASKAKNLADDMVRNTARDLLYYAVTQDAMLIFENLSRGFGRQG |
| | | KRTEMAERQYTRMEDWLTAKLAYEGLPSKTYLSKTLAQYTSKTC |
| 245 | TSL | SNCGFTITSADYDRVLEKLKKTATGWMTTINGKELKVEGQITYYNRYKRQNVVKDLSVEL |
| | | DRLSEESVNNDISSWTKGRSGEALSLLKKRFSHRPVQEKFVCLNCGFETH |
| 246 | RuvC-II | ADEQAALNIARSWLFLRSQEYKKYQTNKTTGNTDKRAFVETWQSFYRKKLKEVWKPAV |

[0159] Mutations can be introduced in any one or combinations of domains of the CasX variant to result in an engineered CasX. These alterations can be amino acid insertions, deletions, substitutions, or any combinations thereof. Any amino acid can be substituted for any other amino acid in the substitutions described herein. The substitution can be a conservative substitution (e.g., a basic amino acid is substituted for another basic amino acid). The substitution can be a non-conservative substitution (e.g., a basic amino acid is substituted for an acidic amino acid or vice versa). For example, a proline in a CasX protein can be substituted for any of arginine, histidine, lysine, aspartic acid, glutamic acid, serine, threonine, asparagine, glutamine, cysteine, glycine, alanine, isoleucine, leucine, methionine, phenylalanine, tryptophan, tyrosine or valine to generate an engineered CasX protein of the disclosure. In some embodiments, an engineered CasX comprises two mutations relative to the CasX protein from which it was derived. In some embodiments, an engineered CasX comprises three mutations relative to the CasX protein from which it was derived. In some embodiments, an engineered CasX comprises 2, 3, 4, 5, 6, 7, 8, 9, 10 or more mutations relative to the CasX protein from which it was derived. In some embodiments, the 2, 3, 4, 5, 6, 7, 8, 9, 10 or more mutations are made in locations of the CasX protein sequence separated from one another. In other embodiments, the 2, 3, 4, 5, 6, 7, 8, 9, 10 or more mutations can be made in adjacent amino acids in the CasX protein sequence. In some embodiments, an engineered CasX comprises two or more mutations relative to two or more different CasX proteins from which they were derived. The methods utilized for the design and creation of the engineered CasX are described below, including the methods of the Examples.

[0160] Suitable mutagenesis methods for generating engineered CasX proteins of the disclosure may include, for example, random mutagenesis, site-directed mutagenesis, Markov Chain Monte Carlo (MCMC)-directed evolution, staggered extension PCR, gene shuffling, rational design, or domain swapping (described in PCT/US2021/061673 and WO2020247882A1, incorporated by reference herein). In some embodiments, the engineered CasX are designed, for example by selecting multiple desired mutations in a CasX variant identified, for example, using the approaches described in the Examples. In certain embodiments, the activity of the CasX variant protein prior to mutagenesis is used as a benchmark against which the activity of one or more resulting engineered CasX are compared, thereby measuring improvements in function of the engineered CasX.

[0161] In some embodiments of the engineered CasX described herein, the approach to design the engineered CasX utilizes a directed evolution method adapted from a Markov Chain Monte Carlo (MCMC)-directed evolution simulation (Biswas N., et al. Coupled Markov Chain Monte Carlo for high-dimensional regression with Half-t priors. arViV: 2012.04798v2 (2021)), as described in Example 1.

[0162] In further iterations of the generation of the engineered CasX proteins, a variant CasX protein can be mutagenized to generate sequences that are screened to identity engineered CasX having improved or enhanced characteristics. Exemplary methods used to generate and evaluate engineered CasX derived from other CasX proteins are described in the Examples (e.g., CasX 515), which were created by introducing modifications to the encoding sequence resulting in amino acid substitutions, deletions, or insertions at one or more positions in one or more domains of the parental CasX protein. In some embodiments, the resulting mutagenized sequences are screened to identify those having enhanced nuclease activity. In other embodiments, the mutagenized sequences are screened to identify those having enhanced editing specificity and reduced off-target editing. In other embodiments, the mutagenized sequences are screened to identify those having enhanced PAM utilization; i.e., the ability to utilize non-canonical PAM sequences. In still other embodiments, the mutagenized sequences are screened to identify those having enhanced properties of any two or three of the foregoing categories; i.e., nuclease activity, specificity (reduced off-target editing), and PAM utilization. In other embodiments, libraries of sequence variants having one, two, three or more mutations at select positions relative to a parental CasX protein can be generated and screened in assays such as an E. coli CcdB toxin assay or a multiplexed pooled approach using a PASS assay to identify those engineered CasX that had enhanced nuclease activity, enhanced specificity, and/or increased PAM utilization compared to the cleavage of the E. coli nucleic acid compared to the parental CasX protein, as described in Examples 5-7. The domain sequences of CasX 515 are presented in Table 7.

[0163] Any changes in the amino acid sequence of a CasX variant protein from which the engineered CasX was derived and that leads to an improved characteristic of the engineered CasX protein is considered an engineered CasX protein of the disclosure, provided the engineered CasX retains the ability to form an RNP with a gRNA or ERS and retains nuclease activity. In some embodiments, the improved characteristic is one or more of improved editing activity of the target nucleic acid, improved editing specificity for the target nucleic acid, improved editing specificity ratio for the target nucleic acid, decreased off-target editing, increased percentage of a eukaryotic genome that can be efficiently edited, improved ability to form cleavage-competent RNP with an ERS, and improved stability of an RNP complex. In some embodiments, the improved characteristic is at least about 0.1-fold improved, at least about 0.5-fold improved, at least about 1-fold improved, at least about 1-fold improved, at least about 1-fold improved, at least about 1.5-fold improved, at least about 2-fold improved, at least about 3-fold improved, at least about 4-fold improved, at least about 5-fold improved, at least about 6-fold improved, at least about 7-fold improved, at least about 8-fold improved, at least about 9-fold improved, at least about 10-fold improved, or any integer in between the foregoing. In some embodiments, the engineered CasX protein comprises between 700 and 1200 amino acids, between 800 and 1100 amino acids, or between 900 and 1000 amino acids.

[0164] In some embodiments, the disclosure provides engineered CasX derived from CasX 515 (SEQ ID NO: 49699) comprising two or more modifications; an insertion, a deletion, or a substitution of amino acid(s) in one or more domains (see Table 7 for CasX 515 domain sequences). In some embodiments, the disclosure provides engineered CasX proteins comprising a pair of mutations relative to CasX 515 (SEQ ID NO: 49699) as depicted in Table 22, or further variations thereof. In some embodiments, an engineered CasX comprising two or more modifications comprises a sequence selected from the group consisting of SEQ ID NOS: 247-294, 27857-49628, 49746-49747, and 49871-49873, or a sequence having at least about 70%, at least about 80%, at least about 90%, or at least about 95%, or at least about 95%, or at least about 96%, or at least about 97%, or at least about 98%, or at least about 99% sequence identity thereto. In a particular approach, as detailed in Example 7, single mutations of CasX 515 (SEQ ID NO: 49699) that demonstrated enhanced activity and/or specificity, were selected based on locations deemed to be potentially complementary, and combined (i.e., having two or three mutations) to make engineered CasX that were then screened for activity and specificity in in vitro assays. The positions of the mutations within domains of CasX are described in detail in Table 21 in the Examples, below. In some embodiments, the engineered CasX comprises an OBD-I comprising an amino acid sequence comprising one or more mutations relative to the sequence of SEQ ID NO: 295. In some embodiments, the engineered CasX comprises an OBD-I comprising one or more mutations relative to the sequence of SEQ ID NO: 295 selected from the group consisting of an I3G substitution, an insertion of a G at position 4, a K4G substitution, an insertion of a G at position 5, a K8G substitution, an insertion of an R at position 26, and a R34P substitution. In some embodiments, the engineered CasX comprises an OBD-I comprising a sequence selected from the group consisting of SEQ ID NOS: 295, 49800, 49803-49808, and 49822-49833, or a sequence having at least about 90%, at least about 95%, at least about 98%, at least about 99% sequence identity thereto. In some embodiments, the engineered CasX comprises a helical I-I domain comprising an amino acid sequence comprising one or more mutations relative to the sequence of SEQ ID NO: 296. In some embodiments, the engineered CasX comprises a helical I-I domain comprising an R7Q substitution relative to the amino acid sequence of SEQ ID NO: 296. In some embodiments, the engineered CasX comprises a helical I-I domain comprises a sequence selected from the group consisting of SEQ ID NOS: 296 and 49809, or a sequence having at least about 90%, at least about 95%, at least about 98%, or at least about 99% sequence identity thereto. In some embodiments, the engineered CasX comprises an NTSB domain comprising an amino acid sequence comprising one or more mutations relative to the sequence of SEQ ID NO: 297. In some embodiments, the engineered CasX comprises an NTSB domain comprising one or more mutations relative to the sequence of SEQ ID NO: 297 selected from the group consisting of an L68K substitution, an L68Q substitution, an A70Y substitution, an A70D substitution, and an A70S substitution. In some embodiments, the engineered CasX comprises an NTSB domain comprising a sequence selected from the group consisting of SEQ ID NOS: 297, 49802, 49810, 49811, 49812, 49818, and 49835-49840, or a sequence having at least about 90%, at least about 95%, at least about 98%, or at least about 99% sequence identity thereto. In some embodiments, the engineered CasX comprises a helical I-II domain comprising an amino acid sequence comprising one or more mutations relative to the sequence of SEQ ID NO: 298. In some embodiments, the engineered CasX comprises a helical I-II domain comprising one or more mutations relative to the sequence of SEQ ID NO: 298 selected from the group consisting of a G32T substitution, an M112T substitution, and an M112W substitution. In some embodiments, the engineered CasX comprises a helical I-II domain comprising a sequence selected from the group consisting of SEQ ID NOS: 298, 49801, 49813-49814, and 49842, or a sequence having at least about 90%, at least about 95%, at least about 98%, or at least about 99% sequence identity thereto. In some embodiments, the engineered CasX comprises a helical II domain comprising an amino acid sequence comprising one or more mutations relative to the sequence of SEQ ID NO: 299. In some embodiments, the engineered CasX comprises a helical II domain comprising one or more mutations relative to the sequence of SEQ ID NO: 299 selected from the group consisting of a Y65T substitution and an E148D substitution. In some embodiments, the engineered CasX comprises a helical II domain comprising a sequence selected from the group consisting of SEQ ID NOS: 299, 49815-49816, and 49843, or a sequence having at least about 90%, at least about 95%, at least about 98%, or at least about 99% sequence identity thereto. In some embodiments, the engineered CasX comprises a RuvC-I domain comprising an amino acid sequence comprising one or more mutations relative to the sequence of SEQ ID NO: 301. In some embodiments, the engineered CasX comprises a RuvC-I domain comprising an S51R substitution relative to the sequence of SEQ ID NO: 301. In some embodiments, the engineered CasX comprises a RuvC-I domain comprising a sequence selected from the group consisting of SEQ ID NOS: 301 and 49821, or a sequence having at least about 90%, at least about 95%, at least about 98%, or at least about 99% sequence identity thereto. In some embodiments, the engineered CasX comprises a TSL domain comprising an amino acid sequence comprising one or more mutations relative to the sequence of SEQ ID NO: 302. In some embodiments, the engineered CasX comprises a TSL domain comprising one or more mutations relative to the sequence of SEQ ID NO: 302 selected from the group consisting of a V15M substitution, a T76D substitution, and an S80Q substitution. In some embodiments, the engineered CasX comprises a TSL domain comprising a sequence selected from the group consisting of SEQ ID NOS: 302, 49817, 49819, 49820, and 49844-49846, or a sequence having at least about 90%, at least about 95%, at least about 98%, or at least about 99% sequence identity thereto. In some embodiments, the engineered CasX comprises an OBD-II domain comprising the sequence of SEQ ID NO: 300, or a sequence having at least about 90%, at least about 95%, at least about 98%, or at least about 99% sequence identity thereto. In some embodiments, the engineered CasX comprises a RuvC-II domain comprising the sequence of SEQ ID NO: 303, or a sequence having at least about 90%, at least about 95%, at least about 98%, or at least about 99% sequence identity thereto. In some embodiments, the engineered CasX comprises two or more mutations selected from the group consisting of 4.I.G & 64.R.Q, 4.I.G & 169.L.K, 4.I.G & 169.L.Q, 4.I.G & 171.A.D, 4.I.G & 171.A.Y, 4.I.G & 171.A.S, 4.I.G & 224.G.T, 4.I.G & 304.M.T, 4.G & 398.Y.T, 4.I.G & 826.V.M, 41G & 887.T.D, 4.I.G & 891.S.Q, 5.-.G & 64.R.Q, 5.-.G & 169.L.K, 5.-.G & 169.L.Q, 5.-.G & 171.A.D, 5.-.G & 171.A.Y, 5.-.G & 171.A.S, 5.-.G & 224.G.T, 5.-.G & 304.M.T, 5.-.G & 398.Y.T, 5.-.G & 826.V.M, 5.-.G & 887.T.D, 5.-.G & 891.S.Q, 9.K.G & 64.R.Q, 9.K.G & 169.L.K, 9.K.G & 169.L.Q, 9.K.G & 171.A.D, 9.K.G & 171.A.Y, 9.K.G & 171.A.S, 9.K.G & 224.G.T, 9.K.G & 304.M.T, 9.K.G & 398.Y.T, 9.K.G & 826.V.M, 9.K.G & 887.T.D, 9.K.G & 891.S.Q, 27.-.R & 64.R.Q, 27.-.R & 169.L.K, 27.-.R & 169.L.Q, 27.-.R & 171.A.D, 27.-.R & 171.A.Y, 27.-.R & 171.A.S, 27.-.R & 224.G.T, 27.-.R & 304.M.T, 27.-.R & 398.Y.T, 27.-.R & 826.V.M, 27.-.R & 887.T.D, 27.-.R & 891.S.Q, 35.R.P & 64.R.Q, 35.R.P & 169.L.K, 35.R.P & 169.L.Q, 35.R.P & 171.A.D, 35.R.P & 171.A.Y, 35.R.P & 171.A.S, 35.R.P & 224.G.T, 35.R.P & 304.M.T, 35.R.P & 398.Y.T, 35.R.P & 826.V.M, 35.R.P & 887.T.D, 35.R.P & 891.S.Q, 887.T.D & 891.S.Q, 64.R.Q & 169.L.K, 64.R.Q & 169.L.Q, 64.R.Q & 171.A.D, 64.R.Q & 171.A.Y, 64.R.Q & 171.A.S, 64.R.Q & 224.G.T, 64.R.Q & 304.M.T, 64.R.Q & 398.Y.T, 64.R.Q & 826.V.M, 64.R.Q & 887.T.D, 64.R.Q & 891.S.Q, 169.L.K & 171.A.D, 169.L.K & 171.A.Y, 169.L.K & 171.A.S, 169.L.K & 224.G.T, 169.L.K & 304.M.T, 169.L.K & 398.Y.T, 169.L.K & 826.V.M, 169.L.K & 887.T.D, 169.L.K & 891.S.Q, 169.L.Q & 171.A.D, 169.L.Q & 171.A.Y, 169.L.Q & 171.A.S, 169.L.Q & 224.G.T, 169.L.Q & 304.M.T, 169.L.Q & 398.Y.T, 169.L.Q & 826.V.M, 169.L.Q & 887.T.D, 169.L.Q & 891.S.Q, 171.A.D & 224.G.T, 171.A.D & 304.M.T, 171.A.D & 398.Y.T, 171.A.D & 826.V.M, 171.A.D & 887.T.D, 171.A.D & 891.S.Q, 171.A.Y & 224.G.T, 171.A.Y & 304.M.T, 171.A.Y & 398.Y.T, 171.A.Y & 826.V.M, 171.A.Y & 887.T.D, 171.A.Y & 891.S.Q, 171.A.S & 224.G.T, 171.A.S & 304.M.T, 171.A.S & 398.Y.T, 171.A.S & 826.V.M, 171.A.S & 887.T.D, 171.A.S & 891.S.Q, 4.I.G & 35.R.P, 224.G.T & 304.M.T, 224.G.T & 398.Y.T, 224.G.T & 826.V.M, 224.G.T & 887.T.D, 224.G.T & 891.S.Q, 5.-.G & 35.R.P, 4.I.G & 27.-.R, 304.M.T & 398.Y.T, 304.M.T & 826.VM, 304.M.T & 887.T.D, 304.M.T & 891.S.Q, 9.K.G & 35.R.P, 5.-.G & 27.-.R, 4.I.G & 9.K.G, 398.Y.T & 826.V.M, 398.Y.T & 887.T.D, 398.Y.T & 891.S.Q, 27.-.R & 35.R.P, 9.K.G & 27.-.R, 5.-.G & 9.K.G, 41G & 5.-.G, 826.V.M & 887.T.D, 826.V.M & 891.S.Q, 5.K.G & 27.-.R, 5.K.G & 169.L.K, 5.K.G & 171.A.D, 5.K.G & 304.M.T, 5.K.G & 398.Y.T, 5.K.G & 891.S.Q, 6.-.G & 27.-.R, 6.-.G & 169.L.K, 6.-.G & 171.A.D, 6.-.G & 304.M.T, 6.-.G & 398.Y.T, 6.-.G & 891.S.Q, 304.M.W & 27.-.R, 304.M.W & 169.L.K, 304.M.W & 171.A.D, 304.M.W & 398.Y.T, 304.M.W & 891.S.Q, 481.E.D & 27.-.R, 481.E.D & 169.L.K, 481.E.D & 171.A.D, 481.E.D & 304.M.T, 481.E.D & 398.Y.T, 481.E.D & 891.S.Q, 698.S.R & 27.-.R, 698.S.R & 169.L.K, 698.S.R & 171.A.D, 698.S.R & 304.M.T, 698.S.R & 398.Y.T, and 698.S.R & 891.S.Q, as provided in Table 22, wherein the position of the mutations is relative to the CasX sequence of SEQ ID NO: 49699. In some embodiments, the engineered CasX comprises two or more mutations from Table 22, wherein the two or more mutations result in an improved characteristic compared to unmodified CasX 515 (SEQ ID NO: 49699). In some embodiments, the improved characteristics is determined compared to the unmodified parental CasX 515 in an in vitro assay under comparable conditions. In some embodiments, the improved characteristic is decreased off-target editing, e.g., as shown in Table 27. In some embodiments, the improved characteristic is increased on-target editing, e.g., as shown in Table 25.

[0165] In some embodiments, the engineered CasX comprises three mutations in the sequence of CasX 515 (SEQ ID NO: 49699), wherein the three mutations are selected from the group consisting of 27.-.R, 169.L.K, and 329.G.K; 27.-.R, 171.A.D, and 224.G.T; and 35.R.P, 171.A.Y, and 304.M.T, wherein the mutations result in an improved characteristic compared to unmodified CasX 515.

[0166] In some embodiments, an engineered CasX selected from the group consisting of SEQ ID NOS: 27858, 27859, 27861, 27865, 27866, 27868, 27870, 27871, 27872, 27876, 27877, 27880, 27882, 27889, 27897, 27898, 27903, 27952, 27953, 27954, 27955, 27958, 27959, 27961, 27963, 27969, 27970, 27973, 27975, 27982, 27990, 27991, 27996, 27998, 28003, 28004, 28006, 28008, 28009, 28010, 28014, 28018, 28027, 28035, 28036, 28047, 28048, 28050, 28052, 28053, 28054, 28058, 28062, 28071, 28079, 28080, 28095, 28101, 28105, 28123, 28137, 28143, 28147, 28165, 28253, 28255, 28257, 28258, 28259, 28263, 28267, 28276, 28284, 28285, 28293, 28295, 28296, 28297, 28301, 28305, 28314, 28322, 28323, 28368, 28369, 28370, 28374, 28378, 28387, 28395, 28396, 28438, 28439, 28443, 28444, 28447, 28449, 28456, 28464, 28465, 28470, 28477, 28481, 28490, 28498, 28499, 28511, 28515, 28524, 28532, 28533, 28633, 28635, 28642, 28650, 28651, 28656, 28661, 28679, 28738, 28745, 28753, 28754, 28759, 28799, 28925, 28926, 29011, 29022, 29056, 29098, 29119, 29140, 29245, 29266, 29308, 29371, 29392, 29476, 29560, 29749, 29917, 29938, 30196, 30888, 31244, 31592, 33212, 33512, 34088, 34631, 34870, 35139, 35402, 35422, 35467, 35507, 35512, 43373, 49746, 49747, and 49871-49873 exhibits improved editing activity compared to the unmodified parental CasX 515. In some embodiments, the improved characteristics is determined compared to the unmodified parental CasX 515 in an in vitro assay under comparable conditions.

[0167] In some embodiments, an engineered CasX selected from the group consisting of SEQ ID NOS: 27858, 27859, 27861, 27865, 27866, 27868, 27870, 27871, 27872, 27876, 27877, 27880, 27882, 27889, 27897, 27898, 27903, 27952, 27953, 27954, 27955, 27958, 27959, 27961, 27963, 27969, 27970, 27973, 27975, 27982, 27990, 27991, 27996, 27998, 28003, 28004, 28006, 28008, 28009, 28010, 28014, 28018, 28027, 28035, 28036, 28047, 28048, 28050, 28052, 28053, 28054, 28058, 28062, 28071, 28079, 28080, 28095, 28101, 28105, 28123, 28137, 28143, 28147, 28165, 28253, 28255, 28257, 28258, 28259, 28263, 28267, 28276, 28284, 28285, 28293, 28295, 28296, 28297, 28301, 28305, 28314, 28322, 28323, 28368, 28369, 28370, 28374, 28378, 28387, 28395, 28396, 28438, 28439, 28443, 28444, 28447, 28449, 28456, 28464, 28465, 28470, 28477, 28481, 28490, 28498, 28499, 28511, 28515, 28524, 28532, 28533, 28633, 28635, 28642, 28650, 28651, 28656, 28661, 28679, 28738, 28745, 28753, 28754, 28759, 28799, 28925, 28926, 29011, 29022, 29056, 29098, 29119, 29140, 29245, 29266, 29308, 29371, 29392, 29476, 29560, 29749, 29917, 29938, 30196, 30888, 31244, 31592, 33212, 33512, 34088, 34631, 34870, 35139, 35402, 35422, 35467, 35507, 35512, 43373, 49746, 49747, and 49871-49873 exhibits improved editing specificity compared to the unmodified parental CasX 515, In some embodiments, the improved characteristics is determined compared to the unmodified parental CasX 515 in an in vitro assay under comparable conditions.

[0168] In some embodiments, an engineered CasX selected from the group consisting of SEQ ID NOS: 27858, 27859, 27861, 27865, 27866, 27868, 27870, 27871, 27872, 27876, 27877, 27880, 27882, 27889, 27897, 27898, 27903, 27952, 27953, 27954, 27955, 27958, 27959, 27961, 27963, 27969, 27970, 27973, 27975, 27982, 27990, 27991, 27996, 27998, 28003, 28004, 28006, 28008, 28009, 28010, 28014, 28018, 28027, 28035, 28036, 28047, 28048, 28050, 28052, 28053, 28054, 28058, 28062, 28071, 28079, 28080, 28095, 28101, 28105, 28123, 28137, 28143, 28147, 28165, 28253, 28255, 28257, 28258, 28259, 28263, 28267, 28276, 28284, 28285, 28293, 28295, 28296, 28297, 28301, 28305, 28314, 28322, 28323, 28368, 28369, 28370, 28374, 28378, 28387, 28395, 28396, 28438, 28439, 28443, 28444, 28447, 28449, 28456, 28464, 28465, 28470, 28477, 28481, 28490, 28498, 28499, 28511, 28515, 28524, 28532, 28533, 28633, 28635, 28642, 28650, 28651, 28656, 28661, 28679, 28738, 28745, 28753, 28754, 28759, 28799, 28925, 28926, 29011, 29022, 29056, 29098, 29119, 29140, 29245, 29266, 29308, 29371, 29392, 29476, 29560, 29749, 29917, 29938, 30196, 30888, 31244, 31592, 33212, 33512, 34088, 34631, 34870, 35139, 35402, 35422, 35467, 35507, 35512, 43373, 49746, 49747, and 49871-49873 exhibits improved activity and specificity compared to the unmodified parental CasX 515. In some embodiments, the improved characteristics is determined compared to the unmodified parental CasX 515 in an in vitro assay under comparable conditions.

[0169] In some embodiments, an engineered CasX selected from the group consisting of SEQ ID NOS: 27865, 27952, 27954, 27955, 27958, 27959, 27973, 28009, 28018, 28048, 28101, 28123, 28137, 28285, 28296, 28301, 28305, 28314, 28323, 28368, 28369, 28370, 28378, 28387, 28438, 28447, 28477, 28481, 28498, 28515, 28524, 28532, 28661, 28799, 28925, 29022, 29266, 29308, 29371, 29560, 29749, 29917, 30888, 31244, 33212, 33512, 34088, 34870, 35422, 35507, 43373, 49872, and 49873 exhibits improved specificity ratio compared to the unmodified parental CasX 515. In some embodiments, the improved characteristics is determined compared to the unmodified parental CasX 515 in an in vitro assay under comparable conditions.

[0170] In some embodiments, an engineered CasX selected from the group consisting of SEQ ID NOS: 27952, 27958, 28101, 28123, 28137, 28285, 28368, 28370, 28378, 28387, 28438, 28799, 28925, 29022, 29308, 29749, 29917, 30888, 34870, 43373, and 49873 exhibits improved editing activity and improved editing specificity compared to the unmodified parental CasX 515. In some embodiments, the improved characteristics is determined compared to the unmodified parental CasX 515 in an in vitro assay under comparable conditions.

[0171] In some embodiments, an engineered CasX selected from the group consisting of SEQ ID NOS: 27952, 27958, 28036, 28101, 28123, 28137, 28285, 28368, 28370, 28378, 28387, 28438, 28499, 28799, 28925, 29011, 29022, 29308, 29749, 29917, 30888, 34870, 35402, 35512, 43373, and 49873 exhibits improved editing activity and improved editing specificity ratio compared to the unmodified parental CasX 515. In some embodiments, the improved characteristics is determined compared to the unmodified parental CasX 515 in an in vitro assay under comparable conditions.

[0172] In some embodiments, the foregoing characteristics of the engineered CasX are improved be at least about 0.1-fold, at least about 0.5-fold, at least about 1-fold, at least about 2-fold, at least about 4-fold, at least about 5-fold, at least about 6-fold, at least about 7-fold, at least about 8-fold, at least about 9-fold, or at least about 10-fold improved compared to the unmodified parental CasX 515.

[0173] In some embodiments, the engineered CasX protein comprises, from N- to C-terminus, an OBD-I domain, a helical I-I domain, an NTSB domain, a helical I-II domain, a helical II domain, an OBD-II, a RuvC-I domain, a TSL domain, and a RuvC-II domain, with each domain comprising a sequence as set forth in Table 23, or a sequence having at least about 90%, or at least about 95% sequence identity thereto. In some embodiments, the engineered CasX protein comprising a pair of mutations as depicted in Table 22, or further variations thereof, and demonstrates increased on-target editing activity or decreased off-target activity (specificity) compared to the unmodified parental CasX variant 515, when assayed in an in vitro assay under comparable conditions.

[0174] As described in the Examples, an engineered CasX termed “CasX 812” was generated. As described in Example 2, CasX 812 was generated via a glycine-to-lysine substitution at position 329 in CasX 515, within the helical I-II domain. CasX 812 demonstrated an improved specificity relative to CasX 515 in the pooled activity and specificity (PASS) assays described in Example 2 and Example 6. The amino acid sequences of the domains of CasX 812 are provided in Table 13 in the Examples. Accordingly, in some embodiments, the disclosure provides an engineered CasX comprising an amino acid substitution at position 329 relative to a CasX 515 protein comprising amino acid sequence of SEQ ID NO: 49699. In some embodiments, the engineered CasX comprises a mutation in the helical I-II domain relative to CasX 515. In some embodiments, the engineered CasX comprises a mutation at position G137 relative to the helical I-II domain of CasX 515. In some embodiments, the engineered CasX comprises a helical I-II domain sequence of SEQ ID NO: 298, or a sequence having at least about 90%, or at least about 95% sequence identity thereto, comprising an amino acid substitution of position G137 relative to the sequence of SEQ ID NO: 298. In some embodiments, the substituted position comprises a hydrophilic amino acid residue. In some embodiments, the hydrophilic amino acid residue is a lysine residue. In some embodiments, hydrophilic amino acid residues an asparagine residue. In some embodiments, the engineered CasX comprises an OBD-I domain comprising the amino acid sequence of SEQ ID NO: 295, or a sequence having at least about 90%, or at least about 95% sequence identity thereto. In some embodiments, the engineered CasX comprises a helical I-I domain comprising the amino acid sequence of SEQ ID NO: 296, or a sequence having at least about 90%, or at least about 95% sequence identity thereto. In some embodiments, the engineered CasX comprises an NTSB domain comprising the amino acid sequence of SEQ ID NO: 297, or a sequence having at least about 90%, or at least about 95% sequence identity thereto. In some embodiments, the engineered CasX comprises a helical I-II domain comprising the amino acid sequence of SEQ ID NO: 49847, or a sequence having at least about 90%, or at least about 95% sequence identity thereto. In some embodiments, the engineered CasX comprises an OBD-II domain comprising the amino acid sequence of SEQ ID NO: 300, or a sequence having at least about 90%, or at least about 95% sequence identity thereto. In some embodiments, the engineered CasX comprises a RuvC-I domain comprising the amino acid sequence of SEQ ID NO: 301, or a sequence having at least about 90%, or at least about 95% sequence identity thereto. In some embodiments, the engineered CasX comprises a TSL domain comprising the amino acid sequence of SEQ ID NO: 302, or a sequence having at least about 90%, or at least about 95% sequence identity thereto. In some embodiments, the engineered CasX comprises a RuvC-II domain comprising the amino acid sequence of SEQ ID NO: 303, or a sequence having at least about 90%, or at least about 95% sequence identity thereto. In another particular embodiment, the disclosure provides an engineered CasX having the sequence of SEQ ID NO: 266 (CasX variant 812), or a sequence having at least about 70%, at least about 80%, at least about 90%, or at least about 95%, or at least about 95%, or at least about 96%, or at least about 97%, or at least about 98%, or at least about 99% sequence identity thereto, wherein the engineered CasX exhibits improved specificity compared to CasX variant 515 (SEQ ID NO: 228).

[0175] The engineered CasX of the disclosure have one or more improved characteristics compared to a CasX protein from which it was derived; e.g., CasX 515 or the CasX proteins of Table 9 (SEQ ID NOS: 492-500). Exemplary improved characteristics of the engineered CasX embodiments include, but are not limited to improved ability to utilize a greater spectrum of PAM sequences in the editing and/or binding of target nucleic acid, increased nuclease activity, improved editing efficiency, improved editing specificity for the target nucleic acid, decreased off-target editing or cleavage, increased percentage of a eukaryotic genome that can be efficiently edited, increased activity of the nuclease, and improved protein:ERS (RNP) complex stability. In particular, the engineered CasX proteins of the disclosure have an enhanced ability to efficiently edit and/or bind target DNA, when complexed with an ERS as an RNP, utilizing a PAM TC motif, including PAM sequences selected from TTC, ATC, GTC, or CTC, compared to an RNP of a reference CasX protein and a reference gRNA. In the foregoing, the PAM sequence is located at least 1 nucleotide 5′ to the non-target strand of the protospacer having identity with the targeting sequence of the ERS in an assay system compared to the editing efficiency and/or binding of an RNP comprising the reference CasX protein and reference gRNA in a comparable assay system.

[0176] Additional engineered CasX of the disclosure include the sequences of SEQ ID NOS: 247-294, as set forth in Table 6, or a sequence having at least about 70%, at least about 80%, at least about 90%, at least about 95%, at least about 98%, at least about 99% sequence identity thereto.

TABLE 6
CasX Protein Sequences

| SEQ ID NO | CasX Protein No. |
|---|---|
| 247 | 793 |
| 248 | 794 |
| 249 | 795 |
| 250 | 796 |
| 251 | 797 |
| 252 | 798 |
| 253 | 799 |
| 254 | 800 |
| 255 | 801 |
| 256 | 802 |
| 257 | 803 |
| 258 | 804 |
| 259 | 805 |
| 260 | 806 |
| 261 | 807 |
| 262 | 808 |
| 263 | 809 |
| 264 | 810 |
| 265 | 811 |
| 266 | 812 |
| 267 | 813 |
| 268 | 814 |
| 269 | 815 |
| 270 | 816 |
| 271 | 817 |
| 272 | 818 |
| 273 | 819 |
| 274 | 820 |
| 275 | 821 |
| 276 | 822 |
| 277 | 823 |
| 278 | 824 |
| 279 | 825 |
| 280 | 826 |
| 281 | 827 |
| 282 | 828 |
| 283 | 829 |
| 284 | 830 |
| 285 | 831 |
| 286 | 832 |
| 287 | 833 |
| 288 | 834 |
| 289 | 835 |
| 290 | 836 |
| 291 | 837 |
| 292 | 838 |
| 293 | 839 |
| 294 | 840 |

c. Engineered CasX Proteins with Domains from Multiple Source Proteins

[0177] Also contemplated within the scope of the disclosure are engineered chimeric CasX proteins. As used herein, a “chimeric CasX” protein refers to both a CasX protein containing at least two domains from different sources, as well a CasX protein containing at least one domain that itself is chimeric. Accordingly, in some embodiments, an engineered chimeric CasX protein is one that includes at least two domains isolated or derived from different sources, such as from two different naturally occurring CasX proteins, (e.g., from two different reference CasX proteins), or from two different CasX variant proteins. In the case of split or non-contiguous domains such as helical I, RuvC and OBD, a portion of the non-contiguous domain can be replaced with the corresponding portion from any other source. For example, the helical I-II domain in SEQ ID NO: 2 can be replaced with the corresponding helical I-II sequence from SEQ ID NO: 1, and the like. In some embodiments, the first domain can be selected from the group consisting of the NTSB, TSL, helical I-I, helical I-II, helical II, OBD-I, OBD-II, RuvC-I, and RuvC-II domains. In some embodiments, the second domain is selected from the group consisting of the NTSB, TSL, helical I-I, helical I-II, helical II, OBD-I, OBD-II, RuvC-I, and RuvC-II domains with the second domain being different from the foregoing first domain. Domain sequences from reference CasX proteins, and their coordinates, are shown in Table 4.

[0178] In some embodiments, the NTSB domain of the engineered CasX derived from SEQ ID NO: 2 is substituted with the corresponding NTSB sequence from SEQ ID NO: 1, or a sequence having at least about 70%, at least about 80%, at least about 90%, or at least about 95% identity thereto, resulting in a chimeric CasX protein. In some embodiments, the helical I-II domain of the engineered CasX derived from SEQ ID NO: 2 is substituted with the corresponding helical I-II sequence from SEQ ID NO: 1, or a sequence having at least about 70%, at least about 80%, at least about 90%, or at least about 95% identity thereto, resulting in a chimeric CasX protein. In some embodiments, the helical I-II domain and the NTSB domain of the engineered CasX derived from SEQ ID NO: 2 is substituted with the corresponding helical I-II from SEQ ID NO: 1, or a sequence having 1, 2, 3, 4, or 5 mismatches thereto, and the NTSB sequence from SEQ ID NO: 1, or a sequence or a sequence having 1, 2, 3, 4, or 5 mismatches thereto, resulting in a chimeric CasX protein. Exemplary chimeric CasX include, but are not limited to the sequences of SEQ ID NOS: 247-294, 24916-49628, 49746-49747, and 49871-49873, which have the substitution of the NTSB and helical I-II domains from SEQ ID NO: 1, while the other domains are originally derived from SEQ ID NO: 2, where the engineered CasX have additional amino acid changes (i.e., 1, 2, 3, 4, or 5 mismatches) at select locations relative to the domains of the reference CasX.

TABLE 7
CasX 515 domain sequences

| Domain | SEQ ID NO | Amino Acid Sequence |
|---|---|---|
| OBD-I | 295 | QEIKRINKIRRRLVKDSNTKKAGKTGPMKTLLVRVMTPDLRERLENLRKKPENIPQ |
| Helical I-I | 296 | PISNTSRANLNKLLTDYTEMKKAILHVYWEEFQKDPVGLMSRVA |
| NTSB | 297 | QPASKKIDQNKLKPEMDEKGNLTTAGFACSQCGQPLFVYKLEQVSEKGKAYTNYFG |
| | | RCNVAEHEKLILLAQLKPEKDSDEAVTYSLGKFGQ |
| Helical I- | 298 | RALDFYSIHVTKESTHPVKPLAQIAGNRYASGPVGKALSDACMGTIASFLSKYQDI |
| II | | IIEHQKVVKGNQKRLESLRELAGKENLEYPSVTLPPQPHTKEGVDAYNEVIARVRM |
| | | WVNLNLWQKLKLSRDDAKPLLRLKGFPSF |
| Helical II | 299 | PLVERQANEVDWWDMVCNVKKLINEKKEDGKVFWQNLAGYKRQEALRPYLSSEEDR |
| | | KKGKKFARYQLGDLLLHLEKKHGEDWGKVYDEAWERIDKKVEGLSKHIKLEEERRS |
| | | EDAQSKAALTDWLRAKASFVIEGLKEADKDEFCRCELKLOKWYGDLRGKPFAIEAE |
| OBD-II | 300 | NSILDISGFSKQYNCAFIWQKDGVKKLNLYLIINYFKGGKLRFKKIKPEAFEANRF |
| | | YTVINKKSGEIVPMEVNENFDDPNLIILPLAFGKRQGREFIWNDLLSLETGSLKLA |
| | | NGRVIEKTLYNRRTRQDEPALFVALTFERREVLD |
| RuvC-I | 301 | SSNIKPMNLIGVDRGENIPAVIALTDPEGCPLSRFKDSLGNPTHILRIGESYKEKQ |
| | | RTIQAKKEVEQRRAGGYSRKYASKAKNLADDMVRNTARDLLYYAVTQDAMLIFENL |
| | | SRGFGROGKRTFMAERQYTRMEDWLTAKLAYEGLPSKTYLSKTLAQYTSKTC |
| TSL | 302 | SNCGFTITSADYDRVLEKLKKTATGWMTTINGKELKVEGQITYYNRYKRQNVVKDL |
| | | SVELDRLSEESVNNDISSWTKGRSGEALSLLKKRFSHRPVQEKFVCLNCGFETH |
| RuvC-II | 303 | ADEQAALNIARSWLFLRSQEYKKYQTNKTTGNTDKRAFVETWQSFYRKKLKEVWKP |
| | | AV |

d. Protein Affinity for the ERS

[0179] In some embodiments, an engineered CasX protein has improved affinity for the ERS relative to a CasX protein from which it was derived, leading to the formation of the ribonucleoprotein complex. Without wishing to be bound by theory, in some embodiments amino acid changes in the helical I domain can increase the binding affinity of the engineered CasX protein with the ERS sequence, while changes in the helical II domain can increase the binding affinity of the engineered CasX protein with the guide scaffold stem loop, and changes in the oligonucleotide binding domain (OBD) increase the binding affinity of the engineered CasX protein with the ERS triplex. Increased affinity of the engineered CasX protein for the ERS may, for example, result in a lower K_{d} for the generation of an RNP complex, which can, in some cases, result in a more stable RNP complex formation. In some embodiments, increased affinity of the engineered CasX protein for the ERS results in increased stability of the RNP complex when delivered to human cells. This increased stability can affect the function and utility of the complex in the cells of a subject, as well as result in improved pharmacokinetic properties in blood, when delivered to a subject. In some embodiments, increased affinity of the engineered CasX protein, and the resulting increased stability of the RNP complex, allows for a lower dose of the engineered CasX protein to be delivered to the subject or cells while still having the desired activity, for example in vivo or in vitro gene editing. In some embodiments, a higher affinity (tighter binding) of an engineered CasX protein to an ERS allows for a greater amount of editing events when both the engineered CasX protein and the ERS remain in an RNP complex. Increased editing events can be assessed using editing assays described herein. In some embodiments, the K_{d} of an engineered CasX protein for an ERS is increased relative to a parental CasX protein mutagenized to create the engineered CasX. In some embodiments, the K_{d} of an engineered CasX for an ERS is increased relative to the CasX from which it was derived by a factor of at least about 1.1, at least about 1.2, at least about 1.3, at least about 1.4, at least about 1.5, at least about 1.6, at least about 1.7, at least about 1.8, at least about 1.9, at least about 2, at least about 3, at least about 4, at least about 5, at least about 6, at least about 7, at least about 8, at least about 9, at least about 10, at least about 15, at least about 20, at least about 25, at least about 30, at least about 35, at least about 40, at least about 45, at least about 50, at least about 60, at least about 70, at least about 80, at least about 90, or at least about 100. In some embodiments, the engineered CasX has about 1.1 to about 100-fold increased binding affinity to the ERS relative to the CasX from which it was derived; e.g., CasX 515.

[0180] In some embodiments, increased affinity of the engineered CasX protein for the ERS results in increased stability of the ribonucleoprotein complex when delivered to mammalian cells, including in vivo delivery to a subject. This increased stability can affect the function and utility of the complex in the cells of a subject, as well as result in improved pharmacokinetic properties in blood, when delivered to a subject. In some embodiments, increased affinity of the engineered CasX protein, and the resulting increased stability of the ribonucleoprotein complex, allows for a lower dose of the engineered CasX protein to be delivered to the subject or cells while still having the desired activity; for example in vivo or in vitro gene editing. The increased ability to form RNP and keep them in stable form can be assessed using assays such as the in vitro cleavage assays described in the Examples herein. In some embodiments, RNP comprising the engineered CasX of the disclosure are able to achieve a k_{cleave} rate when complexed as an RNP that is at last 2-fold, at least 5-fold, or at least 10-fold higher compared to RNP comprising a CasX from which it was derived; e.g., CasX 515.

[0181] Methods of measuring engineered CasX protein binding affinity for an ERS and determination of the cleavage competent fractions include in vitro methods using purified engineered CasX protein and ERS, as described in the Examples. The binding affinity for engineered CasX proteins can be measured by fluorescence polarization if the ERS or engineered CasX protein is tagged with a fluorophore. Alternatively, or in addition, binding affinity can be measured by biolayer interferometry, electrophoretic mobility shift assays (EMSAs), or filter binding. Additional standard techniques to quantify absolute affinities of RNA binding proteins such as the engineered CasX of the disclosure for specific ERS include, but are not limited to, isothermal calorimetry (ITC), and surface plasmon resonance (SPR), as well as the methods of the Examples.

e. Affinity for Target Nucleic Acid

[0182] In some embodiments, an engineered CasX protein has increased binding affinity for a target nucleic acid relative to the affinity of a CasX protein from which it was derived for a target nucleic acid. Engineered CasX with higher affinity for their target nucleic acid may, in some embodiments, cleave the target nucleic acid sequence more rapidly than a reference CasX protein that does not have increased affinity for the target nucleic acid.

[0183] In some embodiments, the improved affinity for the target nucleic acid comprises improved affinity for the target sequence or protospacer sequence of the target nucleic acid, improved affinity for the PAM sequence, an improved ability to search DNA for the target sequence, or any combinations thereof. Without wishing to be bound by theory, it is thought that CRISPR/Cas system proteins such as CasX may find their target sequences by one-dimension diffusion along a DNA molecule. The process is thought to include (1) binding of the ribonucleoprotein to the DNA molecule followed by (2) stalling at the target sequence, either of which may be, in some embodiments, affected by improved affinity of engineered CasX proteins for a target nucleic acid sequence, thereby improving function of the engineered CasX protein.

[0184] Without wishing to be bound by theory, it is possible that amino acid changes in the NTSB domain that increase the efficiency of unwinding, or capture, of a non-target nucleic acid strand in the unwound state, can increase the affinity of engineered CasX proteins for target nucleic acid. Alternatively, or in addition, amino acid changes in the NTSB domain that increase the ability of the NTSB domain to stabilize DNA during unwinding can increase the affinity of engineered CasX proteins for target nucleic acid. Alternatively, or in addition, amino acid changes in the OBD may increase the affinity of engineered CasX protein binding to the protospacer adjacent motif (PAM), thereby increasing affinity of the engineered CasX protein for target nucleic acid. Alternatively, or in addition, amino acid changes in the Helical I and/or II, RuvC and TSL domains that increase the affinity of the engineered CasX protein for the target nucleic acid strand can increase the affinity of the engineered CasX protein for target nucleic acid.

[0185] In some embodiments, binding affinity of an engineered CasX protein of the disclosure for a target nucleic acid molecule is increased relative to a CasX protein from which it was derived. In some embodiments, the engineered CasX protein has increased binding affinity to the target nucleic acid compared to the CasX 515 variant by a factor of at least about 1.1, at least about 1.2, at least about 1.3, at least about 1.4, at least about 1.5, at least about 1.6, at least about 1.7, at least about 1.8, at least about 1.9, at least about 2, at least about 3, at least about 4, at least about 5, at least about 6, at least about 7, at least about 8, at least about 9, at least about 10, at least about 15, at least about 20, at least about 25, at least about 30, at least about 35, at least about 40, at least about 45, at least about 50, at least about 60, at least about 70, at least about 80, at least about 90, or at least about 100-fold greater.

[0186] Methods of measuring CasX protein affinity for a target and/or non-target nucleic acid molecule may include electrophoretic mobility shift assays (EMSAs), filter binding, isothermal calorimetry (ITC), and surface plasmon resonance (SPR), fluorescence polarization and biolayer interferometry (BLI). Further methods of measuring CasX protein affinity for a target include the in vitro biochemical assays of the Examples that measure DNA cleavage events over time.

[0187] In some embodiments, an engineered CasX protein with improved target nucleic acid affinity has increased affinity for or the ability to utilize specific PAM sequences other than the canonical TTC PAM recognized by the reference CasX protein of SEQ ID NO: 2, including PAM sequences selected from the group consisting of ATC, GTC, and CTC, thereby increasing the amount of target nucleic acid that can be edited compared to wild-type CasX nucleases or to CasX variants 491 or 515. Without wishing to be bound by theory, it is possible that these engineered CasX may interact more strongly with DNA overall and may have an increased ability to access and edit sequences within the target nucleic acid due to the ability to more strongly bind or utilize PAM sequences beyond those of wild-type reference CasX or the nucleases of CasX 491 or 515, thereby allowing for a more efficient search process of the CasX protein for the target sequence. A higher overall affinity for DNA also, in some embodiments, can increase the frequency at which a CasX protein can effectively start and finish a binding and unwinding step, thereby facilitating target strand invasion and R-loop formation, and ultimately the cleavage of a target nucleic acid sequence.

f. Improved Specificity for a Target Site

[0188] In some embodiments, an engineered CasX protein has improved specificity for a target nucleic acid sequence relative to a CasX protein from which it was derived. As used herein, “specificity,” sometimes referred to as “target specificity,” refers to the degree to which a CRISPR/Cas system ribonucleoprotein complex cleaves off-target sequences that are similar, but not identical to the target nucleic acid sequence; e.g., an engineered CasX RNP with a higher degree of specificity would exhibit reduced off-target effects, or cleavage of sequences relative to a CasX protein from which it was derived. Without wishing to be bound by theory, it is possible that amino acid changes in the helical I and II domains that increase the specificity of the engineered CasX protein for the target nucleic acid strand can increase the specificity of the engineered CasX protein for the target nucleic acid overall. In some embodiments, amino acid changes that increase specificity of engineered CasX proteins for target nucleic acid may also result in decreased affinity of engineered CasX proteins for DNA.

[0189] The specificity, and the reduction of potentially deleterious off-target effects, of CRISPR/Cas system proteins can be vitally important in order to achieve an acceptable therapeutic index for use in mammalian subjects. As used herein, “off-target effects” refers to off-target effects of unintended cleavage and mutations at untargeted genomic sites showing a similar but not an identical sequence compared to the target site. In some embodiments, the off-target effects exhibited by the engineered CasX complexed with an ERS and linked targeting sequence is less than about 5%, less than about 4%, less than 3%, less than about 2%, less than about 1%, less than about 0.5%, less than 0.1% in cells. In some embodiments the off-target effects are determined in silico. In some embodiments the off-target effects are determined in an in vitro cell-free assay. In some embodiments the off-target effects are determined in a cell-based assay. In some embodiments, the engineered CasX protein comprising a pair of mutations as depicted in Table 22, or further variations thereof, and demonstrates increased on-target editing activity, increased specificity (or decreased off-target activity), increased specificity ratio, or a combination thereof relative to SEQ ID NO: 228 (CasX variant 515).

[0190] Methods of testing CasX protein (such as engineered or reference CasX) target specificity may include guide and Circularization for In vitro Reporting of Cleavage Effects by Sequencing (CIRCLE-seq), or similar methods. In brief, in CIRCLE-seq techniques, genomic DNA is sheared and circularized by ligation of stem-loop adapters, which are nicked in the stem-loop regions to expose 4 nucleotide palindromic overhangs. This is followed by intramolecular ligation and degradation of remaining linear DNA. Circular DNA molecules containing a CasX cleavage site are subsequently linearized with CasX, and adapter adapters are ligated to the exposed ends followed by high-throughput sequencing to generate paired end reads that contain information about the off-target site. Additional assays that can be used to detect off-target events, and therefore CasX protein specificity include assays used to detect and quantify indels (insertions and deletions) formed at those selected off-target sites such as mismatch-detection nuclease assays and next generation sequencing (NGS). Exemplary mismatch-detection assays include nuclease assays, in which genomic DNA from cells treated with CasX and ERS is PCR amplified, denatured and rehybridized to form hetero-duplex DNA, containing one wild-type strand and one strand with an indel. Mismatches are recognized and cleaved by mismatch detection nucleases, such as Surveyor nuclease or T7 endonuclease I. Methods to evaluate the specificity of the engineered CasX, along with supporting data demonstrating improved specificity of embodiments of engineered CasX, are described in the Examples.

g. Protospacer and PAM Sequences

[0191] Herein, the protospacer is defined as the DNA sequence complementary to the targeting sequence of the guide RNA and the DNA complementary to that sequence, referred to as the target strand and non-target strand, respectively. As used herein, the PAM is a nucleotide sequence proximal to the protospacer that, in conjunction with the targeting sequence of the guide RNA, helps the orientation and positioning of the CasX for the potential cleavage of the protospacer strand(s).

[0192] PAM sequences may be degenerate, and specific RNP constructs may have different preferred and tolerated PAM sequences that support different efficiencies of cleavage. Following convention, unless stated otherwise, the disclosure refers to both the PAM and the protospacer sequence and their directionality according to the orientation of the non-target strand. This does not imply that the PAM sequence of the non-target strand, rather than the target strand, is determinative of cleavage or mechanistically involved in target recognition. For example, when reference is to a TTC PAM, it may in fact be the complementary GAA sequence that is required for target cleavage, or it may be some combination of nucleotides from both strands. In the case of the CasX proteins disclosed herein, the PAM is located 5′ of the protospacer with a single nucleotide separating the PAM from the first nucleotide of the protospacer. Thus, in the case of reference CasX, a TTC PAM should be understood to mean a sequence following the formula 5′- . . . NNTTCN(protospacer)NNNNNN . . . 3′ (SEQ ID NO: 304) where ‘N’ is any DNA nucleotide and ‘(protospacer)’ is a DNA sequence having identity with the targeting sequence of the guide RNA. In the case of an engineered CasX with expanded PAM recognition, a TTC, CTC, GTC, or ATC PAM should be understood to mean a sequence following the formulae: 5′- . . . NNTTCN(protospacer)NNNNNN . . . 3′ (SEQ ID NO: 304); 5′- . . . NNCTCN(protospacer)NNNNNN . . . 3′ (SEQ ID NO: 305); 5′- . . . NNGTCN(protospacer)NNNNNN . . . 3′ (SEQ ID NO: 306); or 5′- . . . NNATCN(protospacer)NNNNNN . . . 3′ (SEQ ID NO: 307). Alternatively, a TC PAM should be understood to mean a sequence following the formula 5′- . . . NNNTCN(protospacer)NNNNNN . . . 3′ (SEQ ID NO: 308).

[0193] In some embodiments, the engineered CasX proteins of the disclosure have an improved ability to efficiently edit and/or bind target nucleic acid, when complexed with an ERS as an RNP, utilizing a PAM TC motif, including PAM sequences selected from TTC, ATC, GTC, or CTC, (in a 5′ to 3′ orientation), compared to an RNP of an RNP of a CasX protein from which it was derived, such as CasX 515 complexed with gRNA 174. In the foregoing, the PAM sequence is located at least 1 nucleotide 5′ to the non-target strand of the protospacer having identity with the targeting sequence of the ERS in an assay system. In one embodiment, an RNP of an engineered CasX and ERS exhibits greater editing and/or binding of a target sequence in the target nucleic acid compared to an RNP of a CasX protein from which it was derived, such as CasX 515, and gRNA 174 in a comparable assay system, wherein the PAM sequence of the target DNA is TTC. In another embodiment, an RNP of an engineered CasX and ERS exhibits greater editing and/or binding of a target sequence in the target nucleic acid compared to an RNP comprising an RNP of a CasX protein from which it was derived, such as CasX 515 and gRNA 174 in a comparable assay system, wherein the PAM sequence of the target DNA is ATC. In another embodiment, an RNP of an engineered CasX and ERS exhibits greater editing and/or binding of a target sequence in the target nucleic acid compared to an RNP comprising an RNP of a CasX protein from which it was derived, such as CasX 515, and gRNA 174 in a comparable assay system, wherein the PAM sequence of the target DNA is CTC. In another embodiment, an RNP of an engineered CasX and ERS exhibits greater editing and/or binding of a target sequence in the target nucleic acid compared to an RNP comprising a an RNP of a CasX protein from which it was derived and gRNA 174 in a comparable assay system, wherein the PAM sequence of the target DNA is GTC. In the foregoing embodiments, the increased editing and/or binding affinity for the one or more PAM sequences is at least about 1.5-fold, at least about 2-fold, at least about 4-fold, at least about 10-fold, at least about 20-fold, at least about 30-fold, or at least about 40-fold greater or more compared to the editing and/or binding affinity of an RNP of a CasX protein from which it was derived and gRNA 174 for the PAM sequences.

h. Catalytic Activity

[0194] The ribonucleoprotein complex of the eCasX:ERS systems disclosed herein comprise an engineered CasX complexed with an ERS that binds to a target nucleic acid and cleaves the target nucleic acid. In some embodiments, an engineered CasX protein has improved catalytic activity relative to a CasX protein from which it was derived. Without wishing to be bound by theory, it is thought that in some cases cleavage of the target strand can be a limiting factor for Cas12-like molecules in creating a dsDNA break. In some embodiments, engineered CasX proteins improve bending of the target strand of DNA and cleavage of this strand, resulting in an improvement in the overall efficiency of dsDNA cleavage by the CasX ribonucleoprotein complex.

[0195] Engineered CasX with increased double-strand nuclease activity can be generated, for example, through amino acid changes in the RuvC nuclease domain. In the foregoing, the engineered CasX generates a double-stranded break within 18-26 nucleotides 5′ of a PAM site on the target strand and 10-18 nucleotides 3′ on the non-target strand. Nuclease activity can be assayed by a variety of methods, including those of the Examples. In some embodiments, an engineered CasX has a k_{cleave} constant that is improved at least about 10%, at least about 20%, at least about 30%, at least about 40%, or at least about 50% or more compared to a CasX protein from which it was derived.

[0196] In some embodiments, an engineered CasX protein has the improved characteristic of forming RNP with ERS that result in a higher percentage of cleavage-competent RNP compared to an RNP of a CasX protein from which it was derived and the gRNA variant. By cleavage competent, it is meant that the RNP that is formed has the ability to cleave the target nucleic acid. In some embodiments, the RNP of the engineered CasX and the ERS exhibit at least a 2-fold, or at least a 3-fold, or at least a 4-fold, or at least a 5-fold, or at least a 10-fold cleavage rate compared to an RNP of a CasX protein from which it was derived. In the foregoing embodiment, the improved competency rate can be demonstrated in an in vitro assay, such as described in the Examples.

[0197] In some embodiments, the disclosure provides engineered CasX proteins that are catalytically dead but retains the ability to bind a target nucleic acid. An exemplary catalytically dead engineered CasX protein comprises one or more mutations in the active site of the RuvC domain of the CasX protein. In some embodiments, a catalytically dead engineered CasX protein comprises substitutions at residues 672, 769 and/or 935 relative to the sequence of SEQ ID NO: 1. In one embodiment, a catalytically dead engineered CasX protein comprises substitutions of D672A, E769A and/or D935A relative to the reference CasX protein of SEQ ID NO: 1. In other embodiments, a catalytically dead engineered CasX protein comprises substitutions at amino acids 659, 756 and/or 922 relative to the reference CasX protein of SEQ ID NO: 2. In some embodiments, a catalytically dead engineered CasX protein comprises D659A, E756A and/or D922A substitutions relative to the reference CasX protein of SEQ ID NO: 2. In some embodiments, the disclosure provides a catalytically-dead engineered CasX of any one of SEQ ID NOS: 156, 739-907, 739-907, 11568-22227, 23572-24915, and 49719-49735 comprising the foregoing mutations to render them catalytically dead.

i. Engineered CasX Fusion Proteins

[0198] In some embodiments, the disclosure provides engineered CasX proteins comprising a heterologous protein fused to the CasX, including the engineered CasX of any of the embodiments described herein. This includes engineered CasX comprising N-terminal, C-terminal, or internal fusions of the CasX to a heterologous protein or domain thereof.

[0199] In some embodiments, the engineered CasX fusion protein comprises any one of the sequences of SEQ ID NOS: 247-294, 24916-49628, 49746-49747, or 49871-49873 fused to one or more proteins or domains thereof that have a different activity of interest or impart a different functional property, resulting in a fusion protein.

[0200] A variety of heterologous polypeptides are suitable for inclusion in an engineered CasX fusion protein of the disclosure. In some cases, the fusion partner can modulate transcription (e.g., inhibit transcription, increase transcription) of a target nucleic acid. For example, in some cases the fusion partner is a protein (or a domain from a protein) that inhibits transcription (e.g., a transcriptional repressor, a protein that functions via recruitment of transcription inhibitor proteins, modification of target nucleic acid such as methylation, recruitment of a DNA modifier, modulation of histones associated with target nucleic acid, recruitment of a histone modifier such as those that modify acetylation and/or methylation of histones, and the like). In some cases, the fusion partner is a protein (or a domain from a protein) that increases transcription (e.g., a transcription activator, a protein that acts via recruitment of transcription activator proteins, modification of target nucleic acid such as demethylation, recruitment of a DNA modifier, modulation of histones associated with target nucleic acid, recruitment of a histone modifier such as those that modify acetylation and/or methylation of histones, and the like).

[0201] In some cases, a fusion partner has enzymatic activity that modifies a target nucleic acid sequence; e.g., nuclease activity, methyltransferase activity, demethylase activity, DNA repair activity, DNA damage activity, deamination activity, dismutase activity, alkylation activity, depurination activity, oxidation activity, pyrimidine dimer forming activity, integrase activity, transposase activity, recombinase activity, polymerase activity, ligase activity, helicase activity, photolyase activity or glycosylase activity.

[0202] Examples of proteins (or fragments thereof) that can be used as a fusion partner to decrease transcription include but are not limited to: transcriptional repressors such as the Kruppel associated box (KRAB or SKD); KOX1 repression domain; the Mad mSIN3 interaction domain (SID); the ERF repressor domain (ERD), the SRDX repression domain (e.g., for repression in plants), and the like; histone lysine methyltransferases such as Pr-SET7/8, SUV4-20H1, RIZI, and the like; histone lysine demethylases such as JMJD2A/JHDM3A, JMJD2B, JMJD2C/GASC1, JMJD2D, JARID1A/RBP2, JARID1B/PLU-1, JARID 1C/SMCX, JARID1D/SMCY, and the like; histone lysine deacetylases such as HDAC1, HDAC2, HDAC3, HDAC8, HDAC4, HDAC5, HDAC7, HDAC9, SIRT1, SIRT2, HDAC11, and the like; DNA methylases such as HhaI DNA m5c-methyltransferase (M.HhaI), DNA methyltransferase 1 (DNMT1), DNA methyltransferase 3 alpha (DNMT3A) and subdomains such as DNMT3A catalytic domain and ATRX-DNMT3-DNMT3L domain (ADD), DNMT3L interaction domain (DNMT3L), DNA methyltransferase 3 beta (DNMT3B), Friend of GATA-1 (FOG), METI, DRM3 (plants), ZMET2, CMT1, CMT2 (plants), and the like; and periphery recruitment elements such as Lamin A, Lamin B, and the like.

[0203] In some cases, the fusion partner to an engineered CasX has enzymatic activity that modifies the target nucleic acid (e.g., ssRNA, dsRNA, ssDNA, dsDNA). Examples of enzymatic activity that can be provided by the fusion partner include but are not limited to: nuclease activity such as that provided by a restriction enzyme (e.g., FokI nuclease), methyltransferase activity such as that provided by a methyltransferase (e.g., Hhal DNA m5c-methyltransferase (M.Hhal), DNA methyltransferase 1 (DNMT1), DNA methyltransferase 3 alpha (DNMT3A) and subdomains such as DNMT3A catalytic domain and ATRX-DNMT3-DNMT3L domain (ADD), DNMT3L interaction domain (DNMT3L), DNA methyltransferase 3 beta (DNMT3B), METI, DRM3 (plants), ZMET2, CMT1, CMT2 (plants), and the like); demethylase activity such as that provided by a demethylase (e.g., Ten-Eleven Translocation (TET) dioxygenase 1 (TET 1 CD), TET1, DME, DML1, DML2, ROS1, and the like), DNA repair activity, DNA damage activity, deamination activity such as that provided by a deaminase (e.g., a cytosine deaminase enzyme, e.g., an APOBEC protein such as rat apolipoprotein B mRNA editing enzyme, catalytic polypeptide 1 {APOBEC1}), dismutase activity, alkylation activity, depurination activity, oxidation activity, pyrimidine dimer forming activity, integrase activity such as that provided by an integrase and/or resolvase (e.g., Gin invertase such as the hyperactive mutant of the Gin invertase, GinH106Y; human immunodeficiency virus type 1 integrase (IN); Tn3 resolvase; and the like), transposase activity, recombinase activity such as that provided by a recombinase (e.g., catalytic domain of Gin recombinase), polymerase activity, ligase activity, helicase activity, photolyase activity, and glycosylase activity).

[0204] In some cases, an engineered CasX protein of the present disclosure is fused to a polypeptide selected from a domain for increasing transcription (e.g., a VP16 domain, a VP64 domain), a domain for decreasing transcription (e.g., a KRAB domain, e.g., from the Kox1 protein), a core catalytic domain of a histone acetyltransferase (e.g., histone acetyltransferase p300), a protein/domain that provides a detectable signal (e.g., a fluorescent protein such as GFP), a nuclease domain (e.g., a Fokl nuclease), or a base editor (e.g., cytidine deaminase such as APOBEC1).

[0205] In some cases, an engineered CasX protein of the present disclosure can include an endosomal escape peptide. In some cases, an endosomal escape polypeptide comprises the amino acid sequence GLFXALLXLLXSLWXLLLXA (SEQ ID NO: 309), wherein each X is independently selected from lysine, histidine, and arginine. In some cases, an endosomal escape polypeptide comprises the amino acid sequence GLFHALLHLLHSLWHLLLHA (SEQ ID NO: 310), or HHHHHHHHH (SEQ ID NO: 311). In some embodiments, an engineered CasX comprises a sequence of any one of the sequences of SEQ ID NOS: 247-294, 24916-49628, 49746-49747, or 49871-49873 and an endosomal escape polypeptide.

[0206] Additionally or alternatively, an engineered CasX protein of the present disclosure may be fused to a polypeptide permeant domain to promote uptake by the cell. A number of permeant domains are known in the art and may be used in the non-integrating polypeptides of the present disclosure, including peptides, peptidomimetics, and non-peptide carriers. For example, WO2017/106569 and US20180363009A1, incorporated by reference herein in its entirety, describe fusion of a Cas protein with one or more nuclear localization sequences (NLS) to facilitate cell uptake. In other embodiments, a permeant peptide may be derived from the third alpha helix of Drosophila melanogaster transcription factor Antennapaedia, referred to as penetratin, which comprises the amino acid sequence RQIKIWFQNRRMKWKK (SEQ ID NO: 312). As another example, the permeant peptide comprises the HIV-1 tat basic region amino acid sequence, which may include, for example, amino acids 49-57 of naturally-occurring tat protein. Other permeant domains include poly-arginine motifs, for example, the region of amino acids 34-56 of HIV-1 Rev protein, nona-arginine, octa-arginine, and the like. The site at which the fusion is made may be selected in order to optimize the biological activity, secretion or binding characteristics of the polypeptide. The optimal site will be determined by routine experimentation.

[0207] In some embodiments, a heterologous polypeptide (a fusion partner) for use with an engineered CasX provides for subcellular localization; i.e., the heterologous polypeptide contains a subcellular localization sequence (e.g., a nuclear localization signal (NLS) for targeting to the nucleus, a sequence to keep the fusion protein out of the nucleus, e.g., a nuclear export sequence (NES), a sequence to keep the fusion protein retained in the cytoplasm, a mitochondrial localization signal for targeting to the mitochondria, a chloroplast localization signal for targeting to a chloroplast, an ER retention signal, and the like). In some embodiments, a subject RNA-guided polypeptide or a conditionally active RNA-guided polypeptide and/or subject CasX fusion protein does not include a NLS so that the protein is not targeted to the nucleus, which can be advantageous; e.g., when the target nucleic acid is an RNA that is present in the cytosol. In some embodiments, a fusion partner can provide a tag (i.e., the heterologous polypeptide is a detectable label) for ease of tracking and/or purification (e.g., a fluorescent protein, e.g., green fluorescent protein (GFP), yellow fluorescent protein (YFP), red fluorescent protein (RFP), cyan fluorescent protein (CFP), mCherry, tdTomato, and the like; a histidine tag, e.g., a 6×His tag; a hemagglutinin (HA) tag; a FLAG tag; a Myc tag; and the like).

[0208] In some cases, an engineered CasX protein includes (is fused to) a nuclear localization signal (NLS). Non-limiting examples of NLSs suitable for use with an engineered CasX include sequences having at least about 80%, at least about 90%, or at least about 95% identity or are identical to sequences derived from: the NLS of the SV40 virus large T-antigen, having the amino acid sequence PKKKRKV (SEQ ID NO: 313); the NLS from nucleoplasmin (e.g., the nucleoplasmin bipartite NLS with the sequence KRPAATKKAGQAKKKK (SEQ ID NO: 314); the c-myc NLS having the amino acid sequence PAAKRVKLD (SEQ ID NO: 315)) or RQRRNELKRSP (SEQ ID NO: 316); the hRNPA1 M9 NLS having the sequence NQSSNFGPMKGGNFGGRSSGPYGGGGQYFAKPRNQGGY (SEQ ID NO: 317); the sequence RMRIZFKNKGKDTAELRRRRVEVSVELRKAKKDEQILKRRNV (SEQ ID NO: 318) of the IBB domain from importin-alpha; the sequences VSRKRPRP (SEQ ID NO: 319) and PPKKARED (SEQ ID NO: 320) of the myoma T protein; the sequence PQPKKKPL (SEQ ID NO: 321) of human p53; the sequence SALIKKKKKMAP (SEQ ID NO: 322) of mouse c-abl IV; the sequences DRLRR (SEQ ID NO: 323) and PKQKKRK (SEQ ID NO: 324) of the influenza virus NS1; the sequence RKLKKKIKKL (SEQ ID NO: 325) of the Hepatitis virus delta antigen; the sequence REKKKFLKRR (SEQ ID NO: 326) of the mouse Mxl protein; the sequence KRKGDEVDGVDEVAKKKSKK (SEQ ID NO: 327) of the human poly(ADP-ribose) polymerase; the sequence RKCLQAGMNLEARKTKK (SEQ ID NO: 328) of the steroid hormone receptors (human) glucocorticoid; the sequence PRPRKIPR (SEQ ID NO: 329) of Borna disease virus P protein (BDV-P1); the sequence PPRKKRTVV (SEQ ID NO: 330) of hepatitis C virus nonstructural protein (HCV-NS5A); the sequence NLSKKKKRKREK (SEQ ID NO: 331) of LEF1; the sequence RRPSRPFRKP (SEQ ID NO: 332) of ORF57 simirae; the sequence KRPRSPSS (SEQ ID NO: 333) of EBV LANA; the sequence KRGINDRNFWRGENERKTR (SEQ ID NO: 334) of Influenza A protein; the sequence PRPPKMARYDN (SEQ ID NO: 335) of human RNA helicase A (RHA); the sequence KRSFSKAF (SEQ ID NO: 336) of nucleolar RNA helicase II; the sequence KLKIKRPVK (SEQ ID NO: 337) of TUS-protein; the sequence PKKKRKVPPPPAAKRVKLD (SEQ ID NO: 338) associated with importin-alpha; the sequence PKTRRRPRRSQRKRPPT (SEQ ID NO: 339) from the Rex protein in HTLV-1; the sequence SRRRKANPTKLSENAKKLAKEVEN (SEQ ID NO: 340) from the EGL-13 protein of Caenorhabditis elegans; and the sequences KTRRRPRRSQRKRPPT (SEQ ID NO: 341), RRKKRRPRRKKRR (SEQ ID NO: 342), PKKKSRKPKKKSRK (SEQ ID NO: 343), HKKKHPDASVNFSEFSK (SEQ ID NO: 344), QRPGPYDRPQRPGPYDRP (SEQ ID NO: 345), LSPSLSPLLSPSLSPL (SEQ ID NO: 346), RGKGGKGLGKGGAKRHRK (SEQ ID NO: 347), PKRGRGRPKRGRGR (SEQ ID NO: 348), PKKKRKVPPPPAAKRVKLD (SEQ ID NO: 349), PKKKRKVPPPPKKKRKV (SEQ ID NO: 350), PAKRARRGYKC (SEQ ID NO: 351), KLGPRKATGRW (SEQ ID NO: 352), PRRKREE (SEQ ID NO: 353), PYRGRKE (SEQ ID NO: 354), PLRKRPRR (SEQ ID NO: 355), PLRKRPRRGSPLRKRPRR (SEQ ID NO: 356), PAAKRVKLDGGKRTADGSEFESPKKKRKV (SEQ ID NO: 357), PAAKRVKLDGGKRTADGSEFESPKKKRKVGIHGVPAA (SEQ ID NO: 358), PAAKRVKLDGGKRTADGSEFESPKKKRKVAEAAAKEAAAKEAAAKA (SEQ ID NO: 359), PAAKRVKLDGGKRTADGSEFESPKKKRKVPG (SEQ ID NO: 360), KRKGSPERGERKRHW (SEQ ID NO: 361), KRTADSQHSTPPKTKRKVEFEPKKKRKV (SEQ ID NO: 362), and PKKKRKVGGSKRTADSQHSTPPKTKRKVEFEPKKKRKV (SEQ ID NO: 363). In general, NLS (or multiple NLSs) are of sufficient strength to drive accumulation of an engineered CasX fusion protein in the nucleus of a eukaryotic cell. Detection of accumulation in the nucleus may be performed by any suitable technique. For example, a detectable marker may be fused to an engineered CasX fusion protein such that location within a cell may be visualized. Cell nuclei may also be isolated from cells, the contents of which may then be analyzed by any suitable process for detecting protein, such as immunohistochemistry, Western blot, or enzyme activity assay. Accumulation in the nucleus may also be determined indirectly.

[0209] The disclosure contemplates assembly of multiple NLS in various configurations for linkage to the engineered CasX proteins of the embodiments. In some embodiments, one or more NLS are linked at or near the N-terminus of the engineered CasX protein. In other embodiments, one or more NLS are linked at or near the C-terminus of the engineered CasX protein. In other embodiments, one or more NLS are linked at or near both the N- and C-terminus of the engineered CasX protein. In some embodiments, the NLS linked to the N-terminus of the engineered CasX protein are identical to the NLS linked to the C-terminus. In some embodiments, the NLS linked to the N-terminus of the engineered CasX protein are different from the NLS linked to the C-terminus. In some embodiments, the NLS can be linked within 1, 2, 3, 4, 5, 6, 7, 8, 9 or 10 amino acids to the N- or C-terminus of the engineered CasX protein. In some embodiments, the NLS can be linked to the N- or C-terminus of the engineered CasX protein by a linker peptide, embodiments of which are described herein. In some embodiments, an NLS is linked to another NLS by a linker. In other embodiments, the NLS linked to the N-terminus of the engineered CasX protein are different to the NLS linked to the C-terminus. In some embodiments, the NLS linked to the N-terminus of the engineered CasX protein are selected from the group consisting of the N-terminal sequences as set forth in Table 8 (SEQ ID NOS: 364-410). In some embodiments, the NLS linked to the C-terminus of the engineered CasX protein are selected from the group consisting of the C-terminal sequences as set forth in Table 8 (SEQ ID NOS: 411-457).

[0210] Detection of accumulation in the nucleus of the engineered CasX fusion proteins may be performed by any suitable technique. For example, a detectable marker may be fused to an engineered CasX fusion protein such that location within a cell may be visualized. Cell nuclei may also be isolated from cells, the contents of which may then be analyzed by any suitable process for detecting protein, such as immunohistochemistry, Western blot, or enzyme activity assay. Accumulation in the nucleus may also be determined indirectly.

TABLE 8
NLS Sequences

| | SEQ ID | | SEQ ID |
|---|---|---|---|
| N-terminal Sequences | NO | C-terminal Sequences | NO |
| PKKKRKVGGSPKKKRKVSRQEIKRINKIRR | 364 | TLESPAAKRVKLDGGSPAAKRVKLDGG | 411 |
| RLVKDSNTKKAGKTGP | | SPAAKRVKLDGGSPAAKRVKLDGGSPA | |
| | | AKRVKLDGGSPAAKRVKLDTLESKRPA | |
| | | ATKKAGQAKKKKGGSKRPAATKKAGQA | |
| | | KKKKGGSKRPAATKKAGQAKKKKGGSK | |
| | | RPAATKKAGQAKKKK | |
| PKKKRKVGGSPKKKRKVGGSPKKKRKVGGS | 365 | TLESKRPAATKKAGQAKKKKTLESKRP | 412 |
| PKKKRKVSRQEIKRINKIRRRLVKDSNTKK | | AATKKAGQAKKKKGGSKRPAATKKAGQ | |
| AGKTGP | | AKKKKGGSKRPAATKKAGQAKKKKGGS | |
| | | KRPAATKKAGQAKKKKGGSKRPAATKK | |
| | | AGQAKKKKGGSKRPAATKKAGQAKKKK | |
| PKKKRKVGGSPKKKRKVGGSPKKKRKVGGS | 366 | TLESKRPAATKKAGQAKKKKGGSKRPA | 413 |
| PKKKRKVGGSPKKKRKVGGSPKKKRKVSRQ | | ATKKAGQAKKKKTLESPKKKRKVGGSP | |
| EIKRINKIRRRLVKDSNTKKAGKTGP | | KKKRKVGGSPKKKRKVGGSPKKKRKV | |
| PAAKRVKLDGGSPAAKRVKLDSRQEIKRIN | 367 | TLEGGSPKKKRKVTLESPKKKRKVGGS | 414 |
| KIRRRLVKDSNTKKAGKTGP | | PKKKRKVGGSPKKKRKVGGSPKKKRKV | |
| PAAKRVKLDGGSPAAKRVKLDGGSPAAKRV | 368 | TLEGGSPKKKRKVTLESPAAKRVKLDG | 415 |
| KLDGGSPAAKRVKLDSRQEIKRINKIRRRL | | GSPAAKRVKLDGGSPAAKRVKLDGGSP | |
| VKDSNTKKAGKTGP | | AAKRVKLD | |
| PAAKRVKLDGGSPAAKRVKLDGGSPAAKRV | 369 | TLEGGSPKKKRKVTLESPAAKRVKLDG | 416 |
| KLDGGSPAAKRVKLDGGSPAAKRVKLDGGS | | GSPAAKRVKLDGGSPAAKRVKLDGGSP | |
| PAAKRVKLDSRQEIKRINKIRRRLVKDSNT | | AAKRVKLDGGSPAAKRVKLDGGSPAAK | |
| KKAGKTGP | | RVKLD | |
| KRPAATKKAGQAKKKKSRDISRQEIKRINK | 370 | TLEGGSPKKKRKVTLESKRPAATKKAG | 417 |
| IRRRLVKDSNTKKAGKTGP | | QAKKKK | |
| KRPAATKKAGQAKKKKSRQEIKRINKIRRR | 371 | TLEGGSPKKKRKVTLESKRPAATKKAG | 418 |
| LVKDSNTKKAGKTGP | | QAKKKKGGSKRPAATKKAGQAKKKK | |
| KRPAATKKAGQAKKKKGGSKRPAATKKAGQ | 372 | TLEGGSPKKKRKVTLEGGSPKKKRKV | 419 |
| AKKKKSRDISRQEIKRINKIRRRLVKDSNT | | | |
| KKAGKTGP | | | |
| KRPAATKKAGQAKKKKGGSKRPAATKKAGQ | 373 | TLEGGSPKKKRKVTLEGGSPKKKRKV | 420 |
| AKKKKGGSKRPAATKKAGQAKKKKGGSKRP | | | |
| AATKKAGQAKKKKSRDISRQEIKRINKIRR | | | |
| RLVKDSNTKKAGKTGP | | | |
| KRPAATKKAGQAKKKKGGSKRPAATKKAGQ | 374 | TLEGGSPKKKRKVTLEGGSPKKKRKV | 421 |
| AKKKKGGSKRPAATKKAGQAKKKKGGSKRP | | | |
| AATKKAGQAKKKKGGSKRPAATKKAGQAKK | | | |
| KKGGSKRPAATKKAGQAKKKKSRDISRQEI | | | |
| KRINKIRRRLVKDSNTKKAGKTGP | | | |
| PKKKRKVGGSPKKKRKVGGSPKKKRKVGGS | 375 | TLEGGSPKKKRKVTLEGGSPKKKRKV | 422 |
| PKKKRKVSRDISRQEIKRINKIRRRLVKDS | | | |
| NTKKAGKTGP | | | |
| PKKKRKVGGSPKKKRKVGGSPKKKRKVGGS | 376 | TLEGGSPKKKRKVTLEGGSPKKKRKV | 423 |
| PKKKRKVSRDISRQEIKRINKIRRRLVKDS | | | |
| NTKKAGKTGP | | | |
| PAAKRVKLDGGSPAAKRVKLDGGSPAAKRV | 377 | TLEVGPKRTADSQHSTPPKTKRKVEFE | 424 |
| KLDGGSPAAKRVKLDSRDISRQEIKRINKI | | PKKKRKVTLEGGSPKKKRKV | |
| RRRLVKDSNTKKAGKTGP | | | |
| PAAKRVKLDGGSPAAKRVKLDGGSPAAKRV | 378 | TLEVGGGSGGGSKRTADSQHSTPPKTK | 425 |
| KLDGGSPAAKRVKLDGGSPAAKRVKLDGGS | | RKVEFEPKKKRKVTLEGGSPKKKRKV | |
| PAAKRVKLDSRDISRQEIKRINKIRRRLVK | | | |
| DSNTKKAGKTGP | | | |
| KRPAATKKAGQAKKKKSRDISRQEIKRINK | 379 | TLEVAEAAAKEAAAKEAAAKAKRTADS | 426 |
| IRRRLVKDSNTKKAGKTGP | | QHSTPPKTKRKVEFEPKKKRKVTLEGG | |
| | | SPKKKRKV | |
| KRPAATKKAGQAKKKKGGSKRPAATKKAGQ | 380 | TLEVGPPKKKRKVGGSKRTADSQHSTP | 427 |
| AKKKKSRDISRQEIKRINKIRRRLVKDSNT | | PKTKRKVEFEPKKKRKVTLEGGSPKKK | |
| KKAGKTGP | | RKV | |
| PAAKRVKLDGGKRTADGSEFESPKKKRKVG | 381 | TLEVGPAEAAAKEAAAKEAAAKAPAAK | 428 |
| GSSRDISRQEIKRINKIRRRLVKDSNTKKA | | RVKLDTLEGGSPKKKRKV | |
| GKTGP | | | |
| PAAKRVKLDGGKRTADGSEFESPKKKRKVP | 382 | TLEVGPGGGSGGGSGGGSPAAKRVKLD | 429 |
| PPPGSRDISRQEIKRINKIRRRLVKDSNTK | | TLEVGPKRTADSQHSTPPKTKRKVEFE | |
| KAGKTGP | | PKKKRKV | |
| PAAKRVKLDGGKRTADGSEFESPKKKRKVG | 383 | TLEVGPPKKKRKVPPPPAAKRVKLDTL | 430 |
| IHGVPAAPGSRDISRQEIKRINKIRRRLVK | | EVGGGSGGGSKRTADSQHSTPPKTKRK | |
| DSNTKKAGKTGP | | VEFEPKKKRKV | |
| PAAKRVKLDGGKRTADGSEFESPKKKRKVG | 384 | TLEVGPPAAKRVKLDTLEVAEAAAKEA | 431 |
| GGSGGGSPGSRDISRQEIKRINKIRRRLVK | | AAKEAAAKAKRTADSQHSTPPKTKRKV | |
| DSNTKKAGKTGP | | EFEPKKKRKV | |
| PAAKRVKLDGGKRTADGSEFESPKKKRKVP | 385 | TLEVGPKRTADSQHSTPPKTKRKVEFE | 432 |
| GGGSGGGSPGSRDISRQEIKRINKIRRRLV | | PKKKRKVTLEVGPPKKKRKVGGSKRTA | |
| KDSNTKKAGKTGP | | DSQHSTPPKTKRKVEFEPKKKRKV | |
| PAAKRVKLDGGKRTADGSEFESPKKKRKVA | 386 | TLEVGGGSGGGSKRTADSQHSTPPKTK | 433 |
| EAAAKEAAAKEAAAKAPGSRDISRQEIKRI | | RKVEFEPKKKRKVTLEVGPAEAAAKEA | |
| NKIRRRLVKDSNTKKAGKTGP | | AAKEAAAKAPAAKRVKLD | |
| PAAKRVKLDGGKRTADGSEFESPKKKRKVP | 387 | GSKRPAATKKAGQAKKKKTLEVGPGGG | 434 |
| GSRDISRQEIKRINKIRRRLVKDSNTKKAG | | SGGGSGGGSPAAKRVKLD | |
| KTGP | | | |
| PAAKRVKLDGGSPKKKRKVGGSSRDISRQE | 388 | GSKRPAATKKAGQAKKKKTLEVGPPKK | 435 |
| IKRINKIRRRLVKDSNTKKAGKTGP | | KRKVPPPPAAKRVKLD | |
| PAAKRVKLDPPPPKKKRKVPGSRDISRQEI | 389 | GSKRPAATKKAGQAKKKKTLEVGPPAA | 436 |
| KRINKIRRRLVKDSNTKKAGKTGP | | KRVKLD | |
| PAAKRVKLDPGRSRDISRQEIKRINKIRRR | 390 | GSPKKKRKVTLEVGPKRTADSQHSTPP | 437 |
| LVKDSNTKKAGKTGP | | KTKRKVEFEPKKKRKV | |
| PKKKRKVSRDISRQEIKRINKIRRRLVKDS | 391 | GSKRPAATKKAGQAKKKKTLEVGGGSG | 438 |
| NTKKAGKTGP | | GGSKRTADSQHSTPPKTKRKVEFEPKK | |
| | | KRKV | |
| PAAKRVKLDGGKRTADGSEFESPKKKRKVG | 392 | GSKRPAATKKAGQAKKKKGSKRPAATK | 439 |
| GSSRDISRQEIKRINKIRRRLVKDSNTKKA | | KAGQAKKKK | |
| GKTGP | | | |
| PAAKRVKLDGGKRTADGSEFESPKKKRKVG | 393 | GSKRPAATKKAGQAKKKKGSKRPAATK | 440 |
| GGSGGGSPGSRDISRQEIKRINKIRRRLVK | | KAGQAKKKK | |
| DSNTKKAGKTGP | | | |
| PKKKRKVSRQEIKRINKIRRRLVKDSNTKK | 394 | GSKRPAATKKAGQAKKKKGSKRPAATK | 441 |
| AGKTGP | | KAGQAKKKK | |
| PKKKRKVGGSPKKKRKVGGSPKKKRKVGGS | 395 | GSPKKKRKVGSPKKKRKV | 442 |
| PKKKRKVSRQEIKRINKIRRRLVKDSNTKK | | | |
| AGKTGP | | | |
| PKKKRKVGGSPKKKRKVGGSPKKKRKVGGS | 396 | GGGSGGGSKRTADSQHSTPPKTKRKVE | 443 |
| PKKKRKVGGSPKKKRKVGGSPKKKRKVSRQ | | FEPKKKRKVGSKRPAATKKAGQAKKKK | |
| EIKRINKIRRRLVKDSNTKKAGKTGP | | | |
| PAAKRVKLDSRQEIKRINKIRRRLVKDSNT | 397 | GPPKKKRKVGGSKRTADSQHSTPPKTK | 444 |
| KKAGKTGP | | RKVEFEPKKKRKVGSKRPAATKKAGQA | |
| | | KKKK | |
| PAAKRVKLDGGSPAAKRVKLDSRQEIKRIN | 398 | TGGGPGGGAAAGSGSPKKKRKVGSGSG | 445 |
| KIRRRLVKDSNTKKAGKTGP | | SKRPAATKKAGQAKKKK | |
| PAAKRVKLDGGSPAAKRVKLDGGSPAAKRV | 399 | GPKRTADSQHSTPPKTKRKVEFEPKKK | 446 |
| KLDGGSPAAKRVKLDSRQEIKRINKIRRRL | | RKVGSKRPAATKKAGQAKKKK | |
| VKDSNTKKAGKTGP | | | |
| PAAKRVKLDGGSPAAKRVKLDGGSPAAKRV | 400 | AEAAAKEAAAKEAAAKAKRTADSQHST | 447 |
| KLDGGSPAAKRVKLDGGSPAAKRVKLDGGS | | PPKTKRKVEFEPKKKRKVGSPKKKRKV | |
| PAAKRVKLDSRQEIKRINKIRRRLVKDSNT | | | |
| KKAGKTGP | | | |
| KRPAATKKAGQAKKKKSRQEIKRINKIRRR | 401 | GPPKKKRKVPPPPAAKRVKLDGGGSGG | 448 |
| LVKDSNTKKAGKTGP | | GSKRTADSQHSTPPKTKRKVEFEPKKK | |
| | | RKV | |
| TSPKKKRKVALEYPYDVPDYA | 402 | GSPAAKRVKLDGGSPAAKRVKLDGGSP | 449 |
| | | AAKRVKLDGGSPAAKRVKLDGGSPAAK | |
| | | RVKLDGGSPAAKRVKLDGPPKKKRKVG | |
| | | GSKRTADSQHSTPPKTKRKVEFEPKKK | |
| | | RKV | |
| TLESKRPAATKKAGQAKKKKAPGEYPYDVP | 403 | GSPAAKRVKLGGSPAAKRVKLGGSPKK | 450 |
| DYA | | KRKVGGSPKKKRKVTGGGPGGGAAAGS | |
| | | GSPKKKRKVGSGS | |
| GSKRPAATKKAGQAKKKKYPYDVPDYA | 404 | GSKRPAATKKAGQAKKKKGGSKRPAAT | 451 |
| | | KKAGQAKKKKGPKRTADSQHSTPPKTK | |
| | | RKVEFEPKKKRKV | |
| TLESKRPAATKKAGQAKKKKGGSKRPAATK | 405 | GSKRPAATKKAGQAKKKKGGSKRPAAT | 452 |
| KAGQAKKKKAPGEYPYDVPDYATSPKKKRK | | KKAGQAKKKKAEAAAKEAAAKEAAAKA | |
| VALEYPYDVPDYA | | KRTADSQHSTPPKTKRKVEFEPKKKRK | |
| | | V | |
| TLESKRPAATKKAGQAKKKKGGSKRPAATK | 406 | GPPKKKRKVPPPPAAKRVKLD | 453 |
| KAGQAKKKKGGSKRPAATKKAGQAKKKKGG | | | |
| SKRPAATKKAGQAKKKKTSPKKKRKVALEY | | | |
| PYDVPDYA | | | |
| TLESKRPAATKKAGQAKKKKGGSKRPAATK | 407 | GSPAAKRVKLDGGSPAAKRVKLDGGSP | 454 |
| KAGQAKKKKGGSKRPAATKKAGQAKKKKGG | | AAKRVKLDGGSPAAKRVKLDGGSPAAK | |
| SKRPAATKKAGQAKKKKGGSKRPAATKKAG | | RVKLDGGSPAAKRVKLD | |
| QAKKKKGGSKRPAATKKAGQAKKKKTSPKK | | | |
| KRKVALEYPYDVPDYA | | | |
| TLESPKKKRKVGGSPKKKRKVGGSPKKKRK | 408 | GSPAAKRVKLGGSPAAKRVKLGGSPKK | 455 |
| VGGSPKKKRKVTLESKRPAATKKAGQAKKK | | KRKVGGSPKKKRKV | |
| KAPGEYPYDVPDYA | | | |
| TLESPKKKRKVGGSPKKKRKVGGSPKKKRK | 409 | GSKRPAATKKAGQAKKKKGGSKRPAAT | 456 |
| VGGSPKKKRKVGSKRPAATKKAGQAKKKKY | | KKAGQAKKKK | |
| PYDVPDYA | | | |
| TLESPAAKRVKLDGGSPAAKRVKLDGGSPA | 410 | GSKRPAATKKAGQAKKKKGGSKRPAAT | 457 |
| AKRVKLDGGSPAAKRVKLDTLESKRPAATK | | KKAGQAKKKK | |
| KAGQAKKKKGGSKRPAATKKAGQAKKKKAP | | | |
| GEYPYDVPDYA | | | |

[0211] In some cases, an engineered CasX fusion protein includes a “Protein Transduction Domain” or PTD (also known as a CPP—cell penetrating peptide), which refers to a protein, polynucleotide, carbohydrate, or organic or inorganic compound that facilitates traversing a lipid bilayer, micelle, cell membrane, organelle membrane, or vesicle membrane. A PTD attached to another molecule, which can range from a small polar molecule to a large macromolecule and/or a nanoparticle, facilitates the molecule traversing a membrane, for example going from an extracellular space to an intracellular space, or from the cytosol to within an organelle. In some embodiments, a PTD is covalently linked to the amino terminus of an engineered CasX fusion protein. In some embodiments, a PTD is covalently linked to the carboxyl terminus of an engineered CasX fusion protein. In some cases, the PTD is inserted internally in the sequence of an engineered CasX fusion protein at a suitable insertion site. In some cases, an engineered CasX fusion protein includes (is conjugated to, is fused to) one or more PTDs (e.g., two or more, three or more, four or more PTDs). In some cases, a PTD includes one or more nuclear localization signals (NLS). Examples of PTDs include but are not limited to peptide transduction domain of HIV TAT comprising YGRKKRRQRRR (SEQ ID NO: 458), RKKRRQRR (SEQ ID NO: 459); YARAAARQARA (SEQ ID NO: 460); THRLPRRRRRR (SEQ ID NO: 461); and GGRRARRRRRR (SEQ ID NO: 462); a polyarginine sequence comprising a number of arginines sufficient to direct entry into a cell (e.g., 3, 4, 5, 6, 7, 8, 9, 10, or 10-50 arginines, SEQ ID NO: 463); a VP22 domain (Zender et al. (2002) Cancer Gene Ther. 9(6):489-96); an Drosophila Antennapedia protein transduction domain (Noguchi et al. (2003) Diabetes 52(7): 1732-1737); a truncated human calcitonin peptide (Trehin et al. (2004) Pharm. Research 21:1248-1256); polylysine (Wender et al. (2000) Proc. Natl. Acad. Sci. USA 97: 13003-13008); RRQRRTSKLMKR (SEQ ID NO: 464); Transportan GWTLNSAGYLLGKINLKALAALAKKIL (SEQ ID NO: 465); KALAWEAKLAKALAKALAKHLAKALAKALKCEA (SEQ ID NO: 466); and RQIKIWFQNRRMKWKK (SEQ ID NO: 467). In some embodiments, the PTD is an activatable CPP (ACPP) (Aguilera et al. (2009) Integr Biol (Camb) June; 1(5-6): 371-381). ACPPs comprise a polycationic CPP (e.g., Arg9 or “R9”) connected via a cleavable linker to a matching polyanion (e.g., Glu9 or “E9”), which reduces the net charge to nearly zero and thereby inhibits adhesion and uptake into cells. Upon cleavage of the linker, the polyanion is released, locally unmasking the polyarginine and its inherent adhesiveness, thus “activating” the ACPP to traverse the membrane.

[0212] In some embodiments, an engineered CasX fusion protein can include a CasX protein that is linked to a heterologous polypeptide (a heterologous amino acid sequence) via a linker polypeptide (e.g., one or more linker polypeptides). In some embodiments, an engineered CasX fusion protein can be linked at the C-terminal and/or N-terminal end to a heterologous polypeptide (fusion partner) via a linker polypeptide (e.g., one or more linker polypeptides). The linker polypeptide may have any of a variety of amino acid sequences. Proteins can be joined by a spacer peptide, generally of a flexible nature, although other chemical linkages are not excluded. Suitable linkers include polypeptides of between 4 amino acids and 40 amino acids in length, or between 4 amino acids and 25 amino acids in length. The linking peptides may have virtually any amino acid sequence, bearing in mind that the preferred linkers will have a sequence that results in a generally flexible peptide. The use of small amino acids, such as glycine and alanine, are of use in creating a flexible peptide. The creation of such sequences is routine to those of skill in the art. A variety of different linkers are commercially available and are considered suitable for use. In some embodiments, the one or more fusion proteins are linked to the engineered CasX protein or to adjacent fusion proteins with a linker peptide wherein the linker peptide is selected from the group consisting of RS, (G)n (SEQ ID NO: 468), (GS)n (SEQ ID NO: 469), (GSGGS)n (SEQ ID NO: 470), (GGSGGS)n (SEQ ID NO: 471), (GGGS)n (SEQ ID NO: 472), GGSG (SEQ ID NO: 473), GGSGG (SEQ ID NO: 474), GSGSG (SEQ ID NO: 475), GSGGG (SEQ ID NO: 476), GGGSG (SEQ ID NO: 477), GSSSG (SEQ ID NO: 478), GPGP (SEQ ID NO: 479), GGP, PPP, PPAPPA (SEQ ID NO: 480), PPPG (SEQ ID NO: 481), PPPGPPP (SEQ ID NO: 482), PPP(GGGS)n (SEQ ID NO: 483), (GGGS)nPPP (SEQ ID NO: 484), AEAAAKEAAAKEAAAKA (SEQ ID NO: 485), and TPPKTKRKVEFE (SEQ ID NO: 486), where n is 1 to 5. The ordinarily skilled artisan will recognize that design of a peptide conjugated to any elements described above can include linkers that are all or partially flexible, such that the linker can include a flexible linker as well as one or more portions that confer less flexible structure.

### V. Methods of Making Engineered CasX Proteins and ERS

[0213] The engineered CasX proteins and ERS of the disclosure may be designed and constructed through a variety of methods, as described herein. In some embodiments, the method comprises designing, building and testing a comprehensive set of mutations to a starting biomolecule to produce a library of biomolecule variants; for example, a library of engineered CasX proteins or engineered ERS scaffolds. The methods of the disclosure can encompass making all possible substitutions, as well as all possible small insertions, and all possible deletions of amino acids (in the case of proteins) or nucleotides (in the case of RNA or DNA), or the swapping of domains or subdomains to the starting biomolecule in order to create libraries that are then evaluated for functional changes, and this information used to construct one or more additional libraries. Such iterative construction and evaluation of variants may lead, for example, to identification of mutational themes that lead to certain functional outcomes, such as regions of the protein or gRNA that, when mutated in a certain way, lead to one or more improved functions. Layering of such identified mutations may then further improve function, for example through additive or synergistic interactions. The methods of the disclosure comprise library design, library construction, and library screening. In some embodiments, multiple rounds of design, construction, and screening are undertaken.

a. Library Design

[0214] In some embodiments, the methods to create libraries of mutagenized CasX and ERS are the methods of Examples 1-7 and 11. In some embodiments, the biomolecule of the library comprises a protein or a ribonucleic acid (RNA) molecule, wherein the mutagenized monomer units are amino acids or ribonucleotides, respectively. The fundamental units of biomolecule mutation comprise either: (1) exchanging one monomer for another monomer of different identity (substitutions); (2) inserting one or more additional monomers in the biomolecule (insertions); or (3) removing one or more monomers from the biomolecule (deletions). Libraries comprising substitutions, insertions, and deletions, alone or in combination, to any one or more monomers within any biomolecule described herein, are considered within the scope of the invention.

[0215] In an exemplary embodiment, and as described in Example 1, the disclosure provides CasX proteins derived from CasX 515 in which engineered CasX were designed using a Markov Chain Monte Carlo (MCMC)-directed evolution simulation (Biswas S et al. Low-N protein engineering with data-efficient deep learning. Nature Methods. 18(4):389-396 (2021)). In the method, a codon within CasX 515 was selected and randomly replaced with a codon encoding a different amino acid, such that there was an equal probability of the selected amino acid to be replaced with any of the alternative 19 amino acids. This process was then repeated up to sixteen times, resulting in a simulated mutagenized protein sequence. Then, the predicted fitness of the mutagenized protein sequence was determined using a machine learning model to virtually screen the simulated protein either to discard the simulated protein or to construct and validate the simulated protein experimentally. In the method, the process of mutagenesis and simulated screening was repeated until a desired number of sequences, each containing a desired number of single mutations, were obtained, which were subsequently assayed to identify those engineered CasX with improved characteristics.

[0216] In some embodiments, a library design comprises enumerating all possible mutations for each of one or more target monomers in a biomolecule. As used herein, a “target monomer” refers to a monomer in a biomolecule polymer that is targeted for mutagenesis with the substitutions, insertions and deletions described herein. For example, a target monomer can be an amino acid at a specified position in a protein, or a nucleotide at a specified position in an RNA. In some embodiments, a library of mutated sequences is created by mutation at each consecutive position in the protein or RNA. In other embodiments, a biomolecule can have at least 1, 2, 3, 4, 5, 6, 7, 8, 9, 10, 20, 30, 40, 50, 100 or more target monomers that are systematically mutated to produce a library of biomolecule variants. In some embodiments, every monomer in a biomolecule is a target monomer. For example, in a parental CasX protein where there are two target amino acids, a library design comprises enumerating the 40 possible mutations at each of the two target amino acids. In a further example, in a library of an RNA where there are four target nucleotides, the library design comprises enumerating the 8 possible mutations at each of the four target nucleotides. In some embodiments, each target monomer of a biomolecule is independently randomly selected or selected by intentional design. Thus, in some embodiments, a library comprises random variants, or variants that were designed, or variants comprising random mutations and designed mutations within a single biomolecule, or any combinations thereof.

[0217] In some embodiments, the assembled library is then assayed to assess the comprehensive set of mutations to a biomolecule, encompassing the substitutions, as well as insertions and deletions of amino acids (in the case of proteins) or nucleotides (in the case of RNA). The construction and functional readout of these mutations can be achieved with a variety of established molecular biology methods. In some embodiments, the library comprises a subset of all possible modifications to monomers. For example, in some embodiments, a library collectively represents a single modification of one monomer, for at least some percentage of the total monomer locations in a biomolecule, wherein each single modification is selected from the group consisting of substitution, single insertion, and single deletion. In some embodiments, the library collectively represents the single modification of one monomer for at least 1%, at least 5%, at least 10%, at least 20%, at least 30%, at least 40%, at least 50%, at least 60%, at least 70%, at least 80%, at least 90%, at least 95%, or up to 100% of the total monomer locations in a starting biomolecule. In certain embodiments, for a certain percentage of the total monomer locations in a starting biomolecule, the library collectively represents each possible single modification of one monomer, such as all possible substitutions with the 19 other naturally occurring amino acids (for a protein) or 3 other naturally occurring ribonucleotides (for RNA), insertion of each of the 20 naturally occurring amino acids (for a protein) or 4 naturally occurring ribonucleotides (for RNA), or deletion of the monomer. In still further embodiments, insertion at each location is independently greater than one monomer, for example insertion of two or more, three or more, or four or more monomers, or insertion of between one to four, between two to four, or between one to three monomers. In some embodiments, deletion at a location is independently greater than one monomer, for example, deletion of two or more, three or more, or four or more monomers, or deletion of between one to four, between two to four, or between one to three monomers. Examples of such libraries of engineered CasX and ERS are described in Examples 1-7 and 11.

[0218] In some embodiments, the biomolecule is a protein and the individual monomers are amino acids. In those embodiments where the biomolecule is a protein, the number of possible mutations at each monomer (amino acid) position in the protein comprise 19 amino acid substitutions, 20 amino acid insertions and 1 amino acid deletion, leading to a total of 40 possible mutations per amino acid in the protein.

[0219] In some embodiments, a library of engineered CasX proteins comprising insertions is a 1 amino acid insertion library, a 2 amino acid insertion library, a 3 amino acid insertion library, a 4 amino acid insertion library, a 5 amino acid insertion library, a 6 amino acid insertion library, a 7 amino acid insertion library, an 8 amino acid insertion library, a 9 amino acid insertion library, or a 10 amino acid insertion library. In some embodiments, a library of engineered CasX proteins comprising insertions comprises between 1 and 10 amino acid insertions. In some embodiments, a library of engineered CasX proteins comprising deletions is a 1 amino acid deletion library, a 2 amino acid deletion library, a 3 amino acid deletion library, a 4 amino acid deletion library, a 5 amino acid deletion library, a 6 amino acid deletion library, a 7 amino acid deletion library, an 8 amino acid deletion library, a 9 amino acid deletion library, or a 10 amino acid deletion library. In some embodiments, a library of engineered CasX proteins comprising deletions comprises between 1 and 10 amino acid deletions. In some embodiments, a library of engineered CasX proteins comprising substitutions is a 1 amino acid substitution library, a 2 amino acid substitution library, a 3 amino acid substitution library, a 4 amino acid substitution library, a 5 amino acid substitution library, a 6 amino acid substitution library, a 7 amino acid substitution library, an 8 amino acid substitution library, a 9 amino acid substitution library, or a 10 amino acid insertion library. In some embodiments, a library of engineered CasX proteins comprising substitutions comprises between 1 and 10 amino acid substitutions.

[0220] In some embodiments, the biomolecule is RNA. In those embodiments where the biomolecule is RNA, the number of possible DME mutations at each monomer (ribonucleotide) position in the RNA comprises 3 nucleotide substitutions, 4 nucleotide insertions, and 1 nucleotide deletion, leading to a total of 8 possible mutations per nucleotide.

[0221] In some embodiments of the methods, mutations are incorporated into double-stranded DNA encoding the biomolecule. This DNA can be maintained and replicated in a standard cloning vector, for example a bacterial plasmid, referred to herein as the target plasmid. An exemplary target plasmid contains a DNA sequence encoding the starting biomolecule that will be subjected to mutagenesis, a bacterial origin of replication, and a suitable antibiotic resistance expression cassette. In some embodiments, the antibiotic resistance cassette confers resistance to kanamycin, ampicillin, spectinomycin, bleomycin, streptomycin, erythromycin, tetracycline or chloramphenicol. In some embodiments, the antibiotic resistance cassette confers resistance to kanamycin.

[0222] A library comprising said variants can be constructed in a variety of ways. In certain embodiments, plasmid recombineering is used to construct a library. Such methods can use DNA oligonucleotides encoding one or more mutations to incorporate said mutations into a plasmid encoding the reference biomolecule. For biomolecule variants with a plurality of mutations, in some embodiments more than one oligonucleotide is used. In some embodiments, the DNA oligonucleotides encode one or more mutations wherein the mutation region is flanked by between 10 and 100 nucleotides of homology to the target plasmid, both 5′ and 3′ to the mutation. Such oligonucleotides can in some embodiments be commercially synthesized and used in PCR amplification. An exemplary template for an oligonucleotide encoding a mutation is provided below:
[0223] 5′-(N)₁₀₋₁₀₀-Mutation-(N′)₁₀₋₁₀₀-3′

[0224] In this exemplary oligonucleotide design, the Ns represent a sequence identical to the target plasmid, referred to herein as the homology arms. When a particular monomer in the biomolecule is targeted for mutation, these homology arms directly flank the DNA encoding the monomer in the target plasmid. In some exemplary embodiments where the biomolecule undergoing mutagenesis is a protein, 40 different oligonucleotides, using the same set of homology arms, are used to encode the enumerated 40 different amino acid mutations for each amino acid residue in the protein that is targeted for mutagenesis. When the mutation is of a single amino acid, the region encoding the desired mutation or mutations comprises three nucleotides encoding an amino acid (for substitutions or single insertions), or zero nucleotides (for deletions). In some embodiments, the oligonucleotide encodes insertion of greater than one amino acid. For example, wherein the oligonucleotide encodes the insertion of X amino acids, the region encoding the desired mutation comprises 3*X nucleotides encoding the X amino acids. In some embodiments, the mutation region encodes more than one mutation, for example mutations to two or more monomers of a biomolecule that are in close proximity (e.g., next to each other, or within 1, 2, 3, 4, 5, 6, 7, 8, 9, or 10, or more monomers of each other).

[0225] In some exemplary embodiments where the biomolecule undergoing mutagenesis is an RNA, 8 different oligonucleotides, using the same set of homology arms, encode 8 different single nucleotide mutations for each nucleotide in the RNA that is targeted for mutagenesis. When the mutation is of a single ribonucleotide, the region of the oligo encoding the mutations can consist of the following nucleotide sequences: one nucleotide specifying a nucleotide (for substitutions or insertions), or zero nucleotides (for deletions). In some embodiments, the oligonucleotides are synthesized as single stranded DNA oligonucleotides. In some embodiments, all oligonucleotides targeting a particular amino acid or nucleotide of a biomolecule subjected to mutagenesis are pooled.

b. Library Screening

[0226] Any appropriate method for screening or selecting a library is envisaged as following within the scope of the inventions. High throughput methods may be used to evaluate large libraries with thousands of individual mutations. In some embodiments, the throughput of the library screening or selection assay has a throughput that is in the millions of individual cells. In some embodiments, assays utilizing living cells are preferred because phenotype and genotype are physically linked in living cells by nature of being contained within the same lipid bilayer. Living cells can also be used to directly amplify sub-populations of the overall library. Exemplary methods of screening libraries are described in Examples 1-7 and 11.

[0227] In some embodiments, libraries that have been screened or selected for highly functional variants are further characterized. In some embodiments, further characterizing the library comprises analyzing variants individually through sequencing, such as Sanger sequencing, to identify the specific mutation or mutations that gave rise to the highly functional variant. Individual mutant variants of the biomolecule can be isolated through standard molecular biology techniques for later analysis of function. In some embodiments, further characterizing the library comprises high throughput sequencing of both the library and the one or more libraries of highly functional variants. This approach may, in some embodiments, allow for the rapid identification of mutations that are over-represented in the one or more libraries of highly functional variants compared to the naïve library. Without wishing to be bound by any theory, mutations that are over-represented in the one or more libraries of highly functional variants are likely to be responsible for the activity of the highly functional variants. In some embodiments, further characterizing the library comprises both sequencing of individual variants and high throughput sequencing of both a naïve library and the one or more libraries of highly mutagenized variants.

[0228] High throughput sequencing can produce high throughput data indicating the functional effect of the library members. In embodiments wherein one or more libraries represents every possible mutation of every monomer location, such high throughput sequencing can evaluate the functional effect of every possible mutation. Such sequencing can also be used to evaluate one or more highly functional sub-populations of a given library, which in some embodiments may lead to identification of mutations that result in improved function.

c. Production of Engineered CasX and ERS

[0229] An engineered CasX protein of the present disclosure may be produced in vitro by eukaryotic cells or by prokaryotic cells transformed with encoding vectors (described below) using standard cloning and molecularly biology techniques or as described in the Examples. The particular sequence and the manner of preparation will be determined by convenience, economics, purity required, and the like. In some embodiments, a construct is first prepared containing the DNA sequence encoding the engineered CasX. Exemplary methods for the preparation of such constructs are described in the Examples. The construct is then used to create an expression vector suitable for transforming a host cell, such as a prokaryotic or eukaryotic host cell for the expression and recovery of the protein. Where desired, the host cell is an E. coli. In other embodiments, the host cell is a eukaryotic cell. The eukaryotic host cell can be selected from Baby Hamster Kidney fibroblast (BHK) cells, human embryonic kidney 293 (HEK293), human embryonic kidney 293T (HEK293T), NS0 cells, SP2/0 cells, YO myeloma cells, P3X63 mouse myeloma cells, PER cells, PER.C6 cells, hybridoma cells, NIH3T3 cells, CV-1 (simian) in Origin with SV40 genetic material (COS), HeLa, Chinese hamster ovary (CHO), or yeast cells, or other eukaryotic cells known in the art suitable for the production of recombinant products.

[0230] An engineered CasX protein of the disclosure may also be isolated and purified in accordance with conventional methods of recombinant synthesis. A lysate may be prepared of the expression host and the lysate purified using high performance liquid chromatography (HPLC), exclusion chromatography, gel electrophoresis, affinity chromatography, or other purification technique. For the most part, the compositions which are used will comprise 80% or more by weight of the desired product, more usually 90% or more by weight, preferably 95% or more by weight, and for therapeutic purposes, usually 99.5% or more by weight, in relation to contaminants related to the method of preparation of the product and its purification.

[0231] In the case of production of the ERS (and linked targeting sequences) of the present disclosure, recombinant expression vectors encoding the ERS can be transcribed in vitro, for example using T7 promoter regulatory sequences and T7 polymerase in order to produce the ERS, which can then be recovered by conventional methods; e.g., purification via gel electrophoresis as described in the Examples. Alternatively, the ERS can be prepared synthetically. Once synthesized, the ERS may be utilized in the gene editing pair systems to directly contact and modify a target nucleic acid or may be introduced into a cell by any of the well-known techniques for introducing nucleic acids into cells (e.g., microinjection, electroporation, transfection, etc.).

### VI. Polynucleotides and Vectors

[0232] In another aspect, the present disclosure relates to polynucleotides encoding the engineered CasX and ERS that have utility in the editing of the target nucleic acid in a cell. In some embodiments, the disclosure provides polynucleotides encoding the engineered CasX proteins and the polynucleotides of the ERS of any of the system embodiments described herein. In some embodiments, the disclosure provides a polynucleotide sequence encoding the engineered CasX of any of the embodiments described herein, including the engineered CasX of SEQ ID NOS: 247-294, 24916-49628, 49746-49747, or 49871-49873 or sequences having at least about 80%, at least about 90%, at least about 95%, at least about 96%, at least about 97%, at least about 98%, or at least about 99% sequence identity to a sequence thereto. In some embodiments, the disclosure provides an isolated polynucleotide sequence encoding an ERS sequence of any of the embodiments described herein, including the sequences of SEQ ID NOS: 156, 739-907, 11568-22227, 23572-24915, and 49719-49735, together with targeting sequences capable of hybridizing with the target nucleic acid to be modified.

[0233] In other aspects, the disclosure relates to methods to produce polynucleotide sequences encoding the engineered CasX, or the ERS of any of the embodiments described herein, including homologous variants thereof, as well as methods to express the proteins expressed or ERS transcribed by the polynucleotide sequences. In general, the methods include producing a polynucleotide sequence coding for the engineered CasX, or the ERS of any of the embodiments described herein and incorporating the encoding gene into an expression vector appropriate for a host cell. Standard recombinant techniques in molecular biology can be used to make the polynucleotides and expression vectors of the present disclosure. For production of the encoded reference CasX, the engineered CasX, or the ERS of any of the embodiments described herein, the methods include transforming an appropriate host cell with an expression vector comprising the encoding polynucleotide, and culturing the host cell under conditions causing or permitting the resulting reference CasX, the engineered CasX, or the ERS of any of the embodiments described herein to be expressed or transcribed in the transformed host cell, thereby producing the engineered CasX, or the ERS, which are recovered by methods described herein or by standard purification methods known in the art or as described in the Examples.

[0234] In accordance with the disclosure, nucleic acid sequences that encode the engineered CasX, or the ERS of any of the embodiments described herein (or their complement) are used to generate recombinant DNA molecules that direct the expression in appropriate host cells. Several cloning strategies are suitable for performing the present disclosure, many of which are used to generate a construct that comprises a gene coding for a composition of the present disclosure, or its complement. In some embodiments, the cloning strategy is used to create a gene that encodes a construct that comprises nucleotides encoding the engineered CasX or the ERS that is used to transform a host cell for expression of the composition.

[0235] In some approaches, a construct is first prepared containing the DNA sequence encoding an engineered CasX or an ERS. Exemplary methods for the preparation of such constructs are described in the Examples. The construct is then used to create an expression vector suitable for transforming a host cell, such as a prokaryotic or eukaryotic host cell for the expression and recovery of the protein construct, in the case of the engineered CasX, or the ERS. Where desired, the host cell is an E. coli. In other embodiments, the host cell is a eukaryotic cell. The eukaryotic host cell can be selected from Baby Hamster Kidney fibroblast (BHK) cells, human embryonic kidney 293 (HEK293), human embryonic kidney 293T (HEK293T), NS0 cells, SP2/0 cells, YO myeloma cells, P3X63 mouse myeloma cells, PER cells, PER.C6 cells, hybridoma cells, NIH3T3 cells, CV-1 (simian) in Origin with SV40 genetic material (COS), HeLa, Chinese hamster ovary (CHO), or yeast cells, or other eukaryotic cells known in the art suitable for the production of recombinant products. Exemplary methods for the creation of expression vectors, the transformation of host cells and the expression and recovery of the engineered CasX or the ERS are described in the Examples.

[0236] The gene encoding the engineered CasX, or the ERS construct can be made in one or more steps, either fully synthetically or by synthesis combined with enzymatic processes, such as restriction enzyme-mediated cloning, PCR and overlap extension, including methods more fully described in the Examples. The methods disclosed herein can be used, for example, to ligate sequences of polynucleotides encoding the various components (e.g., engineered CasX and ERS) genes of a desired sequence. Genes encoding polypeptide compositions are assembled from oligonucleotides using standard techniques of gene synthesis.

[0237] In some embodiments, the nucleotide sequence encoding an engineered CasX protein is codon optimized. This type of optimization can entail a mutation of an encoding nucleotide sequence to mimic the codon preferences of the intended host organism or cell while encoding the same engineered CasX protein. Thus, the codons can be changed, but the encoded protein remains unchanged. For example, if the intended target cell of the engineered CasX protein is a human cell, a human codon-optimized encoding nucleotide sequence could be used. As another non-limiting example, if the intended host cell was a mouse cell, then a mouse codon-optimized encoding nucleotide sequence could be generated. As another non-limiting example, if the intended host cell was a prokaryotic cell (e.g., E. coli), then a prokaryotic codon-optimized encoding nucleotide sequence could be generated. The gene design can be performed using algorithms that optimize codon usage and amino acid composition appropriate for the host cell utilized in the production of the engineered CasX. In one method of the disclosure, a library of polynucleotides encoding the engineered CasX or ERS components is created and then assembled, as described above and assayed to confirm that the variants retain functional properties. The resulting genes are then used to transform a host cell and produce and recover the engineered CasX or the ERS compositions for evaluation of its properties, as described herein.

[0238] In some embodiments, the nucleotide sequence encoding the engineered CasX protein is depleted or devoid of CpG motifs. In some embodiments, the CpG content of the engineered CasX is less than about 10%, less than about 5%, or less than about 1% CpG. In some embodiments, the sequence encoding the engineered CasX protein depleted or devoid of CpG motifs comprises a sequence selected from the group consisting of SEQ ID NOS: 49850-49861.

[0239] In some embodiments, the nucleotide sequence encoding the ERS is depleted or devoid of CpG motifs. In some embodiments, the CpG content of the ERS is less than about 10%, less than about 5%, or less than about 1% CpG. In some embodiments, the nucleotide encoding the ERS depleted or devoid of CpG motifs comprises a sequence selected from the group consisting of SEQ ID NOS: 535-556.

[0240] In some embodiments, a nucleotide sequence encoding a ERS is operably linked to a control element; e.g., a transcriptional control element, such as a promoter. In some embodiments, a nucleotide sequence encoding an engineered CasX protein is operably linked to a control element; e.g., a transcriptional control element, such as a promoter. In some cases, the promoter is a constitutively active promoter. In some cases, the promoter is a regulatable promoter. In some cases, the promoter is an inducible promoter. In some cases, the promoter is a tissue-specific promoter. In some cases, the promoter is a cell type-specific promoter. In some cases, the transcriptional control element (e.g., the promoter) is functional in a targeted cell type or targeted cell population. For example, in some cases, the transcriptional control element can be functional in eukaryotic cells; e.g., neurons, spinal motor neurons, medium spiny neurons, cortical neurons, striatal neurons, oligodendrocytes, or glial cells.

[0241] Non-limiting examples of Pol II promoters operably linked to the polynucleotide encoding the engineered CasX of the disclosure include, but are not limited to EF-1alpha, EF-1alpha core promoter, Jens Tornoe (JeT), promoters from cytomegalovirus (CMV), CMV immediate early (CMVIE), CMV enhancer, herpes simplex virus (HSV) thymidine kinase, early and late simian virus 40 (SV40), the SV40 enhancer, long terminal repeats (LTRs) from retrovirus, mouse metallothionein-I, adenovirus major late promoter (Ad MLP), CMV promoter full-length promoter, the minimal CMV promoter, the chicken β-actin promoter (CBA), CBA hybrid (CBh), chicken β-actin promoter with cytomegalovirus enhancer (CB7), chicken beta-Actin promoter and rabbit beta-Globin splice acceptor site fusion (CAG), the rous sarcoma virus (RSV) promoter, the HIV-Ltr promoter, the hPGK promoter, the HSV TK promoter, a 7SK promoter, the Mini-TK promoter, the human synapsin I (SYN) promoter which confers neuron-specific expression, beta-actin promoter, super core promoter 1 (SCP1), the Mecp2 promoter for selective expression in neurons, the minimal IL-2 promoter, the Rous sarcoma virus enhancer/promoter (single), the spleen focus-forming virus long terminal repeat (LTR) promoter, the TBG promoter, promoter from the human thyroxine-binding globulin gene (Liver specific), the PGK promoter, the human ubiquitin C promoter (UBC), the UCOE promoter (Promoter of HNRPA2B1-CBX3), the synthetic CAG promoter, the Histone H2 promoter, the Histone H3 promoter, the U1a1 small nuclear RNA promoter (226 nt), the U1a1 small nuclear RNA promoter (226 nt), the U1b2 small nuclear RNA promoter (246 nt) 26, the GUSB promoter, the CBh promoter, rhodopsin (Rho) promoter, silencing-prone spleen focus forming virus (SFFV) promoter, a human H1 promoter (H1), a POL1 promoter, the TTR minimal enhancer/promoter, the b-kinesin promoter, mouse mammary tumor virus long terminal repeat (LTR) promoter, the human eukaryotic initiation factor 4A (EIF4A1) promoter, the ROSA26 promoter, the glyceraldehyde 3-phosphate dehydrogenase (GAPDH) promoter, tRNA promoters, and truncated versions and sequence variants of the foregoing. In a particular embodiment, the Pol II promoter is EF-1alpha, wherein the promoter enhances transfection efficiency, the transgene transcription or expression of the CRISPR nuclease, the proportion of expression-positive clones and the copy number of the episomal vector in long-term culture.

[0242] Non-limiting examples of Pol III promoters operably linked to the polynucleotide encoding the ERS of the disclosure include, but are not limited to U6, mini U6, U6 truncated promoters, 7SK, and H1 variants, BiH1 (Bidrectional H1 promoter), BiU6, Bi7SK, BiH1 (Bidirectional U6, 7SK, and H1 promoters), gorilla U6, rhesus U6, human 7SK, human H1 promoters, and truncated versions and sequence variants thereof. In the foregoing embodiment, the Pol III promoter enhances the transcription of the ERS. In a particular embodiment, the Pol III promoter is U6, wherein the promoter enhances expression of the CRISPR ERS. In another particular embodiment, the promoter linked to the gene encoding the tropism factor is CMV promoter. Experimental details and data for the use of such promoters are provided in the examples.

[0243] Recombinant expression vectors of the disclosure can also comprise accessory elements that facilitate robust expression of engineered CasX proteins and the ERS of the disclosure. For example, recombinant expression vectors can include one or more of a polyadenylation signal (poly(A), an intronic sequence or a post-transcriptional regulatory element such as a woodchuck hepatitis post-transcriptional regulatory element (WPTRE). Exemplary poly(A) sequences include hGH poly(A) signal (short), HSV TK poly(A) signal, synthetic polyadenylation signals, SV40 poly(A) signal, β-globin poly(A) signal and the like. In some embodiments, a recombinant expression vector encoding an engineered CasX comprises a poly(A) tail of 80 or more adenine nucleotides. A person of ordinary skill in the art will be able to select suitable elements to include in the recombinant expression vectors described herein.

[0244] Selection of the appropriate vector and promoter is well within the level of ordinary skill in the art, as it related to controlling expression, e.g., for modifying a protein involved in antigen processing, antigen presentation, antigen recognition, and/or antigen response and/or its regulatory element. The expression vector may also contain a ribosome binding site for translation initiation and a transcription terminator. The expression vector may also include appropriate sequences for amplifying expression. The expression vector may also include nucleotide sequences encoding protein tags (e.g., 6×His tag, hemagglutinin tag, FLAG tag, fluorescent protein, etc.) that can be fused to the engineered CasX protein, thus resulting in a chimeric CasX protein that are used for purification or detection.

[0245] In some embodiments, provided herein are one or more recombinant expression vectors comprising one or more of: (i) a nucleotide sequence that encodes a ERS that hybridizes to a target sequence of the locus of the targeted genome (e.g., configured as a single or dual guide) operably linked to a promoter that is operable in a target cell such as a eukaryotic cell; and (ii) a nucleotide sequence encoding an engineered CasX protein operably linked to a promoter that is operable in a target cell such as a eukaryotic cell.

[0246] The polynucleotide sequence(s) are inserted into the vector by a variety of procedures. In general, DNA is inserted into an appropriate restriction endonuclease site(s) using techniques known in the art. Vector components generally include, but are not limited to, one or more of a signal sequence, an origin of replication, one or more marker genes, an enhancer element, a promoter, and a transcription termination sequence. Construction of suitable vectors containing one or more of these components employs standard ligation techniques which are known to the skilled artisan. Such techniques are well known in the art and well described in the scientific and patent literature. Various vectors are publicly available. The vector may, for example, be in the form of a plasmid, cosmid, viral particle, or phage that may conveniently be subjected to recombinant DNA procedures, and the choice of vector will often depend on the host cell into which it is to be introduced. Thus, the vector may be an autonomously replicating vector, i.e., a vector, which exists as an extrachromosomal entity, the replication of which is independent of chromosomal replication, e.g., a plasmid. Alternatively, the vector may be one which, when introduced into a host cell, is integrated into the host cell genome and replicated together with the chromosome(s) into which it has been integrated. Once introduced into a suitable host cell, expression of the protein involved in antigen processing, antigen presentation, antigen recognition, and/or antigen response can be determined using any nucleic acid or protein assay known in the art. For example, the presence of transcribed mRNA of the engineered CasX can be detected and/or quantified by conventional hybridization assays (e.g., Northern blot analysis), amplification procedures (e.g. RT-PCR), SAGE (U.S. Pat. No. 5,695,937), and array-based technologies (see e.g., U.S. Pat. Nos. 5,405,783, 5,412,087 and 5,445,934), using probes complementary to any region of the polynucleotide.

[0247] The polynucleotides and recombinant expression vectors can be delivered to the target host cells by a variety of methods. Such methods include, but are not limited to, viral infection, transfection, lipofection, electroporation, calcium phosphate precipitation, polyethyleneimine (PEI)-mediated transfection, DEAE-dextran mediated transfection, microinjection, liposome-mediated transfection, particle gun technology, nucleofection, direct addition by cell penetrating CasX proteins that are fused to or recruit donor DNA, cell squeezing, calcium phosphate precipitation, direct microinjection, nanoparticle-mediated nucleic acid delivery, and using the commercially available TransMessenger® reagents from Qiagen, Stemfect™ RNA Transfection Kit from Stemgent, and TransIT®-mRNA Transfection Kit from Mirus Bio LLC, Lonza nucleofection, Maxagen electroporation and the like.

[0248] In some embodiments, the present disclosure provides vectors comprising the polynucleotides encoding the engineered CasX or ERS selected from the group consisting of a retroviral vector, a lentiviral vector, an adenoviral vector, an adeno-associated viral (AAV) vector, a virus-like particle (VLP), a herpes simplex virus (HSV) vector, a plasmid, a minicircle, a nanoplasmid, a DNA vector, an RNA vector, or a CasX delivery particle (XDP). In some embodiments, the disclosure provides a recombinant expression vector comprising a nucleotide sequence encoding an engineered CasX protein and a nucleotide sequence encoding a ERS. In other embodiments, the nucleotide sequence encoding the engineered CasX protein and the nucleotide sequence encoding the ERS are provided in separate vectors.

[0249] In some embodiments, a recombinant expression vector of the present disclosure is a recombinant adeno-associated virus (AAV) vector. AAV is a small (20 nm), nonpathogenic virus that is useful in treating human diseases in situations that employ a viral vector for delivery to a cell such as a eukaryotic cell, either in vivo or ex vivo for cells to be prepared for administration to a subject. A construct is generated, for example, encoding any of the engineered CasX proteins and ERS embodiments as described herein, and optionally a donor template, and can be flanked with AAV inverted terminal repeat (ITR) sequences, thereby enabling packaging of the AAV vector into an AAV viral particle.

[0250] An “AAV” vector may refer to the naturally occurring wild-type virus itself or derivatives thereof. The term covers all subtypes, serotypes and pseudotypes, and both naturally occurring and recombinant forms, except where required otherwise. As used herein, the term “serotype” refers to an AAV which is identified by and distinguished from other AAVs based on capsid protein reactivity with defined antisera, e.g., there are many known serotypes of primate AAVs. In some embodiments, the AAV vector is selected from AAV1, AAV2, AAV3, AAV4, AAV5, AAV6, AAV7, AAV8, AAV9, AAV 10, AAV12, AAV 9.45, AAV 9.61, AAV 44.9, AAV-Rh74 (Rhesus macaque-derived AAV), and AAVRh10, and modified capsids of these serotypes. For example, serotype AAV-2 is used to refer to an AAV which contains capsid proteins encoded from the cap gene of AAV-2 and a genome containing 5′ and 3′ ITR sequences from the same AAV-2 serotype. Pseudotyped AAV refers to an AAV that contains capsid proteins from one serotype and a viral genome including 5′-3′ ITRs of a second serotype. Pseudotyped rAAV would be expected to have cell surface binding properties of the capsid serotype and genetic properties consistent with the ITR serotype. Pseudotyped recombinant AAV (rAAV) are produced using standard techniques described in the art. As used herein, for example, rAAV1 may be used to refer an AAV having both capsid proteins and 5′-3′ ITRs from the same serotype or it may refer to an AAV having capsid proteins from serotype 1 and 5′-3′ ITRs from a different AAV serotype, e.g., AAV serotype 2. For each example illustrated herein the description of the vector design and production describes the serotype of the capsid and 5′-3′ ITR sequences.

[0251] An “AAV virus” or “AAV viral particle” refers to a viral particle composed of at least one AAV capsid protein (preferably by all of the capsid proteins of a wild-type AAV) and an encapsidated polynucleotide. If the particle additionally comprises a heterologous polynucleotide (i.e., a polynucleotide other than a wild-type AAV genome to be delivered to a mammalian cell), it is typically referred to as “rAAV”. An exemplary heterologous polynucleotide is a polynucleotide comprising an engineered CasX protein and/or ERS and, optionally, a donor template of any of the embodiments described herein.

[0252] By “adeno-associated virus inverted terminal repeats” or “AAV ITRs” is meant the art recognized regions found at each end of the AAV genome which function together in cis as origins of DNA replication and as packaging signals for the virus. AAV ITRs, together with the AAV rep coding region, provide for the efficient excision and rescue from, and integration of a nucleotide sequence interposed between two flanking ITRs into a mammalian cell genome.

[0253] The nucleotide sequences of AAV ITR regions are known. See, for example Kotin, R. M. (1994) Human Gene Therapy 5:793-801; Berns, K. I. “Parvoviridae and their Replication” in Fundamental Virology, 2nd Edition, (B. N. Fields and D. M. Knipe, eds.). As used herein, an AAV ITR need not have the wild-type nucleotide sequence depicted, but may be altered, e.g., by the insertion, deletion or substitution of nucleotides. Additionally, the AAV ITR may be derived from any of several AAV serotypes, including without limitation, AAV1, AAV2, AAV3, AAV4, AAV5, AAV6, AAV7, AAV8, AAV9, AAV10, AAV12, AAV 9.45, AAV 9.61, AAV-Rh74, and AAVRh10, and modified capsids of these serotypes. Furthermore, 5′ and 3′ ITRs which flank a selected transgene nucleotide sequence in an AAV vector need not necessarily be identical or derived from the same AAV serotype or isolate, so long as they function as intended; i.e., to allow for excision and rescue of the sequence of interest from a host cell genome or vector, and to allow integration of the heterologous sequence into the recipient cell genome when AAV Rep gene products are present in the cell. Use of AAV serotypes for integration of heterologous sequences into a host cell is known in the art (see, e.g., WO2018195555A1 and US20180258424A1, incorporated by reference herein). In one particular embodiment, the ITRs are derived from serotype AAV1. In a particular embodiment, the ITR regions flanking the transgene of the embodiments are derived from AAV2; the 5′ ITR of the transgene of the AAV constructs of the disclosure has the sequence CCTGCAGGCAGCTGCGCGCTCGCTCGCTCACTGAGGCCGCCCGGGCGTCGGGCGAC CTTTGGTCGCCCGGCCTCAGTGAGCGAGCGAGCGCGCAGAGAGGGAGTGGCCAACT CCATCACTAGGGGTTCCT (SEQ ID NO: 487), and the 3′ ITR of the transgene of the AAV constructs of the disclosure has the sequence AGGAACCCCTAGTGATGGAGTTGGCCACTCCCTCTCTGCGCGCTCGCTCGCTCACTG AGGCCGGGCGACCAAAGGTCGCCCGACGCCCGGGCTTTGCCCGGGCGGCCTCAGTG AGCGAGCGAGCGCGCAGCTGCCTGCAGG (SEQ ID NO: 488). In other embodiments, the ITR sequences are modified to remove unmethylated CpG motifs to reduce immunogenic responses. In particular, CpG dinucleotide motifs (CpG PAMPs) in AAV vectors are immunostimulatory because of their high degree of hypomethylation, relative to mammalian CpG motifs, which have a high degree of methylation. In one embodiment, the modified AAV 2 ITR sequences are modified to remove CpG motifs, such that the 5′ITR has the sequence of TGCTCACTCACTCACTCACTGAGGCCTGCAGAGCAAAGCTCTGCAGTCTGGGGACCT TTGGTCCCCAGGCCTCAGTGAGTGAGTGAGTGAGCAGAGAGGGAGTGGCCAACTCC ATCACTAGGGGTTCCT (SEQ ID NO: 489) and the 3′ ITR sequence is the sequence TCTGCTCACTCACTCACTCACTGAGGCCTGCAGAGCAAAGCTCTGCAGTCTGGGGAC CTTTGGTCCCCAGGCCTCAGTGAGTGAGTGAGTGAGCAGAGAGGGAGTGGCCAACT CCATCACTAGGGGTTCCT of SEQ ID NO: 490. Similarly, the present disclosure provides rAAV vectors wherein one or more rAAV transgene component sequences selected from the group consisting of 5′ ITR, 3′ ITR, Pol III promoter, Pol II promoter, encoding sequence for CRISPR nuclease, encoding sequence for ERS, accessory element, and poly(A) are codon-optimized for depletion of all or a portion of the CpG dinucleotides, wherein the resulting rAAV vector transgene is substantially devoid of CpG dinucleotides. In some embodiments, the present disclosure provides rAAV vectors wherein one or more rAAV transgene component sequences selected from the group consisting of 5′ ITR, 3′ ITR, Pol III promoter, Pol II promoter, encoding sequence for a CRISPR nuclease, encoding sequence for ERS, 3′ UTR, poly(A) signal sequence, poly(A), and accessory element comprise less than about 10%, less than about 5%, or less than about 1% CpG dinucleotides. In some embodiments, the present disclosure provides rAAV vectors wherein one or more rAAV transgene component sequences selected from the group consisting of 5′ ITR, 3 ITR, Pol III promoter, Pol II promoter, encoding sequence for the CRISPR nuclease, encoding sequence for the ERS, 3′ UTR, poly(A) signal sequence, and poly(A) are devoid of CpG dinucleotides. In some embodiments, the present disclosure provides rAAV vectors wherein the transgene comprises less than about 10%, less than about 5%, or less than about 1% CpG dinucleotides. In some embodiments, the present disclosure provides rAAV vectors wherein the one or more rAAV component sequences codon-optimized for depletion of CpG dinucleotides are selected from the group of sequences consisting of SEQ ID NOS: 489, 490, 535-556, 559-564, and 49850-49861 as set forth in Tables 37, 38, and 51 or a sequence having at least about 80%, at least about 90%, at least about 95%, at least about 96%, at least about 97%, at least about 98%, or at least about 99% sequence identity thereto, wherein the resulting AAV exhibits a lower potential for inducing an immune response, either in vivo (when administered to a subject) or in in vitro mammalian cell assays designed to detect markers of an inflammatory response, wherein the reduced response is determined by the measurement of one or more parameters such as production of antibodies or a delayed-type hypersensitivity to an rAAV component, or the production of inflammatory cytokines and markers, such as, but not limited to TLR9, interleukin-1 (IL-1), IL-6, IL-12, IL-18, tumor necrosis factor alpha (TNF-α), interferon gamma (IFN-γ), and granulocyte-macrophage colony stimulating factor (GM-CSF).

[0254] By “AAV rep coding region” is meant the region of the AAV genome which encodes the replication proteins Rep 78, Rep 68, Rep 52 and Rep 40. These Rep expression products have been shown to possess many functions, including recognition, binding and nicking of the AAV origin of DNA replication, DNA helicase activity and modulation of transcription from AAV (or other heterologous) promoters. The Rep expression products are collectively required for replicating the AAV genome.

[0255] By “AAV cap coding region” is meant the region of the AAV genome which encodes the capsid proteins VP1, VP2, and VP3, or functional homologues thereof. These Cap expression products supply the packaging functions which are collectively required for packaging the viral genome.

[0256] In some embodiments, AAV capsids utilized for delivery of the nucleic acids encoding the engineered CasX, ERS, and, optionally, donor template nucleotides, to a host cell can be derived from any of several AAV serotypes, including without limitation, AAV1, AAV2, AAV3, AAV4, AAV5, AAV6, AAV7, AAV8, AAV9, AAV10, AAV11, AAV12, AAV 9.45, AAV 9.61, AAV 44.9, AAV-Rh74 (Rhesus macaque-derived AAV), and AAVRh10. In some embodiments, the AAV vector and the regulatory sequences are selected so that the total size of the vector is about 4.7 to 5 kb or less, permitting packaging within the AAV capsid. While the AAV vector may be of any AAV serotype, nervous cell tropism varies among AAV capsid serotypes. Thus, use of AAV serotypes compatible with widespread transgene delivery to astrocytes and motoneurons is preferred. In some embodiments, the AAV vector is of serotype 9 or of serotype 6, which have been demonstrated to effectively deliver polynucleotides to motor neurons and glia throughout the spinal cord in preclinical models of ALS (Foust, K D. et al. Therapeutic AAV9-mediated suppression of mutant SOD1 slows disease progression and extends survival in models of inherited ALS. Mol Ther. 21(12):2148 (2013)). In some embodiments, the methods provide use of AAV9 or AAV6 for targeting of neurons via intraparenchymal brain injection. In some embodiments, the methods provide use of AAV9 for intravenous administering of the vector wherein the AAV9 has the ability to penetrate the blood-brain barrier and drive gene expression in the nervous system via both neuronal and glial tropism of the vector. In other embodiments, the AAV vector is derived from serotype 8, which has been demonstrated to effectively deliver polynucleotides to neurons, liver, skeletal muscle and the heart. In other embodiments, the AAV vector is derived from serotype 5, which has been demonstrated to effectively deliver polynucleotides to neurons. In other embodiments, the AAV vector is derived from AAV serotype 2, which has been demonstrated to effectively deliver polynucleotides to retinal cells, skeletal muscle, neurons, vascular smooth muscle cells, and hepatocytes.

[0257] In order to eliminate any integrative capacity of the virus, recombinant AAV vectors remove rep and cap from the DNA of the viral genome and a three plasmid system can be utilized to transfect a suitable host packaging cell. To produce such vectors, the desired transgenes, together with promoters to drive transcription of the transgenes and any enhancer elements, are inserted between the ITRs, and the rep and cap genes are provided in trans in a second plasmid. A third plasmid, providing helper genes such as adenovirus E4, E2a and VA genes, is also used. All three plasmids are then transfected into an appropriate packaging cell using known techniques, such as by transfection. Alternatively, the host cell genome may comprise stably integrated Rep and Cap genes. Suitable packaging cell lines are known to one of ordinary skill in the art. See for example, www.cellbiolabs.com/aav-expression-and-packaging.

[0258] In an advantage of rAAV constructs of the present disclosure, the smaller size of the CRISPR Type V nucleases; e.g., the engineered CasX of the embodiments, permits the inclusion of all the necessary editing and ancillary expression components into the transgene such that a single rAAV particle can deliver and transduce these components into a target cell in a form that results in the expression of the CRISPR nuclease and ERS that are capable of effectively modifying the target nucleic acid of the target cell. This stands in marked contrast to other CRISPR systems, such as Cas9, where typically a two-particle system is employed to deliver the necessary editing components to a target cells.

[0259] Thus, in some embodiments of the rAAV systems, the disclosure provides; i) a first plasmid comprising the ITRs, sequences encoding the engineered CasX, sequences encoding one or more ERS, a first promoter operably linked to the CasX and a second promoter operably linked to the ERS, and, optionally, a 3′ UTR, a poly(A) signal sequence, a poly(A) sequence, and one or more enhancer elements; ii) a second plasmid comprising the rep and cap genes; and iii) a third plasmid comprising helper genes, wherein upon transfection of an appropriate packaging cell, the cell is capable of producing an rAAV having the ability to deliver to a target cell, in a single particle, sequences capable of expressing the engineered CasX nuclease and ERS having the ability to edit the target nucleic acid of the target cell. In some embodiments of the rAAV systems, the sequence encoding the CRISPR protein and the sequence encoding the at least first ERS are less than about 3100, less than about 3090, less than about 3080, less than about 3070, less than about 3060, less than about 3050, or less than about 3040 nucleotides in length, such that the sequences encoding the first and second promoter and, optionally, one or more enhance elements can have at least about 1300, at least about 1350, at least about 1360, at least about 1370, at least about 1380, at least about 1390, at least about 1400, at least about 1500, at least about 1600 nucleotides, at least 1650, at least about 1700, at least about 1750, at least about 1800, at least about 1850, or at least about 1900 nucleotides in combined length. In some embodiments of the rAAV systems, the sequence encoding the first promoter and the at least one accessory element have greater than at least about 1300, at least about 1350, at least about 1360, at least about 1370, at least about 1380, at least about 1390, at least about 1400, at least about 1500, at least about 1600 nucleotides, at least 1650, at least about 1700, at least about 1750, at least about 1800, at least about 1850, or at least about 1900 nucleotides in combined length. In some embodiments of the rAAV systems, the sequence encoding the first and second promoters and the at least one accessory element have greater than at least about 1300, at least about 1350, at least about 1360, at least about 1370, at least about 1380, at least about 1390, at least about 1400, at least about 1500, at least about 1600 nucleotides, at least 1650, at least about 1700, at least about 1750, at least about 1800, at least about 1850, or at least about 1900 nucleotides in combined length. Non-limiting examples of such rAAV systems and encoding sequences are disclosed in the Examples, below.

[0260] Packaging cells are typically used to form virus particles. The eukaryotic host packaging cell can be selected from Baby Hamster Kidney fibroblast (BHK) cells, human embryonic kidney 293 (HEK293), human embryonic kidney 293T (HEK293T), NS0 cells, SP2/0 cells, YO myeloma cells, P3X63 mouse myeloma cells, PER cells, PER.C6 cells, hybridoma cells, NIH3T3 cells, CV-1 (simian) in Origin with SV40 genetic material (COS), HeLa, Chinese hamster ovary (CHO) cells, or other eukaryotic cells known in the art suitable for the production of recombinant AAV. A number of transfection techniques are generally known in the art; see, e.g., Sambrook et al. (1989) Molecular Cloning, a laboratory manual, Cold Spring Harbor Laboratories, New York. Particularly suitable transfection methods include calcium phosphate co-precipitation, direct microinjection into cultured cells, electroporation, liposome mediated gene transfer, lipid-mediated transduction, and nucleic acid delivery using high-velocity microprojectiles.

[0261] In some embodiments, host cells transfected with the above-described AAV expression vectors are rendered capable of providing AAV helper functions in order to replicate and encapsidate the nucleotide sequences flanked by the AAV ITRs to produce rAAV viral particles. AAV helper functions are generally AAV-derived coding sequences which can be expressed to provide AAV gene products that, in turn, function in trans for productive AAV replication. AAV helper functions are used herein to complement necessary AAV functions that are missing from the AAV expression vectors. Thus, AAV helper functions include one, or both of the major AAV ORFs (open reading frames), encoding the rep and cap coding regions, or functional homologues thereof. Accessory functions can be introduced into and then expressed in host cells using methods known to those of skill in the art.

[0262] In other embodiments, suitable vectors may include XDP. XDP particles are particles that closely resemble viruses, but do not contain viral genetic material and are therefore non-infectious. In some embodiments, the disclosure provides XDPs produced in vitro that comprise an eCasX:ERS RNP complex. Non-limiting, exemplary XDP systems are described in PCT/US20/63488 and WO2021113772A1, incorporated by reference herein. In some embodiments, the disclosure provides host cells comprising polynucleotides or vectors encoding any of the foregoing XDP embodiments. Combinations of structural proteins from different viruses can be used to create XDPs, including components from virus families including Parvoviridae (e.g., adeno-associated virus), Retroviridae (e.g., HIV and Alpharetrovirus), Flaviviridae (e.g., Hepatitis C virus), Paramyxoviridae (e.g., Nipah) and bacteriophages (e.g., Qβ, AP205). In some embodiments, the disclosure provides XDP systems designed using components of retrovirus, including lentiviruses such as HIV, Alpharetrovirus, and other genera of the Retroviridae, in which individual plasmids comprising polynucleotides encoding the various components are introduced into a packaging cell that, in turn, produce the XDP. In some embodiments, the disclosure provides XDP comprising polynucleotides encoding one or more components of i) protease, ii) a protease cleavage site, iii) a Gag polyprotein or one or more components of a Gag polyprotein selected from matrix protein (MA), nucleocapsid protein (NC), capsid protein (CA), or p1-p6 protein, iv) a Gag-pol polyprotein or a truncated version lacking reverse transcriptase (RT) and integrase but comprising HIV protease (Gag-TFR-PR), v) engineered CasX; vi) ERS, and vi) targeting glycoproteins or antibody fragments wherein the resulting XDP particle encapsidates multiple eCasX:ERS RNPs. The polynucleotides encoding the Gag, engineered CasX and ERS can further comprise paired components designed to assist the trafficking of the components out of the nucleus of the host cell and into the budding XDP. Non-limiting examples of such trafficking components include hairpin RNA such as MS2 hairpin, PP7 hairpin, Qβ hairpin, and U1 hairpin II that have binding affinity for MS2 coat protein, PP7 coat protein, Qβ coat protein, and U1A signal recognition particle, respectively. In other embodiments, the ERS can comprise Rev response element (RRE) or portions thereof that have binding affinity to Rev, which can be linked to the Gag polyprotein.

[0263] The targeting glycoproteins or antibody fragments on the surface that provides tropism of the XDP to the target cell, wherein upon administration and entry into the target cell, the RNP molecule is free to be transported into the nucleus of the cell. In other embodiments, the disclosure provides XDP of the foregoing and further comprises a second ERS or a donor template. The foregoing offers advantages over other vectors in the art in that viral transduction to dividing and non-dividing cells is efficient and that the XDP delivers potent and short-lived RNP that escape a subject's immune surveillance mechanisms that would otherwise detect a foreign protein. The disclosure contemplates multiple configurations of the arrangement of the encoded components, including duplicates of some of the encoded components. The envelope glycoprotein can be derived from any enveloped viruses known in the art to confer tropism to XDP, including but not limited to the group consisting of Argentine hemorrhagic fever virus, Australian bat virus, Autographa californica multiple nucleopolyhedrovirus, Avian leukosis virus, baboon endogenous virus, Bolivian hemorrhagic fever virus, Boma disease virus, Breda virus, Bunyamwera virus, Chandipura virus, Chikungunya virus, Crimean-Congo hemorrhagic fever virus, Dengue fever virus, Duvenhage virus, Eastern equine encephalitis virus, Ebola hemorrhagic fever virus, Ebola Zaire virus, enteric adenovirus, Ephemerovirus, Epstein-Bar virus (EBV), European bat virus 1, European bat virus 2, Fug Synthetic gP Fusion, Gibbon ape leukemia virus, Hantavirus, Hendra virus, hepatitis A virus, hepatitis B virus, hepatitis C virus, hepatitis D virus, hepatitis E virus, hepatitis G Virus (GB virus C), herpes simplex virus type 1, herpes simplex virus type 2, human cytomegalovirus (HHV5), human foamy virus, human herpesvirus (HHV), human Herpesvirus 7, human herpesvirus type 6, human herpesvirus type 8, human immunodeficiency virus 1 (HIV-1), human metapneumovirus, human T-lymphotropic virus 1, influenza A, influenza B, influenza C virus, Japanese encephalitis virus, Kaposi's sarcoma-associated herpesvirus (HHV8), Kaysanur Forest disease virus, La Crosse virus, Lagos bat virus, Lassa fever virus, lymphocytic choriomeningitis virus (LCMV), Machupo virus, Marburg hemorrhagic fever virus, measles virus, Middle eastern respiratory syndrome-related coronavirus, Mokola virus, Moloney murine leukemia virus, monkey pox, mouse mammary tumor virus, mumps virus, murine gammaherpesvirus, Newcastle disease virus, Nipah virus, Nipah virus, Norwalk virus, Omsk hemorrhagic fever virus, papilloma virus, parvovirus, pseudorabies virus, Quaranfil virus, rabies virus, RD 114 Endogenous Feline Retrovirus, respiratory syncytial virus (RSV), Rift Valley fever virus, Ross River virus, rRotavirus, Rous sarcoma virus, rubella virus, Sabia-associated hemorrhagic fever virus, SARS-associated coronavirus (SARS-CoV), Sendai virus, Tacaribe virus, Thogotovirus, tick-borne encephalitis causing virus, varicella zoster virus (HHV3), varicella zoster virus (HHV3), variola major virus, variola minor virus, Venezuelan equine encephalitis virus, Venezuelan hemorrhagic fever virus, vesicular stomatitis virus (VSV), VSV-G, Vesiculovirus, West Nile virus, western equine encephalitis virus, and Zika Virus.

[0264] Upon production and recovery of the XDP comprising the eCasX:ERS RNP of any of the embodiments described herein, the XDP can be used in methods to edit target cells of subjects by the administering of such XDP, as described more fully, below.

[0265] For non-viral delivery, vectors can also be delivered wherein the vector or vectors encoding the engineered CasX and ERS are formulated in nanoparticles, wherein the nanoparticles contemplated include, but are not limited to nanospheres, liposomes, lipid nanoparticles (LNP), quantum dots, polyethylene glycol particles, hydrogels, and micelles. n some embodiments, the engineered CasX and ERS of the embodiments disclosed herein are formulated in a lipid nanoparticle, described more fully, below.

### VII. Methods for Modification of a Target Nucleic Acid

[0266] The engineered CasX proteins, ERS, nucleic acids, and variants thereof provided herein, as well as vectors encoding such components, are useful for various applications, including therapeutics, diagnostics, and research. To effect the methods of the disclosure for gene editing, resulting in modification of the gene, provided herein are programmable systems comprising the engineered CasX proteins and ERS. The programmable nature of the systems provided herein allows for the precise targeting to achieve the desired effect (nicking, cleaving, repairing, etc.) at one or more regions of predetermined interest in the target nucleic acid sequence of the target gene.

[0267] A variety of strategies and methods can be employed to modify the target nucleic acid sequence in a cell using the systems provided herein. As described herein, an engineered CasX introducing double-stranded cleavage of the target nucleic acid generates a double-stranded break within 18-26 nucleotides 5′ of a PAM site on the target strand and 10-18 nucleotides 3′ on the non-target strand. The resulting modification can result in random insertions or deletions (indels), or a substitution, duplication, frame-shift, or inversion of one or more nucleotides in those regions by non-homologous DNA end joining (NHEJ) repair mechanisms. Alternatively, the editing event may be a cleavage event followed by homology-directed repair (HDR), homology-independent targeted integration (HITI), micro-homology mediated end joining (MMEJ), single strand annealing (SSA) or base excision repair (BER), resulting in modification of the target nucleic acid sequence. In some embodiments of the method, the modification comprises introducing an in-frame mutation in the target nucleic acid. In some embodiments of the method, the modification comprises introducing a frame-shifting mutation in the target nucleic acid. In some embodiments of the method, the modification comprises introducing a premature stop codon in the coding sequence in the target nucleic acid. As a result of a gene knock-down by the foregoing modifications, the protein activity or function may be attenuated or the protein levels may be reduced or eliminated. In some embodiments of the method, the modification results in at least about 10%, at least about 20%, at least about 30%, at least about 40%, at least about 50%, at least about 60%, at least about 70%, at least about 80%, or at least about 90% or more reduced expression of the gene product in the modified cells of the population in comparison to cells in which the gene has not been modified. In other embodiments, the disclosure provides systems and methods for correcting mutations in the gene wherein a corrective sequence is knocked-in by introducing mutations at select locations by design of the targeting sequence linked to the ERS such that a wild-type or functional gene product is expressed.

[0268] In some embodiments, the disclosure provides methods of modifying a target nucleic acid in a cell, the method comprising contacting the target nucleic acid of the cell with: i) an engineered CasX protein and ERS editing pair comprising an engineered CasX and an ERS of any one of the embodiments described herein; ii) a nucleic acid encoding the engineered CasX and the ERS editing pair; iii) a vector comprising the nucleic acid of (ii), above; iv) an XDP comprising the eCasX:ERS editing pair of any one of the embodiments described herein; v) an LNP comprising an ERS and a nucleic acid encoding the engineered CasX; or vi) combinations of two or more of (i) to (v), wherein the contacting of the target nucleic acid with an engineered CasX protein and ERS gene editing pair and, optionally, the donor template, modifies the target nucleic acid in the cell. In some cases, the modification results in a correction or compensation of a mutation in a cell, thereby creating an edited cell such that expression of a functional gene product can occur. In other embodiments of the method, the modification comprises reducing or eliminating expression of the gene product by a knock-down or knock-out of the gene.

[0269] In some embodiments of the method of modifying a target nucleic acid sequence in a cell, wherein the method comprises contacting the target nucleic acid of the cell with an editing pair, wherein the editing pair comprises an engineered CasX selected from the group consisting of the sequences of SEQ ID NOS: 247-294, 24916-49628, 49746-49747, and 49871-49873, or a variant sequence at least 60% identical, at least 70% identical, at least 80% identical, at least 81% identical, at least 82% identical, at least 83% identical, at least 84% identical, at least 85% identical, at least 86% identical, at least 86% identical, at least 87% identical, at least 88% identical, at least 89% identical, at least 89% identical, at least 90% identical, at least 91% identical, at least 92% identical, at least 93% identical, at least 94% identical, at least 95% identical, at least 96% identical, at least 97% identical, at least 98% identical, at least 99% identical, or at least 99.5% identical thereto, the ERS scaffold comprises a sequence selected from the group consisting of the sequences of SEQ ID NOS: 156, 739-907, 11568-22227, 23572-24915, 49719-49735, and 49871-49873, or a sequence at least 65% identical, at least 70% identical, at least 75% identical, at least 80% identical, at least 81% identical, at least 82% identical, at least 83% identical, at least 84% identical, at least 85% identical, at least 86% identical, at least 86% identical, at least 87% identical, at least 88% identical, at least 89% identical, at least 89% identical, at least 90% identical, at least 91% identical, at least 92% identical, at least 93% identical, at least 94% identical, at least 95% identical, at least 96% identical, at least 97% identical, at least 98% identical, at least 99% identical, at least 99.5% identical thereto, and the ERS comprises a targeting sequence that is complementary to the target nucleic acid and is capable of hybridizing with the target nucleic acid.

[0270] In those cases where the engineered CasX is delivered to the cell in the protein form and the ERS is delivered in the RNA form, the engineered CasX and ERS can be pre-complexed and delivered as an RNP. In those cases where the engineered CasX and ERS are delivered to the target cell as nucleic acids and then expressed in the cell, the engineered CasX and ERS can associate as an RNP. In those cases where an LNP delivers the ERS and the engineered CasX is delivered as an mRNA and then is expressed in the cell, the engineered CasX and ERS can associate as an RNP. In the foregoing, the engineered CasX protein provides the site-specific activity and is guided to a target site (and further stabilized at a target site) within a target nucleic acid sequence to be modified by virtue of its association with the ERS. The engineered CasX protein of the RNP complex provides the site-specific activities of the complex such as binding, introducing a single-strand break or a double-strand break within or near the gene that results in a modification of the target nucleic acid such as a permanent indel (deletion or insertion) or other mutation (a base change, inversion or rearrangement with respect to the genomic sequence) in the target nucleic acid, as described herein, with a corresponding modulation of expression or alteration in the function of the gene product, thereby creating a modified cell.

[0271] In other embodiments of the method of modifying a target nucleic acid sequence in a cell, the method comprises contacting the target nucleic acid sequence with a plurality of RNPs with a first and a second, or prwith three, or with four or more ERSs targeted to different or overlapping portions of the gene wherein the engineered CasX protein introduces multiple breaks, either single-stranded or double-stranded, in the target nucleic acid that result in permanent indels (introducing an insertion, or a deletion) or mutations in the target nucleic acid, as described herein, or an excision of the intervening sequence between the breaks with a corresponding modulation of expression or alteration in the function of the gene product, thereby creating a modified cell.

[0272] In other embodiments, the disclosure provides methods of modifying a target nucleic acid sequence of a cell, comprising contacting said cell with a vector of any of the embodiments described herein comprising a nucleic acid encoding a eCasX:ERS gene editing pair comprising an engineered CasX protein and an ERS of any of the embodiments described herein and, optionally, a donor template, wherein the ERS comprises a targeting sequence complementary to, and therefore capable of hybridizing with, the target nucleic acid sequence, wherein the contacting results in modification of the target nucleic acid. Introducing recombinant expression vectors into cells in vitro can occur in any suitable culture media and under any suitable culture conditions that promote the survival of the cells. Introducing recombinant expression vectors into a target cell can be carried out in vivo by administration to a subject using methods and regimens described below.

[0273] In some embodiments, vectors may be provided directly to a target host cell. For example, cells may be contacted with vectors comprising the subject nucleic acids (e.g., recombinant expression vectors encoding the ERS and the engineered CasX protein) such that the vectors are taken up by the cells. Methods for contacting cells with nucleic acid vectors that are plasmids include electroporation, calcium chloride transfection, microinjection, and lipofection are well known in the art. For viral vector delivery, cells can be contacted with viral particles comprising the subject viral expression vectors; e.g., the vectors are viral particles such as AAV or VLP that comprise polynucleotides that encode the eCasX:ERS components. For non-viral delivery, vectors or the eCasX:ERS components can also be formulated for delivery in lipid nanoparticles, described more fully, below.

[0274] In some embodiments, the modifying of the target nucleic acid occurs in vitro, inside of a cell, for example in a cell culture system. In some embodiments, the modifying occurs in vivo inside of a cell of a subject, for example in a cell in an animal. In some embodiments, the cell is a eukaryotic cell. Exemplary eukaryotic cells may include cells selected from the group consisting of a mouse cell, a rat cell, a pig cell, a dog cell, and a non-human primate cell. In some embodiments, the cell is a human cell. Non-limiting examples of cells include an embryonic stem cell, an induced pluripotent stem cell, a germ cell, a fibroblast, an oligodendrocyte, a glial cell, a hematopoietic stem cell, a neuron progenitor cell, a neuron, a muscle cell, a bone cell, a hepatocyte, a pancreatic cell, a retinal cell, a cancer cell, a T-cell, a B-cell, an NK cell, a fetal cardiomyocyte, a myofibroblast, a mesenchymal stem cell, an autotransplanted expanded cardiomyocyte, an adipocyte, a totipotent cell, a pluripotent cell, a blood stem cell, a myoblast, an adult stem cell, a bone marrow cell, a mesenchymal cell, a parenchymal cell, an epithelial cell, an endothelial cell, a mesothelial cell, fibroblasts, osteoblasts, chondrocytes, exogenous cell, endogenous cell, stem cell, hematopoietic stem cell, bone-marrow derived progenitor cell, myocardial cell, skeletal cell, fetal cell, undifferentiated cell, multi-potent progenitor cell, unipotent progenitor cell, a monocyte, a cardiac myoblast, a skeletal myoblast, a macrophage, a capillary endothelial cell, a xenogenic cell, an allogenic cell, or a post-natal stem cell. In alternative embodiments, the cell is a prokaryotic cell.

[0275] In some embodiments of the methods of modifying a target nucleic acid of a cell in vitro or ex vivo, to induce cleavage or any desired modification to a target nucleic acid, the ERS and the engineered CasX protein of the present disclosure and, optionally, the donor template sequence, whether they be introduced as nucleic acids or polypeptides, complexed RNP, vectors or XDP, are provided to the cells for about 30 minutes to about 24 hours, or at least about 1 hour, 1.5 hours, 2 hours, 2.5 hours, 3 hours, 3.5 hours 4 hours, 5 hours, 6 hours, 7 hours, 8 hours, 12 hours, 16 hours, 18 hours, 20 hours, or any other period from about 30 minutes to about 24 hours, which may be repeated with a frequency of about every day to about every 4 days, e.g., every 1.5 days, every 2 days, every 3 days, or any other frequency from about every day to about every four days. The agent(s) may be provided to the subject cells one or more times, e.g., one time, twice, three times, or more than three times, and the cells allowed to incubate with the agent(s) for some amount of time following each contacting event; e.g., 30 minutes to about 24 hours. In the case of in vitro-based methods, after the incubation period with the engineered CasX and ERS (and optionally the donor template), the media is replaced with fresh media and the cells are cultured further.

[0276] In some embodiments, the method comprises administering to a subject a therapeutically-effective dose of a population of cells modified to correct or compensate for the mutation of the gene. In some embodiments, the administration of the modified cells results in the expression of wild-type or a functional gene product in the subject. In one embodiment, the cells are autologous with respect to the subject to be administered the cells. In another embodiment, the cells are allogeneic with respect to the subject to be administered the cells. In some cases, the subject is selected from the group consisting of mouse, rat, pig, and non-human primate. In other cases, the subject is a human.

### VIII. Therapeutic Methods

[0277] In another aspect, the present disclosure relates to methods of treating a disease or disorder in a subject in need thereof. A number of therapeutic strategies have been used to design the systems for use in the methods of treatment of a subject with a disease or disorder related to a genetic mutation. In some embodiments, the modification of the target nucleic acid occurs in a subject having a mutation in an allele of a gene wherein the mutation causes a disease or disorder in the subject. In some embodiments, the modification of the target nucleic acid changes the mutation to a wild type allele of the gene or results in the expression of a functional gene product. In some embodiments, the modification of the target nucleic acid knocks down or knocks out expression of an allele of a gene causing a disease or disorder in the subject.

[0278] In some embodiments, the method comprises administering to the subject a therapeutically effective dose of a system comprising a gene editing pair of an engineered CasX and ERS disclosed herein with a linked targeting sequence complementary to the target nucleic acid to be modified. In some embodiments, the method of treatment comprises administering to the subject a therapeutically effective dose of: i) a eCasX:ERS system comprising ant engineered CasX and a first ERS (with a targeting sequence complementary to the target nucleic acid to be modified) of any of the embodiments described herein; ii) a nucleic acid encoding the eCasX:ERS system of (i); iii) a vector comprising the nucleic acid of (ii), which can be an AAV of any of the embodiments described herein; iv) a XDP comprising the eCasX:ERS system of (i); v) an LNP comprising an ERS and a nucleic acid encoding the engineered CasX; or vi) combinations of two or more of (i)-(v), wherein 1) the gene of the cells of the subject targeted by the first ERS is modified (e.g., knocked-down or knocked-out) by the engineered CasX protein (and, optionally, the donor template); or 2) the gene of the cells of the subject targeted by the first ERS is corrected or modified by the engineered CasX protein such that a functional gene product can be expressed. In some embodiments, the method of treating further comprises administering a second, third, or fourth ERS or nucleic acids encoding the ERS, or an XDP comprising a second, third, or fourth ERS, wherein the second, third, or fourth ERS have targeting sequences complementary to a different or overlapping portion of the target nucleic acid sequence compared to the first ERS. In some cases, the use of a second ERS complexed with an engineered CasX results in edits to a different gene than the first ERS. In other cases, the use of a second ERS targeting the same gene as the first ERS can result in the excision of the nucleotides between the two cleavage locations. It will be understood that in the foregoing, each different ERS is paired with an engineered CasX protein. In embodiments in which two or more gene editing pairs are provided to the cell (e.g., comprising two ERS comprising two or more different spacers that are complementary to different sequences within the same or different target nucleic acid), the gene pairs may be provided simultaneously in the same vector (e.g., as two RNPS and/or within a single AAV vector), or delivered simultaneously in separate vectors. Alternatively, they may be provided consecutively, e.g., the first gene editing pair being provided first, followed by the second gene editing pair, or vice versa.

[0279] In some embodiments, method of treatment comprises administering a therapeutically effective dose of an AAV vector encoding the eCasX:ERS system, wherein the capsid of the AAV vector is selected from AAV1, AAV2, AAV3, AAV4, AAV5, AAV6, AAV7, AAV8, AAV9, AAV10, AAV 9.45, AAV 9.61, AAV-Rh74, or AAVRh10. In other embodiments, the method of treatment comprises administering a therapeutically effective dose of a XDP comprising RNP of the eCasX:ERS system to the subject. In other embodiments, the method of treatment comprises administering a therapeutically effective dose of an LNP comprising an ERS and a nucleic acid encoding the engineered CasX. The vector, XDP, or LNP can be administered by a route of administration selected from the group consisting of intraparenchymal, intravenous, intra-arterial, intramuscular, subcutaneous, intracerebroventricular, intracisternal, intrathecal, intracranial, intravitreal, subretinal, intracapsular, and intraperitoneal routes or combinations thereof, wherein the administering method is injection, transfusion, or implantation. The administration can be once, twice, or can be administered multiple times using a regimen schedule of weekly, every two weeks, monthly, quarterly, every six months, once a year, or every 2 or 3 years. In some cases, the subject is selected from the group consisting of mouse, rat, pig, and non-human primate. In other cases, the subject is a human.

[0280] In some embodiments of the method, the modifying comprises introducing a single-stranded break in the target nucleic acid of the targeted cells of a subject. In other cases, the modifying comprises introducing a double-stranded break in the target nucleic acid of the targeted cells of a subject. In some embodiments, the modifying introduces one or more mutations in the target nucleic acid, such as an insertion, deletion, substitution, duplication, or inversion of one or more nucleotides in the gene, wherein expression of the gene product in the modified cells of the subject is reduced by at least about 10%, at least about 20%, at least about 30%, at least about 40%, at least about 50%, at least about 60%, at least about 70%, at least about 80%, or at least about 90% or more in comparison to a cell that has not been modified. In some cases, the gene of the modified cells of the subject are modified such that least 70%, at least 75%, at least 80%, at least 85%, at least 90%, or at least 95% of the modified cells do not express a detectable level of the gene product. In some embodiments, the administering of the therapeutically effective amount of an eCasX:ERS system to knock down or knock out expression of a gene product to a subject with a disease leads to the prevention or amelioration of the underlying disease such that an improvement is observed in the subject, notwithstanding that the subject may still be afflicted with the underlying disease. In some embodiments, the administering of the therapeutically effective amount of a eCasX:ERS system to correct or compensate for a mutation a gene product to a subject with a disease leads to the prevention or amelioration of the underlying disease such that an improvement is observed in the subject, notwithstanding that the subject may still be afflicted with the underlying disease. In such embodiments, the gene can be modified by the NHEJ host repair mechanisms, or utilized in conjunction with a donor template that is inserted by HDR or HITI mechanisms to either excise, correct, or compensate for the mutation in the cells of the subject, such that expression of a wild-type or functional gene product in modified cells is increased by at least about 50%, at least about 60%, at least about 70%, at least about 80%, at least about 90%, or at least about 95% in comparison to a cell that has not been modified. In some embodiments, the administration of the therapeutically effective amount of the engineered CasX and ERS system leads to an improvement in at least one clinically-relevant parameter for a disease.

IX. Particles for Delivery of the eCasX:ERS Systems

[0281] In another aspect, the present disclosure provides particle compositions for delivery of the repressor systems, such as the eCasx:ERS systems described herein, to cells or to subjects for the repression of a gene. Particles envisaged as within the scope of the instant disclosure include, but are not limited to, nanoparticles such as synthetic nanoparticles, polymeric nanoparticles, lipid nanoparticles, viral particles and virus-like particles. Particles of the disclosure may encapsulate payloads such as ERS variants, as described herein, optionally in combination with mRNA encoding the engineered CasX proteins of any of the embodiments described herein. Alternatively, or in addition, particles of the disclosure may encapsulate payloads of ERS variants and engineered CasX proteins, for example when associated as a ribonucleoprotein (RNP) complex. In some embodiments, the particles are synthetic nanoparticles that encapsulate payloads of ERS variants and mRNA encoding engineered CasX of any of the embodiments described herein. In some embodiments, the synthetic nanoparticles comprise biodegradable polymeric nanoparticles (PNP). In some embodiments, materials for the creation of biodegradable polymeric nanoparticles (PNP) include polylactide, poly (lactic-co-glycolic acid) (PLGA), poly(ethyl cyanoacrylate), poly(butyl cyanoacrylate), poly(isobutyl cyanoacrylate), and poly(isohexyl cyanoacrylate), polyglutamic acid (PGA), poly (ε-caprolactone) (PCL), cyclodextrin, and natural polymers for instance chitosan, albumin, gelatin, and alginate, which are the most utilized polymers for the synthesis of PNP (Production and clinical development of nanoparticles for gene delivery. Molecular Therapy-Methods & Clinical Development 3:16023; doi:10.1038 (2016)). In other embodiments, the particles are lipid nanoparticles that encapsulate ERS variants and mRNA encoding engineered CasX of any of the embodiments described herein, described more fully, below.

a. Lipid Nanoparticles (LNP)

[0282] The present disclosure provides lipid nanoparticles (LNP) for delivery of the eCasX:ERS systems described herein to cells or to subjects for the repression of a gene. In some embodiments, the LNPs of the disclosure are tissue-specific, have excellent biocompatibility, and can deliver the eCasX:ERS systems with high efficiency, and thus can be used for the repression of the targeted gene.

[0283] The disclosure further provides LNP compositions and pharmaceutical compositions comprising a plurality of the LNP described herein.

[0284] In their native forms, nucleic acid polymers are unstable in biological fluids and cannot penetrate into the cytoplasm of target cells, thus requiring delivery systems. Lipid nanoparticles (LNP) have proven useful for both the protection and delivery of nucleic acids to tissues and cells. Furthermore, the use of mRNA in LNPs to encode the engineered CasX eliminates the possibility of undesirable genome integration, as compared to DNA vectors. Moreover, mRNA efficiently translates into protein in both mitotic and non-mitotic cells, as it does not require entry into the nucleus since it exerts its function in the cytoplasmic compartment. LNPs as a delivery platform thus offer the additional advantage of being able to co-formulate both the mRNA encoding the CRISPR nuclease and the ERS into single LNP particles.

[0285] Accordingly, in various embodiments, the disclosure encompasses lipid nanoparticles and compositions that may be used for a variety of purposes, including the delivery of encapsulated or associated (e.g., complexed) therapeutic agents such as nucleic acids to cells, both in vitro and in vivo. In certain embodiments, the disclosure encompasses methods of treating or preventing diseases or disorders in a subject in need thereof by contacting the subject with a lipid nanoparticle that encapsulates or is associated with a suitable therapeutic agent complexed through various physical, chemical or electrostatic interactions between one or more of the lipid components used in the compositions to make LNPs. In some embodiments, the suitable therapeutic agent comprises a eCasX:ERS system as described herein.

[0286] In certain embodiments, the lipid nanoparticles are useful for the delivery of nucleic acids, including, e.g., the mRNA encoding the engineered CasX of the disclosure, including the sequences of SEQ ID NOS: 247-294, 24916-49628, 49746-49747, and 49871-49873, and the ERS variants of the disclosure, including the sequences of SEQ ID NOS: 156, 739-907, 11568-22227, 23572-24915, and 49719-49735. In some embodiments, the present disclosure provides LNP in which the ERS and mRNA encoding the engineered CasX are incorporated into single LNP particles. In other embodiments, the present disclosure provides LNP in which the ERS and mRNA encoding the engineered CasX are incorporated into separate populations of LNPs, which can be formulated together in varying ratios for administration.

[0287] The lipid nanoparticles and lipid nanoparticle compositions of certain embodiments of the disclosure may be used to repress expression of a desired protein both in vitro and in vivo by contacting cells with a lipid nanoparticle comprising one or more ionizable lipids described herein, wherein the lipid nanoparticle encapsulates or is associated with a nucleic acid that is expressed to produce the desired protein (e.g., a messenger RNA encoding the engineered CasX protein). In some embodiments, the lipid nanoparticles and compositions may be used to repress the expression of a target gene both in vitro and in vivo by contacting cells with a lipid nanoparticle comprising one or more novel ionizable cationic lipids or permanently charged cationic lipids described herein, wherein the lipid nanoparticle encapsulates or is associated with one or more nucleic acids of the eCasX:ERS systems of the disclosure that repress the targeted gene. The lipid nanoparticles and compositions of embodiments of the disclosure may also be used for co-delivery of different nucleic acids (e.g., mRNA, gRNA, siRNA, saRNA, mcDNA, and plasmid DNA) separately or in combination, such as may be useful to provide an effect requiring colocalization of different nucleic acids (e.g., mRNA encoding for a suitable gene repressing factor or enzyme and ERS for targeting of the gene).

[0288] In some embodiments, LNPs and LNP compositions described herein include at least one cationic lipid, at least one conjugated lipid, at least one steroid or derivative thereof, at least one helper lipid, or any combination thereof. Alternatively, the lipid compositions of the disclosure can include an ionizable lipid, such as an ionizable cationic lipid, a helper lipid (usually a phospholipid), cholesterol, and a polyethylene glycol-lipid conjugate (PEG-lipid) to improve the colloidal stability in biological environments by, for example, reducing a specific absorption of plasma proteins and forming a hydration layer over the nanoparticles. Such lipid compositions can be formulated at typical mole ratios of 50:10:37-39:13 or 20-50:8-65:15-70:1-3.0 of IL:HL:Sterol: PEG-lipid, with variations made to adjust individual properties.

[0289] The LNPs and LNP compositions of the present disclosure are configured to protect and deliver an encapsulated payload of the systems of the disclosure to tissues and cells, both in vitro and in vivo. Various embodiments of the LNPs and LNP compositions of the present disclosure are described in further detail herein.

b. Cationic Lipid

[0290] In some aspects, the LNPs and LNP compositions of the present disclosure include at least one cationic lipid. The term “cationic lipid,” refers to a lipid species that has a net positive charge. In some embodiments, the cationic lipid is an ionizable cationic lipid that has a net positive charge at a selected pH<pKa of the ionizable lipid. In some embodiments, the ionizable cationic lipid has a pKa less than 7 such that the LNPs and LNP compositions achieve efficient encapsulation of the payload at a relatively low pH below the pKa of the respective lipid. In some embodiments, the cationic lipid has a pKa of about 5 to about 8, about 5.5 to about 7.5, about 6 to about 7, or about 6.5 to about 7. In some embodiments, the cationic lipid may be protonated at a pH below the pKa of the cationic lipid, and it may be substantially neutral at a pH over the pKa. The LNPs and LNP compositions may be safely delivered to a target organ (for example, the liver, lung, heart, spleen, as well as to tumors) and/or cell(hepatocyte, LSEC, cardiac cell, cancer cell, etc.) in vivo, and during endocytosis, exhibit a positive charge when pH drops below the ionizable lipid pKa to release the encapsulated payload through electrostatic interaction with an anionic lipids of the endosomal membrane.

[0291] Early formulations of LNP utilizing permanently cationic lipids resulted in LNPs with positive surface charge that proved toxic in vivo, plus were rapidly cleared by phagocytic cells. By changing to ionizable cationic lipids bearing tertiary amines, especially those with pKa<7, results in LNP achieving efficient encapsulation of nucleic acid polymers at low pH by interacting electrostatically with the negative charges of the phosphate backbone of mRNA, that also result in largely neutral systems at physiological pH values, thus alleviating problems associated with permanently-charged cationic lipids.

[0292] As used herein, “ionizable lipid” means an amine-containing lipid which can be easily protonated, and, for example, it may be a lipid of which charge state changes depending on the surrounding pH. The ionizable lipid may be protonated (positively charged) at a pH below the pKa of a cationic lipid, and it may be substantially neutral at a pH over the pKa. In one example, the LNP may comprise a protonated ionizable lipid and/or an ionizable lipid showing neutrality. In some embodiments, the LNP has a pKa of 5 to 8, 5.5 to 7.5, 6 to 7, or 6.5 to 7. The pKa of the LNP is important for in vivo stability and release of the nucleic acid payload of the LNP in the target cell or organ. In some embodiments, the LNP having the foregoing pKa ranges may be safely delivered to a target organ (for example, the liver, lung, heart, spleen, as well as to tumors) and/or target cell (hepatocyte, LSEC, cardiac cell, cancer cell, etc.) in vivo, and inside the endosome, exhibit a positive charge to release the encapsulated payload through electrostatic interaction with an anionic lipids of the endosomal membrane.

[0293] The ionizable lipid is an ionizable compound having characteristics similar to lipids generally, and through electrostatic interaction with a nucleic acid (for example, an mRNA of the disclosure), may play a role of encapsulating the nucleic acid payloads within the LNP with high efficiency.

[0294] According to the type of the amine and the tail group comprised in the ionizable lipid, (i) the nucleic acid encapsulation efficiency, (ii) PDI (polydispersity index). and/or (iii) the nucleic acid delivery efficiency to tissue and/or cells constituting an organ (for example, hepatocytes or liver sinusoidal endothelial cells in the liver) of the LNP may be different. In certain embodiments, the ionizable lipid is an ionizable cationic lipid, and comprises from about 25 mol % to about 66 mol % of the total lipid present in the particle.

[0295] The LNP comprising an ionizable lipid comprising an amine may have one or more kinds of the following characteristics. (1) the ability to encapsulate a nucleic acid with high efficiency; (2) uniform size of prepared particles (or having a low PDI value); and/or (3) excellent nucleic acid delivery efficiency to organs such as liver, lung, heart, spleen, bone marrow, as well as to tumors, and/or cells constituting such organs (for example, hepatocytes, LSEC, cardiac cells, cancer cells, etc.).

[0296] In particular embodiments, the cationic lipid form plays a crucial role both in nucleic acid encapsulation through electrostatic interactions and intracellular release by disrupting endosomal membranes. The nucleic acid payloads are encapsulated within the LNP by the ionic interactions they form with the positively charged cationic lipid. Non-limiting examples of ionizable cationic lipid components utilized in the LNP of the disclosure are selected from DLin-MC3-DMA (heptatriaconta-6,9,28,31-tetraen-19-yl4-(dimethylamino)butanoate), DLin-KC2-DMA (2,2-dilinoleyl-4-(2-dimethylaminoethyl)-[1,3]-dioxolane), and TNT (1,3,5-triazinane-2,4,6-trione) and TT (N1,N3,N5-tris(2-aminoethyl)benzene-1,3,5-tricarboxamide). Non-limiting examples of helper lipids utilized in the LNP of the disclosure are selected from DSPC (1,2-distearoyl-sn-glycero-3-phosphocholine), POPC (2-Oleoyl-1-palmitoyl-sn-glycero-3-phosphocholine) and DOPE (1,2-Dioleoyl-sn-glycero-3-phosphoethanolamine), 1,2-dioleoyl-sn-glycero-3-phospho-(1′-rac-glycerol) DOPG, 1,2-Dimyristoyl-sn-glycero-3-phosphoethanolamine (DMPE), 1,2-dilauroyl-sn-glycero-3-phosphocholine (DLPC), sphingolipid, and ceramide. Cholesterol and PEG-DMG ((R)-2,3-bis(octadecyloxy)propyl-1-(methoxy polyethylene glycol 2000) carbamate), PEG-DSG (1,2-Distearoyl-rac-glycero-3-methylpolyoxyethylene glycol 2000), or DSPE-PEG2k (1,2-distearoyl-sn-glycero-3-phosphoethanolamine-N-[amino(polyethylene glycol)-2000]), are components utilized in the LNP of the disclosure for the stability, circulation, and size of the LNP.

[0297] In some embodiments, the cationic lipid in the LNP of the disclosure comprises a tertiary amine. In some embodiments, the tertiary amine includes alkyl chains connected to N of the tertiary amine with ether linkages. In some embodiments, the alkyl chains comprise C12-C30 alkyl chains having 0 to 3 double bonds. In some embodiments, the alkyl chains comprise C16-C22 alkyl chains. In some embodiments, the alkyl chains comprise C18 alkyl chains. A number of cationic lipids and related analogs have been described in U.S. Patent Publication Nos. 20060083780, 20060240554, 20110117125, 20190336608, 20190381180 and 20200121809; U.S. Pat. Nos. 5,208,036; 5,264,618; 5,279,833; 5,283,185; 5,753,613; 5,785,992; 9,738,593; 10,106,490; 10,166,298; 10,221,127; and 11,219,634; and PCT Publication No. WO 96/10390, the disclosures of which are herein incorporated by reference in their entirety.

[0298] In some embodiments, the cationic lipid in the LNP of the disclosure may comprise, for example, one or more ionizable cationic lipids wherein the ionizable cationic lipid is a dialkyl lipid. In other embodiments, the ionizable cationic lipid is a tetraalkyl lipid.

[0299] In some embodiments, the cationic lipid in the LNP of the disclosure is selected from 1,2-dilinoleyloxy-N,N-dimethylaminopropane (DLinDMA), 1,2-dilinolenyloxy-N,N-dimethylaminopropane (DLenDMA), 2,2-dilinoleyl-4-(2-dimethylaminoethyl)-[1,3]-dioxolane (DLin-K-C2-DMA), 2,2-dilinoleyl-4-(3-dimethylaminopropyl)-[1,3]-dioxolane (DLin-K-C3-DMA), 2,2-dilinoleyl-4-(4-dimethylaminobutyl)-[1,3]-dioxolane (DLin-K-C4-DMA), 2,2-dilinoleyl-5-dimethylaminomethyl-[1,3]-dioxane (DLin-K6-DMA), 2,2-dilinoleyl-4-N-methylpepiazino-[1,3]-dioxolane (DLin-K-MPZ), 2,2-dilinoleyl-4-dimethylaminomethyl-[1,3]-dioxolane (DLin-K-DMA), 1,2-dilinoleylcarbamoyloxy-3-dimethylaminopropane (DLin-C-DAP), 1,2-dilinoleyoxy-3-(dimethylamino)acetoxypropane (DLin-DAC), 1,2-dilinoleyoxy-3-morpholinopropane (DLin-MA), 1,2-dilinoleoyl-3-dimethylaminopropane (DLinDAP), 1,2-dilinoleylthio-3-dimethylaminopropane (DLin-S-DMA), 1-linoleoyl-2-linoleyloxy-3-dimethylaminopropane (DLin-2-DMAP), 1,2-dilinoleyloxy-3-trimethylaminopropane chloride salt (DLin-TMA.Cl), 1,2-dilinoleoyl-3-trimethylaminopropane chloride salt (DLin-TAP.Cl), 1,2-dilinoleyloxy-3-(N-methylpiperazino)propane (DLin-MPZ), 3-(N,N-dilinoleylamino)-1,2-propanediol (DLinAP), 3-(N,N-dioleylamino)-1,2-propanedio (DOAP), 1,2-dilinoleyloxo-3-(2-N,N-dimethylamino)ethoxypropane (DLin-EG-DMA), N,N-dioleyl-N,N-dimethylammonium chloride (DODAC), 1,2-dioleyloxy-N,N-dimethylaminopropane (DODMA), 1,2-distearyloxy-N,N-dimethylaminopropane (DSDMA), N-(1-(2,3-dioleyloxy)propyl)-N,N,N-trimethylammonium chloride (DOTMA), N,N-distearyl-N,N-dimethylammonium bromide (DDAB), N-(1-(2,3-dioleoyloxy)propyl)-N,N,N-trimethylammonium chloride (DOTAP), 3-(N—(N′,N′-dimethylaminoethane)-carbamoyl)cholesterol (DC-Chol), N-(1,2-dimyristyloxyprop-3-yl)-N,N-dimethyl-N-hydroxyethyl ammonium bromide (DMRIE), 2,3-dioleyloxy-N-[2(spermine-carboxamido)ethyl]-N,N-dimethyl-1-propanaminiumtrifluoroacetate (DOSPA), dioctadecylamidoglycyl spermine (DOGS), 3-dimethylamino-2-(cholest-5-en-3-beta-oxybutan-4-oxy)-1-(cis,cis-9,12-octadecadienoxy)propane (CLinDMA), 2-[5′-(cholest-5-en-3-beta-oxy)-3′-oxapentoxy)-3-dimethyl-1-(cis,cis-9′,1-2′-octadecadienoxy)propane (CpLinDMA), N,N-dimethyl-3,4-dioleyloxybenzylamine (DMOBA), 1,2-N,N′-dioleylcarbamyl-3-dimethylaminopropane (DOcarbDAP), 1,2-N,N′-dilinoleylcarbamyl-3-dimethylaminopropane (DLincarbDAP), and any combination of the forgoing.

[0300] In some embodiments, the cationic lipid in the LNP of the disclosure is selected from heptatriaconta-6,9,28,31-tetraen-19-yl4-(dimethylamino)butanoate (DLin-MC3-DMA), 2,2-dilinoleyl-4-(2-dimethylaminoethyl)-[1,3]-dioxolane (DLin-KC2-DMA), (1,3,5-triazinane-2,4,6-trione) (TNT), N1,N3,N5-tris(2-aminoethyl)benzene-1,3,5-tricarboxamide (TT), and any combination of the forgoing.

[0301] In some embodiments, the N/P ratio (nitrogen from the cationic/ionizable lipid and phosphate from the nucleic acid) in the LNP of the disclosure is in the range of is about 3:1 to 7:1, or about 4:1 to 6:1, or is 3:1, or is 4:1, or is 5:1, or is 6:1, or is 7:1, or is 8:1, or is 9:1.

### Conjugated Lipid

[0302] In some embodiments, the LNPs and LNP compositions of the present disclosure include at least one conjugated lipid. In some embodiments, the conjugated lipid may be selected from a polyethyleneglycol (PEG)-lipid conjugate, a polyamide (ATTA)-lipid conjugate, a cationic-polymer-lipid conjugate (CPL), and any combination of the foregoing. In some cases, conjugated lipids can inhibit aggregation of the LNPs of the disclosure.

[0303] In some embodiments, the conjugated lipid of the LNP of the disclosure comprises a pegylated lipid. The terms “polyethyleneglycol (PEG)-lipid conjugate,” “pegylated lipid” “lipid-PEG conjugate”, “lipid-PEG”, “PEG-lipid”, “PEG-lipid”, or “lipid-PEG” are used interchangeably herein and refer to a lipid attached to a polyethylene glycol (PEG) polymer which is a hydrophilic polymer. The pegylated lipid contributes to the stability of the LNPs and LNP compositions and reduces aggregation of the LNPs. In other embodiments, the lipid of the LNP comprises peptide modified PEG lipids that are used for targeting cell surface receptors Ex: DSPE-PEG-RGD, DSPE-PEG-Transferrin, DSPE-PEG-cholesterol.

[0304] As the PEG-lipid can form the surface lipid, the size of the LNP can be readily varied by varying the proportion of surface (PEG) lipid to the core (ionizable cationic) lipids. In some embodiments, the PEG-lipid of the LNP of the disclosure can be varied from −1 to 5 mol % to modify particle properties such as size, stability, and circulation time.

[0305] The lipid-PEG conjugate contributes to the particle stability in serum of the nanoparticle within the LNP, and plays a role of preventing aggregation between nanoparticles. In addition, the lipid-PEG conjugate may protect nucleic acids, such as mRNAs encoding the engineered CasX proteins of the disclosure, or ERSs of the disclosure, from degrading enzymes during in vivo delivery of the nucleic acids and enhance the stability of the nucleic acids in vivo and increase the half-life of the delivered nucleic acids encapsulated in the nanoparticle. Examples of PEG-lipid conjugates include, but are not limited to, PEG-DAG conjugates, PEG-DAA conjugates, and mixtures thereof. In certain embodiments, the PEG-lipid conjugate is selected from the group consisting of a PEG-diacylglycerol (PEG-DAG) conjugate, a PEG-dialkyloxypropyl (PEG-DAA) conjugate, a PEG-phospholipid conjugate, a PEG-ceramide (PEG-Cer) conjugate, and a mixture thereof.

[0306] In some embodiments, the pegylated lipid of the LNP of the disclosure is selected from a PEG-ceramide, a PEG-diacylglycerol, a PEG-dialkyloxypropyl, a PEG-dialkoxypropylcarbamate, a PEG-phosphatidylethanoloamine, a PEG-phospholipid, a PEG-succinate diacylglycerol, and any combination of the foregoing.

[0307] In some embodiments, the pegylated lipid of the LNP of the disclosure is a PEG-dialkyloxypropyl. In some embodiments, the pegylated lipid is selected from PEG-didecyloxypropyl (C10), PEG-dilauryloxypropyl (C12), PEG-dimyristyloxypropyl (C14), PEG-dipalmityloxypropyl (C16), PEG-distearyloxypropyl (C18), and any combination of the foregoing.

[0308] In other embodiments, the lipid-PEG conjugate of the LNP of the disclosure may be PEG bound to phospholipid such as phosphatidylethanolamine (PEG-PE), PEG conjugated to ceramide (PEG-CER, ceramide-PEG conjugate, ceramide-PEG, cholesterol or PEG conjugated to derivative thereof, PEG-c-DOMG, PEG-DMG, PEG-DLPE, PEG-DMPE, PEG-DPPC, PEG-DSPE(DSPE-PEG), and a mixture thereof, and for example, may be C16-PEG2000 ceramide (N-palmitoyl-sphingosine-1-{succinyl[methoxy(polyethylene glycol)2000]}), DMG-PEG 2000, 14:0 PEG2000 PE.

[0309] In some embodiments, the pegylated lipid of the LNP of the disclosure is selected from 1-(monomethoxy-polyethyleneglycol)-2,3-dimyristoylglycerol, 4-O-(2′,3′-di(tetradecanoyloxy)propyl-1-O-(ω-methoxy(polyethoxy)ethyl)butanedioate (PEG-S-DMG), ω-methoxy(polyethoxy)ethyl-N-(2,3-di(tetradecanoxy)propyl)carbamate, 2,3-di(tetradecanoxy)propyl-N-(ω-methoxy(polyethoxy)ethyl)carbamate, and any combination of the foregoing.

[0310] In some embodiments, the pegylated lipid of the LNP of the disclosure is selected from mPEG2000-1,2-di-O-alkyl-sn3-carbomoylglyceride (PEG-C-DOMG), 1-[8′-(1,2-dimyristoyl-3-propanoxy)-carboxamido-3′,6′-dioxaoctanyl]carbamoyl-w-methyl-poly(ethylene glycol) (2 KPEG-DMG), and any combination of the foregoing.

[0311] In some embodiments, the PEG is directly attached to the lipid of the pegylated lipid. In other embodiments, the PEG is attached to the lipid of the pegylated lipid by a linker moiety selected from an ester-free linker moiety or an ester-containing linker moiety. Non-limiting examples of the ester-free linker moiety include amido (—C(O)NH—), amino (—NR—), carbonyl (—C(O)—), carbamate (—NHC(O)O—), urea (—NHC(O)NH—), disulfide (—S—S—), ether (—O—), succinyl (—(O)CCH2CH2C(O)—), succinamidyl (—NHC(O)CH2CH2C(O)NH—), ether, disulfide and combinations thereof. For example, the linker may contain a carbamate linker moiety and an amido linker moiety. Non-limiting examples of the ester-containing linker moiety include carbonate (—OC(O)O—), succinoyl, phosphate ester (—O—(O)POH—O—), sulfonate ester, and combinations thereof.

[0312] The PEG moiety of the pegylated lipid of the LNP of the disclosure described herein may have an average molecular weight ranging from about 550 daltons to about 10,000 daltons. In certain embodiments, the PEG moiety has an average molecular weight of from about 750 daltons to about 5,000 daltons, about 1,000 daltons to about 4,000 daltons, about 1,500 daltons to about 3,000 daltons, about 750 daltons to about 3,000 daltons, or about 1750 daltons to about 2,000 daltons.

[0313] In some embodiments, the conjugated lipid (e.g., pegylated lipid) comprises from about 1 mol % to about 65 mol %, from about 2 mol % to about 50 mol %, from about 5 mol % to about 40 mol %, or from about 5 mol % to about 20 mol % of the total lipid present in the LNPs and/or LNP compositions. In certain embodiments, the conjugated lipid comprises from about 0.5 mol % to about 3 mol % of the total lipid present in the particle.

[0314] In additional embodiments, the conjugated lipid (e.g., pegylated lipid) of the LNP of the disclosure comprises at least about 1, 2, 5, 10, 15, 20, 25, 30, 35, 40, 45, 50, 55, or 60 mol %, or an intermediate range of any of the foregoing, of the total lipid present in the LNPs and/or LNP compositions.

[0315] For the lipid in the lipid-PEG conjugate of the LNP of the disclosure, any lipid capable of binding to polyethyleneglycol may be used without limitation, and the phospholipid and/or cholesterol which are other elements of the LNP may be also used. In some embodiments, the lipid in the lipid-PEG conjugate may be ceramide, dimyristoylglycerol (DMG), succinoyl-diacylglycerol (s-DAG), distearoylphosphatidylcholine (DSPC), distearoylphosphatidylethanolamine (DSPE), or cholesterol, but not limited thereto.

[0316] In the lipid-PEG conjugate of the LNP of the disclosure, the PEG may be directly conjugated to the lipid or linked to the lipid via a linker moiety. Any linker moiety suitable for binding PEG to the lipid may be used, and for example, includes an ester-free linker moiety and an ester-containing linker moiety. The ester-free linker moiety includes not only amido (—C(O)NH—), amino (—NR—), carbonyl (—C(O)—), carbamate (—NHC(O)O—), urea (—NHC(O)NH—), disulfide (—S—S—), ether (—O—), succinyl (—(O)CCH2CH2C(O)—), succinamidyl (—NHC(O)CH2CH2C(O)NH—), ether, disulfide but also combinations thereof (for example, a linker containing both a carbamate linker moiety and an amido linker moiety), but not limited thereto. The ester-containing linker moiety includes for example, carbonate (—OC(O)O—), succinoyl, phosphate ester (—O—(O)POH—O—), sulfonate ester, and combinations thereof, but not limited thereto.

### Steroids

[0317] In some embodiments, the LNPs and LNP compositions of the present disclosure include at least one steroid or derivative thereof. In some embodiments, the steroid comprises cholesterol. In some embodiments, the LNPs and LNP compositions comprise a cholesterol derivative selected from cholestanol, cholestanone, cholestenone, coprostanol, cholesteryl-2′-hydroxyethyl ether, cholesteryl-4′-hydroxybutyl ether, and any combination of the foregoing. 7 In some embodiments, the steroid (e.g., cholesterol) of the LNP of the disclosure comprises from about 1 mol % to about 60 mol %, from about 2 mol % to about 50 mol %, from about 5 mol % to about 40 mol %, or from about 5 mol % to about 20 mol % of the total lipid present in the LNPs and/or LNP compositions. In other embodiments, the steroid (e.g., cholesterol) of the LNP of the disclosure comprises at least about 1, 2, 5, 10, 15, 20, 25, 30, 35, 40, 45, 50, 55, or 60 mol %, or an intermediate range of any of the foregoing, of the total lipid present in the LNPs and/or LNP compositions

### Additional Lipid/Helper Lipid or Structural Lipid

[0318] In some embodiments, the LNPs and LNP compositions of the present disclosure include at least one helper lipid. In some embodiments, the helper lipid is non-cationic lipid selected from an anionic lipid, a neutral lipid, or both. In some embodiments, the helper lipid comprises at least one phospholipid. In some embodiments, the phospholipid is selected from an anionic phospholipid, a neutral phospholipid, or both. The phospholipid of the elements of the LNPs and LNP compositions can play a role in covering and protecting a core of the LNP formed by interaction of the cationic lipid and nucleic acid in the LNP, and may facilitate cell membrane permeation and endosomal escape during intracellular delivery of the nucleic acid by binding to the phospholipid bilayer of a target cell. A phospholipid which can promote fusion of the LNP to a cell may include without limitation, any of the phospholipids selected from the group described below.

[0319] In some embodiments, the LNP include helper lipids that are used for targeting cell surface receptors Ex: DSPE-RGD, DSPE-cRGD, DSPE-Chol. Also molecules such as 18:0 Lyso-PC and 18:2 Lyso-PC.

[0320] In some embodiments, the LNPs and LNP compositions comprise at least one phospholipid selected from, but not limited to, dipalmitoyl-phosphatidylcholine (DPPC), distearoyl-phosphatidylcholine (DSPC), dioleoyl-phosphatidylethanolamine (DOPE), dioleoyl-phosphatidylcholine (DOPC), dioleoyl-phosphatidylglycerol (DOPG), palmitoyloleoyl-phosphatidylcholine (POPC), palmitoyloleoyl-phosphatidylethanolamine (POPE), palmitoyloleyol-phosphatidylglycerol (POPG), dipalmitoyl-phosphatidylethanolamine (DPPE), dipalmitoyl-phosphatidylglycerol (DPPG), dimyristoyl-phosphatidylethanolamine (DMPE), distearoyl-phosphatidylethanolamine (DSPE), monomethyl-phosphatidylethanolamine, dimethyl-phosphatidylethanolamine, dielaidoyl-phosphatidylethanolamine (DEPE), stearoyloleoyl-phosphatidylethanolamine (SOPE), egg phosphatidylcholine (EPC), phosphatidylethanolamine (PE), 1,2-dioleoyl-sn-glycero-3-phosphoethanolamine, 1-palmitoyl-2-oleoyl-sn-glycero-3-phosphocholine (POPC), 1,2-dioleoyl-sn-glycero-3-[phospho-L-serine](DOPS), 1,2-dioleoyl-sn-glycero-3-[phospho-L-serine], and any combination of the foregoing. In one example, the LNP comprising DSPC may be effective in mRNA delivery (excellent drug delivery efficacy).

[0321] In some embodiments, the helper lipid (e.g., phospholipid) of the LNP of the disclosure comprises from about 1 mol % to about 60 mol %, from about 2 mol % to about 50 mol %, from about 5 mol % to about 40 mol %, or from about 5 mol % to about 20 mol % of the total lipid present in the LNPs and/or LNP compositions. In other embodiments, the helper lipid (e.g., phospholipid) of the LNP of the disclosure comprises at least about 1, 2, 5, 10, 15, 20, 25, 30, 35, 40, 45, 50, 55, or 60 mol %, or an intermediate range of any of the foregoing, of the total lipid present in the LNPs and/or LNP compositions.

[0322] It will be appreciated that the total lipid present in the LNPs and/or LNP compositions comprises the lipids as individual or in combination of the cationic lipid or ionizable cationic lipid, the conjugated lipid, (e.g., pegylated lipid), the peptide conjugated PEG lipid, the steroid (e.g., cholesterol), peptide conjugated-structural lipid (Ex: DSPE-cRGD) and the structural lipid (e.g., phospholipid), leading from LNP formulation containing one to multi-component but not limited to one, two, three, four or five components in an LNP formulation.

[0323] The LNPs and/or LNP compositions may be prepared by dissolving the total lipids (or a portion thereof) in an organic solvent (e.g., ethanol) followed by mixing through a micromixer with the payload (e.g., nucleic acids of the systems) dissolved in an acidic buffer (e.g., pH between 1.0-6.5). At this pH the ionizable cationic lipid is positively charged and interacts with the negatively-charged nucleic acid polymers. The resulting nanostructures containing the nucleic acids are then converted to neutral LNPs when dialyzed against a neutral buffer which also includes removal of the organic solvent (e.g., ethanol) during the exchange of LNPs into physiologically relevant buffer. The LNPs and/or LNP compositions thus formed have a distinct electron-dense nanostructured core where the cationic lipids are organized into inverted micelles around the encapsulated payload, as opposed to traditional bilayer liposomal structures. In another embodiment, the LNP may form a bleb-like structure with nucleic acids in aqueous pockets along the non-electron dense lipid core.

c. Lipid Nanoparticle Properties

[0324] In some embodiments, the LNPs and/or LNP compositions comprise from about 21 mol % to about 85 mol % of the cationic lipid or ionizable cationic lipid, from about 8-65% of helper lipid, about 5-79% cholesterol and about 0.5-10% PEG lipid. In some embodiments, the LNPs and/or LNP compositions comprise from about 50 mol % to about 85 mol % of the cationic lipid or ionizable cationic lipid, from about 0.5 mol % to about 5 mol % of the conjugated lipid, (e.g., pegylated lipid), from about 0.5 mol % to about 5 mol % of the steroid (e.g., cholesterol) and from about 5 mol % to about 20 mol % of the helper lipid (e.g., phospholipid).

[0325] In some embodiments, the LNPs and/or LNP compositions of the disclosure comprise cationic lipid:helper lipid (e.g., phospholipid):steroid (e.g., cholesterol):conjugated lipid, (e.g., pegylated lipid) at a molar ratio of 20 to 50:10 to 30:30 to 60:0.5 to 5, at a molar ratio of 25 to 45:10 to 25:40 to 50:0.5 to 3, at a molar ratio of 25 to 45:10 to 20:40 to 55:0.5 to 3, or at a molar ratio of 25 to 45:10 to 20:40 to 55:1.0 to 1.5.

[0326] In some embodiments, the LNPs and/or LNP compositions of the disclosure have a total lipid:payload ratio (mass/mass) of from about 1 to about 100. In some embodiments, the total lipid:payload ratio is about 1 to about 50, from about 2 to about 25, from about 3 to about 20, from about 4 to about 15, or from about 5 to about 10. In some embodiments, the total lipid: payload ratio is about 5 to about 15, e.g., about 5, 6, 7, 8, 9, 10, 11, 12, 13, 14, 15, or an intermediate range of any of the foregoing.

[0327] In certain embodiments, the LNPs of the disclosure comprise a total lipid: nucleic acid mass ratio of from about 5:1 to about 15:1. In some embodiments, the weight ratio of the cationic lipid and nucleic acid comprised in the LNP may be 1 to 20:1, 1 to 15:1, 1 to 10:1, 5 to 20:1, 5 to 15:1, 5 to 10:1, 7.5 to 20:1, 7.5 to 15:1, or 7.5 to 10:1.

[0328] In some embodiments, the LNP of the disclosure may comprise the cationic lipid of 20 to 50 parts by weight, the phospholipid of 10 to 30 parts by weight, cholesterol of 20 to 60 parts by weight (or 20 to 60 parts by weight), and lipid-PEG conjugate of 0.1 to 10 parts by weight (or 0.25 to 10 parts by weight, 0.5 to 5 parts by weight). Alternatively, the LNP may comprise the cationic lipid of 20 to 50% by weight, phospholipid of 10 to 60% by weight, cholesterol of 20 to 60% by weight (or 30 to 60% by weight), and lipid-PEG conjugate of 0.1 to 10% by weight (or 0.25 to 10% by weight, 0.5 to 5% by weight) based on the total nanoparticle weight. As a further alternative, the LNP may comprise the cationic lipid of 25 to 50% by weight, phospholipid of 10 to 20% by weight, cholesterol of 35 to 55% by weight, and lipid-PEG conjugate of 0.1 to 10% by weight (or 0.25 to 10% by weight, 0.5 to 5% by weight), based on the total nanoparticle weight.

[0329] In some embodiments, the LNPs of the present disclosure have a mean diameter of from about 20 to 200 nm, 20 to 180 nm, 20 to 170 nm, 20 to 150 nm, 20 to 120 nm, 20 to 100 nm, 20 to 90 nm, 30 to 200 nm, 30 to 180 nm, 30 to 170 nm, 30 to 150 nm, 30 to 120 nm, 30 to 100 nm, 30 to 90 nm, 40 to 200 nm, 40 to 180 nm, 40 to 170 nm, 40 to 150 nm, 40 to 120 nm, 40 to 100 nm, 40 to 90 nm, 40 to 80 nm, 40 to 70 nm, 50 to 200 nm, 50 to 180 nm, 50 to 170 nm, 50 to 150 nm, 50 to 120 nm, 50 to 100 nm, 50 to 90 nm, 60 to 200 nm, 60 to 180 nm, 60 to 170 nm, 60 to 150 nm, 60 to 120 nm, 60 to 100 nm, 60 to 90 nm, 70 to 200 nm, 70 to 180 nm, 70 to 170 nm, 70 to 150 nm, 70 to 120 nm, 70 to 100 nm, 70 to 90 nm, 80 to 200 nm, 80 to 180 nm, 80 to 170 nm, 80 to 150 nm, 80 to 120 nm, 80 to 100 nm, 80 to 90 nm, 90 to 200 nm, 90 to 180 nm, 90 to 170 nm, 90 to 150 nm, 90 to 120 nm, or 90 to 100 nm, or an intermediate range of any of the foregoing.

[0330] In some embodiments, the LNPs and/or LNP compositions of the disclosure have a positive charge at acidic pH and may encapsulate the payload (e.g., therapeutic agent) through electrostatic interaction produced by negative charges of the payload (e.g., therapeutic agent). The term “encapsulation,” refers to the mixture of lipids surrounding and embedding the payload (e.g., therapeutic agent) at physiological conditions, forming the LNPs. The term “encapsulation efficiency,” as used herein is the percent amount of payload (e.g., therapeutic agent) encapsulated by the LNPs. It is a measure of payload (e.g., therapeutic agent) in bulk before disruption of LNPs divided by the total amount of payload (e.g., therapeutic agent) measured in bulk post-disruption of LNPs using a surfactant based reagent such as 1-2% Triton X-100. The encapsulation efficiency of the LNPs and/or LNP compositions may be 70% or more, 75% or more, 80% or more, 85% or more, 90% or more, 91% or more, 92% or more, 94% or more, or 95% or more. In other embodiments, the encapsulation efficiency of the LNPs and/or LNP compositions is about 80% to 99%, about 85% to 98%, about 88% to 95%, about 90% to 95%, or the payload (e.g., nucleic acids of the systems) may be fully encapsulated within the lipid portion of the LNPs compositions, and thereby protected from enzymatic degradation. In some embodiments, the payload (e.g., therapeutic agent) is not substantially degraded after exposure of the LNPs and/or LNP compositions to a nuclease at 37° C. for at least about 20, 30, 45, or 60 minutes or at least about 2, 3, 4, 5, 6, 7, 8, 9, 10, 12, 14, 16, 18, 20, 22, 24, 26, 28, 30, 32, 34, or 36 hours. In some embodiments, the payload (e.g., nucleic acids of the systems) is complexed with the lipid portion of the LNPs and/or LNP compositions. The LNPs and/or LNP compositions of the present disclosure are non-toxic to mammals such as humans.

[0331] The term “fully encapsulated” indicates that the payload (e.g., the nucleic acids of the system) in the LNPs and/or LNP compositions is not significantly degraded after exposure to conditions that significantly degrade free DNA, RNA, or protein. In a fully encapsulated system, less than about 25%, more preferably less than about 10%, and most preferably less than about 5% of the payload (e.g., nucleic acids of the system) in the LNPs and/or LNP compositions is degraded by conditions that would degrade 100% of a non-encapsulated payload. “Fully encapsulated” also indicates that the LNPs and/or LNP compositions are serum-stable, and do not decompose into their component parts immediately upon exposure to serum proteins post in vivo administration and protects the cargo until endosomal escape and release into cytoplasm of the cell.

[0332] In some embodiments, the amount of the LNPs and/or LNP compositions having the payload (e.g., therapeutic agent), encapsulated therein is from about 30% to about 100%, from about 40% to about 100%, from about 50% to about 100%, from about 60% to about 100%, from about 70% to about 100%, from about 80% to about 100%, from about 90% to about 100%, from about 30% to about 95%, from about 40% to about 95%, from about 50% to about 95%, from about 60% to about 95%, %, from about 70% to about 95%, from about 80% to about 95%, from about 85% to about 95%, from about 90% to about 95%, from about 30% to about 90%, from about 40% to about 90%, from about 50% to about 90%, from about 60% to about 90%, from about 70% to about 90%, from about 80% to about 90%, or at least about 30%, 35%, 40%, 45%, 50%, 55%, 60%, 65%, 70%, 75%, 80%, 85%, 90%, 91%, 92%, 93%, 94%, 95%, 96%, 97%, 98%, 99%, or an intermediate range of any of the foregoing.

[0333] In some embodiments, the amount of the payload (e.g., the nucleic acids), encapsulated within the LNPs and/or LNP compositions is from about 30% to about 100%, from about 40% to about 100%, from about 50% to about 100%, from about 60% to about 100%, from about 70% to about 100%, from about 80% to about 100%, from about 90% to about 100%, from about 30% to about 95%, from about 40% to about 95%, from about 50% to about 95%, from about 60% to about 95%, %, from about 70% to about 95%, from about 80% to about 95%, from about 85% to about 95%, from about 90% to about 95%, from about 30% to about 90%, from about 40% to about 90%, from about 50% to about 90%, from about 60% to about 90%, from about 70% to about 90%, from about 80% to about 90%, or at least about 30%, 35%, 40%, 45%, 50%, 55%, 60%, 65%, 70%, 75%, 80%, 85%, 90%, 91%, 92%, 93%, 94%, 95%, 96%, 97%, 98%, 99%, or an intermediate range of any of the foregoing.

[0334] In some embodiments, the nucleic acids of the disclosure, such as the mRNA encoding the engineered CasX fusion protein, and/or the ERS, may be provided in a solution to be mixed with a lipid solution such that the nucleic acids may be encapsulated in the lipid nanoparticles. A suitable nucleic acid solution may be any aqueous solution containing the nucleic acid to be encapsulated at various concentrations. For example, a suitable nucleic acid solution may contain the nucleic acid (or nucleic acids) at a concentration of or greater than about 0.01 mg/ml, 0.05 mg/ml, 0.06 mg/ml, 0.07 mg/ml, 0.08 mg/ml, 0.09 mg/ml, 0.1 mg/ml, 0.15 mg/ml, 0.2 mg/ml, 0.3 mg/ml, 0.4 mg/ml, 0.5 mg/ml, 0.6 mg/ml, 0.7 mg/ml, 0.8 mg/ml, 0.9 mg/ml, 1.0 mg/ml, 1.25 mg/ml, 1.5 mg/ml, 1.75 mg/ml, or 2.0 mg/ml. In some embodiments, the nucleic acid comprises an mRNA encoding an engineered CasX, and a suitable mRNA solution may contain the mRNA at a concentration ranging from about 0.01-2.0 mg/ml, 0.01-1.5 mg/ml, 0.01-1.25 mg/ml, 0.01-1.0 mg/ml, 0.01-0.9 mg/ml, 0.01-0.8 mg/ml, 0.01-0.7 mg/ml, 0.01-0.6 mg/ml, 0.01-0.5 mg/ml, 0.01-0.4 mg/ml, 0.01-0.3 mg/ml, 0.01-0.2 mg/ml, 0.01-0.1 mg/ml, 0.05-1.0 mg/ml, 0.05-0.9 mg/ml, 0.05-0.8 mg/ml, 0.05-0.7 mg/ml, 0.05-0.6 mg/ml, 0.05-0.5 mg/ml, 0.05-0.4 mg/ml, 0.05-0.3 mg/ml, 0.05-0.2 mg/ml, 0.05-0.1 mg/ml, 0.1-1.0 mg/ml, 0.2-0.9 mg/ml, 0.3-0.8 mg/ml, 0.4-0.7 mg/ml, or 0.5-0.6 mg/ml. In some embodiments, a suitable mRNA solution may contain an mRNA at a concentration up to about 5.0 mg/ml, 4.0 mg/ml, 3.0 mg/ml, 2.0 mg/ml, 1.0 mg/ml, 0.9 mg/ml, 0.8 mg/ml, 0.7 mg/ml, 0.6 mg/ml, 0.5 mg/ml, 0.4 mg/ml, 0.3 mg/ml, 0.2 mg/ml, 0.1 mg/ml, 0.05 mg/ml, 0.04 mg/ml, 0.03 mg/ml, 0.02 mg/ml, 0.01 mg/ml, or 0.05 mg/ml. In some embodiments, a suitable ERS solution may contain an ERS at a concentration up to about 5.0 mg/ml, 4.0 mg/ml, 3.0 mg/ml, 2.0 mg/ml, 1.0 mg/ml, 0.9 mg/ml, 0.8 mg/ml, 0.7 mg/ml, 0.6 mg/ml, 0.5 mg/ml, 0.4 mg/ml, 0.3 mg/ml, 0.2 mg/ml, 0.1 mg/ml, 0.05 mg/ml, 0.04 mg/ml, 0.03 mg/ml, 0.02 mg/ml, 0.01 mg/ml, or 0.05 mg/ml.

[0335] In some embodiments, the LNP may have an average diameter of 20 nm to 200 nm, 20 to 180 nm, 20 nm to 170 nm, 20 nm to 150 nm, 20 nm to 120 nm, 20 nm to 100 nm, 20 nm to 90 nm, 30 nm to 200 nm, 30 to 180 nm, 30 nm to 170 nm, 30 nm to 150 nm, 30 nm to 120 nm, 30 nm to 100 nm, 30 nm to 90 nm, 40 nm to 200 nm, 40 to 180 nm, 40 nm to 170 nm, 40 nm to 150 nm, 40 nm to 120 nm, 40 nm to 100 nm, 40 nm to 90 nm, 40 nm to 80 nm, 40 nm to 70 nm, 50 nm to 200 nm, 50 to 180 nm, 50 nm to 170 nm, 50 nm to 150 nm, 50 nm to 120 nm, 50 nm to 100 nm, 50 nm to 90 nm, 60 nm to 200 nm, 60 to 180 nm, 60 nm to 170 nm, 60 nm to 150 nm, 60 nm to 120 nm, 60 nm to 100 nm, 60 nm to 90 nm, 70 nm to 200 nm, 70 to 180 nm, 70 nm to 170 nm, 70 nm to 150 nm, 70 nm to 120 nm, 70 nm to 100 nm, 70 nm to 90 nm, 80 nm to 200 nm, 80 to 180 nm, 80 nm to 170 nm, 80 nm to 150 nm, 80 nm to 120 nm, 80 nm to 100 nm, 80 nm to 90 nm, 90 nm to 200 nm, 90 to 180 nm, 90 nm to 170 nm, 90 nm to 150 nm, 90 nm to 120 nm, or 90 nm to 100 nm for easy introduction into liver tissue, hepatocytes and/or LSEC (liver sinusoidal endothelial cells). The LNP may be sized for easy introduction into organs or tissues, including but not limited to liver, lung, heart, spleen, as well as to tumors. When the size of the LNP is smaller than the above range, it can be difficult to maintain stability as the surface area of the LNP is excessively increased, and thus delivery to the target tissue and/or drug effect may be reduced. The LNP may specifically target liver tissue. Without wishing to be bound by theory, it is thought that one mechanism by which LNP may be used to deliver therapeutic agents is through the imitation of the metabolic behaviors of natural lipoproteins, and so LNP may be usefully delivered to a subject through the lipid metabolism processes carried out by the liver. During the delivery of therapeutic agents to hepatocytes or and/or LSEC (liver sinusoidal endothelial cells), the diameter of the fenestrae leading from the sinusoidal lumen to the hepatocytes and LSEC is about 140 nm in mammals and about 100 nm in humans, so the LNP composition for therapeutic agent delivery having LNPs with a diameter in the above ranges may have excellent delivery efficiency to hepatocytes and LSEC when compared to LNP having the diameter outside the above range.

[0336] According to one example, the LNPs of the LNP composition may comprise the cationic lipid:phospholipid:cholesterol:lipid-PEG conjugate in the range described above or at a molar ratio of 20 to 50:10 to 30:30 to 60:0.5 to 5, at a molar ratio of 25 to 45:10 to 25:40 to 50:0.5 to 3, at a molar ratio of 25 to 45:10 to 20:40 to 55:0.5 to 3, or at a molar ratio of 25 to 45:10 to 20:40 to 55:1.0 to 1.5. The LNP comprising components at a molar ratio in the above range may have excellent delivery efficiency of therapeutic agents specific to cells of target organs.

[0337] In certain aspects, the LNP exhibit a positive charge under the acidic pH condition by showing a pKa of 5 to 8, 5.5 to 7.5, 6 to 7, or 6.5 to 7, and may encapsulate a nucleic acid with high efficiency by easily forming a complex with a nucleic acid through electrostatic interaction with a therapeutic agent such as a nucleic acid showing a negative charge. In such cases, the LNP may be usefully used as a composition for intracellular or in vivo delivery of a therapeutic agent (for example, nucleic acid).

[0338] Herein, “encapsulate” or “encapsulation” refers to incorporation of a therapeutic agent efficiently inside a lipid envelope, i.e., by surrounding it by the particle surface and/or embedding it within the particle interior made of various lipids that self-assemble when the polarity of the solvent surrounding them is increased. The encapsulation efficiency means the content of the therapeutic agent encapsulated in the LNP relative the total therapeutic agent content measured per given volume of the LNP formulation measured post-disruption of the LNPs.

[0339] The encapsulation of the nucleic acids of the composition in the LNP may be 70% or more, 75% or more, 80% or more, 85% or more, 90% or more, 91% or more, 92% or more, 94% or more, or 95% or more of LNP in the composition encapsulate nucleic acids. In some embodiments, the encapsulation of the nucleic acids of the composition in the LNP is such that between 80% to 99%, between 80% to 97%, between 80% to 95%, between 85% to 95%, between 87% to 95%, between 90% to 95%, between 91% or more to 95% or less, 91% or more to 94% or less, over 91% to 95% or less, 92% to 99%, between 92% to 97%, or between 92% to 95% of the LNP in the composition encapsulate nucleic acids. In some embodiments, the mRNA encoding the engineered CasX and a ERS of any of the embodiments of the disclosure are fully encapsulated in the LNP.

[0340] The target organs to which a nucleic acid is delivered by the LNP include, but are not limited to the liver, lung, heart, spleen, as well as to tumors. The LNP according to one example is liver tissue-specific and has excellent biocompatibility and can deliver the nucleic acids of a composition with high efficiency, and thus it can be usefully used in related technical fields such as lipid nanoparticle-mediated gene therapy. In a particular embodiment, the target cell to which the nucleic acids are delivered by the LNP according to one example may be a hepatocyte and/or LSEC in vivo. In other embodiments, the disclosure provides LNP formulated for delivery of the nucleic acids of the embodiments to cells ex vivo.

[0341] The disclosure provides a pharmaceutical composition comprising a plurality of LNPs comprising nucleic acids, such as mRNA encoding an engineered CasX protein and/or a ERS described herein, and a pharmaceutically acceptable carrier.

[0342] In certain embodiments, the LNP comprising the nucleic acid(s) has an electron dense core.

[0343] The disclosure provides LNP comprising one or more nucleic acids comprising: (a) an mRNA encoding the engineered CasX, and/or a ERS described herein; (b) one or more cationic lipids or ionizable cationic lipids or salts thereof comprising from about 50 mol % to about 85 mol % of the total lipid present in the LNP; (c) one or more non-cationic lipids comprising from about 13 mol % to about 49.5 mol % of the total lipid present in the LNP; and (d) one or more conjugated lipids that inhibit aggregation of LNPs comprising from about 0.5 mol % to about 2 mol % of the total lipid present in the particle. In another embodiment, the disclosure provides LNP comprising one or more nucleic acids comprising: (a) an mRNA encoding the engineered CasX, and/or a ERS described herein; (b) one or more cationic lipids or ionizable cationic lipids or salts thereof comprising from about 22 mol % to about 85 mol % of the total lipid present in the LNP; (c) one or more non-cationic/phospholipids comprising from about 10 mol % to about 70 mol % of the total lipid present in the LNP; (d) 15 mol % to about 50 mol % sterol, and (d) 1 mol % to about 5 mol % lipid-PEG or lipid-PEG-peptide in the particle. In certain embodiments the engineered CasX mRNA and ERS may be present in the same nucleic acid-lipid particle, or they may be present in different nucleic acid-lipid particles.

[0344] The disclosure provides LNP comprising one or more nucleic acids comprising: (a) an mRNA encoding the engineered CasX described herein; (b) a cationic lipid or a salt thereof comprising from about 52 mol % to about 62 mol % of the total lipid present in the LNP; (c) a mixture of a phospholipid and cholesterol or a derivative thereof comprising from about 36 mol % to about 47 mol % of the total lipid present in the LNP; and (d) a PEG-lipid conjugate comprising from about 1 mol % to about 2 mol % of the total lipid present in the LNP. In particular embodiments, the formulation is a four-component system comprising about 1.4 mol % PEG-lipid conjugate (e.g., PEG2000-C-DMA), about 57.1 mol % cationic lipid (e.g., DLin-K-C2-DMA) or a salt thereof, about 7.1 mol % DPPC (or DSPC), and about 34.3 mol % cholesterol (or derivative thereof).

[0345] In other embodiments, the LNP comprising one or more nucleic acids comprises: (a) an mRNA encoding the engineered CasX and/or a ERS of any of the embodiments described herein; (b) a cationic lipid or a salt thereof comprising from about 46.5 mol % to about 66.5 mol % of the total lipid present in the LNP; (c) cholesterol or a derivative thereof comprising from about 31.5 mol % to about 42.5 mol % of the total lipid present in the LNP; and (d) a PEG-lipid conjugate comprising from about 1 mol % to about 2 mol % of the total lipid present in the LNP. In particular embodiments, the formulation is a three-component system which is phospholipid-free and comprises about 1.5 mol % PEG-lipid conjugate (e.g., PEG2000-C-DMA), about 61.5 mol % cationic lipid (e.g., DLin-K-C2-DMA) or a salt thereof, and about 36.9 mol % cholesterol (or derivative thereof).

[0346] Additional formulations are described in PCT Publication No. WO 09/127060 and US patent publication numbers US 2011/0071208 A1 and US 2011/0076335 A1, the disclosures of which are herein incorporated by reference in their entirety.

[0347] In other embodiments, the LNP comprising one or more nucleic acids comprises: (a) an mRNA encoding the engineered CasX and a ERS of any of the embodiments described herein; (b) one or more cationic lipid or ionizable cationic lipids or salts thereof comprising from about 2 mol % to about 50 mol % of the total lipid present in the LNP; (c) one or more non-cationic lipid or ionizable cationic lipids comprising from about 5 mol % to about 90 mol % of the total lipid present in the LNP; and (d) one or more conjugated lipids that inhibit aggregation of particles comprising from about 0.5 mol % to about 20 mol % of the total lipid present in the LNP.

[0348] In other embodiments, the LNP comprising one or more nucleic acids comprises: (a) an mRNA encoding the engineered CasX and a ERS of any of the embodiments described herein; (b) a cationic lipid or a salt thereof comprising from about 30 mol % to about 50 mol % of the total lipid present in the LNP; (c) a mixture of a phospholipid and cholesterol or a derivative thereof comprising from about 47 mol % to about 69 mol % of the total lipid present in the LNP; and (d) a PEG-lipid conjugate comprising from about 1 mol % to about 3 mol % of the total lipid present in the LNP. In particular embodiments, the formulation is a four-component system which comprises about 2 mol % PEG-lipid conjugate (e.g., PEG2000-C-DMA), about 40 mol % cationic lipid (e.g., DLin-K-C2-DMA) or a salt thereof, about 10 mol % DPPC (or DSPC), and about 48 mol % cholesterol (or derivative thereof).

[0349] In other embodiments, the LNP comprising one or more nucleic acids comprises: (a) an mRNA encoding the engineered CasX and a ERS of any of the embodiments described herein; (b) one or more cationic lipid or ionizable cationic lipids or salts thereof comprising from about 50 mol % to about 65 mol % of the total lipid present in the LNP; (c) one or more non-cationic lipid or ionizable cationic lipids comprising from about 25 mol % to about 45 mol % of the total lipid present in the LNP; and (d) one or more conjugated lipids that inhibit aggregation of particles comprising from about 5 mol % to about 10 mol % of the total lipid present in the LNP.

[0350] In other embodiments, the LNP comprising one or more nucleic acids comprises: (a) an mRNA encoding the engineered CasX and a ERS of any of the embodiments described herein; (b) a cationic lipid or a salt thereof comprising from about 50 mol % to about 60 mol % of the total lipid present in the LNP; (c) a mixture of a phospholipid and cholesterol or a derivative thereof comprising from about 35 mol % to about 45 mol % of the total lipid present in the LNP; and (d) a PEG-lipid conjugate comprising from about 5 mol % to about 10 mol % of the total lipid present in the LNP.

[0351] In certain embodiments, the non-cationic lipid mixture in the formulation comprises: (i) a phospholipid of from about 10 mol % to about 70 mol % of the total lipid present in the LNP; (ii) cholesterol or a derivative thereof of from about 15 mol % to about 50 mol % of the total lipid present in the LNP; and 1-5% lipid-PEG or lipid-PEG-peptide. In particular embodiments, the formulation is a four-component system which comprises about 7 mol % PEG-lipid conjugate (e.g., PEG750-C-DMA), about 54 mol % cationic lipid (e.g., DLin-K-C2-DMA) or a salt thereof, about 7 mol % DPPC (or DSPC), and about 32 mol % cholesterol (or derivative thereof).

[0352] In other embodiments, the LNP comprising one or more nucleic acids comprises: (a) an mRNA encoding the engineered CasX and/or a ERS of any of the embodiments described herein; (b) a cationic lipid or a salt thereof comprising from about 55 mol % to about 65 mol % of the total lipid present in the LNP; (c) cholesterol or a derivative thereof comprising from about 30 mol % to about 40 mol % of the total lipid present in the LNP; and (d) a PEG-lipid conjugate comprising from about 5 mol % to about 10 mol % of the total lipid present in the LNP. In particular embodiments, the formulation is a three-component system which is phospholipid-free and comprises about 7 mol % PEG-lipid conjugate (e.g., PEG750-C-DMA), about 58 mol % cationic lipid (e.g., DLin-K-C2-DMA) or a salt thereof, and about 35 mol % cholesterol (or derivative thereof).

[0353] In other embodiments, the LNP comprising one or more nucleic acids comprises: (a) an mRNA encoding the engineered CasX and/or a ERS of any of the embodiments described herein; (b) a cationic lipid or a salt thereof comprising from about 48 mol % to about 62 mol % of the total lipid present in the LNP; (c) a mixture of a phospholipid and cholesterol or a derivative thereof, wherein the phospholipid comprises about 7 mol % to about 17 mol % of the total lipid present in the LNP, and wherein the cholesterol or derivative thereof comprises about 25 mol % to about 40 mol % of the total lipid present in the LNP; and (d) a PEG-lipid conjugate comprising from about 0.5 mol % to about 3.0 mol % of the total lipid present in the LNP.

### X. Compositions, Kits and Articles of Manufacture

[0354] In some embodiments, the disclosure provides a composition comprising an ERS of any of the embodiments described herein and a linked targeting sequence of at least 15 to 20 nucleotides, wherein the targeting sequence is complementary to a target nucleic acid of a gene.

[0355] In some embodiments, the disclosure provides a composition comprising an engineered CasX of any of the embodiments described herein.

[0356] In some embodiments, the disclosure provides a composition comprising an RNP of an ERS and linked targeting sequence and an engineered CasX of any of the embodiments described herein.

[0357] In some embodiments, the disclosure provides pharmaceutical compositions comprising an engineered CasX protein and a ERS of any of the embodiments of the disclosure and a linked targeting sequence complementary to a target nucleic acid of a gene, together with one or more pharmaceutically suitable excipients. In some embodiments, the pharmaceutical composition is formulated for a route of administration selected from the group consisting of intravenous, intraportal vein injection, intraperitoneal, intramuscular, subcutaneous, intraocular, and oral routes. In one embodiment, the pharmaceutical composition is in a liquid form or a frozen form. In another embodiment, the pharmaceutical composition is in a pre-filled syringe for a single injection. In another embodiment, the pharmaceutical composition is in solid form, for example the pharmaceutical composition is lyophilized.

[0358] In another aspect, provided herein are kits comprising the compositions of the embodiments described herein. In some embodiments, the kit comprises an engineered CasX protein and one or a plurality of ERS of any of the embodiments of the disclosure comprising a targeting sequence complementary to a target nucleic acid of a gene, a pharmaceutically suitable excipient and a suitable container (for example a tube, vial or plate). In other embodiments, the kit comprises a nucleic acid encoding an engineered CasX protein and one or a plurality of ERS of any of the embodiments of the disclosure comprising a targeting sequence complementary to a target nucleic acid of a gene, a pharmaceutically suitable excipient and a suitable container. In other embodiments, the kit comprises a vector comprising a nucleic acid encoding an engineered CasX protein and one or a plurality of ERS of any of the embodiments of the disclosure comprising a targeting sequence complementary to a target nucleic acid of a gene, a pharmaceutically suitable excipient and a suitable container. In other embodiments, the kit comprises an mRNA encoding an engineered CasX protein and one or a plurality of ERS of any of the embodiments of the disclosure comprising a targeting sequence complementary to a target nucleic acid of a gene formulated as an LNP, a pharmaceutically suitable excipient and a suitable container. In still other embodiments, the kit comprises a XDP comprising an engineered CasX protein and one or a plurality of ERS of any of the embodiments of the disclosure comprising a targeting sequence complementary to a target nucleic acid of a gene, a pharmaceutically suitable excipient and a suitable container. In still other embodiments, the kit comprises an AAV vector comprising a sequence encoding an engineered CasX protein and one or a plurality of ERS of any of the embodiments of the disclosure comprising a targeting sequence complementary to a target nucleic acid of a gene, a pharmaceutically suitable excipient and a suitable container.

[0359] In some embodiments, the kit further comprises a buffer, a nuclease inhibitor, a protease inhibitor, a liposome, a therapeutic agent, a label, a label visualization reagent, or any combination of the foregoing. In some embodiments, the kit further comprises a pharmaceutically acceptable carrier, diluent or excipient.

[0360] In some embodiments, the kit comprises appropriate control compositions for gene modifying applications, and instructions for use.

[0361] The present description sets forth numerous exemplary configurations, methods, parameters, and the like. It should be recognized, however, that such description is not intended as a limitation on the scope of the present disclosure, but is instead provided as a description of exemplary embodiments. Embodiments of the present subject matter described above may be beneficial alone or in combination, with one or more other aspects or embodiments. Without limiting the foregoing description, certain non-limiting embodiments of the disclosure are provided below. As will be apparent to those of skill in the art upon reading this disclosure, each of the individually numbered embodiments may be used or combined with any of the preceding or following individually numbered embodiments. This is intended to provide support for all such combinations of embodiments and is not limited to combinations of embodiments explicitly provided below:

### EXEMPLARY EMBODIMENTS

[0362] Embodiment I-1. A guide RNA (gRNA) scaffold comprising a sequence having at least 60%, at least 70%, at least 80%, at least 90%, at least 95%, at least 98%, at least 99%, or 100% sequence identity to any one of the sequences selected from the group consisting of SEQ ID NOS: 29-81.

[0363] Embodiment I-2. The gRNA scaffold of embodiment I-1, comprising a sequence selected from the group consisting of SEQ ID NOS: 29-81.

[0364] Embodiment I-3. The gRNA scaffold of embodiment I-1, comprising a sequence having one or more modifications relative to SEQ ID NO: 17, wherein the one or more modifications result in an improved characteristic.

[0365] Embodiment I-4. The gRNA scaffold of embodiment I-3, wherein the one or more modifications comprise one or more nucleotide substitutions, insertions, and/or deletions as set forth in Table 8.

[0366] Embodiment I-5. The gRNA scaffold of embodiment I-3 or I-4, wherein the improved characteristic is one or more functional properties selected from the group consisting of increased editing activity, increased pseudoknot stem stability, increased triplex region stability, increased scaffold stem stability, extended stem stability, reduced off-target folding intermediates, and increased binding affinity to a Class 2, Type V CRISPR protein, optionally in an in vitro assay.

[0367] Embodiment I-6. The gRNA scaffold of any one of embodiments I-3 to I-5, wherein the gRNA scaffold exhibits an improved enrichment score (log 2) of at least about 2.0, at least about 2.5, at least about 3, or at least about 3.5 greater compared to the score of the gRNA scaffold of SEQ ID NOS: 17 or 18 in an in vitro assay.

[0368] Embodiment I-7. The gRNA scaffold of embodiment I-1, comprising a sequence having one or more modifications relative to SEQ ID NO: 18, wherein the one or more modifications result in an improved characteristic.

[0369] Embodiment I-8. The gRNA scaffold of embodiment I-7, wherein the one or more modifications comprise one or more nucleotide substitutions, insertions, and/or deletions as set forth in Table 9.

[0370] Embodiment I-9. The gRNA scaffold of embodiment I-7 or I-8, wherein the improved characteristic is one or more functional properties selected from the group consisting of increased editing activity, increased pseudoknot stem stability, increased triplex region stability, increased scaffold stem stability, extended stem stability, reduced off-target folding intermediates, and increased binding affinity to a Class 2, Type V CRISPR protein, optionally in an in vitro assay.

[0371] Embodiment I-10. The gRNA scaffold of any one of embodiments I-7 to I-9, wherein the gRNA scaffold exhibits an improved enrichment score (log 2) of at least about 1.2, at least about 1.5, at least about 2.0, at least about 2.5, at least about 3, or at least about 3.5 greater compared to the score of the gRNA scaffold of SEQ ID NOS: 17 or 18 selected from the group consisting of C9, U11, C17, U24, A29, U54, G64, A88, and A95.

[0372] Embodiment I-11. The gRNA scaffold of embodiment I-10, comprising one or more modifications relative to the sequence of SEQ ID NOS: 17 or 18 selected from the group consisting of C9U, U11C, C17G, U24C, A29C, an insertion of G at position 54, an insertion of C at position 64, A88G, and A95G.

[0373] Embodiment I-12. The gRNA scaffold of embodiment I-11, comprising modifications relative to the sequence of SEQ ID NOS: 17 or 18 consisting of C9U, U11C, C17G, U24C, A29C, an insertion of G at position 54, an insertion of C at position 64, A88G, and A95G.

[0374] Embodiment I-13. The gRNA scaffold of any one of embodiments I-3 to I-12, wherein the improved characteristic is selected from the group consisting of pseudoknot stem stability, triplex region stability, scaffold bubble stability, extended stem stability, and binding affinity to a Class 2, Type V CRISPR protein.

[0375] Embodiment I-14. The gRNA scaffold of embodiment I-13, wherein the insertion of C at position 64 and the A88G substitution relative to the sequence of SEQ ID NOS: 17 or 18 resolves an asymmetrical bulge element of the extended stem, enhancing the stability of the extended stem of the gRNA scaffold.

[0376] Embodiment I-15. The gRNA scaffold of embodiment I-13, wherein the substitutions of U11C, U24C, and A95G increase the stability of the triplex region of the gRNA scaffold.

[0377] Embodiment I-16. The gRNA scaffold of embodiment I-13, wherein the substitution of A29C increases the stability of the pseudoknot stem.

[0378] Embodiment I-17. The gRNA scaffold of embodiment I-1 or I-2, wherein the gRNA scaffold comprises one or more heterologous RNA sequences in the extended stem.

[0379] Embodiment I-18. The gRNA scaffold of embodiment I-17, wherein the heterologous RNA is selected from the group consisting of a MS2 hairpin, Qβ hairpin, U1 hairpin II, Uvsx hairpin, and a PP7 stem loop, or sequence variants thereof.

[0380] Embodiment I-19. The gRNA scaffold of embodiment I-17 or I-18, wherein the heterologous RNA sequence increases the stability of the gRNA.

[0381] Embodiment I-20. The gRNA scaffold of embodiment I-17 or I-18, wherein the heterologous RNA is capable of binding a protein, a RNA, a DNA, or a small molecule.

[0382] Embodiment I-21. The gRNA scaffold of any one of embodiments I-17 to I-20, wherein the gRNA scaffold comprises a Rev response element (RRE) or a portion thereof.

[0383] Embodiment I-22. The gRNA scaffold of embodiment I-21, wherein the RRE or portion thereof is selected from the group consisting of Stem IIB of the RRE having sequence UGGGCGCAGCGUCAAUGACGCUGACGGUACA (SEQ ID NO: 353), Stem II-V of the RRE having sequence CAGGAAGCACUAUGGGCGCAGCGUCAAUGACGCUGACGGUACAGGCCAGACAAU UAUUGUCUGGUAUAGUGCAGCAGCAGAACAAUUUGCUGAGGGCUAUUGAGGCGC AACAGCAUCUGUUGCAACUCACAGUCUGGGGCAUCAAGCAGCUCCAGGCAAGAA UCCUG (SEQ ID NO: 355), Stem II of the RRE having sequence GCACUAUGGGCGCAGCGUCAAUGACGCUGACGGUACAGGCCAGACAAUUAUUGU CUGGUAUAGUGC (SEQ ID NO: 354), Rev-binding element (RBE) of Stem IIB having sequence GCUGACGGUACAGGC (SEQ ID NO: 356), and full-length RRE having sequence AGGAGCUUUGUUCCUUGGGUUCUUGGGAGCAGCAGGAAGCACUAUGGGCGCAGC GUCAAUGACGCUGACGGUACAGGCCAGACAAUUAUUGUCUGGUAUAGUGCAGCA GCAGAACAAUUUGCUGAGGGCUAUUGAGGCGCAACAGCAUCUGUUGCAACUCAC AGUCUGGGGCAUCAAGCAGCUCCAGGCAAGAAUCCUGGCUGUGGAAAGAUACCU AAAGGAUCAACAGCUCCU (SEQ ID NO: 357).

[0384] Embodiment I-23. The gRNA of any one of embodiments I-1 to I-22, wherein the gRNA scaffold comprises one or more thymines (T).

[0385] Embodiment I-24. A gRNA comprising the gRNA scaffold of any one of embodiments I-1 to I-23, and a targeting sequence at the 3′ end of the gRNA scaffold that is complementary to a target nucleic acid sequence.

[0386] Embodiment I-25. The gRNA of embodiment I-24, wherein the targeting sequence has 10, 11, 12, 13, 14, 15, 16, 17, 18, 19, 20, 21, 22, 23, 24, 25, 26, 27, 28, 29, or 30 nucleotides.

[0387] Embodiment I-26. The gRNA of embodiment I-25, wherein the targeting sequence has 18, 19, or 20 nucleotides.

[0388] Embodiment I-27. The gRNA of any one of embodiments I-24 to I-26, wherein the gRNA is capable of forming a ribonucleoprotein (RNP) complex with a Class 2, Type V CRISPR protein.

[0389] Embodiment I-28. An engineered Class 2, Type V CRISPR protein comprising:
[0390] a. a NTSB domain comprising a sequence of QPASKKIDQNKLKPEMDEKGNLTTAGFACSQCGQPLFVYKLEQVSEKGKAYTNYFGRC NVAEHEKLILLAQLKPEKDSDEAVTYSLGKFGQ (SEQ ID NO: 145), or a sequence having at least 80% at least 90%, at least 95%, at least 96%, at least 97%, at least 98% or at least 99% identity thereto;
[0391] b. a helical I-II domain comprising a sequence of RALDFYSIHVTKESTHPVKPLAQIAGNRYASGPVGKALSDACMGTIASFLSKYQDIIIEH QKVVKGNQKRLESLRELAGKENLEYPSVTLPPQPHTKEGVDAYNEVIARVRMWVNLN LWQKLKLSRDDAKPLLRLKGFPSF (SEQ ID NO: 163), or a sequence having at least 80%, at least 90%, at least 95%, at least 96%, at least 97%, at least 98% or at least 99% identity thereto;
[0392] c. a helical II domain comprising a sequence of PLVERQANEVDWWDMVCNVKKLINEKKEDGKVFWQQNLAGYKRQEALRPYLSSEEDR KKGKKFARYQLGDLLLHLEKKHGEDWGKVYDEAWERIDKKVEGLSKHIKLEEERRSE DAQSKAALTDWLRAKASFVIEGLKEADKDEFCRCELKLQKWYGDLRGKPFAIEAE (SEQ ID NO: 161), or a sequence having at least 80%, at least 90%, at least 95%, at least 96%, at least 97%, at least 98% or at least 99% identity thereto; and
[0393] d. a RuvC-I domain comprising a sequence of SSNIKPMNLIGVDRGENIPAVIALTDPEGCPLSRFKDSLGNPTHILRIGESYKEKQRTIQAK KEVEQRRAGGYSRKYASKAKNLADDMVRNTARDLLYYAVTQDAMLIFENLSRGFGRQ GKRTFMAERQYTRMEDWLTAKLAYEGLPSKTYLSKTLAQYTSKTC (SEQ ID NO: 162), or a sequence having at least 80%, at least 90%, at least 95%, at least 96%, at least 97%, at least 98% or at least 99% identity thereto.

[0394] Embodiment I-29. The Class 2, Type V CRISPR protein of embodiment I-28, wherein the CRISPR protein comprises an OBD-I domain comprising a sequence of QEIKRINKIRRRLVKDSNTKKAGKTGPMKTLLVRVMTPDLRERLENLRKKPENIPQ (SEQ ID NO: 152), or a sequence having at least 80%, at least 90%, at least 95%, at least 96%, at least 97%, at least 98%, or at least 99% identity thereto.

[0395] Embodiment I-30. The Class 2, Type V CRISPR protein of embodiment I-28 or I-29, wherein the CRISPR protein comprises an OBD-II domain comprising a sequence of
[0396] NSILDISGFSKQYNCAFIWQKDGVKKLNLYLIINYFKGGKLRFKKIKPEAFEANRFYTVINKKSGEIV PMEVNFNFDDPNLIILPLAFGKRQGREFIWNDLLSLETGSLKLANGRVIEKTLYNRRTRQDEPALF VALTFERREVLD (SEQ ID NO: 164), or a sequence having at least 80%, at least 90%, at least 95%, at least 96%, at least 97%, at least 98%, or at least 99% identity thereto.

[0397] Embodiment I-31. The Class 2, Type V CRISPR protein of any one of embodiments I-28 to I-30, wherein the CRISPR protein comprises a helical I-I domain comprising a sequence of PISNTSRANLNKLLTDYTEMKKAILHVYWEEFQKDPVGLMSRVA (SEQ ID NO: 153), or a sequence having at least 80%, at least 90%, at least 95%, at least 96%, at least 97%, at least 98%, or at least 99% identity thereto.

[0398] Embodiment I-32. The Class 2, Type V CRISPR protein of any one of embodiments I-28 to I-31, wherein the CRISPR protein comprises a TSL domain comprising a sequence of SNCGFTITSADYDRVLEKLKKTATGWMT TINGKELKVEGQITYYNRYKRQNVVKDLSV ELDRLSEESVNNDISSWTKGRSGEALSLLKKRFSHRPVQEKFVCLNCGFETH (SEQ ID NO: 159), or a sequence having at least 80%, at least 90%, at least 95%, at least 96%, at least 97%, at least 98%, or at least 99% identity thereto.

[0399] Embodiment I-33. The Class 2, Type V CRISPR protein of any one of embodiments I-28 to I-32, wherein the CRISPR protein comprises a RuvC-II domain comprising a sequence of
[0400] ADEQAALNIARSWLFLRSQEYKKYQTNKTTGNTDKRAFVETWQSFYRKKLKEV WKPAV (SEQ ID NO: 160), or a sequence having at least 80%, at least 90%, at least 95%, at least 96%, at least 97%, at least 98%, or at least 99% identity thereto.

[0401] Embodiment I-35. The Class 2, Type V CRISPR protein of embodiment I-33, comprising the sequence of SEQ ID NOS: 95-142, or a sequence having at least 80%, at least 90%, at least 95%, at least 96%, at least 97%, at least 98%, or at least 99% identity thereto.

[0402] Embodiment I-36. The Class 2, Type V CRISPR protein of any one of embodiments I-28 to I-35, wherein the Class 2, Type V CRISPR protein comprises at least one modification in one or more domains.

[0403] Embodiment I-37. The Class 2, Type V CRISPR protein of embodiment I-36, wherein the at least one modification comprises:
[0404] a. at least one amino acid substitution in a domain;
[0405] b. at least one amino acid deletion in a domain;
[0406] c. at least one amino acid insertion in a domain; or
[0407] d. any combination of (a)-(c).

[0408] Embodiment I-38. The Class 2, Type V CRISPR protein of embodiment I-36 or I-37, comprising a modification at one or more amino acid positions in the NTSB domain relative to SEQ ID NO: 145 selected from the group consisting of P2, S4, Q9, E15, G20, G33, L41, Y51, F55, L68, A70, E75, K88, and G90.

[0409] Embodiment I-39. The Class 2, Type V CRISPR protein of embodiment I-38, wherein the one or more modifications at one or more amino acid positions in the NTSB domain are selected from the group consisting of an insertion of G at position 2, an insertion of I at position 4, an insertion of L at position 4, Q9P, E15S, G20D, a deletion of S at position 30, G33T, L41A, Y51T, F55V, L68D, L68E, L68K, A70Y, A70S, E75A, E75D, E75P, K88Q, and G90Q relative to SEQ ID NO: 145.

[0410] Embodiment I-40. The Class 2, Type V CRISPR protein of any one of embodiments I-36 to I-39, comprising a modification at one or more amino acid positions in the helical I-II domain relative to SEQ ID NO: 163 selected from the group consisting of 124, A25, Y29 G32, G44, S48, S51, Q54, I56, V63, S73, L74, K97, V100, M112, L116, G137, F138, and S140.

[0411] Embodiment I-41. The Class 2, Type V CRISPR protein of embodiment I-40, wherein the one or more modifications at one or more amino acid positions in the helical I-II domain are selected from the group consisting of an insertion of T at position 24, an insertion of C at position 25, Y29F, G32Y, G32N, G32H, G32S, G32T, G32A, G32V, a deletion of G at position 32, G32S, G32T, G44L, G44H, S48H, S48T, S51T, Q54H, I56T, V63T, S73H, L74Y, K97G, K97S, K97D, K97E, V100L, M112T, M112W, M112R, M112K, L116K, G137R, G137K, G137N, an insertion of Q at position 138, and S140Q relative to SEQ ID NO: 163.

[0412] Embodiment I-42. The Class 2, Type V CRISPR protein of any one of embodiments I-36 to I-41, comprising a modification at one or more amino acid positions in the helical II domain relative to SEQ ID NO: 161 selected from the group consisting of L2, V3, E4, R5, Q6, A7, E9, V10, D11, W12, W13, D14, M15, V16, C17, N18, V19, K20, L22, I23, E25, K26, K31, Q35, L37, A38, K41, R 42, Q43, E44, L46, K57, Y65, G68, L70, L71, L72, E75, G79, D81, W82, K84, V85, Y86, D87, I93, K95, K96, E98, L100, K102, I104, K105, E109, R110, D114, K118, A120, L121, W124, L125, R126, A127, A129, I133, E134, G135, L136, E138, D140, K141, D142, E143, F144, C145, C147, E148, L149, K150, L151, Q152, K153, L158, E166, and A167.

[0413] Embodiment I-43. The Class 2, Type V CRISPR protein of embodiment I-42, wherein the one or more modifications at one or more amino acid positions in the helical II domain are selected from the group consisting of an insertion of A at position 2, an insertion of H at position 2, a deletion of L at position 2 and a deletion of V at position 3, V3E, V3Q, V3F, a deletion of V at position 3, an insertion of D at position 3, V3P, E4P, a deletion of E at position 4, E4D, E4L, E4R, R5N, Q6V, an insertion of Q at position 6, an insertion of G at position 7, an insertion of H at position 9, an insertion of A at position 9, VD10, an insertion of T1 at position 0, a deletion of V at position 10, an insertion of F at position 10, an insertion of D at position 11, a deletion of D at position 11, D11 S, a deletion of W at position 12, W12T, W12H, an insertion of P at position 12, an insertion of Q at position 13, an insertion of G at position 12, an insertion of R at position 13, W13P, W13D, an insertion of D at position 13, W13L, an insertion of P at position 14, an insertion of D at position 14, a deletion of D at position 14 and a deletion of M at position 15, a deletion of M at position 15, an insertion of T at position 16, an insertion of P at position 17, N18I, V19N, V19H, K20D, L22D, 123S, E25C, E25P, an insertion of G at position 25, K26T, K27E, K31L, K31Y, Q35D, Q35P, an insertion of S at position 37, a deletion of L at position 37 and a deletion of A at position 38, K41L, an insertion of R at position 42, a deletion of Q at position 43 and a deletion of E at position 44, L46N, K57Q, Y65T, G68M, L70V, L71C, L72D, L72N, L72W, L72Y, E75F, E75L, E75Y, G79P, an insertion of E at position 79, an insertion of T at position 81, an insertion of R at position 81, an insertion of W at position 81, an insertion of Y at position 81, an insertion of W at position 82, an insertion of Y at position 82, W82G, W82R, K84D, K84H, K84P, K84T, V85L, V85A, an insertion of L at position 85, Y86C, D87G, D87M, D87P, I93C, K95T, K96R, E98G, L100A, K102H, 1104T, I104S, 1104Q, K105D, an insertion of K at position 109, E109L, R110D, a deletion of R at position 110, DJ14E, an insertion of D at position 114, K118P, A120R, L121T, W124L, L125C, R126D, A127E, A127L, A129T, A129K, I133E, an insertion of C at position 133, an insertion of S at position 134, an insertion of G at position 134, an insertion of R at position 135, G135P, L136K, L136D, L136S, L136H, a deletion of E at position 138, D140R, an insertion of D at position 140, an insertion of P at position 141, an insertion of D at position 142, a deletion of E at position 143+a deletion of F at position 144, an insertion of Q at position 143, F144K, a deletion of F at position 144, a deletion of F at position 144 and a deletion of C at position 145, C145R, an insertion of G at position 145, C145K, C147D, an insertion of V at position 148, E148D, an insertion of H at position 149, L149R, K150R, L151H, Q152C, K153P, L158S, E166L, and an insertion of F at position 167 relative to SEQ ID NO: 161.

[0414] Embodiment I-44. The Class 2, Type V CRISPR protein of any one of embodiments I-36 to I-43, comprising a modification at one or more amino acid positions in the RuvC-I domain relative to SEQ ID NO: 162 selected from the group consisting of 14, K5, P6, M7, N8, L9, V12, G49, K63, K80, N83, R90, M125, and L146.

[0415] Embodiment I-45. The Class 2, Type V CRISPR protein of embodiment I-44, wherein the one or more modifications at one or more amino acid positions in the RuvC-I domain are selected from the group consisting of an insertion of I at position 4, an insertion of S at position 5, an insertion of T at position 6, an insertion of N at position 6, an insertion of R at position 7, an insertion of K at position 7, an insertion of H at position 8, an insertion of S at position 8, V12L, G49W, G49R, S51R, S51K, K62S, K62T, K62E, V65A, K80E, N83G, R90H, R90G, M125S, M125A, L137Y, an insertion of P at position 137, a deletion of L at position 141, L141R, L141D, an insertion of Q at position 142, an insertion of R at position 143, an insertion of N at position 143, E144N, an insertion of P at position 146, L146F, P147A, K149Q, T150V, an insertion of R at position 152, an insertion of H153, T155Q, an insertion of H at position 155, an insertion of R at position 155, an insertion of L at position 156, a deletion of L at position 156, an insertion of W at position 156, an insertion of A at position 157, an insertion of F at position 157, A157S, Q158K, a deletion of Y at position 159, T160Y, T160F, an insertion of I at position 161, S161P, T163P, an insertion of N at position 163, C164K, and C164M relative to SEQ ID NO: 161.

[0416] Embodiment I-46. The Class 2, Type V CRISPR protein of any one of embodiments I-36 to I-45, comprising a modification at one or more amino acid positions in the OBD-I domain relative to SEQ ID NO: 152 selected from the group consisting of I3, K4, R5, I6, N7, K8, K15, D16, N18, P27, M28, V33, R34, M36, R41, L47, R48, E52, P55, and Q56.

[0417] Embodiment I-47. The Class 2, Type V CRISPR protein of embodiment I-46, wherein the one or more modifications at one or more amino acid positions in the OBD-J domain are selected from the group consisting of an insertion of G at position 3, I3G, 13E, an insertion of G at position 4, K4G, K4P, K4S, K4W, K4W, R5P, an insertion ofP at position 5, an insertion of G at position 5, RSS, an insertion of S at position 5, R5A, R5P, R5G, R5L, 16A, 16L, an insertion of G at position 6, N7Q, N7L, N7S, K8G, K15F, D16W, an insertion of F at position 16, an insertion of F18, an insertion of P at position 27, M28P, M28H, V33T, R34P, M36Y, R41P, L47P, an insertion of P at position 48, E52P, an insertion of P at position 55, a deletion of P at position 55 and a deletion of Q at position 56, Q56S, Q56P, an insertion of D at position 56, an insertion of T at position 56, and Q56P relative to SEQ ID NO: 152.

[0418] Embodiment I-48. The Class 2, Type V CRISPR protein of any one of embodiments I-36 to I-47, comprising a modification at one or more amino acid positions in the OBD-II domain relative to SEQ ID NO: 164 selected from the group consisting of S2, I3, L4, K11, V24, K37, R42, A53, T58, K63, M70, I82, Q92, G93, K110, L121, R124, R141, E143, V144, and L145.

[0419] Embodiment I-49. The Class 2, Type V CRISPR protein of embodiment I-48, wherein the one or more modifications at one or more amino acid positions in the OBD-II domain are selected from the group consisting of a deletion of S at position 2, I3R, I3K, a deletion of I at position 3 and a deletion of L4, a deletion of L at position 4, K11T, an insertion of P at position 24, K37G, R42E, an insertion of S at position 53, an insertion of R at position 58, a deletion of K at position 63, M70T, 182T, Q92I, Q92F, Q92V, Q92A, an insertion of A at position 93, K110Q, R115Q, L121T, an insertion of A at position 124, an insertion of R at position 141, an insertion of D at position 143, an insertion of A at position 143, an insertion of W at position 144, and an insertion of A at position 145 relative to SEQ ID NO: 152.

[0420] Embodiment I-50. The Class 2, Type V CRISPR protein of any one of embodiments I-36 to I-49, comprising a modification at one or more amino acid positions in the TSL domain relative to SEQ ID NO: 159 selected from the group consisting of S1, N2, C3, G4, F5, I7, K18, V58, S67, T76, G78, S80, G81, E82, S85, V96, and E98.

[0421] Embodiment I-51. The Class 2, Type V CRISPR protein of embodiment I-50, wherein the one or more modifications at one or more amino acid positions in the OBD-II domain are selected from the group consisting of an insertion of M at position 1, a deletion of N at position 2, an insertion of V at position 2, C3S, an insertion of G at position 4, an insertion of W at position 4, F5P, an insertion of W at position 7, K18G, V58D, an insertion of A at position 67, T76E, T76D, T76N, G78D, a deletion of S at position 80, a deletion of G at position 81, an insertion of E at position 82, an insertion of N at position 82, S85I, V96C, V96T, and E98D relative to SEQ ID NO: 159.

[0422] Embodiment I-52. The Class 2, Type V CRISPR protein of any one of embodiments I-28 to I-51, exhibiting an improved characteristic relative to SEQ ID NO: 361, wherein the improved characteristic comprises increased binding affinity to a gRNA, increased binding affinity to the target nucleic acid, improved ability to utilize a greater spectrum of PAM sequences in the editing of the target nucleic acid, improved unwinding of the target nucleic acid, increased editing activity, improved editing efficiency, improved editing specificity for cleavage of the target nucleic acid, decreased off-target editing or cleavage of the target nucleic acid, increased percentage of a eukaryotic genome that can be edited, increased activity of the nuclease, increased target strand loading for double strand cleavage, decreased target strand loading for single strand nicking, increased binding of the non-target strand of DNA, improved protein stability, increased protein:gRNA (RNP) complex stability, and improved fusion characteristics.

[0423] Embodiment I-53. The Class 2, Type V CRISPR protein of embodiment I-52, wherein the improved characteristic comprises increased cleavage activity at a target nucleic sequence comprising an TTC, ATC, GTC, or CTC PAM sequence.

[0424] Embodiment I-54. The Class 2, Type V CRISPR protein of embodiment I-53, wherein the improved characteristic comprises increased cleavage activity at a target nucleic acid sequence comprising an ATC or CTC PAM sequence relative to cleavage activity of the sequence of SEQ ID NO: 361.

[0425] Embodiment I-55. The Class 2, Type V CRISPR protein of embodiment I-54, wherein the improved cleavage activity is an enrichment score (log 2) of at least about 1.5, at least about 2.0, at least about 2.5, at least about 3, at least about 3.5, at least about 4, at least about 4.5, at least about 5, at least about 6, at least about 7, at least about 8 or more greater compared to score of the sequence of SEQ ID NO: 361 in an in vitro assay.

[0426] Embodiment I-56. The Class 2, Type V CRISPR protein of embodiment I-54, wherein the improved characteristic comprises increased cleavage activity at a target nucleic acid sequence comprising an CTC PAM sequence relative to the sequence of SEQ ID NO: 361.

[0427] Embodiment I-57. The Class 2, Type V CRISPR protein of embodiment I-56, wherein the improved cleavage activity is an enrichment score (log 2) of at least about 2, at least about 2.5, at least about 3, at least about 3.5, at least about 4, at least about 4.5, at least about 5, or at least about 6 or more greater compared to the score of the sequence of SEQ ID NO: 361 in an in vitro assay.

[0428] Embodiment I-58. The Class 2, Type V CRISPR protein of embodiment I-53, wherein the improved characteristic comprises increased cleavage activity at a target nucleic acid sequence comprising an TTC PAM sequence relative to the sequence of SEQ ID NO: 361.

[0429] Embodiment I-59. The Class 2, Type V CRISPR protein of embodiment I-58, wherein the improved cleavage activity is an enrichment score of at least about 1.5, at least about 2.0, at least about 2.5, at least about 3, at least about 3.5, at least about 4, at least about 4.5, at least about 5, or at least about 6 log 2 or more greater compared to the sequence of SEQ ID NO: 361 in an in vitro assay.

[0430] Embodiment I-60. The Class 2, Type V CRISPR protein of embodiment I-52, wherein the improved characteristic comprises increased specificity for cleavage of the target nucleic acid sequence relative to the sequence of SEQ ID NO:361.

[0431] Embodiment I-61. The Class 2, Type V CRISPR protein of embodiment I-60, wherein the increased specificity is an enrichment score of at least about 2.0, at least about 2.5, at least about 3, at least about 3.5, at least about 4, at least about 4.5, at least about 5, or at least about 6 log 2 or more greater compared to the sequence of SEQ ID NO: 361 in an in vitro assay.

[0432] Embodiment I-62. The Class 2, Type V CRISPR protein of embodiment I-52, wherein the improved characteristic comprises decreased off-target cleavage of the target nucleic acid sequence.

[0433] Embodiment I-63. The Class 2, Type V CRISPR protein of any one of embodiments I-28 to I-62, wherein the Class 2, Type V CRISPR protein has a sequence selected from the group consisting of the sequences of SEQ ID NOS: 95-142, as set forth in Table 3, or a sequence having at least about 50%, at least about 60%, at least about 70%, at least about 80%, at least about 90%, or at least about 95%, or at least about 96%, or at least about 97%, or at least about 98%, or at least about 99%, sequence identity thereto.

[0434] Embodiment I-64. The Class 2, Type V CRISPR protein of any one of embodiments I-28 to I-62, comprising a sequence selected from the group consisting of SEQ ID NOS: 95-142, as set forth in Table 3.

[0435] Embodiment I-65. The Class 2, Type V CRISPR protein of any one of embodiments I-28 to I-64, comprising one or more nuclear localization signals (NLS).

[0436] Embodiment I-66. The Class 2, Type V CRISPR protein of embodiment I-65, wherein the one or more NLS are selected from the group of sequences consisting of PKKKRKV (SEQ ID NO: 189), KRPAATKKAGQAKKKK (SEQ ID NO: 190), PAAKRVKLD (SEQ ID NO: 191), RQRRNELKRSP (SEQ ID NO: 192), NQSSNFGPMKGGNFGGRSSGPYGGGGQYFAKPRNQGGY (SEQ ID NO: 193), RMRIZFKNKGKDTAELRRRRVEVSVELRKAKKDEQILKRRNV (SEQ ID NO: 194), VSRKRPRP (SEQ ID NO: 195), PPKKARED (SEQ ID NO: (196), PQPKKKPL (SEQ ID NO: 197), SALIKKKKKMAP (SEQ ID NO: 198), DRLRR (SEQ ID NO: 199), PKQKKRK (SEQ ID NO: 200), RKLKKKIKKL (SEQ ID NO: 201), REKKKFLKRR (SEQ ID NO: 202), KRKGDEVDGVDEVAKKKSKK (SEQ ID NO: 203), RKCLQAGMNLEARKTKK (SEQ ID NO: 204), PRPRKIPR (SEQ ID NO: 205), PPRKKRTVV (SEQ ID NO: 2206), NLSKKKKRKREK (SEQ ID NO: 207), RRPSRPFRKP (SEQ ID NO: 208), KRPRSPSS (SEQ ID NO: 209), KRGINDRNFWRGENERKTR (SEQ ID NO: 210), PRPPKMARYDN (SEQ ID NO: 211), KRSFSKAF (SEQ ID NO: 212), KLKIKRPVK (SEQ ID NO: 213), PKKKRKVPPPPAAKRVKLD (SEQ ID NO: 214), PKTRRRPRRSQRKRPPT (SEQ ID NO: 215), SRRRKANPTKLSENAKKLAKEVEN (SEQ ID NO: 216), KTRRRPRRSQRKRPPT (SEQ ID NO: 217), RRKKRRPRRKKRR (SEQ ID NO: 218), PKKKSRKPKKKSRK (SEQ ID NO: 219), HKKKHPDASVNFSEFSK (SEQ ID NO: 220), QRPGPYDRPQRPGPYDRP (SEQ ID NO: 221), LSPSLSPLLSPSLSPL (SEQ ID NO: 222), RGKGGKGLGKGGAKRHRK (SEQ ID NO: 223), PKRGRGRPKRGRGR (SEQ ID NO: 224), PKKKRKVPPPPKKKRKV (SEQ ID NO: 226), PAKRARRGYKC (SEQ ID NO: 227), KLGPRKATGRW (SEQ ID NO: 228), PRRKREE (SEQ ID NO: 229), PYRGRKE (SEQ ID NO: 230), PLRKRPRR (SEQ ID NO: 231), PLRKRPRRGSPLRKRPRR (SEQ ID NO: 232), PAAKRVKLDGGKRTADGSEFESPKKKRKV (SEQ ID NO: 233), PAAKRVKLDGGKRTADGSEFESPKKKRKVGIHGVPAA (SEQ ID NO: 234), PAAKRVKLDGGKRTADGSEFESPKKKRKVAEAAAKEAAAKEAAAKA (SEQ ID NO: 235), PAAKRVKLDGGKRTADGSEFESPKKKRKVPG (SEQ ID NO: 236), KRKGSPERGERKRHW (SEQ ID NO: 237), KRTADSQHSTPPKTKRKVEFEPKKKRKV (SEQ ID NO: 238), and PKKKRKVGGSKRTADSQHSTPPKTKRKVEFEPKKKRKV (SEQ ID NO: 239), and, optionally, wherein the one or more NLS are linked to the Class 2, Type V CRISPR protein or to an adjacent NLS with a linker peptide wherein the linker peptide is selected from the group consisting of SR, RS, (G)n (SEQ ID NO: 240), (GS)n (SEQ ID NO: 241), (GSGGS)n (SEQ ID NO: 242), (GGSGGS)n (SEQ ID NO: 243), (GGGS)n (SEQ ID NO: 244), GGSG (SEQ ID NO: 245), GGSGG (SEQ ID NO: 246), GSGSG (SEQ ID NO: 247), GSGGG (SEQ ID NO: 248), GGGSG (SEQ ID NO: 249), GSSSG (SEQ ID NO: 250), GPGP (SEQ ID NO: 251), GGP, PPP, PPAPPA (SEQ ID NO: 252), PPPG (SEQ ID NO: 253), PPPGPPP (SEQ ID NO: 254), PPP(GGGS)n (SEQ ID NO: 255), (GGGS)nPPP (SEQ ID NO: 256), AEAAAKEAAAKEAAAKA (SEQ ID NO: 257), and TPPKTKRKVEFE (SEQ ID NO: 258), wherein n is 1 to 5.

[0437] Embodiment I-67. The Class 2, Type V CRISPR protein of embodiment I-65 or I-66, wherein the one or more NLS are positioned at or near the C-terminus of the protein.

[0438] Embodiment I-68. The Class 2, Type V CRISPR protein of embodiment I-65 or I-66, wherein the one or more NLS are positioned at or near at the N-terminus of the protein.

[0439] Embodiment I-69. The Class 2, Type V CRISPR protein of embodiment I-65 or I-66, comprising at least two NLS, wherein the at least two NLS are positioned at or near the N-terminus and at or near the C-terminus of the protein.

[0440] Embodiment I-70. The Class 2, Type V CRISPR protein of any one of embodiments I-28 to I-69, wherein the Class 2, Type V CRISPR protein is capable of forming a ribonuclear protein complex (RNP) with a gRNA.

[0441] Embodiment I-71. The Class 2, Type V CRISPR protein of embodiment I-70, wherein the RNP exhibits at least one or more improved characteristics as compared to a an RNP of a reference protein of any one of SEQ ID NOS: 358, 359, or 361 and a gRNA of SEQ ID NO: 17 or SEQ ID NO: 18.

[0442] Embodiment I-72. The Class 2, Type V CRISPR protein of embodiment I-71, wherein the improved characteristic is selected from the group consisting of increased binding affinity to a guide nucleic acid (gRNA); increased binding affinity to a target nucleic acid; improved ability to utilize a greater spectrum of one or more PAM sequences, including ATC, CTC, GTC, or TTC, in the editing of target nucleic acid; increased unwinding of the target nucleic acid; increased editing activity; increased editing efficiency; increased editing specificity of the target nucleic acid; increased nuclease activity; increased target strand loading for double strand cleavage; decreased target strand loading for single strand nicking; decreased off-target cleavage of the target nucleic acid; increased binding of non-target nucleic acid strand; and increased protein:gRNA complex (RNP) stability.

[0443] Embodiment I-73. The Class 2, Type V CRISPR protein of embodiment I-71 or I-72, wherein the improved characteristic of the RNP is at least about 1.1 to about 100,000-fold increased relative to an RNP comprising any off SEQ ID NOS: 358, 359, or 361.

[0444] Embodiment I-74. The Class 2, Type V CRISPR protein of embodiment I-71 or I-72, wherein the improved characteristic of the RNP is at least about 10-fold, at least about 100-fold, at least about 1,000-fold, or at least about 10,000-fold increased relative to an RNP comprising any of SEQ ID NOS: 358, 350 or 361.

[0445] Embodiment I-75. The Class 2, Type V CRISPR protein of any one of embodiments I-71 to I-74, wherein the improved characteristic of the RNP comprises a 1.1 to 100-fold improvement in editing efficiency compared to the RNP of an RNP comprising SEQ ID NOS: 358, 350 or 361.

[0446] Embodiment I-76. A gene editing pair comprising a gRNA and a Class 2, Type V CRISPR protein, the pair comprising:
[0447] a. a gRNA of any one of embodiments I-24 to I-27; and
[0448] b. a Class 2, Type V CRISPR protein of any one of embodiments I-28 to I-75.

[0449] Embodiment I-77. The gene editing pair of embodiment I-76, wherein the gRNA and the Class 2, Type V CRISPR protein are capable of forming a ribonuclear protein complex (RNP).

[0450] Embodiment I-78. The gene editing pair of embodiment I-76 or I-77, wherein the gRNA and the Class 2, Type V CRISPR protein are associated together as a ribonuclear protein complex (RNP).

[0451] Embodiment I-79. The gene editing pair of embodiment I-77 or I-78, wherein an RNP of the Class 2, Type V CRISPR protein and the gRNA exhibit at least one or more improved characteristics as compared to an RNP comprising any of SEQ ID NOS: 358, 359, or 361, and a gRNA comprising SEQ ID NO: 17 or SEQ ID NO: 18.

[0452] Embodiment I-80. The gene editing pair of embodiment I-79, wherein the improved characteristic is selected from one or more of the group consisting of increased binding affinity of the Class 2, Type V CRISPR protein to the gRNA; increased binding affinity to a target nucleic acid; increased ability to utilize a greater spectrum of one or more PAM sequences, including ATC, CTC, GTC, or TTC, in the editing of target nucleic acid; increased unwinding of the target nucleic acid; increased editing activity; increased editing efficiency; increased editing specificity of the target nucleic acid; increased nuclease activity; increased target strand loading for double strand cleavage; decreased target strand loading for single strand nicking; decreased off-target cleavage of the target nucleic acid; increased binding of non-target nucleic acid strand; increased protein:gRNA complex (RNP) stability; and increased fusion characteristics.

[0453] Embodiment I-81. The gene editing pair of embodiment I-79 or I-80, wherein the improved characteristic of the RNP of the Class 2, Type V CRISPR protein and the gRNA is at least about 1.1 to about 100-fold or more increased relative to the RNP of an earlier generation CasX and gRNA gene editing pair in a comparable in vitro assay system.

[0454] Embodiment I-82. The gene editing pair of embodiment I-79 or I-80, wherein the improved characteristic of the Class 2, Type V CRISPR protein is at least about 1.1, at least about 2, at least about 10, at least about 100-fold or more increased relative to an earlier generation CasX and gRNA gene editing pair in a comparable in vitro assay system.

[0455] Embodiment I-83. The gene editing pair of any one of embodiments I-77 to I-82, wherein the RNP comprising the Class 2, Type V CRISPR protein and the gRNA exhibits greater editing efficiency and/or binding of a target nucleic acid sequence in the target nucleic acid when any one of the PAM sequences TTC, ATC, GTC, or CTC is located 1 nucleotide 5′ to the non-target strand of the protospacer having identity with the targeting sequence of the gRNA in a cellular assay system compared to the editing efficiency and/or binding of an RNP comprising an earlier generation CasX protein and a reference gRNA in a comparable assay system.

[0456] Embodiment I-84. The gene editing pair of embodiment I-83, wherein the PAM sequence is TTC.

[0457] Embodiment I-85. The gene editing pair of embodiment I-83, wherein the PAM sequence is ATC.

[0458] Embodiment I-86. The gene editing pair of embodiment I-83, wherein the PAM sequence is CTC.

[0459] Embodiment I-87. The gene editing pair of embodiment I-83, wherein the PAM sequence is GTC.

[0460] Embodiment I-88. The gene editing pair of any one of embodiments I-83 to I-87, wherein the RNP comprising the Class 2, Type V CRISPR and the gRNA exhibits increased binding affinity for the one or more PAM sequences that is at least 1.5-fold, at least 2-fold, at least 4-fold, at least 10-fold, at least 20-fold, at least 30-fold, or at least 40-fold greater compared to the binding affinity of an RNP of any one earlier generation CasX and gRNA gene editing pairs, when assessed in a comparable in vitro assay system.

[0461] Embodiment I-89. The gene editing pair of any one of embodiments I-77 to I-88, wherein the RNP of the Class 2, Type V CRISPR protein and the gRNA exhibits increased editing efficiency that is at least 1.5-fold, at least 2-fold, at least 4-fold, at least 10-fold, at least 20-fold, at least 30-fold, or at least 40-fold greater compared to the editing efficiency of an RNP of any one of the reference proteins of earlier generation CasX and gRNA gene editing pairs, when assessed in a comparable in vitro assay system.

[0462] Embodiment I-90. The gene editing pair of any one of embodiments I-77 to I-89, wherein the Class 2, Type V CRISPR and the gRNA are able to form RNP having at least about a 5%, at least about a 10%, at least about a 15%, or at least about a 20% higher percentage of cleavage-competent conformation compared to an RNP of any one of the reference proteins of earlier generation CasX and gRNA gene editing pairs, when assessed in a comparable in vitro assay system.

[0463] Embodiment I-91. The gene editing pair of any one of embodiments I-77 to I-90, wherein the RNP comprising the Class 2, Type V CRISPR and the gRNA exhibit a cleavage rate for the target nucleic acid in a timed in vitro assay that is at least about 5-fold, at least about 10-fold, or at least about 20-fold higher compared to an RNP of any one earlier generation CasX and gRNA gene editing pairs, when assessed in a comparable in vitro assay system.

[0464] Embodiment I-92. The gene editing pair of any one of embodiments I-77 to I-91, wherein the RNP comprising the Class 2, Type V CRISPR and the gRNA exhibit higher percent editing of the target nucleic acid in a timed in vitro assay that is at least about 5-fold, at least about 10-fold, at least about 20-fold, or at least about 100-fold higher compared to an RNP of any one earlier generation CasX and gRNA gene editing pairs, when assessed in a comparable in vitro assay system.

[0465] Embodiment I-93. A catalytically-dead Class 2, Type V CRISPR protein, comprising a sequence derived from any of SEQ ID NOS: 95-142 or a sequence having at least 60%, at least 70%, at least 80%, at least 90%, at least 95%, at least 98%, at least 99% thereto.

[0466] Embodiment I-94. A catalytically-dead Class 2, Type V CRISPR protein, comprising a sequence derived from any of SEQ ID NOS: 95-142.

[0467] Embodiment I-95. The Class 2, Type V CRISPR protein of embodiment I-93 or I-94, wherein and RNP of the catalytically-dead Class 2, Type V CRISPR protein and a gRNA of any one of embodiments I-24 to I-27 retain the ability to bind target nucleic acid.

[0468] Embodiment I-96. A nucleic acid comprising a sequence that encodes the gRNA scaffold of any one of embodiments I-1 to I-23, or the gRNA of any one of embodiments I-24 to 1-27.

[0469] Embodiment I-97. A nucleic acid comprising a sequence that encodes the Class 2, Type V CRISPR protein of any one of embodiments I-28 to I-75.

[0470] Embodiment I-98. The nucleic acid of embodiment I-97, wherein the sequence that encodes the Class 2, Type V CRISPR protein is codon optimized for expression in a eukaryotic cell.

[0471] Embodiment I-99. A vector comprising the gRNA of any one of embodiments I-24 to I-27, the Class 2, Type V CRISPR protein of any one of embodiments I-28 to I-75, or the nucleic acid of any one of embodiments I-96 to I-98.

[0472] Embodiment I-100. The vector of embodiment I-99, wherein the vector comprises a promoter.

[0473] Embodiment I-101. The vector of embodiment I-99 or I-100, wherein the vector is selected from the group consisting of a retroviral vector, a lentiviral vector, an adenoviral vector, an adeno-associated viral (AAV) vector, a herpes simplex virus (HSV) vector, a CasX delivery particle (XDP), a plasmid, a minicircle, a nanoplasmid, a DNA vector, and an RNA vector.

[0474] Embodiment I-102. The vector of embodiment I-101, wherein the vector is an AAV vector.

[0475] Embodiment I-103. The vector of embodiment I-102, wherein the AAV vector is selected from AAV1, AAV2, AAV3, AAV4, AAV5, AAV6, AAV7, AAV8, AAV9, AAV10, AAV11, AAV12, AAV-Rh74, or AAVRh10.

[0476] Embodiment I-104. The vector of embodiment I-101, wherein the vector is a retroviral vector.

[0477] Embodiment I-105. The vector of embodiment I-101, wherein the vector is a XDP comprising one or more components of a gag polyprotein.

[0478] Embodiment I-106. The vector of embodiment I-105, wherein the one or more components of the gag polyprotein are selected from the group consisting of matrix protein (MA), a nucleocapsid protein (NC), a capsid protein (CA), a p1 peptide, a p6 peptide, a P2A peptide, a P2B peptide, a P10 peptide, a p12 peptide, a PP21/24 peptide, a P12/P3/P8 peptide, a P20 peptide, and a protease cleavage site.

[0479] Embodiment I-107. The vector of embodiment I-105 or I-106, wherein the Class 2, Type V CRISPR protein and the gRNA are associated together in an RNP.

[0480] Embodiment I-108. The vector of any one of embodiments I-105 to I-107, comprising a glycoprotein tropism factor.

[0481] Embodiment I-109. The vector of embodiment I-108, wherein the glycoprotein tropism factor has binding affinity for a cell surface marker of a target cell and facilitates entry of the XDP into the target cell.

[0482] Embodiment I-110. The vector of any one of embodiments I-99 to I-109, comprising the donor template.

[0483] Embodiment I-111. A host cell comprising the vector of any one of embodiments I-99 to I-110.

[0484] Embodiment I-112. The host cell of embodiment I-111, wherein the host cell is selected from the group consisting of Baby Hamster Kidney fibroblast (BHK) cells, human embryonic kidney 293 (HEK293) cells, human embryonic kidney 293T (HEK293T) cells, NS0 cells, SP2/0 cells, YO myeloma cells, P3X63 mouse myeloma cells, PER cells, PER.C6 cells, hybridoma cells, NIH3T3 cells, CV-1 (simian) in Origin with SV40 genetic material (COS) cells, HeLa, Chinese hamster ovary (CHO) cells, or yeast cells.

[0485] Embodiment I-113. A method of modifying a target nucleic acid in a cell, comprising contacting the target nucleic acid of the cell with: i) the gene editing pair of any one of embodiments I-76 to I-92; ii) the gene editing pair of any one of embodiments I-76 to I-92 together with a donor template; iii) one or more nucleic acids encoding the gene editing pair of (i) or (ii); iv) a vector comprising the nucleic acid of (iii); v) an XDP comprising the gene editing pair of (i) or (ii); or vi) combinations of two or more of (i) to (v), wherein the contacting of the target nucleic acid modifies the target nucleic acid.

[0486] Embodiment I-114. The method of embodiment I-113, comprising contacting the target with a plurality of gene editing pairs comprising a first and a second, or a plurality of gRNAs comprising targeting sequences complementary to different or overlapping regions of the target nucleic acid.

[0487] Embodiment I-115. The method of embodiment I-113, comprising contacting the target with a plurality of nucleic acids encoding gene editing pairs comprising a first and a second, or a plurality of gRNAs comprising targeting sequences complementary to different or overlapping regions of the target nucleic acid.

[0488] Embodiment I-116. The method of embodiment I-113, comprising contacting the target with a plurality of XDP comprising gene editing pairs comprising a first and a second, or a plurality of gRNAs comprising targeting sequences complementary to different or overlapping regions of the target nucleic acid.

[0489] Embodiment I-117. The method of any one of embodiment I-113, wherein the contacting comprises binding the target nucleic acid with the gene editing pair and introducing one or more single-stranded breaks in the target nucleic acid, wherein the modifying comprises introducing a mutation, an insertion, or a deletion in the target nucleic acid.

[0490] Embodiment I-118. The method of any one of embodiments I-113 to I-116 wherein the contacting comprises binding the target nucleic acid and introducing one or more double-stranded breaks in the target nucleic acid, wherein the modifying comprises introducing a mutation, an insertion, or a deletion in the target nucleic acid.

[0491] Embodiment I-119. The method of any one of embodiments I-113 to I-118, comprising contacting the target nucleic acid with a nucleotide sequence of a donor template nucleic acid wherein the donor template comprises a nucleotide sequence having homology to the target nucleic acid.

[0492] Embodiment I-120. The method of embodiment I-119, wherein the donor template comprises homologous arms on the 5′ and 3′ ends of the donor template.

[0493] Embodiment I-121. The method of embodiment I-119 or I-120, wherein the donor template is inserted in the target nucleic acid at the break site by homology-directed repair.

[0494] Embodiment I-122. The method of embodiment I-121, wherein the donor template is inserted in the target nucleic acid at the break site by non-homologous end joining (NIHEJ) or micro-homology end joining (MMEJ).

[0495] Embodiment I-123. The method of any one of embodiments I-113 to I-122, wherein the modifying of the cell occurs in vitro.

[0496] Embodiment I-124. The method of any one of embodiments I-113 to I-122, wherein modifying of the cell occurs in vivo.

[0497] Embodiment I-125. The method of any one of embodiments I-113 to I-124, wherein the cell is a eukaryotic cell.

[0498] Embodiment I-126. The method of embodiment I-125, wherein the eukaryotic cell is selected from the group consisting of a rodent cell, a mouse cell, a rat cell, a primate cell, and a non-human primate cell.

[0499] Embodiment I-127. The method of embodiment I-125, wherein the eukaryotic cell is a human cell.

[0500] Embodiment I-128. The method of any one of embodiments I-113 to I-127, wherein the cell is selected from the group consisting of an embryonic stem cell, an induced pluripotent stem cell, a germ cell, a fibroblast, an oligodendrocyte, a glial cell, a hematopoietic stem cell, a neuron progenitor cell, a neuron, a muscle cell, a bone cell, a hepatocyte, a pancreatic cell, a retinal cell, a cancer cell, a T-cell, a B-cell, an NK cell, a fetal cardiomyocyte, a myofibroblast, a mesenchymal stem cell, an autotransplanted expanded cardiomyocyte, an adipocyte, a totipotent cell, a pluripotent cell, a blood stem cell, a myoblast, an adult stem cell, a bone marrow cell, a mesenchymal cell, a parenchymal cell, an epithelial cell, an endothelial cell, a mesothelial cell, a fibroblast cell, an osteoblast cell, a chondrocyte cell, an exogenous cell, an endogenous cell, a stem cell, a hematopoietic stem cell, a bone-marrow derived progenitor cell, a myocardial cell, a skeletal cell, a fetal cell, an undifferentiated cell, a multi-potent progenitor cell, a unipotent progenitor cell, a monocyte, a cardiac myoblast, a skeletal myoblast, a macrophage, a capillary endothelial cell, a xenogenic cell, an allogenic cell, an autologous cell, and a post-natal stem cell.

[0501] Embodiment I-129. The method of any one of embodiments I-124 to I-128, wherein the cell is in a subject.

[0502] Embodiment I-130. The method of embodiment I-129, wherein the modifying occurs in the cells of the subject having a mutation in an allele of a gene wherein the mutation causes a disease or disorder in the subject.

[0503] Embodiment I-131. The method of embodiment I-130, wherein the modifying changes the mutation to a wild type allele of the gene or results in the expression of a functional gene product.

[0504] Embodiment I-132. The method of embodiment I-130, wherein the modifying knocks down or knocks out the allele of the gene causing the disease or disorder in the subject.

[0505] Embodiment I-133. The method of any one of embodiments I-129 to I-132, wherein the cell is autologous with respect to the subject.

[0506] Embodiment I-134. The method of any one of embodiments I-129 to I-132, wherein the cell is allogeneic autologous with respect to the subject.

[0507] Embodiment I-135. The method of any one of embodiments I-113 to I-134, wherein the vector is an Adeno-Associated Viral (AAV) vector.

[0508] Embodiment I-136. The method of embodiment I-135, wherein the AAV is AAV1, AAV2, AAV3, AAV4, AAV5, AAV6, AAV7, AAV8, AAV9, AAV10, AAV-Rh74, or AAVRh10.

[0509] Embodiment I-137. The method of embodiment I-113, wherein the vector is a lentiviral vector.

[0510] Embodiment I-138. The method of any one of embodiments I-113 to I-137, wherein the vector is administered to a subject in need using a therapeutically effective dose.

[0511] Embodiment I-139. The method of embodiment I-138, wherein the subject is selected from the group consisting of mouse, rat, pig, and non-human primate.

[0512] Embodiment I-140. The method of embodiment I-138, wherein the subject is a human.

[0513] Embodiment I-141. The method of embodiment I-138 wherein the vector is administered by a route of administration selected from the group consisting of intraparenchymal, intravenous, intra-arterial, intracerebroventricular, intracisternal, intrathecal, intracranial, and intraperitoneal routes wherein the administering method is injection, transfusion, or implantation.

[0514] Embodiment I-142. The method of embodiment I-138, wherein the vector is administered to the subject according to a treatment regimen comprising one or more consecutive doses using a therapeutically effective dose of the vector.

[0515] Embodiment I-143. The method of embodiment I-142, wherein the therapeutically effective dose is administered to the subject as two or more doses over a period of at least two weeks, or at least one month, or at least two months, or at least three months, or at least four months, or at least five months, or at least six months, or once a year, or every 2 or 3 years.

[0516] Embodiment I-144. A cell comprising a target nucleic acid modified by the gene editing pair of any one of embodiments I-76 to I-92.

[0517] Embodiment I-145. A cell edited by the method of any one of embodiments I-113 to I-143.

[0518] Embodiment I-146. The cell of embodiment I-144 or I-145, wherein the cell is a prokaryotic cell.

[0519] Embodiment I-147. The cell of embodiment I-144 or I-145, wherein the cell is a eukaryotic cell.

[0520] Embodiment I-148. The cell of embodiment I-147, wherein the eukaryotic cell is selected from the group consisting of a rodent cell, a mouse cell, a rat cell, a primate cell, and a non-human primate cell.

[0521] Embodiment I-149. The cell of embodiment I-147, wherein the eukaryotic cell is a human cell.

[0522] Embodiment I-150. A composition, comprising the Class 2, Type V CRISPR protein of any one of embodiments I-28 to I-75.

[0523] Embodiment I-151. The composition of embodiment I-150, comprising the gRNA of any one of embodiments I-24 to I-27.

[0524] Embodiment I-152. The composition of embodiment I-151, wherein the protein and the gRNA are associated together in a ribonuclear protein complex (RNP).

[0525] Embodiment I-153. The composition of any one of embodiments I-150 to I-152, comprising a donor template nucleic acid wherein the donor template comprises a nucleotide sequence having homology to a target nucleic acid.

[0526] Embodiment I-154. The composition of any one of embodiments I-150 to I-153, comprising a buffer, a nuclease inhibitor, a protease inhibitor, a liposome, a therapeutic agent, a label, a label visualization reagent, or any combination of the foregoing.

[0527] Embodiment I-155. A composition, comprising a gRNA scaffold of any one of embodiments I-1 to I-23, or a gRNA of any one of embodiments I-24 to I-27.

[0528] Embodiment I-156. The composition of embodiment I-155, comprising the Class 2, Type V CRISPR protein of any one of embodiments I-28 to I-75.

[0529] Embodiment I-157. The composition of embodiment I-156, wherein the Class 2, Type V CRISPR protein and the gRNA are associated together in a ribonuclear protein complex (RNP).

[0530] Embodiment I-158. The composition of any one of embodiments I-155 to I-157, comprising a donor template nucleic acid wherein the donor template comprises a nucleotide sequence having homology to a target nucleic acid.

[0531] Embodiment I-159. The composition of any one of embodiments I-155 to I-158, comprising a buffer, a nuclease inhibitor, a protease inhibitor, a liposome, a therapeutic agent, a label, a label visualization reagent, or any combination of the foregoing.

[0532] Embodiment I-160. A composition, comprising the gene editing pair of any one of embodiments I-76 to I-92.

[0533] Embodiment I-161. The composition of embodiment I-160, comprising a donor template nucleic acid wherein the donor template comprises a nucleotide sequence having homology to a target nucleic acid.

[0534] Embodiment I-162. The composition of embodiment I-160 or I-161, comprising a buffer, a nuclease inhibitor, a protease inhibitor, a liposome, a therapeutic agent, a label, a label visualization reagent, or any combination of the foregoing.

[0535] Embodiment I-163. A kit, comprising the Class 2, Type V CRISPR protein of any one of embodiments I-28 to I-75 and a container.

[0536] Embodiment I-164. The kit of embodiment I-163, comprising a gRNA scaffold of any one of embodiments I-1 to I-23, or a gRNA of any one of embodiments I-24 to I-27.

[0537] Embodiment I-165. The kit of embodiment I-163 or I-164, comprising a donor template nucleic acid wherein the donor template comprises a nucleotide sequence having homology to a target nucleic acid sequence of a target nucleic acid.

[0538] Embodiment I-166. The kit of any one of embodiments I-163 to I-165, comprising a buffer, a nuclease inhibitor, a protease inhibitor, a liposome, a therapeutic agent, a label, a label visualization reagent, or any combination of the foregoing.

[0539] Embodiment I-167. A kit, comprising a gRNA scaffold of any one of embodiments I-1 to I-23, or a gRNA of any one of embodiments I-24 to I-27.

[0540] Embodiment I-168. The kit of embodiment I-167, comprising the Class 2, Type V CRISPR protein of any one of embodiments I-28 to I-75.

[0541] Embodiment I-169. The kit of embodiment I-167 or I-168, comprising a donor template nucleic acid wherein the donor template comprises a nucleotide sequence having homology to a target nucleic acid sequence of a target nucleic acid.

[0542] Embodiment I-170. The kit of any one of embodiments I-167 to I-169, comprising a buffer, a nuclease inhibitor, a protease inhibitor, a liposome, a therapeutic agent, a label, a label visualization reagent, or any combination of the foregoing.

[0543] Embodiment I-171. A kit, comprising the gene editing pair of any one of embodiments I-76 to I-92.

[0544] Embodiment I-172. The kit of embodiment I-171, comprising a donor template nucleic acid wherein the donor template comprises a nucleotide sequence having homology to a target nucleic acid.

[0545] Embodiment I-173. The kit of embodiment I-171 or I-172, comprising a buffer, a nuclease inhibitor, a protease inhibitor, a liposome, a therapeutic agent, a label, a label visualization reagent, or any combination of the foregoing.

[0546] Embodiment I-174. An engineered Class 2, Type V CRISPR protein comprising any one of the sequences listed in Table 3.

[0547] Embodiment I-175. A gRNA comprising any one of the gRNA scaffold variant sequences listed in Table 2.

[0548] Embodiment I-176. The gRNA of embodiment I-175, wherein one or more uracils (U) of the gRNA scaffold variants of the Table 2 sequences are replaced with thymines (T).

[0549] Embodiment I-177. The gRNA of embodiment I-176, comprising a targeting sequence of at least 10 to 30 nucleotides complementary to a target nucleic acid.

[0550] Embodiment I-178. The gRNA of embodiment I-177, wherein the targeting sequence has 20 nucleotides.

[0551] Embodiment I-179. The gRNA of embodiment I-177, wherein the targeting sequence has 19 nucleotides.

[0552] Embodiment I-180. The gRNA of embodiment I-177, wherein the targeting sequence has 18 nucleotides.

[0553] Embodiment I-181. The gRNA of embodiment I-177, wherein the targeting sequence has 17 nucleotides.

[0554] Embodiment I-182. The gRNA of embodiment I-177, wherein the targeting sequence has 16 nucleotides.

[0555] Embodiment I-183. The gRNA of embodiment I-177, wherein the targeting sequence has 15 nucleotides.

[0556] Embodiment I-184. A method of treating a disease in a subject in need thereof, comprising administering to the subject a therapeutically effective amount of a composition comprising: (a) an engineered class 2, type V CRISPR protein comprising any of SEQ ID NOS: 95-142 and (b) a gRNA comprising any of SEQ ID NOS: 29-81.

[0557] Embodiment I-185. A composition comprising: (a) an engineered class 2, type V CRISPR protein comprising any of SEQ ID NOS: 95-142 and (b) a gRNA comprising any of SEQ ID NOS: 29-81, for use as a medicament for the treatment of a subject having a disease.

[0558] Embodiment II-1. An engineered ribonucleic acid scaffold (ERS) comprising a sequence having at least at least 90%, at least 95%, at least 98%, at least 99% sequence identity to one of:

(i)
ACUGGCACUUCUAUCUGAUUACUCUGAGAGCCAUCACCAGCGACUAUGUCGUAUGGGU
AAAGCCGCUUACGGACUUCGGUCCGUAAGAGGCAUCAGAG (variant 221);
or
(ii)
SEQ ID NO: 156
(variant 316);

[0559] comprising one or more modifications in the sequence, wherein the one or more modifications result in an improved characteristic compared to unmodified (i) variant 221 or (ii) SEQ ID NO: 156.

[0560] Embodiment II-2. The ERS of embodiment II-1, wherein the one or modifications comprise mutations in at least two regions of the ERS, wherein the regions are selected from the group consisting of 5′ terminus, pseudoknot stem, triplex loop, triplex, scaffold stem, and extended stem.

[0561] Embodiment II-3. The ERS of embodiment II-2, wherein the mutations in the regions are selected from the group consisting of the mutations of Tables 24A and 24B.

[0562] Embodiment II-4. The ERS of any one of embodiments II-1 to II-3, wherein the improved characteristic is one or more functional properties selected from the group consisting of improved binding to a CasX nuclease to form a ribonucleoprotein (RNPs), enhanced folding stability of the ERS, increased transcriptional efficiency, and enhanced editing of a target nucleic acid by an RNP comprising the ERS.

[0563] Embodiment II-5. The ERS of any one of embodiments II-1 to II-4, wherein the ERS comprises a sequence selected from the group consisting of SEQ ID NOS: 11568-22227 or 23572-24915, or a sequence having at least at least 90%, at least 95%, at least 98%, or at least 99% sequence identity thereto.

[0564] Embodiment II-6. The ERS of any one of embodiments II-1 to II-4, wherein the ERS comprises a sequence selected from the group consisting of SEQ ID NOS: 11568-22227 or 23572-24915.

[0565] Embodiment II-7. The ERS of any one of embodiments II-1 to II-6, wherein the ERS comprises one or more heterologous RNA sequences in the extended stem.

[0566] Embodiment II-8. The ERS of embodiment II-7, wherein the heterologous RNA is selected from the group consisting of a MS2 hairpin, Qβ hairpin, U1 hairpin II, Uvsx hairpin, and a PP7 stem loop, or sequence variants thereof.

[0567] Embodiment II-9. The ERS of embodiment II-7 or II-8, wherein the heterologous RNA is capable of binding a protein, a RNA, a DNA, or a small molecule.

[0568] Embodiment II-10. The ERS of any one of embodiments II-1 to II-9, wherein the ERSERS comprises a Rev response element (RRE) or a portion thereof.

[0569] Embodiment II-11. The ERS of embodiment II-10, wherein the RRE or portion thereof is selected from the group consisting of Stem IIB of the RRE having sequence UGGGCGCAGCGUCAAUGACGCUGACGGUACA, Stem II-V of the RRE having sequence CAGGAAGCACUAUGGGCGCAGCGUCAAUGACGCUGACGGUACAGGCCAGACAAU UAUUGUCUGGUAUAGUGCAGCAGCAGAACAAUUUGCUGAGGGCUAUUGAGGCGC AACAGCAUCUGUUGCAACUCACAGUCUGGGGCAUCAAGCAGCUCCAGGCAAGAA UCCUG, Stem II of the RRE having sequence GCACUAUGGGCGCAGCGUCAAUGACGCUGACGGUACAGGCCAGACAAUUAUUGU CUGGUAUAGUGC, Rev-binding element (RBE) of Stem IIB having sequence GCUGACGGUACAGGC, and full-length RRE having sequence AGGAGCUUUGUUCCUUGGGUUCUUGGGAGCAGCAGGAAGCACUAUGGGCGCAGC GUCAAUGACGCUGACGGUACAGGCCAGACAAUUAUUGUCUGGUAUAGUGCAGCA GCAGAACAAUUUGCUGAGGGCUAUUGAGGCGCAACAGCAUCUGUUGCAACUCAC AGUCUGGGGCAUCAAGCAGCUCCAGGCAAGAAUCCUGGCUGUGGAAAGAUACCU AAAGGAUCAACAGCUCCU.

[0570] Embodiment II-12. The ERS of embodiment II-1, wherein the ERS of SEQ ID NO: SEQ ID NO: 156 comprises one or more chemical modifications to the sequence.

[0571] Embodiment II-13. The ERS of embodiment II-12, wherein the chemical modification is addition of a 2′O-methyl group to one or more nucleotides of the sequence.

[0572] Embodiment II-14. The ERS of embodiment II-12 or II-13, wherein the chemical modification is substitution of a phosphorothioate bond between two or more nucleotides of the sequence.

[0573] Embodiment II-15. The ERS of embodiment II-13 or II-14, wherein the modifications results in reduced susceptibility of the ERS to degradation by cellular RNase compared to an unmodified ERS.

[0574] Embodiment II-16. The ERS of any one of embodiments II-12 to II-16, wherein the ERS comprises a sequence selected from the group consisting of SEQ ID NOS: 501-532.

[0575] Embodiment II-17. The ERS of any one of embodiments II-1 to II-16, comprising a targeting sequence linked at the 3′ end of the ERS that is complementary to a target nucleic acid sequence.

[0576] Embodiment II-18. The ERS of embodiment II-13, wherein the targeting sequence has 15, 16, 17, 18, 19, 20, 21, 22, 23, 24, 25, 26, 27, 28, 29, or 30 nucleotides.

[0577] Embodiment II-19. The ERS of embodiment II-18, wherein the targeting sequence has 18, 19, or 20 nucleotides.

[0578] Embodiment II-20. The ERS of any one of embodiments II-13 to II-19, wherein the ERS is capable of forming a ribonucleoprotein (RNP) complex with a CasX protein.

[0579] Embodiment II-21. An engineered CasX protein, comprising a sequence having two or three mutations in the sequence of SEQ ID NO: 228, wherein the mutations result in an improved characteristic compared to unmodified SEQ ID NO: 228.

[0580] Embodiment II-22. The engineered CasX protein of embodiment II-21, wherein the mutations are selected from
[0581] a. at least one amino acid substitution;
[0582] b. at least one amino acid deletion;
[0583] c. at least one amino acid insertion; or
[0584] d. any combination of (a)-(c).

[0585] Embodiment II-23. The engineered CasX protein of embodiment II-21 or II-22, wherein the mutations are selected from the group consisting of the mutations as set forth in Tables 11-13.

[0586] Embodiment II-24. The engineered CasX protein of any one of embodiments II-21 to II-23, comprising a sequence selected from SEQ ID NOS: 27857-49628 as set forth in Table 14, or a sequence having at least at least 90%, at least 95%, at least 98%, at least 99% sequence identity thereto.

[0587] Embodiment II-25. The engineered CasX protein of any one of embodiments II-21 to II-24, comprising a sequence selected from SEQ ID NOS: 27857-49628 as set forth in Table 14.

[0588] Embodiment II-26. The engineered CasX protein of any one of embodiments II-21 to II-25, wherein the improved characteristic is one or more of improved ability to utilize a greater spectrum of PAM sequences in the editing of target nucleic acid, increased nuclease activity, improved editing efficiency, improved editing specificity for the target nucleic acid, decreased off-target editing, increased percentage of a eukaryotic genome that can be efficiently edited, improved ability to form cleavage-competent RNP with an ERS, and improved stability of an RNP complex.

[0589] Embodiment II-27. The engineered CasX protein of embodiment II-25, wherein the improved characteristic comprises increased nuclease activity at a target nucleic sequence comprising an TTC, ATC, GTC, or CTC PAM sequence relative to nuclease activity of the sequence of SEQ ID NO: 228.

[0590] Embodiment II-28. The engineered CasX protein of any one of embodiments II-21 to 11-27, comprising one or more nuclear localization signals (NLS) selected from the group consisting of the sequences of SEQ ID NOS: 364-457 as set forth in Table 7, and, optionally, wherein the one or more NLS are linked to the engineered CasX protein or to an adjacent NLS with a linker peptide wherein the linker peptide is selected from the group consisting of SR, RS, (G)n (SEQ ID NO: (GS)n, (GSGGS)n, (GGSGGS)n, (GGGS)n, GGSG, GGSGG, GSGSG, GSGGG, GGGSG, GSSSG, GPGP, GGP, PPP, PPAPPA, PPPG, PPPGPPP, PPP(GGGS)n, (GGGS)nPPP, AEAAAKEAAAKEAAAKA, and TPPKTKRKVEFE, wherein n is 1 to 5.

[0591] Embodiment II-29. The engineered CasX protein of embodiment II-28, wherein the one or more NLS are positioned at or near the C-terminus of the protein.

[0592] Embodiment II-36. The engineered CasX protein of embodiment II-28, wherein the one or more NLS are positioned at or near at the N-terminus of the protein.

[0593] Embodiment II-37. The engineered CasX protein of embodiment II-28, comprising at least two NLS, wherein the at least two NLS are positioned at or near the N-terminus and at or near the C-terminus of the protein.

[0594] Embodiment II-38. The engineered CasX protein of any one of embodiments II-21 to II-37, wherein the engineered CasX protein is capable of forming a ribonuclear protein complex (RNP) with an ERS.

[0595] Embodiment II-30. An engineered CasX protein, comprising a sequence of any of SEQ ID NOS: 24916-27856, wherein the mutations result in an improved characteristic compared to SEQ ID NO: 228.

[0596] Embodiment II-31. The engineered CasX protein of embodiment II-30 wherein the improved characteristic is one or more of improved ability to utilize a greater spectrum of PAM sequences in the editing of target nucleic acid, increased nuclease activity, improved editing efficiency, improved editing specificity for the target nucleic acid, decreased off-target editing, increased percentage of a eukaryotic genome that can be efficiently edited, improved ability to form cleavage-competent RNP with an ERS, and improved stability of an RNP complex.

[0597] Embodiment II-32. The engineered CasX protein of embodiment II-30, wherein the improved characteristic comprises increased nuclease activity at a target nucleic sequence comprising an TTC, ATC, GTC, or CTC PAM sequence relative to nuclease activity of the sequence of SEQ ID NO: 228.

[0598] Embodiment II-39. A gene editing pair comprising a ERS and an engineered CasX protein, the pair comprising:
[0599] a. a ERS of any one of embodiments II-1 to II-20; and
[0600] b. an engineered CasX protein of any one of embodiments II-21 to II-38.

[0601] Embodiment II-40. The gene editing pair of embodiment II-39, wherein the ERS and the engineered CasX protein are capable of forming a ribonuclear protein complex (RNP).

[0602] Embodiment II-41. The gene editing pair of embodiment II-39 or II-40, wherein the ERS and the engineered CasX protein are associated together as a ribonuclear protein complex (RNP).

[0603] Embodiment II-42. The gene editing pair of embodiment II-40 or II-41, wherein an RNP of the engineered CasX protein and the ERS exhibit at least one or more improved characteristics as compared to an RNP comprising the sequences of SEQ ID NO: 156 and SEQ ID NO: 228.

[0604] Embodiment II-43. The gene editing pair of embodiment II-42, wherein the improved characteristic is selected from one or more of the group consisting of increased binding affinity of the engineered CasX protein to the ERS; increased binding affinity to a target nucleic acid; increased ability to utilize a greater spectrum of one or more PAM sequences, including ATC, CTC, GTC, or TTC, in the editing of target nucleic acid; increased editing specificity of the target nucleic acid; increased nuclease activity; decreased off-target cleavage of the target nucleic acid; increased RNP stability; increased ability to form cleavage-competent RNP.

[0605] Embodiment II-44. The gene editing pair of any one of embodiments II-39 to II-43, wherein the RNP comprising the engineered CasX protein and the ERS exhibits greater editing efficiency and/or binding of a target nucleic acid sequence in the target nucleic acid when any one of the PAM sequences TTC, ATC, GTC, or CTC is located 1 nucleotide 5′ to the non-target strand of the protospacer having identity with the targeting sequence of the ERS in a cellular assay system compared to the editing efficiency and/or binding of an RNP comprising an earlier generation CasX protein and a reference ERS in a comparable assay system.

[0606] Embodiment II-45. A nucleic acid comprising a sequence that encodes the ERS of any one of embodiments II-1 to II-20.

[0607] Embodiment II-46. A nucleic acid comprising a sequence that encodes the engineered CasX protein of any one of embodiments II-21 to II-38.

[0608] Embodiment II-47. The nucleic acid of embodiment II-46, wherein the nucleic acid is mRNA.

[0609] Embodiment II-48. A vector comprising the ERS of any one of embodiments II-1 to II-20, the engineered CasX protein of any one of embodiments II-21 to II-38, or the nucleic acid of any one of embodiment II-45 or II-46.

[0610] Embodiment II-49. The vector of embodiment II-48, wherein the vector comprises a promoter operably linked to the nucleic acid.

[0611] Embodiment II-50. The vector of embodiment II-48 or II-49, wherein the vector is selected from the group consisting of a retroviral vector, a lentiviral vector, an adenoviral vector, an adeno-associated viral (AAV) vector, a herpes simplex virus (HSV) vector, a CasX delivery particle (XDP), a plasmid, a minicircle, a nanoplasmid, a DNA vector, and an RNA vector.

[0612] Embodiment II-51. The vector of embodiment II-50, wherein the vector is an AAV vector.

[0613] Embodiment II-52. The vector of embodiment II-51, wherein the AAV vector is selected from AAV1, AAV2, AAV3, AAV4, AAV5, AAV6, AAV7, AAV8, AAV9, AAV10, AAV 11, AAV12, AAV 9.45, AAV 9.61, AAV-Rh74, or AAVRh10.

[0614] Embodiment II-53. The vector of embodiment II-50, wherein the vector is a retroviral vector.

[0615] Embodiment II-54. The vector of embodiment II-50, wherein the vector is an XDP comprising one or more components of a gag polyprotein.

[0616] Embodiment II-55. The vector of embodiment II-54, wherein the engineered CasX protein and the ERS are associated together in an RNP.

[0617] Embodiment II-56. The vector of embodiment II-54 or II-55, comprising a glycoprotein tropism factor.

[0618] Embodiment II-57. The vector of embodiment II-56, wherein the glycoprotein tropism factor has binding affinity for a cell surface marker of a target cell and facilitates entry of the XDP into the target cell.

[0619] Embodiment II-58. A host cell comprising the vector of any one of embodiments II-48 to II-57.

[0620] Embodiment II-59. The host cell of embodiment II-58, wherein the host cell is selected from the group consisting of Baby Hamster Kidney fibroblast (BHK) cells, human embryonic kidney 293 (HEK293) cells, human embryonic kidney 293T (HEK293T) cells, NS0 cells, SP2/0 cells, YO myeloma cells, P3X63 mouse myeloma cells, PER cells, PER.C6 cells, hybridoma cells, NIH3T3 cells, CV-1 (simian) in Origin with SV40 genetic material (COS) cells, HeLa, Chinese hamster ovary (CHO) cells, or yeast cells.

[0621] Embodiment II-60. A lipid nanoparticle comprising the nucleic acid of any one of embodiments II-45 to II-47.

[0622] Embodiment II-61. A method of modifying a target nucleic acid in a cell, comprising contacting the target nucleic acid of the cell with: i) the gene editing pair of any one of embodiments II-39 to II-44; ii) one or more nucleic acids encoding the gene editing pair of (i); iii) a vector comprising the nucleic acid of (iii); iv) an XDP comprising the gene editing pair of (i); v) an LNP of embodiment II-60; or vi) combinations of two or more of (i) to (v), wherein the contacting of the target nucleic acid modifies the target nucleic acid.

[0623] Embodiment II-62. The method of embodiment II-61, comprising contacting the target with a plurality of gene editing pairs comprising a first and a second, or a plurality of ERS comprising targeting sequences complementary to different or overlapping regions of the target nucleic acid.

[0624] Embodiment II-63. The method of embodiment II-61, comprising contacting the target with a plurality of nucleic acids encoding gene editing pairs comprising a first and a second, or a plurality of ERS comprising targeting sequences complementary to different or overlapping regions of the target nucleic acid.

[0625] Embodiment II-64. The method of embodiment II-61, comprising contacting the target with a plurality of XDP comprising gene editing pairs comprising a first and a second, or a plurality of ERSs comprising targeting sequences complementary to different or overlapping regions of the target nucleic acid.

[0626] Embodiment II-65. The method of any one of embodiment II-60, wherein the contacting comprises binding the target nucleic acid with the gene editing pair and introducing one or more single-stranded breaks in the target nucleic acid, wherein the modifying comprises introducing a mutation, an insertion, or a deletion in the target nucleic acid.

[0627] Embodiment II-66. The method of any one of embodiments II-60 to II-64 wherein the contacting comprises binding the target nucleic acid and introducing one or more double-stranded breaks in the target nucleic acid, wherein the modifying comprises introducing a mutation, an insertion, or a deletion in the target nucleic acid.

[0628] Embodiment II-67. The method of any one of embodiments II-61 to II-66, wherein the modifying of the cell occurs in vitro.

[0629] Embodiment II-68. The method of any one of embodiments II-61 to II-64, wherein modifying of the cell occurs in vivo.

[0630] Embodiment II-69. The method of any one of embodiments II-60 to II-68, wherein the cell is a eukaryotic cell.

[0631] Embodiment II-70. The method of embodiment II-69, wherein the eukaryotic cell is selected from the group consisting of a rodent cell, a mouse cell, a rat cell, a primate cell, and a non-human primate cell.

[0632] Embodiment II-71. The method of embodiment II-69, wherein the eukaryotic cell is a human cell.

[0633] Embodiment II-72. The method of any one of embodiments II-60 to II-71, wherein the cell is selected from the group consisting of an embryonic stem cell, an induced pluripotent stem cell, a germ cell, a fibroblast, an oligodendrocyte, a glial cell, a hematopoietic stem cell, a neuron progenitor cell, a neuron, a muscle cell, a bone cell, a hepatocyte, a pancreatic cell, a retinal cell, a cancer cell, a T-cell, a B-cell, an NK cell, a fetal cardiomyocyte, a myofibroblast, a mesenchymal stem cell, an autotransplanted expanded cardiomyocyte, an adipocyte, a totipotent cell, a pluripotent cell, a blood stem cell, a myoblast, an adult stem cell, a bone marrow cell, a mesenchymal cell, a parenchymal cell, an epithelial cell, an endothelial cell, a mesothelial cell, a fibroblast cell, an osteoblast cell, a chondrocyte cell, an exogenous cell, an endogenous cell, a stem cell, a hematopoietic stem cell, a bone-marrow derived progenitor cell, a myocardial cell, a skeletal cell, a fetal cell, an undifferentiated cell, a multi-potent progenitor cell, a unipotent progenitor cell, a monocyte, a cardiac myoblast, a skeletal myoblast, a macrophage, a capillary endothelial cell, a xenogenic cell, an allogenic cell, an autologous cell, and a post-natal stem cell.

[0634] Embodiment II-73. The method of any one of embodiments II-68 to II-72, wherein the cell is in a subject.

[0635] Embodiment II-74. The method of embodiment II-73, wherein the modifying occurs in the cells of the subject having a mutation in an allele of a gene wherein the mutation causes a disease or disorder in the subject.

[0636] Embodiment II-75. The method of embodiment II-74, wherein the modifying changes the mutation to a wild type allele of the gene or results in the expression of a functional gene product.

[0637] Embodiment II-76. The method of embodiment II-74, wherein the modifying knocks down or knocks out the allele of the gene causing the disease or disorder in the subject.

[0638] Embodiment II-77. A composition, comprising the engineered CasX protein of any one of embodiments II-21 to II-38.

[0639] Embodiment II-78. The composition of embodiment II-77, comprising the ERS of any one of embodiments II-13 to II-20.

[0640] Embodiment II-79. The composition of embodiment II-78, wherein the protein and the ERS are associated together in a ribonuclear protein complex (RNP).

[0641] Embodiment II-80. A composition, comprising a ERS of any one of embodiments II-1 to II-20.

[0642] Embodiment II-81. The composition of embodiment II-80, comprising the engineered CasX protein of any one of embodiments II-21 to II-38.

[0643] Embodiment II-82. The composition of embodiment II-81, wherein the engineered CasX protein and the ERS are associated together in a ribonuclear protein complex (RNP).

[0644] Embodiment II-83. An engineered CasX protein comprising any one of the sequences listed in Table 14.

[0645] Embodiment II-84. A ERS comprising any one of the ERS variant sequences listed in Table 15 or Table 26.

[0646] Embodiment II-85. The ERS of embodiment II-84, comprising a targeting sequence of at least 10 to 30 nucleotides complementary to a target nucleic acid.

[0647] Embodiment II-86. The ERS of embodiment II-85, wherein the targeting sequence has 20 nucleotides.

[0648] Embodiment II-87. The ERS of embodiment II-85, wherein the targeting sequence has 19 nucleotides.

[0649] Embodiment II-88. The ERS of embodiment II-85, wherein the targeting sequence has 18 nucleotides.

[0650] Embodiment II-89. The ERS of embodiment II-85, wherein the targeting sequence has 17 nucleotides.

[0651] Embodiment II-90. The ERS of embodiment II-85, wherein the targeting sequence has 16 nucleotides.

[0652] Embodiment II-91. The ERS of embodiment II-85, wherein the targeting sequence has 15 nucleotides.

[0653] Embodiment III-1. An engineered ribonucleic acid scaffold (ERS) comprising a sequence of SEQ ID NO: 17, or a sequence having at least about 70% sequence identity thereto, comprising an extended stem loop sequence of SEQ ID NO: 49739 and one or more mutations at positions selected from the group consisting of U11, U24, A29, and A87.

[0654] Embodiment III-2. The engineered ERS of embodiment III-1, comprising mutations at positions U11, U24, A29, and A87.

[0655] Embodiment III-3. The engineered ERS of embodiment III-1, comprising one or more mutations selected from the group consisting of U11C, U24C, A29C, and A87G.

[0656] Embodiment III-4. The engineered ERS of embodiment III-3, comprising mutations consisting of U11C, U24C, A29C, and A87G.

[0657] Embodiment III-5. An engineered ribonucleic acid scaffold (ERS) comprising a sequence of SEQ ID NO: 75, or a sequence having at least about 70% sequence identity thereto, modified to comprise an extended stem loop sequence of SEQ ID NO: 49739.

[0658] Embodiment III-6. The ERS of embodiment III-5, the sequence comprising regions selected from the group consisting of:
[0659] a. a 5′ end comprising a sequence of AC;
[0660] b. a pseudoknot stem I comprising a sequence of UGGCGCU;
[0661] c. a triplex loop comprising a sequence of SEQ ID NO: 49736;
[0662] d. a pseudoknot stem II comprising a sequence of AGCGCCA; and
[0663] e. a triplex region III comprising a sequence of CAGAG.

[0664] Embodiment III-7. An engineered ribonucleic acid scaffold (ERS), comprising the sequence of ACUGGCGCUUCUAUCUGAUUACUCUGAGCGCCAUCACCAGCGACUAUGUCGUAGU GGGUAAAGCUCCCUCUUCGGAGGGAGCAUCAGAG (SEQ ID NO: 156), or a sequence having at least about 96% sequence identity thereto.

[0665] Embodiment III-8. An engineered ribonucleic acid scaffold (ERS) comprising a sequence having at least about 70% sequence identity to

(i)
ACUGGCACUUCUAUCUGAUUACUCUGAGAGCCAUCACCAGCGACUAUGUCGUAUGGGUA
AAGCCGCUUACGGACUUCGGUCCGUAAGAGGCAUCAGAG (SEQ ID NO: 61);
or
(ii)
(SEQ ID NO: 156)
ACUGGCGCUUCUAUCUGAUUACUCUGAGCGCCAUCACCAGCGACUAUGUCGUAGUGGGU
AAAGCUCCCUCUUCGGAGGGAGCAUCAGAG;

[0666] comprising one or more modifications in the sequence, wherein the one or more modifications result in an improved characteristic compared to unmodified SEQ ID NO: 61 or SEQ ID NO: 156.

[0667] Embodiment III-9. The ERS of embodiment III-8, comprising at least two modifications in the sequence, wherein the modifications result in an improved characteristic compared to unmodified SEQ ID NO: 61 or SEQ ID NO: 156.

[0668] Embodiment III-10. The ERS of embodiment III-8 or III-9, wherein the modification comprises:
[0669] a. a substitution of 1 to 30 consecutive nucleotides in one or more regions of the scaffold;
[0670] b. a deletion of 1 to 10 consecutive nucleotides in one or more regions of the scaffold;
[0671] c. an insertion of 1 to 10 consecutive nucleotides in one or more regions of the scaffold;
[0672] d. a substitution of the scaffold stem loop with an RNA stem loop sequence from a heterologous RNA source;
[0673] e. a substitution of the extended scaffold stem loop with an RNA stem loop sequence from a heterologous RNA source; or
[0674] f. any combination of (a)-(d).

[0675] Embodiment III-11. The ERS of any one of embodiments III-8 to III-10, wherein the modifications comprise mutations in one or more regions selected from the group consisting of a 5′ end, a pseudoknot stem, a triplex loop, a scaffold stem loop, an extended stem loop, and a triplex region III.

[0676] Embodiment III-12. The ERS of any one of embodiments III-8 to III-10, wherein the modifications comprise mutations in at least two regions of the ERS, wherein the regions are selected from the group consisting of a 5′ end, a pseudoknot stem I, a triplex loop, a pseudoknot stem II, a scaffold stem loop, an extended stem loop, and a triplex region III.

[0677] Embodiment III-13. The ERS of any one of embodiments III-8 to III-12, wherein the mutations are selected from the group consisting of the mutations of Tables 44, 45, and 47.

[0678] Embodiment III-14. The ERS of embodiment III-13, wherein sequences of the individual mutated regions have the sequences of:
[0679] a. SEQ ID NOS: 739-753 in the 5′ end region;
[0680] b. SEQ ID NOS: 754-772 in the triplex loop region;
[0681] c. SEQ ID NOS: 773-791 in the triplex region;
[0682] d. SEQ ID NOS: 792-841 in the pseudoknot region;
[0683] e. SEQ ID NOS: 842-869 in the scaffold stem region; and/or
[0684] f. SEQ ID NOS: 870-907 in the extended stem region.

[0685] Embodiment III-15. The ERS of embodiment III-13, wherein the ERS comprises paired combinations of individual mutated sequences from different or the same regions.

[0686] Embodiment III-16. The ERS of embodiment III-15, wherein the ERS comprises a sequence selected from the group consisting of SEQ ID NOS: 11,568-22,227 and 23,572-24,915, or a sequence having at least 70% sequence identity thereto.

[0687] Embodiment III-17. The ERS of embodiment III-15, wherein the ERS comprises a sequence selected from the group consisting of SEQ ID NOS: 11,568-22,227 and 23,572-24,915.

[0688] Embodiment III-18. The ERS of any one of embodiments III-7 to III-17, wherein the scaffold has 85-100 nucleotides, or any integer in between.

[0689] Embodiment III-19. An ERS comprising a sequence selected from the group consisting of SEQ ID NOS: 156, 739-907, 739-907, 11568-22227, 23572-24915, and 49719-49735, or a sequence having at least about 90%, at least about 95%, at least about 98%, or at least about 99% sequence identity thereto, wherein the ERS comprises an improved characteristic compared to the sequence of SEQ ID NO: 17.

[0690] Embodiment III-20. The ERS of embodiment III-19, wherein the ERS comprises a sequence selected from the group consisting of SEQ ID NOS: 156, 739-907, 11568-22227, 23572-24915, and 49719-49735, wherein the ERS comprises an improved characteristic compared to the sequence of SEQ ID NO: 17, when assayed in an in vitro cell-based assay under comparable conditions.

[0691] Embodiment III-21. The ERS of embodiment III-19 or III-20, wherein the improved characteristic is one or more functional properties selected from the group consisting of improved binding to a CasX nuclease to form a ribonucleoprotein (RNP), improved folding stability of the ERS, increased half-life in a cell, increased transcriptional efficiency, enhanced ability to synthetically manufacture the ERS, improved editing activity of a target nucleic acid by an RNP comprising the ERS, and improved editing specificity by an RNP comprising the ERS.

[0692] Embodiment III-22. The ERS of any one of embodiments III-1 to III-21, wherein the ERS comprises one or more heterologous RNA sequences in the extended stem loop.

[0693] Embodiment III-23. The ERS of embodiment III-22, wherein the heterologous RNA is selected from the group consisting of a MS2 hairpin, Qβ hairpin, U1 hairpin II, Uvsx hairpin, and a PP7 stem loop, or sequence variants thereof.

[0694] Embodiment III-24. The ERS of embodiment III-22 or III-23, wherein the heterologous RNA is capable of binding a protein, a RNA, a DNA, or a small molecule.

[0695] Embodiment III-25. The ERS of any one of embodiments III-1 to III-24, wherein the ERS comprises a Rev response element (RRE), or a portion thereof.

[0696] Embodiment III-26. The ERS of any one of embodiments III-1 to III-25, comprising a targeting sequence linked at the 3′ end of the ERS that is complementary to a target nucleic acid sequence.

[0697] Embodiment III-27. The ERS of embodiment III-26, wherein the targeting sequence has 15-20 nucleotides.

[0698] Embodiment III-28. The ERS of embodiment III-27, wherein the targeting sequence has 20 nucleotides.

[0699] Embodiment III-29. The ERS of any one of embodiments III-26 to III-28, wherein the ERS and linked targeting sequence has 100-115 nucleotides.

[0700] Embodiment III-30. The ERS of any one of embodiments III-1 to III-29, wherein the CpG content of the ERS is reduced or depleted.

[0701] Embodiment III-31. The ERS of embodiment III-30, wherein the CpG content is less than about 10%, less than about 5%, or less than about 1%.

[0702] Embodiment III-32. The ERS of any one of embodiments III-1 to III-31, wherein the ERS comprises one or more chemical modifications to the sequence.

[0703] Embodiment III-33. The ERS of embodiment III-32, wherein the chemical modification is addition of a 2′O-methyl group to one or more nucleotides of the sequence.

[0704] Embodiment III-34. The ERS of embodiment III-32 or III-33, wherein one or more nucleotides on either or both of the 5′ and 3′ terminal ends of the ERS are modified by an addition of a 2′O-methyl group.

[0705] Embodiment III-35. The ERS of any one of embodiments III-32 to III-34, wherein the chemical modification is substitution of a phosphorothioate bond between two or more nucleosides of the sequence.

[0706] Embodiment III-36. The ERS of any one of embodiments III-32 to III-35, wherein the chemical modification is a substitution of phosphorothioate bonds between two or more nucleotides on either or both of the 5′ and 3′ terminal ends of the ERS.

[0707] Embodiment III-37. The ERS of any one of embodiments III-32 to III-36, wherein the chemically modified ERS comprises a sequence selected from the group consisting of SEQ ID NOS: 49750-49758, 49760-49768, and 49770-49749.

[0708] Embodiment III-38. The ERS of any one of embodiments III-32 to III-37, wherein the chemically modified ERS comprises a sequence of SEQ ID NO: 49770.

[0709] Embodiment III-39. The ERS of embodiment III-37 or III-38, wherein the chemically modified ERS sequence is modified with a 20 nucleotide targeting sequence complementary to a target nucleic acid.

[0710] Embodiment III-40. The ERS of any one of embodiments III-32 to III-39, wherein the chemical modifications result in reduced susceptibility of the ERS to degradation by cellular RNase compared to an unmodified ERS.

[0711] Embodiment III-41. The ERS of any one of embodiments III-1 to III-40, wherein the ERS is capable of forming a ribonucleoprotein (RNP) complex with a CasX protein.

[0712] Embodiment III-42. An engineered CasX protein, comprising a sequence having at least two mutations in the sequence of CasX 515 (SEQ ID NO: 49699) wherein the mutations result in an improved characteristic compared to unmodified CasX 515.

[0713] Embodiment III-43. The engineered CasX protein of embodiment III—, wherein the improved condition is determined in an in vitro assay under comparable conditions.

[0714] Embodiment III-44. The engineered CasX protein of embodiment III-42, wherein the mutations are selected from the group consisting of:
[0715] a. an amino acid substitution;
[0716] b. an amino acid deletion;
[0717] c. an amino acid insertion; and
[0718] d. any combination of (a)-(c).

[0719] Embodiment III-45. The engineered CasX protein of any one of embodiments III-42, wherein engineered CasX protein comprises:
[0720] a. an oligonucleotide binding domain (OBD)-I comprising an amino acid sequence comprising one or more mutations relative to the sequence of SEQ ID NO: 295;
[0721] b. a helical I-I domain comprising an amino acid sequence comprising one or more mutations relative to the sequence of SEQ ID NO: 296;
[0722] c. an NTSB domain comprising an amino acid sequence comprising one or more mutations relative to the sequence of SEQ ID NO: 297;
[0723] d. a helical I-II domain comprising an amino acid sequence comprising one or more mutations relative to the sequence of SEQ ID NO: 298;
[0724] e. a helical II domain comprising an amino acid sequence comprising one or more mutations relative to the sequence of SEQ ID NO: 299;
[0725] f. a RuvC-I domain comprising an amino acid sequence comprising one or more mutations relative to the sequence of SEQ ID NO: 301;
[0726] g. a target strand loading (TSL) domain comprising an amino acid sequence comprising one or more mutations relative to the sequence of SEQ ID NO: 302; or
[0727] h. any combination of (a)-(g).

[0728] Embodiment III-46. The engineered CasX protein of embodiment III-45, wherein:
[0729] a. the OBD-I comprises one or more mutations relative to the sequence of SEQ ID NO: 295 selected from the group consisting of an I3G substitution, an insertion of a G at position 4, a K4G substitution, an insertion of a G at position 5, a K8G substitution, an insertion of an R at position 26, and a R34P substitution;
[0730] b. the helical I-I domain comprises an R7Q substitution relative to the amino acid sequence of SEQ ID NO: 296;
[0731] c. the NTSB domain comprises one or more mutations relative to the sequence of SEQ ID NO: 297 selected from the group consisting of an L68K substitution, an L68Q substitution, an A70Y substitution, an A70D substitution, and an A70S substitution;
[0732] d. the helical I-II domain comprises one or more mutations relative to the sequence of SEQ ID NO: 298 selected from the group consisting of a G32T substitution, an M112T substitution, and an M112W substitution;
[0733] e. the helical II domain comprises one or more mutations relative to the sequence of SEQ ID NO: 299 selected from the group consisting of a Y65T substitution and an E148D substitution;
[0734] f. the RuvC-I domain comprises an S5IR substitution relative to the sequence of SEQ ID NO: 301;
[0735] g. the TSL domain comprises one or more mutations relative to the sequence of SEQ ID NO: 302 selected from the group consisting of a V15M substitution, a T76D substitution, and an S80Q substitution; or
[0736] h. any combination of (a)-(g).

[0737] Embodiment III-47. The engineered CasX protein of embodiment III-45 or III-46, wherein:
[0738] a. the OBD-I comprises a sequence selected from the group consisting of SEQ ID NOS: 295, 49800, 49803-49808, and 49822-49833, or a sequence having at least about 90%, at least about 95%, at least about 98%, at least about 99% sequence identity thereto;
[0739] b. the helical I-I domain comprises a sequence selected from the group consisting of SEQ ID NOS: 296 and 49809, or a sequence having at least about 90%, at least about 95%, at least about 98%, or at least about 99% sequence identity thereto;
[0740] c. the NTSB domain comprises a sequence selected from the group consisting of SEQ ID NOS: 297, 49802, 49810, 49811, 49812, 49818, and 49835-49840, or a sequence having at least about 90%, at least about 95%, at least about 98%, or at least about 99% sequence identity thereto;
[0741] d. the helical I-II domain comprises a sequence selected from the group consisting of SEQ ID NOS: 298, 49801, 49813-49814, and 49842, or a sequence having at least about 90%, at least about 95%, at least about 98%, or at least about 99% sequence identity thereto;
[0742] e. the helical II domain comprises a sequence selected from the group consisting of SEQ ID NOS: 299, 49815-49816, and 49843, or a sequence having at least about 90%, at least about 95%, at least about 98%, or at least about 99% sequence identity thereto;
[0743] f. the RuvC-I domain comprises a sequence selected from the group consisting of SEQ ID NOS: 301 and 49821, or a sequence having at least about 90%, at least about 95%, at least about 98%, or at least about 99% sequence identity thereto;
[0744] g. the TSL domain comprises a sequence selected from the group consisting of SEQ ID NOS: 302, 49817, 49819, 49820, and 49844-49846, or a sequence having at least about 90%, at least about 95%, at least about 98%, or at least about 99% sequence identity thereto; or
[0745] h. any combination of (a)-(g).

[0746] Embodiment III-48. The engineered CasX protein of any one of embodiments III-45 to III-47, wherein the engineered CasX protein further comprises:
[0747] a. an OBD-II comprising the sequence of SEQ ID NO: 300, or a sequence having at least about 90%, at least about 95%, at least about 98%, or at least about 99% sequence identity thereto; and/or
[0748] b. a RuvC-II domain comprising the sequence of SEQ ID NO: 303, or a sequence having at least about 90%, at least about 95%, at least about 98%, or at least about 99% sequence identity thereto.

[0749] Embodiment III-49. The engineered CasX protein of any one of embodiments III-42 to III-48, wherein the engineered CasX protein comprises, from N- to C-terminus, an OBD-I domain, a helical I-I domain, an NTSB domain, a helical I-II domain, a helical II domain, an OBD-II, a RuvC-I domain, a TSL domain, and a RuvC-II domain, with each domain comprising a sequence as set forth in Table 21.

[0750] Embodiment III-50. The engineered CasX protein of any one of embodiments III-42 to III-49, wherein the two mutations are selected from the group consisting of the paired mutations as set forth in Table 22.

[0751] Embodiment III-51. The engineered CasX protein of any one of embodiments III-42 to III-49, wherein the two mutations are selected from the group consisting of the following pairs: 4.I.G & 64.R.Q, 4.I.G & 169.L.K, 4.I.G & 169.L.Q, 4.I.G & 171.A.D, 4.I.G & 171.A.Y, 4.I.G & 171.A.S, 4.I.G & 224.G.T, 41G & 304.M.T, 4.I.G & 398.Y.T, 4.I.G & 826.V.M, 4.I.G & 887.T.D, 4.I.G & 891.S.Q, 5.-.G & 64.R.Q, 5.-.G & 169.L.K, 5.-.G & 169.L.Q, 5.-.G & 171.A.D, 5.-.G & 171.A.Y, 5.-.G & 171.A.S, 5.-.G & 224.G.T, 5.-.G & 304.M.T, 5.-.G & 398.Y.T, 5.-.G & 826.V.M, 5.-.G & 887.T.D, 5.-.G & 891.S.Q, 9.K.G & 64.R.Q, 9.K.G & 169.L.K, 9.K.G & 169.L.Q, 9.K.G & 171.A.D, 9.K.G & 171.A.Y, 9.K.G & 171.A.S, 9.K.G & 224.G.T, 9.K.G & 304.M.T, 9.K.G & 398.Y.T, 9.K.G & 826.V.M, 9.K.G & 887.T.D, 9.K.G & 891.S.Q, 27.-.R & 64.R.Q, 27.-.R & 169.L.K, 27.-.R & 169.L.Q, 27.-.R & 171.A.D, 27.-.R & 171.A.Y, 27.-.R & 171.A.S, 27.-.R & 224.G.T, 27.-.R & 304.M.T, 27.-.R & 398.Y.T, 27.-.R & 826.V.M, 27.-.R & 887.TD, 27.-.R & 891.S.Q, 35.R.P & 64.R.Q, 35.R.P & 169.L.K, 35.R.P & 169.L.Q, 35.R.P & 171.A.D, 35.R.P & 171.AY, 35.R.P & 171.A.S, 35.R.P & 224.G.T, 35.R.P & 304.M.T, 35.R.P & 398.Y.T, 35.R.P & 826.V.M, 35.R.P & 887.T.D, 35.R.P & 891.S.Q, 887.T.D & 891.S.Q, 64.R.Q & 169.L.K, 64.R.Q & 169.L.Q, 64.R.Q & 171.AD, 64.R.Q & 171.A.Y, 64.R.Q & 171.A.S, 64.R.Q & 224.G.T, 64.R.Q & 304.M.T, 64.R.Q & 398.Y.T, 64.R.Q & 826.V.M, 64.R.Q & 887.T.D, 64.R.Q & 891.S.Q, 169.L.K & 171.A.D, 169.L.K & 171.A.Y, 169.L.K & 171.A.S, 169.L.K & 224.G.T, 169.L.K & 304.M.T, 169.L.K & 398.Y.T, 169.L.K & 826.V.M, 169.L.K & 887.T.D, 169.L.K & 891.S.Q, 169.L.Q & 171.A.D, 169.L.Q & 171.A.Y, 169.L.Q & 171.A.S, 169.L.Q & 224.G.T, 169.L.Q & 304.M.T, 169.L.Q & 398.Y.T, 169.L.Q & 826.V.M, 169.L.Q & 887.T.D, 169.L.Q & 891.S.Q, 171.A.D & 224.G.T, 171.A.D & 304.M.T, 171.A.D & 398.Y.T, 171.A.D & 826.V.M, 171.A.D & 887.T.D, 171.A.D & 891.S.Q, 171.A.Y & 224.G.T, 171.A.Y & 304.M.T, 171.A.Y & 398.Y.T, 171.A.Y & 826.V.M, 171.A.Y & 887.T.D, 171.A.Y & 891.S.Q, 171.A.S & 224.G.T, 171.A.S & 304.M.T, 171.A.S & 398.Y.T, 171.A.S & 826.V.M, 171.A.S & 887.T.D, 171.A.S & 891.S.Q, 4.I.G & 35.R.P, 224.G.T & 304.M.T, 224.G.T & 398.Y.T, 224.G.T & 826.V.M, 224.G.T & 887.T.D, 224.G.T & 891.S.Q, 5.-.G & 35.R.P, 4.I.G & 27.-.R, 304.M.T & 398.Y.T, 304.M.T & 826.V.M, 304.M.T & 887.T.D, 304.M.T & 891.S.Q, 9.K.G & 35.R.P, 5.-.G & 27.-.R, 4.I.G & 9.K.G, 398.Y.T & 826.V.M, 398.Y.T & 887.T.D, 398.Y.T & 891.S.Q, 27.-.R & 35.R.P, 9.K.G & 27.-.R, 5.-.G & 9.K.G, 4.I.G & 5.-.G, 826.V.M & 887.T.D, 826.V.M & 891.S.Q, 5.K.G & 27.-.R, 5.K.G & 169.L.K, 5.K.G & 171.A.D, 5.K.G & 304.M.T, 5.K.G & 398.Y.T, 5.K.G & 891.S.Q, 6.-.G & 27.-.R, 6.-.G & 169.L.K, 6.-.G & 171.AD, 6.-.G & 304.M.T, 6.-.G & 398.Y.T, 6.-.G & 891. S.Q, 304.M.W & 27.-.R, 304.M.W & 169.L.K, 304.M.W & 171.A.D, 304.M.W & 398.Y.T, 304.M.W & 891.S.Q, 481.E.D & 27.-.R, 481.E.D & 169.L.K, 481.E.D & 171.AD, 481.E.D & 304.M.T, 481.E.D & 398.Y.T, 481.E.D & 891.S.Q, 698.S.R & 27.-.R, 698.S.R & 169.L.K, 698.S.R & 171.A.D, 698.S.R & 304.M.T, 698.S.R & 398.Y.T, and 698.S.R & 891.S.Q. The engineered CasX protein of embodiment III-42, wherein comprising three mutations selected from the group consisting of (a) 27.-.R, 169.L.K, and 329.G.K; (b) 27.-.R, 171.A.D, and 224.G.T; and (c) 35.R.P, 171.A.Y, and 304.M.T, wherein the mutations result in an improved characteristic compared to unmodified CasX 515.

[0752] Embodiment III-52. The engineered CasX protein of any one of embodiments III-42 to III-51, comprising a sequence selected from SEQ ID NOS: 24916-49628, 49746-49747, and 49871-49873, or a sequence having at least 70% sequence identity thereto.

[0753] Embodiment III-53. The engineered CasX protein of any one of embodiments III-42 to III-51, comprising a sequence selected from SEQ ID NOS: 24916-49628, 49746-49747, and 49871-49873.

[0754] Embodiment III-54. The engineered CasX protein of any one of embodiments III-42 to III-49, comprising a sequence selected from the group consisting of SEQ ID NOS: 27858, 27859, 27861, 27865, 27866, 27868, 27870, 27871, 27872, 27876, 27877, 27880, 27882, 27889, 27897, 27898, 27903, 27952, 27953, 27954, 27955, 2, 7958, 27959, 27961, 27963, 27969, 27970, 27973, 27975, 27982, 27990, 27991, 27996, 27998, 28003, 28004, 28006, 28008, 28009, 28010, 28014, 28018, 28027, 28035, 28036, 28047, 28048, 28050, 28052, 28053, 28054, 28058, 28062, 28071, 28079, 28080, 28095, 28101, 28105, 28123, 28137, 28143, 28147, 28165, 28253, 28255, 28257, 28258, 28259, 28263, 28267, 28276, 28284, 28285, 28293, 28295, 28296, 28297, 28301, 28305, 28314, 28322, 28323, 28368, 28369, 28370, 28374, 28378, 28387, 28395, 28396, 28438, 28439, 28443, 28444, 28447, 28449, 28456, 28464, 28465, 28470, 28477, 28481, 28490, 28498, 28499, 28511, 28515, 28524, 28532, 28533, 28633, 28635, 28642, 28650, 28651, 28656, 28661, 28679, 28738, 28745, 28753, 28754, 28759, 28799, 28925, 28926, 29011, 29022, 29056, 29098, 29119, 29140, 29245, 29266, 29308, 29371, 29392, 29476, 29560, 29749, 29917, 29938, 30196, 30888, 31244, 31592, 33212, 33512, 34088, 34631, 34870, 35139, 35402, 35422, 35467, 35507, 35512, 43373, 49746, 49747 and 49871-49873, or a sequence having at least about 70%, at least about 80%, at least about 90%, at least about 95%, at least about 98%, or at least about 99% sequence identity thereto.

[0755] Embodiment III-55. The engineered CasX protein of any one of embodiments III-42 to III-50, comprising a sequence selected from the group consisting of SEQ 1D NOS: 27858, 27859, 27861, 27865, 27866, 27868, 27870, 27871, 27872, 27876, 27877, 27880, 27882, 27889, 27897, 27898, 27903, 27952, 27953, 27954, 27955, 27958, 27959, 27961, 27963, 27969, 27970, 27973, 27975, 27982, 27990, 27991, 27996, 27998, 28003, 28004, 28006, 28008, 28009, 28010, 28014, 28018, 28027, 28035, 28036, 28047, 28048, 28050, 28052, 28053, 28054, 28058, 28062, 28071, 28079, 28080, 28095, 28101, 28105, 28123, 28137, 28143, 28147, 28165, 28253, 28255, 28257, 28258, 28259, 28263, 28267, 28276, 28284, 28285, 28293, 28295, 28296, 28297, 28301, 28305, 28314, 28322, 28323, 28368, 28369, 28370, 28374, 28378, 28387, 28395, 28396, 28438, 28439, 28443, 28444, 28447, 284149, 28456, 28464, 28465, 28470, 28477, 28481, 28490, 284198, 28499, 28511, 28515, 28524, 28532, 28533, 28633, 28635, 28642, 28650, 28651, 28656, 28661, 28679, 28738, 28745, 28753, 28754, 28759, 28799, 28925, 28926, 29011, 29022, 29056, 29098, 29119, 29140, 29245, 29266, 29308, 29371, 29392, 29476, 29560, 29749, 29917, 29938, 30196, 30888, 31244, 31592, 33212, 33512, 34088, 34631, 34870, 35139, 35402, 35422, 35467, 35507, 35512, 43373, 49746, 49747, and 49871-49873.

[0756] Embodiment III-56. The engineered CasX protein of any one of embodiments III-42 to III-55, wherein the improved characteristic is one or more of editing activity, improved editing specificity, improved specificity ratio, improved editing activity and editing specificity, or improved editing activity and improved specificity ratio.

[0757] Embodiment III-57. The engineered CasX protein of any one of embodiments III-42 to III-55, wherein the engineered CasX comprises a sequence selected from the group consisting of SEQ ID NOS: 27858, 27859, 27861, 27865, 27866, 27868, 27870, 27871, 27872, 27876, 27877, 27880, 27882, 27889, 27897, 27898, 27903, 27952, 27953, 27954, 27955, 27958, 27959, 27961, 27963, 27969, 27970, 27973, 27975, 27982, 27990, 27991, 27996, 27998, 28003, 28004, 28006, 28008, 28009, 28010, 28014, 28018, 28027, 28035, 28036, 28047, 28048, 28050, 28052, 28053, 28054, 28058, 28062, 28071, 28079, 28080, 28095, 28101, 28105, 28123, 28137, 28143, 28147, 28165, 28253, 28255, 28257, 28258, 28259, 28263, 28267, 28276, 28284, 28285, 28293, 28295, 28296, 28297, 28301, 28305, 28314, 28322, 28323, 28368, 28369, 28370, 28374, 28378, 28387, 28395, 28396, 28438, 28439, 28443, 28444, 28447, 28449, 28456, 28464, 28465, 28470, 28477, 28481, 28490, 28498, 28499, 28511, 28515, 28524, 28532, 28533, 28633, 28635, 28642, 28650, 28651, 28656, 28661, 28679, 28738, 28745, 28753, 28754, 28759, 28799, 28925, 28926, 29011, 29022, 29056, 29098, 29119, 29140, 29245, 29266, 29308, 29371, 29392, 29476, 29560, 29749, 29917, 29938, 30196, 30888, 31244, 31592, 33212, 33512, 34088, 34631, 34870, 35139, 35402, 35422, 35467, 35507, 35512, 43373, 49746, 49747, and 49871-49873 or a sequence having at least about 70%, at least about 80%, at least about 90%, at least about 95%, at least about 98%, or at least about 99% sequence identity thereto, wherein the engineered CasX exhibits improved editing activity compared to unmodified CasX 515.

[0758] Embodiment III-58. The engineered CasX protein of any one of embodiments III-42 to III-55, wherein the engineered CasX comprises a sequence selected from the group consisting of SEQ ID NOS: 27858, 27859, 27861, 27865, 27866, 27868, 27870, 27871, 27872, 27876, 27877, 27880, 27882, 27889, 27897, 27898, 27903, 27952, 27953, 27954, 27955, 27958, 27959, 27961, 27963, 27969, 27970, 27973, 27975, 27982, 27990, 27991, 27996, 27998, 28003, 28004, 28006, 28008, 28009, 28010, 28014, 28018, 28027, 28035, 28036, 28047, 28048, 28050, 28052, 28053, 28054, 28058, 28062, 28071, 28079, 28080, 28095, 28101, 28105, 28123, 28137, 28143, 28147, 28165, 28253, 28255, 28257, 28258, 28259, 28263, 28267, 28276, 28284, 28285, 28293, 28295, 28296, 28297, 28301, 28305, 28314, 28322, 28323, 28368, 28369, 28370, 28374, 28378, 28387, 28395, 28396, 28438, 28439, 28443, 28444, 28447, 28449, 28456, 28464, 28465, 28470, 28477, 28481, 28490, 28498, 28499, 28511, 28515, 28524, 28532, 28533, 28633, 28635, 28642, 28650, 28651, 28656, 28661, 28679, 28738, 28745, 28753, 28754, 28759, 28799, 28925, 28926, 29011, 29022, 29056, 29098, 29119, 29140, 29245, 29266, 29308, 29371, 29392, 29476, 29560, 29749, 29917, 29938, 30196, 30888, 31244, 31592, 33212, 33512, 34088, 34631, 34870, 35139, 35402, 35422, 35467, 35507, 35512, 43373, 49746, 49747, and 49871-49873, or a sequence having at least about 70%, at least about 80%, at least about 90%, at least about 95%, at least about 98%, or at least about 99% sequence identity thereto, wherein the engineered CasX exhibits improved editing specificity compared to unmodified CasX 515

[0759] Embodiment III-59. The engineered CasX protein of any one of embodiments III-42 to III-55, wherein the engineered CasX comprises a sequence selected from the group consisting of SEQ ID NOS: 27858, 27859, 27861, 27865, 27866, 27868, 27870, 27871, 27872, 27876, 27877, 27880, 27882, 27889, 27897, 27898, 27903, 27952, 27953, 27954, 27955, 27958, 27959, 27961, 27963, 27969, 27970, 27973, 27975, 27982, 27990, 27991, 27996, 27998, 28003, 28004, 28006, 28008, 28009, 28010, 28014, 28018, 28027, 28035, 28036, 28047, 28048, 28050, 28052, 28053, 28054, 28058, 28062, 28071, 28079, 28080, 28095, 28101, 28105, 28123, 28137, 28143, 28147, 28165, 28253, 28255, 28257, 28258, 28259, 28263, 28267, 28276, 28284, 28285, 28293, 28295, 28296, 28297, 28301, 28305, 28314, 28322, 28323, 28368, 28369, 28370, 28374, 28378, 28387, 28395, 28396, 28438, 28439, 28443, 28444, 28447, 28449, 28456, 28464, 28465, 28470, 28477, 28481, 28490, 28498, 28499, 28511, 28515, 28524, 28532, 28533, 28633, 28635, 28642, 28650, 28651, 28656, 28661, 28679, 28738, 28745, 28753, 28754, 28759, 28799, 28925, 28926, 29011, 29022, 29056, 29098, 29119, 29140, 29245, 29266, 29308, 29371, 29392, 29476, 29560, 29749, 29917, 29938, 30196, 30888, 31244, 31592, 33212, 33512, 34088, 34631, 34870, 35139, 35402, 35422, 35467, 35507, 35512, 43373, 49746, 49747, and 49871-49873 or a sequence having at least about 70%, at least about 80%, at least about 90%, at least about 95%, at least about 98%, or at least about 99% sequence identity thereto, wherein the engineered CasX exhibits improved editing activity and specificity compared to unmodified CasX 515.

[0760] Embodiment III-60. The engineered CasX protein of any one of embodiments II-42 to III-55, wherein the engineered CasX comprises a sequence selected from the group consisting of SEQ ID NOS: 27865, 27952, 27954, 27955, 27958, 27959, 27973, 28009, 28018, 28048, 28101, 28123, 28137, 28285, 28296, 28301, 28305, 28314, 28323, 28368, 28369, 28370, 28378, 28387, 28438, 28447, 28477, 28481, 28498, 28515, 28524, 28532, 28661, 28799, 28925, 29022, 29266, 29308, 29371, 29560, 29749, 29917, 30888, 31244, 33212, 33512, 34088, 34870, 35422, 35507, 43373, 49872, and 49873, or a sequence having at least about 70%, at least about 80%, at least about 90%, at least about 95%, at least about 98%, or at least about 99% sequence identity thereto, wherein the engineered CasX exhibits improved specificity ratio compared to unmodified CasX 515.

[0761] Embodiment III-61. The engineered CasX protein of any one of embodiments III-42 to III-55, wherein the engineered CasX comprises a sequence selected from the group consisting of SEQ ID NOS: 27952, 27958, 28101, 28123, 28137, 28285, 28368, 28370, 28378, 28387, 28438, 28799, 28925, 29022, 29308, 29749, 29917, 30888, 34870, 43373, and 49873, or a sequence having at least about 70%, at least about 80%, at least about 90%, at least about 95%, at least about 98%, or at least about 99% sequence identity thereto, wherein the engineered CasX exhibits improved editing activity and improved editing specificity compared to an unmodified CasX 515.

[0762] Embodiment III-62. The engineered CasX protein of any one of embodiments III-42 to III-61, wherein the improved characteristic is at least about 0.1-fold to about 10-fold improved in the in vitro assay.

[0763] Embodiment III-63. The engineered CasX variant of any one of embodiments III-1 to 111-55, wherein the engineered CasX protein is a catalytically inactive CasX (dCasX) protein.

[0764] Embodiment III-64. The engineered CasX variant of embodiment III-63, wherein the dCasX comprises a mutation at residues:
[0765] a. D672A, and/or E769A, and/or D935A corresponding to the CasX protein of SEQ ID NO:1; or D659A, and/or E756A, and/or D922A corresponding to the CasX protein of SEQ ID NO: 2.

[0766] Embodiment III-65. An engineered CasX protein comprising:
[0767] a. an NTSB domain sequence of SEQ ID NO: 297, or a sequence having at least about 90%, or at least about 95% sequence identity thereto;
[0768] b. a RuvC-II domain sequence of SEQ ID NO: 303, or a sequence having at least about 90%, or at least about 95% sequence identity thereto; and;
[0769] c. a helical I-II domain sequence of SEQ ID NO: 298, or a sequence having at least about 90%, or at least about 95% sequence identity thereto, comprising an amino acid substitution of position G137 relative to the sequence of SEQ ID NO: 298, wherein the substituted position G137 relative to the sequence of SEQ ID NO: 298 comprises a hydrophilic amino acid residue.

[0770] Embodiment III-66. The engineered CasX protein of embodiment III-65, wherein the hydrophilic amino acid residue is lysine or asparagine.

[0771] Embodiment III-67. The engineered CasX protein of embodiment III-65 or 111-66, comprising:
[0772] a. an OBD-I domain sequence of SEQ ID NO: 295, or a sequence having at least about 90%, or at least about 95% sequence identity thereto;
[0773] b. a helical I-I domain sequence of SEQ ID NO: 296, or a sequence having at least about 90%, or at least about 95% sequence identity thereto;
[0774] c. an OBD-II domain sequence of SEQ ID NO: 300, or a sequence having at least about 90%, or at least about 95% sequence identity thereto;
[0775] d. a RuvC-I domain sequence of SEQ ID NO: 301, or a sequence having at least about 90%, or at least about 95% sequence identity thereto; and
[0776] e. a TSL domain sequence of SEQ ID NO: 302, or a sequence having at least about 90%, or at least about 95% sequence identity thereto.

[0777] Embodiment III-68. The engineered CasX protein of any one of embodiments III-65 to 111-67, comprising a sequence of SEQ ID NO: 266, or a sequence having at least about 70%, at least about 80%, at least about 90%, at least about 95%, at least about 98%, at least about 99% sequence identity thereto, wherein the engineered CasX has an improved characteristic of the compared to the CasX of SEQ ID NO: 228.

[0778] Embodiment III-69. The engineered CasX protein of embodiment III-68, wherein the improved characteristic is one or more of improved ability to utilize a greater spectrum of protospacer adjacent motif (PAM) sequences in the editing of target nucleic acid, increased nuclease activity, increased editing of target nucleic acid, improved editing specificity for the target nucleic acid, decreased off-target editing, increased percentage of a eukaryotic genome that can be efficiently edited, improved ability to form cleavage-competent RNP with an ERS, and improved stability of an RNP complex.

[0779] Embodiment III-70. The engineered CasX protein of embodiment III-69, wherein the improved characteristic comprises increased editing specificity of target nucleic acid relative to the editing of the sequence of SEQ ID NO: 228, wherein the increase is at least about 1.01-fold, at least about 1.5-fold, at least about 2-fold, at least about 4-fold, at least about 10-fold, at least about 20-fold, at least about 30-fold, or at least about 40-fold greater.

[0780] Embodiment III-71. The engineered CasX protein of embodiment III-69, wherein the improved characteristic comprises decreased off-target editing relative to the off-target editing of the sequence of SEQ ID NO: 228.

[0781] Embodiment III-72. The engineered CasX protein of embodiment III-71, wherein the off-target editing is less than about 5%, less than about 4%, less than 3%, less than about 2%, less than about 1%, less than about 0.5%, less than 0.1%, when measured in silico, in an in vitro cell-free assay, or in a cell-based assay.

[0782] Embodiment III-73. The engineered CasX protein of any one of embodiments III-42 to III-72, comprising one or more nuclear localization signals (NLS), and, optionally, wherein the one or more NLS are linked to the engineered CasX protein or to an adjacent NLS with a linker peptide.

[0783] Embodiment III-74. The engineered CasX protein of embodiment III-73, wherein the NLS is selected from the group consisting of the sequences of SEQ ID NOS: 364-457 as set forth in Table 8.

[0784] Embodiment III-75. The engineered CasX protein of embodiment III-73 and III-74, wherein the linker peptide is selected from the group consisting of SR, RS, and SEQ ID NOS: 468-486.

[0785] Embodiment III-76. The engineered CasX protein of any one of embodiments III-73 to III-75, wherein the one or more NLS are positioned at or near the C-terminus of the protein.

[0786] Embodiment III-77. The engineered CasX protein of any one of embodiments III-73 to III-75, wherein the one or more NLS are positioned at or near at the N-terminus of the protein.

[0787] Embodiment III-78. The engineered CasX protein of any one of embodiments III-73 to III-75, comprising at least two NLS, wherein the at least two NLS are positioned at or near the N-terminus and at or near the C-terminus of the protein.

[0788] Embodiment III-79. The engineered CasX protein of any one of embodiments III-42 to III-78, wherein the engineered CasX protein is capable of forming a ribonuclear protein complex (RNP) with an ERS.

[0789] Embodiment III-80. A gene editing pair comprising a ERS and an engineered CasX protein, the pair comprising an ERS of any one of embodiments III-1 to III-41 and an engineered CasX protein of any one of embodiments III-42 to III-79.

[0790] Embodiment III-81. The gene editing pair of embodiment III-80, wherein the ERS and the engineered CasX protein are capable of forming a ribonuclear protein complex (RNP).

[0791] Embodiment III-82. The gene editing pair of embodiment III-80, wherein the ERS and the engineered CasX protein are associated together as a ribonuclear protein complex (RNP).

[0792] Embodiment III-83. The gene editing pair of any one of embodiments III-80 to III-82, wherein an RNP of the engineered CasX protein and the ERS exhibit at least one or more improved characteristics as compared to an RNP comprising the sequences of SEQ ID NO: 156 and SEQ ID NO: 228.

[0793] Embodiment III-84. The gene editing pair of embodiment III-83, wherein the improved characteristic is selected from one or more of the group consisting of increased binding affinity of the engineered CasX protein to the ERS, increased binding affinity to a target nucleic acid, increased ability to utilize a greater spectrum of one or more PAM sequences, including ATC, CTC, GTC, or TTC, in the editing of target nucleic acid, increased editing specificity of the target nucleic acid, increased nuclease activity, increased cleavage rate of the target nucleic acid, decreased off-target cleavage of the target nucleic acid, increased RNP stability, and increased ability to form cleavage-competent RNP.

[0794] Embodiment III-85. A nucleic acid comprising a sequence that encodes the ERS of any one of embodiments III-1 to III-41.

[0795] Embodiment III-86. The nucleic acid of embodiment III-85, wherein the sequence is depleted or devoid of CpG motifs.

[0796] Embodiment III-87. The nucleic acid of embodiment III-86, comprising a sequence selected from the group consisting of SEQ ID NOS: 535-556.

[0797] Embodiment III-88. A nucleic acid comprising a sequence that encodes the engineered CasX protein of any one of embodiments III-42 to III-79.

[0798] Embodiment III-89. The nucleic acid of embodiment III-86, wherein the sequence that encodes the engineered CasX protein is codon-optimized.

[0799] Embodiment III-90. The nucleic acid of embodiment III-89, wherein the sequence that encodes the engineered CasX protein is codon-optimized for expression in a human cell.

[0800] Embodiment III-91. The nucleic acid of embodiment III-88, wherein the sequence that encodes the engineered CasX protein is devoid or depleted of CpG motifs.

[0801] Embodiment III-92. The nucleic acid of embodiment III-91, comprising a sequence selected from the group consisting of SEQ ID NOS: 49850-49861.

[0802] Embodiment III-93. The nucleic acid of any one of embodiments III-88 to III-90, wherein the nucleic acid is messenger RNA (mRNA).

[0803] Embodiment III-94. A vector comprising:
[0804] a. the ERS of any one of embodiments II-1 to III-41;
[0805] b. the engineered CasX protein of any one of embodiments III-42 to III-79;
[0806] c. the nucleic acid of embodiment III-85 to III-87;
[0807] d. the nucleic acid of any one of embodiments III-88 to III-93; or
[0808] e. any combination of (a)-(d).

[0809] Embodiment III-95. The vector of embodiment III-94, wherein the vector comprises a promoter operably linked to the nucleic acid.

[0810] Embodiment III-96. The vector of embodiment III-94 or III-95, wherein the vector is selected from the group consisting of a retroviral vector, a lentiviral vector, an adenoviral vector, an adeno-associated viral (AAV) vector, a herpes simplex virus (HSV) vector, a CasX delivery particle (XDP), a plasmid, a minicircle, a nanoplasmid, a DNA vector, and an RNA vector.

[0811] Embodiment III-97. The vector of embodiment III-96, wherein the vector is an AAV vector.

[0812] Embodiment III-98. The vector of embodiment III-97, wherein the AAV vector is a serotype selected from AAV1, AAV2, AAV3, AAV4, AAV5, AAV6, AAV7, AAV8, AAV9, AAV10, AAV11, AAV12, AAV 9.45, AAV 9.61, AAV-Rh74, or AAVRh10.

[0813] Embodiment III-99. The vector of embodiment III-98, wherein the AAV vector comprises a transgene with inverted terminal repeat (ITR) sequences derived from AAV2.

[0814] Embodiment III-100. The vector of embodiment III-96, wherein the vector is a retroviral vector.

[0815] Embodiment III-101. The vector of embodiment III-96, wherein the vector is an XDP comprising one or more components of a gag polyprotein.

[0816] Embodiment III-102. The vector of embodiment III-101, wherein the XDP comprises the engineered CasX protein and the ERS associated together in an RNP.

[0817] Embodiment III-103. The vector of embodiment III-101 or 111-102, comprising a glycoprotein tropism factor.

[0818] Embodiment III-104. The vector of embodiment III-103, wherein the glycoprotein tropism factor has binding affinity for a cell surface marker of a target cell and facilitates entry of the XDP into the target cell.

[0819] Embodiment III-105. A host cell comprising the vector of any one of embodiments III-94 to III-104.

[0820] Embodiment III-106. The host cell of embodiment III-105, wherein the host cell is selected from the group consisting of a Baby Hamster Kidney fibroblast (BHK) cell, a human embryonic kidney 293 (HEK293) cell, a human embryonic kidney 293T (HEK293T) cell, a NS0 cell, a SP2/0 cell, a YO myeloma cell, a P3X63 mouse myeloma cell, a PER cell, a PER.C6 cell, a hybridoma cell, a NIH3T3 cell, a CV-1 (simian) in Origin with SV40 genetic material (COS) cell, a HeLa cell, a Chinese hamster ovary (CHO) cell, or a yeast cell.

[0821] Embodiment III-107. A lipid nanoparticle (LNP) comprising:
[0822] a. the ERS of any one of embodiments III-1 to III-41;
[0823] b. the nucleic acid of any one of embodiments III-85 to III-93; or
[0824] c. a combination of (a) and (b).

[0825] Embodiment III-108. The LNP of embodiment III-107, wherein the LNP comprises one or more components selected from the group consisting of an ionizable lipid, a helper phospholipid, a polyethylene glycol (PEG)-modified lipid, and cholesterol or a derivative thereof.

[0826] Embodiment III-109. The LNP of embodiment III-107, wherein the LNP comprises an ionizable lipid, a helper phospholipid, a polyethylene glycol (PEG)-modified lipid, and cholesterol or a derivative thereof.

[0827] Embodiment III-110. The LNP of any one of embodiments III-107 to III-109, wherein the LNP comprises a cationic lipid comprising a pKa of about 5 to about 8.

[0828] Embodiment III-111. A method of modifying a target nucleic acid in a cell, comprising introducing into the cell:
[0829] a. the gene editing pair of any one of embodiments III-80 to III-84;
[0830] b. one or more nucleic acids encoding the gene editing pair of (a);
[0831] c. a vector comprising the nucleic acid of (b);
[0832] d. an XDP comprising the gene editing pair of (a);
[0833] e. the LNP of any one of embodiments III-107 to III-110; or
[0834] f. combinations of two or more of (a) to (e),
   wherein the target nucleic acid of the cell targeted by the ERS is modified by the engineered CasX.

[0835] Embodiment III-112. The method of embodiment III-111, comprising contacting the target with a plurality of gene editing pairs comprising a first and a second, or three or four ERS comprising targeting sequences complementary to different or overlapping regions of the target nucleic acid.

[0836] Embodiment III-113. The method of embodiment III-111, comprising contacting the target with a plurality of nucleic acids encoding gene editing pairs comprising a first and a second, three, or four ERS comprising targeting sequences complementary to different or overlapping regions of the target nucleic acid.

[0837] Embodiment III-114. The method of embodiment III-111, comprising contacting the target with a plurality of XDP comprising gene editing pairs comprising a first and a second, or three, or four ERSs comprising targeting sequences complementary to different or overlapping regions of the target nucleic acid.

[0838] Embodiment III-115. The method of embodiment III-111, comprising contacting the target nucleic acid with the gene editing pair and introducing one or more single-stranded breaks in the target nucleic acid, wherein the modifying comprises introducing a mutation, an insertion, or a deletion in the target nucleic acid.

[0839] Embodiment III-116. The method of any one of embodiments III-112 to III-115, wherein the contacting comprises binding the target nucleic acid and introducing one or more double-stranded breaks in the target nucleic acid, wherein the modifying comprises introducing a mutation, an insertion, or a deletion in the target nucleic acid.

[0840] Embodiment III-117. The method of any one of embodiments III-111 to III-116, wherein the modifying corrects a mutation in the gene to wild-type or results in the ability of the cell to express a functional gene product.

[0841] Embodiment III-118. The method of any one of embodiments III-111 to III-116, wherein the modifying knocks down or knocks out the gene.

[0842] Embodiment III-119. The method of any one of embodiments III-111 to III-116, wherein the modifying of the cell occurs in vitro or ex vivo.

[0843] Embodiment III-120. The method of any one of embodiments III-111 to III-114, wherein modifying of the cell occurs in vivo.

[0844] Embodiment III-121. The method of any one of embodiments III-111 to III-120, wherein the cell is a eukaryotic cell.

[0845] Embodiment III-122. The method of embodiment III-121, wherein the eukaryotic cell is selected from the group consisting of a rodent cell, a mouse cell, a rat cell, a primate cell, and a non-human primate cell.

[0846] Embodiment III-123. The method of embodiment III-121, wherein the eukaryotic cell is a human cell.

[0847] Embodiment III-124. The method of any one of embodiments III-111 to III-123, wherein the cell is selected from the group consisting of an embryonic stem cell, an induced pluripotent stem cell, a germ cell, a fibroblast, an oligodendrocyte, a glial cell, a hematopoietic stem cell, a neuron progenitor cell, a neuron, a muscle cell, a bone cell, a hepatocyte, a pancreatic cell, a retinal cell, a cancer cell, a T-cell, a B-cell, an NK cell, a fetal cardiomyocyte, a myofibroblast, a mesenchymal stem cell, an autotransplanted expanded cardiomyocyte, an adipocyte, a totipotent cell, a pluripotent cell, a blood stem cell, a myoblast, an adult stem cell, a bone marrow cell, a mesenchymal cell, a parenchymal cell, an epithelial cell, an endothelial cell, a mesothelial cell, a fibroblast cell, an osteoblast cell, a chondrocyte cell, an exogenous cell, an endogenous cell, a stem cell, a hematopoietic stem cell, a bone-marrow derived progenitor cell, a myocardial cell, a skeletal cell, a fetal cell, an undifferentiated cell, a multi-potent progenitor cell, a unipotent progenitor cell, a monocyte, a cardiac myoblast, a skeletal myoblast, a macrophage, a capillary endothelial cell, a xenogenic cell, an allogenic cell, an autologous cell, and a post-natal stem cell.

[0848] Embodiment III-125. The method of any one of embodiments III-120 to III-124, wherein the modifying occurs in the cells of a subject having a mutation in an allele of a gene wherein the mutation causes a disease or disorder in the subject.

[0849] Embodiment III-126. A composition, comprising the engineered CasX protein of any one of embodiments III-42 to III-79.

[0850] Embodiment III-127. The composition of embodiment III-126, comprising the ERS of any one of embodiments III-1 to III-41.

[0851] Embodiment III-128. The composition of embodiment III-127, wherein the CasX protein and the ERS are associated together in a ribonuclear protein complex (RNP).

[0852] Embodiment III-129. A composition, comprising an ERS of any one of embodiments III-1 to III-41.

[0853] Embodiment III-130. The composition of embodiment III-129, comprising the engineered CasX protein of any one of embodiments III-42 to III-79.

[0854] Embodiment III-131. The composition of embodiment III-130, wherein the engineered CasX protein and the ERS are associated together in a ribonuclear protein complex (RNP).

[0855] Embodiment III-132. The composition of any one of embodiments III-127 to III-131, wherein the ERS comprises a targeting sequence of 15 to 20 nucleotides, wherein the targeting sequence is complementary to a target nucleic acid.

[0856] Embodiment III-133. The composition of embodiment III-132, wherein the targeting sequence has 20 nucleotides.

[0857] Embodiment III-134. A pharmaceutical composition comprising the composition of any one of embodiments III-126-Error! Reference source not found. and a pharmaceutically acceptable excipient.

[0858] Embodiment III-135. A pharmaceutical composition comprising the LNP of any one of embodiments III-107 to III-110 and a suitable container.

[0859] Embodiment III-136. A kit comprising the pharmaceutical composition of embodiment III-134 or III-135 and a suitable container.

[0860] Embodiment III-137. An engineered CasX protein comprising any one of the sequences set forth in SEQ ID NOS: 24916-49628, 49746-49747, and 49871-49873.

[0861] Embodiment III-138. An engineered CasX protein comprising any one of the sequences listed in Table 5.

[0862] Embodiment III-139. A ERS comprising any one of the ERS sequences selected from the group consisting of SEQ ID NOS: 11,568-22,227 and 23,572-24,915.

[0863] Embodiment III-140. The ERS of embodiment III-138, comprising a targeting sequence having 15-20 nucleotides, wherein the targeting sequence is complementary to a target nucleic acid.

[0864] Embodiment III-141. The ERS of embodiment III-140, wherein the targeting sequence has 20 nucleotides.

[0865] Embodiment III-142. The composition of any one of embodiments III-126—for use in the manufacture of a medicament for the treatment a subject having a disease.

### EXAMPLES

[0866] The following Examples are merely illustrative and are not meant to limit any aspects of the present disclosure in any way.

### Example 1: The CcdB Selection Assay Identifies CasX Proteins with dsDNA Nuclease Activity

[0867] Experiments were performed to identify a set of highly mutated proteins derived from CasX protein 515 (SEQ ID NO: 228) that are biochemically competent or exhibit improved activity for double-stranded DNA (dsDNA) cleavage at target DNA sequences. To accomplish this, first, a set of sequences was generated using machine learning methods, and second, CcdB selections were performed to validate that the mutated proteins were biochemically competent for dsDNA cleavage.

### Materials and Methods

[0868] To engineer novel nucleases composed of many individual single mutations, a Markov Chain Monte Carlo (MCMC)-directed evolution simulation was performed (Biswas S et al. Low-N protein engineering with data-efficient deep learning. Nature Methods. 18(4):389-396 (2021)) where a starting sequence s is mutated to a new sequence s*. First, simulated mutagenesis was performed within the RuvC domain, wherein a codon within CasX 515 was selected and randomly replaced with a codon encoding a different amino acid, such that there was an equal probability of the selected amino acid to be replaced with any of the alternative 19 amino acids. This process was then repeated up to sixteen times, resulting in a simulated mutagenized protein sequence. Second, the predicted fitness of the mutagenized protein sequence was determined using a machine learning model, described below. First, fitness estimates were defined using the following functions: 1) ŷ=f′(s), to estimate the predicted fitness of the starting protein sequence, s; and 2) ŷ*=f′(s*), to estimate the predicted fitness of the simulated mutagenized protein sequence, s*. These predicted fitness estimates were used to virtually screen the simulated protein either to discard the simulated protein or to construct and validate the simulated protein experimentally. To make this decision, an MCMC simulation was performed, where a proposed protein sequence was either accepted or discarded with probability equal to min[1, exp{(ŷ*−ŷ)/T}], where the temperature value T=0.01. Finally, this process of mutagenesis and simulated screening was repeated until a desired number of sequences, each containing a desired number of single mutations, were obtained. Use of the MCMC algorithm resulted in the generation of the following sets of new CasX sequences: 3,600 sequences with two single mutations and 1,200 sequences with three single mutations. Additionally, twenty new sequences were generated for each of the following number of single mutations: 4, 5, 6, 7, 8, 9, 10, 11, 12, 13, 14, 15, 16. Finally, ten additional sequences were generated with 17 single mutations.

[0869] In the simulated screening above, the predicted fitness f′ must be calculated for any given sequence s or s*. This fitness prediction was determined using one of three machine learning models, defined as Model A, Model B, or Model C. Model A used the machine learning software Esm1b 0.4.0 (Rives A et al. et al. Biological structure and function emerge from scaling unsupervised learning to 250 million protein sequences. Proc. Natl. Acad. Sci. U.S.A., 181(15):e2016239118 (2021)). To refine Model A, the model was first trained by Support Vector Regression (SVR) using single mutation fitness data. The software package used for SVR was sklearn v.0.22.2.post1 (Pedregosa F et al. Scikit-learn: Machine learning in Python. JMLR 12(85):2825-2830, (2011)). Model B employed the machine learning software TAPE v.0.4 (Rao R et al. Evaluating protein transfer learning with tape. Advances in neural information processing systems, 32:9689 (2019)) and the same dataset was used to fine-tune the pre-trained model. For Model C, the predicted fitness value of a sequence s* was defined as the sum of the true fitness values for each single mutation present in sequence s* relative to sequence s. A custom script was used to calculate predicted fitness values for Model C. Finally, sequences were also generated randomly as negative controls. The predicted fitness score, determined using the three machine learning models for each new CasX sequence designed using simulated mutagenesis, was subsequently used to identify and generate the set of CasX proteins that were subjected to the CcdB bacterial selection experiments as described in the ensuing paragraph.

[0870] To obtain the true fitness values for the sequences described above, CcdB bacterial selection experiments were performed. Briefly, 300 ng of p73 plasmid expressing the indicated CasX protein (or library) and gRNA with scaffold 235 with spacer 23.2 (AGAGCGUGAUAUUACCCUGU; SEQ ID NO: 491), which would target the p58 plasmid expressing the CcdB toxin, was electroporated into E. coli strain BW25113 harboring the p58 plasmid. After transformation, the culture was allowed to recover in glucose-rich media for 20 minutes at 37° C. with shaking, after which IPTG was added to a final concentration of 1 mM, and the culture was further incubated for an additional 40 minutes. A recovered culture was then split, where a fraction was titered on LB agar plates containing an antibiotic selective for the plasmid. Cells were titered on plates containing either glucose (CcdB toxin is not expressed) or arabinose (CcdB toxin is expressed), and the relative survival was calculated. The remainder of the recovered culture was further split after the recovery period, and grown in media containing either glucose or arabinose, to collect samples of the pooled library either with no selection or with strong selection, respectively. These cultures were harvested, and the surviving plasmid pool was extracted using a Plasmid Miniprep Kit (QIAGEN) according to the manufacturer's instructions. The entire process was repeated for a total of two rounds of selection. Finally, the entirety of the above protocol was repeated as a “stringent CcdB selection”, using a modified version of the p73 plasmid, specifically, a much weaker promoter (WGAN45) was used to express the guide RNA.

[0871] The final plasmid pool was isolated, and a PCR amplification of the p73 plasmid was performed using primers specific for the mutagenized region of CasX 515. Amplified DNA product was purified with Ampure XP DNA cleanup kit and eluted in water. Amplicons were then prepared for sequencing with a second PCR to add adapter sequences compatible with next-generation sequencing (NGS) on either a MiSeq or a NextSeq (Illumina) according to the manufacturer's instructions. Returned raw data files were processed as follows: (1) sequences were trimmed for quality and for adapter sequences; (2) sequences from read 1 and read 2 were merged into a single insert sequence; and (3) each sequence was quantified for containing a mutation relative to the reference sequence for CasX 515. Incidences of individual mutations relative to CasX 515 were counted. Mutation counts post-selection were divided by mutation counts pre-selection, and a pseudocount of ten was used to generate an “Enrichment Score”. The log base two (log 2) of this score was calculated and plotted for the following two sets of sequences: 1) new CasX sequences generated using machine learning and 2) randomly generated sequences used as negative controls.

### Results:

[0872] The above described CasX sequences, as well as negative control sequences, were synthesized and cloned as a pooled library, then subjected to two rounds of bacterial selection. The resulting log 2 enrichment scores represented true fitness values, f(s), and were plotted in the graph of FIG. 1. First, 13 sequences of CasX 515 consisting of different codons were plotted. As expected, these sequences produced the same amino acid sequence and all exhibited fitness values of approximately 0.3. In contrast, mutations that either produced catalytically ‘dead’ nucleases or produced stop codons, resulted in CasX proteins with drastically reduced fitness values, ranging from −4 to −6. Alternatively, mutations where one amino acid was exchanged for another resulted in varying effects on fitness, spanning the range from high activity similar to CasX 515, to intermediate or even no levels of activity as seen for catalytically inactivated CasX nucleases. Furthermore, those CasX nucleases harboring mutations designed to maintain function exhibited dramatically improved fitness compared to the fitness level of the randomly mutated CasX molecules (compare top graph with bottom graph in FIG. 1). This trend remained true for CasX nucleases that were designed to contain any number of single mutations between one and ten. In the case where a single mutation was being considered, the average fitness for a model predicted mutation was 0.275, while that for a random mutation was −0.887, and the difference between the distributions was highly statistically significant (p=1.6E-54; two-tailed t-test). Similarly, highly statistically significant p-values were obtained when comparing the difference between the distributions for two (p=8.5E-250; two-tailed t-test) or three mutations (p=5.2E-153; two-tailed t-test). Furthermore, the data illustrate that generation of most CasX sequences containing more than four mutations resulted in substantially poorer fitness values compared to CasX protein sequences with one to three mutations (FIG. 1).

[0873] Finally, the above results were validated by repeating the selection under conditions of reduced guide RNA expression, referred to as the stringent CcdB selection, and these enrichment values are plotted in FIG. 2. As illustrated in FIG. 2, the true fitness values determined for the machine-learning derived engineered CasX harboring one to ten mutations relative to CasX 515 were overall higher than the fitness values determined for randomly mutated CasX molecules. Similarly, these distributions were highly statistically significantly different (p=1.9E-48, p=9.6E-116, and p=2.5E-80 for single, double, or triple mutations, respectively; two-tailed t-test). Similarly, the data demonstrate that CasX sequences with more than four mutations produced substantially poor fitness values, mostly ranging from −2 to −6, a fitness level comparable to that observed with the catalytically-dead CasX (FIG. 2). These experiments show that use of machine learning to guide design of CasX molecules resulted in the generation of significantly improved nucleases compared to nucleases generated via random mutation. Those nucleases with activity greater than or comparable to CasX 515, that is, with average true fitness value determined to be >0 (for n=3 biological replicates), are provided in SEQ ID NOS: 24916-27856.

### Example 2: Individual Mutations Conferring CasX Proteins with Improved Biochemical Properties can be Combined to Further Improve Properties

[0874] Experiments were performed to identify single mutations (e.g., amino acid substitutions, insertions, or deletions) and combinations of single mutations that would improve one or more of the following biochemical properties of the CasX protein: (1) exhibit improved specificity for cleavage at on-target versus off-target sites in human cells; (2) utilize alternative protospacer adjacent motif (PAM) recognition sequences other than the canonical PAM sequence ‘TTC’; and (3) show improved nuclease activity of the CasX protein. To accomplish this, the HEK293 cell line PASS_V1.03 was treated with the WT CasX protein 2 (SEQ ID NO: 2) or with mutated CasX proteins, and next-generation sequencing (NGS) was performed to calculate the percent editing at a variety of spacers and associated target sites.

### Materials and Methods

[0875] A multiplexed pooled approach was taken to assay clonal proteins derived from CasX 515 listed in Table 9 using a pooled activity and specificity (PASS) assay. Here, a pooled HEK cell line, which was adapted to suspension culture from adherent cells, was generated and termed PASS_V1.03. Methods to complete the production of the PASS_V1.03 line were previously described in International Publication No. WO2022120095A1, incorporated herein by reference.

TABLE 9
List of CasX proteins derived from CasX
515 assessed here using the PASS assay

| | Mutation(s) applied to CasX 515 | Amino acid |
|---|---|---|
| CasX protein no. | (Position.Reference.Alternative)* | SEQ ID NO |
| CasX 591 | 292.V.L | 492 |
| CasX 593 | 304.M.W | 493 |
| CasX 844 | 292.V.L + 304.M.W | 494 |
| CasX 532 | 27.—.R | 495 |
| CasX 535 | 224.G.S | 496 |
| CasX 668 | 27.—.R + 224.G.S | 497 |
| CasX 946 | 701.E.H | 498 |
| CasX 947 | 709.K.Y | 499 |
| CasX 948 | 701.E.H + 709.K.Y | 500 |

*Positions of mutations are shown relative to a CasX 515 sequence with an N-terminal methionine residue (SEQ ID NO: 49699).

[0876] To assess the editing activity and specificity of a CasX nuclease at human target sites, two sets of target sites were quantified. First, 47 TTC PAM on-target sites, where the 20 nucleotides of the spacer were perfectly complementary to the target site, were quantified, and the average editing efficiency and standard error of the mean across this set of target sites was calculated for two biological replicates. Second, 91 TTC PAM off-target sites were quantified, where each spacer-target pair consisted of a single nucleotide mismatch at one of the twenty positions of the target site. The average editing efficiency and standard error of the mean for two biological replicates were also calculated for this set of target sites. Similarly, average editing efficiency was calculated for sets of target sites with alternative PAMs, as described in International Publication No. WO2022120095A1. Finally, CcdB bacterial selections were performed, and log 2 enrichment values were calculated as described in International Publication No. WO2022120095A1.

### Results:

[0877] The average on-target editing activity and average off-target editing activity were determined for the following CasX proteins: CasX 515; two single-mutation proteins derived from CasX 515 (i.e., CasX 591 and 593); and CasX 844, which contains both of the single mutations combined. Results showing average on-target editing activity and average off-target editing activity are illustrated in bar plots in FIG. 3A and FIG. 3B respectively. The data show that on average, CasX 515 was able to edit ˜75% of the on-target sites and ˜36% of the off-target sites. In contrast, while CasX 591 and 593 were able to maintain similar on-target editing rates (average˜77% and 80% respectively), their average off-target editing rates dropped to 30% and 28%, respectively. Finally, the combined double mutant CasX 844 was able to edit on-target sites at an average rate of 65%, which is ˜10% lower in comparison to the average editing rate achieved by CasX 515. However, the off-target editing rates for CasX 844 were substantially lower, achieving an average off-target rate of ˜15%. Taken together, while CasX 844 exhibited a small loss of on-target editing activity relative to that achieved by CasX 515, it was able to edit less than 50% of the number of off-target sites targeted by CasX 515. This is an indication that improvements to specificity conferred by each single mutation could be synergistically combined, resulting in enhanced CasX editing specificity.

[0878] To assess the synergistic or additive quality of combining individual mutations experimentally, PASS data were generated for additional sets of target sites with alternative PAM sequences beyond the wild-type TTC sequence for CasX proteins 515, 532, 535, and 668 (see Table 10 for specific mutations relative to CasX 515), using the method described in International Publication No. WO2022120095A1. FIG. 4 is a bar plot showing the average on-target editing activity of the four CasX proteins across a series of four different PAM sequences. Similarly, the synergistic effect of combining multiple single mutations was observed, here, in the context of increased recognition of three novel PAM sequences as indicated. For each non-TTC PAM sequence, each of the CasX proteins having two single mutations exhibited increased editing level relative to the level attained with CasX 515. When the two mutations were combined to generate CasX 668, a synergistic increase in editing level was observed for the non-canonical PAM sequences, especially with CTC and GTC PAM.

[0879] Next, the CcdB bacterial selection assay was employed to assess nuclease activity from CasX 515, two derivatives of CasX 515 with a different single mutation (CasX 946 and CasX 947), and a CasX 515 derivative harboring both mutations (CasX 948). The results, represented as the mean log 2 enrichment value from three biological replicates, are shown in FIG. 5 for the indicated CasX. The results show that relative to the nuclease activity demonstrated by CasX 515, the K683Y mutation of CasX 947 resulted in a statistically significant increase in activity (p=0.019; two-tailed t-test), and that the E675H of CasX 946 mutation resulted in seemingly improved, though not statistically significantly different, activity (FIG. 5). Furthermore, combining the two single mutations in CasX 948 dramatically and significantly increased the log 2 enrichment score from that obtained for CasX 515, from an average of 0.359 to an average of 1.16, with a significance value of p=0.0096 by two tailed t-Test.

[0880] These biochemical properties are thus subject to synergistic or additive effects of combinatorial single mutations. Table 10 lists the single mutations shown to improve on-target TTC PAM editing activity relative to CasX 515 in at least one biological replicate in the PASS assay. Table 11 lists the single mutations demonstrated to improve editing specificity relative to CasX 515 in at least one biological replicate in the PASS assay. Table 12 lists the single mutations determined to alter the PAM recognition sequence of CasX 515 in at least one biological replicate in the PASS assay.

Structural Insights into the Observed Improvements in Activity, Specificity, and/or PAM Recognition of CasX Proteins:

[0881] A structural analysis of various mutations revealed additional insights that could explain the observed improvement in specificity of the tested CasX proteins. In the case of CasX 591, the substitution of a valine to a leucine at position 292 might have resulted in additional bulk around the duplex helix of the R-loop, since leucine contains a single additional carbon in its hydrophobic side chain relative to that of valine. This increased bulk might have resulted in increased structural constraint of the R-loop, thereby prohibiting mismatch-induced distortions to occur in the R-loop. Similarly, the improved specificity demonstrated by CasX 593 might be attributed to the substitution of a tryptophan for a methionine at position 304. The large side chain of tryptophan possibly contributed to the increased bulk proximal to the gRNA:DNA duplex. Furthermore, other mutations might improve specificity via a different mechanism. CasX 812 was generated via a glycine-to-lysine substitution at position 329, within the Helical I-II domain, while CasX 594 was generated via a glycine-to-asparagine substitution at the same position (see summary of the CasX 812 sequence in Table 13, below). Both substitutions at position 329 appeared to improve specificity, which could be explained by two potential mechanisms. First, removing glycine could reduce the flexibility and therefore enhance structural rigidity in this region of the protein, thereby impeding the formation of mismatches between the gRNA and target DNA and increasing nuclease specificity. Second, adding lysine or asparagine might induce additional hydrogen bonding between these side chains and the gRNA. Such interactions might enforce an “A-form” geometry on the RNA, thereby hindering accommodating structural changes that would allow mismatches to exist within the R-loop. Finally, some mutations may improve specificity by destabilizing the overall R-loop. Such destabilizing effects might be sufficient to prevent R-loop formation at less stable mismatched off-target sites, while the more stable, fully complementary on-target site would remain fully capable of R-loop formation. For instance, in the case of CasX 757, the loss of the positively charged lysine as a result of the lysine-to-glutamine substitution at position 796 might reduce the protein's binding affinity for the negatively-charged DNA backbone of the proximal non-target strand, thereby destabilizing the R-loop. Similarly, the lysine-to-glutamine substitution at position 611 to generate CasX 824 might improve specificity by removing excess stabilizing energy mediated by ionic interactions with the backbone of the proximal DNA target strand, thereby preferentially reducing off-target effects. Similarly, in the case of CasX 781, the lysine-to-glutamate substitution at position 390 resulted in a stronger destabilization effect: here, the attractive positive charge of the lysine was replaced with a repulsive negative charge of a glutamate, thereby destabilizing interactions with the target strand.

[0882] In the case of the improved PAM recognition effects seen with CasX proteins 532, 533, and 668 (FIG. 4), the additive behavior of the two mutations tested (27.-.R and 224.G.S) was potentially enabled by the fact that the two mutations might improve access to new PAM sequences via two different biochemical mechanisms. First, position 224 in CasX 515 (or position 223 when excluding a prepended methionine) was identified as an important modifier of nucleotide preference at the first position of the PAM sequence. The glycine-to-serine substitution resulting in CasX 535 improved PAM recognition at all three non-canonical PAMs (ATC, CTC, and GTC). It is possible that this improved recognition occurred due to additional bonding interactions between the edge of the nucleotide base, which was physically proximal to this position, and the amino acid side-chain of the serine residue. Additionally, replacing glycine for serine might be stabilizing the alpha-helix in this region. Stabilizing this alpha-helix would reduce the energy required for R-loop formation, therefore unlocking the editing activity at non-canonical PAM sequences that were slightly imperfectly recognized. Furthermore, it is possible that the alpha carbon of glycine was capable of Van der Waals interactions with the methyl group of the thymine nucleobase, and these interactions were potentially abrogated upon substituting glycine for serine. Finally, there might be other amino acid positions (e.g., position 230) within CasX 515 capable of recognizing certain nucleotides within the PAM recognition sequence of CasX. Second, the insertion of an arginine at position 27, as was the case in CasX 532, was previously observed to be involved in broadening PAM preference. This insertion, located in a loop of the OBD domain proximal to the non-target strand, might be mediating additional ionic interactions between the positively charged side-chain and negatively charged DNA backbone of the non-target strand. As a result, this interaction might be involved in stabilizing the R-loop regardless of the specific nucleotide in position 1 of the PAM sequence, thereby improving editing efficiency. Furthermore, there might be additional positions within CasX capable of accepting a positively charged amino acid and remaining physically close to the DNA backbone to mediate stabilization of the unwound DNA.

[0883] Lastly, the improved nuclease activity of some CasX proteins might be attributed to an increased stability of the unwound R-loop state. For instance, in the case of CasX 583, a hydrophobic leucine was replaced by a positively charged lysine at position 169. The lysine side chain would be free to interact with the proximal negatively charged backbone of the non-target DNA strand, thereby stabilizing the R-loop. Similarly, an insertion of a positively charged arginine at position 27, as was the case in CasX 532, would be expected to increase the stability of the unwound R-loop state by interacting with the proximal negatively charged backbone of the DNA target strand. Furthermore, additional affinity of the CasX protein for the gRNA would increase the effective concentration of active RNP, which would increase the overall editing rate. This might be how CasX 818, which contained a serine-to-arginine substitution at position 698, demonstrated improved nuclease activity, since the arginine would be physically proximal to the scaffold region of the gRNA. CasX 643, in which glutamine was replaced with a phenylalanine at position 593, might also be demonstrating improved editing in a similar manner, i.e., by improving the affinity of the CasX protein for the gRNA through base-stacking between the phenylalanine and proximal cytosine at position 19 of the gRNA. Finally, in the case of CasX 654, the replacement of a methionine by a serine at position 772 would result in additional hydrogen bonding with the minor groove of the R-loop duplex or with the backbone of the non-target DNA strand.

[0884] Overall, the results here demonstrate that the biochemical properties of nuclease activity, nuclease specificity, and PAM recognition ability of CasX proteins can be improved or altered by multiple single mutations acting in combination to achieve greater effects than any single mutation alone.

TABLE 10
Single mutations resulting in average on-target TTC PAM
editing activity greater than that achieved by CasX 515
in at least one biological replicate of the PASS assay

| | | | Difference in average |
|---|---|---|---|
| | Mutation relative | CasX | on-target TTC PAM |
| CasX | to CasX 515* | amino acid | editing activity |
| protein | (Position.Refer- | sequence | relative to CasX |
| no. | ence.Alternative) | (SEQ ID NO) | 515 (fraction) |
| 532 | 27.—.R | 495 | 0.08 |
| 535 | 224.G.S | 49629 | 0.10 |
| 555 | 171.A.D | 49630 | 0.06 |
| 559 | 4.I.G | 49631 | 0.22 |
| 561 | 5.—.G | 49632 | 0.01 |
| 562 | 5.K.G | 49633 | 0.13 |
| 564 | 6.—.G | 49634 | 0.05 |
| 566 | 7.I.A | 49635 | 0.05 |
| 568 | 8.N.S | 49636 | 0.11 |
| 569 | 9.K.G | 49637 | 0.03 |
| 572 | 35.R.P | 49638 | 0.04 |
| 573 | 53.E.P | 49639 | 0.12 |
| 577 | 64.R.Q | 49640 | 0.14 |
| 580 | 86.W.D | 49641 | 0.10 |
| 583 | 169.L.K | 49642 | 0.16 |
| 584 | 171.A.Y | 49643 | 0.11 |
| 585 | 171.A.S | 49644 | 0.06 |
| 587 | 224.G .— | 49645 | 0.03 |
| 590 | 289.K.S | 49646 | 0.09 |
| 591 | 292.V.L | 49647 | 0.14 |
| 592 | 304.M.T | 49648 | 0.20 |
| 593 | 304.M.W | 493 | 0.16 |
| 602 | 339.—.Q | 49649 | 0.01 |
| 604 | 342.—.A | 49650 | 0.002 |
| 607 | 398.Y.T | 49651 | 0.02 |
| 613 | 412.—.E | 49652 | 0.002 |
| 638 | 481.E.D | 49653 | 0.02 |
| 643 | 593.Q.F | 49654 | 0.03 |
| 644 | 593.Q.V | 49655 | 0.02 |
| 646 | 653.—.T | 49656 | 0.06 |
| 649 | 655.—.S | 49657 | 0.002 |
| 651 | 696.G.R | 26039 | 0.03 |
| 654 | 772.M.S | 49658 | 0.05 |
| 656 | 887.T.D | 49659 | 0.005 |
| 702 | 91.K.V | 49660 | 0.01 |
| 718 | 7.I.L | 49661 | 0.05 |
| 721 | 156.F.V | 49662 | 0.04 |
| 736 | 794.P.A | 49663 | 0.05 |
| 760 | 797.T.V | 49664 | 0.10 |
| 762 | 793.—.P | 49665 | 0.06 |
| 780 | 389.—.V | 49666 | 0.04 |
| 787 | 826.V.M | 49667 | 0.04 |
| 788 | 891.S.Q | 49668 | 0.04 |
| 789 | 917.G.E | 49669 | 0.04 |
| 790 | 951.—.S | 49670 | 0.04 |
| 791 | 953.—.K | 49671 | 0.04 |
| 812 | 329.G.K | 266 | 0.05 |
| 818 | 698.S.R | 272 | 0.05 |
| 824 | 611.K.Q | 278 | 0.23 |

*Positions of mutations are shown relative to a CasX 515 sequence with an N-terminal methionine residue (SEQ ID NO: 49699).

TABLE 11
Single mutations resulting in average off-target TTC PAM editing
activity less than that achieved by CasX 515 in at least one
biological replicate of the PASS assay, and where the average
on-target TTC PAM editing rate is not lower than that achieved
by CasX 515 by more than an absolute value of 10%

| | Mutation relative | CasX | Average off-target |
|---|---|---|---|
| CasX | to CasX 515* | amino acid | TTC PAM |
| protein | (Position.Refer- | sequence | editing activity |
| no. | ence.Alternative) | (SEQ ID NO) | (fraction) |
| 544 | 232.D.G | 49672 | 0.34 |
| 555 | 171.A.D | 49630 | 0.30 |
| 562 | 5.K.G | 49633 | 0.29 |
| 564 | 6.—.G | 49634 | 0.33 |
| 568 | 8.N.S | 49636 | 0.27 |
| 569 | 9.K.G | 49637 | 0.27 |
| 572 | 35.R.P | 49638 | 0.21 |
| 580 | 86.W.D | 49641 | 0.23 |
| 584 | 171.A.Y | 49643 | 0.23 |
| 585 | 171.A.S | 49644 | 0.24 |
| 587 | 224.G.— | 49645 | 0.14 |
| 590 | 289.K.S | 49646 | 0.22 |
| 591 | 292.V.L | 49647 | 0.25 |
| 593 | 304.M.W | 493 | 0.19 |
| 594 | 329.G.N | 49673 | 0.12 |
| 607 | 398.Y.T | 49651 | 0.34 |
| 609 | 405.L.N | 49674 | 0.24 |
| 610 | 405.L.W | 49675 | 0.19 |
| 611 | 408.E.Y | 49676 | 0.24 |
| 612 | 412.G.P | 49677 | 0.25 |
| 613 | 412.—.E | 49652 | 0.34 |
| 614 | 414.—.R | 49678 | 0.33 |
| 616 | 414.—.Y | 49679 | 0.31 |
| 619 | 417.K.D | 49680 | 0.33 |
| 622 | 420.D.G | 49681 | 0.22 |
| 631 | 469.L.K | 49682 | 0.21 |
| 632 | 469.L.S | 49683 | 0.24 |
| 633 | 473.—.D | 49684 | 0.25 |
| 638 | 481.E.D | 49653 | 0.26 |
| 643 | 593.Q.F | 49654 | 0.33 |
| 644 | 593.Q.V | 49655 | 0.35 |
| 649 | 655.—.S | 49657 | 0.27 |
| 657 | 893.—.N | 49685 | 0.27 |
| 702 | 91.K.V | 49660 | 0.24 |
| 717 | 390.K.Q | 49686 | 0.20 |
| 718 | 7.I.L | 49661 | 0.28 |
| 721 | 156.F.V | 49662 | 0.28 |
| 757 | 796.K.Q | 49687 | 0.25 |
| 758 | 791.E.N | 49688 | 0.22 |
| 777 | 169.L.Q | 49689 | 0.24 |
| 779 | 372.G.I | 49690 | 0.19 |
| 780 | 389.—.V | 49666 | 0.29 |
| 781 | 390.K.E | 49691 | 0.24 |
| 784 | 570.P.I | 49692 | 0.22 |
| 788 | 891.S.Q | 49668 | 0.27 |
| 789 | 917.G.E | 49669 | 0.25 |
| 790 | 951.—.S | 49670 | 0.21 |
| 791 | 953.—.K | 49671 | 0.23 |
| 812 | 329.G.K | 266 | 0.16 |
| 818 | 698.S.R | 272 | 0.30 |
| 824 | 611.K.Q | 278 | 0.16 |

*Positions of mutations are shown relative to a CasX 515 sequence with an N-terminal methionine residue (SEQ ID NO: 49699).

TABLE 12
Single mutations resulting in log2 enrichment >0 when
selected against synthetic PAM sequences of ATC
or CTC in the CedB bacterial selection.

| | Mutation relative | CasX | | | |
|---|---|---|---|---|---|
| CasX | to CasX 515* | amino acid | log2 | | |
| protein | (Position.Refer- | sequence | en- | | |
| no. | ence.Alternative) | (SEQ ID NO) | richment | Spacer | PAM |
| 528 | 224.G.Y | 49693 | 9.09 | 23.19 | ATC |
| 534 | 224.G.H | 49694 | 4.11 | 23.27 | CTC |
| 535 | 224.G.S | 496 | 8.31 | 23.19 | ATC |
| 536 | 224.G.T | 49695 | 3.81 | 11.2 | CTC |
| 537 | 224.G.A | 49696 | 6.29 | 11.2 | CTC |
| 538 | 224.G.V | 49697 | 3.62 | 23.27 | CTC |
| 583 | 169.L.K | 49642 | 4.21 | 11.2 | CTC |
| 587 | 224.G.— | 49645 | 3.94 | 23.27 | CTC |
| 532 | 27.—.R | 495 | 2.96 | 11.2 | CTC |
| 949 | 231.S.R | 49698 | 8.95 | 24.25 | TTG |

*Positions of mutations are shown relative to a CasX 515 sequence with an N-terminal methionine residue (SEQ ID NO: 49699).

TABLE 13
CasX 812 domain sequences and coordinates

| | SEQ | | |
|---|---|---|---|
| Domain | ID NO | Amino Acid Sequence* | Coordinates |
| N-terminal | — | M | 1 |
| methionine | | | |
| OBD-I | 295 | QEIKRINKIRRRLVKDSNTKKAGKTGPMKTLLVRVMTPDLRERLEN | 2-57 |
| | | LRKKPENIPQ | |
| Helical I-I | 296 | PISNTSRANLNKLLTDYTEMKKAILHVYWEEFQKDPVGLMSRVA | 58-101 |
| NTSB | 297 | QPASKKIDQNKLKPEMDEKGNLTTAGFACSQCGQPLFVYKLEQVSE | 102-192 |
| | | KGKAYTNYFGRCNVAEHEKLILLAQLKPEKDSDEAVTYSLGKFGQ | |
| Helical I-II | 49847 | RALDFYSIHVTKESTHPVKPLAQIAGNRYASGPVGKALSDACMGTI | 193-333 |
| | | ASFLSKYQDIIIEHQKVVKGNQKRLESLRELAGKENLEYPSVTLPP | |
| | | QPHTKEGVDAYNEVIARVRMWVNLNLWQKLKLSRDDAKPLLRLKKF | |
| | | PSF | |
| Helical II | 299 | PLVERQANEVDWWDMVCNVKKLINEKKEDGKVFWQNLAGYKRQEAL | 334-501 |
| | | RPYLSSEEDRKKGKKFARYQLGDLLLHLEKKHGEDWGKVYDEAWER | |
| | | IDKKVEGLSKHIKLEEERRSEDAQSKAALTDWLRAKASFVIEGLKE | |
| | | ADKDEFCRCELKLOKWYGDLRGKPFAIEAE | |
| OBD-II | 300 | NSILDISGFSKQYNCAFIWQKDGVKKLNLYLIINYFKGGKLRFKKI | 502-647 |
| | | KPEAFEANRFYTVINKKSGEIVPMEVNENFDDPNLIILPLAFGKRQ | |
| | | GREFIWNDLLSLETGSLKLANGRVIEKTLYNRRTRQDEPALFVALT | |
| | | FERREVLD | |
| RuvC-I | 301 | SSNIKPMNLIGVDRGENIPAVIALTDPEGCPLSRFKDSLGNPTHIL | 648-811 |
| | | RIGESYKEKORTIQAKKEVEQRRAGGYSRKYASKAKNLADDMVRNT | |
| | | ARDLLYYAVTQDAMLIFENLSRGFGRQGKRTEMAERQYTRMEDWLT | |
| | | AKLAYEGLPSKTYLSKTLAQYTSKTC | |
| TSL | 302 | SNCGETITSADYDRVLEKLKKTATGWMTTINGKELKVEGQITYYNR | 812-921 |
| | | YKRONVVKDLSVELDRLSEESVNNDISSWTKGRSGEALSLLKKRFS | |
| | | HRPVQEKFVCLNCGFETH | |
| RuvC-II | 303 | ADEQAALNIARSWLFLRSQEYKKYQTNKTTGNTDKRAFVETWQSFY | 922-979 |
| | | RKKLKEVWKPAV | |

*Position of the 329.G.K mutation relative to CasX 515 is bolded and underlined.

### Example 3: The PASS Assay Identifies CasX Proteins with Enhanced Specificity Relative to CasX 515

[0885] Experiments were performed to identify CasX proteins with improved specificity for cleavage at on-target versus off-target sites in human cells. To accomplish this, the HEK293 cell line PASS_V1.03 was treated with the WT CasX protein 2 or with CasX proteins with mutations relative to WT, and next-generation sequencing (NGS) was performed to calculate the percent editing at a variety of spacers and associated target sites.

### Materials and Methods

[0886] The multiplexed pooled PASS assay was used, as described in Example 2. Samples were treated in biological triplicate, as well as technical duplicate, for a total of six replicates for each CasX protein. Here, the CasX proteins tested were wild-type CasX 2, engineered CasX proteins 119, 491, 515, 593, and 812; Streptococcus pyogenes (“Spy”) Cas9 served as a negative control.

[0887] To assess the editing activity and specificity of a CasX nuclease at human target sites, two sets of target sites were quantified. First, TTC PAM on-target sites, where the twenty nucleotides of each gRNA spacer targeting these on-target sites were perfectly complementary to the target site, were quantified. For each sample and spacer-target pair, data based on <500 reads were removed. Fraction indel values for each sample and spacer-target pair were subtracted by the average fraction indel value across Cas9-treated samples with the same spacer-target pair, where Cas9 served as a negative control due to the absence of a compatible guide RNA. Second, TTC PAM off-target sites, where one of the twenty nucleotides of the spacer was mismatched with the target site, were quantified. As above, for each sample and spacer-target pair, data based on <500 reads were removed, and fraction indel values for each sample and spacer-target pair were subtracted by the average fraction indel value across Cas9-treated samples with the same spacer-target pair. Finally, for those TTC PAM spacer-target pairs that had both an on-target and an off-target version, the average editing activity and 95% confidence intervals were calculated.

### Results:

[0888] The average on-target editing activity and average off-target editing activity were determined for the following CasX proteins: the wild-type protein CasX 2, the CasX proteins 119, 491, and 515, and two single-mutation proteins derived from CasX 515 (i.e., CasX 593 and 812). Cas9 was also included as a negative control, where no editing was expected due to the lack of a compatible gRNA. Results showing average on-target editing activity and average off-target editing activity are illustrated as box plots in FIG. 6A and FIG. 6B, respectively. The data show that on average, CasX 812 was able to edit on-target sites at a high rate, on average˜93% as efficiently as CasX 515 (FIG. 6A), yet CasX 812 demonstrated, on average, a 2.7× lower rate of editing at off-target sites compared with that exhibited by CasX 515 (FIG. 6B). These data show that when compared with CasX 515, CasX 812 is, on average, nearly as effective at editing at a chosen target site while exhibiting substantially reduced off-target editing, an important safety consideration for their use as therapeutics.

[0889] While the average editing rate across spacers is a useful metric to compare CasX proteins, individual spacers often produce different editing levels. FIGS. 7A-7C are point plots showing the editing rates for select CasX proteins using gRNA with 27 different human sequence spacers. For each spacer, the editing rate is shown for both the on-target and off-target site, where the off-target site consists of a human single nucleotide polymorphism. The results show that some individual spacers can be classified as allele-specific, where the on-target editing rate is greater than 20%, and the off-target editing rate is less than one-fifth of the on-target editing rate. Furthermore, the number of spacers that can be classified as allele-specific depends on the CasX protein being used: for CasX 491, 13 of these spacers met these criteria (FIG. 7A; regions highlighted in gray are allele-specific). In contrast, use of CasX 515 resulted in 17 allele-specific spacers meeting the criterion (FIG. 7B), while CasX 812 resulted in 20 allele-specific spacers (FIG. 7C). Taken together, these data show that, compared to CasX 515, CasX 812 has an improved average specificity across spacers, as well as an improved number of allele-specific spacers.

[0890] The results here demonstrate that the nuclease specificity of CasX proteins can be improved or altered by single mutations, and that CasX proteins 593 and 812 have improved specificity relative to the control protein CasX 515.

### Example 4: CasX:gRNA In Vitro Cleavage Assays

[0891] Experiments were performed to assess in vitro DNA cleavage by CasX:gRNA ribonucleoproteins (RNPs).

### Materials and Methods

### Assembly of RNP

[0892] RNPs of either CasX 119, CasX 491, CasX 515 (SEQ ID NO: 228), or CasX 812 (SEQ ID NO: 266) were assembled with single guide RNAs (sgRNA) with scaffold 316 (SEQ ID NO: 156) and one of two spacers, as described in detail below. The amino acid sequences of CasX 119 and CasX 491 are disclosed in International Publication No. WO2020247882A1. Separately, RNPs of CasX 515 were assembled with sgRNA with either scaffold 2 (SEQ ID NO: 5), 174 (SEQ ID NO: 17), 235 (SEQ ID NO: 75), or 316 and one of two spacers.

[0893] Purified RNP of CasX and sgRNA were prepared same-day prior to experiments. For experiments where protein variants were being compared, the CasX protein was incubated with sgRNA at 1:1.2 molar ratio. When scaffolds were compared, the protein was added in 1.2:1 ratio to guide. Briefly, sgRNA was added to Buffer #1 (20 mM Tris HCl pH 7.5, 150 mM NaCl, 1 mM TCEP, 5% glycerol, 10 mM MgCl₂) on ice, then CasX was added to the sgRNA solution, slowly with swirling, and immediately incubated at 37° C. for 20 minutes to form RNP complexes. RNP complexes were centrifuged at 4° C. for 5 minutes at 16,000×g to remove any precipitate. Formation of competent (active) RNP was assessed as described below. In vitro cleavage assays

[0894] The ability of CasX variants to form active RNP compared to reference CasX was determined using an in vitro cleavage assay. The beta-2 microglobulin (B2) 7.9 and 7.37 target for the cleavage assay was created as follows. DNA oligos (sequences in Table 14) were generated with 5′ terminal amino modification for conjugation to Cy-dyes with an amino-reactive handle (N-hydroxysuccinimide). Oligo-dye conjugation reactions of 100 uM oligo and 1 mM dye were performed in 100 mM sodium borate pH 8.3 at 4° C. for 16 h. Target strands (TS) were labeled with Cy5.5 and non-targeting strands (NTS) were labeled with Cy7.5. After quenching the reactions with 1 mM Tris pH 7.5, the conjugated oligos were purified via ethanol precipitation. Double-stranded DNA (dsDNA) targets were formed by mixing the oligos in a 1:1 ratio in 1× hybridization buffer (20 mM Tris HCl pH 7.5, 100 mM KCl, 5 mM MgCl₂), heating to 95° C. for 10 minutes, and allowing the solution to cool to room temperature.

TABLE 14
DNA sequences and descriptions of target DNAs

| DNA Sequence (5′-3′)* | SEQ ID NO: | Description |
|---|---|---|
| /5AmMC6/TGAAGCTGACAGCATTCGGGCCGAGA | 49874 | 7.37 NTS with 5' amine for NHS ester |
| TGTCTCGCTCCGTGGCCTTAGCTGTGCTCGCGCT | | linkages** |
| /5AmMC6/AGCGCGAGCACAGCTAAGGCCACGGA | 49875 | 7.37 TS with 5' amine ** |
| GCGAGACATCTCGGCCCGAATGCTGTCAGCTTCA | | |
| /5AmMC6/TGAAGCTGACAGCATTCGGGCCTAGA | 49876 | 7.37 gel probe NTS, mismatch at 5 |
| TGTCTCGCTCCGTGGCCTTAGCTGTGCTCGCGCT | | |
| /5AmMC6/AGCGCGAGCACAGCTAAGGCCACGGA | 49877 | 7.37 gel probe TS, mismatch at 5 |
| GCGAGACATCTAGGCCCGAATGCTGTCAGCTTCA | | |
| /5AmMC6/TGAAGCTGACAGCATTCGGGCCGAGA | 49878 | 7.37 gel probe NTS, mismatch at 10 |
| TATCTCGCTCCGTGGCCTTAGCTGTGCTCGCGCT | | |
| /5AmMC6/AGCGCGAGCACAGCTAAGGCCACGGA | 49879 | 7.37 gel probe TS, mismatch at 10 |
| GCGAGATATCTCGGCCCGAATGCTGTCAGCTTCA | | |
| /5AmMC6/TGAAGCTGACAGCATTCGGGCCGAGA | 49880 | 7.37 gel probe NTS, mismatch at 15 |
| TGTCTCGATCCGTGGCCTTAGCTGTGCTCGCGCT | | |
| /5AmMC6/AGCGCGAGCACAGCTAAGGCCACGGA | 49881 | 7.37 gel probe TS, mismatch at 15 |
| TCGAGACATCTCGGCCCGAATGCTGTCAGCTTCA | | |
| /5AmMC6/CTTTCAGCAAGGACTGGTCTTTCTAT | 49882 | 7.9 target TS |
| CTCTTGTACTACACTGAATTCACCCCCACTGAAA | | |
| /5AmMC6/TTTCAGTGGGGGTGAATTCAGTGTAG | 49883 | 7.9 target NTS |
| TACAAGAGATAGAAAGACCAGTCCTTGCTGAAAG | | |
| /5AmMC6/CTTTCAGCAAGGACTGGTCTTTCTAT | 49884 | 7.9 gel probe TS, mismatch at 5 |
| CTCTTGTACGACACTGAATTCACCCCCACTGAAA | | |
| /5AmMC6/TTTCAGTGGGGGTGAATTCAGTGTCG | 49885 | 7.9 gel probe NTS, mismatch at 5 |
| TACAAGAGATAGAAAGACCAGTCCTTGCTGAAAG | | |
| /5AmMC6/CTTTCAGCAAGGACTGGTCTTTCTAT | 49886 | 7.9 gel probe TS, mismatch at 10 |
| CTCTCGTACTACACTGAATTCACCCCCACTGAAA | | |
| /5AmMC6/TTTCAGTGGGGGTGAATTCAGTGTAG | 49887 | 7.9 gel probe NTS, mismatch at 10 |
| TACGAGAGATAGAAAGACCAGTCCTTGCTGAAAG | | |
| /5AmMC6/CTTTCAGCAAGGACTGGTCTTTCTGT | 49888 | 7.9 gel probe TS, mismatch at 15 |
| CTCTTGTACTACACTGAATTCACCCCCACTGAAA | | |
| /5AmMC6/TTTCAGTGGGGGTGAATTCAGTGTAG | 49889 | 7.9 gel probe NTS, mismatch at 15 |
| TACAAGAGACAGAAAGACCAGTCCTTGCTGAAAG | | |

*5AmMC6 indicates the 5′ Amino Modifier C6. The target sequences are underlined.
**The Kcleave assay using the mismatched position 5 dsDNA target was run at 37° C.

### Determining Cleavage-Competent Fractions for RNPs

[0895] Cleavage reactions were prepared with final RNP concentrations of 100 nM and final target concentration of 100 nM. Reactions were carried out at 37° C. and initiated by the addition of the dye-labeled dsDNA target. Aliquots were taken at 5, 30, and 60 minutes and quenched by adding to 95% formamide, 25 mM EDTA. Samples were denatured by heating at 95° C. for 10 minutes and run on a 10% urea-PAGE gel. The gels were imaged with a Cytiva Typhoon and quantified using the Cytiva IQTL software.

### Kcleave Assay

[0896] Cleavage reactions were set up with a final RNP concentration of 200 nM and a final target concentration of 10 nM. Reactions were carried out at 16° C., except where otherwise noted, and initiated by the addition of the target DNA. Aliquots were taken at 15, 30, 60, 120, 180, 240, and 480 seconds, and quenched by adding to 95% formamide, 25 mM EDTA. Samples were denatured by heating at 95° C. for 10 minutes and run on a 10% urea-PAGE gel. The gels were imaged with a Cytiva Typhoon and quantified using the Cytiva IQTL software. The apparent first-order rate constant of non-target strand cleavage (k_{cleave}) was determined for each CasX:sgRNA combination replicate individually.

[0897] To test the relative specificities of engineered proteins in vitro, apparent cleavage rate constants were compared for targets with mismatched bases at various positions (5, 10, and 15 nt downstream of PAM, Table 14). Cleavage assays were performed in large excess of RNP (200 nM RNP and 1 nM target dsDNA) at 16° C., with the exception of assays measuring cleavage of the target with a mismatch at 5 nt, which were conducted at 37° C. in order to observe measurable cleavage rates. Aliquots were taken at 15, 30, 60, 120, 180, 240, and 480 seconds, and quenched by adding to 95% formamide, 25 mM EDTA. Samples were denatured by heating at 95° C. for 10 minutes and run on a 10% urea-PAGE gel. The gels were imaged with a Cytiva Typhoon and quantified using the Cytiva IQTL software. The apparent first-order rate constant of non-target strand cleavage (k_{cleave}) was determined for each CasX:sgRNA combination replicate individually.

### Results:

### Determining Cleavage-Competent Fractions for Protein Variants Compared to Reference CasX 119

[0898] To determine the cleavage-competent fraction for the tested CasX proteins, it was assumed that CasX acts essentially as a single-turnover enzyme under the assayed conditions, as indicated by the observation that sub-stoichiometric amounts of enzyme fail to cleave a greater-than-stoichiometric amount of target even under extended time-scales and instead approach a plateau that scales with the amount of enzyme present. Thus, the fraction of target cleaved over long time-scales by an equimolar amount of RNP is indicative of what fraction of the RNP is properly formed and active for cleavage. Thus, the active (competent) fraction for each RNP was derived from the cleaved fraction over the total signal at the 60-minute timepoint, upon confirming an increase in cleaved fraction from the 5-minute timepoint, and relative plateau in cleaved fraction from the 30-minute timepoint.

[0899] Apparent competent fractions were determined for the RNPs with various CasX proteins, and are provided in Table 15.

TABLE 15
Protein variant RNP comparison of fraction competence and Kcleave rates

| | | Kcleave (sec⁻¹) | | | |
|---|---|---|---|---|---|
| | Fraction | On- | Position 15 | Position 10 | Position 5 |
| RNP | competence* | target | mismatch | mismatch | mismatch |
| (CasX.Scaffold.Spacer) | (mean ± stdev) | spacer | spacer | spacer | spacer** |
| 119.174.7.9 | 26.71 ± 9.65% | 0.0292 | 0.0158 | 0.0047 | 0.0127 |
| 491.174.7.9 | 49.23 ± 6.37% | 0.0966 | 0.0552 | 0.03 | 0.0616 |
| 515.174.7.9 | 30.15 ± 3.58% | 0.0782 | 0.0625 | 0.0324 | 0.0392 |
| 812.174.7.9 | 53.28 ± 5.14% | 0.0909 | 0.0512 | 0.0142 | 0.01 |
| 119.174.7.37 | 29.01 ± 2.67% | 0.0022 | 0.0061 | 0.0028 | 0.0034 |
| 491.174.7.37 | 48.73 ± 5.44% | 0.0425 | 0.015 | 0.0297 | 0.0301 |
| 515.174.7.37 | 43.54 ± 16.19% | 0.0396 | 0.0127 | 0.0297 | 0.0347 |
| 812.174.7.37 | 38.23 ± 2.49% | 0.027 | 0.0111 | 0.0119 | 0.014 |

*Active fraction was calculated by averaging three experimental replicates.
**The Kcleave assay using the mismatched position 5 dsDNA target was run at 37° C.

[0900] For protein variant comparison, the following CasX proteins were used with guide scaffold 316 and spacer 7.9 or guide 316 and spacer 7.37: CasX 119, CasX 491, CasX 515, and CasX 812. CasX 119 had the lowest active fraction for both spacers, indicating that CasX 491, CasX 515, and CasX 812 form more active and stable RNP with the identical guides under the tested conditions as compared to CasX 119. CasX proteins 491, 515, and 812 did not show consistent trends in their competent fractions across the two spacers, consistent with the expectation that the additional engineering following CasX 491 primarily affects target engagement and cleavage, rather than guide binding or stability.

Kcleave Assay to Understand Specificity of RNPs Formed from Protein Variants

[0901] Assays were performed to measure the apparent first-order rate constant of non-target strand cleavage (k_{cleave}), and the results are presented in Table 15, above. A drastic effect on the kinetics of CasX 812 RNP cleavage was observed for on-target versus the mismatched dsDNA target for both spacers. CasX 812 had comparable on-target cleavage rates to CasX 491 and CasX 515 for both spacers, with a slightly higher cleavage rate than 515 on spacer 7.9, which might be explained by the lower competent fraction observed for the 515 RNP with that spacer, and a lower cleavage rate on 7.37.

[0902] The off-target rates for CasX 812 were much more substantially reduced for most of the mismatched substrates. The difference in kcleave rates was readily apparent for the target with a mismatch at position 10, with 812 having a roughly 6-fold (7.9) and 2-fold (7.37) reduction in cleavage rate, as compared to its on-target rate. CasX 515, by comparison, exhibited a 2.4-fold and a 25% reduction on the same targets. A substantial difference was also observed for the position 5 mismatch targets. Even though the assay was run at 37° C. to enable measurable cleavage rates, as the position 5 mismatch targets were essentially uncleaved by the CasX RNPs at the lower temperature used for the other targets, CasX 812 against spacer 7.9 exhibited a 9-fold reduction in cleavage rate from on-target rate run at 16° C. and a 2-fold reduction for the 7.37 spacer with a position 5 mismatch. CasX 515 showed a 2-fold reduction for mismatched 7.9 and a nearly equivalent cleavage rate for 7.37 with the position 5 mismatch (note that the “equivalent” cleavage rate is due to the increased temperature).

[0903] For the position 15 mismatch substrate, CasX 812 exhibited modest reductions in cleavage rates relative to on-target rates, comparable to the reduction observed for 515. This suggests that the increased sensitivity of CasX 812 to mismatches declines by the PAM distal region, at least for the specific mismatches and spacers tested here. The increased sensitivity at positions 5 and 10 in particular correlates with the position of the G329K mutation present in CasX 812. This mutation introduces a positive charge near the RNA spacer around position 8 and may help CasX to better read out distortions caused by mismatches. Mismatches closer to this new site of contact would be more likely to significantly disrupt either R-loop propagation or allosteric activation of the RuvC (depending on the precise mechanism of increased specificity), while mismatches farther away (as in the position 15 mismatch) might have more variable effects depending on the nature of the mismatch and its effects on the broader heteroduplex structure. Taken together, these data confirm that CasX 812 is inherently more sensitive to mismatches between the RNA spacer and the DNA target and is not simply a less active enzyme, as the decrease in cleavage rate at mismatched targets is in excess of the decrease in cleavage rate at properly matched targets. This is consistent with the results in Examples 2, 6, and 7 that indicate that CasX 812 is a highly specific enzyme, with lower off-target editing compared to the other nucleases tested.

### Determining Cleavage-Competent Fractions for Single Guide Variants Relative to Reference Single Guide 2

[0904] RNPs were complexed using the aforementioned methods. To isolate the effect of sgRNA identity on RNP formation, guide-limiting conditions were employed. sgRNAs with scaffolds 2, 174, 235, or 316 with spacers 7.9 or 7.37 were mixed with CasX 515 at final concentrations of 1 μM for the guide and 1.2 μM for the protein. Fraction competence was calculated as described above, and the results are provided in Table 16.

TABLE 16
Guide variant RNP comparison of fraction
competence and Kcleave assay

| RNP construct | Competent fraction | |
|---|---|---|
| (CasX.Scaffold.Spacer) | (mean ± stdev) | Kcleave (sec⁻¹) |
| 515.2.7.9 | 28.14 6.87% | 0.1346 ± 0.0118 |
| 515.174.7.9 | 42.77 9.62% | 0.1723 ± 0.0046 |
| 515.235.7.9 | 34.11 1.15% | 0.1696 ± 0.0571 |
| 515.316.7.9 | 30.89 6.87% | 0.1413 ± 0.0301 |
| 515.2.7.37 | 10.42 2.24% | 0.0204 ± 0.0002 |
| 515.174.7.37 | 19.96 2.88% | 0.0534 ± 0.0200 |
| 515.235.7.37 | 32.64 11.60% | 0.0647 ± 0.0163 |
| 515.316.7.37 | 26.98 11.08% | 0.0851 ± 0.0071 |

* active fraction was calculated by averaging two experimental replicates

[0905] Given the complex folding structure of the CasX guide, fraction competence is expected to largely be determined by how much of the guide is properly folded for interaction with the protein. All guides with engineered scaffolds showed improvements over scaffold 2, and guides with scaffold 235 or ERS 316 showed improvements relative to 174 for spacer 7.37. This is consistent with the introduction of mutations in the pseudoknot and triplex that are expected to stabilize the properly folded form. As described in Example 12, below, scaffold 235 and ERS 316 both produced higher levels of gene editing than scaffold 174 when assayed in a cell culture system and delivered via lentiviral vectors at a relatively low multiplicity of infection.

[0906] Higher competent fractions of all guides were observed for spacer 7.9. For this spacer, scaffold 174 had the highest competent fraction, followed by scaffolds 316, 235, and 2. Proper guide folding is expected to be highly dependent on the potential for undesired interactions between the scaffold and spacer sequences, so the observed differences may be attributable to differential sequence-specific interactions, variations in prep quality, or noise in the assay.

Determining k_{Cleave} for Single Guide Variants Compared to Reference Scaffold 2

[0907] Cleavage assays were performed with CasX 515 and guides with reference scaffold 2 compared to guides with scaffolds 174, 235, or 316 with spacer 7.9 or 7.37 to determine relative cleavage rates. The mean and standard deviation of three replicates with independent fits are presented in Table 16, above.

[0908] To reduce cleavage kinetics to a range measurable with the assay, the cleavage reactions were incubated at 16° C. Under these conditions, all guides supported faster cleavage rates as compared to scaffold 2. For spacer 7.37, the cleavage kinetics aligned with those guides that contributed to the highest fraction competence, with the highest cleavage rate being sg174 (0.1723 s⁻¹), followed by scaffold 235 (0.1696 s⁻¹) and scaffold 316 (0.1413 s⁻¹), versus scaffold 2 (0.1346 s⁻¹). For spacer 7.9, scaffold 316 yielded the highest cleavage rate (0.0851 s⁻¹), followed by scaffold 235 (0.0647 s⁻¹) and sg174 (0.0534 s⁻¹), versus scaffold 2 (0.0204 s⁻¹). The fraction competence and k_{cleave} data did not demonstrate differences across the engineered variants that were consistent across both spacers, although all are consistently better than scaffold 2. This suggests that the improvements seen for scaffold 235 and 316 over 174 are primarily due to behavior in the cell, whether it be stability in the cytoplasm, folding in the cytoplasm, transcription when delivered via plasmid or AAV, or refolding ability when delivered via LNP, that are not captured by guides that have been in vitro transcribed, refolded, and tested for cleavage biochemically.

### Example 5: The PASS Assay Identifies Engineered CasX Proteins with Enhanced Activity, Specificity, and/or PAM Recognition Relative to CasX 515

[0909] Experiments are performed to assay engineered CasX proteins designed with a combination of mutations introduced in CasX 515 to identify engineered CasX proteins exhibiting improvements in the following types of biochemical properties: 1) editing activity; 2) editing activity and specificity for cleavage at on-target versus off-target sites; 3) editing activity and PAM recognition; and 4) editing activity, specificity, and PAM recognition. To accomplish this, the HEK293 cell line PASS_V1.03 is treated with the wild-type CasX protein 2 (SEQ ID NO: 2) or with CasX protein 515 (SEQ ID NO: 228), or an engineered CasX protein, and next-generation sequencing (NGS) is performed to calculate the percent editing at a variety of spacers and associated target sites.

### Materials and Methods

[0910] To engineer CasX nucleases with improved activity, specificity, and/or PAM recognition, individual single mutations are combined to generate the library of CasX protein sequences provided in SEQ ID NOS: 27857-49628.

[0911] Single mutations were identified above to improve activity (see Table 10, Example 2), specificity (see Table 11, Example 2), or PAM recognition (see Table 12, Example 2) relative to CasX 515. The following types of combinations of single mutations are generated to produce new engineered CasX: 1) activity+activity; 2) activity+specificity; 3) activity+activity+PAM recognition; and 4) activity+specificity+PAM recognition. The resulting engineered CasX proteins are constructed and assayed using the PASS system, a multiplexed pooled approach described in Example 2.

[0912] To assess the editing activity and specificity of an engineered CasX protein at human target sites, editing at two sets of target sites is quantified. First, editing at TTC PAM on-target sites, where the twenty nucleotides of each gRNA spacer targeting these on-target sites are perfectly complementary to the target site, is quantified, and the average editing efficiency and standard error of the mean for two biological replicates are calculated for this set of on-target sites. Second, editing at TTC PAM off-target sites, where each spacer-target pair consists of a single nucleotide mismatch at one of the 20 positions of the target site, is quantified. The average editing efficiency and standard error of the mean is calculated for this set of target sites. The ratio of editing efficiency, as well as the propagated standard error of the mean, between the off-target and the on-target sites is calculated. This ratio metric is defined as the Specificity Ratio.

[0913] To assess PAM sequence specificity for each engineered CasX protein, average editing efficiency and standard error of the mean is similarly calculated for sets of target sites with non-canonical PAM sequences ATC, CTC, and GTC.

[0914] The results from these experiments are expected to identify those engineered CasX proteins harboring a combination of mutations designed to improve the following relative to the CasX 515 control: 1) double-strand cleavage activity; 2) editing activity and specificity for cleavage at on-target versus off-target sites; 3) editing activity and PAM recognition; and 4) editing activity, specificity, and PAM recognition. Specifically, the results are expected to reveal those engineered CasX proteins with higher average editing efficiency at target DNA sequences associated with TTC PAM, as well as engineered CasX proteins with a higher specificity ratio (measured as editing at on-target versus off-target sites). The data is also expected to reveal those engineered CasX proteins with higher average editing efficiency at target DNA sequences with alternative PAM sequences (ATC, CTC, or GTC). These data are expected to demonstrate that a broad spectrum of engineered CasX proteins can be engineered with improved biochemical properties having enhanced activity and specificity for a specific therapeutic target of interest.

### Example 6: Identification of CasX Proteins with Enhanced Activity or Specificity Relative to CasX 515

[0915] An experiment was performed to identify CasX proteins with single mutations and increased editing activity or improved specificity relative to CasX 515.

### Materials and Methods

[0916] The multiplexed pooled PASS assay was used as described in Example 2. CasX proteins were expressed using a relatively weakly-expressing promoter to reduce CasX protein expression and thereby improve the sensitivity of the assay. Samples were tested in quadruplicate. The list of CasX proteins tested and their mutations relative to CasX 515 is provided in Tables 17 and 18, below. All of the tested CasX proteins had single mutations (i.e., a single amino acid substitution, deletion, or insertion) relative to CasX 515, except for CasX 676, which has three mutations relative to CasX 515. Streptococcus pyogenes Cas9 without a guide RNA served as a negative control.

[0917] As described in Example 3, to assess the editing activity and specificity of the tested CasX proteins at human target sites, two sets of target sites were quantified. First, editing was quantified at TTC PAM on-target sites in which the twenty nucleotides of each gRNA spacer targeting these on-target sites were perfectly complementary to the target site. For each sample and spacer-target pair, data based on <500 reads were removed. Fraction indel values for each sample and spacer-target pair were subtracted by the average fraction indel value across Cas9-treated samples with the same spacer-target pair; Cas9 served as a negative control due to the absence of a compatible guide RNA. Second, editing was quantified at TTC PAM off-target sites, in which one of the twenty nucleotides of the spacer was mismatched with the target site. As above, for each sample and spacer-target pair, data based on <500 reads were removed, and fraction indel values for each sample and spacer-target pair were subtracted by the average fraction indel value across Cas9-treated samples with the same spacer-target pair. Finally, for those TTC PAM spacer-target pairs that had both an on-target and an off-target version, the average editing activity and standard error of the mean (SEM) were calculated.

### Results:

[0918] Table 17 provides the level of on-target editing produced by various CasX proteins with mutations relative to CasX 515, ranked from highest to lowest activity.

TABLE 17
Average on-targeting editing activity,
ranked from highest to lowest

| | | Average | SEM on-target |
|---|---|---|---|
| Protein | Mutation relative to | on-target TTC | TTC PAM |
| Designation | CasX 515* | PAM editing | editing |
| (CasX protein | (Position.Refer- | activity | activity |
| no., or Cas9) | ence.Alternative) | (fraction) | (fraction) |
| 607 | 398.Y.T | 2.72E−01 | 4.08E−02 |
| 532 | 27.—.R | 2.59E−01 | 3.34E−02 |
| 676 | 27.—.R & 170.L.K | 2.36E−01 | 3.42E−02 |
| | & 224.G.S | | |
| 592 | 304.M.T | 2.19E−01 | 3.73E−02 |
| 788 | 891.S.Q | 2.18E−01 | 3.43E−02 |
| 583 | 169.L.K | 2.17E−01 | 3.66E−02 |
| 555 | 171.A.D | 2.14E−01 | 3.73E−02 |
| 515 | — | 2.09E−01 | 3.82E−02 |
| 569 | 9.K.G | 2.08E−01 | 3.12E−02 |
| 787 | 826.V.M | 2.07E−01 | 3.45E−02 |
| 561 | 5.—.G | 1.98E−01 | 3.41E−02 |
| 577 | 64.R.Q | 1.94E−01 | 3.48E−02 |
| 585 | 171.A.S | 1.94E−01 | 3.40E−02 |
| 572 | 35.R.P | 1.89E−01 | 3.95E−02 |
| 536 | 224.G.T | 1.88E−01 | 3.43E−02 |
| 656 | 887.T.D | 1.87E−01 | 3.34E−02 |
| 559 | 4.I.G | 1.87E−01 | 3.22E−02 |
| 777 | 169.L.Q | 1.84E−01 | 3.36E−02 |
| 584 | 171.A.Y | 1.83E−01 | 3.66E−02 |
| 779 | 372.G.I | 1.79E−01 | 3.15E−02 |
| 566 | 7.I.A | 1.77E−01 | 3.37E−02 |
| 638 | 481.E.D | 1.77E−01 | 3.37E−02 |
| 593 | 304.M.W | 1.76E−01 | 3.35E−02 |
| 568 | 8.N.S | 1.76E−01 | 3.34E−02 |
| 562 | 5.K.G | 1.74E−01 | 3.04E−02 |
| 564 | 6.—.G | 1.73E−01 | 3.32E−02 |
| 757 | 796.K.Q | 1.73E−01 | 2.94E−02 |
| 654 | 772.M.S | 1.70E−01 | 3.18E−02 |
| 760 | 797.T.V | 1.70E−01 | 3.12E−02 |
| 818 | 698.S.R | 1.67E−01 | 3.31E−02 |
| 646 | 653.—.T | 1.66E−01 | 3.06E−02 |
| 784 | 570.P.I | 1.65E−01 | 2.64E−02 |
| 762 | 793.—.P | 1.64E−01 | 2.99E−02 |
| 789 | 917.G.E | 1.61E−01 | 2.91E−02 |
| 649 | 655.—.S | 1.58E−01 | 3.13E−02 |
| 594 | 329.G.N | 1.56E−01 | 3.26E−02 |
| 604 | 342.—.A | 1.55E−01 | 2.87E−02 |
| 612 | 412.G.P | 1.55E−01 | 2.81E−02 |
| 644 | 593.Q.V | 1.52E−01 | 2.97E−02 |
| 736 | 794.P.A | 1.52E−01 | 2.85E−02 |
| 790 | 951.—.S | 1.51E−01 | 2.87E−02 |
| 780 | 389.—.V | 1.49E−01 | 3.02E−02 |
| 717 | 390.K.Q | 1.43E−01 | 2.84E−02 |
| 633 | 473.—.D | 1.41E−01 | 2.71E−02 |
| 590 | 289.K.S | 1.40E−01 | 2.92E−02 |
| 657 | 893.—.N | 1.39E−01 | 2.96E−02 |
| 643 | 593.Q.F | 1.38E−01 | 2.80E−02 |
| 544 | 232.D.G | 1.37E−01 | 3.19E−02 |
| 591 | 292.V.L | 1.37E−01 | 2.76E−02 |
| 534 | 224.G.H | 1.36E−01 | 2.24E−02 |
| 791 | 953.—.K | 1.34E−01 | 2.60E−02 |
| 781 | 390.K.E | 1.33E−01 | 2.71E−02 |
| 718 | 7.I.L | 1.32E−01 | 2.85E−02 |
| 812 | 329.G.K | 1.29E−01 | 2.97E−02 |
| 609 | 405.L.N | 1.26E−01 | 2.57E−02 |
| 758 | 791.E.N | 1.24E−01 | 2.33E−02 |
| 616 | 414.—.Y | 1.22E−01 | 2.44E−02 |
| 632 | 469.L.S | 1.22E−01 | 2.79E−02 |
| 614 | 414.—.R | 1.18E−01 | 2.32E−02 |
| 721 | 156.F.V | 1.14E−01 | 2.48E−02 |
| 611 | 408.E.Y | 1.11E−01 | 2.08E−02 |
| 622 | 420.D.G | 1.07E−01 | 2.41E−02 |
| 610 | 405.L.W | 1.06E−01 | 2.21E−02 |
| 619 | 417.K.D | 1.05E−01 | 2.59E−02 |
| 580 | 86.W.D | 1.00E−01 | 2.22E−02 |
| 602 | 339.—.Q | 9.82E−02 | 2.53E−02 |
| 537 | 224.G.A | 9.21E−02 | 2.34E−02 |
| 587 | 224.G.— | 8.18E−02 | 2.19E−02 |
| 538 | 224.G.V | 7.16E−02 | 2.16E−02 |
| 702 | 91.K.V | 6.31E−02 | 1.93E−02 |
| 824 | 611.K.Q | 4.07E−02 | 1.23E−02 |
| 631 | 469.L.K | 3.01E−02 | 1.30E−02 |
| 573 | 53.E.P | 2.65E−02 | 1.11E−02 |
| 528 | 224.G.Y | 8.98E−03 | 7.97E−03 |
| 535 | 224.G.S | 7.92E−03 | 7.31E−03 |
| Cas9 | n/a | 7.17E−03 | 8.11E−03 |

*Positions of mutations are shown relative to a CasX 515 sequence with an N-terminal methionine residue (SEQ ID NO: 49699). Each mutation is indicated by its position, reference sequence, and alt sequence, separated by ‘.’ Insertions are indicated with a ‘—’ in the reference sequence (first position), and deletions with a ‘—’ in the alt sequence (second position). Multiple individual mutations are separated by “&”.

[0919] As shown in Table 17, CasX proteins 607, 532, 676, 592, 788, 583, and 555 produced higher levels of on-target editing than did CasX 515. CasX proteins 569, 787, 561, 577, 585, and 572 also produced relatively high levels of on-target editing, with at least 90% of the activity of CasX 515 (i.e., greater than 1.88E-01 on-target editing).

[0920] Table 18 provides the level of off-target editing produced by various CasX proteins with mutations relative to CasX 515, ranked from lowest to highest activity.

TABLE 18
Average off-targeting editing activity,
ranked from lowest to highest

| | | Average | SEM |
|---|---|---|---|
| Protein | Mutation relative | off-target | off-target |
| Designation | to CasX 515* | TTC PAM | TTC PAM |
| (CasX | (Position. | editing | editing |
| protein no., | Reference. | activity | activity |
| or Cas9) | Alternative) | (fraction) | (fraction) |
| 528 | 224.G.Y | 1.73E−03 | 1.84E−03 |
| Cas9 | n/a | 2.18E−03 | 2.72E−03 |
| 535 | 224.G.S | 2.33E−03 | 2.63E−03 |
| 573 | 53.E.P | 5.01E−03 | 3.29E−03 |
| 824 | 611.K.Q | 5.86E−03 | 2.93E−03 |
| 631 | 469.L.K | 6.23E−03 | 3.45E−03 |
| 587 | 224.G.— | 1.15E−02 | 4.68E−03 |
| 538 | 224.G.V | 1.45E−02 | 7.45E−03 |
| 702 | 91.K.V | 1.52E−02 | 6.87E−03 |
| 812 | 329.G.K | 1.58E−02 | 7.16E−03 |
| 580 | 86.W.D | 1.78E−02 | 6.27E−03 |
| 619 | 417.K.D | 1.94E−02 | 6.80E−03 |
| 610 | 405.L.W | 2.08E−02 | 6.80E−03 |
| 758 | 791.E.N | 2.11E−02 | 7.51E−03 |
| 721 | 156.F.V | 2.12E−02 | 6.94E−03 |
| 591 | 292.V.L | 2.15E−02 | 7.81E−03 |
| 537 | 224.G.A | 2.18E−02 | 8.82E−03 |
| 590 | 289.K.S | 2.28E−02 | 8.23E−03 |
| 622 | 420.D.G | 2.30E−02 | 7.70E−03 |
| 632 | 469.L.S | 2.34E−02 | 7.92E−03 |
| 633 | 473.—.D | 2.36E−02 | 8.67E−03 |
| 614 | 414.—.R | 2.38E−02 | 7.57E−03 |
| 594 | 329.G.N | 2.41E−02 | 9.14E−03 |
| 643 | 593.Q.F | 2.46E−02 | 8.93E−03 |
| 609 | 405.L.N | 2.47E−02 | 8.24E−03 |
| 781 | 390.K.E | 2.48E−02 | 8.34E−03 |
| 616 | 414.—.Y | 2.48E−02 | 7.29E−03 |
| 602 | 339.—.Q | 2.55E−02 | 9.70E−03 |
| 791 | 953.—.K | 2.71E−02 | 7.83E−03 |
| 593 | 304.M.W | 2.87E−02 | 1.04E−02 |
| 644 | 593.Q.V | 2.88E−02 | 9.11E−03 |
| 657 | 893.—.N | 2.89E−02 | 1.02E−02 |
| 717 | 390.K.Q | 2.99E−02 | 1.00E−02 |
| 611 | 408.E.Y | 3.00E−02 | 8.86E−03 |
| 572 | 35.R.P | 3.06E−02 | 1.07E−02 |
| 780 | 389.—.V | 3.07E−02 | 9.83E−03 |
| 818 | 698.S.R | 3.15E−02 | 1.02E−02 |
| 638 | 481.E.D | 3.16E−02 | 1.01E−02 |
| 584 | 171.A.Y | 3.39E−02 | 1.07E−02 |
| 790 | 951.—.S | 3.47E−02 | 1.02E−02 |
| 718 | 7.I.L | 3.47E−02 | 1.06E−02 |
| 649 | 655.—.S | 3.54E−02 | 1.09E−02 |
| 562 | 5.K.G | 3.56E−02 | 1.09E−02 |
| 784 | 570.P.I | 3.60E−02 | 9.80E−03 |
| 736 | 794.P.A | 3.61E−02 | 1.03E−02 |
| 789 | 917.G.E | 3.63E−02 | 1.11E−02 |
| 544 | 232.D.G | 3.64E−02 | 1.15E−02 |
| 612 | 412.G.P | 3.64E−02 | 1.12E−02 |
| 604 | 342.—.A | 3.66E−02 | 1.11E−02 |
| 564 | 6.—.G | 3.67E−02 | 1.07E−02 |
| 568 | 8.N.S | 3.91E−02 | 1.15E−02 |
| 779 | 372.G.I | 3.98E−02 | 1.20E−02 |
| 760 | 797.T.V | 3.99E−02 | 1.09E−02 |
| 777 | 169.L.Q | 4.11E−02 | 1.16E−02 |
| 566 | 7.I.A | 4.20E−02 | 1.15E−02 |
| 569 | 9.K.G | 4.29E−02 | 1.03E−02 |
| 577 | 64.R.Q | 4.38E−02 | 1.28E−02 |
| 536 | 224.G.T | 4.44E−02 | 1.32E−02 |
| 656 | 887.T.D | 4.54E−02 | 1.22E−02 |
| 646 | 653.—.T | 4.56E−02 | 1.21E−02 |
| 757 | 796.K.Q | 4.60E−02 | 1.25E−02 |
| 559 | 4.I.G | 4.71E−02 | 1.19E−02 |
| 585 | 171.A.S | 4.73E−02 | 1.24E−02 |
| 515 | — | 4.85E−02 | 1.33E−02 |
| 762 | 793.—.P | 4.91E−02 | 1.25E−02 |
| 561 | 5.—.G | 4.92E−02 | 1.37E−02 |
| 788 | 891.S.Q | 5.50E−02 | 1.45E−02 |
| 555 | 171.A.D | 5.53E−02 | 1.52E−02 |
| 787 | 826.V.M | 5.68E−02 | 1.33E−02 |
| 654 | 772.M.S | 5.84E−02 | 1.61E−02 |
| 583 | 169.L.K | 5.95E−02 | 1.48E−02 |
| 592 | 304.M.T | 5.97E−02 | 1.48E−02 |
| 534 | 224.G.H | 6.37E−02 | 1.52E−02 |
| 676 | 27.—.R & 170.L.K | 7.13E−02 | 1.68E−02 |
| | & 224.G.S | | |
| 607 | 398.Y.T | 8.25E−02 | 1.82E−02 |
| 532 | 27.—.R | 8.70E−02 | 1.73E−02 |

*Positions of mutations are shown relative to a CasX 515 sequence with an N-terminal methionine residue (SEQ ID NO: 49699). Each mutation is indicated by its position, reference sequence, and alt sequence, separated by ‘.’ Insertions are indicated with a ‘—’ in the reference sequence (first position), and deletions with a ‘—’ in the alt sequence (second position). Multiple individual mutations are separated by “&”.

[0921] As shown in Table 18, many of the tested CasX proteins showed lower levels of off-target editing than did CasX 515. For example, consistent with the results presented in Example 2, CasX 812 again produced relatively low levels of off-target editing. Further, some of the tested CasX proteins showed even lower levels of off-target editing than did CasX 812 (specifically, CasX 528, 535, 573, 824, 631, 587, 538, and 702)

[0922] Based on these results, a set of mutation conferring a high degree of editing activity and/or specificity was chosen for introducing in pairs into CasX 515. First, high activity mutations were defined as those that showed a level of on-target editing equal to at least 87.3% of the level of on-target editing by CasX 515. CasX 607, 532, 676, 592, 788, 583, 555, 569, 787, 561, 577, 585, 572, 536, 656, 559, 777, and 584 met this threshold, and were therefore selected as potential activity-enhancing mutations (see Table 19). Second, high specificity mutations were defined as those producing 80% or lower of the level of off-target editing produced by CasX 515, while maintaining at least 79.95% of the on-target editing activity of CasX 515. This 80% on-target editing activity requirement was implemented to avoid selecting mutations that were simply loss-of-function mutations and would therefore not be expected to be useful as gene editors. CasX 593, 572, 818, 638, 584, 562, and 784 met these criteria, and were therefore selected as potential specificity-enhancing mutations (see Table 19).

[0923] In total, 22 individual mutations were chosen as candidates for introducing in pairs into CasX 515 and testing for improved properties, as described in Example 7, below. The positions of the individual mutations relative to full-length CasX 515 protein, as well as amino acid sequences of full-length CasX proteins with the individual mutations, are provided in Table 19. Table 20, below, shows the amino acid sequences and coordinates of the domains of CasX 515, and Table 21 shows the positions of the 22 individual mutations within the domains of CasX 515, as well as the amino acid sequences of domains with each individual mutations.

TABLE 19
Summary of positions of single mutations
within the CasX 515 protein

| | | Mutation relative | Full-length |
|---|---|---|---|
| | | to CasX 515* | CasX |
| CasX | | (Position. | amino acid |
| protein | | Reference. | sequence |
| no. | Phenotype | Alternative) | (SEQ ID NO) |
| 532 | Activity | 27.—.R | 495 |
| 536 | Activity | 224.G.T | 49695 |
| 555 | Activity | 171.A.D | 49630 |
| 559 | Activity | 4.I.G | 49631 |
| 561 | Activity | 5.—.G | 49632 |
| 562 | Specificity | 5.K.G | 49633 |
| 564 | Specificity | 6.—.G | 49634 |
| 569 | Activity | 9.K.G | 49637 |
| 572 | Activity | 35.R.P | 49638 |
| | (and specificity) | | |
| 577 | Activity | 64.R.Q | 49638 |
| 583 | Activity | 169.L.K | 49640 |
| 584 | Activity | 171.A.Y | 49642 |
| | (and specificity) | | |
| 585 | Activity | 171.A.S | 49643 |
| 592 | Activity | 304.M.T | 49643 |
| 593 | Specificity | 304.M.W | 493 |
| 607 | Activity | 398.Y.T | 49651 |
| 638 | Specificity | 481.E.D | 49653 |
| 656 | Activity | 887.T.D | 49659 |
| 777 | Activity | 169.L.Q | 49689 |
| 787 | Activity | 826.V.M | 49667 |
| 788 | Activity | 891.S.Q | 49668 |
| 818 | Specificity | 698.S.R | 272 |

*Positions of mutations are shown relative to a CasX 515 sequence with an N-terminal methionine residue (SEQ ID NO: 49699). Each mutation is indicated by its position, reference sequence, and alt sequence, separated by ‘.’ Insertions are indicated with a ‘—’ in the reference sequence (first position), and deletions with a ‘—’ in the alt sequence (second position). Multiple individual mutations are separated by “&”.

TABLE 20
CasX 515 domain sequences and coordinates

| | SEQ | | |
|---|---|---|---|
| Domain | ID NO | Amino Acid Sequence | Coordinates |
| N-terminal | — | M | 1 |
| methionine | | | |
| OBD-I | 295 | QEIKRINKIRRRLVKDSNTKKAGKTGPMKTLLVRVMTPDLRERLEN | 2-57 |
| | | LRKKPENIPQ | |
| Helical I-I | 296 | PISNTSRANLNKLLTDYTEMKKAILHVYWEEFQKDPVGLMSRVA | 58-101 |
| NTSB | 297 | QPASKKIDQNKLKPEMDEKGNLTTAGFACSQCGQPLFVYKLEQVSE | 102-192 |
| | | KGKAYTNYFGRCNVAEHEKLILLAQLKPEKDSDEAVTYSLGKFGQ | |
| Helical I-II | 298 | RALDFYSIHVTKESTHPVKPLAQIAGNRYASGPVGKALSDACMGTI | 193-333 |
| | | ASFLSKYQDIIIEHQKVVKGNQKRLESLRELAGKENLEYPSVTLPP | |
| | | QPHTKEGVDAYNEVIARVRMWVNLNLWQKLKLSRDDAKPLLRLKGF | |
| | | PSF | |
| Helical II | 299 | PLVERQANEVDWWDMVCNVKKLINEKKEDGKVEWQNLAGYKRQEAL | 334-501 |
| | | RPYLSSEEDRKKGKKFARYQLGDLLLHLEKKHGEDWGKVYDEAWER | |
| | | IDKKVEGLSKHIKLEEERRSEDAQSKAALTDWLRAKASFVIEGLKE | |
| | | ADKDEFCRCELKLQKWYGDLRGKPFAIEAE | |
| OBD-II | 300 | NSILDISGFSKQYNCAFIWQKDGVKKLNLYLIINYFKGGKLRFKKI | 502-647 |
| | | KPEAFEANRFYTVINKKSGEIVPMEVNENFDDPNLIILPLAFGKRQ | |
| | | GREFIWNDLLSLETGSLKLANGRVIEKTLYNRRTRQDEPALFVALT | |
| | | FERREVLD | |
| RuvC-I | 301 | SSNIKPMNLIGVDRGENIPAVIALTDPEGCPLSRFKDSLGNPTHIL | 648-811 |
| | | RIGESYKEKQRTIQAKKEVEQRRAGGYSRKYASKAKNLADDMVRNT | |
| | | ARDLLYYAVTQDAMLIFENLSRGFGRQGKRTEMAERQYTRMEDWLT | |
| | | AKLAYEGLPSKTYLSKTLAQYTSKTC | |
| TSL | 302 | SNCGFTITSADYDRVLEKLKKTATGWMTTINGKELKVEGQITYYNR | 812-921 |
| | | YKRQNVVKDLSVELDRLSEESVNNDISSWTKGRSGEALSLLKKRES | |
| | | HRPVQEKFVCLNCGFETH | |
| RuvC-II | 303 | ADEQAALNIARSWLFLRSQEYKKYQTNKTTGNTDKRAFVETWQSFY | 922-979 |
| | | RKKLKEVWKPAV | |

TABLE 21
Summary of positions of single mutations within CasX 515 protein domains

| | | Position of | | |
|---|---|---|---|---|
| | | mutation within | | Amino acid |
| | | CasX 515 domain* | | sequence of |
| CasX | | (Position. | | mutated |
| protein | Mutated | Reference. | Amino acid sequence of | domain |
| no. | domain | Alternative) | mutated domain† | (SEQ ID NO) |
| 532 | OBD-I | 26.—.R | QEIKRINKIRRRLVKDSNTKKAGKTRGPMK | 49800 |
| | | | TLLVRVMTPDLRERLENLRKKPENIPQ | |
| 536 | Helical I-II | 32.G.T | RALDFYSIHVTKESTHPVKPLAQIAGNRYA | 49801 |
| | | | STPVGKALSDACMGTIASELSKYQDIIIEH | |
| | | | QKVVKGNQKRLESLRELAGKENLEYPSVTL | |
| | | | PPQPHTKEGVDAYNEVIARVRMWVNLNLWQ | |
| | | | KLKLSRDDAKPLLRLKGFPSF | |
| 555 | NTSB | 70.A.D | QPASKKIDQNKLKPEMDEKGNLTTAGFACS | 49802 |
| | | | QCGQPLFVYKLEQVSEKGKAYTNYFGRCNV | |
| | | | AEHEKLILLDQLKPEKDSDEAVTYSLGKFG | |
| | | | Q | |
| 559 | OBD-I | 3.I.G | QEGKRINKIRRRLVKDSNTKKAGKTGPMKT | 49803 |
| | | | LLVRVMTPDLRERLENLRKKPENIPQ | |
| 561 | OBD-I | 4.—.G | QEIGKRINKIRRRLVKDSNTKKAGKTGPMK | 49804 |
| | | | TLLVRVMTPDLRERLENLRKKPENIPQ | |
| 562 | OBD-I | 4.K.G | QEIGRINKIRRRLVKDSNTKKAGKTGPMKT | 49805 |
| | | | LLVRVMTPDLRERLENLRKKPENIPQ | |
| 564 | OBD-I | 5.—.G | QEIKGRINKIRRRLVKDSNTKKAGKTGPMK | 49806 |
| | | | TLLVRVMTPDLRERLENLRKKPENIPQ | |
| 569 | OBD-I | 8.K.G | QEIKRINGIRRRLVKDSNTKKAGKTGPMKT | 49807 |
| | | | LLVRVMTPDLRERLENLRKKPENIPQ | |
| 572 | OBD-I | 34.R.P | QEIKRINKIRRRLVKDSNTKKAGKTGPMKT | 49808 |
| | | | LLVPVMTPDLRERLENLRKKPENIPQ | |
| 577 | Helical I-I | 7.R.Q | PISNTSQANLNKLLTDYTEMKKAILHVYWE | 49809 |
| | | | EFQKDPVGLMSRVA | |
| 583 | NTSB | 68.L.K | QPASKKIDQNKLKPEMDEKGNLTTAGFACS | 49810 |
| | | | QCGQPLFVYKLEQVSEKGKAYTNYFGRCNV | |
| | | | AEHEKLIKLAQLKPEKDSDEAVTYSLGKFG | |
| | | | Q | |
| 584 | NTSB | 70.A.Y | QPASKKIDQNKLKPEMDEKGNLTTAGFACS | 49811 |
| | | | QCGQPLFVYKLEQVSEKGKAYTNYFGRCNV | |
| | | | AEHEKLILLYQLKPEKDSDEAVTYSLGKFG | |
| | | | Q | |
| 585 | NTSB | 70.A.S | QPASKKIDQNKLKPEMDEKGNLTTAGFACS | 49812 |
| | | | QCGQPLFVYKLEQVSEKGKAYTNYFGRCNV | |
| | | | AEHEKLILLSQLKPEKDSDEAVTYSLGKFG | |
| | | | Q | |
| 592 | Helical I-II | 112.M.T | RALDFYSIHVTKESTHPVKPLAQIAGNRYA | 49813 |
| | | | SGPVGKALSDACMGTIASFLSKYQDIIIEH | |
| | | | QKVVKGNQKRLESLRELAGKENLEYPSVTL | |
| | | | PPQPHTKEGVDAYNEVIARVRTWVNLNLWQ | |
| | | | KLKLSRDDAKPLLRLKGFPSF | |
| 593 | Helical I-II | 112.M.W | RALDFYSIHVTKESTHPVKPLAQIAGNRYA | 49814 |
| | | | SGPVGKALSDACMGTIASFLSKYQDIIIEH | |
| | | | QKVVKGNQKRLESLRELAGKENLEYPSVTL | |
| | | | PPQPHTKEGVDAYNEVIARVRWWVNLNLWQ | |
| | | | KLKLSRDDAKPLLRLKGFPSF | |
| 607 | Helical II | 65.Y.T | PLVERQANEVDWWDMVCNVKKLINEKKEDG | 49815 |
| | | | KVFWQNLAGYKRQEALRPYLSSEEDRKKGK | |
| | | | KFARTQLGDLLLHLEKKHGEDWGKVYDEAW | |
| | | | ERIDKKVEGLSKHIKLEEERRSEDAQSKAA | |
| | | | LTDWLRAKASFVIEGLKEADKDEFCRCELK | |
| | | | LQKWYGDLRGKPFAIEAE | |
| 638 | Helical II | 148.E.D | PLVERQANEVDWWDMVCNVKKLINEKKEDG | 49816 |
| | | | KVEWQNLAGYKRQEALRPYLSSEEDRKKGK | |
| | | | KFARYQLGDLLLHLEKKHGEDWGKVYDEAW | |
| | | | ERIDKKVEGLSKHIKLEEERRSEDAQSKAA | |
| | | | LTDWLRAKASFVIEGLKEADKDEFCRCDLK | |
| | | | LQKWYGDLRGKPFAIEAE | |
| 656 | TSL | 76.T.D | SNCGFTITSADYDRVLEKLKKTATGWMTTI | 49817 |
| | | | NGKELKVEGQITYYNRYKRQNVVKDLSVEL | |
| | | | DRLSEESVNNDISSWDKGRSGEALSLLKKR | |
| | | | FSHRPVQEKFVCLNCGFETH | |
| 777 | NTSB | 68.L.Q | QPASKKIDQNKLKPEMDEKGNLTTAGFACS | 49818 |
| | | | QCGQPLFVYKLEQVSEKGKAYTNYFGRCNV | |
| | | | AEHEKLIQLAQLKPEKDSDEAVTYSLGKFG | |
| | | | Q | |
| 787 | TSL | 15.V.M | SNCGFTITSADYDRMLEKLKKTATGWMTTI | 49819 |
| | | | NGKELKVEGQITYYNRYKRQNVVKDLSVEL | |
| | | | DRLSEESVNNDISSWTKGRSGEALSLLKKR | |
| | | | FSHRPVQEKFVCLNCGFETH | |
| 788 | TSL | 80.S.Q | SNCGFTITSADYDRVLEKLKKTATGWMTTI | 49820 |
| | | | NGKELKVEGQITYYNRYKRQNVVKDLSVEL | |
| | | | DRLSEESVNNDISSWTKGRQGEALSLLKKR | |
| | | | FSHRPVQEKFVCLNCGFETH | |
| 818 | RuvC-I | 51.S.R | SSNIKPMNLIGVDRGENIPAVIALTDPEGC | 49821 |
| | | | PLSRFKDSLGNPTHILRIGERYKEKQRTIQ | |
| | | | AKKEVEQRRAGGYSRKYASKAKNLADDMVR | |
| | | | NTARDLLYYAVTQDAMLIFENLSRGFGRQG | |
| | | | KRTEMAERQYTRMEDWLTAKLAYEGLPSKT | |
| | | | YLSKTLAQYTSKTC | |

*Positions of mutations within domains are shown relative to the CasX 515 domain sequences provided in Table 20, above. Each mutation is indicated by its position, reference sequence, and alt sequence, separated by ‘.’ Insertions are indicated with a ‘—’ in the reference sequence (first position), and deletions with a ‘—’ in the alt sequence (second position).
†Mutated residues are bolded and underlined.

### Example 7: Engineered CasX Proteins with Pairs of Mutations Relative to CasX 515

[0924] Engineered CasX proteins were generated with pairs of mutations relative to CasX 515, and assessed for their on and off-target gene editing activity.

### Materials and Methods

[0925] Pairs of mutations listed in Tables 19 and 21, above, were introduced into the CasX 515 amino acid sequence to generate 161 amino acid sequences of engineered CasX proteins. The pairs of mutations and full-length amino acid sequences of the 161 engineered CasX proteins tested are listed in Tables 22, and Table 23 provides the amino acid sequences of each of the domains of the 161 engineered CasX proteins.

TABLE 22
Pairs of mutations and amino acid sequences
of engineered CasX proteins

| Mutations relative | | |
|---|---|---|
| to CasX 515* | | Full-length |
| (Position. | Phenotypes of | CasX amino |
| Reference. | single mutations | acid |
| Alternative) | (see Example 6) | SEQ ID NO |
| 4.I.G & 64.R.Q | Activity + activity | 28006 |
| 4.I.G & 169.L.K | Activity + activity | 28008 |
| 4.I.G & 169.L.Q | Activity + activity | 29119 |
| 4.I.G & 171.A.D | Activity + activity | 27952 |
| 4.I.G & 171.A.Y | Activity + activity | 28009 |
| 4.I.G & 171.A.S | Activity + activity | 28010 |
| 4.I.G & 224.G.T | Activity + activity | 31244 |
| 4.I.G & 304.M.T | Activity + activity | 28014 |
| 4.I.G & 398.Y.T | Activity + activity | 28018 |
| 4.I.G & 826.V.M | Activity + activity | 28035 |
| 4.I.G & 887.T.D | Activity + activity | 28027 |
| 4.I.G & 891.S.Q | Activity + activity | 28036 |
| 5.—.G & 64.R.Q | Activity + activity | 28050 |
| 5.—.G & 169.L.K | Activity + activity | 28052 |
| 5.—.G & 169.L.Q | Activity + activity | 29140 |
| 5.—.G & 171.A.D | Activity + activity | 27953 |
| 5.—.G & 171.A.Y | Activity + activity | 28053 |
| 5.—.G & 171.A.S | Activity + activity | 28054 |
| 5.—.G & 224.G.T | Activity + activity | 31592 |
| 5.—.G & 304.M.T | Activity + activity | 28058 |
| 5.—.G & 398.Y.T | Activity + activity | 28062 |
| 5.—.G & 826.V.M | Activity + activity | 28079 |
| 5.—.G & 887.T.D | Activity + activity | 28071 |
| 5.—.G & 891.S.Q | Activity + activity | 28080 |
| 9.K.G & 64.R.Q | Activity + activity | 28255 |
| 9.K.G & 169.L.K | Activity + activity | 28257 |
| 9.K.G & 169.L.Q | Activity + activity | 29245 |
| 9.K.G & 171.A.D | Activity + activity | 27958 |
| 9.K.G & 171.A.Y | Activity + activity | 28258 |
| 9.K.G & 171.A.S | Activity + activity | 28259 |
| 9.K.G & 224.G.T | Activity + activity | 33212 |
| 9.K.G & 304.M.T | Activity + activity | 28263 |
| 9.K.G & 398.Y.T | Activity + activity | 28267 |
| 9.K.G & 826.V.M | Activity + activity | 28284 |
| 9.K.G & 887.T.D | Activity + activity | 28276 |
| 9.K.G & 891.S.Q | Activity + activity | 28285 |
| 27.—.R & 64.R.Q | Activity + activity | 27868 |
| 27.—.R & 169.L.K | Activity + activity | 27870 |
| 27.—.R & 169.L.Q | Activity + activity | 29056 |
| 27.—.R & 171.A.D | Activity + activity | 27858 |
| 27.—.R & 171.A.Y | Activity + activity | 27871 |
| 27.—.R & 171.A.S | Activity + activity | 27872 |
| 27.—.R & 224.G.T | Activity + activity | 30196 |
| 27.—.R & 304.M.T | Activity + activity | 27876 |
| 27.—.R & 398.Y.T | Activity + activity | 27880 |
| 27.—.R & 826.V.M | Activity + activity | 27897 |
| 27.—.R & 887.T.D | Activity + activity | 27889 |
| 27.—.R & 891.S.Q | Activity + activity | 27898 |
| 35.R.P & 64.R.Q | Activity + activity | 28293 |
| 35.R.P & 169.L.K | Activity + activity | 28295 |
| 35.R.P & 169.L.Q | Activity + activity | 29266 |
| 35.R.P & 171.A.D | Activity + activity | 27959 |
| 35.R.P & 171.A.Y | Activity + activity | 28296 |
| 35.R.P & 171.A.S | Activity + activity | 28297 |
| 35.R.P & 224.G.T | Activity + activity | 33512 |
| 35.R.P & 304.M.T | Activity + activity | 28301 |
| 35.R.P & 398.Y.T | Activity + activity | 28305 |
| 35.R.P & 826.V.M | Activity + activity | 28322 |
| 35.R.P & 887.T.D | Activity + activity | 28314 |
| 35.R.P & 891.S.Q | Activity + activity | 28323 |
| 887.T.D & 891.S.Q | Activity + activity | 28926 |
| 64.R.Q & 169.L.K | Activity + activity | 28368 |
| 64.R.Q & 169.L.Q | Activity + activity | 29308 |
| 64.R.Q & 171.A.D | Activity + activity | 27961 |
| 64.R.Q & 171.A.Y | Activity + activity | 28369 |
| 64.R.Q & 171.A.S | Activity + activity | 28370 |
| 64.R.Q & 224.G.T | Activity + activity | 34088 |
| 64.R.Q & 304.M.T | Activity + activity | 28374 |
| 64.R.Q & 398.Y.T | Activity + activity | 28378 |
| 64.R.Q & 826.V.M | Activity + activity | 28395 |
| 64.R.Q & 887.T.D | Activity + activity | 28387 |
| 64.R.Q & 891.S.Q | Activity + activity | 28396 |
| 169.L.K & 171.A.D | Activity + activity | 27963 |
| 169.L.K & 171.A.Y | Activity + activity | 28438 |
| 169.L.K & 171.A.S | Activity + activity | 28439 |
| 169.L.K & 224.G.T | Activity + activity | 34631 |
| 169.L.K & 304.M.T | Activity + activity | 28443 |
| 169.L.K & 398.Y.T | Activity + activity | 28447 |
| 169.L.K & 826.V.M | Activity + activity | 28464 |
| 169.L.K & 887.T.D | Activity + activity | 28456 |
| 169.L.K & 891.S.Q | Activity + activity | 28465 |
| 169.L.Q & 171.A.D | Activity + activity | 29098 |
| 169.L.Q & 171.A.Y | Activity + activity | 29371 |
| 169.L.Q & 171.A.S | Activity + activity | 29392 |
| 169.L.Q & 224.G.T | Activity + activity | 43373 |
| 169.L.Q & 304.M.T | Activity + activity | 29476 |
| 169.L.Q & 398.Y.T | Activity + activity | 29560 |
| 169.L.Q & 826.V.M | Activity + activity | 29917 |
| 169.L.Q & 887.T.D | Activity + activity | 29749 |
| 169.L.Q & 891.S.Q | Activity + activity | 29938 |
| 171.A.D & 224.G.T | Activity + activity | 30888 |
| 171.A.D & 304.M.T | Activity + activity | 27969 |
| 171.A.D & 398.Y.T | Activity + activity | 27973 |
| 171.A.D & 826.V.M | Activity + activity | 27990 |
| 171.A.D & 887.T.D | Activity + activity | 27982 |
| 171.A.D & 891.S.Q | Activity + activity | 27991 |
| 171.A.Y & 224.G.T | Activity + activity | 34870 |
| 171.A.Y & 304.M.T | Activity + activity | 28477 |
| 171.A.Y & 398.Y.T | Activity + activity | 28481 |
| 171.A.Y & 826.V.M | Activity + activity | 28498 |
| 171.A.Y & 887.T.D | Activity + activity | 28490 |
| 171.A.Y & 891.S.Q | Activity + activity | 28499 |
| 171.A.S & 224.G.T | Activity + activity | 35139 |
| 171.A.S & 304.M.T | Activity + activity | 28511 |
| 171.A.S & 398.Y.T | Activity + activity | 28515 |
| 171.A.S & 826.V.M | Activity + activity | 28532 |
| 171.A.S & 887.T.D | Activity + activity | 28524 |
| 171.A.S & 891.S.Q | Activity + activity | 28533 |
| 4.I.G & 35.R.P | Activity + activity | 28004 |
| 224.G.T & 304.M.T | Activity + activity | 35402 |
| 224.G.T & 398.Y.T | Activity + activity | 35422 |
| 224.G.T & 826.V.M | Activity + activity | 35507 |
| 224.G.T & 887.T.D | Activity + activity | 35467 |
| 224.G.T & 891.S.Q | Activity + activity | 35512 |
| 5.—.G & 35.R.P | Activity + activity | 28048 |
| 4.I.G & 27.—.R | Activity + activity | 27859 |
| 304.M.T & 398.Y.T | Activity + activity | 28633 |
| 304.M.T & 826.V.M | Activity + activity | 28650 |
| 304.M.T & 887.T.D | Activity + activity | 28642 |
| 304.M.T & 891.S.Q | Activity + activity | 28651 |
| 9.K.G & 35.R.P | Activity + activity | 28253 |
| 5.—.G & 27.—.R | Activity + activity | 49746 |
| 4.I.G & 9.K.G | Activity + activity | 28003 |
| 398.Y.T & 826.V.M | Activity + activity | 28753 |
| 398.Y.T & 887.T.D | Activity + activity | 28745 |
| 398.Y.T & 891.S.Q | Activity + activity | 28754 |
| 27.—.R & 35.R.P | Activity + activity | 27866 |
| 9.K.G & 27.—.R | Activity + activity | 27865 |
| 5.—.G & 9.K.G | Activity + activity | 28047 |
| 4.I.G & 5.—.G | Activity + activity | 27998 |
| 826.V.M & 887.T.D | Activity + activity | 28925 |
| 826.V.M & 891.S.Q | Activity + activity | 29011 |
| 5.K.G & 27.—.R | Activity + specificity | 27861 |
| 5.K.G & 169.L.K | Activity + specificity | 28095 |
| 5.K.G & 171.A.D | Activity + specificity | 27954 |
| 5.K.G & 304.M.T | Activity + specificity | 28101 |
| 5.K.G & 398.Y.T | Activity + specificity | 28105 |
| 5.K.G & 891.S.Q | Activity + specificity | 28123 |
| 6.—.G & 27.—.R | Activity + specificity | 49747 |
| 6.—.G & 169.L.K | Activity + specificity | 28137 |
| 6.—.G & 171.A.D | Activity + specificity | 27955 |
| 6.—.G & 304.M.T | Activity + specificity | 28143 |
| 6.—.G & 398.Y.T | Activity + specificity | 28147 |
| 6.—.G & 891.S.Q | Activity + specificity | 28165 |
| 304.M.W & 27.—.R | Activity + specificity | 27877 |
| 304.M.W & 169.L.K | Activity + specificity | 28444 |
| 304.M.W & 171.A.D | Activity + specificity | 27970 |
| 304.M.W & 398.Y.T | Activity + specificity | 28661 |
| 304.M.W & 891.S.Q | Activity + specificity | 28679 |
| 481.E.D & 27.—.R | Activity + specificity | 27882 |
| 481.E.D & 169.L.K | Activity + specificity | 28449 |
| 481.E.D & 171.A.D | Activity + specificity | 27975 |
| 481.E.D & 304.M.T | Activity + specificity | 28635 |
| 481.E.D & 398.Y.T | Activity + specificity | 28738 |
| 481.E.D & 891.S.Q | Activity + specificity | 28799 |
| 698.S.R & 27.—.R | Activity + specificity | 27903 |
| 698.S.R & 169.L.K | Activity + specificity | 28470 |
| 698.S.R & 171.A.D | Activity + specificity | 27996 |
| 698.S.R & 304.M.T | Activity + specificity | 28656 |
| 698.S.R & 398.Y.T | Activity + specificity | 28759 |
| 698.S.R & 891.S.Q | Activity + specificity | 29022 |

*Positions of mutations are shown relative to a CasX 515 sequence with an N-terminal methionine residue (SEQ ID NO: 49699). Each mutation is indicated by its position, reference sequence, and alt sequence, separated by ‘.’ Insertions are indicated with a ‘—’ in the reference sequence (first position), and deletions with a ‘—’ in the alt sequence (second position). Multiple individual mutations are separated by “&”.

TABLE 23
Amino acid sequences of domains of engineered CasX proteins, N- to C-terminus

| Mutations relative | | | | | | | | | |
|---|---|---|---|---|---|---|---|---|---|
| to CasX 515* | | | | | | | | | |
| (Position. Reference. | Amino acid sequences of domains of engineered CasX proteins (SEQ ID NOs) | | | | | | | | |
| Alternative) | OBD-I | Helical I-I | NTSB | Helical I-II | Helical II | OBD-II | RuvC-I | TSL | RuvC-II |
| None (non-mutated | 295 | 296 | 297 | 298 | 299 | 300 | 301 | 302 | 303 |
| CasX 515) | | | | | | | | | |
| 4.I.G & 64.R.Q | 49803 | 49809 | 297 | 298 | 299 | 300 | 301 | 302 | 303 |
| 4.I.G & 169.L.K | 49803 | 296 | 49810 | 298 | 299 | 300 | 301 | 302 | 303 |
| 4.I.G & 169.L.Q | 49803 | 296 | 49818 | 298 | 299 | 300 | 301 | 302 | 303 |
| 4.I.G & 171.A.D | 49803 | 296 | 49802 | 298 | 299 | 300 | 301 | 302 | 303 |
| 4.I.G & 171.A.Y | 49803 | 296 | 49811 | 298 | 299 | 300 | 301 | 302 | 303 |
| 4.I.G & 171.A.S | 49803 | 296 | 49812 | 298 | 299 | 300 | 301 | 302 | 303 |
| 4.I.G & 224.G.T | 49803 | 296 | 297 | 49801 | 299 | 300 | 301 | 302 | 303 |
| 4.I.G & 304.M.T | 49803 | 296 | 297 | 49813 | 299 | 300 | 301 | 302 | 303 |
| 4.I.G & 398.Y.T | 49803 | 296 | 297 | 298 | 49815 | 300 | 301 | 302 | 303 |
| 4.I.G & 826.V.M | 49803 | 296 | 297 | 298 | 299 | 300 | 301 | 49819 | 303 |
| 4.I.G & 887.T.D | 49803 | 296 | 297 | 298 | 299 | 300 | 301 | 49817 | 303 |
| 4.I.G & 891.S.Q | 49803 | 296 | 297 | 298 | 299 | 300 | 301 | 49820 | 303 |
| 5.—.G & 64.R.Q | 49804 | 49809 | 297 | 298 | 299 | 300 | 301 | 302 | 303 |
| 5.—.G & 169.L.K | 49804 | 296 | 49810 | 298 | 299 | 300 | 301 | 302 | 303 |
| 5.—.G & 169.L.Q | 49804 | 296 | 49818 | 298 | 299 | 300 | 301 | 302 | 303 |
| 5.—.G & 171.A.D | 49804 | 296 | 49802 | 298 | 299 | 300 | 301 | 302 | 303 |
| 5.—.G & 171.A.Y | 49804 | 296 | 49811 | 298 | 299 | 300 | 301 | 302 | 303 |
| 5.—.G & 171.A.S | 49804 | 296 | 49812 | 298 | 299 | 300 | 301 | 302 | 303 |
| 5.—.G & 224.G.T | 49804 | 296 | 297 | 49801 | 299 | 300 | 301 | 302 | 303 |
| 5.—.G & 304.M.T | 49804 | 296 | 297 | 49813 | 299 | 300 | 301 | 302 | 303 |
| 5.—.G & 398.Y.T | 49804 | 296 | 297 | 298 | 49815 | 300 | 301 | 302 | 303 |
| 5.—.G & 826.V.M | 49804 | 296 | 297 | 298 | 299 | 300 | 301 | 49819 | 303 |
| 5.—.G & 887.T.D | 49804 | 296 | 297 | 298 | 299 | 300 | 301 | 49817 | 303 |
| 5.—.G & 891.S.Q | 49804 | 296 | 297 | 298 | 299 | 300 | 301 | 49820 | 303 |
| 9.K.G & 64.R.Q | 49807 | 49809 | 297 | 298 | 299 | 300 | 301 | 302 | 303 |
| 9.K.G & 169.L.K | 49807 | 296 | 49810 | 298 | 299 | 300 | 301 | 302 | 303 |
| 9.K.G & 169.L.Q | 49807 | 296 | 49818 | 298 | 299 | 300 | 301 | 302 | 303 |
| 9.K.G & 171.A.D | 49807 | 296 | 49802 | 298 | 299 | 300 | 301 | 302 | 303 |
| 9.K.G & 171.A.Y | 49807 | 296 | 49811 | 298 | 299 | 300 | 301 | 302 | 303 |
| 9.K.G & 171.A.S | 49807 | 296 | 49812 | 298 | 299 | 300 | 301 | 302 | 303 |
| 9.K.G & 224.G.T | 49807 | 296 | 297 | 49801 | 299 | 300 | 301 | 302 | 303 |
| 9.K.G & 304.M.T | 49807 | 296 | 297 | 49813 | 299 | 300 | 301 | 302 | 303 |
| 9.K.G & 398.Y.T | 49807 | 296 | 297 | 298 | 49815 | 300 | 301 | 302 | 303 |
| 9.K.G & 826.V.M | 49807 | 296 | 297 | 298 | 299 | 300 | 301 | 49819 | 303 |
| 9.K.G & 887.T.D | 49807 | 296 | 297 | 298 | 299 | 300 | 301 | 49817 | 303 |
| 9.K.G & 891.S.Q | 49807 | 296 | 297 | 298 | 299 | 300 | 301 | 49820 | 303 |
| 27.—.R & 64.R.Q | 49800 | 49809 | 297 | 298 | 299 | 300 | 301 | 302 | 303 |
| 27.—.R & 169.L.K | 49800 | 296 | 49810 | 298 | 299 | 300 | 301 | 302 | 303 |
| 27.—.R & 169.L.Q | 49800 | 296 | 49818 | 298 | 299 | 300 | 301 | 302 | 303 |
| 27.—.R & 171.A.D | 49800 | 296 | 49802 | 298 | 299 | 300 | 301 | 302 | 303 |
| 27.—.R & 171.A.Y | 49800 | 296 | 49811 | 298 | 299 | 300 | 301 | 302 | 303 |
| 27.—.R & 171.A.S | 49800 | 296 | 49812 | 298 | 299 | 300 | 301 | 302 | 303 |
| 27.—.R & 224.G.T | 49800 | 296 | 297 | 49801 | 299 | 300 | 301 | 302 | 303 |
| 27.—.R & 304.M.T | 49800 | 296 | 297 | 49813 | 299 | 300 | 301 | 302 | 303 |
| 27.—.R & 398.Y.T | 49800 | 296 | 297 | 298 | 49815 | 300 | 301 | 302 | 303 |
| 27.—.R & 826.V.M | 49800 | 296 | 297 | 298 | 299 | 300 | 301 | 49819 | 303 |
| 27.—.R & 887.T.D | 49800 | 296 | 297 | 298 | 299 | 300 | 301 | 49817 | 303 |
| 27.—.R & 891.S.Q | 49800 | 296 | 297 | 298 | 299 | 300 | 301 | 49820 | 303 |
| 35.R.P & 64.R.Q | 49808 | 49809 | 297 | 298 | 299 | 300 | 301 | 302 | 303 |
| 35.R.P & 169.L.K | 49808 | 296 | 49810 | 298 | 299 | 300 | 301 | 302 | 303 |
| 35.R.P & 169.L.Q | 49808 | 296 | 49818 | 298 | 299 | 300 | 301 | 302 | 303 |
| 35.R.P & 171.A.D | 49808 | 296 | 49802 | 298 | 299 | 300 | 301 | 302 | 303 |
| 35.R.P & 171.A.Y | 49808 | 296 | 49811 | 298 | 299 | 300 | 301 | 302 | 303 |
| 35.R.P & 171.A.S | 49808 | 296 | 49812 | 298 | 299 | 300 | 301 | 302 | 303 |
| 35.R.P & 224.G.T | 49808 | 296 | 297 | 49801 | 299 | 300 | 301 | 302 | 303 |
| 35.R.P & 304.M.T | 49808 | 296 | 297 | 49813 | 299 | 300 | 301 | 302 | 303 |
| 35.R.P & 398.Y.T | 49808 | 296 | 297 | 298 | 49815 | 300 | 301 | 302 | 303 |
| 35.R.P & 826.V.M | 49808 | 296 | 297 | 298 | 299 | 300 | 301 | 49819 | 303 |
| 35.R.P & 887.T.D | 49808 | 296 | 297 | 298 | 299 | 300 | 301 | 49817 | 303 |
| 35.R.P & 891.S.Q | 49808 | 296 | 297 | 298 | 299 | 300 | 301 | 49820 | 303 |
| 887.T.D & 891.S.Q | 295 | 296 | 297 | 298 | 299 | 300 | 301 | 49844 | 303 |
| 64.R.Q & 169.L.K | 295 | 49809 | 49810 | 298 | 299 | 300 | 301 | 302 | 303 |
| 64.R.Q & 169.L.Q | 295 | 49809 | 49818 | 298 | 299 | 300 | 301 | 302 | 303 |
| 64.R.Q & 171.A.D | 295 | 49809 | 49802 | 298 | 299 | 300 | 301 | 302 | 303 |
| 64.R.Q & 171.A.Y | 295 | 49809 | 49811 | 298 | 299 | 300 | 301 | 302 | 303 |
| 64.R.Q & 171.A.S | 295 | 49809 | 49812 | 298 | 299 | 300 | 301 | 302 | 303 |
| 64.R.Q & 224.G.T | 295 | 49809 | 297 | 49801 | 299 | 300 | 301 | 302 | 303 |
| 64.R.Q & 304.M.T | 295 | 49809 | 297 | 49813 | 299 | 300 | 301 | 302 | 303 |
| 64.R.Q & 398.Y.T | 295 | 49809 | 297 | 298 | 49815 | 300 | 301 | 302 | 303 |
| 64.R.Q & 826.V.M | 295 | 49809 | 297 | 298 | 299 | 300 | 301 | 49819 | 303 |
| 64.R.Q & 887.T.D | 295 | 49809 | 297 | 298 | 299 | 300 | 301 | 49817 | 303 |
| 64.R.Q & 891.S.Q | 295 | 49809 | 297 | 298 | 299 | 300 | 301 | 49820 | 303 |
| 169.L.K & 171.A.D | 295 | 296 | 49835 | 298 | 299 | 300 | 301 | 302 | 303 |
| 169.L.K & 171.A.Y | 295 | 296 | 49836 | 298 | 299 | 300 | 301 | 302 | 303 |
| 169.L.K & 171.A.S | 295 | 296 | 49837 | 298 | 299 | 300 | 301 | 302 | 303 |
| 169.L.K & 224.G.T | 295 | 296 | 49810 | 49801 | 299 | 300 | 301 | 302 | 303 |
| 169.L.K & 304.M.T | 295 | 296 | 49810 | 49813 | 299 | 300 | 301 | 302 | 303 |
| 169.L.K & 398.Y.T | 295 | 296 | 49810 | 298 | 49815 | 300 | 301 | 302 | 303 |
| 169.L.K & 826.V.M | 295 | 296 | 49810 | 298 | 299 | 300 | 301 | 49819 | 303 |
| 169.L.K & 887.T.D | 295 | 296 | 49810 | 298 | 299 | 300 | 301 | 49817 | 303 |
| 169.L.K & 891.S.Q | 295 | 296 | 49810 | 298 | 299 | 300 | 301 | 49820 | 303 |
| 169.L.Q & 171.A.D | 295 | 296 | 49838 | 298 | 299 | 300 | 301 | 302 | 303 |
| 169.L.Q & 171.A.Y | 295 | 296 | 49839 | 298 | 299 | 300 | 301 | 302 | 303 |
| 169.L.Q & 171.A.S | 295 | 296 | 49840 | 298 | 299 | 300 | 301 | 302 | 303 |
| 169.L.Q & 224.G.T | 295 | 296 | 49818 | 49801 | 299 | 300 | 301 | 302 | 303 |
| 169.L.Q & 304.M.T | 295 | 296 | 49818 | 49813 | 299 | 300 | 301 | 302 | 303 |
| 169.L.Q & 398.Y.T | 295 | 296 | 49818 | 298 | 49815 | 300 | 301 | 302 | 303 |
| 169.L.Q & 826.V.M | 295 | 296 | 49818 | 298 | 299 | 300 | 301 | 49819 | 303 |
| 169.L.Q & 887.T.D | 295 | 296 | 49818 | 298 | 299 | 300 | 301 | 49817 | 303 |
| 169.L.Q & 891.S.Q | 295 | 296 | 49818 | 298 | 299 | 300 | 301 | 49820 | 303 |
| 171.A.D & 224.G.T | 295 | 296 | 49802 | 49801 | 299 | 300 | 301 | 302 | 303 |
| 171.A.D & 304.M.T | 295 | 296 | 49802 | 49813 | 299 | 300 | 301 | 302 | 303 |
| 171.A.D & 398.Y.T | 295 | 296 | 49802 | 298 | 49815 | 300 | 301 | 302 | 303 |
| 171.A.D & 826.V.M | 295 | 296 | 49802 | 298 | 299 | 300 | 301 | 49819 | 303 |
| 171.A.D & 887.T.D | 295 | 296 | 49802 | 298 | 299 | 300 | 301 | 49817 | 303 |
| 171.A.D & 891.S.Q | 295 | 296 | 49802 | 298 | 299 | 300 | 301 | 49820 | 303 |
| 171.A.Y & 224.G.T | 295 | 296 | 49811 | 49801 | 299 | 300 | 301 | 302 | 303 |
| 171.A.Y & 304.M.T | 295 | 296 | 49811 | 49813 | 299 | 300 | 301 | 302 | 303 |
| 171.A.Y & 398.Y.T | 295 | 296 | 49811 | 298 | 49815 | 300 | 301 | 302 | 303 |
| 171.A.Y & 826.V.M | 295 | 296 | 49811 | 298 | 299 | 300 | 301 | 49819 | 303 |
| 171.A.Y & 887.T.D | 295 | 296 | 49811 | 298 | 299 | 300 | 301 | 49817 | 303 |
| 171.A.Y & 891.S.Q | 295 | 296 | 49811 | 298 | 299 | 300 | 301 | 49820 | 303 |
| 171.A.S & 224.G.T | 295 | 296 | 49812 | 49801 | 299 | 300 | 301 | 302 | 303 |
| 171.A.S & 304.M.T | 295 | 296 | 49812 | 49813 | 299 | 300 | 301 | 302 | 303 |
| 171.A.S & 398.Y.T | 295 | 296 | 49812 | 298 | 49815 | 300 | 301 | 302 | 303 |
| 171.A.S & 826.V.M | 295 | 296 | 49812 | 298 | 299 | 300 | 301 | 49819 | 303 |
| 171.A.S & 887.T.D | 295 | 296 | 49812 | 298 | 299 | 300 | 301 | 49817 | 303 |
| 171.A.S & 891.S.Q | 295 | 296 | 49812 | 298 | 299 | 300 | 301 | 49820 | 303 |
| 4.I.G & 35.R.P | 49822 | 296 | 297 | 298 | 299 | 300 | 301 | 302 | 303 |
| 224.G.T & 304.M.T | 295 | 296 | 297 | 49842 | 299 | 300 | 301 | 302 | 303 |
| 224.G.T & 398.Y.T | 295 | 296 | 297 | 49801 | 49815 | 300 | 301 | 302 | 303 |
| 224.G.T & 826.V.M | 295 | 296 | 297 | 49801 | 299 | 300 | 301 | 49819 | 303 |
| 224.G.T & 887.T.D | 295 | 296 | 297 | 49801 | 299 | 300 | 301 | 49817 | 303 |
| 224.G.T & 891.S.Q | 295 | 296 | 297 | 49801 | 299 | 300 | 301 | 49820 | 303 |
| 5.—.G & 35.R.P | 49823 | 296 | 297 | 298 | 299 | 300 | 301 | 302 | 303 |
| 4.I.G & 27.—.R | 49824 | 296 | 297 | 298 | 299 | 300 | 301 | 302 | 303 |
| 304.M.T & 398.Y.T | 295 | 296 | 297 | 49813 | 49815 | 300 | 301 | 302 | 303 |
| 304.M.T & 826.V.M | 295 | 296 | 297 | 49813 | 299 | 300 | 301 | 49819 | 303 |
| 304.M.T & 887.T.D | 295 | 296 | 297 | 49813 | 299 | 300 | 301 | 49817 | 303 |
| 304.M.T & 891.S.Q | 295 | 296 | 297 | 49813 | 299 | 300 | 301 | 49820 | 303 |
| 9.K.G & 35.R.P | 49825 | 296 | 297 | 298 | 299 | 300 | 301 | 302 | 303 |
| 5.—.G & 27.—.R | 49826 | 296 | 297 | 298 | 299 | 300 | 301 | 302 | 303 |
| 4.I.G & 9.K.G | 49827 | 296 | 297 | 298 | 299 | 300 | 301 | 302 | 303 |
| 398.Y.T & 826.V.M | 295 | 296 | 297 | 298 | 49815 | 300 | 301 | 49819 | 303 |
| 398.Y.T & 887.T.D | 295 | 296 | 297 | 298 | 49815 | 300 | 301 | 49817 | 303 |
| 398.Y.T & 891.S.Q | 295 | 296 | 297 | 298 | 49815 | 300 | 301 | 49820 | 303 |
| 27.—.R & 35.R.P | 49828 | 296 | 297 | 298 | 299 | 300 | 301 | 302 | 303 |
| 9.K.G & 27.—.R | 49829 | 296 | 297 | 298 | 299 | 300 | 301 | 302 | 303 |
| 5.—.G & 9.K.G | 49830 | 296 | 297 | 298 | 299 | 300 | 301 | 302 | 303 |
| 4.I.G & 5.—.G | 49831 | 296 | 297 | 298 | 299 | 300 | 301 | 302 | 303 |
| 826.V.M & 887.T.D | 295 | 296 | 297 | 298 | 299 | 300 | 301 | 49845 | 303 |
| 826.V.M & 891.S.Q | 295 | 296 | 297 | 298 | 299 | 300 | 301 | 49846 | 303 |
| 5.K.G & 27.—.R | 49832 | 296 | 297 | 298 | 299 | 300 | 301 | 302 | 303 |
| 5.K.G & 169.L.K | 49805 | 296 | 49810 | 298 | 299 | 300 | 301 | 302 | 303 |
| 5.K.G & 171.A.D | 49805 | 296 | 49802 | 298 | 299 | 300 | 301 | 302 | 303 |
| 5.K.G & 304.M.T | 49805 | 296 | 297 | 49813 | 299 | 300 | 301 | 302 | 303 |
| 5.K.G & 398.Y.T | 49805 | 296 | 297 | 298 | 49815 | 300 | 301 | 302 | 303 |
| 5.K.G & 891.S.Q | 49805 | 296 | 297 | 298 | 299 | 300 | 301 | 49820 | 303 |
| 6.—.G & 27.—.R | 49833 | 296 | 297 | 298 | 299 | 300 | 301 | 302 | 303 |
| 6.—.G & 169.L.K | 49806 | 296 | 49810 | 298 | 299 | 300 | 301 | 302 | 303 |
| 6.—.G & 171.A.D | 49806 | 296 | 49802 | 298 | 299 | 300 | 301 | 302 | 303 |
| 6.—.G & 304.M.T | 49806 | 296 | 297 | 49813 | 299 | 300 | 301 | 302 | 303 |
| 6.—.G & 398.Y.T | 49806 | 296 | 297 | 298 | 49815 | 300 | 301 | 302 | 303 |
| 6.—.G & 891.S.Q | 49806 | 296 | 297 | 298 | 299 | 300 | 301 | 49820 | 303 |
| 304.M.W & 27.—.R | 49800 | 296 | 297 | 49814 | 299 | 300 | 301 | 302 | 303 |
| 304.M.W & 169.L.K | 295 | 296 | 49810 | 49814 | 299 | 300 | 301 | 302 | 303 |
| 304.M.W & 171.A.D | 295 | 296 | 49802 | 49814 | 299 | 300 | 301 | 302 | 303 |
| 304.M.W & 398.Y.T | 295 | 296 | 297 | 49814 | 49815 | 300 | 301 | 302 | 303 |
| 304.M.W & 891.S.Q | 295 | 296 | 297 | 49814 | 299 | 300 | 301 | 49820 | 303 |
| 481.E.D & 27.—.R | 49800 | 296 | 297 | 298 | 49816 | 300 | 301 | 302 | 303 |
| 481.E.D & 169.L.K | 295 | 296 | 49810 | 298 | 49816 | 300 | 301 | 302 | 303 |
| 481.E.D & 171.A.D | 295 | 296 | 49802 | 298 | 49816 | 300 | 301 | 302 | 303 |
| 481.E.D & 304.M.T | 295 | 296 | 297 | 49813 | 49816 | 300 | 301 | 302 | 303 |
| 481.E.D & 398.Y.T | 295 | 296 | 297 | 298 | 49843 | 300 | 301 | 302 | 303 |
| 481.E.D & 891.S.Q | 295 | 296 | 297 | 298 | 49816 | 300 | 301 | 49820 | 303 |
| 698.S.R & 27.—.R | 49800 | 296 | 297 | 298 | 299 | 300 | 49821 | 302 | 303 |
| 698.S.R & 169.L.K | 295 | 296 | 49810 | 298 | 299 | 300 | 49821 | 302 | 303 |
| 698.S.R & 171.A.D | 295 | 296 | 49802 | 298 | 299 | 300 | 49821 | 302 | 303 |
| 698.S.R & 304.M.T | 295 | 296 | 297 | 49813 | 299 | 300 | 49821 | 302 | 303 |
| 698.S.R & 398.Y.T | 295 | 296 | 297 | 298 | 49815 | 300 | 49821 | 302 | 303 |
| 698.S.R & 891.S.Q | 295 | 296 | 297 | 298 | 299 | 300 | 49821 | 49820 | 303 |

*Positions of mutations are shown relative to a CasX 515 sequence with an N-terminal methionine residue (SEQ ID NO: 49699). Each mutation is indicated by its position, reference sequence, and alt sequence, separated by ‘.’ Insertions are indicated with a ‘—’ in the reference sequence (first position), and deletions with a ‘—’ in the alt sequence (second position). Multiple individual mutations are separated by “&”.

[0926] A subset of these 161 engineered CasX proteins were cloned using methods standard in the art, and are listed in Tables 25 and 27, below. In addition, an engineered CasX protein termed CasX 1001 was generated by combining mutations from engineered CasX protein 812 and CasX variant 676 (27.-.R, 169.L.K, and 329.G.K mutations relative to CasX 515), which have been previously validated as a highly specific and highly active CasX proteins, respectively (the PAM-altering 224.G.S mutation also present in CasX 676 was not included). Engineered CasX protein 969 was generated by combining 27.-.R, 171.A.D, and 224.G.T mutations relative to CasX 515. Finally, engineered CasX protein 973 was generated by combining 35.R.P, 171.A.Y, and 304.M.T mutations relative to CasX 515. The amino acid sequences of engineered CasX proteins 969, 973, and 1001 are provided in Table 24, below.

TABLE 24
Amino acid sequences of engineered CasX proteins 969, 973, and 1001

| CasX | | |
|---|---|---|
| protein | | SEQ |
| no. | Amino acid sequence | ID NO |
| 969 | QEIKRINKIRRRLVKDSNTKKAGKTRGPMKTLLVRVMTPDLRERLENLRKKPENIPQPISNTSR | 49871 |
| | ANLNKLLTDYTEMKKAILHVYWEEFQKDPVGLMSRVAQPASKKIDQNKLKPEMDEKGNLTTAGF | |
| | ACSQCGQPLFVYKLEQVSEKGKAYTNYFGRCNVAEHEKLILLDQLKPEKDSDEAVTYSLGKFGQ | |
| | RALDFYSIHVTKESTHPVKPLAQIAGNRYASTPVGKALSDACMGTIASFLSKYQDIIIEHQKVV | |
| | KGNQKRLESLRELAGKENLEYPSVTLPPQPHTKEGVDAYNEVIARVRMWVNLNLWQKLKLSRDD | |
| | AKPLLRLKGFPSFPLVERQANEVDWWDMVCNVKKLINEKKEDGKVEWQNLAGYKRQEALRPYLS | |
| | SEEDRKKGKKFARYQLGDLLLHLEKKHGEDWGKVYDEAWERIDKKVEGLSKHIKLEEERRSEDA | |
| | QSKAALTDWLRAKASFVIEGLKEADKDEFCRCELKLQKWYGDLRGKPFAIEAENSILDISGESK | |
| | QYNCAFIWQKDGVKKLNLYLIINYFKGGKLRFKKIKPEAFEANRFYTVINKKSGEIVPMEVNEN | |
| | FDDPNLIILPLAFGKRQGREFIWNDLLSLETGSLKLANGRVIEKTLYNRRTRQDEPALFVALTE | |
| | ERREVLDSSNIKPMNLIGVDRGENIPAVIALTDPEGCPLSRFKDSLGNPTHILRIGESYKEKQR | |
| | TIQAKKEVEQRRAGGYSRKYASKAKNLADDMVRNTARDLLYYAVTQDAMLIFENLSRGFGRQGK | |
| | RTFMAERQYTRMEDWLTAKLAYEGLPSKTYLSKTLAQYTSKTCSNCGFTITSADYDRVLEKLKK | |
| | TATGWMTTINGKELKVEGQITYYNRYKRQNVVKDLSVELDRLSEESVNNDISSWTKGRSGEALS | |
| | LLKKRFSHRPVQEKFVCLNCGFETHADEQAALNIARSWLFLRSQEYKKYQTNKTTGNTDKRAFV | |
| | ETWQSFYRKKLKEVWKPAV | |
| 973 | QEIKRINKIRRRLVKDSNTKKAGKTGPMKTLLVPVMTPDLRERLENLRKKPENIPQPISNTSRA | 49872 |
| | NLNKLLTDYTEMKKAILHVYWEEFQKDPVGLMSRVAQPASKKIDQNKLKPEMDEKGNLTTAGFA | |
| | CSQCGQPLFVYKLEQVSEKGKAYTNYFGRCNVAEHEKLILLYQLKPEKDSDEAVTYSLGKFGQR | |
| | ALDFYSIHVTKESTHPVKPLAQIAGNRYASGPVGKALSDACMGTIASFLSKYQDIIIEHQKVVK | |
| | GNQKRLESLRELAGKENLEYPSVTLPPQPHTKEGVDAYNEVIARVRTWVNLNLWQKLKLSRDDA | |
| | KPLLRLKGFPSFPLVERQANEVDWWDMVCNVKKLINEKKEDGKVFWQNLAGYKRQEALRPYLSS | |
| | EEDRKKGKKFARYQLGDLLLHLEKKHGEDWGKVYDEAWERIDKKVEGLSKHIKLEEERRSEDAQ | |
| | SKAALTDWLRAKASFVIEGLKEADKDEFCRCELKLQKWYGDLRGKPFAIEAENSILDISGFSKQ | |
| | YNCAFIWQKDGVKKLNLYLIINYFKGGKLRFKKIKPEAFEANRFYTVINKKSGEIVPMEVNENF | |
| | DDPNLIILPLAFGKRQGREFIWNDLLSLETGSLKLANGRVIEKTLYNRRTRQDEPALFVALTFE | |
| | RREVLDSSNIKPMNLIGVDRGENIPAVIALTDPEGCPLSRFKDSLGNPTHILRIGESYKEKQRT | |
| | IQAKKEVEQRRAGGYSRKYASKAKNLADDMVRNTARDLLYYAVTQDAMLIFENLSRGFGRQGKR | |
| | TEMAERQYTRMEDWLTAKLAYEGLPSKTYLSKTLAQYTSKTCSNCGFTITSADYDRVLEKLKKT | |
| | ATGWMTTINGKELKVEGQITYYNRYKRQNVVKDLSVELDRLSEESVNNDISSWTKGRSGEALSL | |
| | LKKRFSHRPVQEKFVCLNCGFETHADEQAALNIARSWLFLRSQEYKKYQTNKTTGNTDKRAFVE | |
| | TWQSFYRKKLKEVWKPAV | |
| 1001 | QEIKRINKIRRRLVKDSNTKKAGKTRGPMKTLLVRVMTPDLRERLENLRKKPENIPQPISNTSR | 49873 |
| | ANLNKLLTDYTEMKKAILHVYWEEFQKDPVGLMSRVAQPASKKIDQNKLKPEMDEKGNLTTAGF | |
| | ACSQCGQPLFVYKLEQVSEKGKAYTNYFGRCNVAEHEKLIKLAQLKPEKDSDEAVTYSLGKFGQ | |
| | RALDFYSIHVTKESTHPVKPLAQIAGNRYASGPVGKALSDACMGTIASFLSKYQDIIIEHQKVV | |
| | KGNQKRLESLRELAGKENLEYPSVTLPPQPHTKEGVDAYNEVIARVRMWVNLNLWQKLKLSRDD | |
| | AKPLLRLKKFPSFPLVERQANEVDWWDMVCNVKKLINEKKEDGKVEWQNLAGYKRQEALRPYLS | |
| | SEEDRKKGKKFARYQLGDLLLHLEKKHGEDWGKVYDEAWERIDKKVEGLSKHIKLEEERRSEDA | |
| | QSKAALTDWLRAKASFVIEGLKEADKDEFCRCELKLQKWYGDLRGKPFAIEAENSILDISGESK | |
| | QYNCAFIWQKDGVKKLNLYLIINYFKGGKLRFKKIKPEAFEANRFYTVINKKSGEIVPMEVNEN | |
| | FDDPNLIILPLAFGKRQGREFIWNDLLSLETGSLKLANGRVIEKTLYNRRTRQDEPALFVALTF | |
| | ERREVLDSSNIKPMNLIGVDRGENIPAVIALTDPEGCPLSRFKDSLGNPTHILRIGESYKEKQR | |
| | TIQAKKEVEQRRAGGYSRKYASKAKNLADDMVRNTARDLLYYAVTQDAMLIFENLSRGFGRQGK | |
| | RTFMAERQYTRMEDWLTAKLAYEGLPSKTYLSKTLAQYTSKTCSNCGFTITSADYDRVLEKLKK | |
| | TATGWMTTINGKELKVEGQITYYNRYKRQNVVKDLSVELDRLSEESVNNDISSWTKGRSGEALS | |
| | LLKKRFSHRPVQEKFVCLNCGFETHADEQAALNIARSWLFLRSQEYKKYQTNKTTGNTDKRAFV | |
| | ETWQSFYRKKLKEVWKPAV | |

[0927] A multiplexed pooled PASS assay was performed and analyzed as described in Example 6. As noted in Example 6, CasX proteins were expressed using a relatively weakly-expressing promoter to reduce CasX protein expression and thereby improve the sensitivity of the assay. Samples were tested in duplicate, except for engineered CasX protein 1006, which was tested in quadruplicate. In Tables 25, 26, and 27, below, the results for the CasX 1006 samples are reported in two separate rows, each the average of two samples. Streptococcus pyogenes Cas9 without a guide RNA served as a negative control. CasX 515, CasX 676, and engineered CasX protein 812 were also included as controls.

### Results:

[0928] Table 25 provides the level of on-target editing produced by various CasX proteins with mutations relative to CasX 515, ranked from highest to lowest activity.

TABLE 25
Average on-targeting editing activity of engineered
CasX proteins, ranked from highest to lowest

| | Mutation(s) | | Average | SEM |
|---|---|---|---|---|
| Protein | relative | Amino | on-target | on-target |
| Designation | to CasX 515* | acid | TTC PAM | TTC PAM |
| (CasX | (Position. | sequence | editing | editing |
| protein no., | Reference. | SEQ | activity | activity |
| or Cas9) | Alternative) | ID NO | (fraction) | (fraction) |
| 1018 | 9.K.G & 891.S.Q | 28285 | 3.01E−01 | 1.20E−01 |
| 1007 | 304.M.T & 826.V.M | 28650 | 2.76E−01 | 7.86E−02 |
| 1006 | 826.V.M & 891.S.Q | 29011 | 2.38E−01 | 4.11E−02 |
| 987 | 169.L.K & 304.M.T | 28443 | 2.32E−01 | 3.38E−02 |
| 1014 | 4.I.G & 891.S.Q | 28036 | 2.29E−01 | 3.45E−02 |
| 1143 | 4.I.G & 826.V.M | 28035 | 2.29E−01 | 3.44E−02 |
| 1019 | 27.—.R & 171.A.S | 27872 | 2.22E−01 | 2.52E−02 |
| 1029 | 5.K.G & 891.S.Q | 28123 | 2.16E−01 | 2.96E−02 |
| 1006 | 826.V.M & 891.S.Q | 29011 | 2.16E−01 | 3.44E−02 |
| 1015 | 5.—.G & 304.M.T | 28058 | 2.11E−01 | 3.20E−02 |
| 970 | 27.—.R & 891.S.Q | 27898 | 2.09E−01 | 2.61E−02 |
| 1028 | 5.K.G & 304.M.T | 28101 | 2.07E−01 | 3.10E−02 |
| 996 | 171.A.Y & 891.S.Q | 28499 | 2.05E−01 | 3.42E−02 |
| 969 | 27.—.R, 171.A.D, & | 49871 | 2.04E−01 | 2.64E−02 |
| | 224.G.T | | | |
| 984 | 64.R.Q & 891.S.Q | 28396 | 2.03E−01 | 9.13E−02 |
| 1041 | 698.S.R & 891.S.Q | 29022 | 2.01E−01 | 3.17E−02 |
| 1016 | 9.K.G & 171.A.D | 27958 | 1.98E−01 | 3.20E−02 |
| 1000 | 224.G.T & 891.S.Q | 35512 | 1.92E−01 | 2.51E−02 |
| 999 | 224.G.T & 304.M.T | 35402 | 1.92E−01 | 2.90E−02 |
| 986 | 169.L.K & 171.A.S | 28439 | 1.90E−01 | 2.76E−02 |
| 977 | 64.R.Q & 169.L.K | 28368 | 1.90E−01 | 3.12E−02 |
| 792 | 27.—.R & 169.L.K | 27870 | 1.89E−01 | 2.89E−02 |
| 993 | 171.A.D & 224.G.T | 30888 | 1.88E−01 | 2.70E−02 |
| 997 | 171.A.S & 304.M.T | 28511 | 1.87E−01 | 2.83E−02 |
| 1025 | 169.L.K & 891.S.Q | 28465 | 1.87E−01 | 2.99E−02 |
| 1001 | 27.—.R, 169.L.K, & | 49873 | 1.85E−01 | 2.57E−02 |
| | 329.G.K | | | |
| 1040 | 481.E.D & 891.S.Q | 28799 | 1.85E−01 | 3.00E−02 |
| 1004 | 304.M.T & 891.S.Q | 28651 | 1.85E−01 | 3.11E−02 |
| 676 | 27.—.R, 170.L.K, & | | 1.84E−01 | 2.28E−02 |
| | 224.G.S | | | |
| 1031 | 6.—.G & 169.L.K | 28137 | 1.84E−01 | 3.02E−02 |
| 980 | 64.R.Q & 171.A.S | 28370 | 1.80E−01 | 3.06E−02 |
| 981 | 64.R.Q & 304.M.T | 28374 | 1.79E−01 | 2.44E−02 |
| 985 | 169.L.K & 171.A.Y | 28438 | 1.73E−01 | 3.57E−02 |
| 989 | 169.L.Q & 224.G.T | 43373 | 1.73E−01 | 3.20E−02 |
| 992 | 169.L.Q & 887.T.D | 29749 | 1.70E−01 | 3.40E−02 |
| 994 | 171.A.Y & 224.G.T | 34870 | 1.68E−01 | 3.21E−02 |
| 1005 | 826.V.M & 887.T.D | 28925 | 1.68E−01 | 3.17E−02 |
| 983 | 64.R.Q & 887.T.D | 28387 | 1.68E−01 | 1.70E−02 |
| 1026 | 169.L.Q & 826.V.M | 29917 | 1.65E−01 | 3.09E−02 |
| 1009 | 4.I.G & 171.A.D | 27952 | 1.65E−01 | 6.43E−02 |
| 982 | 64.R.Q & 398.Y.T | 28378 | 1.64E−01 | 2.73E−02 |
| 978 | 64.R.Q & 169.L.Q | 29308 | 1.63E−01 | 2.96E−02 |
| 515 | — | 228 | 1.63E−01 | 2.38E−02 |
| 1003 | 9.K.G & 27.—.R | 27865 | 1.61E−01 | 2.28E−02 |
| 1017 | 9.K.G & 224.G.T | 33212 | 1.56E−01 | 2.73E−02 |
| 1020 | 35.R.P & 171.A.D | 27959 | 1.55E−01 | 3.01E−02 |
| 998 | 171.A.S & 826.V.M | 28532 | 1.54E−01 | 2.92E−02 |
| 1010 | 4.I.G & 171.A.Y | 28009 | 1.54E−01 | 2.71E−02 |
| 1022 | 35.R.P & 891.S.Q | 28323 | 1.48E−01 | 2.79E−02 |
| 1038 | 224.G.T & 826.V.M | 35507 | 1.48E−01 | 3.11E−02 |
| 1027 | 5.K.G & 171.A.D | 27954 | 1.42E−01 | 2.32E−02 |
| 1012 | 4.I.G & 398.Y.T | 28018 | 1.40E−01 | 2.10E−02 |
| 971 | 35.R.P & 169.L.Q | 29266 | 1.39E−01 | 2.75E−02 |
| 1032 | 6.—.G & 171.A.D | 27955 | 1.39E−01 | 2.40E−02 |
| 1024 | 169.L.K & 398.Y.T | 28447 | 1.38E−01 | 2.87E−02 |
| 1023 | 64.R.Q & 224.G.T | 34088 | 1.37E−01 | 2.34E−02 |
| 1036 | 171.A.S & 887.T.D | 28524 | 1.37E−01 | 2.38E−02 |
| 988 | 169.L.Q & 171.A.Y | 29371 | 1.36E−01 | 3.36E−02 |
| 1034 | 171.A.Y & 826.V.M | 28498 | 1.36E−01 | 3.05E−02 |
| 1030 | 171.A.D & 398.Y.T | 27973 | 1.35E−01 | 2.55E−02 |
| 1039 | 304.M.W & 398.Y.T | 28661 | 1.29E−01 | 3.28E−02 |
| 1033 | 171.A.Y & 304.M.T | 28477 | 1.25E−01 | 2.29E−02 |
| 1021 | 35.R.P & 304.M.T | 28301 | 1.25E−01 | 1.77E−02 |
| 1011 | 4.I.G & 224.G.T | 31244 | 1.24E−01 | 2.13E−02 |
| 979 | 64.R.Q & 171.A.Y | 28369 | 1.24E−01 | 2.15E−02 |
| 1002 | 5.—.G & 35.R.P | 28048 | 1.20E−01 | 2.31E−02 |
| 1035 | 171.A.S & 398.Y.T | 28515 | 1.14E−01 | 2.07E−02 |
| 851 | 35.R.P & 171.A.Y | 28296 | 1.13E−01 | 2.31E−02 |
| 995 | 171.A.Y & 398.Y.T | 28481 | 1.13E−01 | 1.83E−02 |
| 973 | 35.R.P, 171.A.Y, & | 49872 | 1.12E−01 | 1.96E−02 |
| | 304.M.T | | | |
| 976 | 35.R.P & 887.T.D | 28314 | 9.62E−02 | 2.52E−02 |
| 974 | 35.R.P & 224.G.T | 33512 | 9.00E−02 | 1.52E−02 |
| 1037 | 224.G.T & 398.Y.T | 35422 | 8.30E−02 | 1.35E−02 |
| 812 | 329.G.K | 266 | 7.68E−02 | 1.69E−02 |
| 975 | 35.R.P & 398.Y.T | 28305 | 7.49E−02 | 1.51E−02 |
| 991 | 169.L.Q & 398.Y.T | 29560 | 4.87E−02 | 1.74E−02 |
| Cas9 | n/a | — | 0.00E+00 | 0.00E+00 |

*Positions of mutations are shown relative to a CasX 515 sequence with an N-terminal methionine residue (SEQ ID NO: 49699). Each mutation is indicated by its position, reference sequence, and alt sequence, separated by ‘.’ Insertions are indicated with a ‘—’ in the reference sequence (first position), and deletions with a ‘—’ in the alt sequence (second position). Multiple individual mutations are separated by “&”.

[0929] As shown in Table 25, 41 of the tested engineered CasX proteins produced higher levels of on-target editing than did CasX 515; the 41 CasX proteins are bolded in Table 25. Engineered CasX protein 1018 had 9.K.G and 891.S.Q amino acid substitutions and produced the highest level of on-target editing in the assay. The CasX 676 control was more active than CasX 515, and CasX 812 was less active than CasX 515, which is consistent with previous results.

[0930] A large number of the tested CasX proteins produced lower levels of on-target editing than CasX 515. This suggests that not all combinations of mutations, including combinations of mutations that were relatively active for on-target editing when introduced into CasX 515 as single mutations (see Example 6), are compatible for producing highly active CasX proteins.

[0931] To understand the amino acid residues that may be causal for improving CasX activity, the identity of the mutations in the engineered CasX proteins with two or three mutations resulting in improved on-target editing activity relative to CasX 515 was examined (Table 26).

TABLE 26
Summary of mutations in engineered CasX proteins with
greater on-target editing activity than CasX 515

| | Number of | |
|---|---|---|
| Position of mutation | occurrences | Identity of mutation(s) |
| relative to CasX 515 | of mutations | (Number of engineered CasX |
| (SEQ ID NO: 49699) | at position* | proteins with mutation) |
| 891 | 13 | 891.S.Q |
| 169 | 12 | 169.L.K (8); 169.L.Q (4) |
| 171 | 11 | 171.A.S (4); 171.A.D (4); |
| | | 171.A.Y (3) |
| 304 | 8 | 304.M.T |
| 64 | 7 | 64.R.Q |
| 224 | 6 | 224.G.T |
| 27 | 5 | 27.—.R |
| 826 | 4 | 826.V.M |
| 4 | 3 | 4.I.G |
| 5 | 3 | 5.—.G (1); 5.K.G (2) |
| 887 | 3 | 887.T.D |
| 9 | 2 | 9.K.G |
| 6 | 1 | 6.—.G |
| 481 | 1 | 481.E.D |
| 698 | 1 | 698.S.R |

*Excluding CasX 676.

[0932] As shown in Table 26, certain positions were mutated in several members of the set of engineered CasX proteins with higher on-target editing activity than CasX 515. For example, the serine to glutamine substitution at position 891 (891.S.Q), in the TSL domain, was found in 13 members of the engineered CasX proteins with improved on-target editing activity relative to CasX 515. The TSL domain is a dynamic domain involved in coordinating the introduction of the target strand to the RuvC active site, and the substitution of serine for the longer glutamine may allow for additional hydrogen bonding interactions with the target strand and more efficient transfer to the nuclease domain.

[0933] One of two substitutions at position 169 (169.L.K or 169.L.Q), in the NTSB domain, were found in 12 members of the engineered CasX proteins with higher on-target editing activity than CasX 515. This position is proximal to the second and third nucleotides of the unwound non-target strand in structures of the non-target strand loading state, and the introduction of either a charged residue or one capable of multiple hydrogen-bonding interactions likely allows for the stabilization of the unwound state and thus more efficient unwinding. It should be noted that 169.L.K was more enriched than 169.L.Q among the engineered CasX proteins with improved on-target editing activity, which suggests that while a polar interaction increases enzymatic activity, a charge-charge interaction is more suitable for this position.

[0934] One of three substitutions at position 171 (171.A.S, 171.A.D, or 171.A.Y), also in the NTSB domain, were found in 11 members of the engineered CasX proteins with improved on-target editing activity. Residue 171 is solvent-exposed, so a polar residue is likely more favorable at this position. While the residue is not in a position that interacts with the non-target strand in published structures, the dynamic nature of the NTSB domain may allow these residues to make hydrogen-bonding interactions with the target DNA at some point in the unwinding process. A serine is present at this position in the wild-type CasX 2 (SEQ ID NO: 2) sequence and is an alanine in CasX variants containing the chimeric NTSB from CasX1, meaning that the 171.A.S mutation in particular represents a reversion to a wild-type sequence. Notably, 171.A.Y was also found in several of the variants performing worse than CasX 515, which suggests that a tyrosine at position 171 might create too much steric hindrance for proper hydrogen-bonding interactions with the target DNA.

[0935] While the 169.L.K and 27.-.R mutations found in CasX 676 were well-represented among the high activity variants, there were a number of orthogonal mutations with distinct mechanisms that may allow for increased activity without the loss of specificity seen in CasX 676. 891. S.Q in particular was found in a number of top-performing activity variants that also have a higher specificity ratio than CasX 515 (see below).

[0936] Table 27, below, provides the level of off-target editing produced by various CasX proteins with two or three mutations relative to CasX 515, ranked from lowest to highest activity.

TABLE 27
Average off-targeting editing activity of engineered
CasX proteins, ranked from lowest to highest

| | | | Average | SEM |
|---|---|---|---|---|
| Protein | Mutation relative | Amino | off-target | off-target |
| Designation | to CasX 515* | acid | TTC PAM | TTC PAM |
| (CasX | (Position. | sequence | editing | editing |
| protein no., | Reference. | SEQ | activity | activity |
| or Cas9) | Alternative) | ID NO | (fraction) | (fraction) |
| Cas9 | n/a | — | 0.00E+00 | 0.00E+00 |
| 812 | 329.G.K | 266 | 4.46E−03 | 3.30E−03 |
| 991 | 169.L.Q & 398.Y.T | 29560 | 4.71E−03 | 3.59E−03 |
| 975 | 35.R.P & 398.Y.T | 28305 | 6.63E−03 | 5.75E−03 |
| 976 | 35.R.P & 887.T.D | 28314 | 8.76E−03 | 6.93E−03 |
| 851 | 35.R.P & 171.A.Y | 28296 | 9.95E−03 | 6.91E−03 |
| 974 | 35.R.P & 224.G.T | 33512 | 9.95E−03 | 6.79E−03 |
| 971 | 35.R.P & 169.L.Q | 29266 | 1.15E−02 | 8.07E−03 |
| 1037 | 224.G.T & 398.Y.T | 35422 | 1.22E−02 | 8.00E−03 |
| 1039 | 304.M.W & 398.Y.T | 28661 | 1.24E−02 | 1.01E−02 |
| 988 | 169.L.Q & 171.A.Y | 29371 | 1.30E−02 | 8.38E−03 |
| 973 | 35.R.P, 171.A.Y, & | 49872 | 1.37E−02 | 9.35E−03 |
| | 304.M.T | | | |
| 995 | 171.A.Y & 398.Y.T | 28481 | 1.53E−02 | 9.56E−03 |
| 1002 | 5.—.G & 35.R.P | 28048 | 1.69E−02 | 1.03E−02 |
| 1009 | 4.I.G & 171.A.D | 27952 | 1.76E−02 | 1.08E−02 |
| 1011 | 4.I.G & 224.G.T | 31244 | 1.80E−02 | 1.12E−02 |
| 1035 | 171.A.S & 398.Y.T | 28515 | 1.86E−02 | 9.86E−03 |
| 989 | 169.L.Q & 224.G.T | 43373 | 1.91E−02 | 1.19E−02 |
| 1018 | 9.K.G & 891.S.Q | 28285 | 1.91E−02 | 1.43E−02 |
| 1033 | 171.A.Y & 304.M.T | 28477 | 1.93E−02 | 1.09E−02 |
| 994 | 171.A.Y & 224.G.T | 34870 | 1.95E−02 | 1.21E−02 |
| 1020 | 35.R.P & 171.A.D | 27959 | 1.98E−02 | 1.24E−02 |
| 1022 | 35.R.P & 891.S.Q | 28323 | 2.04E−02 | 1.10E−02 |
| 979 | 64.R.Q & 171.A.Y | 28369 | 2.09E−02 | 1.24E−02 |
| 1032 | 6.—.G & 171.A.D | 27955 | 2.20E−02 | 1.15E−02 |
| 1027 | 5.K.G & 171.A.D | 27954 | 2.28E−02 | 1.29E−02 |
| 1041 | 698.S.R & 891.S.Q | 29022 | 2.41E−02 | 1.32E−02 |
| 1012 | 4.I.G & 398.Y.T | 28018 | 2.50E−02 | 1.30E−02 |
| 1030 | 171.A.D & 398.Y.T | 27973 | 2.53E−02 | 1.31E−02 |
| 1024 | 169.L.K & 398.Y.T | 28447 | 2.54E−02 | 1.39E−02 |
| 982 | 64.R.Q & 398.Y.T | 28378 | 2.58E−02 | 1.58E−02 |
| 983 | 64.R.Q & 887.T.D | 28387 | 2.59E−02 | 1.06E−02 |
| 1040 | 481.E.D & 891.S.Q | 28799 | 2.63E−02 | 1.30E−02 |
| 1017 | 9.K.G & 224.G.T | 33212 | 2.67E−02 | 1.64E−02 |
| 1001 | 27.—.R, 169.L.K, & | 49873 | 2.74E−02 | 1.31E−02 |
| | 329.G.K | | | |
| 992 | 169.L.Q & 887.T.D | 29749 | 2.78E−02 | 1.47E−02 |
| 1036 | 171.A.S & 887.T.D | 28524 | 2.80E−02 | 1.47E−02 |
| 1003 | 9.K.G & 27.—.R | 27865 | 2.80E−02 | 1.40E−02 |
| 1005 | 826.V.M & 887.T.D | 28925 | 2.81E−02 | 1.41E−02 |
| 978 | 64.R.Q & 169.L.Q | 29308 | 2.83E−02 | 1.48E−02 |
| 1021 | 35.R.P & 304.M.T | 28301 | 2.84E−02 | 1.62E−02 |
| 985 | 169.L.K & 171.A.Y | 28438 | 3.00E−02 | 1.62E−02 |
| 977 | 64.R.Q & 169.L.K | 28368 | 3.03E−02 | 1.46E−02 |
| 1023 | 64.R.Q & 224.G.T | 34088 | 3.05E−02 | 1.81E−02 |
| 1034 | 171.A.Y & 826.V.M | 28498 | 3.07E−02 | 1.24E−02 |
| 1010 | 4.I.G & 171.A.Y | 28009 | 3.17E−02 | 1.59E−02 |
| 1026 | 169.L.Q & 826.V.M | 29917 | 3.18E−02 | 1.44E−02 |
| 1016 | 9.K.G & 171.A.D | 27958 | 3.30E−02 | 1.43E−02 |
| 1038 | 224.G.T & 826.V.M | 35507 | 3.30E−02 | 1.58E−02 |
| 1029 | 5.K.G & 891.S.Q | 28123 | 3.31E−02 | 1.77E−02 |
| 1031 | 6.—.G & 169.L.K | 28137 | 3.38E−02 | 1.65E−02 |
| 980 | 64.R.Q & 171.A.S | 28370 | 3.41E−02 | 1.59E−02 |
| 993 | 171.A.D & 224.G.T | 30888 | 3.43E−02 | 1.68E−02 |
| 1028 | 5.K.G & 304.M.T | 28101 | 3.65E−02 | 1.85E−02 |
| 998 | 171.A.S & 826.V.M | 28532 | 3.68E−02 | 1.63E−02 |
| 515 | — | 228 | 3.83E−02 | 1.46E−02 |
| 999 | 224.G.T & 304.M.T | 35402 | 3.91E−02 | 1.93E−02 |
| 1000 | 224.G.T & 891.S.Q | 35512 | 4.14E−02 | 2.07E−02 |
| 996 | 171.A.Y & 891.S.Q | 28499 | 4.25E−02 | 2.02E−02 |
| 981 | 64.R.Q & 304.M.T | 28374 | 4.30E−02 | 2.20E−02 |
| 1014 | 4.I.G & 891.S.Q | 28036 | 4.63E−02 | 2.06E−02 |
| 986 | 169.L.K & 171.A.S | 28439 | 4.63E−02 | 2.46E−02 |
| 1006 | 826.V.M & 891.S.Q | 29011 | 4.66E−02 | 2.16E−02 |
| 1025 | 169.L.K & 891.S.Q | 28465 | 4.73E−02 | 2.04E−02 |
| 997 | 171.A.S & 304.M.T | 28511 | 4.82E−02 | 2.22E−02 |
| 1015 | 5.—.G & 304.M.T | 28058 | 5.10E−02 | 2.19E−02 |
| 987 | 169.L.K & 304.M.T | 28443 | 5.72E−02 | 2.55E−02 |
| 1006 | 826.V.M & 891.S.Q | 29011 | 5.87E−02 | 2.71E−02 |
| 969 | 27.—.R, 171.A.D, & | 49871 | 5.88E−02 | 2.17E−02 |
| | 224.G.T | | | |
| 1004 | 304.M.T & 891.S.Q | 28651 | 6.11E−02 | 2.26E−02 |
| 1143 | 4.I.G & 826.V.M | 28035 | 6.15E−02 | 2.79E−02 |
| 676 | 27.—.R, 170.L.K, & | 30074 | 6.19E−02 | 2.14E−02 |
| | 224.G.S | | | |
| 1019 | 27.—.R & 171.A.S | 27872 | 6.78E−02 | 1.45E−02 |
| 970 | 27.—.R & 891.S.Q | 27898 | 6.87E−02 | 2.22E−02 |
| 1007 | 304.M.T & 826.V.M | 28650 | 6.99E−02 | 8.52E−02 |
| 984 | 64.R.Q & 891.S.Q | 28396 | 7.16E−02 | 1.01E−01 |
| 792 | 27.—.R & 169.L.K | 27870 | 7.26E−02 | 2.39E−02 |

[0937] As shown in Table 27, the majority of the tested CasX proteins with pairs of mutations relative to CasX 515 produced lower levels of off-target editing than did CasX 515; these samples are bolded in Table 27.

[0938] Table 28, below, provides the specificity ratio (i.e., the average level of on-targeting editing divided by the average level of off-target editing) of the tested CasX proteins with two or three mutations relative to CasX 515, ranked from the highest to lowest ratio. CasX proteins with higher specificity ratios than CasX 515 are bolded in Table 28.

TABLE 28
Specificity ratios of engineered CasX proteins,
ranked from highest to lowest*

| | | | Specificity | |
|---|---|---|---|---|
| | | | ratio | |
| | | | (average | SEM |
| Protein | Mutation relative | Amino | on-target | off-target |
| Designation | to CasX 515* | acid | activity/ | TTC PAM |
| (CasX | (Position. | sequence | average | editing |
| protein no., | Reference. | (SEQ | off-target | activity |
| or Cas9) | Alternative) | ID NO) | activity) | (fraction) |
| 812 | 329.G.K | 266 | 17.22 | 0.52 |
| 1018 | 9.K.G & 891.S.Q | 28285 | 15.76 | 0.35 |
| 971 | 35.R.P & 169.L.Q | 29266 | 12.09 | 0.5 |
| 851 | 35.R.P & 171.A.Y | 28296 | 11.36 | 0.49 |
| 975 | 35.R.P & 398.Y.T | 28305 | 11.3 | 0.67 |
| 976 | 35.R.P & 887.T.D | 28314 | 10.98 | 0.53 |
| 988 | 169.L.Q & 171.A.Y | 29371 | 10.46 | 0.4 |
| 1039 | 304.M.W & 398.Y.T | 28661 | 10.4 | 0.56 |
| 991 | 169.L.Q & 398.Y.T | 29560 | 10.34 | 0.41 |
| 1009 | 4.I.G & 171.A.D | 27952 | 9.38 | 0.23 |
| 989 | 169.L.Q & 224.G.T | 43373 | 9.06 | 0.44 |
| 974 | 35.R.P & 224.G.T | 33512 | 9.05 | 0.51 |
| 994 | 171.A.Y & 224.G.T | 34870 | 8.62 | 0.43 |
| 1041 | 698.S.R & 891.S.Q | 29022 | 8.34 | 0.39 |
| 973 | 35.R.P, 171.A.Y, & | 49872 | 8.18 | 0.51 |
| | 304.M.T | | | |
| 1020 | 35.R.P & 171.A.D | 27959 | 7.83 | 0.43 |
| 995 | 171.A.Y & 398.Y.T | 28481 | 7.39 | 0.46 |
| 1022 | 35.R.P & 891.S.Q | 28323 | 7.25 | 0.35 |
| 1002 | 5.—.G & 35.R.P | 28048 | 7.1 | 0.41 |
| 1040 | 481.E.D & 891.S.Q | 28799 | 7.03 | 0.33 |
| 1011 | 4.I.G & 224.G.T | 31244 | 6.89 | 0.45 |
| 1037 | 224.G.T & 398.Y.T | 35422 | 6.8 | 0.49 |
| 1001 | 27.—.R, 169.L.K, & | 49873 | 6.75 | 0.34 |
| | 329.G.K | | | |
| 1029 | 5.K.G & 891.S.Q | 28123 | 6.53 | 0.4 |
| 983 | 64.R.Q & 887.T.D | 28387 | 6.49 | 0.38 |
| 1033 | 171.A.Y & 304.M.T | 28477 | 6.48 | 0.31 |
| 982 | 64.R.Q & 398.Y.T | 28378 | 6.36 | 0.45 |
| 1032 | 6.—.G & 171.A.D | 27955 | 6.32 | 0.35 |
| 977 | 64.R.Q & 169.L.K | 28368 | 6.27 | 0.32 |
| 1027 | 5.K.G & 171.A.D | 27954 | 6.23 | 0.4 |
| 1035 | 171.A.S & 398.Y.T | 28515 | 6.13 | 0.35 |
| 992 | 169.L.Q & 887.T.D | 29749 | 6.12 | 0.33 |
| 1016 | 9.K.G & 171.A.D | 27958 | 6 | 0.27 |
| 1005 | 826.V.M & 887.T.D | 28925 | 5.98 | 0.31 |
| 979 | 64.R.Q & 171.A.Y | 28369 | 5.93 | 0.42 |
| 1017 | 9.K.G & 224.G.T | 33212 | 5.84 | 0.44 |
| 985 | 169.L.K & 171.A.Y | 28438 | 5.77 | 0.34 |
| 978 | 64.R.Q & 169.L.Q | 29308 | 5.76 | 0.33 |
| 1003 | 9.K.G & 27.—.R | 27865 | 5.75 | 0.36 |
| 1028 | 5.K.G & 304.M.T | 28101 | 5.67 | 0.36 |
| 1012 | 4.I.G & 398.Y.T | 28018 | 5.6 | 0.37 |
| 993 | 171.A.D & 224.G.T | 30888 | 5.48 | 0.34 |
| 1031 | 6.—.G & 169.L.K | 28137 | 5.44 | 0.34 |
| 1024 | 169.L.K & 398.Y.T | 28447 | 5.43 | 0.32 |
| 1030 | 171.A.D & 398.Y.T | 27973 | 5.34 | 0.33 |
| 980 | 64.R.Q & 171.A.S | 28370 | 5.28 | 0.3 |
| 1026 | 169.L.Q & 826.V.M | 29917 | 5.19 | 0.27 |
| 1006 | 826.V.M & 891.S.Q | 29011 | 5.11 | 0.29 |
| 1014 | 4.I.G & 891.S.Q | 28036 | 4.95 | 0.29 |
| 999 | 224.G.T & 304.M.T | 35402 | 4.91 | 0.34 |
| 1036 | 171.A.S & 887.T.D | 28524 | 4.89 | 0.35 |
| 1010 | 4.I.G & 171.A.Y | 28009 | 4.86 | 0.33 |
| 996 | 171.A.Y & 891.S.Q | 28499 | 4.82 | 0.31 |
| 1000 | 224.G.T & 891.S.Q | 35512 | 4.64 | 0.37 |
| 1023 | 64.R.Q & 224.G.T | 34088 | 4.49 | 0.42 |
| 1038 | 224.G.T & 826.V.M | 35507 | 4.48 | 0.27 |
| 1034 | 171.A.Y & 826.V.M | 28498 | 4.43 | 0.43 |
| 1021 | 35.R.P & 304.M.T | 28301 | 4.4 | 0.18 |
| 515 | — | 228 | 4.26 | 0.24 |
| 998 | 171.A.S & 826.V.M | 28532 | 4.18 | 0.25 |
| 981 | 64.R.Q & 304.M.T | 28374 | 4.16 | 0.37 |
| 1015 | 5.—.G & 304.M.T | 28058 | 4.14 | 0.28 |
| 986 | 169.L.K & 171.A.S | 28439 | 4.1 | 0.39 |
| 987 | 169.L.K & 304.M.T | 28443 | 4.06 | 0.3 |
| 1025 | 169.L.K & 891.S.Q | 28465 | 3.95 | 0.27 |
| 1007 | 304.M.T & 826.V.M | 28650 | 3.95 | 0.93 |
| 997 | 171.A.S & 304.M.T | 28511 | 3.88 | 0.31 |
| 1143 | 4.I.G & 826.V.M | 28035 | 3.72 | 0.3 |
| 1006 | 826.V.M & 891.S.Q | 29011 | 3.68 | 0.3 |
| 969 | 27.—.R, 171.A.D, & | 49871 | 3.47 | 0.24 |
| | 224.G.T | | | |
| 1019 | 27.—.R & 171.A.S | 27872 | 3.27 | 0.1 |
| 970 | 27.—.R & 891.S.Q | 27898 | 3.04 | 0.2 |
| 1004 | 304.M.T & 891.S.Q | 28651 | 3.03 | 0.2 |
| 676 | 27.—.R, 170.L.K, & | 30074 | 2.97 | 0.22 |
| | 224.G.S | | | |
| 984 | 64.R.Q & 891.S.Q | 28396 | 2.84 | 0.95 |
| 792 | 27.—.R & 169.L.K | 27870 | 2.6 | 0.18 |

*Specificity ratio and SEM values are shown rounded to the nearest hundredth.

[0939] As shown in Table 28, the majority of the tested engineered CasX proteins had higher on-target to off-target editing ratios than CasX 515. While the previously validated high-specificity variant CasX 812 had the highest specificity ratio, consistent with results described in Example 2, above, many engineered CasX proteins demonstrated high specificity ratios without as significant a loss in on-target activity as was observed for CasX 812.

[0940] The 35.R.P mutation was commonly observed in variants with very high specificity ratios. This residue is in the OBD and believed to be involved in binding the guide RNA. Mutation to a proline at this position may have complex effects on allosteric regulation. Notably, these variants also tended to have low activity, suggesting that apparent specificity may be in part the result of less efficient RNP formation due to the disruption of this guide-binding interaction. Overall, an inverse correlation was observed between specificity ratio and activity. This suggests that it is difficult to fully avoid trade-offs between activity and specificity. However, it is also evident that the strategy of combining activity and specificity mutants can compensate for this trade-off and result in variants with both characteristics improved.

[0941] Notably, some engineered CasX variants produced both higher levels of on-target editing and lower levels of off-target editing than did CasX 515, namely engineered CasX proteins 977, 978, 980, 982, 983, 985, 989, 992, 993, 994, 1001, 1005, 1009, 1016, 1018, 1026, 1028, 1029, 1031, 1040, and 1041. An even greater number had higher on-target activity and a higher specificity ratio, specifically, engineered CasX proteins 977, 978, 980, 982, 983, 985, 989, 992, 993, 994, 996, 999, 1000, 1001, 1005, 1006, 1009, 1014, 1016, 1018, 1026, 1028, 1029, 1031, 1040, and 1041. Such engineered CasX proteins are therefore interpreted to be highly active and highly specific.

[0942] Taken together, the results described herein demonstrate that mutations to CasX 515 can be introduced into the sequence that result in engineered CasX with improved gene editing activity and/or specificity.

### Example 8: Design and Assessment of Modified gRNAs in Improving Editing when Delivered Together with CasX mRNA In Vitro and In Vivo

[0943] Experiments were performed to identify new gRNA scaffold sequences and demonstrate that chemical modifications of these gRNA scaffolds enhance the editing efficiency of the CasX:gRNA system when delivered in vitro in conjunction with CasX mRNA as editing pairs.

### Materials and Methods

Synthesis of gRNAs:

[0944] All gRNAs tested in this example were chemically synthesized and were derived from gRNA scaffolds 174 and 235 and engineered ribonucleic acid scaffold (ERS) 316. The sequences of gRNA scaffolds 174 and 235 and ERS 316 and their chemical modification profiles are listed in Table 29. The sequences of the resulting gRNAs, including spacers targeting PCSK9, B2M, or ROSA26, and their chemical modification profiles assayed in this example are listed in Table 30. A schematic of the structure of gRNA scaffolds 174 and 235 and ERS 316 are shown in FIGS. 11A-11C, respectively, and the sites of chemical modifications of the gRNAs are shown schematically in FIGS. 8A, 8B, 10, 16A, and 16B.

TABLE 29
Sequences of gRNA scaffolds and ERSs with their different
chemical modification profiles (denoted by version number),
where “NNNNNNNNNNNNNNNNNNNN” is a spacer placeholder.
Chemical modifications: * = phosphorothioate bond; m =
2′OMe modification

| gRNA | | |
|---|---|---|
| scaffold/ | | |
| ERS no. | | SEQ ID |
| (version) | gRNA sequence | NO |
| 174 (v0) | ACUGGCGCUUUUAUCUGAUUACUUUGAGAGCCAUCACCAGCGACUAUGUCGUAGUGGGU | 49749 |
| | AAAGCUCCCUCUUCGGAGGGAGCAUCAAAGNNNNNNNNNNNNNNNNNNNN | |
| 174 (v1) | mA*mC*mU*GGCGCUUUUAUCUGAUUACUUUGAGAGCCAUCACCAGCGACUAUGUCGUA | 49750 |
| | GUGGGUAAAGCUCCCUCUUCGGAGGGAGCAUCAAAGNNNNNNNNNNNNNNNNNmN*mN* | |
| | mN | |
| 174 (v2) | mA*mC*mU*GGCGCUUUUAUCUGAUUACUUUGAGAGCCAUCACCAGCGACUAUGUCGUA | 49751 |
| | GUGGGUAAAGCUCCCUCUUCGGAGGGAGCAUCAAAGNNNNNNNNNNNNNNNNNNNN*mU | |
| | *mU*mU | |
| 174 (v3) | mA*mC*mU*mGmGmCmGmCmUmUmUmUmAmUmCmUmGmAmUUACUUUGmAmGmAmGmCm | 49752 |
| | CmAmUmCmAmCmCAGCGAmCmUAUmGmUmCmGUAGUGmGmGmUmAmAmAmGmCmUmCmC | |
| | mCmUmCmUmUmCmGmGmAmGmGmGmAmGmCmAmUmCmAAAGNNNNNNNNNNNNNNNNNm | |
| | N*mN*mN | |
| 174 (v4) | mA*mC*mU*mGmGmCmGmCUUUUmAmUmCmUmGmAmUUACUUUGmAmGmAmGmCmCmAm | 49753 |
| | UmCmAmCmCAGCGAmCmUAUmGmUmCmGUAGUGmGmGmUmAmAmAmGmCmUmCmCmCmU | |
| | mCmUmUmCmGmGmAmGmGmGmAmGmCmAmUCAAAGNNNNNNNNNNNNNNNNNmN*mN*m | |
| | N | |
| 174 (v5) | mA*mC*mU*GGCGCUUUUAUCUGAUUACUUUGAGAGCCAUCACCAGCGAmCmUAUmGmU | 49754 |
| | mCmGUAGUGGGUAAAmGmCmUmCmCmCmUmCmUmUmCmGmGmAmGmGmGmAmGmCAUCA | |
| | AAGNNNNNNNNNNNNNNNNNmN*mN*mN | |
| 174 (v6) | mA*mC*mU*GGCGCUUUUAUCUGAUUACUUUGAGAGCCAUCACCAGCGACUAUGUCGUA | 49755 |
| | GUGGGUAAAmGmCmUmCmCmCmUmCmUmUmCmGmGmAmGmGmGmAmGmCAUCAAAGNNN | |
| | NNNNNNNNNNNNNNmN*mN*mN | |
| 174 (v7) | mA*mC*mU*GGmCGmCmUUUUAmUmCUGAUUACUUUGmAmGAGCCmAmUmCmAmCCAGC | 49756 |
| | mGmAmCmUAUmGmUmCmGUAGUGGmGmUAmAmAmGmCmUmCmCmCmUmCmUmUmCmGmG | |
| | mAmGmGmGmAmGmCmAmUCAAAGNNNNNNNNNNNNNNNNN*mN*mN*mN | |
| 174 (v8) | mA*mC*mU*GGCGCUUUUAUCUGAUUACUUUGAGAGCCmAmUmCmAmCCAGCmGmAmCm | 49757 |
| | UAUmGmUmCmGUAGUGGmGmUmAmAAmGmCmUmCmCmCmUmCmUmUmCmGmGmAmGmGm | |
| | GmAmGmCmAmUCAAAGNNNNNNNNNNNNNNNNN*mN*mN*mN | |
| 174 (v9) | mA*mC*mU*GGmCmGCmUUUUAmUmCUGAUUACUUUGmAmGAGCCAUCACCAGCmGmAm | 49758 |
| | CmUAUmGmUmCmGUAGUGGGUAAAmGmCmUmCmCmCmUmCmUmUmCmGmGmAmGmGmGm | |
| | AmGmCAUCAAAGNNNNNNNNNNNNNNNNN*mN*mN*mN | |
| 235 (v0) | ACUGGCGCUUCUAUCUGAUUACUCUGAGCGCCAUCACCAGCGACUAUGUCGUAGUGGGU | 49759 |
| | AAAGCCGCUUACGGACUUCGGUCCGUAAGAGGCAUCAGAGNNNNNNNNNNNNNNNNNNN | |
| | N | |
| 235 (v1) | mA*mC*mU*GGCGCUUCUAUCUGAUUACUCUGAGCGCCAUCACCAGCGACUAUGUCGUA | 49760 |
| | GUGGGUAAAGCCGCUUACGGACUUCGGUCCGUAAGAGGCAUCAGAGNNNNNNNNNNNNN | |
| | NNNNmN*mN*mN | |
| 235 (v2) | mA*mC*mU*GGCGCUUCUAUCUGAUUACUCUGAGCGCCAUCACCAGCGACUAUGUCGUA | 49761 |
| | GUGGGUAAAGCCGCUUACGGACUUCGGUCCGUAAGAGGCAUCAGAGNNNNNNNNNNNNN | |
| | NNNNNNN*mU*mU*mU | |
| 235 (v3) | mA*mC*mU*mGmGmCmGmCmUmUmCmUmAmUmCmUmGmAmUUACUCUGmAmGmCmGmCm | 49762 |
| | CmAmUmCmAmCmCAGCGAmCmUAUmGmUmCmGUAGUGmGmGmUmAmAmAmGmCmCmGmC | |
| | mUmUmAmCmGmGmAmCmUmUmCmGmGmUmCmCmGmUmAmAmGmAmGmGmCmAmUmCmAG | |
| | AGNNNNNNNNNNNNNNNNNmN*mN*mN | |
| 235 (v4) | mA*mC*mU*mGmGmCmGmCUUCUmAmUmCmUmGmAmUUACUCUGmAmGmCmGmCmCmAm | 49763 |
| | UmCmAmCmCAGCGAmCmUAUmGmUmCmGUAGUGmGmGmUmAmAmAmGmCmCmGmCmUmU | |
| | mAmCmGmGmAmCmUmUmCmGmGmUmCmCmGmUmAmAmGmAmGmGmCmAmUCAGAGNNNN | |
| | NNNNNNNNNNNNNmN*mN*mN | |
| 235 (v5) | mA*mC*mU*GGCGCUUCUAUCUGAUUACUCUGAGCGCCAUCACCAGCGAmCmUAUmGmU | 49764 |
| | mCmGUAGUGGGUmAmAmAmGmCmCmGmCmUmUmAmCmGmGmAmCmUmUmCmGmGmUmCm | |
| | CmGmUmAmAmGmAmGmGmCAUCAGAGNNNNNNNNNNNNNNNNNmN*mN*mN | |
| 235 (v6) | mA*mC*mU*GGCGCUUCUAUCUGAUUACUCUGAGCGCCAUCACCAGCGACUAUGUCGUA | 49765 |
| | GUGGGUmAmAmAmGmCmCmGmCmUmUmAmCmGmGmAmCmUmUmCmGmGmUmCmCmGmUm | |
| | AmAmGmAmGmGmCAUCAGAGNNNNNNNNNNNNNNNNNmN*mN*mN | |
| 235 (v7) | mA*mC*mU*GGmCGmCmUUCUAmUmCUGAUUACUCUGmAmGCGCCmAmUmCmAmCCAGC | 49766 |
| | mGmAmCmUAUmGmUmCmGUAGUGGmGmUmAmAAmGmCmCmGmCmUmUmAmCmGmGmAmC | |
| | mUmUmCmGmGmUmCmCmGmUmAmAmGmAmGmGmCmAmUCAGAGNNNNNNNNNNNNNNNN | |
| | N*mN*mN*mN | |
| 235 (v8) | mA*mC*mU*GGCGCUUCUAUCUGAUUACUCUGAGCGCCmAmUmCmAmCCAGCmGmAmCm | 49767 |
| | UAUmGmUmCmGUAGUGGmGmUmAmAAmGmCmCmGmCmUmUmAmCmGmGmAmCmUmUmCm | |
| | GmGmUmCmCmGmUmAmAmGmAmGmGmCmAmUCAGAGNNNNNNNNNNNNNNNNN*mN*mN | |
| | *mN | |
| 235 (v9) | mA*mC*mU*GGmCGmCmUUCUAmUmCUGAUUACUCUGmAmGCGCCAUCACCAGCmGmAm | 49768 |
| | CmUAUmGmUmCmGUAGUGGGUAAAmGmCmCmGmCmUmUmAmCmGmGmAmCmUmUmCmGm | |
| | GmUmCmCmGmUmAmAmGmAmGmGmCAUCAGAGNNNNNNNNNNNNNNNNN*mN*mN*mN | |
| 316 (v0) | ACUGGCGCUUCUAUCUGAUUACUCUGAGCGCCAUCACCAGCGACUAUGUCGUAGUGGGU | 49769 |
| | AAAGCUCCCUCUUCGGAGGGAGCAUCAGAGNNNNNNNNNNNNNNNNNNNN | |
| 316 (v1) | mA*mC*mU*GGCGCUUCUAUCUGAUUACUCUGAGCGCCAUCACCAGCGACUAUGUCGUA | 49770 |
| | GUGGGUAAAGCUCCCUCUUCGGAGGGAGCAUCAGAGNNNNNNNNNNNNNNNNN*mN*mN | |
| | *mN | |
| 316 (v2) | mA*mC*mU*GGCGCUUCUAUCUGAUUACUCUGAGCGCCAUCACCAGCGACUAUGUCGUA | 49771 |
| | GUGGGUAAAGCUCCCUCUUCGGAGGGAGCAUCAGAGNNNNNNNNNNNNNNNNNNNN*mU | |
| | *mU*mU | |
| 316 (v3) | mA*mC*mU*mGmGmCmGmCmUmUmCmUmAmUmCmUmGmAmUUACUCUGmAmGmCmGmCm | 49772 |
| | CmAmUmCmAmCmCAGCGAmCmUAUmGmUmCmGUAGUGmGmGmUmAmAmAmGmCmUmCmC | |
| | mCmUmCmUmUmCmGmGmAmGmGmGmAmGmCmAmUmCmAGAGNNNNNNNNNNNNNNNNN* | |
| | mN*mN*mN | |
| 316 (v4) | mA*mC*mU*mGmGmCmGmCUUCUmAmUmCmUmGmAmUUACUCUGmAmGmCmGmCmCmAm | 49773 |
| | UmCmAmCmCAGCGAmCmUAUmGmUmCmGUAGUGmGmGmUmAmAmAmGmCmUmCmCmCmU | |
| | mCmUmUmCmGmGmAmGmGmGmAmGmCmAmUCAGAGNNNNNNNNNNNNNNNNN*mN*mN* | |
| | mN | |
| 316 (v5) | mA*mC*mU*GGCGCUUCUAUCUGAUUACUCUGAGCGCCAUCACCAGCGAmCmUAUmGmU | 49774 |
| | mCmGUAGUGGGUAAAmGmCmUmCmCmCmUmCmUmUmCmGmGmAmGmGmGmAmGmCAUCA | |
| | GAGNNNNNNNNNNNNNNNNN*mN*mN*mN | |
| 316 (v6) | mA*mC*mU*GGCGCUUCUAUCUGAUUACUCUGAGCGCCAUCACCAGCGACUAUGUCGUA | 49775 |
| | GUGGGUAAAmGmCmUmCmCmCmUmCmUmUmCmGmGmAmGmGmGmAmGmCAUCAGAGNNN | |
| | NNNNNNNNNNNNNN*mN*mN*mN | |
| 316 (v7) | mA*mC*mU*GGmCGmCmUUCUAmUmCUGAUUACUCUGmAmGCGCCmAmUmCmAmCCAGC | 49776 |
| | mGmAmCmUAUmGmUmCmGUAGUGGmGmUmAmAAmGmCmUmCmCmCmUmCmUmUmCmGmG | |
| | mAmGmGmGmAmGmCmAmUCAGAGNNNNNNNNNNNNNNNNN*mN*mN*mN | |
| 316 (v8) | mA*mC*mU*GGCGCUUCUAUCUGAUUACUCUGAGCGCCmAmUmCmAmCCAGCmGmAmCm | 49777 |
| | UAUmGmUmCmGUAGUGGmGmUmAmAAmGmCmUmCmCmCmUmCmUmUmCmGmGmAmGmGm | |
| | GmAmGmCmAmUCAGAGNNNNNNNNNNNNNNNNN*mN*mN*mN | |
| 316 (v9) | mA*mC*mU*GGmCGmCmUUCUAmUmCUGAUUACUCUGmAmGCGCCAUCACCAGCmGmAm | 49749 |
| | CmUAUmGmUmCmGUAGUGGGUAAAmGmCmUmCmCmCmUmCmUmUmCmGmGmAmGmGmGm | |
| | AmGmCAUCAGAGNNNNNNNNNNNNNNNNN*mN*mN*mN | |

TABLE 30
Sequences of gRNAs with their different chemical modification
profiles (denoted by version number) assayed in this example.
Chemical modifications: * = phosphorothioate bond; m = 2′OMe
modification

| gRNA ID | | | |
|---|---|---|---|
| (scaffold/ERS | | | SEQ ID |
| no .- spacer) | Target | gRNA sequence | NO |
| 174-6.7 | human | ACUGGCGCUUUUAUCUGAUUACUUUGAGAGCCAUCACCAGCGACUAU | 501 |
| (v0) | PCSK9 | GUCGUAGUGGGUAAAGCUCCCUCUUCGGAGGGAGCAUCAAAGUCCUG | |
| | | GCUUCCUGGUGAAGA | |
| 174-6.7 | human | mA*mC*mU*GGCGCUUUUAUCUGAUUACUUUGAGAGCCAUCACCAGC | 502 |
| (v1) | PCSK9 | GACUAUGUCGUAGUGGGUAAAGCUCCCUCUUCGGAGGGAGCAUCAAA | |
| | | GUCCUGGCUUCCUGGUGAmA*mG*mA | |
| 174-6.8 | human | ACUGGCGCUUUUAUCUGAUUACUUUGAGAGCCAUCACCAGCGACUAU | 503 |
| (v0) | PCSK9 | GUCGUAGUGGGUAAAGCUCCCUCUUCGGAGGGAGCAUCAAAGUGGCU | |
| | | UCCUGGUGAAGAUGA | |
| 174-6.8 | human | mA*mC*mU*GGCGCUUUUAUCUGAUUACUUUGAGAGCCAUCACCAGC | 504 |
| (v1) | PCSK9 | GACUAUGUCGUAGUGGGUAAAGCUCCCUCUUCGGAGGGAGCAUCAAA | |
| | | GUGGCUUCCUGGUGAAGAmU*mG*mA | |
| 174-7.9 | human | ACUGGCGCUUUUAUCUGAUUACUUUGAGAGCCAUCACCAGCGACUAU | 505 |
| (v0) | B2M | GUCGUAGUGGGUAAAGCUCCCUCUUCGGAGGGAGCAUCAAAGGUGUA | |
| | | GUACAAGAGAUAGAA | |
| 174-7.9 | human | mA*mC*mU*GGCGCUUUUAUCUGAUUACUUUGAGAGCCAUCACCAGC | 506 |
| (v1) | B2M | GACUAUGUCGUAGUGGGUAAAGCUCCCUCUUCGGAGGGAGCAUCAAA | |
| | | GGUGUAGUACAAGAGAUAmG*mA*mA | |
| 316-6.7 | human | ACUGGCGCUUCUAUCUGAUUACUCUGAGCGCCAUCACCAGCGACUAU | 507 |
| (v0) | PCSK9 | GUCGUAGUGGGUAAAGCUCCCUCUUCGGAGGGAGCAUCAGAGUCCUG | |
| | | GCUUCCUGGUGAAGA | |
| 316-6.7 | human | mA*mC*mU*GGCGCUUCUAUCUGAUUACUCUGAGCGCCAUCACCAGC | 508 |
| (vl’) | PCSK9 | GACUAUGUCGUAGUGGGUAAAGCUCCCUCUUCGGAGGGAGCAUCAGA | |
| | | GUCCUGGCUUCCUGGUGAmA*mG*mA | |
| 316-6.8 | human | ACUGGCGCUUCUAUCUGAUUACUCUGAGCGCCAUCACCAGCGACUAU | 509 |
| (v0) | PCSK9 | GUCGUAGUGGGUAAAGCUCCCUCUUCGGAGGGAGCAUCAGAGUGGCU | |
| | | UCCUGGUGAAGAUGA | |
| 316-6.8 | human | mA*mC*mU*GGCGCUUCUAUCUGAUUACUCUGAGCGCCAUCACCAGC | 510 |
| (v1’) | PCSK9 | GACUAUGUCGUAGUGGGUAAAGCUCCCUCUUCGGAGGGAGCAUCAGA | |
| | | GUGGCUUCCUGGUGAAGAmU*mG*mA | |
| 316-7.9 | human | ACUGGCGCUUCUAUCUGAUUACUCUGAGCGCCAUCACCAGCGACUAU | 511 |
| (v0) | B2M | GUCGUAGUGGGUAAAGCUCCCUCUUCGGAGGGAGCAUCAGAGGUGUA | |
| | | GUACAAGAGAUAGAA | |
| 316-7.9 | human | mA*mC*mU*GGCGCUUCUAUCUGAUUACUCUGAGCGCCAUCACCAGC | 512 |
| (v1’) | B2M | GACUAUGUCGUAGUGGGUAAAGCUCCCUCUUCGGAGGGAGCAUCAGA | |
| | | GGUGUAGUACAAGAGAUAmG*mA*mA | |
| 174-7.37 | human | ACUGGCGCUUUUAUCUgAUUACUUUGAGAGCCAUCACCAGCGACUAU | 513 |
| (v0) | B2M | GUCGUAgUGGGUAAAGCUCCCUCUUCGGAGGGAGCAUCAAAGGGCCG | |
| | | AGAUGUCUCGCUC | |
| 174-7.37 | human | mA*mC*mU*GGCGCUUUUAUCUgAUUACUUUGAGAGCCAUCACCAGC | 49778 |
| (v1*) | B2M | GACUAUGUCGUAgUGGGUAAAGCUCCCUCUUCGGAGGGAGCAUCAAA | |
| | | GGGCCGAGAUGUCUCG*mC*mU*mC | |
| 235-6.7 | human | ACUGGCGCUUCUAUCUGAUUACUCUGAGCGCCAUCACCAGCGACUAU | 515 |
| (v0) | PCSK9 | GUCGUAGUGGGUAAAGCCGCUUACGGACUUCGGUCCGUAAGAGGCAU | |
| | | CAGAGUCCUGGCUUCCUGGUGAAGA | |
| 235-6.7 | human | mA*mC*mU*GGCGCUUCUAUCUGAUUACUCUGAGCGCCAUCACCAGC | 516 |
| (v1) | PCSK9 | GACUAUGUCGUAGUGGGUAAAGCCGCUUACGGACUUCGGUCCGUAAG | |
| | | AGGCAUCAGAGUCCUGGCUUCCUGGUGAmA*mG*mA | |
| 235-6.7 | human | mA*mC*mU*GGCGCUUCUAUCUGAUUACUCUGAGCGCCAUCACCAGC | 517 |
| (v2) | PCSK9 | GACUAUGUCGUAGUGGGUAAAGCCGCUUACGGACUUCGGUCCGUAAG | |
| | | AGGCAUCAGAGUCCUGGCUUCCUGGUGAAGAU*mU*mU*mU | |
| 235-6.7 | human | mA*mC*mU*mGmGmCmGmCmUmUmCmUmAmUmCmUmGmAmUUACUCU | 518 |
| (v3) | PCSK9 | GmAmGmCmGmCmCmAmUmCmAmCmCAGCGAmCmUAUmGmUmCmGUAG | |
| | | UGmGmGmUmAmAmAmGmCmCmGmCmUmUmAmCmGmGmAmCmUmUmCm | |
| | | GmGmUmCmCmGmUmAmAmGmAmGmGmCmAmUmCmAGAGUCCUGGCUU | |
| | | CCUGGUGAmA*mG*mA | |
| 235-6.7 | human | mA*mC*mU*mGmGmCmGmCUUCUmAmUmCmUmGmAmUUACUCUGmAm | 519 |
| (v4) | PCSK9 | GmCmGmCmCmAmUmCmAmCmCAGCGAmCmUAUmGmUmCmGUAGUGmG | |
| | | mGmUmAmAmAmGmCmCmGmCmUmUmAmCmGmGmAmCmUmUmCmGmGm | |
| | | UmCmCmGmUmAmAmGmAmGmGmCmAmUCAGAGUCCUGGCUUCCUGGU | |
| | | GAmA*mG*mA | |
| 235-6.7 | human | mA*mC*mU*GGCGCUUCUAUCUGAUUACUCUGAGCGCCAUCACCAGC | 520 |
| (v5) | PCSK9 | GAmCmUAUmGmUmCmGUAGUGGGUmAmAmAmGmCmCmGmCmUmUmAm | |
| | | CmGmGmAmCmUmUmCmGmGmUmCmCmGmUmAmAmGmAmGmGmCAUCA | |
| | | GAGUCCUGGCUUCCUGGUGAmA*mG*mA | |
| 235-6.7 | human | mA*mC*mU*GGCGCUUCUAUCUGAUUACUCUGAGCGCCAUCACCAGC | 521 |
| (v6) | PCSK9 | GACUAUGUCGUAGUGGGUmAmAmAmGmCmCmGmCmUmUmAmCmGmGm | |
| | | AmCmUmUmCmGmGmUmCmCmGmUmAmAmGmAmGmGmCAUCAGAGUCC | |
| | | UGGCUUCCUGGUGAmA*mG*mA | |
| 235-6.8 | human | ACUGGCGCUUCUAUCUGAUUACUCUGAGCGCCAUCACCAGCGACUAU | 522 |
| (v0) | PCSK9 | GUCGUAGUGGGUAAAGCCGCUUACGGACUUCGGUCCGUAAGAGGCAU | |
| | | CAGAGUGGCUUCCUGGUGAAGAUGA | |
| 235-6.8 | human | mA*mC*mU*GGCGCUUCUAUCUGAUUACUCUGAGCGCCAUCACCAGC | 523 |
| (v1) | PCSK9 | GACUAUGUCGUAGUGGGUAAAGCCGCUUACGGACUUCGGUCCGUAAG | |
| | | AGGCAUCAGAGUGGCUUCCUGGUGAAGAmU*mG*mA | |
| 235-6.8 | human | mA*mC*mU*GGCGCUUCUAUCUGAUUACUCUGAGCGCCAUCACCAGC | 524 |
| (v2) | PCSK9 | GACUAUGUCGUAGUGGGUAAAGCCGCUUACGGACUUCGGUCCGUAAG | |
| | | AGGCAUCAGAGUGGCUUCCUGGUGAAGAUGA*mU*mU*mU | |
| 235-6.8 | human | mA*mC*mU*mGmGmCmGmCmUmUmCmUmAmUmCmUmGmAmUUACUCU | 49779 |
| (v3) | PCSK9 | GmAmGmCmGmCmCmAmUmCmAmCmCAGCGAmCmUAUmGmUmCmGUAG | |
| | | UGmGmGmUmAmAmAmGmCmCmGmCmUmUmAmCmGmGmAmCmUmUmCm | |
| | | GmGmUmCmCmGmUmAmAmGmAmGmGmCmAmUmCmAGAGUGGCUUCCU | |
| | | GGUGAAGAmU*mG*mA | |
| 235-6.8 | human | mA*mC*mU*mGmGmCmGmCUUCUmAmUmCmUmGmAmUUACUCUGmAm | 526 |
| (v4) | PCSK9 | GmCmGmCmCmAmUmCmAmCmCAGCGAmCmUAUmGmUmCmGUAGUGmG | |
| | | mGmUmAmAmAmGmCmCmGmCmUmUmAmCmGmGmAmCmUmUmCmGmGm | |
| | | UmCmCmGmUmAmAmGmAmGmGmCmAmUCAGAGUGGCUUCCUGGUGAA | |
| | | GAmU*mG*mA | |
| 235-6.8 | human | mA*mC*mU*GGCGCUUCUAUCUGAUUACUCUGAGCGCCAUCACCAGC | 527 |
| (v5) | PCSK9 | GAmCmUAUmGmUmCmGUAGUGGGUmAmAmAmGmCmCmGmCmUmUmAm | |
| | | CmGmGmAmCmUmUmCmGmGmUmCmCmGmUmAmAmGmAmGmGmCAUCA | |
| | | GAGUGGCUUCCUGGUGAAGAmU*mG*mA | |
| 235-6.8 | human | mA*mC*mU*GGCGCUUCUAUCUGAUUACUCUGAGCGCCAUCACCAGC | 528 |
| (v6) | PCSK9 | GACUAUGUCGUAGUGGGUmAmAmAmGmCmCmGmCmUmUmAmCmGmGm | |
| | | AmCmUmUmCmGmGmUmCmCmGmUmAmAmGmAmGmGmCAUCAGAGUGG | |
| | | CUUCCUGGUGAAGAmU*mG*mA | |
| 316-27.107 | mouse | ACUGGCGCUUCUAUCUGAUUACUCUGAGCGCCAUCACCAGCGACUAU | 529 |
| (v0) | PCSK9 | GUCGUAGUGGGUAAAGCUCCCUCUUCGGAGGGAGCAUCAGAGCUGGC | |
| | | UUCUUGGUGAAGAUG | |
| 316-27.107 | mouse | mA*mC*mU*GGCGCUUCUAUCUGAUUACUCUGAGCGCCAUCACCAGC | 49780 |
| (v1) | PCSK9 | GACUAUGUCGUAGUGGGUAAAGCUCCCUCUUCGGAGGGAGCAUCAGA | |
| | | GCUGGCUUCUUGGUGAAG*mA*mU*mG | |
| 316-27.107 | mouse | mA*mC*mU*GGmCGmCmUUCUAmUmCUGAUUACUCUGmAmGCGCCmA | 530 |
| (v7) | PCSK9 | mUmCmAmCCAGCmGmAmCmUAUmGmUmCmGUAGUGGmGmUmAmAAmG | |
| | | mCmUmCmCmCmUmCmUmUmCmGmGmAmGmGmGmAmGmCmAmUCAGAG | |
| | | CUGGCUUCUUGGUGAAG*mA*mU*mG | |
| 316-27.107 | mouse | mA*mC*mU*GGCGCUUCUAUCUGAUUACUCUGAGCGCCmAmUmCmAm | 531 |
| (v8) | PCSK9 | CCAGCmGmAmCmUAUmGmUmCmGUAGUGGmGmUmAmAAmGmCmUmCm | |
| | | CmCmUmCmUmUmCmGmGmAmGmGmGmAmGmCmAmUCAGAGCUGGCUU | |
| | | CUUGGUGAAG*mA*mU*mG | |
| 316-27.107 | mouse | mA*mc*mU*GGmCGmCmUUCUAmUmCUGAUUACUCUGmAmGCGCCAU | 532 |
| (v9*) | PCSK9 | CACCAGCmGmAmCmUAUmGmUmCmGUAGUGGGUAAAmGmCmUmCmCm | |
| | | CmUmCmUmUmCmGmGmAmGmGmGmAmGmCAUCAGAGCUGGCUUCUUG | |
| | | GUGAA*mG*mA*mU*mG | |
| 174-35.2 (v0) | ROSA26 | ACUGGCGCUUUUAUCUGAUUACUUUGAGAGCCAUCACCAGCGACUAU | 49781 |
| | | GUCGUAGUGGGUAAAGCUCCCUCUUCGGAGGGAGCAUCAAAGAGAAG | |
| | | AUGGGCGGGAGUCUU | |
| 174-35.2 (v2) | ROSA26 | mA*mC*mU*GGCGCUUUUAUCUGAUUACUUUGAGAGCCAUCACCAGC | 49782 |
| | | GACUAUGUCGUAGUGGGUAAAGCUCCCUCUUCGGAGGGAGCAUCAAA | |
| | | GAGAAGAUGGGCGGGAGUCUU*mU*mU*mU | |
| 316-35.2 (v0) | ROSA26 | ACUGGCGCUUCUAUCUGAUUACUCUGAGCGCCAUCACCAGCGACUAU | 49783 |
| | | GUCGUAGUGGGUAAAGCUCCCUCUUCGGAGGGAGCAUCAGAGAGAAG | |
| | | AUGGGCGGGAGUCUU | |
| 316-35.2 (v1) | ROSA26 | mA*mC*mU*GGCGCUUCUAUCUGAUUACUCUGAGCGCCAUCACCAGC | 49784 |
| | | GACUAUGUCGUAGUGGGUAAAGCUCCCUCUUCGGAGGGAGCAUCAGA | |
| | | GAGAAGAUGGGCGGGAGU*mC*mU*mU | |
| 316-35.2 (v5) | ROSA26 | mA*mC*mU*GGCGCUUCUAUCUGAUUACUCUGAGCGCCAUCACCAGC | 49785 |
| | | GAmCmUAUmGmUmCmGUAGUGGGUAAAmGmCmUmCmCmCmUmCmUmU | |
| | | mCmGmGmAmGmGmGmAmGmCAUCAGAGAGAAGAUGGGCGGGAGU*mC | |
| | | *mU*mU | |

Note that gRNAs annotated with a v1’ design contain one less phosphorothioate bond on the 3′ end of the gRNA. gRNAs annotated with v1* contain one extra phosphorothioate bond on the 3′ end of the gRNA. gRNAs annotated with a v9* contain an extra phosphorothioate bond on the 3′ end of the gRNA.

Biochemical Characterization of gRNA Activity:

[0945] Target DNA oligonucleotides with fluorescent moieties on the 5′ ends were purchased commercially (sequences listed in Table 31). Double-stranded DNA (dsDNA) targets were formed by mixing the oligos in a 1:1 ratio in 1× cleavage buffer (20 mM Tris HCl pH 7.5, 150 mM NaCl, 1 mM TCEP, 5% glycerol, 10 mM MgCl₂), following by heating to 95° C. for 10 minutes, and then allowing the solution to cool to room temperature. CasX ribonucleoproteins (RNPs) were reconstituted with CasX 491 and the indicated gRNAs at a final concentration of 1 μM with 1.2-fold excess of the indicated gRNA in 1× cleavage buffer. RNPs were allowed to form at 37° C. for 10 minutes.

[0946] The effects of various structural and chemical modifications to the gRNA scaffold on the cleavage rate of CasX 491 RNPs were determined. Cleavage reactions were prepared with final RNP concentrations of 200 nM and final target concentrations of 10 nM, and reactions were carried out at 16° C. and initiated by the addition of the labeled target DNA substrate (Table 31). Aliquots of reactions were taken at 0.25, 0.5, 1, 2, 5, and 10 minutes and quenched by adding an equal volume of 95% formamide with 20 mM EDTA. Samples were denatured at 95° C. for 10 minutes and resolved on a 10% urea-PAGE gel. Gels were imaged on a Typhoon™ laser-scanner platform and quantified using ImageQuant™ TL 8.2 image analysis software (Cytiva™). The apparent first-order rate constant of non-target strand cleavage (k_{cleave-}) was determined for each CasX:gRNA combination.

[0947] To determine the competent fraction formed by each gRNA, cleavage reactions were prepared with final RNP concentrations of 100 nM and final target concentrations of 100 nM. Reactions were carried out at 37° C. and initiated by the addition of the labeled target substrate (Table 31). Aliquots were taken at 0.5, 1, 2, 5, 10, and 30 minutes and quenched by adding an equal volume of 95% formamide with 25 mM EDTA. Samples were denatured by heating at 95° C. for 10 minutes and resolved on a 10% urea-PAGE gel. Gels were imaged and quantified as above. CasX was assumed to act as a single-turnover enzyme under the assayed conditions, as indicated by the observation that sub-stoichiometric amounts of enzyme would fail to cleave a greater-than-stoichiometric amount of target substrate even under extended time-scales, and instead would approach a plateau that scaled with the amount of enzyme present. Thus, the fraction of target substrate cleaved over long time-scales by an equimolar amount of RNP would be indicative of the fraction of RNP that was properly formed and active for cleavage. The cleavage traces were fitted with a biphasic rate model, as the cleavage reaction clearly deviated from monophasic under this concentration regime. The plateau of each fit was determined and reported as the active fraction for each RNP in Table 34.

TABLE 31
Sequences of target DNA substrate oligonucleotides with
fluorescent moieties on the 5′ ends used for biochemical
characterization of gRNA activity.

| DNA substrate | Sequence |
|---|---|
| 6.7/6.8 target top strand | /700/CATGTCTTCCATGGCCTTCTTCCTGGCT |
| (SEQ ID NO: 533) | TCCTGGTGAAGATGAGTGGCGACCTGCTGGAG |
| 6.7/6.8 target bottom strand | /800/CTCCAGCAGGTCGCCACTCATCTTCACC |
| (SEQ ID NO: 534) | AGGAAGCCAGGAAGAAGGCCATGGAAGACATG |

/700/ = IRDye700;
/800/ = IRDye800

In Vitro Transcription of CasX mRNA:

[0948] DNA templates encoding CasX 491 or CasX 676 (see Table 32 for encoding sequences) used for in vitro transcription were generated by PCR using forward primers containing a T7 promoter, followed by agarose gel extraction of the appropriately sized DNA. 25 ng/μL final concentration of template DNA was used in each in vitro transcription reaction that was carried out following the manufacturer's recommended protocol with slight modifications. Following in vitro transcription reaction incubation for 2-3 hours at 37° C., which were carried out with CleanCap® AG and N1-methyl-pseudouridine, DNAse digestion of template DNA and column-based purification using the Zymo RNA miniprep kit were performed. The poly(A) tail was added using E. coli PolyA Polymerase following the manufacturer's protocol, followed by column-based purification as stated above. Poly(A) tailed in vitro transcribed RNA was eluted in RNAse free water, analyzed on an Agilent TapeStation for integrity, and flash frozen prior to storage at −80° C.

TABLE 32
Encoding sequences of the CasX mRNA
molecules assessed in this example*

| CasX 491 | | SEQ |
|---|---|---|
| mRNA ID | Component (ID) | ID NO |
| CasX 491 | 5′UTR | 49786 |
| mRNA #1 | START codon + c-MYC NLS + linker | 49787 |
| | CasX 491 | 49788 |
| | Linker + c-MYC NLS | 49789 |
| | P2A mScarlet + STOP codon | 49790 |
| CasX 676 | 5′UTR + Kozak sequence | 49791 |
| mRNA #2 | START codon + c-MYC NLS | 49792 |
| | CasX 676 | 49793 |
| | c-MYC NLS + STOP codons | 49794 |
| | 3′UTR | 49795 |
| | Xbal restriction site (partial) | 49796 |
| | Poly(A) tail | 49797 |

*Components are listed in a 5′ to 3′ order within the constructs

In Vitro Delivery of gRNA and CasX mRNA Via Transfection:

[0949] Editing at the PCSK9 locus and consequential effects on secreted PCSK9 levels were assessed for conditions using CasX 491 mRNA co-delivered with a PCSK9-targeting gRNA with scaffold 174 compared to conditions where a PCSK9-targeting gRNA with ERS 316 was used. 100 ng of in vitro transcribed mRNA coding for CasX 491 with a P2A and mScarlet fluorescent protein was transfected into HepG2 cells with version 1 (v1) of gRNAs 174-6.7, 174-6.8, 316-6.7, and 316-6.8 (see Table 30) using lipofectamine. After a media change, the following were harvested at 28 hours post-transfection: 1) transfected cells were harvested for editing assessment at the PCSK9 locus by NGS; 2) media supernatant was harvested to measure secreted PCSK9 protein levels by ELISA. For editing analysis by NGS, amplicons were amplified from 200 ng of extracted gDNA with a set of primers targeting the PCSK9 locus and processed for sequencing. Specifically, genomic DNA (gDNA) from harvested cells was extracted using the Zymo Quick-DNA™ Miniprep Plus kit following the manufacturer's instructions. Target amplicons were formed by amplifying regions of interest from 50-100 ng of extracted gDNA with a set of primers targeting the human PCSK9 locus. These gene-specific primers contained an additional sequence at the 5′ ends to introduce Illumina reads 1 and 2 sequences. Further, they contained a 16-nucleotide random sequence that functioned as a unique molecular identifier (UMI). The quality and quantification of the amplicon was assessed using a Fragment Analyzer DNA analyzer kit (Agilent, dsDNA 35-1500 bp). Amplicons were sequenced on the Illumina MiSeq™ according to the manufacturer's instructions. Raw fastq sequencing files were processed by trimming for quality and adapter sequences and merging read 1 and read 2 into a single insert sequence; insert sequences were then analyzed by the CRISPResso2 (v 2.0.29) program. The percentage of reads modified in a window around the 3′ end of the spacer was determined. The activity of the CasX molecule was quantified as the total percent of reads that contain insertions, substitutions, and/or deletions anywhere within this window for each.

[0950] Secreted PCSK9 levels in the media supernatant were also analyzed using a fluorescence resonance energy transfer-based immunoassay from CISBio following the manufacturer's instructions. Here, a gRNA using scaffold 174 with spacer 7.37 (v0; see Table 30), which targeted the endogenous B2M (beta-2-microglobulin) locus, served as the non-targeting (NT) control. These results are shown in FIG. 12.

[0951] To compare the editing potency of version 0 (v0) and version 1 (vi) of B2M-targeting gRNAs, ˜6E4 HepG2 hepatocytes were seeded per well of a 96-well plate. 24 hours later, seeded cells were co-transfected using lipofectamine with 100 ng of in vitro transcribed mRNA coding for CasX 491 and different doses (1, 5, or 50 ng) of either v0 or vi of the B2M-targeting gRNA containing scaffold 174 and spacer 7.37 (see Table 30). Six days post-transfection, cells were harvested for B2M protein expression analysis via immunostaining of the B2M-dependent HLA protein, followed by flow cytometry using the Attune™ NxT flow cytometer. These results are shown in FIG. 9.

[0952] V1 through v6 variants of chemically-modified PCSK9-targeting gRNAs (Table 30) were assessed for their effects on editing potency and consequential effects on secreted PCSK9 levels in vitro. Briefly, 100 ng of in vitro transcribed mRNA coding for CasX protein 491 and a P2A and mScarlet fluorescent protein was transfected into HepG2 cells with 50 ng of the indicated chemically-modified gRNA using lipofectamine. After a media change, the following were harvested at 28 hours post-transfection: 1) transfected cells for editing assessment at the PCSK9 locus by NGS as described above; 2) media supernatant to measure secreted PCSK9 protein levels by ELISA, as described above. Here, a B2M-targeting gRNA was used as a non-targeting control. These results are shown in Table 35.

[0953] To formulate LNPs, CasX mRNA and gRNA were encapsulated into LNPs using GenVoy-ILM™ lipids on the Precision NanoSystems Inc. (PNI) Ignite™ Benchtop System and following the manufacturer's guidelines. GenVoy-ILM™ lipids are manufactured by PNI, with a proprietary composition of ionizable lipid:DSPC:cholesterol:stabilizer at 50:10:37.5:2.5 mol %. Briefly, to formulate LNPs, equal mass ratios of CasX mRNA and gRNA were diluted in PNI Formulation Buffer, pH 4.0. GenVoy-ILM™ was diluted 1:1 in anhydrous ethanol. mRNA/gRNA co-formulations were performed using a 6:1 N/P ratio. The RNA and lipids were run through a PNI laminar flow cartridge at a predetermined flow rate ratio (RNA:Genvoy-ILM™) on the PNI Ignite™ Benchtop System. After formulation, the LNPs were diluted in PBS, pH 7.4, to decrease the ethanol concentration and increase the pH, which increases the stability of the particles. Buffer exchange of the mRNA/sgRNA-LNPs was achieved by overnight dialysis into PBS, pH 7.4, at 4° C. using 10k Slide-A-Lyzer™ Dialysis Cassettes (Thermo Scientific™). Following dialysis, the mRNA/gRNA-LNPs were concentrated to >0.5 mg/mL using 100 kDa Amicon®-Ultra Centrifugal Filters (Millipore) and then filter-sterilized. Formulated LNPs were analyzed on a Stunner (Unchained Labs) to determine their diameter and polydispersity index (PDI). Encapsulation efficiency and RNA concentration was determined by RiboGreen™ assay using Invitrogen's Quant-iT™ Ribogreen™ RNA assay kit.

Delivery of LNPs Encapsulating CasX mRNA and Targeting gRNAs In Vitro:

[0954] ˜50,000 HepG2 cells, cultured in DMEM/F-12 media containing 10% FBS and 1% PenStrep, were seeded per well in a 96-well plate. The next day, seeded cells were treated with varying concentrations of LNPs, which were prepared in six 2-fold serial dilutions starting at 250 ng. These LNPs were formulated to encapsulate CasX 491 mRNA and a B2M-targeting gRNA incorporating either scaffold 174 or ERS 316 with spacer 7.9 (vi; see Table 30). Media was changed 24 hours after LNP treatment, and cells were cultured for six additional days prior to harvesting for gDNA extraction for editing assessment at the B2M locus by NGS and B2M protein expression analysis via HLA immunostaining, followed by flow cytometry using the Attune NxT flow cytometer. Briefly, for editing assessment, amplicons were amplified from 200 ng of extracted gDNA with primers targeting the human B2M locus and processed as described in above. The results of these assays are shown in FIGS. 13A and 13B.

[0955] ˜20,000 mouse Hepa1-6 hepatocytes were seeded per well in a 96-well plate. The following day, seeded cells were treated with varying concentrations of LNPs, which were prepared in eight 2-fold serial dilutions starting at 1000 ng. These LNPs were formulated to encapsulate CasX 676 mRNA #2 (see Table 32) and a ROSA26-targeting gRNA incorporating ERS 316 with spacer 35.2 (v1 or 5; see Table 30). Media was changed 24 hours post-treatment with LNPs, and cells were cultured for seven additional days prior to harvesting for gDNA extraction for editing assessment at the ROSA26 locus by NGS. Briefly, amplicons were amplified from extracted gDNA with primers targeting the mouse ROSA26 locus and processed as described above. The results of this experiment are shown in FIG. 14A.

Delivery of LNPs Encapsulating CasX mRNA and Targeting gRNA In Vivo:

[0956] To assess the effects of using v1 and v5 of ERS 316 in vivo, CasX 676 mRNA #2 (see Table 32) and a ROSA26-targeting gRNA using ERS 316 with spacer 35.2 (v1 or v5; see Table 30) were encapsulated within the same LNP using a 1:1 mass ratio for mRNA:gRNA. LNP co-formulations were generated as described above. Formulated LNPs were buffer-exchanged to PBS for in vivo injection. LNPs were administered intravenously through the retro-orbital sinus into 4-week old C57BL/6 mice. Mice were observed for five minutes after injection to ensure recovery from anesthesia before being placed into their home cage. Naïve, uninjected animals served as experimental controls. Six days post-administration, mice were euthanized, and the liver tissue was harvested for gDNA extraction using the Zymo Research Quick DNA/RNA Miniprep kit following the manufacturer's instructions. Target amplicons were then amplified from the extracted gDNA with a set of primers targeting the mouse ROSA26 locus and processed for editing assessment by NGS as described above. The results of this experiment are shown in FIG. 14B.

[0957] To compare the effects of using v7, v8, and v9 of ERS 316 on editing at the PCSK9 locus in vivo, CasX 676 mRNA #1 (see Table 33 for sequences) and a PCSK9-targeting gRNA using ERS 316 with spacer 27.107 (v1, v7, v8, or v9; see Table 30), were encapsulated within the same LNP using a 1:1 mass ratio for mRNA:gRNA for each gRNA. LNPs were administered retro-orbitally into 6-week old C57BL/6 mice, as described above, and mice were euthanized seven days post-injection to harvest liver tissue for gDNA extraction for editing assessment by NGS at the PCSK9 locus. The results of this experiment are shown in FIG. 15.

TABLE 33
Encoding sequences of CasX 676 mRNA #1 molecule

| CasX ID | Component (ID) | Description | SEQ ID NO |
|---|---|---|---|
| CasX 676 mRNA #1 | 5′UTR | Human HBA | 49798 |
| | START codon + | | 49792 |
| | c-MYC NLS | | |
| | CasX 676 | | 49793 |
| | c-MYC NLS + | | 49794 |
| | STOP codons | | |
| | 3′UTR | Human HBA | 49799 |
| | Poly(A) tail | | 49797 |

*Components are listed in a 5′ to 3′ order within the constructs

### Results:

Assessing the Effects of Various Chemical Modifications on gRNA Activity:

[0958] Several studies involving Cas9 have demonstrated that chemical modifications of the gRNA resulted in significantly improved editing activity when delivered with Cas9 mRNA. Following delivery of Cas9 mRNA and gRNA into target cells, unprotected gRNA is susceptible to degradation during the mRNA translation process. Addition of chemical modifications such as 2′O-methyl (2′OMe) groups and phosphorothioate bonds can reduce the susceptibility of the gRNA to cellular RNases, but also have the potential to disrupt folding of the gRNA and its interactions with the CRISPR-Cas protein. Given the lack of structural similarity between CasX and Cas9, as well as their respective gRNAs, appropriate chemical modification profiles must be designed and validated de novo. Using published structures of wild-type CasX from Deltaproteobacteria (PDB codes 6NY1, 6NY2, and 6NY3) as reference, residues that appeared potentially amenable to modification were selected. However, the published structures were of a wild type CasX ortholog and gRNA distinct from the species used as the basis for the engineered variants presented here, and they also lacked the resolution to confidently determine interactions between protein side-chains and the RNA backbone. These limitations introduced a significant amount of ambiguity into determining which nucleotides might be safely modified. As a result, six profiles of chemical modifications (denoted as versions) were designed for initial testing, and these six profiles are illustrated in FIGS. 8A and 8B. The v1 profile was designed as a simple end-protected structure, where the first and last three nucleotides were modified with 2′OMe and phosphorothioate bonds. In the v2 profile, 3′UUU tail was added to mimic the termination sequence used in cellular transcription systems and to move the modified nucleotides outside of the region of the spacer involved in target recognition. The v3 profile included the end protection as in v1, as well as the addition of 2′OMe modifications at all nucleotides identified to be potentially modifiable based on structural analysis. The v4 profile was modeled based on v3, but with all the modifications in the triplex region removed, as this structure was predicted to be more sensitive to any perturbation of the RNA helical structure and backbone flexibility. The v5 profile maintained chemical modifications in the scaffold stem and extended stem regions, while the v6 profile harbored modifications only in the extended stem. The extended stem is a region that would become fully exposed to solvent in the RNP and is amenable to replacement by other hairpin structures, and therefore presumably relatively insensitive to chemical modifications.

[0959] The minimally modified v1 gRNA was initially assessed against an unmodified gRNA (v0) to determine the potential benefit of such chemical modifications on editing when the gRNA was co-delivered with CasX mRNA to target cells. Modified (vi) and unmodified (v0) B2M-targeting gRNAs with spacer 7.37 were co-transfected with CasX mRNA into HepG2 cells, and editing at the B2M locus was measured by loss of surface presentation of the B2M-dependent HLA complex, as detected by flow cytometry (FIG. 9). The data demonstrate that use of the vi gRNA resulted in substantially greater loss of B2M expression compared to the levels seen with v0 gRNA across the various doses, thereby confirming that end modifications of the gRNA increased CasX-mediated editing activity upon delivery of the CasX mRNA and gRNA.

[0960] The broader set of gRNA chemical modification profiles were assessed using PCSK9-targeting gRNAs using scaffold variant 235 and spacers 6.7 and 6.8 to determine whether the additional chemical modifications would be able to support the formation of active RNPs. In vitro cleavage assays described above were performed to determine k_{cleave} and fraction competence for these engineered gRNAs harboring the various chemical modification profiles. The results from these in vitro cleavage assays are shown in Table 34. The data demonstrate that gRNAs with the v3 profiles exhibited no activity, an indication that the addition of some chemical modifications significantly interfered with RNP formation or activity. Adding v4 chemical modifications resulted in a reasonable cleavage rate in the excess RNP condition, but exhibited very low fraction competence. The difference between v3 and v4 modifications confirmed that modifications in the triplex region prevented the formation of any active RNP, either due to the inability of the gRNA to fold properly or a disruption in the gRNA-protein interactions. The reduced fraction competence resulting from appending v4 modifications suggest that while the gRNA was able to successfully assemble with the CasX protein to form a cleavage-competent RNP, a large majority of the gRNA was misfolded, or that the appended chemical modifications reduced the affinity of the gRNA for the CasX protein and impeded the efficiency of RNP formation. Application of the v5 or v6 profiles resulted in competent fractions that were comparable to, but slightly lower than, those obtained for reactions using the v1 and v2 modifications. While the k_{cleave} values were relatively consistent between v5 and v6 gRNAs, both v5 and v6 gRNAs achieved nearly half of the k_{cleave} values for v1 and v2 gRNAs. The reduced k_{cleave} value for v6 gRNA was particularly surprising, given the lack of expected interaction between the gRNA and CasX protein in the modified extended stem. However, for both v5 and v6 gRNAs, it is possible that the reduced flexibility of the gRNA, resulting from the 2′OMe modifications, inhibited structural changes in the RNP required for efficient cleavage, or that the modified initial base-pairs of the hairpin involved in CasX protein interaction had been negatively impacted by the inclusion of the 2′OMe groups.

TABLE 34
Parameters of cleavage activity assessed for CasX
RNPs with the various PCSK9-targeting gRNAs using
scaffold 235 and harboring the indicated chemical
modification profile, denoted by version number

| gRNA | | |
|---|---|---|
| (scaffold no.-spacer, | k_{cleave} | Fraction |
| version no.) | (min⁻¹) | competence |
| 235-6.7, v1 | 0.901 | 0.398 |
| 235-6.8, v1 | 1.36 | 0.398 |
| 235-6.7, v2 | 0.454 | 0.386 |
| 235-6.8, v2 | 2.03 | 0.361 |
| 235-6.7, v3 | 0 | 0 |
| 235-6.8, v3 | 0 | 0 |
| 235-6.7, v4 | 0.434 | 0.031 |
| 235-6.8, v4 | 0.257 | 0.005 |
| 235-6.7, v5 | 0.506 | 0.313 |
| 235-6.8, v5 | 0.680 | 0.388 |
| 235-6.7, v6 | 0.462 | 0.346 |
| 235-6.8, v6 | 0.715 | 0.325 |

[0961] The chemically-modified PCSK9-targeting gRNAs based on scaffold 235 were subsequently assessed for editing in a cell-based assay. CasX mRNA and chemically modified PCSK9-targeting gRNAs were co-transfected into HepG2 cells using lipofectamine. Editing levels were measured by indel rate at the PCSK9 locus by NGS and secreted PCSK9 levels by ELISA, and the data are displayed in Table 35. The data demonstrate that use of v3 and v4 gRNAs resulted in minimal editing activity at the PCSK9 locus, consistent with findings from the biochemical in vitro cleavage assays shown in Table 34. Meanwhile, use of v5 and v6 gRNAs resulted in editing levels, measured by indel rate and PCSK9 secretion, that were slightly lower than the levels attained with use of vi and v2 gRNAs (Table 35). Specifically, the results show that use of v1 and v2 gRNAs, which harbored end modifications, resulted in ˜80-85% editing at the PCSK9 locus, indicating that adding chemical modifications to the gRNA ends was sufficient to achieve efficient editing with CasX. While the data demonstrate that use of v5 and v6 gRNAs resulted in efficient editing in vitro, near-saturating levels of editing were observed with use of the v gRNA in this experiment where a single dose of the gRNA was transfected. As a result, the use of a single dose rendered it challenging to assess clearly the effects of the chemical modifications on editing under guide-limiting conditions. Therefore, profiles v1 and v5 were chosen for further testing, as v1 contains the simplest modification profile, and v5 is the most heavily modified profile whose application demonstrated robust activity in vitro (Tables 34 and 35).

TABLE 35
Editing levels measured by indel rate at PCSK9 locus by NGS and
secreted PCSK9 levels by ELISA in HepG2 cells co-transfected
with CasX 491 mRNA and various chemically-modified PCSK9-targeting
gRNAs using scaffold 235 and either spacer 6.7 or 6.8

| Experimental | Indel rate (edit fraction) | | Secreted PCSK9 (ng/mL) | |
|---|---|---|---|---|
| condition | Mean | Stdev | Mean | Stdev |
| CasX mRNA only | 0.0021 | 0.003 | 52 | 14 |
| 235-6.7, v1 | 0.83 | 0.0058 | 18 | 5.7 |
| 235-6.7, v2 | 0.79 | 0.0071 | 21 | 4 |
| 235-6.7, v3 | 0.024 | 0.02 | 48 | 19 |
| 235-6.7, v4 | 0.12 | 0.006 | 34 | 5.5 |
| 235-6.7, v5 | 0.73 | 0.023 | 21 | 9 |
| 235-6.7, v6 | 0.75 | 0.0069 | 22 | 8.8 |
| 235-6.8, v1 | 0.85 | 0.017 | 16 | 4.4 |
| 235-6.8, v2 | 0.83 | 0.0028 | 20 | 1.5 |
| 235-6.8, v3 | 0.023 | 0.0027 | 39 | 2.7 |
| 235-6.8, v4 | 0.088 | 0.0086 | 42 | 10 |
| 235-6.8, v5 | 0.77 | 0.017 | 19 | 1.6 |
| 235-6.8, v6 | 0.78 | 0.014 | 24 | 6.9 |
| Non-targeting ctrl | 0.0019 | 0.0026 | 42 | 12 |

[0962] The v1 and v5 profiles were further tested in another cell-based assay to assess their effects on editing efficiency. LNPs were formulated to co-encapsulate CasX mRNA 42 and v1 and v5 chemically-modified ROSA26-targeting gRNAs using the newly-designed ERS 316 (described further in the following sub-section). The “v5” profile was modified slightly for application to ERS 316. Three 2′ OMe modifications in the non-base-paired region immediately 5′ of the extended stem were removed to restrict modifications to the two stemloop regions. Hepa1-6 hepatocytes were treated with the resulting LNPs at various doses and harvested eight days post-treatment to assess editing at the ROSA26 locus, measured as indel rate detected by NGS (FIG. 14A). The data demonstrate that treatment with LNPs delivering the v5 ROSA26-targeting gRNA resulted in markedly lower editing levels across the range of doses compared to the levels achieved with the v1 counterpart (FIG. 14A). There are several possible explanations for the differences in relative activity observed with use of v5 gRNA in FIG. 14A relative to that observed in Table 35. The first and most likely possible explanation is that the single dose used to achieve editing shown in Table 35 was too high to measure differences in activity accurately between use of v5 gRNA and v1 gRNA. It is also possible that the removal of the modifications outside the stemloop motifs in the ERS 316 version of v5 negatively impacted guide activity. While it is possible that these modifications provide stability benefits that outweigh an activity cost imparted by the stemloop modifications, this seems unlikely given that increasing levels of modification have so far resulted in decreased activity. A final possible explanation is that the modifications in the v5 profile might negatively impact LNP formulation or behavior through differential interactions between the modified nucleotide backbone and the ionizable lipid of the LNP, potentially resulting in less efficient gRNA encapsulation or in less efficient gRNA release following internalization.

[0963] LNPs co-encapsulating the CasX mRNA #2 and vi and v5 chemically-modified ROSA26-targeting gRNAs based on ERS 316 were further tested in vivo. FIG. 14B shows the results of the editing assay as percent editing measured as indel rate at the ROSA26 locus. The data demonstrate that use of the v5 gRNA resulted in ˜5-fold lower editing compared to that achieved with use of the v1 gRNA, under more relevant testing conditions of in vivo LNP delivery. These findings support the reduced cleavage rate observed biochemically for the v5 gRNA in Table 34, an indication that the v5 modifications have interfered with some aspect of CasX activity. Given the consistent decrease in activity detected in v5 and v6 profiles (Table 34), the reduced editing may be attributed to modifications in the extended stem region. Although the extended stem of the gRNA has minimal interactions with the CasX protein, it is possible that addition of 2′OMe groups at the first base-pair disrupted either the CasX protein-gRNA interactions or the complex RNA fold where the extended stem meets the pseudoknot and triplex regions. More specifically, inclusion of the 2′OMe groups might have adversely affected the basal base-pairs of the gRNA extended stem and residues R49, K50, and K51 of the CasX protein. Finally, structural studies of CasX have suggested that flexibility of the gRNA is required for efficient DNA cleavage (Liu J, et al, CasX enzymes comprise a distinct family of RNA-guided genome editors. Nature 566:218-223 (2019); Tsuchida C A, et al, Chimeric CRISPR-CasX enzymes and guide RNAs for improved genome editing activity. Mol Cell 82(6): 1199-1209 (2022)). Thus, the addition of the 2′OMe groups throughout the extended stem might have enforced a more rigid A-form helical structure and prevented the needed flexibility for the gRNA for efficient cleavage. Furthermore, it is possible that the additional modifications in the scaffold stem in the v5 and v6 profiles might be detrimental to activity, though this is currently unclear given the limited comparisons between the v5 and v6 profiles.

[0964] Additional modification profiles were designed with the goal of enhancing gRNA stability while mitigating the adverse effects on RNP cleavage activity. Using recently published structures of wild-type CasX from Planctomycetes (PDB codes 7WAY, 7WAZ, 7WB0, 7WB1), which has a higher homology to the CasX proteins being assessed, additional chemical modification profiles for gRNAs were designed and are illustrated in FIG. 10. These profiles illustrate the addition of 2′OMe groups and phosphorothioate bonds to a newly-designed gRNA scaffold, which is described in the ensuing sub-section. These new gRNA chemical modification profiles were designed based on the initial data demonstrating sufficient editing activity observed in Table 35 with use of the v5 gRNA that suggested that modifications to the extended stem and scaffold stem regions would not negatively impact activity. The v7 profile was designed to include 2′OMe at residues likely to be modifiable throughout the gRNA structure, which excluded the triplex region, given the dramatic negative effects of adding such modifications observed earlier with the v3 profile. More conservative profiles, v8 and v9, were also designed, as illustrated in FIG. 10. For the v8 construct, modifications were removed in the pseudoknot and triplex loop region, but were retained in the scaffold stem, extended stem, and their flanking single-stranded regions, in addition to the 5′ and 3′ termini. For the v9 profile, modifications were removed in the single-stranded regions flanking the stemloops, but were retained in the stemloops themselves, in addition to the pseudoknot, triplex loop, and 5′ and 3′ termini. The additional chemical modification profiles v7, v8, and v9 of the newly designed ERS 316 (discussed further below) were assessed in vivo at the PCSK9 locus. The results of the editing assay in vivo quantified as percent editing at the PCSK9 locus measured as indel rate as detected NGS are illustrated in FIG. 15. Despite the fact that low editing efficiency was detected overall, the data demonstrate that use of v7, v8, and v9 gRNAs resulted in lower editing levels at the PCSK9 locus compared to the indel rate achieved with use of the v1 gRNA (FIG. 15). Given the findings in FIGS. 14A-14B showing inferior editing activity attained with the v5 gRNA, it is unsurprising that v7, v8, and v9 profiles similarly demonstrated comparatively lower editing activity. As illustrated in FIG. 10, the v7, v8, and v9 profiles include modifications throughout the extended stem region, which might have interfered with RNP activity.

Comparison of gRNA Scaffold 174 and ERS 316 Using an In Vitro Cleavage Assay:

[0965] Previous work had established gRNA scaffold 235 as the top-performing scaffold across multiple delivery conditions. However, the longer length of scaffold 235 (119 bp, when using a 20 bp spacer) relative to gRNAs including scaffold 174 (109 bp, when using a 20 bp spacer) increased the difficulty of solid-phase RNA synthesis, which would result in increased manufacturing costs, decreased purity and yield, and higher rates of synthesis failures. To address these issues but retain the improved activity of using scaffold 235, a chimeric gRNA scaffold was designed primarily on the basis of the scaffold 235 sequence, but the extended stemloop of scaffold 235 was replaced with the shorter extended stemloop of scaffold 174 (FIGS. 11A-11C). The resulting chimeric scaffold, named ERS 316, was synthesized in parallel with scaffold 174 and PCSK9-targeting spacers 6.7 and 6.8, and B2M-targeting spacer 7.9 harboring the vi chemical modification profile, with 2′OMe and phosphorothioate bonds on the first and last three nucleotides of all gRNAs (see Table 30). Scaffold 174 was chosen as the comparator rather than scaffold 235 because scaffold 174 was the best previously characterized scaffold with the same length as ERS 316.

[0966] In vitro cleavage activity was assessed for gRNAs with scaffold 174 and ERS 316 and spacers 6.7 and 6.8. Cleavage assays were carried out with 20-fold excess RNP over a matching dsDNA target. Cleavage rates were quantified for all four guides, and the results are shown in Table 36. The data demonstrate that in the context of spacer 6.7, use of either scaffold 174 or ERS 316 resulted in similar cleavage rates, with ERS 316 resulting in marginally faster cleavage than that achieved with scaffold 174. In the context of spacer 6.8, the difference in cleavage activity was more pronounced: CasX RNPs using ERS 316 were able to cleave DNA nearly twice as quickly as CasX RNPs using scaffold 174 (Table 36).

[0967] Assays were also performed with equimolar amounts of RNP and DNA target over a longer time course to assess the fraction of expected RNP active for cleavage. As the CasX RNP is essentially single-turnover over the tested timescale, and the concentrations used are expected to be substantially higher than the K_{D} of the DNA-binding reaction, the amount of cleaved DNA should approximate the amount of active RNP. For either spacer 6.7 or 6.8, the active fraction of CasX RNPs incorporating ERS 316 was 25-30% higher than for CasX RNPs using scaffold 174 (Table 36). These data suggest that a higher fraction of gRNA using ERS 316 was properly folded for association with the CasX protein, or that the gRNA using ERS 316 was able to associate more strongly with the CasX protein. Compared to scaffold 174, ERS 316 harbors mutations expected to stabilize the pseudoknot and triplex structures required for proper gRNA folding. The increased stability of these motifs in particular, which were more likely to misfold than the simple hairpins found elsewhere in the gRNA structure, might result in a slightly higher fraction of the gRNAs folding into an active conformation.

TABLE 36
Parameters of cleavage activity assessed for CasX RNPs
with gRNAs containing scaffold 174 or ERS 316 with
the version 1 (v1) chemical modification profile.

| gRNA | k_{cleave} | Fraction |
|---|---|---|
| (scaffold/ERS no.-spacer) | (min⁻¹) | competence |
| 174-6.7, v1 | 0.236 | 0.194 |
| 174-6.8, v1 | 0.142 | 0.165 |
| 316-6.7, v1 | 0.264 | 0.244 |
| 316-6.8, v1 | 0.272 | 0.213 |

Comparison of gRNA Scaffold 174 and ERS 316 in a Cell-Based Assay:

[0968] An editing assessment using gRNA scaffold 174 compared to ERS 316 was performed in a cell-based assay. CasX 491 mRNA and the version 1 (v1) of PCSK9-targeting gRNAs using spacers 6.7 and 6.8 were lipofected into HepG2 cells. Treated cells were harvested 28 hours post-transfection for analysis of editing levels at the PCSK9 locus by NGS and secreted PCSK9 levels by ELISA, and the data are presented in FIG. 12. The data demonstrate that use of any of the PCSK9-targeting gRNA tested resulted in efficient editing at the PCSK9 locus and substantial reduction in PCSK9 secretion compared to the non-targeting control using the B2M-targeting gRNA. The results also show that use of ERS 316 resulted in more effective editing at the PCSK9 locus than that observed with use of scaffold 174 (˜10 percentage point increase in editing rate achieved with ERS 316 over scaffold 174). This finding is further supported by the ELISA results, such that use of ERS 316 resulted in more effective reduction of PCSK9 secretion compared to that achieved with use of scaffold 174.

[0969] Scaffold 174 and ERS 316 were also assessed in an editing assay where LNPs were formulated to co-encapsulate CasX 491 mRNA and B2M-targeting gRNA harboring either scaffold. HepG2 cells were treated with the resulting LNPs at various doses and harvested seven days post-treatment to assess editing at the B2M locus, measured as indel rate detected by NGS (FIG. 13A) and loss of surface presentation of the B2M-dependent HLA complex, as detected by flow cytometry (FIG. 13B). The results from both assays demonstrate that treatment with LNPs to deliver the B2M-targeting gRNA using ERS 316 resulted in higher editing potency at the B2M locus compared to LNPs delivering the gRNA using scaffold 174 at each dose (FIGS. 13A and 13B). Specifically, at the highest dose of 250 ng, use of ERS 316 resulted in an editing level that was nearly two-fold higher than the level attained with using scaffold 174. This substantial increase in editing efficacy when using ERS 316 versus scaffold 174, compared to the comparatively modest difference in activity observed from the in vitro cleavage assays, might be attributed to the destabilization of gRNA structure and folding during LNP formulation. The low pH conditions and association of cationic lipids during LNP formulation could adversely affect parts of the gRNA structure and result in unfolding. Consequently, it would be necessary for the gRNA to refold quickly in the cytoplasm upon delivery, both to bind the CasX protein to form the RNP and to evade RNase degradation. The stability-increasing mutations in ERS 316 compared to scaffold 174 might provide a substantial benefit in supporting proper gRNA refolding in the cytoplasm after LNP delivery, while the deliberate folding protocol carried out for the gRNA prior to biochemical experiments likely reduced the impact of these mutations.

### Example 9: CpG-Depletion of DNA Encoding the Guide RNA Scaffold Improves CasX-Mediated Editing In Vitro

[0970] Pathogen-associated molecular patterns (PAMPs), such as unmethylated CpG motifs, are small molecular motifs conserved within a class of microbes. They are recognized by toll-like receptors (TLRs) and other pattern recognition receptors in eukaryotes and often induce a non-specific immune activation. In the context of gene therapy, therapeutics containing PAMPs are often not as well-tolerated and are rapidly cleared from the patient given the strong immune response triggered, which ultimately leads to reduced therapeutic efficacy. CpG motifs are short single-stranded DNA sequences containing the dinucleotide CG. When these CpG motifs are unmethylated, they act as PAMPs and therefore stimulate the immune response. In this example, experiments were performed to deplete CpG motifs in the guide scaffold coding sequence in the context of an AAV construct encoding CasX protein 491, guide scaffold 235, and spacer 7.37 targeting the endogenous B2M locus, and test the effect of CpG-depletion in the guide scaffold on editing of the B2M locus in vitro.

### Materials and Methods

### Design of CpG-Depleted Guide Scaffolds:

[0971] Nucleotide substitutions were rationally-designed to replace native CpG motifs within the base gRNA scaffold (gRNA scaffold 235) with the intent to preserve editing activity while reducing scaffold immunogenicity. It was believed that as many CpG-motifs as possible should be removed from the scaffold coding sequence in order to sufficiently reduce immunogenicity. Scaffold 235 contains a total of eight CpG elements; six of which are predicted to basepair and form complementary strands of a double-stranded secondary structure (see FIG. 17A). Therefore, the six basepairing CpGs forming three pairs were mutated in concert to maintain important secondary structures. This reduced the number of independent CpG-containing regions to five (three pairs and two single CpGs) to be considered independently for CpG-removal. Specifically, mutations were designed in (1) the pseudoknot stem, (2) the scaffold stem, (3) the extended stem bubble, (4) the extended step, and (5) the extended stem loop, as diagrammed in FIG. 17B and described in detail below.

[0972] In the pseudoknot stem (region 1), the CpG pair was flipped to a GpC to minimize the alteration of the base composition and sequence. Based on previous experiments involving replacing individual base pairs, it was anticipated that this mutation was not likely to be detrimental to the structure and function of the guide RNA scaffold.

[0973] Similarly, in the scaffold stem (region 2) the CpG pair was flipped to a GpC to minimize the alteration of the base composition and sequence. It was anticipated that this mutation was likely to be detrimental to the structure and function of the guide RNA scaffold because strong sequence conservation was seen in this region in previous experiments mutating individual bases or base pairs. This strong sequence conservation is likely due to the scaffold stem loop being important in interacting with the CasX protein as well as in the formation of a triplex structural element with the pseudoknot region.

[0974] In the extended stem bubble (region 3) the single CpG was removed by one of three strategies. First, the bubble was deleted by mutating CG->C. Second, the bubble was resolved to restore ideal basepairing by mutating CG->CT. Third, the entire extended stem loop was replaced with the extended stem loop of scaffold 174. Note that, by itself, the replacement of the extended stem loop with that of scaffold 174 recapitulates ERS 316, which has previously been shown to edit efficiently. There are no CpG motifs in the extended stem loop of scaffold 174. Therefore, replacing the extended stem loop with that of scaffold 174 also removes the CpG motif in the extended stem (region 4). Based on previous experiments showing the relative robustness of the extended stem to small changes, it was anticipated that mutating the extended stem bubble was moderately likely to be detrimental to the structure and function of the guide RNA scaffold.

[0975] In the extended stem (region 4), the CpG pair could not be flipped to GpC without generating additional CpG motifs. Therefore, the CpGs were changed to a GG and a complementary CC motif. Similar to region 3, based on the relative robustness of the extended stem to small changes, it was anticipated that this mutation was not likely to be detrimental to the structure and function of the guide RNA scaffold.

[0976] Finally, the extended stem loop (region 5) was mutated in one of three ways that were designed based on previous experiments examining the stability of the stem loop. In particular, several variations of the stem loop had previously been shown to have similar stability levels, and some of these variations of the stem loop do not contain CpGs. Based on these findings, first, the loop was replaced with a new loop with a CUUG sequence. Second, the loop was replaced with a new loop with a GAAA sequence. Since the GAAA loop replacement would generate a novel CpG adjacent to the loop, it was combined with a C—>G base swap and the corresponding G->C base swap on the complementary strand, ultimately resulting in a CUUCGG->GGAAAC exchange. Third, the loop was mutated by the insertion of an A to interrupt the CpG motif and thereby increase the size of the loop from 4 to 5 bases. It was anticipated that randomly mutating the extended stem loop would likely have detrimental effects on secondary structure stability and hence on editing. However, relying on previously confirmed sequences was believed to have a lower risk associated with a replacement.

[0977] To generate guide RNA scaffolds encoded by DNA with reduced CpG levels, the mutations described above were combined in various configurations. Table 37, below, summarizes combinations of the mutations that were used. In Table 37, a 0 indicates that no mutation was introduced to a given region, a 1, 2, or 3 indicates that a mutation was introduced in that region, as diagrammed in FIG. 17B, and n/a indicates not applicable. Specifically, for region 1, the pseudoknot stem, a 1 indicates that a CG->GC mutation was introduced. For region 2, the scaffold stem, a 1 indicates that a CG->GC mutation was introduced. For region 3, the extended stem bubble, a 1 indicates that the bubble was removed by the deletion of the G and A bases that form the bubble, a 2 indicates that the bubble was resolved by a CG->CU mutation that allows for basepairing between the A and U bases, and a 3 indicates that the extended stem loop was replaced with the extended step loop from guide scaffold 174. For region 4, the extended stem, a 1 indicates that a CG->GC mutation was introduced. For region 5, the extended stem loop, a 1 indicates that the loop was replaced from UUCG->CUUG, a 2 indicates that the loop was replaced along with a basepair adjacent to the loop, from CUUCGG->GGAAAC, and a 3 indicates that an A was inserted between the C and the G.

TABLE 37
Summary of mutations for CpG-reduction
and depletion in guide scaffold 235

| | | | Region 3 | | |
|---|---|---|---|---|---|
| | Region 1 | Region 2 | (Extended | Region 4 | Region 5 |
| Scaffold | (Pseudoknot | (Scaffold | stem | (Extended | (Extended |
| ID | stem) | stem) | bubble) | stem) | stem loop) |
| 320 | 1 | 0 | 0 | 1 | 0 |
| 321 | 1 | 0 | 1 | 1 | 0 |
| 322 | 1 | 0 | 2 | 1 | 0 |
| 323 | 1 | 0 | 3 | n/a | 0 |
| 324 | 1 | 0 | 1 | 1 | 1 |
| 325 | 1 | 0 | 2 | 1 | 1 |
| 326 | 1 | 0 | 3 | n/a | 1 |
| 327 | 1 | 0 | 1 | 1 | 2 |
| 328 | 1 | 0 | 2 | 1 | 2 |
| 329 | 1 | 0 | 3 | n/a | 2 |
| 330 | 1 | 0 | 1 | 1 | 3 |
| 331 | 1 | 0 | 2 | 1 | 3 |
| 332 | 1 | 0 | 3 | n/a | 3 |
| 334 | 1 | 1 | 2 | 1 | 1 |
| 335 | 1 | 1 | 3 | n/a | 1 |
| 336 | 1 | 1 | 1 | 1 | 2 |
| 337 | 1 | 1 | 2 | 1 | 2 |
| 338 | 1 | 1 | 3 | n/a | 2 |
| 339 | 1 | 1 | 1 | 1 | 3 |
| 340 | 1 | 1 | 2 | 1 | 3 |
| 341 | 1 | 1 | 3 | n/a | 3 |
| 235 | 0 | 0 | 0 | 0 | 0 |

[0978] Table 38, below, lists the DNA and RNA sequences of the designed CpG-reduced or depleted guide scaffolds.

TABLE 38
DNA and RNA sequences encoding CpG-reduced
or CpG-depleted guide RNA scaffolds

| | DNA sequence | RNA sequence |
|---|---|---|
| Scaffold ID | SEQ ID NO | SEQ ID NO |
| 320 | 535 | 160 |
| 321 | 536 | 161 |
| 322 | 537 | 162 |
| 323 | 538 | 163 |
| 324 | 539 | 164 |
| 325 | 540 | 165 |
| 326 | 541 | 166 |
| 327 | 542 | 167 |
| 328 | 543 | 168 |
| 329 | 544 | 169 |
| 330 | 545 | 170 |
| 331 | 546 | 171 |
| 332 | 547 | 172 |
| 333 | 548 | 173 |
| 334 | 549 | 174 |
| 335 | 550 | 175 |
| 336 | 551 | 176 |
| 337 | 552 | 177 |
| 338 | 553 | 178 |
| 339 | 554 | 179 |
| 340 | 555 | 180 |
| 341 | 556 | 181 |

### Generation of CpG-Depleted AAV Plasmids:

[0979] The CpG-reduced or depleted gRNA scaffolds were tested in the context of AAV vectors that were otherwise CpG-depleted, with the exception of the AAV2 ITRs. Specifically, nucleotide substitutions to replace native CpG motifs in AAV components were designed in silico based on homologous nucleotide sequences from related species for the following elements: the murine Ula snRNA (small nuclear RNA) gene promoter, the bGHpA (bovine growth hormone polyadenylation) sequence, and the human U6 promoter. The coding sequence for CasX 491 was codon-optimized for CpG depletion. All resulting sequences (Tables 38 and 39) were ordered as gene fragments with the appropriate overhangs for cloning and isothermal assembly to replace individually the corresponding elements of the existing base AAV plasmid (construct ID 183). Spacer 7.37 (GGCCGAGAUGUCUCGCUCCG; SEQ ID NO: 557), which targets the endogenous B2M gene, was used for the experiments discussed in this example. The first time that the experiment was performed (“N=1”), a sample with the non-targeting spacer 0.0 was also included as a control (CGAGACGTAATTACGTCTCG, SEQ ID NO: 558; see FIG. 18).

[0980] The resulting AAV constructs were generated using standard molecular cloning techniques. Cloned and sequence-validated plasmid constructs were midi-prepped for subsequent nucleofection and AAV vector production. The sequences of the additional components of AAV constructs, with the exception of sequences encoding the gRNAs (Table 38), are listed in Table 39.

TABLE 39
Sequences of AAV elements (5′-3′ in AAV construct)

| Element | SEQ ID NO |
|---|---|
| AAV2 5′ ITR | 559 |
| CpG-depleted U1a promoter | 560 |
| CpG-depleted cMycNLS-CasX491-cMycNLS | 561 |
| CpG-depleted bGH-polyA sequence | 562 |
| CpG-depleted U6 promoter | 563 |
| AAV2 3′ ITR | 564 |

### AAV Production:

[0981] Suspension-adapted HEK293T cells, maintained in FreeStyle 293 media, were seeded in 20-30 mL of media at 1.5E6 cells/mL on the day of transfection. Endotoxin-free pAAV plasmids with the transgene flanked by ITR repeats were co-transfected with plasmids supplying the adenoviral helper genes for replication and AAV rep/cap genome using PEI Max (Polysciences) in serum-free Opti-MEM media. Three days later, cultures were centrifuged to separate the supernatant from the cell pellet, and the AAV particles were collected, concentrated, and filtered following standard procedures.

[0982] To determine the viral genome (vg) titer, 1 μL from crude lysate viruses was digested with DNase and ProtK, followed by quantitative PCR. 5 μL of digested virus was used in a 25 μL qPCR reaction composed of IDT primetime master mix and a set of primer and 6′FAM/Zen/IBFQ probe (IDT) designed to amplify a 62 bp-fragment located in the AAV2-ITR. An AAV ITR plasmid was used as reference standards to calculate the titer (vg/mL) of viral samples.

### AAV Transduction of Induced Neurons In Vitro:

[0983] 24 hours prior to transduction, 50,000 induced neurons per well were seeded on Matrigel-coated 96-well plates. AAVs expressing the CasX:gRNA system with various versions of the guide scaffold were then diluted in neuronal plating media and added to cells. The first time that the experiment was performed (“N=1”), cells were transduced at a multiplicity of infection (MOI) of 4e3 viral genomes (vg)/cell (see FIG. 18). Seven days post-plating, induced neurons were transduced with virus diluted in fresh feeding media. Eight days post-transduction, cells were lifted using lysis buffer, 4-well replicates were pooled per experimental condition, and genomic DNA (gDNA) was harvested and prepared for editing analysis at the B2M locus using next generation sequencing (NGS). The second time that the experiment was performed (“N=2”), cells were transduced at an MOI of 3e3 vg/cell, 1e3 vg/cell, or 3e2 vg/cell (see FIG. 19, FIG. 20, and FIG. 21). Seven days post-plating, induced neurons were transduced with virus diluted in fresh feeding media. Seven days post-transduction, cells were lifted using lysis buffer, 2-well replicates were pooled per experimental condition, and gDNA was harvested and prepared for editing analysis at the B2M locus using NGS. Samples that were not transduced with AAV were included as controls.

### NGS Processing and Analysis:

[0984] Genomic DNA (gDNA) from harvested cells were extracted using the Zymo Quick-DNA Miniprep Plus kit following the manufacturer's instructions. Target amplicons were formed by amplifying regions of interest from 200 ng of extracted gDNA with a set of primers specific to the human B2M gene. These gene-specific primers contained an additional sequence at the 5′ end to introduce an Illumina adapter and a 16-nucleotide unique molecule identifier. Amplified DNA products were purified with the Ampure XP DNA cleanup kit. Quality and quantification of the amplicon were assessed using a Fragment Analyzer DNA Analysis kit (Agilent, dsDNA 35-1500 bp). Amplicons were sequenced on the Illumina Miseq according to the manufacturer's instructions. Raw fastq files from sequencing were quality-controlled and processed using cutadapt v2.1, flash2 v2.2.00, and CRISPResso2 v2.0.29. Each sequence was quantified for containing an insertion or deletion (indel) relative to the reference sequence, in a window around the 3′ end of the spacer (30 bp window centered at −3 bp from 3′ end of spacer). CasX activity was quantified as the total percent of reads that contain insertions, substitutions, and/or deletions anywhere within this window for each sample.

### Results:

[0985] Mutations were introduced into the guide scaffold 235 in order to reduce the CpG content of the DNA sequence coding the guide scaffold. Surprisingly, compared to scaffold 235, all of the CpG-reduced and CpG-depleted scaffolds produced higher levels of editing in induced neurons. This was the case with two independent repeats of the experiment (with the results from the first repeat of the experiment shown in FIG. 18, and the results of the second repeat of the experiment shown in FIGS. 19-21), and across multiple MOIs (see FIGS. 19-21). The enhanced level of editing was surprising because the goal of reducing CpG content was to simply preserve editing activity while reducing immunogenicity. Instead, the mutations enhanced editing activity, rather than merely preserving it.

[0986] Notably, scaffold 320 showed a significant increase in potency over scaffold 235. Scaffold 320 includes mutations to only two regions of the scaffold; in the pseudoknot stem and the extended stem (regions 1 and 4). Further, some combinations of mutations produced worse editing than scaffold 320. However, even the CpG-reduced scaffolds that performed worse than scaffold 320, such as scaffolds 331 and 334, performed similar to or better than scaffold 235.

[0987] Based on these results, without wishing to be bound by theory, it is believed that the boost in potency seen in many of the CpG-reduced and CpG-depleted scaffolds is likely caused by one of the mutations present in all CpG-reduced scaffolds (i.e., region 1 and/or 4). Since the mutation to region 4 is not present in the scaffolds with the extended stem loop replacement (i.e., the third mutation to region 3) and these scaffolds show a similar improvement in potency over 235 as 320 did, it is believed that the beneficial effect is likely caused by the mutation in region 1 (pseudoknot stem), which is present in all of the tested scaffolds. Further experiments are performed to test the effect of the individual mutations in the pseudoknot stem (region 1) and the extended stem (region 4) separately.

[0988] Further, the N=l data as presented in FIG. 18 indicate that all the new scaffolds carrying the mutation in region 2 (scaffold stem) edited at a slightly lower level than their respective counterparts without this mutation. This suggests that mutating this position in the scaffold stem may have a small deleterious effect on editing potency. This is examined in additional experiments.

[0989] The results described here demonstrate that introducing mutations that reduced the CpG content of the DNA encoding the guide RNA scaffold resulted in improvements in gene editing relative to guide scaffold 235.

### Example 10: Additional Assessment of the Effects of Using CpG-Reduced or Depleted Guide RNAs on CasX-Mediated Editing Activity

[0990] As discussed above, unmethylated CpG motifs act as PAMPs that potently trigger undesired immune activation; therefore, nucleotide substitutions to replace native CpG motifs in the AAV constructs, including that encoding for guide scaffold 235 and ERS 316, were designed and generated. Here, experiments were performed to evaluate further the effects of using these resulting CpG-reduced or depleted gRNA scaffolds or ERSs on CasX-mediated editing activity.

### Materials and Methods

[0991] The CpG-reduced or depleted ERSs 320-341 were evaluated in three in vitro experiments described below; the sequences of ERSs 320-341 are listed in Table 38 In addition, two newly engineered gRNA ERSs, ERSs 382 and 392 (sequences listed in Table 40), were also assessed. As benchmark comparisons, scaffold 174, scaffold 235, and ERS 316 were also included for evaluation.

TABLE 40
Sequences of additional gRNA scaffolds
and ERSs tested in this example

| Scaffold or ERS ID | DNA SEQ ID NO | RNA SEQ ID NO |
|---|---|---|
| 382 | 49708 | 49725 |
| 392 | 49718 | 49735 |
| 174 | 49700 | 17 |

[0992] AAV constructs were designed and generated as previously described in Example 9. The CpG-reduced or depleted gRNA scaffolds or ERSs were tested in two different AAV backbones. Specifically, for the experiment involving lipofection of HEK293 cells as described below, scaffold 235 and ERSs 320-341 were tested in AAV vectors that were CpG-depleted, with the exception of AAV2 ITRs, as previously described in Example 9. Briefly, the CpG-depleted AAV backbone construct encoded for CpG-depleted versions of the following elements: U1A promoter, CasX 491, bGH poly(A) signal sequence, and U6 promoter. For the experiment involving AAV transduction of human induced neurons (iNs) and HEK293 cells as described below, scaffold 174, scaffold 235, ERS 316, ERS 320-341, ERS 382, and ERS 392 were tested in an AAV backbone that was not CpG-depleted (see Table 41 for sequences). Furthermore, spacer 7.37 targeting the B2M locus was used in two experiments described below involving HEK293 cells: lipofection and AAV transduction. Spacer 31.63 targeting the AAVS1 locus was used in an experiment described below involving human iNs. Table 42 below lists the AAV constructs that were tested in the context of a non-CpG-depleted AAV vector and the experimental conditions in which these constructs were assessed.

TABLE 41
Sequences encoding for a base AAV plasmid into which
gRNA scaffolds or ERSs in Table 40 were cloned

| | DNA sequence or |
|---|---|
| Component Name | SEQ ID NO |
| 5′ ITR | 487 |
| buffer sequence | 49863 |
| U1A promoter | 49864 |
| buffer sequence | 49865 |
| Kozak | GCCACC |
| start codon + c-MYC NLS | 49796 |
| linker | TCTAGA |
| CasX 515 | 49834 |
| linker | GGATCC |
| c-MYC NLS | 49841 |
| stop codon | TAA |
| buffer sequence | 49848 |
| bGH poly(A) signal sequence | 49866 |
| buffer sequence | GGTACCGT |
| U6 promoter | 49867 |
| buffer sequence | GAAACACC |
| Scaffold or ERS | See sequences listed in |
| | Tables 2, 38, 40 |
| B2M spacer (spacer 7.37) | 49849 |
| AAVS1 spacer (spacer 31.63) | 49868 |
| Non-targeting spacer (spacer 0.0) | 49745 |
| buffer sequence | 49869 |
| 3′ ITR | 488 |

TABLE 42
List of AAV constructs and scaffolds or ERSs tested in a non-
CpG-depleted AAV vector (see Table 41 for sequences) and the
experimental conditions in which these constructs were assessed

| AAV | Scaffolds | | |
|---|---|---|---|
| construct ID | or ERS | Spacer | Experimental conditions |
| 262 | 235 | 31.63 | AAV transduction in iNs |
| 263 | 328 | 31.63 | AAV transduction in iNs |
| 264 | 329 | 31.63 | AAV transduction in iNs |
| 265 | 382 | 31.63 | AAV transduction in iNs |
| 266 | 174 | 31.63 | AAV transduction in iNs |
| 267 | 335 | 31.63 | AAV transduction in iNs |
| 268 | 325 | 31.63 | AAV transduction in iNs |
| 269 | 330 | 31.63 | AAV transduction in iNs |
| 270 | 327 | 31.63 | AAV transduction in iNs |
| 271 | 334 | 31.63 | AAV transduction in iNs |
| 272 | 339 | 31.63 | AAV transduction in iNs |
| 273 | 337 | 31.63 | AAV transduction in iNs |
| 274 | 235 | Non- | AAV transduction in iNs |
| | | targeting | |
| 275 | 331 | 7.37 | AAV transduction in HEK293s |
| 276 | 335 | 7.37 | AAV transduction in HEK293s |
| 277 | 316 | 7.37 | AAV transduction in HEK293s |
| 278 | 392 | 7.37 | AAV transduction in HEK293s |
| 279 | 325 | 7.37 | AAV transduction in HEK293s |
| 280 | 334 | 7.37 | AAV transduction in HEK293s |
| 281 | 324 | 7.37 | AAV transduction in HEK293s |
| 282 | 336 | 7.37 | AAV transduction in HEK293s |
| 283 | 330 | 7.37 | AAV transduction in HEK293s |
| 284 | 320 | 7.37 | AAV transduction in HEK293s |
| 285 | 332 | 7.37 | AAV transduction in HEK293s |
| 286 | 321 | 7.37 | AAV transduction in HEK293s |
| 287 | 339 | 7.37 | AAV transduction in HEK293s |
| 288 | 235 | 7.37 | AAV transduction in HEK293s |
| 289 | 235 | Non- | AAV transduction in HEK293s |
| | | targeting | |

[0993] AAV production was performed using methods described in Example 9. For the experiment involving lipofection of HEK293 cells as described below, AAV titering was performed 9 as described in Example 9. For the two experiments involving AAV transduction of human iNs or HEK293 cells as described below, AAV titering was performed by ddPCR.

Cell-Based Assays Evaluating the Effects of Using CpG-Depleted or Reduced gRNA Scaffold or ERSs on Editing Activity:

[0994] In one experiment, ˜20,000 HEK293 cells per well were seeded in 96-well plates 24 hours prior to transfection. Seeded cells were then transfected with CpG-depleted AAV plasmids containing various versions of the guide (ERS 320-341). 5 days post transfection, cells were harvested for B2M protein expression analysis via HLA immunostaining following by flow cytometry, following methods described in Example 9. A CpG-depleted AAV plasmid with scaffold 235 served as an experimental control. An AAV plasmid with a CMV promoter driving mCherry expression was used as a transfection control, and a ˜41% transfection rate was observed. The results from this experiment are shown in FIG. 22.

[0995] In a second experiment, ˜20,000 iNs per well were seeded on Matrigel-coated 96-well plates 7 days prior to transduction. AAVs expressing the CasX:gRNA system, containing various versions of the guide RNA (AAV construct ID #262-274; see Table 42), were diluted in neuronal plating media and added to cells 7 days post-plating. Cells were transduced at three MOIs (3E4, 1E4 or 3E3 vg/cell). 7 days post-transduction, cells were gDNA extraction for editing analysis at the AAVS1 locus using NGS following methods described in Example 9. The results from this experiment are shown in FIGS. 23A-23C.

[0996] In a third experiment, ˜10,000 HEK293 cells per well were seeded in 96-well plates 24 hours prior to transfection. Seeded cells were then transduced with AAVs expressing the CasX:gRNA system, containing various versions of the guide RNA (AAV construct ID #275-289; see Table 42). Cells were transduced at three MOIs (1E4, 3E3, or 1E3 vg/cell). 5 days post-transduction, cells were harvested for B2M protein expression analysis via HLA immunostaining following by flow cytometry, following methods described in Example 9. The results from this experiment are shown in FIGS. 24A-24C.

### Results:

[0997] Experiments were performed to evaluate further the effects of using CpG-reduced or depleted ERSs on CasX-mediated editing activity. In the first experiment (N=1), HEK293 cells were lipofected with CpG-depleted AAV plasmids containing various versions of the ERS (ERS 320-341). B2M protein expression was subsequently analyzed, and the results of the assay are shown in FIG. 22. The data demonstrate that use of ERS 320-341 did not improve editing activity at the target B2M locus, since use of these ERSs produced a lower percentage of cells with B2M⁻ relative to the level achieved when using an AAV construct containing scaffold 235. These results do not recapitulate the results described in Example 9 (see FIGS. 18-21).

[0998] In the second experiment (N=1), human iNs were transduced with AAV particles expressing the CasX:gRNA system, containing various versions of the guide RNA (AAV construct ID #262-274). Editing at the AAVS1 locus was analyzed, and the results of the assay are shown in FIGS. 23A-23C. The data demonstrate that of the ERSs tested, use of ERSs 329 and 382 appeared to improve editing at the AAVS1 locus when compared to use of scaffold 235, especially at MOI of 1E4 and 3E3 vg/cell. Furthermore, the effects on editing activity were observed in a dose-dependent manner.

[0999] In the third experiment (N=1), HEK293 cells were transduced with AAV particles expressing the CasX:gRNA system, containing various versions of the guide RNA (AAV construct ID #275-289). B2M protein expression was subsequently analyzed, and the results of the assay are shown in FIGS. 24A-24C. The data demonstrate that of the guide RNAs tested, use of ERSs 316, 392 and 332 appeared to improve editing at the B2M locus when compared to use of scaffold 235 overall. Specifically, at the higher MOI of 1E4 and 3E3 vg/cell, slightly improved editing was observed with use of ERSs 316, 392, and 332 (FIGS. 24A-24B), while a stronger editing improvement was observed at the lower MOI of 1E3 vg/cell (FIG. 24C). Notably, ERS 332 and 392 both include CG>GC mutations in the pseudoknot stem (region 1; FIGS. 17A-17B), effectively reducing the overall number of CpGs when compared to scaffold 235, thereby potentially contributing to the increase in editing activity. Furthermore, ERS 316 and 332 both have a truncated extended stem when compared to scaffold 235, removing the bubble and the CG dinucleotide (region 3; FIGS. 17A-17B), thereby also potentially contributing to the observed increase in editing activity. Further experiments are performed, especially at lower MOIs, to unravel the intricacies of the effects of individual CpG mutations on editing potency.

[1000] The results from the experiments described here demonstrate that use of guide RNAs with different levels of CpG depletion can result in varying levels of editing mediated by the CasX:gRNA system, and that the resulting editing levels can vary by method of delivery (e.g., plasmid transfection vs. AAV transduction).

### Example 11: Comprehensive Sequence Determinants of Engineered Ribonucleic Acid Scaffold Activity in Complex with CasX Nuclease

[1001] The following example describes the design and evaluation of a library of engineered ribonucleic acid scaffolds (ERSs) derived from CasX guide RNA scaffolds. Experiments are performed to synthesize, screen, and analyze the ERS library for improved activity when used with a CasX-based gRNA-guided nuclease.

### Materials and Methods

### Design of ERS Library:

[1002] A library of ERSs was designed to test the effect of key mutations to individual regions in the CasX gRNA scaffold, alone and in combination. Specifically, mutations were designed to affect functional characteristics of the ERS related to improving binding to CasX to form ribonucleoproteins (RNPs), for example, through enhanced folding stability of individual domains of the ERS, enhanced folding stability of the entire ERS, increased transcriptional efficiency, or enhanced binding affinity to CasX. Further, mutations were designed to affect the function of the RNP once formed, for example, through increased cleavage activity and specificity of the CasX RNP. Finally, mutations were designed to improve manufacturability by shortening the overall length of the ERS sequence. The rationale for the design of the mutations of the library is described in detail below.

[1003] Members of the library were designed first by enumerating sequence variants of each region of the CasX gRNA scaffold that had been previously identified as conducive to improved activity. Previously, a large-scale assessment was performed to determine guide scaffold mutations that improved or worsened function. In brief, that library was composed of all single mutations in guide RNA scaffolds 174 and 175, as well as a subset of double mutations, higher-order mutations, and domain replacements with alternate synthetic sequences. Quantitative values for each mutated scaffold's effect on function were obtained from this screen. Several different selection criteria were applied to identify top mutations to incorporate into the ERS library described herein and test in subsequent rounds of experimentation. These mutations could be single mutations, double mutations, or entire domain swaps. The criteria were applied to be able to obtain mutations that could be acting on different functional “levers” that would affect activity of the ERS-nuclease complex and came from multiple different regions of the ERS, and so could conceivably be stacked together to obtain additive functional effects without the mutations negatively interacting. In brief, criteria as outlined below were used to identify mutations.

[1004] (a) Single mutations that had consistently higher activity in the context of both guide scaffold 174 and guide scaffold 175, based on enrichment scores greater than the reference scaffold for at least one scaffold context, and enrichment scores greater than 0 for the other scaffold context.

[1005] (b) A subset of single mutations that had high activity in the context of both guide scaffold 174 and guide scaffold 175 based on enrichment score greater than 0 for both scaffold, and were at novel positions compared to the previous set (a), to diversify the mutations to assess.

[1006] (c) Double mutations with high activity that were composed of single mutations that are individually low activity. This criterion was chosen to obtain more diversified sequences (e.g., with multiple mutations) that would not be achieved by additive stacking of high-activity single mutations. These mutations comprised structurally interacting residues. Double mutations with high activity were defined as positive enrichment in the context of both guide scaffold 174 and guide scaffold 175 or had enrichment greater than at least one of guide scaffold 174 or guide scaffold 175; single mutations with low activity were defined as those with no positive enrichment in either guide scaffold 174 or guide scaffold 175.

[1007] (d) Double mutations with higher activity than the reference scaffolds in the context of guide scaffold 174 and guide scaffold 175, or just compared to guide scaffold 175 scaffold.

[1008] (e) Single mutations that were present in the double mutations in set (d). These variants were included in order to serve as important reference points for the double mutation scaffolds.

[1009] (f) The top ˜10 extended stem replacements or extended stem mutations that were enriched in the context of either guide scaffold 174 or guide scaffold 175.

[1010] (g) The top 5 pseudoknot stems that were enriched in the context of either guide scaffold 174 or guide scaffold 175.

[1011] Alternatively, additional members of the ERS library were rationally designed with mutations to improve functional characteristics of the ERS. These mutations were added to the library despite not being found in the large-scale assessment described above. First, truncations of the 5′ end were introduced into the library. Transcription from a U6 promoter starts at a defined register for A and G residues, but not C or T residues; thus starting with A or G ensures the integrity of the transcript sequence (see Gao, Z. et al., Transcription. 2017; 8(5): 275-287). Thus, for this mutation, the 5′ A and C were deleted, but the next residue was changed from a T to a G for transcriptional integrity, while the predicted base-paired base to that T at position 33 was changed from an A to a C to compensate for the disrupted base pair. For this mutation, the T-A pair at positions 3 and 33 were replaced with a G-C at positions 3 and 33, with the A and C at positions 1 and 2 deleted.

[1012] Further, triplex stabilizing mutations were introduced into the ERS library. The large-scale assessment described above was not able to test triplex variants due to limitations in the cloning methods, but an independent line of inquiry has determined that guide scaffolds 214 and 215, each of which contains three mutated residues in one position of the triplex, had improved activity when introduced into guide scaffold 174 and 175 (data not shown). The three mutations in scaffold 215 ultimately became incorporated into guide scaffold 235 and ERS 316. Therefore, triplex stabilizing mutations were introduced into the library to probe whether adding additional positions would improve behavior, or whether reverting any of these mutations is very deleterious, in order to better understand the effect of this triple mutation on structure and function.

[1013] Finally, truncated extended stems were introduced into the ERS library. These sequences introduced sequential deletions in the extended stem sequence of the scaffold, as well as some loop deletions, and base pair swaps, that were intended to confer additional stability on the extended stem formation while truncating the stem. The goal of truncating the stem was to generate a shorter overall ERS for improved manufacturability.

[1014] Taken together, based on the above analyses and rational designs, the regions and domains that were modified in the ERS library were as follows (regions as summarized in Table 43 and diagrammed in FIG. 25):
[1015] (1) 5′ end variants (N=15), which are hypothesized to increase transcriptional efficiency by varying the 5′ end, increasing manufacturability by shortening the 5′ end, and/or increase folding stability of the variant gRNA structure;
[1016] (2) pseudoknot stem variants (N=49), which are hypothesized to increase folding stability of the pseudoknot stem and thus increase folding stability of the variant gRNA structure;
[1017] (3) triplex loop variants (N=19), which may increase folding stability of the variant gRNA structure, increase binding affinity to the nuclease, and/or increase manufacturability by shortening the triplex loop sequence;
[1018] (4) triplex variants (including adjacent sequence between the extended stem and the start of annotated triplex; N=19), which may increase folding stability of the variant gRNA structure;
[1019] (5) scaffold stem variants (including adjacent sequences from the end of pseudoknot and start of extended stem; N=27), which may increase folding stability of the scaffold stem and, thus, increase folding stability of the variant gRNA structure, increase binding affinity to the nuclease, and/or affect the function of the RNP once formed, e.g., through increased cleavage activity and specificity of the CasX RNP; and
[1020] (6) extended stem variants (N=33), which may increase folding stability of the extended stem and, thus, increase folding stability of the variant gRNA structure, and/or increase manufacturability through substantial truncations in the ERS length.

TABLE 43
Summary of positions of mutations in ERS library relative to ERS 316

| Region of mutation | RNA sequence in ERS 316 | SEQ ID NO |
|---|---|---|
| 5′ end | AC | N/A |
| Pseudoknot stem | UGGCGCU_AGCGCCA | 565 |
| Triplex loop | AUCUGAUUA | 566 |
| Triplex (including adjacent sequence | UCU_CUCUG_AUCAGAG | 567 |
| between the extended stem and the start | | |
| of annotated triplex) | | |
| Scaffold stem (including adjacent | UCACCAGCGACUAUGUCGUAGUG | 568 |
| sequences from the end of pseudoknot | GGUAAA | |
| and start of extended stem) | | |
| Extended stem | GCUCCCUCUUCGGAGGGAGC | 569 |

[1021] The individual region mutations that were identified for inclusion in the library are presented in Table 44. Note that in the tables, there can be multiple mutated bases in a given region, but that the mutations in each row of the table are considered an “individual mutation” for purposes of assembling the library.

TABLE 44
Mutations to scaffold 221 (RNA sequence)

| | Region of |
|---|---|
| Mutation* | mutation |
| 0.—.A | 5′ end |
| 0.A.G | 5′ end |
| 1.C.— | 5′ end |
| 1.—.U | 5′ end |
| 2.U.— | 5′ end |
| 3.—.A | 5′ end |
| 0.A.U;1.C.A | 5′ end |
| 1.C.—;2.U.— | 5′ end |
| 1.C.—;5.C.U | 5′ end |
| 0.A.U | 5′ end |
| 1.C.A | 5′ end |
| 1.C.G | 5′ end |
| 2.U.A | 5′ end |
| 2.U.G | 5′ end |
| 0.A.—;1.C.—;2.U.G;32.A.C | 5′ end |
| 12.—.A | Triplex loop |
| 13.U.A | Triplex loop |
| 13.U.G | Triplex loop |
| 13.U.— | Triplex loop |
| 14.C.A | Triplex loop |
| 14.C.U | Triplex loop |
| 14.C.G | Triplex loop |
| 15.—.U | Triplex loop |
| 18.—.U | Triplex loop |
| 17.—.U | Triplex loop |
| 17.—.A | Triplex loop |
| 17.A.G | Triplex loop |
| 17.A.U | Triplex loop |
| 20.A.G | Triplex loop |
| 11.—.U;11.—.A | Triplex loop |
| 14.—.U;14.—.A | Triplex loop |
| 13.U.C | Triplex loop |
| 15.U.A | Triplex loop |
| 15.U.G | Triplex loop |
| 25.G.C;93.C.G | Triplex |
| 9.UCU.UUU | Triplex |
| 21.CUCUG.CUUUG | Triplex |
| 93.CAGAG.CAAAG | Triplex |
| 9.UCU.UUU;21.CUCUG.CUUUG | Triplex |
| 9.UCU.UUU;93.CAGAG.CAAAG | Triplex |
| 21.CUCUG.CUUUG;93.CAGAG.CAAAG | Triplex |
| 9.UCU.UGU | Triplex |
| 9.UCU.UCC;21.CUCUG.CCCUG;93.CAGAG.CAGGG | Triplex |
| 9.UCU.CCU;21.CUCUG.CUCCG;93.CAGAG.CGGAG | Triplex |
| 9.UCU.UGG;21.CUCUG.CCCUG;93.CAGAG.CAGGG | Triplex |
| 9.UCU.GGU;21.CUCUG.CUCCG;93.CAGAG.CGGAG | Triplex |
| 9.UCU.CCC;21.CUCUG.CCCCG;93.CAGAG.CGGGG | Triplex |
| 9.UCU.GGG;21.CUCUG.CCCCG;93.CAGAG.CGGGG | Triplex |
| 21.CUCUG.GUCUC;93.CAGAG.GAGAC | Triplex |
| 21.CUCUG.GUCUG;93.CAGAG.CAGAC | Triplex |
| 21.CUCUG.CUCUC;93.CAGAG.CAGAC | Triplex |
| 91.A.C | Triplex |
| 91.A.G | Triplex |
| 6.A.U | Pseudoknot |
| 6.A.G | Pseudoknot |
| 6.A.G;28.A.C | Pseudoknot |
| 6.A.G;28.A.U | Pseudoknot |
| 6.A.G;28.—.C | Pseudoknot |
| 28.—.U;6.A.G | Pseudoknot |
| 26.A.U;6.A.G | Pseudoknot |
| 28.A.G;6.A.G | Pseudoknot |
| 32.A.U;6.A.G | Pseudoknot |
| 5.C.G;29.G.C;6.A.G | Pseudoknot |
| 6.A.U;28.A.C | Pseudoknot |
| 6.A.C;28.A.G | Pseudoknot |
| 6.A.C;28.A.U | Pseudoknot |
| 6.A.U;28.A.G | Pseudoknot |
| 28.—.C;28.A.U;6.A.G | Pseudoknot |
| 28.A.C;29.G.A;6.A.G | Pseudoknot |
| 28.A.U;32.A.G;6.A.G | Pseudoknot |
| 28.A.C | Pseudoknot |
| 28.—.U | Pseudoknot |
| 28.A.U | Pseudoknot |
| 6.A.C;28.—.G | Pseudoknot |
| 6.A.U;28.A.U | Pseudoknot |
| 6.A.C;27.—.G | Pseudoknot |
| 7.C.G;28.A.C;6.A.G | Pseudoknot |
| 5.CA.GC;28.AG.GC | Pseudoknot |
| 6.A.C | Pseudoknot |
| 5.C.U;6.A.G | Pseudoknot |
| 7.C.G;6.A.G | Pseudoknot |
| 26.A.G;6.A.G | Pseudoknot |
| 27.—.G;6.A.G | Pseudoknot |
| 27.G.U;6.A.G | Pseudoknot |
| 28.—.C;6.A.G | Pseudoknot |
| 28.—.U;6.A.G | Pseudoknot |
| 29.G.A;6.A.G | Pseudoknot |
| 32.A.G;6.A.G | Pseudoknot |
| 26.A.G;28.A.C;6.A.G | Pseudoknot |
| 26.A.G;28.A.C;6.A.G | Pseudoknot |
| 26.A.G;28.A.C;6.A.G | Pseudoknot |
| 2.UGGCAC.CUGUAG;27.GAGCCA.CUACAG | Pseudoknot |
| 2.UGGCAC.CAGCAA;27.GAGCCA.UUGCUG | Pseudoknot |
| 2.UGGCAC.CGAGAC;27.GAGCCA.GGCUCG | Pseudoknot |
| 2.UGGCAC.ACUGGU;27.GAGCCA.ACCAGU | Pseudoknot |
| 2.UGGCAC.AGGCCG;27.GAGCCA.CGGCCU | Pseudoknot |
| 2.UGGCAC.ACACGG;27.GAGCCA.CCGUGU | Pseudoknot |
| 2.UGGCAC.GGGACU;27.GAGCCA.AGUCCC | Pseudoknot |
| 2.UGGCAC.GGGCAA;27.GAGCCA.UUGCCC | Pseudoknot |
| 2.UGGCAC.GAGCAC;27.GAGCCA.GGGCUC | Pseudoknot |
| 2.UGGCAC.UGUGCG;27.GAGCCA.CGCACA | Pseudoknot |
| 2.UGGCAC.AGGUCC;27.GAGCCA.GGACCU | Pseudoknot |
| 2.UGGCAC.GAGGUG;27.GAGCCA.CACCUC | Pseudoknot |
| 44.U.G | Scaffold stem |
| 53.—.G | Scaffold stem |
| 53.—.U | Scaffold stem |
| 35.A.U | Scaffold stem |
| 35.A.C | Scaffold stem |
| 43.C.U | Scaffold stem |
| 52.A.G | Scaffold stem |
| 56.—.U | Scaffold stem |
| 56.—.A | Scaffold stem |
| 33.U.A | Scaffold stem |
| 34.C.G;56.G.C | Scaffold stem |
| 34.C.G;57.—.C | Scaffold stem |
| 35.A.G;56.—.C | Scaffold stem |
| 38.A.U;53.U.A | Scaffold stem |
| 40.C.A,50.G.U | Scaffold stem |
| 40.C.G;50.G.C | Scaffold stem |
| 41.G.C;49.C.G | Scaffold stem |
| 41.G.U;49.C.A | Scaffold stem |
| 58.A.—;59.A.— | Scaffold stem |
| 40.CG.GC;49.CG.GC;53.—.U | Scaffold stem |
| 33.U.G | Scaffold stem |
| 34.C.G | Scaffold stem |
| 35.A.G | Scaffold stem |
| 45.A.C | Scaffold stem |
| 56.—.C | Scaffold stem |
| 57.—.C | Scaffold stem |
| 58.A.G | Scaffold stem |
| 59.A.G | Scaffold stem |
| 61.GCCGCUUACGGACUUCGGUCCGUAAGAGGC.GGUGACGGUCUUC | Extended stem |
| GGACCGUCACC | |
| 61.GCCGCUUACGGACUUCGGUCCGUAAGAGGC.UCGUAAGAACUUC | Extended stem |
| GGUUCUUACGA | |
| 61.GCCGCUUACGGACUUCGGUCCGUAAGAGGC.GUGCGCCCGCUUC | Extended stem |
| GGCGGGCGCAC | |
| 61.GCCGCUUACGGACUUCGGUCCGUAAGAGGC.UAAUGAAAACUUC | Extended stem |
| GGUUUUCAUUA | |
| 61.GCCGCUUACGGACUUCGGUCCGUAAGAGGC.UGGAAGAUGCUUC | Extended stem |
| GGCAUCUUCCA | |
| 61.GCCGCUUACGGACUUCGGUCCGUAAGAGGC.GCGGCAGAUCUGA | Extended stem |
| GCCUCCGAGCUCUCUGCCGC | |
| 61.GCCGCUUACGGACUUCGGUCCGUAAGAGGC.GCUCCCUCACAGG | Extended stem |
| GAUGUGAGGGAGC | |
| 61.GCCGCUUACGGACUUCGGUCCGUAAGAGGC.GCUCCCUCAGCUG | Extended stem |
| CAGUGAGGGAGC | |
| 61.GCCGCUUACGGACUUCGGUCCGUAAGAGGC.GCGCUUACGGACU | Extended stem |
| UCGGUCCGUAAGAAGC | |
| 61.GCCGCUUACGGACUUCGGUCCGUAAGAGGC.GCGCUUACGGAAU | Extended stem |
| UCGUGUCCGUAAGAAGC | |
| 61.GCCGCUUACGGACUUCGGUCCGUAAGAGGC.GCGCUUUCGGACU | Extended stem |
| UCGGUCCGGAAGAAGC | |
| 61.GCCGCUUACGGACUUCGGUCCGUAAGAGGC.GCGCCUUACGGAC | Extended stem |
| UUCGGUCCGUAAGGAGC | |
| 61.GCCGCUUACGGACUUCGGUCCGUAAGAGGC.GCGCUUACGGACU | Extended stem |
| UCGCGGUCCGUAAGAAGC | |
| 61.GCCGCUUACGGACUUCGGUCCGUAAGAGGC.GCGCUUACGGACU | Extended stem |
| UCGGUCCGUAAGUCGC | |
| 61.GCCGCUUACGGACUUCGGUCCGUAAGAGGC.GCGCUUACGGAGU | Extended stem |
| UCGAUCCGUAAGAAGC | |
| 61.GCCGCUUACGGACUUCGGUCCGUAAGAGGC.GCGGUUACGGACU | Extended stem |
| UCGGUCCGUAAGACGC | |
| 61.GCCGCUUACGGACUUCGGUCCGUAAGAGGC.GCUCCCUCUUCGG | Extended stem |
| AGGGAGC | |
| 61.GCCGCUUACGGACUUCGGUCCGUAAGAGGC.GCUCCCUCUUCGG | Extended stem |
| AGGAGGC | |
| 61.GCCGCUUACGGACUUCGGUCCGUAAGAGGC.GCUCCCUCUUCGG | Extended stem |
| AGAGUGC | |
| 61.GCCGCUUACGGACUUCGGUCCGUAAGAGGC.GCUCCCUAUUCGG | Extended stem |
| AUGGAGC | |
| 61.GCCGCUUACGGACUUCGGUCCGUAAGAGGC.GCUCCCUCUUCGG | Extended stem |
| AGGGAACGC | |
| 61.GCCGCUUACGGACUUCGGUCCGUAAGAGGC.GCUCCCUCAUAGG | Extended stem |
| AGGGAGC | |
| 61.GCCGCUUACGGACUUCGGUCCGUAAGAGGC.GUCUCCCUCUUCG | Extended stem |
| GAGGGAGGC | |
| 61.GCCGCUUACGGACUUCGGUCCGUAAGAGGC.GCUCCUCUUCGGA | Extended stem |
| GGAGC | |
| 61.GCCGCUUACGGACUUCGGUCCGUAAGAGGC.GCUCUCUUCGGAG | Extended stem |
| AGC | |
| 61.GCCGCUUACGGACUUCGGUCCGUAAGAGGC.GCUCCCUUCGGGG | Extended stem |
| AGC | |
| 61.GCCGCUUACGGACUUCGGUCCGUAAGAGGC.GCUCCGUUCGCGG | Extended stem |
| AGC | |
| 61.GCCGCUUACGGACUUCGGUCCGUAAGAGGC.GCUGCUUCGGCAG | Extended stem |
| C | |
| 61.GCCGCUUACGGACUUCGGUCCGUAAGAGGC.GCUGCAGC | Extended stem |
| 61.GCCGCUUACGGACUUCGGUCCGUAAGAGGC.GCUAGC | Extended stem |
| 61.GCCGCUUACGGACUUCGGUCCGUAAGAGGC.CUCCCUCUUCGGA | Extended stem |
| GGGAG | |
| 61.GCCGCUUACGGACUUCGGUCCGUAAGAGGC.GCGCCCUCUUCGG | Extended stem |
| AGGGAGC | |
| 61.GCCGCUUACGGACUUCGGUCCGUAAGAGGC.GGUCCCUCUUCGG | Extended stem |
| AGGGAAC | |
| 64.G.—;87.A.— | Extended stem |
| 64.G.U | Extended stem |
| 69.C.G;82.G.C | Extended stem |
| 61.GCCGCUUACGGACUUCGGUCCGUAAGAGGC.GCUCCCUCUUCAG | Extended stem |
| GAGGGAGC | |
| 61.GCCGCUUACGGACUUCGGUCCGUAAGAGGC.GCUCCCUGGAAAC | Extended stem |
| AGGGAGC | |

*positions are numbered relative to the 5′ end of guide scaffold 221, with “0” being the 5′ terminus. Each mutation is indicated by its position, reference sequence, and alt sequence, separated by ‘.’ (e.g., 1.C.A is nucleotide position 1, reference sequence nucleotide C, alternate sequence nucleotide A). Position indexing starts at 0 such that the first base in scaffold 221 is 0.A. Insertions are indicated with a ‘—’ in the reference sequence (first position), and deletions with a ‘—’ in the alt sequence (second position). Multiple individual mutations are semi-colon separated.

[1022] The individual mutations of Table 44 were then introduced into the comparable relative positions of the ERS 316 scaffold (taking into account the differences in the extended stem positions and the individual differences between scaffolds 221 and 316 in the other regions as shown in Table 45), and Table 46 lists the DNA and RNA sequences of the ERS.

TABLE 45
Additional sequence changes applied to ERS
to convert parental scaffold 221 to ERS 316

| Mutation* | Region |
|---|---|
| 6.A.G;28.A.C | Pseudoknot stem |
| 53.—.G | Scaffold stem |
| 61.GCCGCTTACGGACTTCGGT | Extended stem |
| CCGTAAGAGGC.GCTCCCTCTT | |
| CGGAGGGAGC | |

*positions are numbered relative to the 5′ end of guide scaffold 221, with “0” being the 5′ terminus. Each mutation is indicated by its position, reference sequence, and alt sequence, separated by ‘.’ (e.g., 1.C.A is nucleotide position 1, reference sequence nucleotide C, alternate sequence nucleotide A). Position indexing starts at 0 such that the first base in scaffold 221 is 0.A. Insertions are indicated with a ‘—’ in the reference sequence (first position), and deletions with a ‘—’ in the alt sequence (second position). Multiple individual mutations are semi-colon separated.

TABLE 46
DNA and RNA sequences of ERSs with individual mutations

| Region of | DNA sequence | RNA sequence |
|---|---|---|
| mutation | SEQ ID NO | SEQ ID NO |
| 5′ end | 570 | 739 |
| 5′ end | 571 | 740 |
| 5′ end | 572 | 741 |
| 5′ end | 573 | 742 |
| 5′ end | 574 | 743 |
| 5′ end | 575 | 744 |
| 5′ end | 576 | 745 |
| 5′ end | 577 | 746 |
| 5′ end | 578 | 747 |
| 5′ end | 579 | 748 |
| 5′ end | 580 | 749 |
| 5′ end | 581 | 750 |
| 5′ end | 582 | 751 |
| 5′ end | 583 | 752 |
| 5′ end | 584 | 753 |
| Triplex loop | 585 | 754 |
| Triplex loop | 586 | 755 |
| Triplex loop | 587 | 756 |
| Triplex loop | 588 | 757 |
| Triplex loop | 589 | 758 |
| Triplex loop | 590 | 759 |
| Triplex loop | 591 | 760 |
| Triplex loop | 592 | 761 |
| Triplex loop | 593 | 762 |
| Triplex loop | 594 | 763 |
| Triplex loop | 595 | 764 |
| Triplex loop | 596 | 765 |
| Triplex loop | 597 | 766 |
| Triplex loop | 598 | 767 |
| Triplex loop | 599 | 768 |
| Triplex loop | 600 | 769 |
| Triplex loop | 601 | 770 |
| Triplex loop | 602 | 771 |
| Triplex loop | 603 | 772 |
| Triplex | 604 | 773 |
| Triplex | 605 | 774 |
| Triplex | 606 | 775 |
| Triplex | 607 | 776 |
| Triplex | 608 | 777 |
| Triplex | 609 | 778 |
| Triplex | 610 | 779 |
| Triplex | 611 | 780 |
| Triplex | 612 | 781 |
| Triplex | 613 | 782 |
| Triplex | 614 | 783 |
| Triplex | 615 | 784 |
| Triplex | 616 | 785 |
| Triplex | 617 | 786 |
| Triplex | 618 | 787 |
| Triplex | 619 | 788 |
| Triplex | 620 | 789 |
| Triplex | 621 | 790 |
| Triplex | 622 | 791 |
| Pseudoknot | 623 | 792 |
| Pseudoknot | 624 | 793 |
| Pseudoknot | 625 | 794 |
| Pseudoknot | 626 | 795 |
| Pseudoknot | 627 | 796 |
| Pseudoknot | 628 | 797 |
| Pseudoknot | 629 | 798 |
| Pseudoknot | 630 | 799 |
| Pseudoknot | 631 | 800 |
| Pseudoknot | 632 | 801 |
| Pseudoknot | 633 | 802 |
| Pseudoknot | 634 | 803 |
| Pseudoknot | 635 | 804 |
| Pseudoknot | 636 | 805 |
| Pseudoknot | 637 | 806 |
| Pseudoknot | 638 | 807 |
| Pseudoknot | 639 | 808 |
| Pseudoknot | 640 | 809 |
| Pseudoknot | 641 | 810 |
| Pseudoknot | 642 | 811 |
| Pseudoknot | 643 | 812 |
| Pseudoknot | 644 | 813 |
| Pseudoknot | 645 | 814 |
| Pseudoknot | 646 | 815 |
| Pseudoknot | 647 | 816 |
| Pseudoknot | 648 | 817 |
| Pseudoknot | 649 | 818 |
| Pseudoknot | 650 | 819 |
| Pseudoknot | 651 | 820 |
| Pseudoknot | 652 | 821 |
| Pseudoknot | 653 | 822 |
| Pseudoknot | 654 | 823 |
| Pseudoknot | 655 | 824 |
| Pseudoknot | 656 | 825 |
| Pseudoknot | 657 | 826 |
| Pseudoknot | 658 | 827 |
| Pseudoknot | 659 | 828 |
| Pseudoknot | 660 | 829 |
| Pseudoknot | 661 | 830 |
| Pseudoknot | 662 | 831 |
| Pseudoknot | 663 | 832 |
| Pseudoknot | 664 | 833 |
| Pseudoknot | 665 | 834 |
| Pseudoknot | 666 | 835 |
| Pseudoknot | 667 | 836 |
| Pseudoknot | 668 | 837 |
| Pseudoknot | 669 | 838 |
| Pseudoknot | 670 | 839 |
| Pseudoknot | 671 | 840 |
| Pseudoknot | 672 | 841 |
| Scaffold stem | 673 | 842 |
| Scaffold stem | 674 | 843 |
| Scaffold stem | 675 | 844 |
| Scaffold stem | 676 | 845 |
| Scaffold stem | 677 | 846 |
| Scaffold stem | 678 | 847 |
| Scaffold stem | 679 | 848 |
| Scaffold stem | 680 | 849 |
| Scaffold stem | 681 | 850 |
| Scaffold stem | 682 | 851 |
| Scaffold stem | 683 | 852 |
| Scaffold stem | 684 | 853 |
| Scaffold stem | 685 | 854 |
| Scaffold stem | 686 | 855 |
| Scaffold stem | 687 | 856 |
| Scaffold stem | 688 | 857 |
| Scaffold stem | 689 | 858 |
| Scaffold stem | 690 | 859 |
| Scaffold stem | 691 | 860 |
| Scaffold stem | 692 | 861 |
| Scaffold stem | 693 | 862 |
| Scaffold stem | 694 | 863 |
| Scaffold stem | 695 | 864 |
| Scaffold stem | 696 | 865 |
| Scaffold stem | 697 | 866 |
| Scaffold stem | 698 | 867 |
| Scaffold stem | 699 | 868 |
| Scaffold stem | 700 | 869 |
| Extended stem | 701 | 870 |
| Extended stem | 702 | 871 |
| Extended stem | 703 | 872 |
| Extended stem | 704 | 873 |
| Extended stem | 705 | 874 |
| Extended stem | 706 | 875 |
| Extended stem | 707 | 876 |
| Extended stem | 708 | 877 |
| Extended stem | 709 | 878 |
| Extended stem | 710 | 879 |
| Extended stem | 711 | 880 |
| Extended stem | 712 | 881 |
| Extended stem | 713 | 882 |
| Extended stem | 714 | 883 |
| Extended stem | 715 | 884 |
| Extended stem | 716 | 885 |
| Extended stem | 717 | 886 |
| Extended stem | 718 | 887 |
| Extended stem | 719 | 888 |
| Extended stem | 720 | 889 |
| Extended stem | 721 | 890 |
| Extended stem | 722 | 891 |
| Extended stem | 723 | 892 |
| Extended stem | 724 | 893 |
| Extended stem | 725 | 894 |
| Extended stem | 726 | 895 |
| Extended stem | 727 | 896 |
| Extended stem | 728 | 897 |
| Extended stem | 729 | 898 |
| Extended stem | 730 | 899 |
| Extended stem | 731 | 900 |
| Extended stem | 732 | 901 |
| Extended stem | 733 | 902 |
| Extended stem | 734 | 903 |
| Extended stem | 735 | 904 |
| Extended stem | 736 | 905 |
| Extended stem | 737 | 906 |
| Extended stem | 738 | 907 |

[1023] Next, all possible pairwise combinations of the individual mutations in different regions of Table 46 were introduced into ERS 316, so that each modified region could be assessed individually and in combination with all other modified regions. Specifically, to generate combinations of mutations that are expected to enhance editing efficiency when combined together, the mutations were assigned to specific regions of the ERS, as described above, and only mutations affecting different regions were combined together. Note that mutations in this library may each individually be composed of double mutations, and so a “combination of mutations” as described in this Example may involve combining a double mutant affecting the 5′ end and a domain replacement of the extended stem, each of which are composed of multiple deviations from the reference scaffold, for example. The individual and pairwise combinations of each of these mutations resulted in 10,829 unique ERS sequences, each of which represents a considerable deviation from the ERS 316 sequence (SEQ ID NO: 156). The DNA sequences of the ERSs with combinations of the mutations of Tables 44 and 45 are provided in SEQ ID NOS: 908-11,567 and 22,228-23571, and the corresponding RNA sequences are provided in SEQ ID NOS: 11,568-22,227 and 23,572-24, and 915.

### Molecular Biology of Library Construction:

[1024] The designed library of ERSs is synthesized, and then amplified by PCR with primers specific to the library. These primers amplify additional sequence at the 5′ and 3′ ends of the library to introduce sequence recognition sites for the restriction enzyme SapI. The PCR amplicon is introduced into a plasmid backbone containing flanking SapI sites for replacement of the flanked region by the library with standard Golden Gate cloning procedures. In a second step, a spacer sequence is further introduced into the library of plasmid backbones using standard Golden Gate cloning procedures. Next-generation sequencing (NGS) is performed to validate that the ERSs are evenly represented in the plasmid library.

### Lentivirus Production:

[1025] Lentiviral particles are generated by transfecting LentiX HEK293T cells, seeded 24 hours prior, at a confluency of 70-90%. Plasmids containing the pooled ERS library are introduced to a second-generation lentiviral system containing the packaging and VSV-G envelope plasmids with polyethylenimine, in serum-free media. For particle production, media is changed 12 hours post-transfection, and viruses are harvested at 36-48 hours post-transfection. Viral supernatant is filtered using 0.45 μm PES membrane filters and diluted in cell culture media when appropriate, prior to addition to target cells.

Screening and/or Selecting for Key Characteristics of ERS Function:

[1026] Screening and/or selections systems are developed to identify ERSs that are improved for a key functional property, such as folding stability of individual regions within the gRNA, folding stability of the entire gRNA, transcriptional efficiency, binding affinity to the CasX nuclease; and increased editing activity and editing specificity of the CasX RNP in complex with a target. Each of these functional changes is anticipated to result in higher editing of a DNA duplex; thus, screening systems are designed to identify ERSs out of a pool that are effective at a gene-editing based knockdown of reporter gene(s) in mammalian cells. CasX proteins 515, 593, 676, or 812 are used in the screening assays.

[1027] The screening methods may take several forms. For example, a gene encoding an endogenous cell surface receptor is edited so that its corresponding protein levels are knocked down, which would enable sorting away cells that maintain expression of the receptor. An antibody conjugated to a fluorophore or ligand enables distinguishing cells that maintain or lose receptor expression. Alternately, certain cell surface receptors that internalize toxins are targeted, such that application of a toxin is used to isolate only the cells that lose receptor expression. The representation of ERSs before and after selection is compared to generate a quantitative enrichment score for each ERS that reads out its efficacy in expressing in human cells, forming a complex with the RNP, and creating efficacious indels that reduce receptor expression. Screens and selections are repeated several times with different spacers, target genes, or other conditions to select for different functional outcomes of ERSs. Representative assays are described in International Publication No. WO2022120095A1.

[1028] In the case of cell screens, reporter cells are passed 24-48 hours prior to transduction to ensure cellular division occurs. At the point of transduction with lentiviral particles, the cells are trypsinized, counted, and diluted to appropriate density. Cells are resuspended with no treatment, library- or control-containing neat lentiviral supernatant at a low multiplicity of infection (MOI) to minimize dual lentiviral integrations. The lentiviral-cellular mixtures are seeded at 40-60% confluency prior to incubation at 37° C., 5% CO₂. Cells are selected for successful transduction 48 hours post-transduction with puromycin at 1-3 g/ml for 4-6 days followed by recovery in HEK or Fb medium.

[1029] Following selection, cells are suspended in 4′,6-diamidino-2-phenylindole (DAPI) and phosphate-buffered saline (PBS). Cells are then filtered by Corning™ strainer-cap FACS tube (Prod. 352235) and sorted using a Sony MA900 cell sorter. Cells are sorted for knockdown of a fluorescent reporter, in addition to gating for single, live cells via standard methods. Sorted cells from the experiment are lysed, and the genomic DNA is extracted using a Zymo Quick-DNA™ Miniprep Plus following the manufacturer's protocol.

### Sample Processing for NGS:

[1030] Genomic DNA is amplified via PCR with primers specific to the guide RNA-encoding DNA, to form a target amplicon. These primers contain additional sequence at the 5′ ends to introduce Illumina® read 1 and read 2 sequences. Standard PCR conditions are utilized to generate amplified DNA. Amplified DNA product is purified with Ampure XP DNA cleanup kit. Quality and quantification of the amplicon is assessed using a Fragment Analyzer DNA analyzer kit (Agilent, dsDNA 35-1500 bp). Amplicons is sequenced on the Illumina® Miseq™ (v3, 150 cycles of single-end sequencing) according to the manufacturer's instructions.

### NGS Analysis (Sample Processing and Data Analysis):

[1031] Reads are trimmed for adapter sequences with cutadapt (version 2.1), and the guide sequence (comprising the ERS sequence and spacer sequence) are extracted for each read (also using cutadapt v 2.1 linked adapters to extract the sequence between the upstream and downstream amplicon sequence). Unique guide RNA sequences are counted, and then each ERS sequence is compared to the list of designed ERS sequences and to the sequence of ERS 316 (SEQ ID NO: 156) to determine the identity of each. Read counts for each unique guide RNA sequence is normalized for sequencing depth using mean normalization. The change in representation before and after selection is quantified for each ERS by calculating an enrichment score (normalized read count in selected divided by normalized read count in naive). Two enrichment scores from different selections are combined by a weighted average of the individual log 2 enrichment scores, weighted by their relative representations within the naive population. Error on the log 2 enrichment scores are estimated calculating a 95% confidence interval on the average enrichment score across triplicate samples. These errors are propagated when combining the enrichment values for the two separate selections. Enrichment scores are analyzed for the effect of each region sequence either by itself, or in combination with other ERS sequences. Effective combinations are evaluated for the functional effects listed above.

### Results:

[1032] The screens and selections described herein are expected to identify ERSs with improved functional properties. Specifically, ERSs with improved binding to CasX, improved function in promoting gene editing (in the context of an RNP), improved function in promoting editing specificity (in the context of an RNP), and improved manufacturability are expected to be identified.

### Example 12: Generation and Assessment of Engineered Ribonucleic Acid Scaffolds with Mutations in the Pseudoknot Stem

[1033] As described in Example 9, ERS 320 was designed with mutations to deplete the CpG content of the DNA encoding the pseudoknot stem and the extended stem regions of the scaffold. In the experiment described in Example 9, ERS 320 produced a significant increase in editing potency relative to scaffold 235. This suggested that mutations to the pseudoknot stem have the potential to improve ERS function. In the following example, a selection of ERSs with mutations in the pseudoknot stem were designed and tested for their ability to promote genome editing.

### Materials and Methods

Design of ERSs with Mutations in the Pseudoknot Stem:

[1034] ERSs with mutations in the pseudoknot stem were designed based on ERS 316 (SEQ ID NO: 156). The positions of the mutations, as well as full-length DNA and RNA sequences of the ERSs are provided in Table 47, below. ERS 392 recapitulates the CG->GC mutation in the pseudoknot stem that was used to generate ERS 320, as described in Example 9. Scaffolds 174 and 235 and ERS 316 were included in this experiment as controls.

TABLE 47
Mutations and DNA and RNA sequences of guide
scaffolds and ERSs

| | | DNA | RNA |
|---|---|---|---|
| | | SEQ | SEQ |
| Scaffold/ | | ID | ID |
| ERS no. | Position of mutation* | NO | NO |
| 174 | n/a | 49700 | 17 |
| 235 | n/a | 49701 | 75 |
| 316 | n/a | 625 | 156 |
| 320 | 5.CG.GC;28.CG.GC;64.TCCCTC | 535 | 160 |
| | TTCGGAGGGA.CGCTTAGGGACTTCG | | |
| | GTCCCTAAGAG | | |
| 332 | 5.CG.GC;28.CG.GC;74.—.A | 547 | 172 |
| 376 | 6.—.T | 49702 | 49719 |
| 377 | 6.—.G | 49703 | 49720 |
| 378 | 6.—.G;26.A.T | 49704 | 49721 |
| 379 | 6.—.G;27.—.G | 49705 | 49722 |
| 380 | 6.—.T;28.—.C | 49706 | 49723 |
| 381 | 6.—.C;27.—.G | 49707 | 49724 |
| 382 | 28.—.C | 49708 | 49725 |
| 383 | 28. T | 49709 | 49726 |
| 384 | 6.—.G;28.—.C | 49710 | 49727 |
| 385 | 6.—.C | 49711 | 49728 |
| 386 | 5.C.T;6.—.G | 49712 | 49729 |
| 387 | 6. G | 49713 | 49730 |
| 388 | 6.—.G;28.—.C | 49714 | 49731 |
| 389 | 2.TGGC.CTGTAG;26.—.CTAC | 49715 | 49732 |
| 390 | 2.TGGC.CAGCAA;26.—.TTGC | 49716 | 49733 |
| 391 | 2.TGGC.CGAGAC;26.A.GGCTC | 49717 | 49734 |
| 392 | 5.CG.GC;28.CG.GC | 49718 | 49735 |

*positions are numbered relative to the 5′ end of ERS 316, with “0” being the 5′ terminus. Each mutation is indicated by its position, reference sequence, and alt sequence, separated by ‘.’ (e.g., 1.C.A is nucleotide position 1, reference sequence nucleotide C, alternate sequence nucleotide A). Position indexing starts at 0 such that the first base in ERS 316 is 0.A. Insertions are indicated with a ‘—’ in the reference sequence, and deletions with a ‘—’ in the alt sequence. Multiple individual mutations are semi-colon separated.

### Transfection and Assessment of B2M Editing:

[1035] HEK293T cells were lipofected with 100 ng of plasmid encoding CasX 515 and a gRNA made up of a scaffold or ERS listed in Table 47. The gRNAs had either a non-targeting spacer or a spacer targeting the B2M locus, as listed in Table 48. 24 hours post-transfection, cells were selected with 1 g/mL puromycin for 48 hours, and then allowed to recover for 24 hours. Then, cells were harvested for B2M protein expression analysis via immunostaining of the B2M-dependent HLA protein, followed by flow cytometry using the Attune™ NxT flow cytometer. Each construct was tested in duplicate, and the transfection and subsequent experiment was performed on two separate occasions.

TABLE 48
Sequences of B2M and non-targeting spacers
used in this example

| Spacer ID | DNA sequence | SEQ ID NO |
|---|---|---|
| 7.9 | GTGTAGTACAAGAGATAGAA | 49740 |
| 7.19 | CCCCCACTGAAAAAGATGAG | 49741 |
| 7.43 | AGGCCAGAAAGAGAGAGTAG | 49742 |
| 7.119 | CGCTGGATAGCCTCCAGGCC | 49743 |
| 7.14 | TGAAGCTGACAGCATTCGGG | 49744 |
| Non-targeting | CGAGACGTAATTACGTCTCG | 49745 |

### Lentiviral Transduction and Assessment of B2M Editing:

[1036] In a separate experiment, HEK293T cells were transduced with lentiviral particles encoding CasX 515 and a gRNA made up of either scaffold 174, scaffold 235, ERS 316, ERS 382, or ERS 392. The gRNAs had either a non-targeting spacer or spacer 7.9, 7.19, or 7.119 targeting the B2M locus, as provided in Table 48. Lentiviral particles were produced as described in Example 11, above. Viral supernatants were filtered using 0.45 μm membrane filters, diluted in media, and added to HEK293T target cells cultured at a relatively low multiplicity of infection (MOI) of either 0.1 or 0.05. Transduced cells were grown for three days in a 37° C. incubator with 5% C02. Cells were harvested for B2M protein expression analysis via immunostaining of the B2M-dependent HLA protein, followed by flow cytometry using the Attune™ NxT flow cytometer. The lentiviruses also expressed mScarlet, and the mean fluorescence intensity (MFI) of mScarlet was quantified to confirm that the cells contained similar amounts of transduced lentivirus.

### Results:

[1037] Editing of the B2M locus was measured in HEK293T cells transfected with plasmids expressing CasX 515 and gRNAs made up of the scaffolds or ERSs listed in Table 47. The results are provided in Table 49, below.

TABLE 49
Percentage of HEK293T cells with edited B2M locus following
transfection with plasmids expressing CasX 515 and
gRNAs with mutations to the pseudoknot stem

| | Percentage of HLA- HEK293T cells | |
|---|---|---|
| Scaffold | with edited B2M locus* | |
| ERS no. | First transfection | Second transfection |

Non-targeting spacer

| | | | | |
|---|---|---|---|---|
| 174 | 24.3 | 22.5 | 4.2 | 5.2 |
| 235 | 1.7 | 1.4 | 3.5 | 4.3 |
| 316 | — | 4.1 | 3.1 | 3.9 |
| 316 | 1 | 3.8 | 3.6 | 4.5 |
| 320 | 1.4 | 1.4 | 2.5 | 3.1 |
| 332 | 1.6 | 1.6 | 2.5 | 3.6 |
| 376 | 3.2 | 4.9 | 4.3 | 5.4 |
| 377 | 0.6 | 5.6 | 5 | 6.3 |
| 378 | 0.8 | 4.8 | 4.3 | 6 |
| 379 | 1.3 | 5.6 | 5 | 6.7 |
| 380 | 1.3 | 4.8 | 4.7 | 5.1 |
| 381 | 1.3 | 5.1 | 4.6 | 7.3 |
| 381 | 6.9 | 5.9 | 4.3 | 7 |
| 382 | 1.2 | 4.5 | 3.8 | 6.4 |
| 383 | 1.2 | 3.7 | 3.1 | 5.1 |
| 384 | 1.6 | 5.3 | 2.4 | 5.3 |
| 385 | 1.4 | 1.2 | 3.3 | 3.5 |
| 386 | 1.5 | 1.2 | 2.3 | 2.7 |
| 387 | 1.5 | 1.1 | 3 | 3.7 |
| 388 | 2.7 | 1.7 | 5.5 | 6.3 |
| 389 | 1.6 | 1.2 | 2.4 | 3.1 |
| 390 | 1.3 | 1.3 | 2.4 | 3.1 |
| 391 | 1.4 | 1.3 | 2.6 | 3.4 |
| 392 | 1.6 | 1.4 | 3 | 4.2 |

Spacer 7.9

| | | | | |
|---|---|---|---|---|
| 174 | 68.5 | 62.1 | 85.4 | 80.6 |
| 235 | 73.1 | 68.3 | 91.8 | 88.9 |
| 316 | — | 85.5 | 82.7 | 84.7 |
| 316 | 72.6 | 92.2 | 91.4 | 92.2 |
| 320 | 75.4 | 70.4 | 92.6 | 91.2 |
| 332 | 70.5 | 63.5 | 85.2 | 84.4 |
| 376 | 67.8 | 90.6 | 89.9 | 90 |
| 377 | 71.3 | 90.9 | 90.4 | 90.3 |
| 378 | 75.5 | 90.8 | 91.2 | 92.2 |
| 379 | 68 | 87.9 | 87.6 | 87.4 |
| 380 | 65.2 | 90.5 | 90.6 | 90.8 |
| 381 | 67 | 88.7 | 88.7 | 89 |
| 381 | 61.6 | 86.9 | 88 | 88 |
| 382 | 71.9 | 89.1 | 90.5 | 90.6 |
| 383 | 64.7 | 91.6 | 91.1 | 91 |
| 384 | 62.5 | 79.7 | 82 | 83.1 |
| 385 | 68.4 | 62.5 | 83.2 | 81.1 |
| 386 | 72.5 | 63.1 | 90.7 | 91.1 |
| 387 | 74.5 | 69.4 | 94 | 92.9 |
| 388 | 67.8 | 65.1 | 89.9 | 90.1 |
| 389 | 32.2 | 28.9 | 54.1 | 53.8 |
| 390 | 34.5 | 30.9 | 57.8 | 57.7 |
| 391 | 25.9 | 25.7 | 55.2 | 55.4 |
| 392 | 77.1 | 71.5 | 93.5 | 91.6 |

Spacer 7.19

| | | | | |
|---|---|---|---|---|
| 174 | 58.6 | 47.5 | 81.4 | 81.7 |
| 235 | 62.5 | 54.2 | 90.3 | 89.8 |
| 316 | — | 82.6 | 78.8 | 83.5 |
| 316 | 63.3 | 82.9 | 86.4 | 86.9 |
| 320 | 67.4 | 60.3 | 91.7 | 92.1 |
| 332 | 1.8 | 1.5 | 4.8 | 7.1 |
| 376 | 52.5 | 80 | 78.8 | 80.2 |
| 377 | 56.6 | 83.4 | 84 | 83.4 |
| 378 | 57.1 | 83.8 | 82.9 | 84.2 |
| 379 | 49.2 | 72.4 | 75.8 | 76 |
| 380 | 45.6 | 73.6 | 74.4 | 76.1 |
| 381 | 49.2 | 70.7 | 74.7 | 76.2 |
| 381 | 43.5 | 73.5 | 75.5 | 78.3 |
| 382 | 59.7 | 81.9 | 84.7 | 86.6 |
| 383 | 50.4 | 78.7 | 78.9 | 80.6 |
| 384 | 45.7 | 78.9 | 76.6 | 77.5 |
| 385 | 54.3 | 48.9 | 72.7 | 71.6 |
| 386 | 56.3 | 47.6 | 76.5 | 77.7 |
| 387 | 64.5 | 59.1 | 86.9 | 89.7 |
| 388 | 48 | 45.3 | 75.5 | 77.6 |
| 389 | 3.1 | 2.6 | 8.9 | 12.9 |
| 390 | 18 | 15.4 | 36.4 | 38.9 |
| 391 | 14.7 | 12.8 | 38.5 | 40.3 |
| 392 | 64.3 | 58.4 | 87.6 | 87.8 |

Spacer 7.43

| | | | | |
|---|---|---|---|---|
| 174 | 50.6 | 43.9 | 76.2 | 75.4 |
| 235 | 58.7 | 52.5 | 80.4 | 80.2 |
| 316 | — | 68 | 67.1 | 70.5 |
| 316 | 52.2 | 78.2 | 77.7 | 78.4 |
| 320 | 59.6 | 53.2 | 83.9 | 82.1 |
| 332 | 49.3 | 40.5 | 69.9 | 67.6 |
| 376 | 56.6 | 80.2 | 81.6 | 81.3 |
| 377 | 64.7 | 81.2 | 84.1 | 83.2 |
| 378 | 56.5 | 76.8 | 79.6 | 78.8 |
| 379 | 59.5 | 77.1 | 79.2 | 78.9 |
| 380 | 58.3 | 77.1 | 78.9 | 78.1 |
| 381 | 50.9 | 71.4 | 74.2 | 70.1 |
| 381 | 47.5 | 66.6 | 70.7 | 65.5 |
| 382 | 57.1 | 75.3 | 80.7 | 79.8 |
| 383 | 52.9 | 72.5 | 75.3 | 73.4 |
| 384 | 46.6 | 71.6 | 74.6 | 70.7 |
| 385 | 56.7 | 46.9 | 70.9 | 73.4 |
| 386 | 62.5 | 48.2 | 80.5 | 82.2 |
| 387 | 56.8 | 49.3 | 81.8 | 82.6 |
| 388 | 53.5 | 48.9 | 75.1 | 77.2 |
| 389 | 4.5 | 4 | 13.6 | 18 |
| 390 | 15.1 | 11.7 | 29.5 | 34.5 |
| 391 | 16.2 | 13.4 | 33.6 | 38.7 |
| 392 | 53.8 | 51.8 | 82 | 82.1 |

Spacer 7.119

| | | | | |
|---|---|---|---|---|
| 174 | 36.2 | 32.2 | 64.6 | 63.6 |
| 235 | 60.9 | 55.5 | 89 | 87.3 |
| 316 | — | 66.5 | 68.5 | 70.6 |
| 316 | 56.4 | 73.7 | 79.5 | 83.3 |
| 320 | 54.6 | 46.8 | 85.3 | 83.9 |
| 332 | 51.7 | 46.1 | 74.8 | 78.2 |
| 376 | 45.8 | 66.9 | 71.8 | 75.1 |
| 377 | 49 | 69.4 | 76.3 | 79.2 |
| 378 | 45.7 | 67 | 75.1 | 78.1 |
| 379 | 35.2 | 49.9 | 59.3 | 61.8 |
| 380 | 37.9 | 56.2 | 66.2 | 67.3 |
| 381 | 31.9 | 50.2 | 52.4 | 56.8 |
| 381 | 28.9 | 46.2 | 50.2 | 52.5 |
| 382 | 49.8 | 67.8 | 71.3 | 76.3 |
| 383 | 44.2 | 60.9 | 65.5 | 69.6 |
| 384 | 36.8 | 59.3 | 64.9 | 66 |
| 385 | 39.1 | 32.8 | 62.8 | 62.7 |
| 386 | 40.9 | 33.8 | 72.7 | 74.5 |
| 387 | 7.8 | 6.2 | 24.1 | 31.4 |
| 388 | 35.8 | 30.6 | 62.2 | 64.4 |
| 389 | 4.9 | 3.9 | 15.3 | 20 |
| 390 | 4.3 | 3.9 | 11.9 | 17.1 |
| 391 | 3.8 | 3 | 9.3 | 12.9 |
| 392 | 58 | 50.2 | 85 | 83.3 |

Spacer 7.14

| | | | | |
|---|---|---|---|---|
| 174 | 47.5 | 43.7 | 74.1 | 76.4 |
| 235 | 31.4 | 29.6 | 58 | 57.2 |
| 316 | — | 44.8 | 41.6 | 40.3 |
| 316 | 31.8 | 52.7 | 53.2 | 55.6 |
| 320 | 36.4 | 34 | 59.9 | 62.3 |
| 332 | 14.8 | 12.4 | 25 | 25.4 |
| 376 | 34.1 | 55.5 | 56.1 | 56.9 |
| 377 | 24.6 | 45.1 | 42.7 | — |
| 378 | 26.9 | 45.1 | 43.5 | 47.5 |
| 379 | 36.1 | 54.8 | 56.2 | 59.3 |
| 380 | 46.6 | 67.4 | 70.2 | 72.3 |
| 381 | 50.8 | 72.1 | 73.4 | 74 |
| 381 | — | 39.3 | 35.2 | 39.4 |
| 382 | 42.2 | 65.6 | 66.4 | 67 |
| 383 | 37 | 64 | 64.9 | 64.9 |
| 384 | 18 | 38.4 | 35.1 | 38.1 |
| 385 | 18.1 | 16.1 | 29.6 | 24 |
| 386 | 36.2 | 31.6 | 53.1 | 53.8 |
| 387 | 33.3 | 28.2 | 48.1 | 51 |
| 388 | 31 | 25.5 | 49.3 | 55.4 |
| 389 | 20.6 | 17.6 | 45 | 45.8 |
| 390 | 8.4 | 7.9 | 19.3 | 22.6 |
| 391 | 52.8 | 52.9 | 80.9 | 78.9 |
| 392 | 42.3 | 42.6 | 66.7 | 67.2 |

*Data are shown rounded to the nearest tenth.

[1038] Many of the tested ERS produced levels of editing that were similar to ERS 316 (Table 49). Surprisingly, some scaffolds produced higher levels of editing than ERS 316, but only with certain spacers. Specifically, scaffold 391 showed a relatively high level of editing with spacer 7.14, but not other spacers. Scaffold 392 produced overall high levels of editing with multiple spacers, and edited with spacer 7.14 to a greater extent than ERS 316. The sequences of ERS 391 and 392 are outlined compared to scaffold 23 and ERS 316 in Table 50, below.

TABLE 50
Sequences of regions of scaffold 235,
ERS 316, and ERS 392, 5′ to 3′

| | | |
|---|---|---|
| | | SEQ |
| | | ID |
| Region of Scaffold | RNA Sequence* | NO |

Guide scaffold 235

| | | |
|---|---|---|
| 5′ end | AC | — |
| Pseudoknot stem I | UGGCGCU | — |
| Triplex loop (including | UCUAUCUGAUUACUCUG | 49736 |
| triplex regions I and II) | | |
| Pseudoknot stem II | AGCGCCA | — |
| Linking nucleotides I | UCA | |
| Scaffold stem loop | CCAGCGACUAUGUCGUA | 49737 |
| | GUGG | |
| Linking nucleotides II | GUAAA | — |
| Extended stem loop | GCCGCUUACGGACUUCG | 49738 |
| | GUCCGUAAGAGGC | |
| Linking nucleotides III | AU | — |
| Triplex region III | CAGAG | — |

ERS 316

| | | |
|---|---|---|
| 5′ end | AC | — |
| Pseudoknot stem I | UGGCGCU | — |
| Triplex loop (including | UCUAUCUGAUUACUCUG | 49736 |
| triplex regions I and II) | | |
| Pseudoknot stem II | AGCGCCA | — |
| Linking nucleotides I | UCA | — |
| Scaffold stem loop | CCAGCGACUAUGUCGUA | 49737 |
| | GUGG | |
| Linking nucleotides II | GUAAA | — |
| Extended stem loop | GCUCCCUCUUCGGAGGG | 49739 |
| | AGC | |
| Linking nucleotides III | AU | — |
| Triplex region III | CAGAG | — |

ERS 391

| | | |
|---|---|---|
| 5′ end | AC | — |
| Pseudoknot stem I | CGAGACGCU | — |
| Triplex loop (including | UCUAUCUGAUUACUCUG | 49736 |
| triplex regions I and II) | | |
| Pseudoknot stem II | GGCUCGCGCCA | — |
| Linking nucleotides I | UCA | — |
| Scaffold stem loop | CCAGCGACUAUGUCGUA | 49737 |
| | GUGG | |
| Linking nucleotides II | GUAAA | — |
| Extended stem loop | GCUCCCUCUUCGGAGGG | 49739 |
| | AGC | |
| Linking nucleotides III | AU | — |
| Triplex region III | CAGAG | — |

ERS 392

| | | |
|---|---|---|
| 5′ end | AC | — |
| Pseudoknot stem I | UGGGCCU | — |
| Triplex loop (including | UCUAUCUGAUUACUCUG | 49736 |
| triplex regions I and II) | | |
| Pseudoknot stem II | AGGCCCA | — |
| Linking nucleotides I | UCA | — |
| Scaffold stem loop | CCAGCGACUAUGUCGUA | 49737 |
| | GUGG | |
| Linking nucleotides II | GUAAA | — |
| Extended stem loop | GCCGCUUACGGACUUCG | 49738 |
| | GUCCGUAAGAGGC | |
| Linking nucleotides III | AU | — |
| Triplex region III | CAGAG | |

*Bases that form the triplex (herein termed triplex regions I-III) are bolded and underlined.

[1039] Scaffold 174, scaffold 235, ERS 316, ERS 382, or ERS 392 were also tested via lentiviral transduction in HEK293T cells at MOIs of 0.1 (FIG. 26) and 0.05 (FIG. 27). At these relatively low MOIs, the improvement in editing activity in scaffold 235 and ERS 316 relative to scaffold 174 was pronounced, with both scaffold 235 and ERS 316 producing over twice as many cells with edited B2M loci as scaffold 174. These results show that scaffold 235 and ERS 316 are highly effective scaffolds for producing gene editing at low doses in cell culture, and are therefore also expected to be highly useful scaffolds for editing in vivo. In these assays, ERS 392 produced similar levels of editing to ERS 316 with the tested spacers.

[1040] Overall, the results described herein demonstrate that ERSs with mutations in the pseudoknot stem region can produce gene editing.

### Example 13: Assessment of CpG-Depleted CasX 515 Variants on CasX-Mediated Editing

[1041] Experiments were performed to deplete CpG motifs in the AAV construct encoding for CasX protein 515 and demonstrate that these CpG-depleted CasX 515 variants can edit effectively in vitro.

### Materials and Methods

### Design of CpG-Depleted and Codon-Optimized CasX 515 Variants and AAV Plasmid Cloning:

[1042] Nucleotide substitutions to replace native CpG motifs in CasX protein 515, as well as the flanking c-MYC NLSes, were rationally designed with codon optimization using various publicly available algorithms. As a result, the amino acid sequence of the encoding sequence of CpG-depleted CasX 515 with flanking c-MYC NLSes would be the same as the amino acid sequence of the corresponding encoding sequence of native CasX 515 with flanking c-MYC NLSes. Table 51 provides the sequences of CpG-depleted and codon-optimized variants of CasX 515 with flanking c-MYC NLSes, as well as the corresponding non-CpG depleted CasX 515 with flanking c-MYC NLSes.

TABLE 51
Sequences of CpG-depleted and codon-optimized
variants of CasX 515 with flanking c-MYC NLSes

| CpG-depleted or non-CpG-depleted | | |
|---|---|---|
| variant 515 with flanking | | |
| c-MYC NLSes (version no.) | AAV construct ID | SEQ ID NO |
| CpG-depleted 515 (v1) | 290 | 49850 |
| CpG-depleted 515 (v2) | 291 | 49851 |
| CpG-depleted 515 (v3) | 292 | 49852 |
| CpG-depleted 515 (v4) | 293 | 49853 |
| CpG-depleted 515 (v5) | 294 | 49854 |
| CpG-depleted 515 (v6) | 295 | 49855 |
| CpG-depleted 515 (v7) | 296 | 49856 |
| CpG-depleted 515 (v8) | — | 49857 |
| CpG-depleted 515 (v9) | — | 49858 |
| CpG-depleted 515 (v10) | — | 49859 |
| CpG-depleted 515 (v11) | 297 | 49860 |
| CpG-depleted 515 (v12) | — | 49861 |
| Non-CpG-depleted 515 | 298 | 49862 |

[1043] All resulting sequences of the CpG-depleted and codon-optimized variants of CasX 515 with flanking c-MYC NLSes were cloned into a base AAV plasmid (sequences shown in Table 52). gRNA scaffold 235 and spacer 31.63, which targets the AAVS1 locus, were used for the experiments discussed in this example. The resulting AAV constructs were generated using standard molecular cloning techniques. Cloned and sequence-validated plasmid constructs were midi-prepped for subsequent nucleofection and AAV vector production.

TABLE 52
Sequences encoding for a base AAV plasmid into which CpG-
depleted variants of CasX 515 in Table 51 were cloned

| AAV | | |
|---|---|---|
| construct | | DNA Sequence or |
| ID | Component Name | SEQ ID NO |
| 290 | 5′ ITR | 487 |
| through | buffer sequence | 49863 |
| 298 | UlA promoter | 49864 |
| | buffer sequence | 49865 |
| | Kozak | GCCACC |
| | start codon + CpG-depleted (or non- | See sequences |
| | CpG-depleted) & codon-optimized CasX | listed in Table 51 |
| | 515 with flanking c-MYC NLSes | |
| | stop codon | TGA |
| | buffer sequence | 49870 |
| | bGH poly(A) signal sequence | 49866 |
| | buffer sequence | GGTACCGT |
| | U6 promoter | 49867 |
| | buffer sequence | GAAACACC |
| | Scaffold 235 | 49701 |
| | AAVS1 spacer (31.63) | 49868 |
| | buffer sequence | 49869 |
| | 3′ ITR | 488 |

### Transfection of HEK293 Cells In Vitro:

[1044] ˜50,000 HEK293 cells per well were seeded on 24-well plates; two days later, cells were transfected with AAV plasmids containing sequences for a non-CpG-depleted (CpG⁺) CasX 515 (Table 51) or a version 1 of a CpG-depleted and codon-optimized CasX 515 variant (CpG⁻ v1; Table 51) following standard methods using lipofectamine. Two days later, cells were harvested to extract total protein lysate for western blotting analysis. Quantification of protein concentration and western blotting were performed using standard procedures. Three technical replicates were performed (Replicates 1-3) for the western blot. The results of this experiment are shown in FIG. 28. Untransfected cells served as an experimental control.

### AAV Production and Titering:

[1045] AAV production was performed using methods described in Example 9. AAV titering was performed by ddPCR using a primer-probe set specific to bGH, an indicator of the AAV transgene.

### AAV Transduction of iNs (Induced Neurons) In Vitro:

[1046] For one experiment, ˜30,000 iNs per well were seeded Matrigel-coated 96-well plates 7 days prior to transduction. Cells were transduced with AAVs expressing the CasX gRNA system, a non-CpG-depleted CasX 515 (CpG⁺; Table 51) or version 1 of the CpG-depleted and codon-optimized CasX 515 variant (CpG⁻ v1; Table 51) and codon-optimized variants of CasX 515, at an MOI of 1E4 vg/cell. 7 days post-transduction, cells were harvested for gDNA extraction for editing analysis at the AAVS1 locus using NGS. One replicate was performed this experiment, and the results are shown in Table 53.

### AAV Transduction of HEK293 Cells In Vitro:

[1047] In a second experiment, ˜5,000 HEK293 cells per well are seeded on 96-well plates two days prior to transduction. AAVs expressing the CasX:gRNA system, containing various CpG-depleted and codon-optimized variants of CasX 515, are diluted in neuronal plating media and added to cells. Cells are transduced at four MOIs (1E4, 3E3, 1E3, or 3.7E2 vg/cell). Five days post-transduction, cells are harvested for gDNA extraction for editing analysis at the AAVS1 locus using NGS.

### Results:

[1048] In one experiment, HEK293 cells were transiently transfected with AAV plasmids containing a CpG⁺ CasX 515 sequence or CpG− v1 CasX 515 sequence. Four days post-transfection, CasX expression and editing activity at the AAVS1 locus were evaluated by western blotting and NGS respectively. The results of the western blotting analysis are portrayed in FIG. 28, showing CasX protein levels in transfected HEK293 cells, with a total protein stain blot (bottom blot) serving as the loading control. Cells transfected with the AAV plasmid containing a CpG⁺ CasX 515 sequence are labeled as “CpG⁺ CasX 515” (lane 1), while cells transfected with the construct harboring a CpG⁻ CasX 515 sequence are labelled as “CpG⁻ CasX 515_A” (lane 2) and “CpG⁻ CasX 515_B” (lane 3). Untransfected HEK293 cells are labelled “No plasmid control” (lane 4). The results in FIG. 28 show that expressing the AAV plasmid containing either the CpG⁻ or CpG⁺ CasX 515 sequence resulted in CasX expression. Editing activity at the AAVS1 locus was also assessed in human iNs; the results show that use of the AAV plasmid with either CpG⁻ v1 or CpG⁺ CasX 515 sequence resulting in editing at the target locus (Table 53).

TABLE 53
Results of the editing assay at the AAVS1 locus when using AAV
plasmid containing either CpG⁻ or CpG⁺ CasX 515

| Experimental condition | Indel rate at AAVS1 locus |
|---|---|
| AAV plasmid with CpG⁺ 515 | 20.82% |
| AAV plasmid with CpG⁻ 515 (v1) | 16.55% |
| ‘No plasmid’ control | 0.06% |

[1049] The experiments demonstrate that depleting CpG motifs in the AAV construct encoding for CasX protein 515 resulted in sufficient CasX expression to induce effective editing at the target locus in vitro. Incorporating CpG-depleted AAV elements into the AAV genome would potentially reduce the risk of immunogenicity post-delivery of AAVs into target cells and tissues.

What is claimed is:

1. An engineered ribonucleic acid scaffold (ERS) comprising a sequence of SEQ ID NO: 17, or a sequence having at least about 70% sequence identity thereto, comprising an extended stem loop sequence of SEQ ID NO: 49739 and one or more mutations at positions selected from the group consisting of U11, U24, A29, and A87.

2. The engineered ERS of claim 1, comprising mutations at positions U11, U24, A29, and A87.

3. The engineered ERS of claim 1, comprising one or more mutations selected from the group consisting of U11C, U24C, A29C, and A87G.

4. The engineered ERS of claim 3, comprising mutations consisting of U11C, U24C, A29C, and A87G.

5. An engineered ribonucleic acid scaffold (ERS) comprising a sequence of SEQ ID NO: 75, or a sequence having at least about 70% sequence identity thereto, modified to comprise an extended stem loop sequence of SEQ ID NO: 49739.

6. The ERS of claim 5, the sequence comprising regions selected from the group consisting of:
a. a 5′ end comprising a sequence of AC;
b. a pseudoknot stem I comprising a sequence of UGGCGCU;
c. a triplex loop comprising a sequence of SEQ ID NO: 49736;
d. a pseudoknot stem II comprising a sequence of AGCGCCA; and
e. a triplex region III comprising a sequence of CAGAG.

7. An engineered ribonucleic acid scaffold (ERS), comprising the sequence of ACUGGCGCUUCUAUCUGAUUACUCUGAGCGCCAUCACCAGCGACUAUGUCGUA GUGGGUAAAGCUCCCUCUUCGGAGGGAGCAUCAGAG (SEQ ID NO: 156), or a sequence having at least about 96% sequence identity thereto.

8. An engineered ribonucleic acid scaffold (ERS) comprising a sequence having at least about 70% sequence identity to (i) ACUGGCACUUCUAUCUGAUUACUCUGAGAGCCAUCACCAGCGACUAUGUCGUA UGGGUAAAGCCGCUUACGGACUUCGGUCCGUAAGAGGCAUCAGAG (SEQ ID NO: 61); or (ii) ACUGGCGCUUCUAUCUGAUUACUCUGAGCGCCAUCACCAGCGACUAUGUCGUA GUGGGUAAAGCUCCCUCUUCGGAGGGAGCAUCAGAG (SEQ ID NO: 156); comprising one or more modifications in the sequence, wherein the one or more modifications result in an improved characteristic compared to unmodified SEQ ID NO: 61 or SEQ ID NO: 156.

9. The ERS of claim 8, comprising at least two modifications in the sequence, wherein the modifications result in an improved characteristic compared to unmodified SEQ ID NO: 61 or SEQ ID NO: 156.

10. The ERS of claim 8 or claim 9, wherein the modification comprises:
a. a substitution of 1 to 30 consecutive nucleotides in one or more regions of the scaffold;
b. a deletion of 1 to 10 consecutive nucleotides in one or more regions of the scaffold;
c. an insertion of 1 to 10 consecutive nucleotides in one or more regions of the scaffold;
d. a substitution of the scaffold stem loop with an RNA stem loop sequence from a heterologous RNA source;
e. a substitution of the extended scaffold stem loop with an RNA stem loop sequence from a heterologous RNA source; or
f. any combination of (a)-(d).

11. The ERS of any one of claims 8-10, wherein the modifications comprise mutations in one or more regions selected from the group consisting of a 5′ end, a pseudoknot stem, a triplex loop, a scaffold stem loop, an extended stem loop, and a triplex region III.

12. The ERS of any one of claims 8-10, wherein the modifications comprise mutations in at least two regions of the ERS, wherein the regions are selected from the group consisting of a 5′ end, a pseudoknot stem I, a triplex loop, a pseudoknot stem II, a scaffold stem loop, an extended stem loop, and a triplex region III.

13. The ERS of any one of claims 8-12, wherein the mutations are selected from the group consisting of the mutations of Tables 44, 45, and 47.

14. The ERS of claim 13, wherein sequences of the individual mutated regions have the sequences of:
a. SEQ ID NOS: 739-753 in the 5′ end region;
b. SEQ ID NOS: 754-772 in the triplex loop region;
c. SEQ ID NOS: 773-791 in the triplex region;
d. SEQ ID NOS: 792-841 in the pseudoknot region;
e. SEQ ID NOS: 842-869 in the scaffold stem region; and/or
f. SEQ ID NOS: 870-907 in the extended stem region.

15. The ERS of claim 13, wherein the ERS comprises paired combinations of individual mutated sequences from different or the same regions.

16. The ERS of claim 15, wherein the ERS comprises a sequence selected from the group consisting of SEQ ID NOS: 11,568-22,227 and 23,572-24,915, or a sequence having at least 70% sequence identity thereto.

17. The ERS of claim 15, wherein the ERS comprises a sequence selected from the group consisting of SEQ ID NOS: 11,568-22,227 and 23,572-24,915.

18. The ERS of any one of claims 7-17, wherein the scaffold has 85-100 nucleotides, or any integer in between.

19. An ERS comprising a sequence selected from the group consisting of SEQ ID NOS: 156, 739-907, 739-907, 11568-22227, 23572-24915, and 49719-49735, or a sequence having at least about 90%, at least about 95%, at least about 98%, or at least about 99% sequence identity thereto, wherein the ERS comprises an improved characteristic compared to the sequence of SEQ ID NO: 17.

20. The ERS of claim 19, wherein the ERS comprises a sequence selected from the group consisting of SEQ ID NOS: 156, 739-907, 11568-22227, 23572-24915, and 49719-49735, wherein the ERS comprises an improved characteristic compared to the sequence of SEQ ID NO: 17, when assayed in an in vitro cell-based assay under comparable conditions.

21. The ERS of claim 19 or claim 20, wherein the improved characteristic is one or more functional properties selected from the group consisting of improved binding to a CasX nuclease to form a ribonucleoprotein (RNP), improved folding stability of the ERS, increased half-life in a cell, increased transcriptional efficiency, enhanced ability to synthetically manufacture the ERS, improved editing activity of a target nucleic acid by an RNP comprising the ERS, and improved editing specificity by an RNP comprising the ERS.

22. The ERS of any one of claims 1-21, wherein the ERS comprises one or more heterologous RNA sequences in the extended stem loop.

23. The ERS of claim 22, wherein the heterologous RNA is selected from the group consisting of a MS2 hairpin, Qβ hairpin, U1 hairpin II, Uvsx hairpin, and a PP7 stem loop, or sequence variants thereof.

24. The ERS of claim 22 or claim 23, wherein the heterologous RNA is capable of binding a protein, a RNA, a DNA, or a small molecule.

25. The ERS of any one of claims 1-24, wherein the ERS comprises a Rev response element (RRE), or a portion thereof.

26. The ERS of any one of claims 1-25, comprising a targeting sequence linked at the 3′ end of the ERS that is complementary to a target nucleic acid sequence.

27. The ERS of claim 26, wherein the targeting sequence has 15-20 nucleotides.

28. The ERS of claim 27, wherein the targeting sequence has 20 nucleotides.

29. The ERS of any one of claims 26-28, wherein the ERS and linked targeting sequence has 100-115 nucleotides.

30. The ERS of any one of claims 1-29, wherein the CpG content of the ERS is reduced or depleted.

31. The ERS of claim 30, wherein the CpG content is less than about 10%, less than about 5%, or less than about 1%.

32. The ERS of any one of claims 1-31, wherein the ERS comprises one or more chemical modifications to the sequence.

33. The ERS of claim 32, wherein the chemical modification is addition of a 2′O-methyl group to one or more nucleotides of the sequence.

34. The ERS of claim 32 or claim 33, wherein one or more nucleotides on either or both of the 5′ and 3′ terminal ends of the ERS are modified by an addition of a 2′O-methyl group.

35. The ERS of any one of claims 32-34, wherein the chemical modification is substitution of a phosphorothioate bond between two or more nucleosides of the sequence.

36. The ERS of any one of claims 32-35, wherein the chemical modification is a substitution of phosphorothioate bonds between two or more nucleotides on either or both of the 5′ and 3′ terminal ends of the ERS.

37. The ERS of any one of claims 32-36, wherein the chemically modified ERS comprises a sequence selected from the group consisting of SEQ ID NOS: 49750-49758, 49760-49768, and 49770-49749.

38. The ERS of any one of claims 32-37, wherein the chemically modified ERS comprises a sequence of SEQ ID NO: 49770.

39. The ERS of claim 37 or claim 38, wherein the chemically modified ERS sequence is modified with a 20 nucleotide targeting sequence complementary to a target nucleic acid.

40. The ERS of any one of claims 32-39, wherein the chemical modifications result in reduced susceptibility of the ERS to degradation by cellular RNase compared to an unmodified ERS.

41. The ERS of any one of claims 1-40, wherein the ERS is capable of forming a ribonucleoprotein (RNP) complex with a CasX protein.

42. An engineered CasX protein, comprising a sequence having at least two mutations in the sequence of CasX 515 (SEQ ID NO: 49699) wherein the mutations result in an improved characteristic compared to unmodified CasX 515.

43. The engineered CasX protein of claim, wherein the improved condition is determined in an in vitro assay under comparable conditions.

44. The engineered CasX protein of claim 42, wherein the mutations are selected from the group consisting of:
a. an amino acid substitution;
b. an amino acid deletion;
c. an amino acid insertion; and
d. any combination of (a)-(c).

45. The engineered CasX protein of any one of claim 42, wherein engineered CasX protein comprises:
a. an oligonucleotide binding domain (OBD)-I comprising an amino acid sequence comprising one or more mutations relative to the sequence of SEQ ID NO: 295;
b. a helical I-I domain comprising an amino acid sequence comprising one or more mutations relative to the sequence of SEQ ID NO: 296;
c. an NTSB domain comprising an amino acid sequence comprising one or more mutations relative to the sequence of SEQ ID NO: 297;
d. a helical I-II domain comprising an amino acid sequence comprising one or more mutations relative to the sequence of SEQ ID NO: 298;
e. a helical II domain comprising an amino acid sequence comprising one or more mutations relative to the sequence of SEQ ID NO: 299;
f. a RuvC-I domain comprising an amino acid sequence comprising one or more mutations relative to the sequence of SEQ ID NO: 301;
g. a target strand loading (TSL) domain comprising an amino acid sequence comprising one or more mutations relative to the sequence of SEQ ID NO: 302; or
h. any combination of (a)-(g).

46. The engineered CasX protein of claim 45, wherein:
a. the OBD-I comprises one or more mutations relative to the sequence of SEQ ID NO: 295 selected from the group consisting of an I3G substitution, an insertion of a G at position 4, a K4G substitution, an insertion of a G at position 5, a K8G substitution, an insertion of an R at position 26, and a R34P substitution;
b. the helical I-I domain comprises an R7Q substitution relative to the amino acid sequence of SEQ ID NO: 296;
c. the NTSB domain comprises one or more mutations relative to the sequence of SEQ ID NO: 297 selected from the group consisting of an L68K substitution, an L68Q substitution, an A70Y substitution, an A70D substitution, and an A70S substitution;
d. the helical I-II domain comprises one or more mutations relative to the sequence of SEQ ID NO: 298 selected from the group consisting of a G32T substitution, an M112T substitution, and an M112W substitution;
e. the helical II domain comprises one or more mutations relative to the sequence of SEQ ID NO: 299 selected from the group consisting of a Y65T substitution and an E148D substitution;
f. the RuvC-I domain comprises an S51R substitution relative to the sequence of SEQ ID NO: 301;
g. the TSL domain comprises one or more mutations relative to the sequence of SEQ ID NO: 302 selected from the group consisting of a V15M substitution, a T76D substitution, and an S80Q substitution; or
h. any combination of (a)-(g).

47. The engineered CasX protein of claim 45 or claim 46, wherein:
a. the OBD-I comprises a sequence selected from the group consisting of SEQ ID NOS: 295, 49800, 49803-49808, and 49822-49833, or a sequence having at least about 90%, at least about 95%, at least about 98%, at least about 99% sequence identity thereto;
b. the helical I-I domain comprises a sequence selected from the group consisting of SEQ ID NOS: 296 and 49809, or a sequence having at least about 90%, at least about 95%, at least about 98%, or at least about 99% sequence identity thereto;
c. the NTSB domain comprises a sequence selected from the group consisting of SEQ ID NOS: 297, 49802, 49810, 49811, 49812, 49818, and 49835-49840, or a sequence having at least about 90%, at least about 95%, at least about 98%, or at least about 99% sequence identity thereto;
d. the helical I-II domain comprises a sequence selected from the group consisting of SEQ ID NOS: 298, 49801, 49813-49814, and 49842, or a sequence having at least about 90%, at least about 95%, at least about 98%, or at least about 99% sequence identity thereto;
e. the helical II domain comprises a sequence selected from the group consisting of SEQ ID NOS: 299, 49815-49816, and 49843, or a sequence having at least about 90%, at least about 95%, at least about 98%, or at least about 99% sequence identity thereto;
f. the RuvC-I domain comprises a sequence selected from the group consisting of SEQ ID NOS: 301 and 49821, or a sequence having at least about 90%, at least about 95%, at least about 98%, or at least about 99% sequence identity thereto;
g. the TSL domain comprises a sequence selected from the group consisting of SEQ ID NOS: 302, 49817, 49819, 49820, and 49844-49846, or a sequence having at least about 90%, at least about 95%, at least about 98%, or at least about 99% sequence identity thereto; or
h. any combination of (a)-(g).

48. The engineered CasX protein of any one of claims 45-47, wherein the engineered CasX protein further comprises:
a. an OBD-II comprising the sequence of SEQ ID NO: 300, or a sequence having at least about 90%, at least about 95%, at least about 98%, or at least about 99% sequence identity thereto; and/or
b. a RuvC-II domain comprising the sequence of SEQ ID NO: 303, or a sequence having at least about 90%, at least about 95%, at least about 98%, or at least about 99% sequence identity thereto.

49. The engineered CasX protein of any one of claims 42-48, wherein the engineered CasX protein comprises, from N- to C-terminus, an OBD-I domain, a helical I-I domain, an NTSB domain, a helical I-II domain, a helical II domain, an OBD-II, a RuvC-I domain, a TSL domain, and a RuvC-II domain, with each domain comprising a sequence as set forth in Table 21.

50. The engineered CasX protein of any one of claims 42-49, wherein the two mutations are selected from the group consisting of the paired mutations as set forth in Table 22.

51. The engineered CasX protein of any one of claims 42-49, wherein the two mutations are selected from the group consisting of the following pairs: 4.I.G & 64.R.Q, 4I.G & 169.L.K, 4.I.G & 169.L.Q, 4.I.G & 171.A.D, 4.I.G & 171.A.Y, 4.I.G & 171.A.S, 4.I.G & 224.G.T, 4.I.G & 304.M.T, 4.I.G & 398.Y.T, 4.I.G & 826.V.M, 4.I.G & 887.T.D, 4.I.G & 891.S.Q, 5.-.G & 64.R.Q, 5.-.G & 169.L.K, 5.-.G & 169.L.Q, 5.-.G & 171.A.D, 5.-.G & 171.A.Y, 5.-.G & 171.A.S, 5.-.G & 224.G.T, 5.-.G & 304.M.T, 5.-.G & 398.Y.T, 5.-.G & 826.V.M, 5.-.G & 887.T.D, 5.-.G & 891.S.Q, 9.K.G & 64.R.Q, 9.K.G & 169.L.K, 9.K.G & 169.L.Q, 9.K.G & 171.A.D, 9.K.G & 171.A.Y, 9.K.G & 171.A.S, 9.K.G & 224.G.T, 9.K.G & 304.M.T, 9.K.G & 398.Y.T, 9.K.G & 826.V.M, 9.K.G & 887.T.D, 9.K.G & 891.S.Q, 27.-.R & 64.R.Q, 27.-.R & 169.L.K, 27.-.R & 169.L.Q, 27.-.R & 171.A.D, 27.-.R & 171.A.Y, 27.-.R & 171.A.S, 27.-.R & 224.G.T, 27.-.R & 304.M.T, 27.-.R & 398.Y.T, 27.-.R & 826.V.M, 27.-.R & 887.T D, 27.-.R & 891.S.Q, 35.R.P & 64.R.Q, 35.R.P & 169.L.K, 35.R.P & 169.L.Q, 35.R.P & 171.A.D, 35.R.P & 171.A.Y, 35.R.P & 171.A.S, 35.R.P & 224.G.T, 35.R.P & 304.M.T, 35.R.P & 398.Y. T, 35.R.P & 826.V.M, 35.R.P & 887.T.D, 35.R.P & 891.S.Q, 887.T.D & 891.S.Q, 64.R.Q & 169.L.K, 64.R.Q & 169.L.Q, 64.R.Q & 171.A.D, 64.R.Q & 171.A.Y, 64.R.Q & 171.A.S, 64.R.Q & 224.G. T, 64.R.Q & 304.M.T, 64.R.Q & 398.Y.T, 64.R.Q & 826.V.M, 64.R.Q & 887.T.D, 64.R.Q & 891.S.Q, 169.L.K & 171.A.D, 169.L.K & 171.A.Y, 169.L.K & 171.A.S, 169.L.K & 224.G.T, 169.L.K & 304.M.T, 169.L.K & 398.Y.T, 169.L.K & 826.V.M, 169.L.K & 887.T.D, 169.L.K & 891.S.Q, 169.L.Q & 171.A.D, 169.L.Q & 171.A.Y, 169.L.Q & 171.A.S, 169.L.Q & 224.G.T, 169.L.Q & 304.M.T, 169.L.Q & 398.Y.T, 169.L.Q & 826.V.M, 169.L.Q & 887.T.D, 169.L.Q & 891.S.Q, 171.A.D & 224.G.T, 171.A.D & 304.M.T, 171.A.D & 398.Y.T, 171.A.D & 826.V.M, 171.A.D & 887.T.D, 171.A.D & 891.S.Q, 171.A.Y & 224.G.T, 171.A.Y & 304.M.T, 171.A.Y & 398.Y.T, 171.A.Y & 826.V.M, 171.A.Y & 887.T.D, 171.A.Y & 891.S.Q, 171.A.S & 224.G.T, 171.A.S & 304.M.T, 171.A.S & 398.Y.T, 171.A.S & 826.V.M, 171.A.S & 887.T.D, 171.A.S & 891.S.Q, 4.I.G & 35.R.P, 224.G.T & 304.M.T, 224.G.T & 398.Y.T, 224.G.T & 826.V.M, 224.G.T & 887.T.D, 224.G.T & 891.S.Q, 5.-.G & 35.R.P, 4.I.G & 27.-.R, 304.M.T & 398.Y.T, 304.M.T & 826.V.M, 304.M.T & 887.T.D, 304.M.T & 891.S.Q, 9.K.G & 35.R.P, 5.-.G & 27.-.R, 4.I.G & 9.K.G, 398.Y.T & 826.V.M, 398.Y.T & 887.T.D, 398.Y.T & 891.S.Q, 27.-.R & 35.R.P, 9.K.G & 27.-.R, 5.-.G & 9.K.G, 4.I.G & 5.-.G, 826.V.M & 887.T.D, 826.V.M & 891.S.Q, 5.K.G & 27.-.R, 5.K.G & 169.L.K, 5.K.G & 171.A.D, 5.K.G & 304.M.T, 5.K.G & 398.YT, 5.K.G & 891.S.Q, 6.-.G & 27.-.R, 6.-.G & 169.L.K, 6.-.G & 171.A.D, 6.-.G & 304.M.T, 6.-.G & 398.Y.T, 6.-.G & 891.S.Q, 304.M.W & 27.-.R, 304.M.W & 169.L.K, 304.M.W & 171.A.D, 304.M.W & 398.Y.T, 304.M.W & 891.S.Q, 481.E.D & 27.-.R, 481.E.D & 169.L.K, 481.E.D & 171.A.D, 481.E.D & 304.M.T, 481.E.D & 398.Y.T, 481.E.D & 891.S.Q, 698.S.R & 27.-.R, 698.S.R & 169.L.K, 698.S.R & 171.A.D, 698.S.R & 304.M.T, 698.S.R & 398.Y.T, and 698.S.R & 891.S.Q.

52. The engineered CasX protein of claim 42, comprising three mutations selected from the group consisting of (a) 27.-.R, 169.L.K, and 329.G.K; (b) 27.-.R, 171.A.D, and 224.G.T; and (c) 35.R.P, 171.A.Y, and 304.M.T, wherein the mutations result in an improved characteristic compared to unmodified CasX 515.

53. The engineered CasX protein of any one of claims 42-51, comprising a sequence selected from SEQ ID NOS: 24916-49628, 49746-49747, and 49871-49873, or a sequence having at least 70% sequence identity thereto.

54. The engineered CasX protein of any one of claims 42-51, comprising a sequence selected from SEQ ID NOS: 24916-49628, 49746-49747, and 49871-49873.

55. The engineered CasX protein of any one of claims 42-49, comprising a sequence selected from the group consisting of SEQ ID NOS: 27858, 27859, 27861, 27865, 27866, 27868, 27870, 27871, 27872, 27876, 27877, 27880, 27882, 27889, 27897, 27898, 27903, 27952, 27953, 27954, 27955, 27958, 27959, 27961, 27963, 27969, 27970, 27973, 27975, 27982, 27990, 27991, 27996, 27998, 28003, 28004, 28006, 28008, 28009, 28010, 28014, 28018, 28027, 28035, 28036, 28047, 28048, 28050, 28052, 28053, 28054, 28058, 28062, 28071, 28079, 28080, 28095, 28101, 28105, 28123, 28137, 28143, 28147, 28165, 28253, 28255, 28257, 28258, 28259, 28263, 28267, 28276, 28284, 28285, 28293, 28295, 28296, 28297, 28301, 28305, 28314, 28322, 28323, 28368, 28369, 28370, 28374, 28378, 28387, 28395, 28396, 28438, 28439, 28443, 28444, 28447, 28449, 28456, 28464, 28465, 28470, 28477, 28481, 28490, 28498, 28499, 28511, 28515, 28524, 28532, 28533, 28633, 28635, 28642, 28650, 28651, 28656, 28661, 28679, 28738, 28745, 28753, 28754, 28759, 28799, 28925, 28926, 29011, 29022, 29056, 29098, 29119, 29140, 29245, 29266, 29308, 29371, 29392, 29476, 29560, 29749, 29917, 29938, 30196, 30888, 31244, 31592, 33212, 33512, 34088, 34631, 34870, 35139, 35402, 35422, 35467, 35507, 35512, 43373, 49746, 49747 and 49871-49873, or a sequence having at least about 70%, at least about 80%, at least about 90%, at least about 95%, at least about 98%, or at least about 99% sequence identity thereto.

56. The engineered CasX protein of any one of claims 42-50, comprising a sequence selected from the group consisting of SEQ ID NOS: 27858, 27859, 27861, 27865, 27866, 27868, 27870, 27871, 27872, 27876, 27877, 27880, 27882, 27889, 27897, 27898, 27903, 27952, 27953, 27954, 27955, 27958, 27959, 27961, 27963, 27969, 27970, 27973, 27975, 27982, 27990, 27991, 27996, 27998, 28003, 28004, 28006, 28008, 28009, 28010, 28014, 28018, 28027, 28035, 28036, 28047, 28048, 28050, 28052, 28053, 28054, 28058, 28062, 28071, 28079, 28080, 28095, 28101, 28105, 28123, 28137, 28143, 28147, 28165, 28253, 28255, 28257, 28258, 28259, 28263, 28267, 28276, 28284, 28285, 28293, 28295, 28296, 28297, 28301, 28305, 28314, 28322, 28323, 28368, 28369, 28370, 28374, 28378, 28387, 28395, 28396, 28438, 28439, 28443, 28444, 28447, 28449, 28456, 28464, 28465, 28470, 28477, 28481, 28490, 28498, 28499, 28511, 28515, 28524, 28532, 28533, 28633, 28635, 28642, 28650, 28651, 28656, 28661, 28679, 28738, 28745, 28753, 28754, 28759, 28799, 28925, 28926, 29011, 29022, 29056, 29098, 29119, 29140, 29245, 29266, 29308, 29371, 29392, 29476, 29560, 29749, 29917, 29938, 30196, 30888, 31244, 31592, 33212, 33512, 34088, 34631, 34870, 35139, 35402, 35422, 35467, 35507, 35512, 43373, 49746, 49747, and 49871-49873.

57. The engineered CasX protein of any one of claims 42-56, wherein the improved characteristic is one or more of editing activity, improved editing specificity, improved specificity ratio, improved editing activity and editing specificity, or improved editing activity and improved specificity ratio.

58. The engineered CasX protein of any one of claims 42-56, wherein the engineered CasX comprises a sequence selected from the group consisting of SEQ ID NOS: 27858, 27859, 27861, 27865, 27866, 27868, 27870, 27871, 27872, 27876, 27877, 27880, 27882, 27889, 27897, 27898, 27903, 27952, 27953, 27954, 27955, 27958, 27959, 27961, 27963, 27969, 27970, 27973, 27975, 27982, 27990, 27991, 27996, 27998, 28003, 28004, 28006, 28008, 28009, 28010, 28014, 28018, 28027, 28035, 28036, 28047, 28048, 28050, 28052, 28053, 28054, 28058, 28062, 28071, 28079, 28080, 28095, 28101, 28105, 28123, 28137, 28143, 28147, 28165, 28253, 28255, 28257, 28258, 28259, 28263, 28267, 28276, 28284, 28285, 28293, 28295, 28296, 28297, 28301, 28305, 28314, 28322, 28323, 28368, 28369, 28370, 28374, 28378, 28387, 28395, 28396, 28438, 28439, 28443, 28444, 28447, 28449, 28456, 28464, 28465, 28470, 28477, 28481, 28490, 28498, 28499, 28511, 28515, 28524, 28532, 28533, 28633, 28635, 28642, 28650, 28651, 28656, 28661, 28679, 28738, 28745, 28753, 28754, 28759, 28799, 28925, 28926, 29011, 29022, 29056, 29098, 29119, 29140, 29245, 29266, 29308, 29371, 29392, 29476, 29560, 29749, 29917, 29938, 30196, 30888, 31244, 31592, 33212, 33512, 34088, 34631, 34870, 35139, 35402, 35422, 35467, 35507, 35512, 43373, 49746, 49747, and 49871-49873 or a sequence having at least about 70%, at least about 80%, at least about 90%, at least about 95%, at least about 98%, or at least about 99% sequence identity thereto, wherein the engineered CasX exhibits improved editing activity compared to unmodified CasX 515.

59. The engineered CasX protein of any one of claims 42-56, wherein the engineered CasX comprises a sequence selected from the group consisting of SEQ ID NOS: 27858, 27859, 27861, 27865, 27866, 27868, 27870, 27871, 27872, 27876, 27877, 27880, 27882, 27889, 27897, 27898, 27903, 27952, 27953, 27954, 27955, 27958, 27959, 27961, 27963, 27969, 27970, 27973, 27975, 27982, 27990, 27991, 27996, 27998, 28003, 28004, 28006, 28008, 28009, 28010, 28014, 28018, 28027, 28035, 28036, 28047, 28048, 28050, 28052, 28053, 28054, 28058, 28062, 28071, 28079, 28080, 28095, 28101, 28105, 28123, 28137, 28143, 28147, 28165, 28253, 28255, 28257, 28258, 28259, 28263, 28267, 28276, 28284, 28285, 28293, 28295, 28296, 28297, 28301, 28305, 28314, 28322, 28323, 28368, 28369, 28370, 28374, 28378, 28387, 28395, 28396, 28438, 28439, 28443, 28444, 28447, 28449, 28456, 28464, 28465, 28470, 28477, 28481, 28490, 28498, 28499, 28511, 28515, 28524, 28532, 28533, 28633, 28635, 28642, 28650, 28651, 28656, 28661, 28679, 28738, 28745, 28753, 28754, 28759, 28799, 28925, 28926, 29011, 29022, 29056, 29098, 29119, 29140, 29245, 29266, 29308, 29371, 29392, 29476, 29560, 29749, 29917, 29938, 30196, 30888, 31244, 31592, 33212, 33512, 34088, 34631, 34870, 35139, 35402, 35422, 35467, 35507, 35512, 43373, 49746, 49747, and 49871-49873, or a sequence having at least about 70%, at least about 80%, at least about 90%, at least about 95%, at least about 98%, or at least about 99% sequence identity thereto, wherein the engineered CasX exhibits improved editing specificity compared to unmodified CasX 515.

60. The engineered CasX protein of any one of claims 42-56, wherein the engineered CasX comprises a sequence selected from the group consisting of SEQ ID NOS: 27858, 27859, 27861, 27865, 27866, 27868, 27870, 27871, 27872, 27876, 27877, 27880, 27882, 27889, 27897, 27898, 27903, 27952, 27953, 27954, 27955, 27958, 27959, 27961, 27963, 27969, 27970, 27973, 27975, 27982, 27990, 27991, 27996, 27998, 28003, 28004, 28006, 28008, 28009, 28010, 28014, 28018, 28027, 28035, 28036, 28047, 28048, 28050, 28052, 28053, 28054, 28058, 28062, 28071, 28079, 28080, 28095, 28101, 28105, 28123, 28137, 28143, 28147, 28165, 28253, 28255, 28257, 28258, 28259, 28263, 28267, 28276, 28284, 28285, 28293, 28295, 28296, 28297, 28301, 28305, 28314, 28322, 28323, 28368, 28369, 28370, 28374, 28378, 28387, 28395, 28396, 28438, 28439, 28443, 28444, 28447, 28449, 28456, 28464, 28465, 28470, 28477, 28481, 28490, 28498, 28499, 28511, 28515, 28524, 28532, 28533, 28633, 28635, 28642, 28650, 28651, 28656, 28661, 28679, 28738, 28745, 28753, 28754, 28759, 28799, 28925, 28926, 29011, 29022, 29056, 29098, 29119, 29140, 29245, 29266, 29308, 29371, 29392, 29476, 29560, 29749, 29917, 29938, 30196, 30888, 31244, 31592, 33212, 33512, 34088, 34631, 34870, 35139, 35402, 35422, 35467, 35507, 35512, 43373, 49746, 49747, and 49871-49873 or a sequence having at least about 70%, at least about 80%, at least about 90%, at least about 95%, at least about 98%, or at least about 99% sequence identity thereto, wherein the engineered CasX exhibits improved editing activity and specificity compared to unmodified CasX 515.

61. The engineered CasX protein of any one of claims 42-56, wherein the engineered CasX comprises a sequence selected from the group consisting of SEQ ID NOS: 27865, 27952, 27954, 27955, 27958, 27959, 27973, 28009, 28018, 28048, 28101, 28123, 28137, 28285, 28296, 28301, 28305, 28314, 28323, 28368, 28369, 28370, 28378, 28387, 28438, 28447, 28477, 28481, 28498, 28515, 28524, 28532, 28661, 28799, 28925, 29022, 29266, 29308, 29371, 29560, 29749, 29917, 30888, 31244, 33212, 33512, 34088, 34870, 35422, 35507, 43373, 49872, and 49873, or a sequence having at least about 70%, at least about 80%, at least about 90%, at least about 95%, at least about 98%, or at least about 99% sequence identity thereto, wherein the engineered CasX exhibits improved specificity ratio compared to unmodified CasX 515.

62. The engineered CasX protein of any one of claims 42-56, wherein the engineered CasX comprises a sequence selected from the group consisting of SEQ ID NOS: 27952, 27958, 28101, 28123, 28137, 28285, 28368, 28370, 28378, 28387, 28438, 28799, 28925, 29022, 29308, 29749, 29917, 30888, 34870, 43373, and 49873, or a sequence having at least about 70%, at least about 80%, at least about 90%, at least about 95%, at least about 98%, or at least about 99% sequence identity thereto, wherein the engineered CasX exhibits improved editing activity and improved editing specificity compared to an unmodified CasX 515.

63. The engineered CasX protein of any one of claims 42-62, wherein the improved characteristic is at least about 0.1-fold to about 10-fold improved in the in vitro assay.

64. The engineered CasX variant of any one of claims 1-56, wherein the engineered CasX protein is a catalytically inactive CasX (dCasX) protein.

65. The engineered CasX variant of claim 64, wherein the dCasX comprises a mutation at residues:
a. D672A, and/or E769A, and/or D935A corresponding to the CasX protein of SEQ ID NO:1; or
D659A, and/or E756A, and/or D922A corresponding to the CasX protein of SEQ ID NO: 2.

66. An engineered CasX protein comprising two or more mutations selected from 4.I.G & 64.R.Q, 4.I.G & 169.L.K, 4.I.G & 169.L.Q, 4.I.G & 171.A.D, 4.I.G & 171.A.Y, 4.I.G & 171.A.S, 4.I.G & 224.G.T, 4.I.G & 304.M.T, 4.I.G & 398.Y.T, 4.I.G & 826.V.M, 41G & 887.T.D, 4.I.G & 891.S.Q, 5.-.G & 64.R.Q, 5.-.G & 169.L.K, 5.-.G & 169.L.Q, 5.-.G & 171.A.D, 5.-.G & 171.A.Y, 5.-.G & 171.A.S, 5.-.G & 224.G.T, 5.-.G & 304.M.T, 5.-.G & 398.Y.T, 5.-.G & 826.V.M, 5.-.G & 887.T.D, 5.-.G & 891.S.Q, 9.K.G & 64.R.Q, 9.K.G & 169.L.K, 9.K.G & 169.L.Q, 9.K.G & 171.A.D, 9.K.G & 171.A.Y, 9.K.G & 171.A.S, 9.K.G & 224.G.T, 9.K.G & 304.M.T, 9.K.G & 398.Y.T, 9.K.G & 826.V.M, 9.K.G & 887.T.D, 9.K.G & 891.S.Q, 27.-.R & 64.R.Q, 27.-.R & 169.L.K, 27.-.R & 169.L.Q, 27.-.R & 171.A.D, 27.-.R & 171.A.Y, 27.-.R & 171.A.S, 27.-.R & 224.G.T, 27.-.R & 304.M.T, 27.-.R & 398.Y.T, 27.-.R & 826.V.M, 27.-.R & 887.T.D, 27.-.R & 891.S.Q, 35.R.P & 64.R.Q, 35.R.P & 169.L.K, 35.R.P & 169.L.Q, 35.R.P & 171.A.D, 35.R.P & 171.A.Y, 35.R.P & 171.A.S, 35.R.P & 224.G.T, 35.R.P & 304.M.T, 35.R.P & 398.Y.T, 35.R.P & 826.V.M, 35.R.P & 887.T.D, 35.R.P & 891.S.Q, 887.T.D & 891.S.Q, 64.R.Q & 169.L.K, 64.R.Q & 169.L.Q, 64.R.Q & 171.A.D, 64.R.Q & 171.A.Y, 64.R.Q & 171.A.S, 64.R.Q & 224.G.T, 64.R.Q & 304.M.T, 64.R.Q & 398.Y.T, 64.R.Q & 826.V.M, 64.R.Q & 887.T.D, 64.R.Q & 891.S.Q, 169.L.K & 171.A.D, 169.L.K & 171.A.Y, 169.L.K & 171.A.S, 169.L.K & 224.G.T, 169.L.K & 304.M.T, 169.L.K & 398.Y.T, 169.L.K & 826.V.M, 169.L.K & 887.T.D, 169.L.K & 891.S.Q, 169.L.Q & 171.A.D, 169.L.Q & 171.A.Y, 169.L.Q & 171.A.S, 169.L.Q & 224.G.T, 169.L.Q & 304.M.T, 169.L.Q & 398.Y.T, 169.L.Q & 826.V.M, 169.L.Q & 887.T.D, 169.L.Q & 891.S.Q, 171.A.D & 224.G.T, 171.A.D & 304.M.T, 171.A.D & 398.Y.T, 171.A.D & 826.V.M, 171.A.D & 887.T.D, 171.A.D & 891.S.Q, 171.A.Y & 224.G.T, 171.A.Y & 304.M.T, 171.A.Y & 398.Y.T, 171.A.Y & 826.V.M, 171.A.Y & 887.T.D, 171.A.Y & 891.S.Q, 171.A.S & 224.G.T, 171.A.S & 304.M.T, 171.A.S & 398.Y.T, 171.A.S & 826.V.M, 171.A.S & 887.T.D, 171.A.S & 891.S.Q, 4.I.G & 35.R.P, 224.G.T & 304.M.T, 224.G.T & 398.Y.T, 224.G.T & 826.V.M, 224.G.T & 887.T.D, 224.G.T & 891.S.Q, 5.-.G & 35.R.P, 4.I.G & 27.-.R, 304.M.T & 398.Y.T, 304.M.T & 826.V.M, 304.M.T & 887.T.D, 304.M.T & 891.S.Q, 9.K.G & 35.R.P, 5.-.G & 27.-.R, 4.I.G & 9.K.G, 398.Y.T & 826.V.M, 398.Y.T & 887.T.D, 398.Y.T & 891. S.Q, 27.-.R & 35.R.P, 9.K.G & 27.-.R, 5.-.G & 9.K.G, 4.I.G & 5.-.G, 826.V.M & 887.T.D, 826.V.M & 891.S.Q, 5.K.G & 27.-.R, 5.K.G & 169.L.K, 5.K.G & 171.A.D, 5.K.G & 304.M.T, 5.K.G & 398.YT, 5.K.G & 891.S.Q, 6.-.G & 27.-.R, 6.-.G & 169.L.K, 6.-.G & 171.A.D, 6.-.G & 304.M.T, 6.-.G & 398.Y.T, 6.-.G & 891.S.Q, 304.M.W & 27.-.R, 304.M.W & 169.L.K, 304.M.W & 171.A.D, 304.M.W & 398.Y.T, 304.M.W & 891.S.Q, 481.E.D & 27.-.R, 481.E.D & 169.L.K, 481.E.D & 171.A.D, 481.E.D & 304.M.T, 481.E.D & 398.Y.T, 481.E.D & 891.S.Q, 698.S.R & 27.-.R, 698.S.R & 169.L.K, 698.S.R & 171.A.D, 698.S.R & 304.M.T, 698.S.R & 398.Y.T, and 698.S.R & 891.S.Q.

67. An engineered CasX protein comprising:
a. an NTSB domain sequence of SEQ ID NO: 297, or a sequence having at least about 90%, or at least about 95% sequence identity thereto;
b. a RuvC-II domain sequence of SEQ ID NO: 303, or a sequence having at least about 90%, or at least about 95% sequence identity thereto; and;
c. a helical I-II domain sequence of SEQ ID NO: 298, or a sequence having at least about 90%, or at least about 95% sequence identity thereto, comprising an amino acid substitution of position G137 relative to the sequence of SEQ ID NO: 298, wherein the substituted position G137 relative to the sequence of SEQ ID NO: 298 comprises a hydrophilic amino acid residue.

68. The engineered CasX protein of claim 67, wherein the hydrophilic amino acid residue is lysine or asparagine.

69. The engineered CasX protein of claim 67, or claim 68, comprising:
a. an OBD-I domain sequence of SEQ ID NO: 295, or a sequence having at least about 90%, or at least about 95% sequence identity thereto;
b. a helical I-I domain sequence of SEQ ID NO: 296, or a sequence having at least about 90%, or at least about 95% sequence identity thereto;
c. an OBD-II domain sequence of SEQ ID NO: 300, or a sequence having at least about 90%, or at least about 95% sequence identity thereto;
d. a RuvC-I domain sequence of SEQ ID NO: 301, or a sequence having at least about 90%, or at least about 95% sequence identity thereto; and
e. a TSL domain sequence of SEQ ID NO: 302, or a sequence having at least about 90%, or at least about 95% sequence identity thereto.

70. The engineered CasX protein of any one of claims 67-69, comprising a sequence of SEQ ID NO: 266, or a sequence having at least about 70%, at least about 80%, at least about 90%, at least about 95%, at least about 98%, at least about 99% sequence identity thereto, wherein the engineered CasX has an improved characteristic of the compared to the CasX of SEQ ID NO: 228.

71. The engineered CasX protein of claim 70, wherein the improved characteristic is one or more of improved ability to utilize a greater spectrum of protospacer adjacent motif (PAM) sequences in the editing of target nucleic acid, increased nuclease activity, increased editing of target nucleic acid, improved editing specificity for the target nucleic acid, decreased off-target editing, increased percentage of a eukaryotic genome that can be efficiently edited, improved ability to form cleavage-competent RNP with an ERS, and improved stability of an RNP complex.

72. The engineered CasX protein of claim 71, wherein the improved characteristic comprises increased editing specificity of target nucleic acid relative to the editing of the sequence of SEQ ID NO: 228, wherein the increase is at least about 1.01-fold, at least about 1.5-fold, at least about 2-fold, at least about 4-fold, at least about 10-fold, at least about 20-fold, at least about 30-fold, or at least about 40-fold greater.

73. The engineered CasX protein of claim 71, wherein the improved characteristic comprises decreased off-target editing relative to the off-target editing of the sequence of SEQ ID NO: 228.

74. The engineered CasX protein of claim 73, wherein the off-target editing is less than about 5%, less than about 4%, less than 3%, less than about 2%, less than about 1%, less than about 0.5%, less than 0.1%, when measured in silico, in an in vitro cell-free assay, or in a cell-based assay.

75. The engineered CasX protein of any one of claims 42-74, comprising one or more nuclear localization signals (NLS), and, optionally, wherein the one or more NLS are linked to the engineered CasX protein or to an adjacent NLS with a linker peptide.

76. The engineered CasX protein of claim 75, wherein the NLS is selected from the group consisting of the sequences of SEQ ID NOS: 364-457 as set forth in Table 8.

77. The engineered CasX protein of claim 75 or claim 76, wherein the linker peptide is selected from the group consisting of SR, RS, and peptides of SEQ ID NOS: 468-486.

78. The engineered CasX protein of any one of claims 75-77, wherein the one or more NLS are positioned at or near the C-terminus of the protein.

79. The engineered CasX protein of any one of claims 75-77, wherein the one or more NLS are positioned at or near at the N-terminus of the protein.

80. The engineered CasX protein of any one of claims 75-77, comprising at least two NLS, wherein the at least two NLS are positioned at or near the N-terminus and at or near the C-terminus of the protein.

81. The engineered CasX protein of any one of claims 42-80, wherein the engineered CasX protein is capable of forming a ribonuclear protein complex (RNP) with an ERS.

82. A gene editing pair comprising a ERS and an engineered CasX protein, the pair comprising an ERS of any one of claims 1-41 and an engineered CasX protein of any one of claims 42-81.

83. The gene editing pair of claim 82, wherein the ERS and the engineered CasX protein are capable of forming a ribonuclear protein complex (RNP).

84. The gene editing pair of claim 82, wherein the ERS and the engineered CasX protein are associated together as a ribonuclear protein complex (RNP).

85. The gene editing pair of any one of claims 82-84, wherein an RNP of the engineered CasX protein and the ERS exhibit at least one or more improved characteristics as compared to an RNP comprising the sequences of SEQ ID NO: 156 and SEQ ID NO: 228.

86. The gene editing pair of claim 85, wherein the improved characteristic is selected from one or more of the group consisting of increased binding affinity of the engineered CasX protein to the ERS, increased binding affinity to a target nucleic acid, increased ability to utilize a greater spectrum of one or more PAM sequences, including ATC, CTC, GTC, or TTC, in the editing of target nucleic acid, increased editing specificity of the target nucleic acid, increased nuclease activity, increased cleavage rate of the target nucleic acid, decreased off-target cleavage of the target nucleic acid, increased RNP stability, and increased ability to form cleavage-competent RNP.

87. A nucleic acid comprising a sequence that encodes the ERS of any one of claims 1-41.

88. The nucleic acid of claim 87, wherein the sequence is depleted or devoid of CpG motifs.

89. The nucleic acid of claim 88, comprising a sequence selected from the group consisting of SEQ ID NOS: 535-556.

90. A nucleic acid comprising a sequence that encodes the engineered CasX protein of any one of claims 42-81.

91. The nucleic acid of claim 88, wherein the sequence that encodes the engineered CasX protein is codon-optimized.

92. The nucleic acid of claim 91, wherein the sequence that encodes the engineered CasX protein is codon-optimized for expression in a human cell.

93. The nucleic acid of claim 90, wherein the sequence that encodes the engineered CasX protein is devoid or depleted of CpG motifs.

94. The nucleic acid of claim 93, comprising a sequence selected from the group consisting of SEQ ID NOS: 49850-49861.

95. The nucleic acid of any one of claims 90-92, wherein the nucleic acid is messenger RNA (mRNA).

96. A vector comprising:
a. the ERS of any one of claims 1-41;
b. the engineered CasX protein of any one of claims 42-81;
c. the nucleic acid of claim 87-89;
d. the nucleic acid of any one of claims 90-95; or
e. any combination of (a)-(d).

97. The vector of claim 96, wherein the vector comprises a promoter operably linked to the nucleic acid.

98. The vector of claim 96 or claim 97, wherein the vector is selected from the group consisting of a retroviral vector, a lentiviral vector, an adenoviral vector, an adeno-associated viral (AAV) vector, a herpes simplex virus (HSV) vector, a CasX delivery particle (XDP), a plasmid, a minicircle, a nanoplasmid, a DNA vector, and an RNA vector.

99. The vector of claim 98, wherein the vector is an AAV vector.

100. The vector of claim 99, wherein the AAV vector is a serotype selected from AAV1, AAV2, AAV3, AAV4, AAV5, AAV6, AAV7, AAV8, AAV9, AAV10, AAV11, AAV12, AAV 9.45, AAV 9.61, AAV-Rh74, or AAVRh10.

101. The vector of claim 100, wherein the AAV vector comprises a transgene with inverted terminal repeat (ITR) sequences derived from AAV2.

102. The vector of claim 98, wherein the vector is a retroviral vector.

103. The vector of claim 98, wherein the vector is an XDP comprising one or more components of a gag polyprotein.

104. The vector of claim 103, wherein the XDP comprises the engineered CasX protein and the ERS associated together in an RNP.

105. The vector of claim 103 or claim 104, comprising a glycoprotein tropism factor.

106. The vector of claim 105, wherein the glycoprotein tropism factor has binding affinity for a cell surface marker of a target cell and facilitates entry of the XDP into the target cell.

107. A host cell comprising the vector of any one of claims 96-106.

108. The host cell of claim 107, wherein the host cell is selected from the group consisting of a Baby Hamster Kidney fibroblast (BHK) cell, a human embryonic kidney 293 (HEK293) cell, a human embryonic kidney 293T (HEK293 T) cell, a NS0 cell, a SP2/0 cell, a YO myeloma cell, a P3X63 mouse myeloma cell, a PER cell, a PER.C6 cell, a hybridoma cell, a NIH3T3 cell, a CV-1 (simian) in Origin with SV40 genetic material (COS) cell, a HeLa cell, a Chinese hamster ovary (CHO) cell, or a yeast cell.

109. A lipid nanoparticle (LNP) comprising:
a. the ERS of any one of claims 1-41;
b. the nucleic acid of any one of claims 87-95; or
c. a combination of (a) and (b).

110. The LNP of claim 109, wherein the LNP comprises one or more components selected from the group consisting of an ionizable lipid, a helper phospholipid, a polyethylene glycol (PEG)-modified lipid, and cholesterol or a derivative thereof.

111. The LNP of claim 109, wherein the LNP comprises an ionizable lipid, a helper phospholipid, a polyethylene glycol (PEG)-modified lipid, and cholesterol or a derivative thereof.

112. The LNP of any one of claims 109-111, wherein the LNP comprises a cationic lipid comprising a pKa of about 5 to about 8.

113. A method of modifying a target nucleic acid in a cell, comprising introducing into the cell:
a. the gene editing pair of any one of claims 82-86;
b. one or more nucleic acids encoding the gene editing pair of (a);
c. a vector comprising the nucleic acid of (b);
d. an XDP comprising the gene editing pair of (a);
e. the LNP of any one of claims 109-112; or
f. combinations of two or more of (a) to (e),
wherein the target nucleic acid of the cell targeted by the ERS is modified by the engineered CasX.

114. The method of claim 113, comprising contacting the target with a plurality of gene editing pairs comprising a first and a second, or three or four ERS comprising targeting sequences complementary to different or overlapping regions of the target nucleic acid.

115. The method of claim 113, comprising contacting the target with a plurality of nucleic acids encoding gene editing pairs comprising a first and a second, three, or four ERS comprising targeting sequences complementary to different or overlapping regions of the target nucleic acid.

116. The method of claim 113, comprising contacting the target with a plurality of XDP comprising gene editing pairs comprising a first and a second, or three, or four ERSs comprising targeting sequences complementary to different or overlapping regions of the target nucleic acid.

117. The method of claim 113, comprising contacting the target nucleic acid with the gene editing pair and introducing one or more single-stranded breaks in the target nucleic acid, wherein the modifying comprises introducing a mutation, an insertion, or a deletion in the target nucleic acid.

118. The method of any one of claims 114-117, wherein the contacting comprises binding the target nucleic acid and introducing one or more double-stranded breaks in the target nucleic acid, wherein the modifying comprises introducing a mutation, an insertion, or a deletion in the target nucleic acid.

119. The method of any one of claims 113-118, wherein the modifying corrects a mutation in the gene to wild-type or results in the ability of the cell to express a functional gene product.

120. The method of any one of claims 113-118, wherein the modifying knocks down or knocks out the gene.

121. The method of any one of claims 113-118, wherein the modifying of the cell occurs in vitro or ex vivo.

122. The method of any one of claims 113-116, wherein modifying of the cell occurs in vivo.

123. The method of any one of claims 113-122, wherein the cell is a eukaryotic cell.

124. The method of claim 123, wherein the eukaryotic cell is selected from the group consisting of a rodent cell, a mouse cell, a rat cell, a primate cell, and a non-human primate cell.

125. The method of claim 123, wherein the eukaryotic cell is a human cell.

126. The method of any one of claims 113-125, wherein the cell is selected from the group consisting of an embryonic stem cell, an induced pluripotent stem cell, a germ cell, a fibroblast, an oligodendrocyte, a glial cell, a hematopoietic stem cell, a neuron progenitor cell, a neuron, a muscle cell, a bone cell, a hepatocyte, a pancreatic cell, a retinal cell, a cancer cell, a T-cell, a B-cell, an NK cell, a fetal cardiomyocyte, a myofibroblast, a mesenchymal stem cell, an autotransplanted expanded cardiomyocyte, an adipocyte, a totipotent cell, a pluripotent cell, a blood stem cell, a myoblast, an adult stem cell, a bone marrow cell, a mesenchymal cell, a parenchymal cell, an epithelial cell, an endothelial cell, a mesothelial cell, a fibroblast cell, an osteoblast cell, a chondrocyte cell, an exogenous cell, an endogenous cell, a stem cell, a hematopoietic stem cell, a bone-marrow derived progenitor cell, a myocardial cell, a skeletal cell, a fetal cell, an undifferentiated cell, a multi-potent progenitor cell, a unipotent progenitor cell, a monocyte, a cardiac myoblast, a skeletal myoblast, a macrophage, a capillary endothelial cell, a xenogenic cell, an allogenic cell, an autologous cell, and a post-natal stem cell.

127. The method of any one of claims 122-126, wherein the modifying occurs in the cells of a subject having a mutation in an allele of a gene wherein the mutation causes a disease or disorder in the subject.

128. A composition, comprising the engineered CasX protein of any one of claims 42-81.

129. The composition of claim 128, comprising the ERS of any one of claims 1-41.

130. The composition of claim 129, wherein the CasX protein and the ERS are associated together in a ribonuclear protein complex (RNP).

131. A composition, comprising an ERS of any one of claims 1-41.

132. The composition of claim 131, comprising the engineered CasX protein of any one of claims 42-81.

133. The composition of claim 132, wherein the engineered CasX protein and the ERS are associated together in a ribonuclear protein complex (RNP).

134. The composition of any one of claims 129-133, wherein the ERS comprises a targeting sequence of 15 to 20 nucleotides, wherein the targeting sequence is complementary to a target nucleic acid.

135. The composition of claim 134, wherein the targeting sequence has 20 nucleotides.

136. A pharmaceutical composition comprising the composition of any one of claims 128-133 and a pharmaceutically acceptable excipient.

137. A pharmaceutical composition comprising the LNP of any one of claims 109-112 and a suitable container.

138. A kit comprising the pharmaceutical composition of claim 136 or claim 137 and a suitable container.

139. An engineered CasX protein comprising any one of the sequences set forth in SEQ ID NOS: 24916-49628, 49746-49747, and 49871-49873.

140. An engineered CasX protein comprising any one of the sequences listed in Table 5.

141. A ERS comprising any one of the ERS sequences selected from the group consisting of SEQ ID NOS: 11,568-22,227 and 23,572-24,915.

142. The ERS of claim 141, comprising a targeting sequence having 15-20 nucleotides, wherein the targeting sequence is complementary to a target nucleic acid.

143. The ERS of claim 142, wherein the targeting sequence has 20 nucleotides.

144. The composition of any one of claims 128-135 for use in the manufacture of a medicament for the treatment a subject having a disease.

The application's sequence listing, which the Patent Office published only in electronic form, follows.

SEQUENCE LISTING (49870 sequences)

SEQ ID NO: 1 - protein, 986 aa, unidentified
  REGION 1..986: note = Deltaproteobacteria sp.
MEKRINKIRKKLSADNATKPVSRSGPMKTLLVRVMTDDLKKRLEKRRKKPEVMPQVISNNAANNLRMLLDDYTKMKEAILQVYWQEFKDDHVGLMCKFAQPASKKIDQNKLKPEMDEKGNLTTAGFACSQCGQPLFVYKLEQVSEKGKAYTNYFGRCNVAEHEKLILLAQLKPEKDSDEAVTYSLGKFGQRALDFYSIHVTKESTHPVKPLAQIAGNRYASGPVGKALSDACMGTIASFLSKYQDIIIEHQKVVKGNQKRLESLRELAGKENLEYPSVTLPPQPHTKEGVDAYNEVIARVRMWVNLNLWQKLKLSRDDAKPLLRLKGFPSFPVVERRENEVDWWNTINEVKKLIDAKRDMGRVFWSGVTAEKRNTILEGYNYLPNENDHKKREGSLENPKKPAKRQFGDLLLYLEKKYAGDWGKVFDEAWERIDKKIAGLTSHIEREEARNAEDAQSKAVLTDWLRAKASFVLERLKEMDEKEFYACEIQLQKWYGDLRGNPFAVEAENRVVDISGFSIGSDGHSIQYRNLLAWKYLENGKREFYLLMNYGKKGRIRFTDGTDIKKSGKWQGLLYGGGKAKVIDLTFDPDDEQLIILPLAFGTRQGREFIWNDLLSLETGLIKLANGRVIEKTIYNKKIGRDEPALFVALTFERREVVDPSNIKPVNLIGVDRGENIPAVIALTDPEGCPLPEFKDSSGGPTDILRIGEGYKEKQRAIQAAKEVEQRRAGGYSRKFASKSRNLADDMVRNSARDLFYHAVTHDAVLVFENLSRGFGRQGKRTFMTERQYTKMEDWLTAKLAYEGLTSKTYLSKTLAQYTSKTCSNCGFTITTADYDGMLVRLKKTSDGWATTLNNKELKAEGQITYYNRYKRQTVEKELSAELDRLSEESGNNDISKWTKGRRDEALFLLKKRFSHRPVQEQFVCLDCGHEVHADEQAALNIARSWLFLNSNSTEFKSYKSGKQPFVGAWQAFYKRRLKEVWKPNA

SEQ ID NO: 2 - protein, 978 aa, unidentified
  REGION 1..978: note = Planctomycetes sp.
MQEIKRINKIRRRLVKDSNTKKAGKTGPMKTLLVRVMTPDLRERLENLRKKPENIPQPISNTSRANLNKLLTDYTEMKKAILHVYWEEFQKDPVGLMSRVAQPAPKNIDQRKLIPVKDGNERLTSSGFACSQCCQPLYVYKLEQVNDKGKPHTNYFGRCNVSEHERLILLSPHKPEANDELVTYSLGKFGQRALDFYSIHVTRESNHPVKPLEQIGGNSCASGPVGKALSDACMGAVASFLTKYQDIILEHQKVIKKNEKRLANLKDIASANGLAFPKITLPPQPHTKEGIEAYNNVVAQIVIWVNLNLWQKLKIGRDEAKPLQRLKGFPSFPLVERQANEVDWWDMVCNVKKLINEKKEDGKVFWQNLAGYKRQEALLPYLSSEEDRKKGKKFARYQFGDLLLHLEKKHGEDWGKVYDEAWERIDKKVEGLSKHIKLEEERRSEDAQSKAALTDWLRAKASFVIEGLKEADKDEFCRCELKLQKWYGDLRGKPFAIEAENSILDISGFSKQYNCAFIWQKDGVKKLNLYLIINYFKGGKLRFKKIKPEAFEANRFYTVINKKSGEIVPMEVNFNFDDPNLIILPLAFGKRQGREFIWNDLLSLETGSLKLANGRVIEKTLYNRRTRQDEPALFVALTFERREVLDSSNIKPMNLIGIDRGENIPAVIALTDPEGCPLSRFKDSLGNPTHILRIGESYKEKQRTIQAAKEVEQRRAGGYSRKYASKAKNLADDMVRNTARDLLYYAVTQDAMLIFENLSRGFGRQGKRTFMAERQYTRMEDWLTAKLAYEGLPSKTYLSKTLAQYTSKTCSNCGFTITSADYDRVLEKLKKTATGWMTTINGKELKVEGQITYYNRYKRQNVVKDLSVELDRLSEESVNNDISSWTKGRSGEALSLLKKRFSHRPVQEKFVCLNCGFETHADEQAALNIARSWLFLRSQEYKKYQTNKTTGNTDKRAFVETWQSFYRKKLKEVWKPAV

SEQ ID NO: 3 - protein, 855 aa, unidentified
  REGION 1..855: note = Candidatus Sungbacteria sp.
MDNANKPSTKSLVNTTRISDHFGVTPGQVTRVFSFGIIPTKRQYAIIERWFAAVEAARERLYGMLYAHFQENPPAYLKEKFSYETFFKGRPVLNGLRDIDPTIMTSAVFTALRHKAEGAMAAFHTNHRRLFEEARKKMREYAECLKANEALLRGAADIDWDKIVNALRTRLNTCLAPEYDAVIADFGALCAFRALIAETNALKGAYNHALNQMLPALVKVDEPEEAEESPRLRFFNGRINDLPKFPVAERETPPDTETIIRQLEDMARVIPDTAEILGYIHRIRHKAARRKPGSAVPLPQRVALYCAIRMERNPEEDPSTVAGHFLGEIDRVCEKRRQGLVRTPFDSQIRARYMDIISFRATLAHPDRWTEIQFLRSNAASRRVRAETISAPFEGFSWTSNRTNPAPQYGMALAKDANAPADAPELCICLSPSSAAFSVREKGGDLIYMRPTGGRRGKDNPGKEITWVPGSFDEYPASGVALKLRLYFGRSQARRMLTNKTWGLLSDNPRVFAANAELVGKKRNPQDRWKLFFHMVISGPPPVEYLDFSSDVRSRARTVIGINRGEVNPLAYAVVSVEDGQVLEEGLLGKKEYIDQLIETRRRISEYQSREQTPPRDLRQRVRHLQDTVLGSARAKIHSLIAFWKGILAIERLDDQFHGREQKIIPKKTYLANKTGFMNALSFSGAVRVDKKGNPWGGMIEIYPGGISRTCTQCGTVWLARRPKNPGHRDAMVVIPDIVDDAAATGFDNVDCDAGTVDYGELFTLSREWVRLTPRYSRVMRGTLGDLERAIRQGDDRKSRQMLELALEPQPQWGQFFCHRCGFNGQSDVLAATNLARRAISLIRRLPDTDTPPTP

SEQ ID NO: 4 - RNA, 108 nt, synthetic construct
  misc_feature 1..108: note = gRNA sequence
  source 1..108: mol_type = other RNA
acatctggcgcgtttattccattactttggagccagtcccagcgactatgtcgtatggacgaagcgcttatttatcggagagaaaccgataagtaaaacgcatcaaag

SEQ ID NO: 5 - RNA, 108 nt, synthetic construct
  misc_feature 1..108: note = gRNA sequence
  source 1..108: mol_type = other RNA
tactggcgcttttatctcattactttgagagccatcaccagcgactatgtcgtatgggtaaagcgcttatttatcggagagaaatccgataaataagaagcatcaaag

SEQ ID NO: 6 - RNA, 81 nt, synthetic construct
  misc_feature 1..81: note = gRNA sequence
  source 1..81: mol_type = other RNA
acatctggcgcgtttattccattactttggagccagtcccagcgactatgtcgtatggacgaagcgcttatttatcggaga

SEQ ID NO: 7 - RNA, 78 nt, synthetic construct
  misc_feature 1..78: note = gRNA sequence
  source 1..78: mol_type = other RNA
acatctggcgcgtttattccattactttggagccagtcccagcgactatgtcgtatggacgaagcgcttatttatcgg

SEQ ID NO: 8 - RNA, 80 nt, synthetic construct
  misc_feature 1..80: note = gRNA sequence
  source 1..80: mol_type = other RNA
tactggcgcttttatctcattactttgagagccatcaccagcgactatgtcgtatgggtaaagcgcttatttatcggaga

SEQ ID NO: 9 - RNA, 77 nt, synthetic construct
  misc_feature 1..77: note = gRNA sequence
  source 1..77: mol_type = other RNA
tactggcgcttttatctcattactttgagagccatcaccagcgactatgtcgtatgggtaaagcgcttatttatcgg

SEQ ID NO: 10 - RNA, 25 nt, synthetic construct
  misc_feature 1..25: note = gRNA sequence
  source 1..25: mol_type = other RNA
gtttacacactccctctcatagggt

SEQ ID NO: 11 - RNA, 25 nt, synthetic construct
  misc_feature 1..25: note = gRNA sequence
  source 1..25: mol_type = other RNA
gtttacacactccctctcatgaggt

SEQ ID NO: 12 - RNA, 25 nt, synthetic construct
  misc_feature 1..25: note = gRNA sequence
  source 1..25: mol_type = other RNA
ttttacataccccctctcatgggat

SEQ ID NO: 13 - RNA, 25 nt, synthetic construct
  misc_feature 1..25: note = gRNA sequence
  source 1..25: mol_type = other RNA
gtttacacactccctctcatggggg

SEQ ID NO: 14 - RNA, 20 nt, synthetic construct
  misc_feature 1..20: note = gRNA sequence
  source 1..20: mol_type = other RNA
ccagcgactatgtcgtatgg

SEQ ID NO: 15 - RNA, 39 nt, synthetic construct
  misc_feature 1..39: note = gRNA sequence
  source 1..39: mol_type = other RNA
gcgcttatttatcggagagaaatccgataaataagaagc

SEQ ID NO: 16 - RNA, 74 nt, synthetic construct
  misc_feature 1..74: note = gRNA sequence
  source 1..74: mol_type = other RNA
ggcgcttttatctcattactttgagagccatcaccagcgactatgtcgtatgggtaaagcgcttatttatcgga

SEQ ID NO: 17 - RNA, 89 nt, synthetic construct
  misc_feature 1..89: note = gRNA variant scaffold
  source 1..89: mol_type = other RNA
actggcgcttttatctgattactttgagagccatcaccagcgactatgtcgtagtgggtaaagctccctcttcggagggagcatcaaag

SEQ ID NO: 18 - RNA, 97 nt, synthetic construct
  misc_feature 1..97: note = gRNA variant scaffold
  source 1..97: mol_type = other RNA
actggcgcctttatctcattactttgagagccatcaccagcgactatgtcgtatgggtaaagcgcttacggacttcggtccgtaagaagcatcaaag

SEQ ID NO: 19 - RNA, 89 nt, synthetic construct
  misc_feature 1..89: note = gRNA variant scaffold
  source 1..89: mol_type = other RNA
gctggcgcttttatctgattactttgagagccatcaccagcgactatgtcgtagtgggtaaagctccctcttcggagggagcatcaaag

SEQ ID NO: 20 - RNA, 88 nt, synthetic construct
  misc_feature 1..88: note = gRNA variant scaffold
  source 1..88: mol_type = other RNA
actggcgcttttatctgattactttgagagccatcaccagcgactatgtcgtatgggtaaagctccctcttcggagggagcatcaaag

SEQ ID NO: 21 - RNA, 151 nt, synthetic construct
  misc_feature 1..151: note = gRNA variant scaffold
  source 1..151: mol_type = other RNA
actggcgcttttatctgattactttgagagccatcaccagcgactatgtcgtagtgggtaaataggagctgcactatgggcgcagtgtcattgacgctgacggtacaggccagacaattattgtctggtatagtgcagctcctaatcaaag

SEQ ID NO: 22 - RNA, 97 nt, synthetic construct
  misc_feature 1..97: note = gRNA variant scaffold
  source 1..97: mol_type = other RNA
actggcgcctttatctgattactttgagagccatcaccagcgactatgtcgtatgggtaaagcgcttacggacttcggtccgtaagaagcatcaaag

SEQ ID NO: 23 - RNA, 97 nt, synthetic construct
  misc_feature 1..97: note = gRNA variant scaffold
  source 1..97: mol_type = other RNA
actggcgcttttatctgattactttgagagccatcaccagcgactatgtcgtatgggtaaagcgcttacggacttcggtccgtaagaagcatcaaag

SEQ ID NO: 24 - RNA, 98 nt, synthetic construct
  misc_feature 1..98: note = gRNA variant scaffold
  source 1..98: mol_type = other RNA
actggcgcttttatctgattactttgagagccatcaccagcgactatgtcgtagtgggtaaagcgcttacggacttcggtccgtaagaagcatcaaag

SEQ ID NO: 25 - RNA, 89 nt, synthetic construct
  misc_feature 1..89: note = gRNA variant scaffold
  source 1..89: mol_type = other RNA
actggcgcttttatctgattactttgagagccatcaccagcgactatgtcgtattgggtaaagctccctcttcggagggagcatcaaag

SEQ ID NO: 26 - RNA, 98 nt, synthetic construct
  misc_feature 1..98: note = gRNA variant scaffold
  source 1..98: mol_type = other RNA
actggcgcttttatctgattactttgagagccatcaccagcgactatgtcgtattgggtaaagcgcttacggacttcggtccgtaagaagcatcaaag

SEQ ID NO: 27 - RNA, 98 nt, synthetic construct
  misc_feature 1..98: note = gRNA variant scaffold
  source 1..98: mol_type = other RNA
actggcgcctttatcatcattactttgagagccatcaccagcgactatgtcgtatgggtaaagcgcttacggacttcggtccgtaagaagcatcaaag

SEQ ID NO: 28 - RNA, 90 nt, synthetic construct
  misc_feature 1..90: note = gRNA variant scaffold
  source 1..90: mol_type = other RNA
actggcgcttttatctgattactttgagagccatcaccagcgactatgtcgtagtgggtaaagcgccctcttcggagggaagcatcaaag

SEQ ID NO: 29 - RNA, 96 nt, synthetic construct
  misc_feature 1..96: note = gRNA variant scaffold
  source 1..96: mol_type = other RNA
actggcgcttttatctgattactttgagagccatcaccagcgactatgtcgtagtgggtaaagctcacatgaggatcacccatgtgagcatcaaag

SEQ ID NO: 30 - RNA, 89 nt, synthetic construct
  misc_feature 1..89: note = gRNA variant scaffold
  source 1..89: mol_type = other RNA
actggcacttttacctgattactttgagagccaacaccagcgactatgtcgtagtgggtaaagctccctcttcggagggagcatcaaag

SEQ ID NO: 31 - RNA, 89 nt, synthetic construct
  misc_feature 1..89: note = gRNA variant scaffold
  source 1..89: mol_type = other RNA
actggcacttttatctgattactttgagagccatcaccagcgactatgtcgtagtgggtaaagctccctcttcggagggagcatcaaag

SEQ ID NO: 32 - RNA, 89 nt, synthetic construct
  misc_feature 1..89: note = gRNA variant scaffold
  source 1..89: mol_type = other RNA
actggcccttttatctgattactttgagagccatcaccagcgactatgtcgtagtgggtaaagctccctcttcggagggagcatcaaag

SEQ ID NO: 33 - RNA, 89 nt, synthetic construct
  misc_feature 1..89: note = gRNA variant scaffold
  source 1..89: mol_type = other RNA
actggcgcttttacctgattactttgagagccatcaccagcgactatgtcgtagtgggtaaagctccctcttcggagggagcatcaaag

SEQ ID NO: 34 - RNA, 89 nt, synthetic construct
  misc_feature 1..89: note = gRNA variant scaffold
  source 1..89: mol_type = other RNA
actggcgcttttatctgattactttgagagccaacaccagcgactatgtcgtagtgggtaaagctccctcttcggagggagcatcaaag

SEQ ID NO: 35 - RNA, 97 nt, synthetic construct
  misc_feature 1..97: note = gRNA variant scaffold
  source 1..97: mol_type = other RNA
actggcacctttacctgattactttgagagccaacaccagcgactatgtcgtatgggtaaagcgcttacggacttcggtccgtaagaagcatcaaag

SEQ ID NO: 36 - RNA, 97 nt, synthetic construct
  misc_feature 1..97: note = gRNA variant scaffold
  source 1..97: mol_type = other RNA
actggcacctttatctgattactttgagagccatcaccagcgactatgtcgtatgggtaaagcgcttacggacttcggtccgtaagaagcatcaaag

SEQ ID NO: 37 - RNA, 97 nt, synthetic construct
  misc_feature 1..97: note = gRNA variant scaffold
  source 1..97: mol_type = other RNA
actggcccctttatctgattactttgagagccatcaccagcgactatgtcgtatgggtaaagcgcttacggacttcggtccgtaagaagcatcaaag

SEQ ID NO: 38 - RNA, 97 nt, synthetic construct
  misc_feature 1..97: note = gRNA variant scaffold
  source 1..97: mol_type = other RNA
actggcgcctttatctgattactttgagagccaacaccagcgactatgtcgtatgggtaaagcgcttacggacttcggtccgtaagaagcatcaaag

SEQ ID NO: 39 - RNA, 89 nt, synthetic construct; identical to SEQ ID NO: 19
  misc_feature 1..89: note = gRNA variant scaffold
  source 1..89: mol_type = other RNA

SEQ ID NO: 40 - RNA, 90 nt, synthetic construct
  misc_feature 1..90: note = gRNA variant scaffold
  source 1..90: mol_type = other RNA
gactggcgcttttatctgattactttgagagccatcaccagcgactatgtcgtagtgggtaaagctccctcttcggagggagcatcaaag

SEQ ID NO: 41 - RNA, 90 nt, synthetic construct
  misc_feature 1..90: note = gRNA variant scaffold
  source 1..90: mol_type = other RNA
actggcgcctttatctgattactttggagagccatcaccagcgactatgtcgtagtgggtaaagctccctcttcggagggagcatcaaag

SEQ ID NO: 42 - RNA, 89 nt, synthetic construct
  misc_feature 1..89: note = gRNA variant scaffold
  source 1..89: mol_type = other RNA
actggcgcatttatctgattactttgtgagccatcaccagcgactatgtcgtagtgggtaaagctccctcttcggagggagcatcaaag

SEQ ID NO: 43 - RNA, 89 nt, synthetic construct
  misc_feature 1..89: note = gRNA variant scaffold
  source 1..89: mol_type = other RNA
actggcgcctttatctgattactttgagagccatcaccagcgactatgtcgtagtgggtaaagctccctcttcggagggagcatcaaag

SEQ ID NO: 44 - RNA, 90 nt, synthetic construct
  misc_feature 1..90: note = gRNA variant scaffold
  source 1..90: mol_type = other RNA
actggcgcttttatctgattactttggagagccatcaccagcgactatgtcgtagtgggtaaagctccctcttcggagggagcatcaaag

SEQ ID NO: 45 - RNA, 89 nt, synthetic construct
  misc_feature 1..89: note = gRNA variant scaffold
  source 1..89: mol_type = other RNA
actggcgcatttatctgattactttgagagccatcaccagcgactatgtcgtagtgggtaaagctccctcttcggagggagcatcaaag

SEQ ID NO: 46 - RNA, 89 nt, synthetic construct
  misc_feature 1..89: note = gRNA variant scaffold
  source 1..89: mol_type = other RNA
actggcgcttttatctgattactttgtgagccatcaccagcgactatgtcgtagtgggtaaagctccctcttcggagggagcatcaaag

SEQ ID NO: 47 - RNA, 90 nt, synthetic construct
  misc_feature 1..90: note = gRNA variant scaffold
  source 1..90: mol_type = other RNA
actggcgcttttattctgattactttgagagccatcaccagcgactatgtcgtagtgggtaaagctccctcttcggagggagcatcaaag

SEQ ID NO: 48 - RNA, 88 nt, synthetic construct
  misc_feature 1..88: note = gRNA variant scaffold
  source 1..88: mol_type = other RNA
acggcgcttttatctgattactttgagagccatcaccagcgactatgtcgtagtgggtaaagctccctcttcggagggagcatcaaag

SEQ ID NO: 49 - RNA, 89 nt, synthetic construct
  misc_feature 1..89: note = gRNA variant scaffold
  source 1..89: mol_type = other RNA
actggcgcttttatatgattactttgagagccatcaccagcgactatgtcgtagtgggtaaagctccctcttcggagggagcatcaaag

SEQ ID NO: 50 - RNA, 90 nt, synthetic construct
  misc_feature 1..90: note = gRNA variant scaffold
  source 1..90: mol_type = other RNA
actggcgcttttatcttgattactttgagagccatcaccagcgactatgtcgtagtgggtaaagctccctcttcggagggagcatcaaag

SEQ ID NO: 51 - RNA, 89 nt, synthetic construct
  misc_feature 1..89: note = gRNA variant scaffold
  source 1..89: mol_type = other RNA
actggcgcttttatctgattactttgagagccagcaccagcgactatgtcgtagtgggtaaagctccctcttcggagggagcatcaaag

SEQ ID NO: 52 - RNA, 89 nt, synthetic construct
  misc_feature 1..89: note = gRNA variant scaffold
  source 1..89: mol_type = other RNA
actggcgctgttatctgattacttcgagagccatcaccagcgactatgtcgtagtgggtaaagctccctcttcggagggagcatcgaag

SEQ ID NO: 53 - RNA, 89 nt, synthetic construct
  misc_feature 1..89: note = gRNA variant scaffold
  source 1..89: mol_type = other RNA
actggcgctcttatctgattacttcgagagccatcaccagcgactatgtcgtagtgggtaaagctccctcttcggagggagcatcgaag

SEQ ID NO: 54 - RNA, 89 nt, synthetic construct
  misc_feature 1..89: note = gRNA variant scaffold
  source 1..89: mol_type = other RNA
actggcgcttgtatctgattactctgagagccatcaccagcgactatgtcgtagtgggtaaagctccctcttcggagggagcatcagag

SEQ ID NO: 55 - RNA, 89 nt, synthetic construct
  misc_feature 1..89: note = gRNA variant scaffold
  source 1..89: mol_type = other RNA
actggcgcttctatctgattactctgagagccatcaccagcgactatgtcgtagtgggtaaagctccctcttcggagggagcatcagag

SEQ ID NO: 56 - RNA, 89 nt, synthetic construct
  misc_feature 1..89: note = gRNA variant scaffold
  source 1..89: mol_type = other RNA
actggcgctttgatctgattaccttgagagccatcaccagcgactatgtcgtagtgggtaaagctccctcttcggagggagcatcaagg

SEQ ID NO: 57 - RNA, 89 nt, synthetic construct
  misc_feature 1..89: note = gRNA variant scaffold
  source 1..89: mol_type = other RNA
actggcgctttcatctgattaccttgagagccatcaccagcgactatgtcgtagtgggtaaagctccctcttcggagggagcatcaagg

SEQ ID NO: 58 - RNA, 89 nt, synthetic construct
  misc_feature 1..89: note = gRNA variant scaffold
  source 1..89: mol_type = other RNA
actggcgctgttatctgattactttgagagccatcaccagcgactatgtcgtagtgggtaaagctccctcttcggagggagcatcaaag

SEQ ID NO: 59 - RNA, 89 nt, synthetic construct
  misc_feature 1..89: note = gRNA variant scaffold
  source 1..89: mol_type = other RNA
actggcgcttttatctgattactttgagagccatcaccagcgactatgtcgtagtgggtaaagctccctcttcggagggagcatcgaag

SEQ ID NO: 60 - RNA, 89 nt, synthetic construct
  misc_feature 1..89: note = gRNA variant scaffold
  source 1..89: mol_type = other RNA
actggcgcttttatctgattacttcgagagccatcaccagcgactatgtcgtagtgggtaaagctccctcttcggagggagcatcaaag

SEQ ID NO: 61 - RNA, 98 nt, synthetic construct
  misc_feature 1..98: note = gRNA variant scaffold
  source 1..98: mol_type = other RNA
actggcacttctatctgattactctgagagccatcaccagcgactatgtcgtatgggtaaagccgcttacggacttcggtccgtaagaggcatcagag

SEQ ID NO: 62 - RNA, 89 nt, synthetic construct
  misc_feature 1..89: note = gRNA variant scaffold
  source 1..89: mol_type = other RNA
actggcacttctatctgattactctgagagccatcaccagcgactatgtcgtagtgggtaaagctccctcttcggagggagcatcagag

SEQ ID NO: 63 - RNA, 98 nt, synthetic construct
  misc_feature 1..98: note = gRNA variant scaffold
  source 1..98: mol_type = other RNA
actggcacctttatctgattactttgagagccatcaccagcgactatgtcgtatgggtaaagccgcttacggacttcggtccgtaagaggcatcaaag

SEQ ID NO: 64 - RNA, 98 nt, synthetic construct
  misc_feature 1..98: note = gRNA variant scaffold
  source 1..98: mol_type = other RNA
actggcacttgtatctgattactctgagagccatcaccagcgactatgtcgtatgggtaaagccgcttacggacttcggtccgtaagaggcatcagag

SEQ ID NO: 65 - RNA, 89 nt, synthetic construct
  misc_feature 1..89: note = gRNA variant scaffold
  source 1..89: mol_type = other RNA
actggcacttgtatctgattactctgagagccatcaccagcgactatgtcgtagtgggtaaagctccctcttcggagggagcatcagag

SEQ ID NO: 66 - RNA, 141 nt, synthetic construct
  misc_feature 1..141: note = gRNA variant scaffold
  source 1..141: mol_type = other RNA
actggcgcttttatctgattactttgagagccatcaccagcgactatgtcgtagtgggtaaagctgcactatgggcgcagcgtcaatgacgctgacggtacaggccagacaattattgtctggtatagtgcagcatcaaag

SEQ ID NO: 67 - RNA, 309 nt, synthetic construct
  misc_feature 1..309: note = gRNA variant scaffold
  source 1..309: mol_type = other RNA
actggcgcttttatctgattactttgagagccatcaccagcgactatgtcgtagtgggtaaagctaggagctttgttccttgggttcttgggagcagcaggaagcactatgggcgcagcgtcaatgacgctgacggtacaggccagacaattattgtctggtatagtgcagcagcagaacaatttgctgagggctattgaggcgcaacagcatctgttgcaactcacagtctggggcatcaagcagctccaggcaagaatcctggctgtggaaagatacctaaaggatcaacagctcctagcatcaaag

SEQ ID NO: 68 - RNA, 100 nt, synthetic construct
  misc_feature 1..100: note = gRNA variant scaffold
  source 1..100: mol_type = other RNA
actggcgcttttatctgattactttgagagccatcaccagcgactatgtcgtagtgggtaaagctccccgtacaccatcagggtacggggagcatcaaag

SEQ ID NO: 69 - RNA, 97 nt, synthetic construct
  misc_feature 1..97: note = gRNA variant scaffold
  source 1..97: mol_type = other RNA
actggcacttttatctgattactttgagagccatcaccagcgactatgtcgtatgggtaaagcgcttacggacttcggtccgtaagaagcatcaaag

SEQ ID NO: 70 - RNA, 97 nt, synthetic construct
  misc_feature 1..97: note = gRNA variant scaffold
  source 1..97: mol_type = other RNA
actggcacttctatctgattactctgagagccatcaccagcgactatgtcgtatgggtaaagcgcttacggacttcggtccgtaagaagcatcagag

SEQ ID NO: 71 - RNA, 98 nt, synthetic construct
  misc_feature 1..98: note = gRNA variant scaffold
  source 1..98: mol_type = other RNA
actggcgcttctatctgattactctgagagccatcaccagcgactatgtcgtatgggtaaagccgcttacggacttcggtccgtaagaggcatcagag

SEQ ID NO: 72 - RNA, 98 nt, synthetic construct
  misc_feature 1..98: note = gRNA variant scaffold
  source 1..98: mol_type = other RNA
actggcacttctatctgattactctgagcgccatcaccagcgactatgtcgtatgggtaaagccgcttacggacttcggtccgtaagaggcatcagag

SEQ ID NO: 73 - RNA, 98 nt, synthetic construct
  misc_feature 1..98: note = gRNA variant scaffold
  source 1..98: mol_type = other RNA
actggcgcttctatctgattactctgagcgccatcaccagcgactatgtcgtatgggtaaagccgcttacggacttcggtccgtaagaggcatcagag

SEQ ID NO: 74 - RNA, 98 nt, synthetic construct
  misc_feature 1..98: note = gRNA variant scaffold
  source 1..98: mol_type = other RNA
actggcgcttctatctgattactctgagcgccatcaccagcgactatgtcgtatgggtaaagcgccttacggacttcggtccgtaaggagcatcagag

SEQ ID NO: 75 - RNA, 99 nt, synthetic construct
  misc_feature 1..99: note = gRNA variant scaffold
  source 1..99: mol_type = other RNA
actggcgcttctatctgattactctgagcgccatcaccagcgactatgtcgtagtgggtaaagccgcttacggacttcggtccgtaagaggcatcagag

SEQ ID NO: 76 - RNA, 98 nt, synthetic construct
  misc_feature 1..98: note = gRNA variant scaffold
  source 1..98: mol_type = other RNA
acgggactttctatctgattactctgaagtccctcaccagcgactatgtcgtatgggtaaagccgcttacggacttcggtccgtaagaggcatcagag

SEQ ID NO: 77 - RNA, 98 nt, synthetic construct
  misc_feature 1..98: note = gRNA variant scaffold
  source 1..98: mol_type = other RNA
acctgtagttctatctgattactctgactacagtcaccagcgactatgtcgtatgggtaaagccgcttacggacttcggtccgtaagaggcatcagag

SEQ ID NO: 78 - RNA, 113 nt, synthetic construct
  misc_feature 1..113: note = gRNA variant scaffold
  source 1..113: mol_type = other RNA
actggcgcttttatctgattactttgagagccatcaccagcgactatgtcgtagtgggtaaagctgcacggtgggcgcagcttcggctgacggtacaccgtgcagcatcaaag

SEQ ID NO: 79 - RNA, 143 nt, synthetic construct
  misc_feature 1..143: note = gRNA variant scaffold
  source 1..143: mol_type = other RNA
actggcgcttttatctgattactttgagagccatcaccagcgactatgtcgtagtgggtaaagctgcacggtgggcgcagcttcggctgacggtacaccggtgggcgcagcttcggctgacggtacaccgtgcagcatcaaag

SEQ ID NO: 80 - RNA, 173 nt, synthetic construct
  misc_feature 1..173: note = gRNA variant scaffold
  source 1..173: mol_type = other RNA
actggcgcttttatctgattactttgagagccatcaccagcgactatgtcgtagtgggtaaagctgcacggtgggcgcagcttcggctgacggtacaccggtgggcgcagcttcggctgacggtacaccggtgggcgcagcttcggctgacggtacaccgtgcagcatcaaag

SEQ ID NO: 81 - RNA, 203 nt, synthetic construct
  misc_feature 1..203: note = gRNA variant scaffold
  source 1..203: mol_type = other RNA
actggcgcttttatctgattactttgagagccatcaccagcgactatgtcgtagtgggtaaagctgcacggtgggcgcagcttcggctgacggtacaccggtgggcgcagcttcggctgacggtacaccggtgggcgcagcttcggctgacggtacaccggtgggcgcagcttcggctgacggtacaccgtgcagcatcaaag

SEQ ID NO: 82 - RNA, 233 nt, synthetic construct
  misc_feature 1..233: note = gRNA variant scaffold
  source 1..233: mol_type = other RNA
actggcgcttttatctgattactttgagagccatcaccagcgactatgtcgtagtgggtaaagctgcacggtgggcgcagcttcggctgacggtacaccggtgggcgcagcttcggctgacggtacaccggtgggcgcagcttcggctgacggtacaccggtgggcgcagcttcggctgacggtacaccggtgggcgcagcttcggctgacggtacaccgtgcagcatcaaag

SEQ ID NO: 83 - RNA, 97 nt, synthetic construct
  misc_feature 1..97: note = gRNA variant scaffold
  source 1..97: mol_type = other RNA
actggcgcttttatctgattactttgagagccatcaccagcgactatgtcgtagtgggtaaagctgcacctagcggaggctaggtgcagcatcaaag

SEQ ID NO: 84 - RNA, 118 nt, synthetic construct
  misc_feature 1..118: note = gRNA variant scaffold
  source 1..118: mol_type = other RNA
actggcgcttttatctgattactttgagagccatcaccagcgactatgtcgtagtgggtaaagctgcacctcggcttgctgaagcgcgcacggcaagaggcgaggtgcagcatcaaag

SEQ ID NO: 85 - RNA, 192 nt, synthetic construct
  misc_feature 1..192: note = gRNA variant scaffold
  source 1..192: mol_type = other RNA
actggcgcttttatctgattactttgagagccatcaccagcgactatgtcgtagtgggtaaagctgcacctctctcgacgcaggactcggcttgctgaagcgcgcacggcaagaggcgaggggcggcgactggtgagtacgccaaaaattttgactagcggaggctagaaggagagaggtgcagcatcaaag

SEQ ID NO: 86 - RNA, 156 nt, synthetic construct
  misc_feature 1..156: note = gRNA variant scaffold
  source 1..156: mol_type = other RNA
actggcgcttttatctgattactttgagagccatcaccagcgactatgtcgtagtgggtaaagctgcacggtgcccgtctgttgtgtcgagagacgccaaaaattttgactagcggaggctagaaggagagagatgggtgccgtgcagcatcaaag

SEQ ID NO: 87 - RNA, 96 nt, synthetic construct
  misc_feature 1..96: note = gRNA variant scaffold
  source 1..96: mol_type = other RNA
actggcgcttttatctgattactttgagagccatcaccagcgactatgtcgtagtgggtaaagctgcacatggagaggagatgtgcagcatcaaag

SEQ ID NO: 88 - RNA, 91 nt, synthetic construct
  misc_feature 1..91: note = gRNA variant scaffold
  source 1..91: mol_type = other RNA
actggcgcttttatctgattactttgagagccatcaccagcgactatgtcgtagtgggtaaagctgcacatggagatgtgcagcatcaaag

SEQ ID NO: 89 - RNA, 106 nt, synthetic construct
  misc_feature 1..106: note = gRNA variant scaffold
  source 1..106: mol_type = other RNA
actggcgcttttatctgattactttgagagccatcaccagcgactatgtcgtagtgggtaaagcttgggcgcagcgtcaatgacgctgacggtacaagcatcaaag

SEQ ID NO: 90 - RNA, 145 nt, synthetic construct
  misc_feature 1..145: note = gRNA variant scaffold
  source 1..145: mol_type = other RNA
actggcgcttttatctgattactttgagagccatcaccagcgactatgtcgtagtgggtaaagctgcactatgggcgcagcgtcaatgacgctgacggtacaggccacatgaggatcacccatgtggtatagtgcagcatcaaag

SEQ ID NO: 91 - RNA, 155 nt, synthetic construct
  misc_feature 1..155: note = gRNA variant scaffold
  source 1..155: mol_type = other RNA
actggcgcttttatctgattactttgagagccatcaccagcgactatgtcgtagtgggtaaagctgcactatgggcgcagctcatgaggatcacccatgagctgacggtacaggccacatgaggatcacccatgtggtatagtgcagcatcaaag

SEQ ID NO: 92 - RNA, 151 nt, synthetic construct
  misc_feature 1..151: note = gRNA variant scaffold
  source 1..151: mol_type = other RNA
actggcgcttttatctgattactttgagagccatcaccagcgactatgtcgtagtgggtaaagctgcactatgggcgcagcgtcaatgacgctgacggtacaggccacatggcagtcgtaacgacgcgggtggtatagtgcagcatcaaag

SEQ ID NO: 93 - RNA, 172 nt, synthetic construct
  misc_feature 1..172: note = gRNA variant scaffold
  source 1..172: mol_type = other RNA
actggcgcttttatctgattactttgagagccatcaccagcgactatgtcgtagtgggtaaagctgcactatgggcgcagcaaacatggcagtcctaaggacgcgggttttgctgacggtacaggccacatggcagtcgtaacgacgcgggtggtatagtgcagcatcaaag

SEQ ID NO: 94 - RNA, 159 nt, synthetic construct
  misc_feature 1..159: note = gRNA variant scaffold
  source 1..159: mol_type = other RNA
actggcgcttttatctgattactttgagagccatcaccagcgactatgtcgtagtgggtaaagctgcactatgggcgcagacatggcagtcgtaacgacgcgggtctgacggtacaggccacatgaggatcacccatgtggtatagtgcagcatcaaag

SEQ ID NO: 95 - RNA, 108 nt, synthetic construct
  misc_feature 1..108: note = gRNA variant scaffold
  source 1..108: mol_type = other RNA
actggcgcttttatctgattactttgagagccatcaccagcgactatgtcgtagtgggtaaagctgcactaaggagtttatatggaaacccttagtgcagcatcaaag

SEQ ID NO: 96 - RNA, 242 nt, synthetic construct
  misc_feature 1..242: note = gRNA variant scaffold
  source 1..242: mol_type = other RNA
actggcgcttttatctgattactttgagagccatcaccagcgactatgtcgtagtgggtaaagctcaggaagcactatgggcgcagcgtcaatgacgctgacggtacaggccagacaattattgtctggtatagtgcagcagcagaacaatttgctgagggctattgaggcgcaacagcatctgttgcaactcacagtctggggcatcaagcagctccaggcaagaatcctgagcatcaaag

SEQ ID NO: 97 - RNA, 98 nt, synthetic construct
  misc_feature 1..98: note = gRNA variant scaffold
  source 1..98: mol_type = other RNA
actggcgcttttatctgattactttgagagccatcaccagcgactatgtcgtagtgggtaaagctgcacgccctgaagaagggcgtgcagcatcaaag

SEQ ID NO: 98 - RNA, 111 nt, synthetic construct
  misc_feature 1..111: note = gRNA variant scaffold
  source 1..111: mol_type = other RNA
actggcgcttttatctgattactttgagagccatcaccagcgactatgtcgtagtgggtaaagctgcacggctcgtgtagctcattagctccgagccgtgcagcatcaaag

SEQ ID NO: 99 - RNA, 113 nt, synthetic construct
  misc_feature 1..113: note = gRNA variant scaffold
  source 1..113: mol_type = other RNA
actggcgcttttatctgattactttgagagccatcaccagcgactatgtcgtagtgggtaaagctgcacccgtgtgcatccgcagtgtcggatccacgggtgcagcatcaaag

SEQ ID NO: 100 - RNA, 112 nt, synthetic construct
  misc_feature 1..112: note = gRNA variant scaffold
  source 1..112: mol_type = other RNA
actggcgcttttatctgattactttgagagccatcaccagcgactatgtcgtagtgggtaaagctgcacggaatccattgcactccggatttcactaggtgcagcatcaaag

SEQ ID NO: 101 - RNA, 103 nt, synthetic construct
  misc_feature 1..103: note = gRNA variant scaffold
  source 1..103: mol_type = other RNA
actggcgcttttatctgattactttgagagccatcaccagcgactatgtcgtagtgggtaaagctgcacatgcatgtctaagacagcatgtgcagcatcaaag

SEQ ID NO: 102 - RNA, 106 nt, synthetic construct
  misc_feature 1..106: note = gRNA variant scaffold
  source 1..106: mol_type = other RNA
actggcgcttttatctgattactttgagagccatcaccagcgactatgtcgtagtgggtaaagctgcacaaaacataaggaaaacctatgttgtgcagcatcaaag

SEQ ID NO: 103 - RNA, 153 nt, synthetic construct
  misc_feature 1..153: note = gRNA variant scaffold
  source 1..153: mol_type = other RNA
actggcgcttctatctgattactctgagcgccatcaccagcgactatgtcgtagtgggtaaagccgcttacggactatgggcgcagcgtcaatgacgctgacggtacaggccagacaattattgtctggtatagtccgtaagaggcatcagag

SEQ ID NO: 104 - RNA, 147 nt, synthetic construct
  misc_feature 1..147: note = gRNA variant scaffold
  source 1..147: mol_type = other RNA
actggcgcttctatctgattactctgagcgccatcaccagcgactatgtcgtagtgggtaaagccgcttacgggtgggcgcagcgtcaatgacgctgacggtacaggccagacaattattgtctggtacccgtaagaggcatcagag

SEQ ID NO: 105 - RNA, 157 nt, synthetic construct
  misc_feature 1..157: note = gRNA variant scaffold
  source 1..157: mol_type = other RNA
actggcgcttctatctgattactctgagcgccatcaccagcgactatgtcgtagtgggtaaagccgcttacggactatgggcgcagcgtcaatgacgctgacggtacaggccacatgaggatcacccatgtggtatagtccgtaagaggcatcagag

SEQ ID NO: 106 - RNA, 143 nt, synthetic construct
  misc_feature 1..143: note = gRNA variant scaffold
  source 1..143: mol_type = other RNA
actggcgcttttatctgattactttgagagccatcaccagcgactatgtcgtagtgggtaaagctccctatgggcgcagcgtcaatgacgctgacggtacaggccacatgaggatcacccatgtggtatagggagcatcaaag

SEQ ID NO: 107 - RNA, 167 nt, synthetic construct
  misc_feature 1..167: note = gRNA variant scaffold
  source 1..167: mol_type = other RNA
actggcgcttctatctgattactctgagcgccatcaccagcgactatgtcgtagtgggtaaagccgcttacggactatgggcgcagctcatgaggatcacccatgagctgacggtacaggccacatgaggatcacccatgtggtatagtccgtaagaggcatcagag

SEQ ID NO: 108 - RNA, 153 nt, synthetic construct
  misc_feature 1..153: note = gRNA variant scaffold
  source 1..153: mol_type = other RNA
actggcgcttttatctgattactttgagagccatcaccagcgactatgtcgtagtgggtaaagctccctatgggcgcagctcatgaggatcacccatgagctgacggtacaggccacatgaggatcacccatgtggtatagggagcatcaaag

SEQ ID NO: 109 - RNA, 163 nt, synthetic construct
  misc_feature 1..163: note = gRNA variant scaffold
  source 1..163: mol_type = other RNA
actggcgcttctatctgattactctgagcgccatcaccagcgactatgtcgtagtgggtaaagccgcttacggactatgggcgcagcgtcaatgacgctgacggtacaggccacatggcagtcgtaacgacgcgggtggtatagtccgtaagaggcatcagag

SEQ ID NO: 110 - RNA, 149 nt, synthetic construct
  misc_feature 1..149: note = gRNA variant scaffold
  source 1..149: mol_type = other RNA
actggcgcttttatctgattactttgagagccatcaccagcgactatgtcgtagtgggtaaagctccctatgggcgcagcgtcaatgacgctgacggtacaggccacatggcagtcgtaacgacgcgggtggtatagggagcatcaaag

SEQ ID NO: 111 - RNA, 184 nt, synthetic construct
  misc_feature 1..184: note = gRNA variant scaffold
  source 1..184: mol_type = other RNA
actggcgcttctatctgattactctgagcgccatcaccagcgactatgtcgtagtgggtaaagccgcttacggactatgggcgcagcaaacatggcagtcctaaggacgcgggttttgctgacggtacaggccacatggcagtcgtaacgacgcgggtggtatagtccgtaagaggcatcagag

SEQ ID NO: 112 - RNA, 170 nt, synthetic construct
  misc_feature 1..170: note = gRNA variant scaffold
  source 1..170: mol_type = other RNA
actggcgcttttatctgattactttgagagccatcaccagcgactatgtcgtagtgggtaaagctccctatgggcgcagcaaacatggcagtcctaaggacgcgggttttgctgacggtacaggccacatggcagtcgtaacgacgcgggtggtatagggagcatcaaag

SEQ ID NO: 113 - RNA, 171 nt, synthetic construct
  misc_feature 1..171: note = gRNA variant scaffold
  source 1..171: mol_type = other RNA
actggcgcttctatctgattactctgagcgccatcaccagcgactatgtcgtagtgggtaaagccgcttacggactatgggcgcagacatggcagtcgtaacgacgcgggtctgacggtacaggccacatgaggatcacccatgtggtatagtccgtaagaggcatcagag

SEQ ID NO: 114 - RNA, 157 nt, synthetic construct
  misc_feature 1..157: note = gRNA variant scaffold
  source 1..157: mol_type = other RNA
actggcgcttttatctgattactttgagagccatcaccagcgactatgtcgtagtgggtaaagctccctatgggcgcagacatggcagtcgtaacgacgcgggtctgacggtacaggccacatgaggatcacccatgtggtatagggagcatcaaag

SEQ ID NO: 115 - RNA, 155 nt, synthetic construct
  misc_feature 1..155: note = gRNA variant scaffold
  source 1..155: mol_type = other RNA
actggcgcttttatctgattactttgagagccatcaccagcgactatgtcgtagtgggtaaagctgcactatgggcgcagcacctgaggatcacccaggtgctgacggtacaggccacctgaggatcacccaggtggtatagtgcagcatcaaag

SEQ ID NO: 116 - RNA, 155 nt, synthetic construct
  misc_feature 1..155: note = gRNA variant scaffold
  source 1..155: mol_type = other RNA
actggcgcttttatctgattactttgagagccatcaccagcgactatgtcgtagtgggtaaagctgcactatgggcgcagcgcatgaggatcacccatgcgctgacggtacaggccgcatgaggatcacccatgcggtatagtgcagcatcaaag

SEQ ID NO: 117 - RNA, 155 nt, synthetic construct
  misc_feature 1..155: note = gRNA variant scaffold
  source 1..155: mol_type = other RNA
actggcgcttttatctgattactttgagagccatcaccagcgactatgtcgtagtgggtaaagctgcactatgggcgcagcgcctgaggatcacccaggcgctgacggtacaggccgcctgaggatcacccaggcggtatagtgcagcatcaaag

SEQ ID NO: 118 - RNA, 155 nt, synthetic construct
  misc_feature 1..155: note = gRNA variant scaffold
  source 1..155: mol_type = other RNA
actggcgcttttatctgattactttgagagccatcaccagcgactatgtcgtagtgggtaaagctgcactatgggcgcagcgcctgagcatcagccaggcgctgacggtacaggccgcctgagcatcagccaggcggtatagtgcagcatcaaag

SEQ ID NO: 119 - RNA, 155 nt, synthetic construct
  misc_feature 1..155: note = gRNA variant scaffold
  source 1..155: mol_type = other RNA
actggcgcttttatctgattactttgagagccatcaccagcgactatgtcgtagtgggtaaagctgcactatgggcgcagcacatgagcatcagccatgtgctgacggtacaggccacatgagcatcagccatgtggtatagtgcagcatcaaag

SEQ ID NO: 120 - RNA, 155 nt, synthetic construct
  misc_feature 1..155: note = gRNA variant scaffold
  source 1..155: mol_type = other RNA
actggcgcttttatctgattactttgagagccatcaccagcgactatgtcgtagtgggtaaagctgcactatgggcgcagcacatgagtatcaaccatgtgctgacggtacaggccacatgagtatcaaccatgtggtatagtgcagcatcaaag

SEQ ID NO: 121 - RNA, 155 nt, synthetic construct
  misc_feature 1..155: note = gRNA variant scaffold
  source 1..155: mol_type = other RNA
actggcgcttttatctgattactttgagagccatcaccagcgactatgtcgtagtgggtaaagctgcactatgggcgcagcacatgagaatcagccatgtgctgacggtacaggccacatgagaatcagccatgtggtatagtgcagcatcaaag

SEQ ID NO: 122 - RNA, 155 nt, synthetic construct
  misc_feature 1..155: note = gRNA variant scaffold
  source 1..155: mol_type = other RNA
actggcgcttttatctgattactttgagagccatcaccagcgactatgtcgtagtgggtaaagctgcactatgggcgcagcccttgaggatcacccatgtgctgacggtacaggccccttgaggatcacccatgtggtatagtgcagcatcaaag

SEQ ID NO: 123 - RNA, 155 nt, synthetic construct
  misc_feature 1..155: note = gRNA variant scaffold
  source 1..155: mol_type = other RNA
actggcgcttttatctgattactttgagagccatcaccagcgactatgtcgtagtgggtaaagctgcactatgggcgcagcacttgaggatcacccatgtgctgacggtacaggccacttgaggatcacccatgtggtatagtgcagcatcaaag

SEQ ID NO: 124 - RNA, 155 nt, synthetic construct
  misc_feature 1..155: note = gRNA variant scaffold
  source 1..155: mol_type = other RNA
actggcgcttttatctgattactttgagagccatcaccagcgactatgtcgtagtgggtaaagctgcactatgggcgcagcacctgaggatcacccatgtgctgacggtacaggccacctgaggatcacccatgtggtatagtgcagcatcaaag

SEQ ID NO: 125 - RNA, 155 nt, synthetic construct
  misc_feature 1..155: note = gRNA variant scaffold
  source 1..155: mol_type = other RNA
actggcgcttttatctgattactttgagagccatcaccagcgactatgtcgtagtgggtaaagctgcactatgggcgcagcacatgaggatcacctatgtgctgacggtacaggccacatgaggatcacctatgtggtatagtgcagcatcaaag

SEQ ID NO: 126 - RNA, 155 nt, synthetic construct
  misc_feature 1..155: note = gRNA variant scaffold
  source 1..155: mol_type = other RNA
actggcgcttttatctgattactttgagagccatcaccagcgactatgtcgtagtgggtaaagctgcactatgggcgcagcacattaggatcaccaatgtgctgacggtacaggccacattaggatcaccaatgtggtatagtgcagcatcaaag

SEQ ID NO: 127 - RNA, 155 nt, synthetic construct
  misc_feature 1..155: note = gRNA variant scaffold
  source 1..155: mol_type = other RNA
actggcgcttttatctgattactttgagagccatcaccagcgactatgtcgtagtgggtaaagctgcactatgggcgcagcacattaggatcaccgatgtgctgacggtacaggccacattaggatcaccgatgtggtatagtgcagcatcaaag

SEQ ID NO: 128 - RNA, 155 nt, synthetic construct
  misc_feature 1..155: note = gRNA variant scaffold
  source 1..155: mol_type = other RNA
actggcgcttttatctgattactttgagagccatcaccagcgactatgtcgtagtgggtaaagctgcactatgggcgcagcacattaggatcacctatgtgctgacggtacaggccacattaggatcacctatgtggtatagtgcagcatcaaag

SEQ ID NO: 129 - RNA, 155 nt, synthetic construct
  misc_feature 1..155: note = gRNA variant scaffold
  source 1..155: mol_type = other RNA
actggcgcttttatctgattactttgagagccatcaccagcgactatgtcgtagtgggtaaagctgcactatgggcgcagcacatgaggattacccatgtgctgacggtacaggccacatgaggattacccatgtggtatagtgcagcatcaaag

SEQ ID NO: 130 - RNA, 155 nt, synthetic construct
  misc_feature 1..155: note = gRNA variant scaffold
  source 1..155: mol_type = other RNA
actggcgcttttatctgattactttgagagccatcaccagcgactatgtcgtagtgggtaaagctgcactatgggcgcagcacatgaggataacccatgtgctgacggtacaggccacatgaggataacccatgtggtatagtgcagcatcaaag

SEQ ID NO: 131 - RNA, 155 nt, synthetic construct
  misc_feature 1..155: note = gRNA variant scaffold
  source 1..155: mol_type = other RNA
actggcgcttttatctgattactttgagagccatcaccagcgactatgtcgtagtgggtaaagctgcactatgggcgcagcacatgaggatgacccatgtgctgacggtacaggccacatgaggatgacccatgtggtatagtgcagcatcaaag

SEQ ID NO: 132 - RNA, 155 nt, synthetic construct
  misc_feature 1..155: note = gRNA variant scaffold
  source 1..155: mol_type = other RNA
actggcgcttttatctgattactttgagagccatcaccagcgactatgtcgtagtgggtaaagctgcactatgggcgcagcacatgaggaccacccatgtgctgacggtacaggccacatgaggaccacccatgtggtatagtgcagcatcaaag

SEQ ID NO: 133 - RNA, 155 nt, synthetic construct
  misc_feature 1..155: note = gRNA variant scaffold
  source 1..155: mol_type = other RNA
actggcgcttttatctgattactttgagagccatcaccagcgactatgtcgtagtgggtaaagctgcactatgggcgcagcagatgaggatcacccatgggctgacggtacaggccagatgaggatcacccatggggtatagtgcagcatcaaag

SEQ ID NO: 134 - RNA, 155 nt, synthetic construct
  misc_feature 1..155: note = gRNA variant scaffold
  source 1..155: mol_type = other RNA
actggcgcttttatctgattactttgagagccatcaccagcgactatgtcgtagtgggtaaagctgcactatgggcgcagcacatggggatcacccatgtgctgacggtacaggccacatggggatcacccatgtggtatagtgcagcatcaaag

SEQ ID NO: 135 - RNA, 155 nt, synthetic construct
  misc_feature 1..155: note = gRNA variant scaffold
  source 1..155: mol_type = other RNA
actggcgcttttatctgattactttgagagccatcaccagcgactatgtcgtagtgggtaaagctgcactatgggcgcagcacatgaggatcacccatgtgctgacggtacaggccacatgaggatcacccatgtggtatagtgcagcatcaaag

SEQ ID NO: 136 - RNA, 96 nt, synthetic construct
  misc_feature 1..96: note = gRNA variant scaffold
  source 1..96: mol_type = other RNA
actggcgcttttatctgattactttgagagccatcaccagcgactatgtcgtagtgggtaaagctcacctgaggatcacccaggtgagcatcaaag

SEQ ID NO: 137 - RNA, 96 nt, synthetic construct
  misc_feature 1..96: note = gRNA variant scaffold
  source 1..96: mol_type = other RNA
actggcgcttttatctgattactttgagagccatcaccagcgactatgtcgtagtgggtaaagctcgcatgaggatcacccatgcgagcatcaaag

SEQ ID NO: 138 - RNA, 96 nt, synthetic construct
  misc_feature 1..96: note = gRNA variant scaffold
  source 1..96: mol_type = other RNA
actggcgcttttatctgattactttgagagccatcaccagcgactatgtcgtagtgggtaaagctcgcctgaggatcacccaggcgagcatcaaag

SEQ ID NO: 139 - RNA, 96 nt, synthetic construct
  misc_feature 1..96: note = gRNA variant scaffold
  source 1..96: mol_type = other RNA
actggcgcttttatctgattactttgagagccatcaccagcgactatgtcgtagtgggtaaagctcgcctgagcatcagccaggcgagcatcaaag

SEQ ID NO: 140 - RNA, 96 nt, synthetic construct
  misc_feature 1..96: note = gRNA variant scaffold
  source 1..96: mol_type = other RNA
actggcgcttttatctgattactttgagagccatcaccagcgactatgtcgtagtgggtaaagctcacatgagcatcagccatgtgagcatcaaag

SEQ ID NO: 141 - RNA, 96 nt, synthetic construct
  misc_feature 1..96: note = gRNA variant scaffold
  source 1..96: mol_type = other RNA
actggcgcttttatctgattactttgagagccatcaccagcgactatgtcgtagtgggtaaagctcacatgagtatcaaccatgtgagcatcaaag

SEQ ID NO: 142 - RNA, 96 nt, synthetic construct
  misc_feature 1..96: note = gRNA variant scaffold
  source 1..96: mol_type = other RNA
actggcgcttttatctgattactttgagagccatcaccagcgactatgtcgtagtgggtaaagctcacatgagaatcagccatgtgagcatcaaag

SEQ ID NO: 143 - RNA, 96 nt, synthetic construct
  misc_feature 1..96: note = gRNA variant scaffold
  source 1..96: mol_type = other RNA
actggcgcttttatctgattactttgagagccatcaccagcgactatgtcgtagtgggtaaagctcccttgaggatcacccatgtgagcatcaaag

SEQ ID NO: 144 - RNA, 96 nt, synthetic construct
  misc_feature 1..96: note = gRNA variant scaffold
  source 1..96: mol_type = other RNA
actggcgcttttatctgattactttgagagccatcaccagcgactatgtcgtagtgggtaaagctcacttgaggatcacccatgtgagcatcaaag

SEQ ID NO: 145 - RNA, 96 nt, synthetic construct
  misc_feature 1..96: note = gRNA variant scaffold
  source 1..96: mol_type = other RNA
actggcgcttttatctgattactttgagagccatcaccagcgactatgtcgtagtgggtaaagctcacctgaggatcacccatgtgagcatcaaag

SEQ ID NO: 146 - RNA, 96 nt, synthetic construct
  misc_feature 1..96: note = gRNA variant scaffold
  source 1..96: mol_type = other RNA
actggcgcttttatctgattactttgagagccatcaccagcgactatgtcgtagtgggtaaagctcacatgaggatcacctatgtgagcatcaaag

SEQ ID NO: 147 - RNA, 96 nt, synthetic construct
  misc_feature 1..96: note = gRNA variant scaffold
  source 1..96: mol_type = other RNA
actggcgcttttatctgattactttgagagccatcaccagcgactatgtcgtagtgggtaaagctcacattaggatcaccaatgtgagcatcaaag

SEQ ID NO: 148 - RNA, 96 nt, synthetic construct
  misc_feature 1..96: note = gRNA variant scaffold
  source 1..96: mol_type = other RNA
actggcgcttttatctgattactttgagagccatcaccagcgactatgtcgtagtgggtaaagctcacattaggatcaccgatgtgagcatcaaag

SEQ ID NO: 149 - RNA, 96 nt, synthetic construct
  misc_feature 1..96: note = gRNA variant scaffold
  source 1..96: mol_type = other RNA
actggcgcttttatctgattactttgagagccatcaccagcgactatgtcgtagtgggtaaagctcacattaggatcacctatgtgagcatcaaag

SEQ ID NO: 150 - RNA, 96 nt, synthetic construct
  misc_feature 1..96: note = gRNA variant scaffold
  source 1..96: mol_type = other RNA
actggcgcttttatctgattactttgagagccatcaccagcgactatgtcgtagtgggtaaagctcacatgaggattacccatgtgagcatcaaag

SEQ ID NO: 151 - RNA, 96 nt, synthetic construct
  misc_feature 1..96: note = gRNA variant scaffold
  source 1..96: mol_type = other RNA
actggcgcttttatctgattactttgagagccatcaccagcgactatgtcgtagtgggtaaagctcacatgaggataacccatgtgagcatcaaag

SEQ ID NO: 152 - RNA, 96 nt, synthetic construct
  misc_feature 1..96: note = gRNA variant scaffold
  source 1..96: mol_type = other RNA
actggcgcttttatctgattactttgagagccatcaccagcgactatgtcgtagtgggtaaagctcacatgaggatgacccatgtgagcatcaaag

SEQ ID NO: 153 - RNA, 96 nt, synthetic construct
  misc_feature 1..96: note = gRNA variant scaffold
  source 1..96: mol_type = other RNA
actggcgcttttatctgattactttgagagccatcaccagcgactatgtcgtagtgggtaaagctcacatgaggaccacccatgtgagcatcaaag

SEQ ID NO: 154 - RNA, 96 nt, synthetic construct
  misc_feature 1..96: note = gRNA variant scaffold
  source 1..96: mol_type = other RNA
actggcgcttttatctgattactttgagagccatcaccagcgactatgtcgtagtgggtaaagctcagatgaggatcacccatgggagcatcaaag

SEQ ID NO: 155 - RNA, 96 nt, synthetic construct
  misc_feature 1..96: note = gRNA variant scaffold
  source 1..96: mol_type = other RNA
actggcgcttttatctgattactttgagagccatcaccagcgactatgtcgtagtgggtaaagctcacatggggatcacccatgtgagcatcaaag

SEQ ID NO: 156 - RNA, 89 nt, synthetic construct
  misc_feature 1..89: note = gRNA variant scaffold
  source 1..89: mol_type = other RNA
actggcgcttctatctgattactctgagcgccatcaccagcgactatgtcgtagtgggtaaagctccctcttcggagggagcatcagag

SEQ ID NO: 157 - RNA, 96 nt, synthetic construct
  misc_feature 1..96: note = gRNA variant scaffold
  source 1..96: mol_type = other RNA
actggcgcttctatctgattactctgagcgccatcaccagcgactatgtcgtagtgggtaaagctcacatgaggatcacccatgtgagcatcagag

SEQ ID NO: 158 - RNA, 145 nt, synthetic construct
  misc_feature 1..145: note = gRNA variant scaffold
  source 1..145: mol_type = other RNA
actggcgcttctatctgattactctgagcgccatcaccagcgactatgtcgtagtgggtaaagctgcactatgggcgcagcgtcaatgacgctgacggtacaggccacatgaggatcacccatgtggtatagtgcagcatcagag

SEQ ID NO: 159 - RNA, 155 nt, synthetic construct
  misc_feature 1..155: note = gRNA variant scaffold
  source 1..155: mol_type = other RNA
actggcgcttctatctgattactctgagcgccatcaccagcgactatgtcgtagtgggtaaagctgcactatgggcgcagctcatgaggatcacccatgagctgacggtacaggccacatgaggatcacccatgtggtatagtgcagcatcagag

SEQ ID NO: 160 - RNA, 99 nt, synthetic construct
  misc_feature 1..99: note = gRNA variant scaffold
  source 1..99: mol_type = other RNA
actgggccttctatctgattactctgaggcccatcaccagcgactatgtcgtagtgggtaaagccgcttagggacttcggtccctaagaggcatcagag

SEQ ID NO: 161 - RNA, 97 nt, synthetic construct
  misc_feature 1..97: note = gRNA variant scaffold
  source 1..97: mol_type = other RNA
actgggccttctatctgattactctgaggcccatcaccagcgactatgtcgtagtgggtaaagcccttagggacttcggtccctaagggcatcagag

SEQ ID NO: 162 - RNA, 99 nt, synthetic construct
  misc_feature 1..99: note = gRNA variant scaffold
  source 1..99: mol_type = other RNA
actgggccttctatctgattactctgaggcccatcaccagcgactatgtcgtagtgggtaaagcctcttagggacttcggtccctaagaggcatcagag

SEQ ID NO: 163 - RNA, 89 nt, synthetic construct
  misc_feature 1..89: note = gRNA variant scaffold
  source 1..89: mol_type = other RNA
actgggccttctatctgattactctgaggcccatcaccagcgactatgtcgtagtgggtaaagctccctcttcggagggagcatcagag

SEQ ID NO: 164 - RNA, 97 nt, synthetic construct
  misc_feature 1..97: note = gRNA variant scaffold
  source 1..97: mol_type = other RNA
actgggccttctatctgattactctgaggcccatcaccagcgactatgtcgtagtgggtaaagcccttagggaccttggtccctaagggcatcagag

SEQ ID NO: 165 - RNA, 99 nt, synthetic construct
  misc_feature 1..99: note = gRNA variant scaffold
  source 1..99: mol_type = other RNA
actgggccttctatctgattactctgaggcccatcaccagcgactatgtcgtagtgggtaaagcctcttagggaccttggtccctaagaggcatcagag

SEQ ID NO: 166 - RNA, 89 nt, synthetic construct
  misc_feature 1..89: note = gRNA variant scaffold
  source 1..89: mol_type = other RNA
actgggccttctatctgattactctgaggcccatcaccagcgactatgtcgtagtgggtaaagctccctccttggagggagcatcagag

SEQ ID NO: 167 - RNA, 97 nt, synthetic construct
  misc_feature 1..97: note = gRNA variant scaffold
  source 1..97: mol_type = other RNA
actgggccttctatctgattactctgaggcccatcaccagcgactatgtcgtagtgggtaaagcccttagggaggaaactccctaagggcatcagag

SEQ ID NO: 168 - RNA, 99 nt, synthetic construct
  misc_feature 1..99: note = gRNA variant scaffold
  source 1..99: mol_type = other RNA
actgggccttctatctgattactctgaggcccatcaccagcgactatgtcgtagtgggtaaagcctcttagggaggaaactccctaagaggcatcagag

SEQ ID NO: 169 - RNA, 89 nt, synthetic construct
  misc_feature 1..89: note = gRNA variant scaffold
  source 1..89: mol_type = other RNA
actgggccttctatctgattactctgaggcccatcaccagcgactatgtcgtagtgggtaaagctccctggaaacagggagcatcagag

SEQ ID NO: 170 - RNA, 98 nt, synthetic construct
  misc_feature 1..98: note = gRNA variant scaffold
  source 1..98: mol_type = other RNA
actgggccttctatctgattactctgaggcccatcaccagcgactatgtcgtagtgggtaaagcccttagggacttcaggtccctaagggcatcagag

SEQ ID NO: 171 - RNA, 100 nt, synthetic construct
  misc_feature 1..100: note = gRNA variant scaffold
  source 1..100: mol_type = other RNA
actgggccttctatctgattactctgaggcccatcaccagcgactatgtcgtagtgggtaaagcctcttagggacttcaggtccctaagaggcatcagag

SEQ ID NO: 172 - RNA, 90 nt, synthetic construct
  misc_feature 1..90: note = gRNA variant scaffold
  source 1..90: mol_type = other RNA
actgggccttctatctgattactctgaggcccatcaccagcgactatgtcgtagtgggtaaagctccctcttcaggagggagcatcagag

SEQ ID NO: 173 - RNA, 97 nt, synthetic construct
  misc_feature 1..97: note = gRNA variant scaffold
  source 1..97: mol_type = other RNA
actgggccttctatctgattactctgaggcccatcaccaggcactatgtgctagtgggtaaagcccttagggaccttggtccctaagggcatcagag

SEQ ID NO: 174 - RNA, 99 nt, synthetic construct
  misc_feature 1..99: note = gRNA variant scaffold
  source 1..99: mol_type = other RNA
actgggccttctatctgattactctgaggcccatcaccaggcactatgtgctagtgggtaaagcctcttagggaccttggtccctaagaggcatcagag

SEQ ID NO: 175 - RNA, 89 nt, synthetic construct
  misc_feature 1..89: note = gRNA variant scaffold
  source 1..89: mol_type = other RNA
actgggccttctatctgattactctgaggcccatcaccaggcactatgtgctagtgggtaaagctccctccttggagggagcatcagag

SEQ ID NO: 176 - RNA, 97 nt, synthetic construct
  misc_feature 1..97: note = gRNA variant scaffold
  source 1..97: mol_type = other RNA
actgggccttctatctgattactctgaggcccatcaccaggcactatgtgctagtgggtaaagcccttagggaggaaactccctaagggcatcagag

SEQ ID NO: 177 - RNA, 99 nt, synthetic construct
  misc_feature 1..99: note = gRNA variant scaffold
  source 1..99: mol_type = other RNA
actgggccttctatctgattactctgaggcccatcaccaggcactatgtgctagtgggtaaagcctcttagggaggaaactccctaagaggcatcagag

SEQ ID NO: 178 - RNA, 89 nt, synthetic construct
  misc_feature 1..89: note = gRNA variant scaffold
  source 1..89: mol_type = other RNA
actgggccttctatctgattactctgaggcccatcaccaggcactatgtgctagtgggtaaagctccctggaaacagggagcatcagag

SEQ ID NO: 179 - RNA, 98 nt, synthetic construct
  misc_feature 1..98: note = gRNA variant scaffold
  source 1..98: mol_type = other RNA
actgggccttctatctgattactctgaggcccatcaccaggcactatgtgctagtgggtaaagcccttagggacttcaggtccctaagggcatcagag

SEQ ID NO: 180 - RNA, 100 nt, synthetic construct
  misc_feature 1..100: note = gRNA variant scaffold
  source 1..100: mol_type = other RNA
actgggccttctatctgattactctgaggcccatcaccaggcactatgtgctagtgggtaaagcctcttagggacttcaggtccctaagaggcatcagag

SEQ ID NO: 181 - RNA, 90 nt, synthetic construct
  misc_feature 1..90: note = gRNA variant scaffold
  source 1..90: mol_type = other RNA
actgggccttctatctgattactctgaggcccatcaccaggcactatgtgctagtgggtaaagctccctcttcaggagggagcatcagag

SEQ ID NO: 182 - RNA, 96 nt, synthetic construct; identical to SEQ ID NO: 157
  misc_feature 1..96: note = gRNA variant scaffold
  source 1..96: mol_type = other RNA

SEQ ID NO: 183 - RNA, 145 nt, synthetic construct; identical to SEQ ID NO: 158
  misc_feature 1..145: note = gRNA variant scaffold
  source 1..145: mol_type = other RNA

SEQ ID NO: 184 - RNA, 155 nt, synthetic construct; identical to SEQ ID NO: 159
  misc_feature 1..155: note = gRNA variant scaffold
  source 1..155: mol_type = other RNA

SEQ ID NO: 185 - RNA, 159 nt, synthetic construct
  misc_feature 1..159: note = gRNA variant scaffold
  source 1..159: mol_type = other RNA
actggcgcttctatctgattactctgagcgccatcaccagcgactatgtcgtagtgggtaaagctgcactatgggcgcagacatggcagtcgtaacgacgcgggtctgacggtacaggccacatgaggatcacccatgtggtatagtgcagcatcagag

SEQ ID NO: 186 - RNA, 145 nt, synthetic construct
  misc_feature 1..145: note = gRNA variant scaffold
  source 1..145: mol_type = other RNA
actggcgcttttatctgattactttgagagccatcaccagcgactatgtcgtagtgggtaaagctgcactatggggccacatgaggatcacccatgtggtgtacagcgcagcgtcaatgacgctgacgatagtgcagcatcaaag

SEQ ID NO: 187 - RNA, 436 nt, synthetic construct
  misc_feature 1..436: note = gRNA variant scaffold
  source 1..436: mol_type = other RNA
actggcgcttttatctgattactttgagagccatcaccagcgactatgtcgtagtgggtaaagctgcactatgggcgcagctcatgaggatcacccatgagctgacggtacaggccacatgaggatcacccatgtggtatagtgcagcatcaaagctgcattctagttgtggtttcacaattattcttgagtgtagtctcgtcattcaccaaatctttgtttggtgcgcgcggccggcatggtcccagcctcctcgctggcgccggctgggcaacattccgaggggaccgtcccctcggtaatggcgaatgggacgtcgactgctaacaaagcccgaaaggaagctgagttggctgctgccaccgctgagcaataactagcataaccccttggggcctctaaacgggtcttgaggggttttttgctgatttttttt

SEQ ID NO: 188 - RNA, 272 nt, synthetic construct
  misc_feature 1..272: note = gRNA variant scaffold
  source 1..272: mol_type = other RNA
actggcgcttttatctgattactttgagagccatcaccagcgactatgtcgtagtgggtaaagctgcactatgggcgcagctcatgaggatcacccatgagctgacggtacaggccacatgaggatcacccatgtggtatagtgcagcatcaaagctgcattctagttgtggtttatggccggcatggtcccagcctcctcgctggcgccggctgggcaacattccgaggggaccgccccctcggtaatggcgaatgggacccatttttttt

SEQ ID NO: 189 - RNA, 271 nt, synthetic construct
  misc_feature 1..271: note = gRNA variant scaffold
  source 1..271: mol_type = other RNA
actggcgcttttatctgattactttgagagccatcaccagcgactatgtcgtagtgggtaaagctgcactatgggcgcagctcatgaggatcacccatgagctgacggtacaggccacatgaggatcacccatgtggtatagtgcagcatcaaagctgcattctagttgtggtttgtggccggcatggtccagcctactcgctggcgcgggctgggcaacattccgaggggacccgtccctcggtaatggcgaatgggacccatttttttt

SEQ ID NO: 190 - RNA, 274 nt, synthetic construct
  misc_feature 1..274: note = gRNA variant scaffold
  source 1..274: mol_type = other RNA
actggcgcttttatctgattactttgagagccatcaccagcgactatgtcgtagtgggtaaagctgcactatgggcgcagctcatgaggatcacccatgagctgacggtacaggccacatgaggatcacccatgtggtatagtgcagcatcaaagctgcattctagttgtggtttgtggccggcatggccccagcctcctcgctggcgccggctgggcaacgatccgaggggactgtccctctcgagaatcggcaaatggggcccctttttttt

SEQ ID NO: 191 - RNA, 283 nt, synthetic construct
  misc_feature 1..283: note = gRNA variant scaffold
  source 1..283: mol_type = other RNA
actggcgcttttatctgattactttgagagccatcaccagcgactatgtcgtagtgggtaaagctgcactatgggcgcagctcatgaggatcacccatgagctgacggtacaggccacatgaggatcacccatgtggtatagtgcagcatcaaagctgcattctagttgtggttttcgggtcggcatggcatctccacctccacctcctcgcggtccgacctgggcatccgaaggaggagcggacgtccactcggatggctaagggagagcccagtttttttt

SEQ ID NO: 192 - RNA, 276 nt, synthetic construct
  misc_feature 1..276: note = gRNA variant scaffold
  source 1..276: mol_type = other RNA
actggcgcttttatctgattactttgagagccatcaccagcgactatgtcgtagtgggtaaagctgcactatgggcgcagctcatgaggatcacccatgagctgacggtacaggccacatgaggatcacccatgtggtatagtgcagcatcaaagctgcattctagttgtggttttcgggtcggcatggcatctccacctccccgtggtccgacctgggcatccgaaggaggacggacgtccactcggatggctaagggagtgccggctttttttt

SEQ ID NO: 193 - RNA, 251 nt, synthetic construct
  misc_feature 1..251: note = gRNA variant scaffold
  source 1..251: mol_type = other RNA
actggcgcttttatctgattactttgagagccatcaccagcgactatgtcgtagtgggtaaagctgcactatgggcgcagctcatgaggatcacccatgagctgacggtacaggccacatgaggatcacccatgtggtatagtgcagcatcaaagctgcattctagttgtggtttggccggcatggtcccagcctcctcgctggcgccggctgggcaacatgcttcggcatggcgaatgggactttttttt

SEQ ID NO: 194 - RNA, 377 nt, synthetic construct
  misc_feature 1..377: note = gRNA variant scaffold
  source 1..377: mol_type = other RNA
actggcgcttttatctgattactttgagagccatcaccagcgactatgtcgtagtgggtaaagctcacatgaggatcacccatgtgagcatcaaagctgcattctagttgtggtttcacaattattcttgagtgtagtctcgtcattcaccaaatctttgtttggtgcgcgcggccggcatggtcccagcctcctcgctggcgccggctgggcaacattccgaggggaccgtcccctcggtaatggcgaatgggacgtcgactgctaacaaagcccgaaaggaagctgagttggctgctgccaccgctgagcaataactagcataaccccttggggcctctaaacgggtcttgaggggttttttgctgatttttttt

SEQ ID NO: 195 - RNA, 213 nt, synthetic construct
  misc_feature 1..213: note = gRNA variant scaffold
  source 1..213: mol_type = other RNA
actggcgcttttatctgattactttgagagccatcaccagcgactatgtcgtagtgggtaaagctcacatgaggatcacccatgtgagcatcaaagctgcattctagttgtggtttatggccggcatggtcccagcctcctcgctggcgccggctgggcaacattccgaggggaccgccccctcggtaatggcgaatgggacccatttttttt

SEQ ID NO: 196 - RNA, 212 nt, synthetic construct
  misc_feature 1..212: note = gRNA variant scaffold
  source 1..212: mol_type = other RNA
actggcgcttttatctgattactttgagagccatcaccagcgactatgtcgtagtgggtaaagctcacatgaggatcacccatgtgagcatcaaagctgcattctagttgtggtttgtggccggcatggtccagcctactcgctggcgcgggctgggcaacattccgaggggacccgtccctcggtaatggcgaatgggacccatttttttt

SEQ ID NO: 197 - RNA, 215 nt, synthetic construct
  misc_feature 1..215: note = gRNA variant scaffold
  source 1..215: mol_type = other RNA
actggcgcttttatctgattactttgagagccatcaccagcgactatgtcgtagtgggtaaagctcacatgaggatcacccatgtgagcatcaaagctgcattctagttgtggtttgtggccggcatggccccagcctcctcgctggcgccggctgggcaacgatccgaggggactgtccctctcgagaatcggcaaatggggcccctttttttt

SEQ ID NO: 198 - RNA, 224 nt, synthetic construct
  misc_feature 1..224: note = gRNA variant scaffold
  source 1..224: mol_type = other RNA
actggcgcttttatctgattactttgagagccatcaccagcgactatgtcgtagtgggtaaagctcacatgaggatcacccatgtgagcatcaaagctgcattctagttgtggttttcgggtcggcatggcatctccacctccacctcctcgcggtccgacctgggcatccgaaggaggagcggacgtccactcggatggctaagggagagcccagtttttttt

SEQ ID NO: 199 - RNA, 217 nt, synthetic construct
  misc_feature 1..217: note = gRNA variant scaffold
  source 1..217: mol_type = other RNA
actggcgcttttatctgattactttgagagccatcaccagcgactatgtcgtagtgggtaaagctcacatgaggatcacccatgtgagcatcaaagctgcattctagttgtggttttcgggtcggcatggcatctccacctccccgtggtccgacctgggcatccgaaggaggacggacgtccactcggatggctaagggagtgccggctttttttt

SEQ ID NO: 200 - RNA, 192 nt, synthetic construct
  misc_feature 1..192: note = gRNA variant scaffold
  source 1..192: mol_type = other RNA
actggcgcttttatctgattactttgagagccatcaccagcgactatgtcgtagtgggtaaagctcacatgaggatcacccatgtgagcatcaaagctgcattctagttgtggtttggccggcatggtcccagcctcctcgctggcgccggctgggcaacatgcttcggcatggcgaatgggactttttttt

SEQ ID NO: 201 - RNA, 163 nt, synthetic construct
  misc_feature 1..163: note = gRNA variant scaffold
  source 1..163: mol_type = other RNA
actggcgcttttatctgattactttgagagccatcaccagcgactatgtcgtagtgggtaaagctgcactatgggcgcagcaaggagtttatatggaaacccttgctgacggtacaggccaaggagtttatatggaaacccttggtatagtgcagcatcaaag

SEQ ID NO: 202 - RNA, 147 nt, synthetic construct
  misc_feature 1..147: note = gRNA variant scaffold
  source 1..147: mol_type = other RNA
actggcgcttttatctgattactttgagagccatcaccagcgactatgtcgtagtgggtaaagctgcactatgggcgcagcgccctgaagaagggcgctgacggtacaggccgccctgaagaagggcggtatagtgcagcatcaaag

SEQ ID NO: 203 - RNA, 173 nt, synthetic construct
  misc_feature 1..173: note = gRNA variant scaffold
  source 1..173: mol_type = other RNA
actggcgcttttatctgattactttgagagccatcaccagcgactatgtcgtagtgggtaaagctgcactatgggcgcagcggctcgtgtagctcattagctccgagccgctgacggtacaggccggctcgtgtagctcattagctccgagccggtatagtgcagcatcaaag

SEQ ID NO: 204 - RNA, 177 nt, synthetic construct
  misc_feature 1..177: note = gRNA variant scaffold
  source 1..177: mol_type = other RNA
actggcgcttttatctgattactttgagagccatcaccagcgactatgtcgtagtgggtaaagctgcactatgggcgcagcccgtgtgcatccgcagtgtcggatccacgggctgacggtacaggccccgtgtgcatccgcagtgtcggatccacggggtatagtgcagcatcaaag

SEQ ID NO: 205 - RNA, 161 nt, synthetic construct
  misc_feature 1..161: note = gRNA variant scaffold
  source 1..161: mol_type = other RNA
actggcgcttttatctgattactttgagagccatcaccagcgactatgtcgtagtgggtaaagctgcactatgggcgcagcatccattgcactccggatagctgctgacggtacaggccatccattgcactccggatagctggtatagtgcagcatcaaag

SEQ ID NO: 206 - RNA, 157 nt, synthetic construct
  misc_feature 1..157: note = gRNA variant scaffold
  source 1..157: mol_type = other RNA
actggcgcttttatctgattactttgagagccatcaccagcgactatgtcgtagtgggtaaagctgcactatgggcgcagcatgcatgtctaagacagcatgctgacggtacaggccatgcatgtctaagacagcatggtatagtgcagcatcaaag

SEQ ID NO: 207 - RNA, 162 nt, synthetic construct
  misc_feature 1..162: note = gRNA variant scaffold
  source 1..162: mol_type = other RNA
actggcgcttttatctgattactttgagagccatcaccagcgactatgtcgtagtgggtaaagctgcactatgggcgcagcaaaacataaggaaaacctatgttctgacggtacaggccaaaacataaggaaaacctatgttggtatagtgcagcatcaaag

SEQ ID NO: 208 - RNA, 175 nt, synthetic construct
  misc_feature 1..175: note = gRNA variant scaffold
  source 1..175: mol_type = other RNA
actggcgcttctatctgattactctgagcgccatcaccagcgactatgtcgtagtgggtaaagccgcttacggactatgggcgcagcaaggagtttatatggaaacccttgctgacggtacaggccaaggagtttatatggaaacccttggtatagtccgtaagaggcatcagag

SEQ ID NO: 209 - RNA, 159 nt, synthetic construct
  misc_feature 1..159: note = gRNA variant scaffold
  source 1..159: mol_type = other RNA
actggcgcttctatctgattactctgagcgccatcaccagcgactatgtcgtagtgggtaaagccgcttacggactatgggcgcagcgccctgaagaagggcgctgacggtacaggccgccctgaagaagggcggtatagtccgtaagaggcatcagag

SEQ ID NO: 210 - RNA, 185 nt, synthetic construct
  misc_feature 1..185: note = gRNA variant scaffold
  source 1..185: mol_type = other RNA
actggcgcttctatctgattactctgagcgccatcaccagcgactatgtcgtagtgggtaaagccgcttacggactatgggcgcagcggctcgtgtagctcattagctccgagccgctgacggtacaggccggctcgtgtagctcattagctccgagccggtatagtccgtaagaggcatcagag

SEQ ID NO: 211 - RNA, 189 nt, synthetic construct
  misc_feature 1..189: note = gRNA variant scaffold
  source 1..189: mol_type = other RNA
actggcgcttctatctgattactctgagcgccatcaccagcgactatgtcgtagtgggtaaagccgcttacggactatgggcgcagcccgtgtgcatccgcagtgtcggatccacgggctgacggtacaggccccgtgtgcatccgcagtgtcggatccacggggtatagtccgtaagaggcatcagag

SEQ ID NO: 212 - RNA, 173 nt, synthetic construct
  misc_feature 1..173: note = gRNA variant scaffold
  source 1..173: mol_type = other RNA
actggcgcttctatctgattactctgagcgccatcaccagcgactatgtcgtagtgggtaaagccgcttacggactatgggcgcagcatccattgcactccggatagctgctgacggtacaggccatccattgcactccggatagctggtatagtccgtaagaggcatcagag

SEQ ID NO: 213 - RNA, 169 nt, synthetic construct
  misc_feature 1..169: note = gRNA variant scaffold
  source 1..169: mol_type = other RNA
actggcgcttctatctgattactctgagcgccatcaccagcgactatgtcgtagtgggtaaagccgcttacggactatgggcgcagcatgcatgtctaagacagcatgctgacggtacaggccatgcatgtctaagacagcatggtatagtccgtaagaggcatcagag

SEQ ID NO: 214 - RNA, 175 nt, synthetic construct
  misc_feature 1..175: note = gRNA variant scaffold
  source 1..175: mol_type = other RNA
actggcgcttctatctgattactctgagcgccatcaccagcgactatgtcgtagtgggtaaagccgcttacggactatgggcgcagcaaaacataaggaaaacctatgttgctgacggtacaggccaaaacataaggaaaacctatgttggtatagtccgtaagaggcatcagag

SEQ ID NO: 215 - RNA, 19 nt, synthetic construct
  misc_feature 1..19: note = MS2 hairpin
  source 1..19: mol_type = other RNA
acatgaggatcacccatgt

SEQ ID NO: 216 - RNA, 18 nt, synthetic construct
  misc_feature 1..18: note = Qbeta hairpin
  source 1..18: mol_type = other RNA
tgcatgtctaagacagca

SEQ ID NO: 217 - RNA, 20 nt, synthetic construct
  misc_feature 1..20: note = U1 hairpin II
  source 1..20: mol_type = other RNA
aatccattgcactccggatt

SEQ ID NO: 218 - RNA, 12 nt, synthetic construct
  misc_feature 1..12: note = Uvsx hairpin
  source 1..12: mol_type = other RNA
cctcttcggagg

SEQ ID NO: 219 - RNA, 21 nt, synthetic construct
  misc_feature 1..21: note = PP7 hairpin
  source 1..21: mol_type = other RNA
aggagtttctatggaaaccct

SEQ ID NO: 220 - RNA, 30 nt, synthetic construct
  misc_feature 1..30: note = phage replication loop
  source 1..30: mol_type = other RNA
aggtgggacgacctctcggtcgtcctatct

SEQ ID NO: 221 - RNA, 19 nt, synthetic construct
  misc_feature 1..19: note = Kissing loop_a
  source 1..19: mol_type = other RNA
tgctcgctccgttcgagca

SEQ ID NO: 222 - RNA, 21 nt, synthetic construct
  misc_feature 1..21: note = Kissing loop_b1
  source 1..21: mol_type = other RNA
tgctcgacgcgtcctcgagca

SEQ ID NO: 223 - RNA, 22 nt, synthetic construct
  misc_feature 1..22: note = Kissing loop_b2
  source 1..22: mol_type = other RNA
tgctcgtttgcggctacgagca

SEQ ID NO: 224 - RNA, 17 nt, synthetic construct
  misc_feature 1..17: note = G quadriplex M3q
  source 1..17: mol_type = other RNA
agggagggagggagagg

SEQ ID NO: 225 - RNA, 19 nt, synthetic construct
  misc_feature 1..19: note = G quadriplex telomere basket
  source 1..19: mol_type = other RNA
ggttagggttagggttagg

SEQ ID NO: 226 - RNA, 25 nt, synthetic construct
  misc_feature 1..25: note = Sarcin-ricin loop
  source 1..25: mol_type = other RNA
ctgctcagtacgagaggaaccgcag

SEQ ID NO: 227 - RNA, 78 nt, synthetic construct
  misc_feature 1..78: note = pseudoknots
  source 1..78: mol_type = other RNA
tacactgggatcgctgaattagagatcggcgtcctttcattctatatactttggagttttaaaatgtctctaagtaca

SEQ ID NO: 228 - protein, 978 aa, synthetic construct
  REGION 1..978: note = CasX 515
QEIKRINKIRRRLVKDSNTKKAGKTGPMKTLLVRVMTPDLRERLENLRKKPENIPQPISNTSRANLNKLLTDYTEMKKAILHVYWEEFQKDPVGLMSRVAQPASKKIDQNKLKPEMDEKGNLTTAGFACSQCGQPLFVYKLEQVSEKGKAYTNYFGRCNVAEHEKLILLAQLKPEKDSDEAVTYSLGKFGQRALDFYSIHVTKESTHPVKPLAQIAGNRYASGPVGKALSDACMGTIASFLSKYQDIIIEHQKVVKGNQKRLESLRELAGKENLEYPSVTLPPQPHTKEGVDAYNEVIARVRMWVNLNLWQKLKLSRDDAKPLLRLKGFPSFPLVERQANEVDWWDMVCNVKKLINEKKEDGKVFWQNLAGYKRQEALRPYLSSEEDRKKGKKFARYQLGDLLLHLEKKHGEDWGKVYDEAWERIDKKVEGLSKHIKLEEERRSEDAQSKAALTDWLRAKASFVIEGLKEADKDEFCRCELKLQKWYGDLRGKPFAIEAENSILDISGFSKQYNCAFIWQKDGVKKLNLYLIINYFKGGKLRFKKIKPEAFEANRFYTVINKKSGEIVPMEVNFNFDDPNLIILPLAFGKRQGREFIWNDLLSLETGSLKLANGRVIEKTLYNRRTRQDEPALFVALTFERREVLDSSNIKPMNLIGVDRGENIPAVIALTDPEGCPLSRFKDSLGNPTHILRIGESYKEKQRTIQAKKEVEQRRAGGYSRKYASKAKNLADDMVRNTARDLLYYAVTQDAMLIFENLSRGFGRQGKRTFMAERQYTRMEDWLTAKLAYEGLPSKTYLSKTLAQYTSKTCSNCGFTITSADYDRVLEKLKKTATGWMTTINGKELKVEGQITYYNRYKRQNVVKDLSVELDRLSEESVNNDISSWTKGRSGEALSLLKKRFSHRPVQEKFVCLNCGFETHADEQAALNIARSWLFLRSQEYKKYQTNKTTGNTDKRAFVETWQSFYRKKLKEVWKPAV

SEQ ID NO: 229 - protein, 54 aa, unidentified
  REGION 1..54: note = Deltaproteobacteria sp.
EKRINKIRKKLSADNATKPVSRSGPMKTLLVRVMTDDLKKRLEKRRKKPEVMPQ

SEQ ID NO: 230 - protein, 44 aa, unidentified
  REGION 1..44: note = Deltaproteobacteria sp.
VISNNAANNLRMLLDDYTKMKEAILQVYWQEFKDDHVGLMCKFA

SEQ ID NO: 231 - protein, 91 aa, unidentified
  REGION 1..91: note = Deltaproteobacteria sp.
QPASKKIDQNKLKPEMDEKGNLTTAGFACSQCGQPLFVYKLEQVSEKGKAYTNYFGRCNVAEHEKLILLAQLKPEKDSDEAVTYSLGKFGQ

SEQ ID NO: 232 - protein, 141 aa, unidentified
  REGION 1..141: note = Deltaproteobacteria sp.
RALDFYSIHVTKESTHPVKPLAQIAGNRYASGPVGKALSDACMGTIASFLSKYQDIIIEHQKVVKGNQKRLESLRELAGKENLEYPSVTLPPQPHTKEGVDAYNEVIARVRMWVNLNLWQKLKLSRDDAKPLLRLKGFPSF

SEQ ID NO: 233 - protein, 177 aa, unidentified
  REGION 1..177: note = Deltaproteobacteria sp.
PVVERRENEVDWWNTINEVKKLIDAKRDMGRVFWSGVTAEKRNTILEGYNYLPNENDHKKREGSLENPKKPAKRQFGDLLLYLEKKYAGDWGKVFDEAWERIDKKIAGLTSHIEREEARNAEDAQSKAVLTDWLRAKASFVLERLKEMDEKEFYACEIQLQKWYGDLRGNPFAVEAE

SEQ ID NO: 234 - protein, 151 aa, unidentified
  REGION 1..151: note = Deltaproteobacteria sp.
NRVVDISGFSIGSDGHSIQYRNLLAWKYLENGKREFYLLMNYGKKGRIRFTDGTDIKKSGKWQGLLYGGGKAKVIDLTFDPDDEQLIILPLAFGTRQGREFIWNDLLSLETGLIKLANGRVIEKTIYNKKIGRDEPALFVALTFERREVVD

SEQ ID NO: 235 - protein, 164 aa, unidentified
  REGION 1..164: note = Deltaproteobacteria sp.
PSNIKPVNLIGVDRGENIPAVIALTDPEGCPLPEFKDSSGGPTDILRIGEGYKEKQRAIQAAKEVEQRRAGGYSRKFASKSRNLADDMVRNSARDLFYHAVTHDAVLVFENLSRGFGRQGKRTFMTERQYTKMEDWLTAKLAYEGLTSKTYLSKTLAQYTSKTC

SEQ ID NO: 236 - protein, 110 aa, unidentified
  REGION 1..110: note = Deltaproteobacteria sp.
SNCGFTITTADYDGMLVRLKKTSDGWATTLNNKELKAEGQITYYNRYKRQTVEKELSAELDRLSEESGNNDISKWTKGRRDEALFLLKKRFSHRPVQEQFVCLDCGHEVH

SEQ ID NO: 237 - protein, 53 aa, unidentified
  REGION 1..53: note = Deltaproteobacteria sp.
ADEQAALNIARSWLFLNSNSTEFKSYKSGKQPFVGAWQAFYKRRLKEVWKPNA

SEQ ID NO: 238 - protein, 56 aa, unidentified
  REGION 1..56: note = Planctomycetes sp.
QEIKRINKIRRRLVKDSNTKKAGKTGPMKTLLVRVMTPDLRERLENLRKKPENIPQ

SEQ ID NO: 239 - protein, 44 aa, unidentified
  REGION 1..44: note = Planctomycetes sp.
PISNTSRANLNKLLTDYTEMKKAILHVYWEEFQKDPVGLMSRVA

SEQ ID NO: 240 - protein, 90 aa, unidentified
  REGION 1..90: note = Planctomycetes sp.
QPAPKNIDQRKLIPVKDGNERLTSSGFACSQCCQPLYVYKLEQVNDKGKPHTNYFGRCNVSEHERLILLSPHKPEANDELVTYSLGKFGQ

SEQ ID NO: 241 - protein, 141 aa, unidentified
  REGION 1..141: note = Planctomycetes sp.
RALDFYSIHVTRESNHPVKPLEQIGGNSCASGPVGKALSDACMGAVASFLTKYQDIILEHQKVIKKNEKRLANLKDIASANGLAFPKITLPPQPHTKEGIEAYNNVVAQIVIWVNLNLWQKLKIGRDEAKPLQRLKGFPSF

SEQ ID NO: 242 - protein, 168 aa, unidentified
  REGION 1..168: note = Planctomycetes sp.
PLVERQANEVDWWDMVCNVKKLINEKKEDGKVFWQNLAGYKRQEALLPYLSSEEDRKKGKKFARYQFGDLLLHLEKKHGEDWGKVYDEAWERIDKKVEGLSKHIKLEEERRSEDAQSKAALTDWLRAKASFVIEGLKEADKDEFCRCELKLQKWYGDLRGKPFAIEAE

SEQ ID NO: 243 - protein, 146 aa, unidentified
  REGION 1..146: note = Planctomycetes sp.
NSILDISGFSKQYNCAFIWQKDGVKKLNLYLIINYFKGGKLRFKKIKPEAFEANRFYTVINKKSGEIVPMEVNFNFDDPNLIILPLAFGKRQGREFIWNDLLSLETGSLKLANGRVIEKTLYNRRTRQDEPALFVALTFERREVLD

SEQ ID NO: 244 - protein, 164 aa, unidentified
  REGION 1..164: note = Planctomycetes sp.
SSNIKPMNLIGIDRGENIPAVIALTDPEGCPLSRFKDSLGNPTHILRIGESYKEKQRTIQAAKEVEQRRAGGYSRKYASKAKNLADDMVRNTARDLLYYAVTQDAMLIFENLSRGFGRQGKRTFMAERQYTRMEDWLTAKLAYEGLPSKTYLSKTLAQYTSKTC

SEQ ID NO: 245 - protein, 110 aa, unidentified
  REGION 1..110: note = Planctomycetes sp.
SNCGFTITSADYDRVLEKLKKTATGWMTTINGKELKVEGQITYYNRYKRQNVVKDLSVELDRLSEESVNNDISSWTKGRSGEALSLLKKRFSHRPVQEKFVCLNCGFETH

SEQ ID NO: 246 - protein, 58 aa, unidentified
  REGION 1..58: note = Planctomycetes sp.
ADEQAALNIARSWLFLRSQEYKKYQTNKTTGNTDKRAFVETWQSFYRKKLKEVWKPAV

SEQ ID NO: 247 - protein, 979 aa, synthetic construct
  REGION 1..978: note = CasX variant
QEIKRINKIRRRLVKDSNTKKAGKTGPMKTLLVRVMTPDLRERLENLRKKPENIPQPISNTSRANLNKLLTDYTEMKKAILHVYWEEFQKDPVGLMSRVAGQPASKKIDQNKLKPEMDEKGNLTTAGFACSQCGQPLFVYKLEQVSEKGKAYTNYFGRCNVAEHEKLILLAQLKPEKDSDEAVTYSLGKFGQRALDFYSIHVTKESTHPVKPLAQIAGNRYASGPVGKALSDACMGTIASFLSKYQDIIIEHQKVVKGNQKRLESLRELAGKENLEYPSVTLPPQPHTKEGVDAYNEVIARVRMWVNLNLWQKLKLSRDDAKPLLRLKGFPSFPLVERQANEVDWWDMVCNVKKLINEKKEDGKVFWQNLAGYKRQEALRPYLSSEEDRKKGKKFARYQLGDLLLHLEKKHGEDWGKVYDEAWERIDKKVEGLSKHIKLEEERRSEDAQSKAALTDWLRAKASFVIEGLKEADKDEFCRCELKLQKWYGDLRGKPFAIEAENSILDISGFSKQYNCAFIWQKDGVKKLNLYLIINYFKGGKLRFKKIKPEAFEANRFYTVINKKSGEIVPMEVNFNFDDPNLIILPLAFGKRQGREFIWNDLLSLETGSLKLANGRVIEKTLYNRRTRQDEPALFVALTFERREVLDSSNIKPMNLIGVDRGENIPAVIALTDPEGCPLSRFKDSLGNPTHILRIGESYKEKQRTIQAKKEVEQRRAGGYSRKYASKAKNLADDMVRNTARDLLYYAVTQDAMLIFENLSRGFGRQGKRTFMAERQYTRMEDWLTAKLAYEGLPSKTYLSKTLAQYTSKTCSNCGFTITSADYDRVLEKLKKTATGWMTTINGKELKVEGQITYYNRYKRQNVVKDLSVELDRLSEESVNNDISSWTKGRSGEALSLLKKRFSHRPVQEKFVCLNCGFETHADEQAALNIARSWLFLRSQEYKKYQTNKTTGNTDKRAFVETWQSFYRKKLKEVWKPAV

SEQ ID NO: 248 - protein, 979 aa, synthetic construct
  REGION 1..978: note = CasX variant
QEIKRINKIRRRLVKDSNTKKAGKTGPMKTLLVRVMTPDLRERLENLRKKPENIPQPISNTSRANLNKLLTDYTEMKKAILHVYWEEFQKDPVGLMSRVAQPIASKKIDQNKLKPEMDEKGNLTTAGFACSQCGQPLFVYKLEQVSEKGKAYTNYFGRCNVAEHEKLILLAQLKPEKDSDEAVTYSLGKFGQRALDFYSIHVTKESTHPVKPLAQIAGNRYASGPVGKALSDACMGTIASFLSKYQDIIIEHQKVVKGNQKRLESLRELAGKENLEYPSVTLPPQPHTKEGVDAYNEVIARVRMWVNLNLWQKLKLSRDDAKPLLRLKGFPSFPLVERQANEVDWWDMVCNVKKLINEKKEDGKVFWQNLAGYKRQEALRPYLSSEEDRKKGKKFARYQLGDLLLHLEKKHGEDWGKVYDEAWERIDKKVEGLSKHIKLEEERRSEDAQSKAALTDWLRAKASFVIEGLKEADKDEFCRCELKLQKWYGDLRGKPFAIEAENSILDISGFSKQYNCAFIWQKDGVKKLNLYLIINYFKGGKLRFKKIKPEAFEANRFYTVINKKSGEIVPMEVNFNFDDPNLIILPLAFGKRQGREFIWNDLLSLETGSLKLANGRVIEKTLYNRRTRQDEPALFVALTFERREVLDSSNIKPMNLIGVDRGENIPAVIALTDPEGCPLSRFKDSLGNPTHILRIGESYKEKQRTIQAKKEVEQRRAGGYSRKYASKAKNLADDMVRNTARDLLYYAVTQDAMLIFENLSRGFGRQGKRTFMAERQYTRMEDWLTAKLAYEGLPSKTYLSKTLAQYTSKTCSNCGFTITSADYDRVLEKLKKTATGWMTTINGKELKVEGQITYYNRYKRQNVVKDLSVELDRLSEESVNNDISSWTKGRSGEALSLLKKRFSHRPVQEKFVCLNCGFETHADEQAALNIARSWLFLRSQEYKKYQTNKTTGNTDKRAFVETWQSFYRKKLKEVWKPAV

SEQ ID NO: 249 - protein, 979 aa, synthetic construct
  REGION 1..979: note = CasX variant
QEIKRINKIRRRLVKDSNTKKAGKTGPMKTLLVRVMTPDLRERLENLRKKPENIPQPISNTSRANLNKLLTDYTEMKKAILHVYWEEFQKDPVGLMSRVAQPALSKKIDQNKLKPEMDEKGNLTTAGFACSQCGQPLFVYKLEQVSEKGKAYTNYFGRCNVAEHEKLILLAQLKPEKDSDEAVTYSLGKFGQRALDFYSIHVTKESTHPVKPLAQIAGNRYASGPVGKALSDACMGTIASFLSKYQDIIIEHQKVVKGNQKRLESLRELAGKENLEYPSVTLPPQPHTKEGVDAYNEVIARVRMWVNLNLWQKLKLSRDDAKPLLRLKGFPSFPLVERQANEVDWWDMVCNVKKLINEKKEDGKVFWQNLAGYKRQEALRPYLSSEEDRKKGKKFARYQLGDLLLHLEKKHGEDWGKVYDEAWERIDKKVEGLSKHIKLEEERRSEDAQSKAALTDWLRAKASFVIEGLKEADKDEFCRCELKLQKWYGDLRGKPFAIEAENSILDISGFSKQYNCAFIWQKDGVKKLNLYLIINYFKGGKLRFKKIKPEAFEANRFYTVINKKSGEIVPMEVNFNFDDPNLIILPLAFGKRQGREFIWNDLLSLETGSLKLANGRVIEKTLYNRRTRQDEPALFVALTFERREVLDSSNIKPMNLIGVDRGENIPAVIALTDPEGCPLSRFKDSLGNPTHILRIGESYKEKQRTIQAKKEVEQRRAGGYSRKYASKAKNLADDMVRNTARDLLYYAVTQDAMLIFENLSRGFGRQGKRTFMAERQYTRMEDWLTAKLAYEGLPSKTYLSKTLAQYTSKTCSNCGFTITSADYDRVLEKLKKTATGWMTTINGKELKVEGQITYYNRYKRQNVVKDLSVELDRLSEESVNNDISSWTKGRSGEALSLLKKRFSHRPVQEKFVCLNCGFETHADEQAALNIARSWLFLRSQEYKKYQTNKTTGNTDKRAFVETWQSFYRKKLKEVWKPAV

SEQ ID NO: 250 - protein, 979 aa, synthetic construct
  REGION 1..978: note = CasX variant
QEIKRINKIRRRLVKDSNTKKAGKTGPMKTLLVRVMTPDLRERLENLRKKPENIPQPISNTSRANLNKLLTDYTEMKKAILHVYWEEFQKDPVGLMSRVAQPASKKIDQNKLKPEMDEKGNLTTAGFACSQCGQPLFVYKLEQVSEKGKAYTNYFGRCNVAEHEKLILLAQLKPEKDSDEAVTYSLGKFGQRALDFYSIHVTKESTHPVKPLAQIAGNRYASGPVGKALSDACMGTIASFLSKYQDIIIEHQKVVKGNQKRLESLRELAGKENLEYPSVTLPPQPHTKEGVDAYNEVIARVRMWVNLNLWQKLKLSRDDAKPLLRLKGFPSFPDLVERQANEVDWWDMVCNVKKLINEKKEDGKVFWQNLAGYKRQEALRPYLSSEEDRKKGKKFARYQLGDLLLHLEKKHGEDWGKVYDEAWERIDKKVEGLSKHIKLEEERRSEDAQSKAALTDWLRAKASFVIEGLKEADKDEFCRCELKLQKWYGDLRGKPFAIEAENSILDISGFSKQYNCAFIWQKDGVKKLNLYLIINYFKGGKLRFKKIKPEAFEANRFYTVINKKSGEIVPMEVNFNFDDPNLIILPLAFGKRQGREFIWNDLLSLETGSLKLANGRVIEKTLYNRRTRQDEPALFVALTFERREVLDSSNIKPMNLIGVDRGENIPAVIALTDPEGCPLSRFKDSLGNPTHILRIGESYKEKQRTIQAKKEVEQRRAGGYSRKYASKAKNLADDMVRNTARDLLYYAVTQDAMLIFENLSRGFGRQGKRTFMAERQYTRMEDWLTAKLAYEGLPSKTYLSKTLAQYTSKTCSNCGFTITSADYDRVLEKLKKTATGWMTTINGKELKVEGQITYYNRYKRQNVVKDLSVELDRLSEESVNNDISSWTKGRSGEALSLLKKRFSHRPVQEKFVCLNCGFETHADEQAALNIARSWLFLRSQEYKKYQTNKTTGNTDKRAFVETWQSFYRKKLKEVWKPAV

SEQ ID NO: 251 - protein, 979 aa, synthetic construct
  REGION 1..978: note = CasX variant
QEIKRINKIRRRLVKDSNTKKAGKTGPMKTLLVRVMTPDLRERLENLRKKPENIPQPISNTSRANLNKLLTDYTEMKKAILHVYWEEFQKDPVGLMSRVAQPASKKIDQNKLKPEMDEKGNLTTAGFACSQCGQPLFVYKLEQVSEKGKAYTNYFGRCNVAEHEKLILLAQLKPEKDSDEAVTYSLGKFGQRALDFYSIHVTKESTHPVKPLAQIAGNRYASGPVGKALSDACMGTIASFLSKYQDIIIEHQKVVKGNQKRLESLRELAGKENLEYPSVTLPPQPHTKEGVDAYNEVIARVRMWVNLNLWQKLKLSRDDAKPLLRLKGFPSFHPLVERQANEVDWWDMVCNVKKLINEKKEDGKVFWQNLAGYKRQEALRPYLSSEEDRKKGKKFARYQLGDLLLHLEKKHGEDWGKVYDEAWERIDKKVEGLSKHIKLEEERRSEDAQSKAALTDWLRAKASFVIEGLKEADKDEFCRCELKLQKWYGDLRGKPFAIEAENSILDISGFSKQYNCAFIWQKDGVKKLNLYLIINYFKGGKLRFKKIKPEAFEANRFYTVINKKSGEIVPMEVNFNFDDPNLIILPLAFGKRQGREFIWNDLLSLETGSLKLANGRVIEKTLYNRRTRQDEPALFVALTFERREVLDSSNIKPMNLIGVDRGENIPAVIALTDPEGCPLSRFKDSLGNPTHILRIGESYKEKQRTIQAKKEVEQRRAGGYSRKYASKAKNLADDMVRNTARDLLYYAVTQDAMLIFENLSRGFGRQGKRTFMAERQYTRMEDWLTAKLAYEGLPSKTYLSKTLAQYTSKTCSNCGFTITSADYDRVLEKLKKTATGWMTTINGKELKVEGQITYYNRYKRQNVVKDLSVELDRLSEESVNNDISSWTKGRSGEALSLLKKRFSHRPVQEKFVCLNCGFETHADEQAALNIARSWLFLRSQEYKKYQTNKTTGNTDKRAFVETWQSFYRKKLKEVWKPAV

SEQ ID NO: 252 - protein, 979 aa, synthetic construct
  REGION 1..978: note = CasX variant
QEIKRINKIRRRLVKDSNTKKAGKTGPMKTLLVRVMTPDLRERLENLRKKPENIPQPISNTSRANLNKLLTDYTEMKKAILHVYWEEFQKDPVGLMSRVAQPASKKIDQNKLKPEMDEKGNLTTAGFACSQCGQPLFVYKLEQVSEKGKAYTNYFGRCNVAEHEKLILLAQLKPEKDSDEAVTYSLGKFGQRALDFYSIHVTKESTHPVKPLAQIAGNRYASGPVGKALSDACMGTIASFLSKYQDIIIEHQKVVKGNQKRLESLRELAGKENLEYPSVTLPPQPHTKEGVDAYNEVIARVRMWVNLNLWQKLKLSRDDAKPLLRLKGFPSFPLVERQANEVDQWWDMVCNVKKLINEKKEDGKVFWQNLAGYKRQEALRPYLSSEEDRKKGKKFARYQLGDLLLHLEKKHGEDWGKVYDEAWERIDKKVEGLSKHIKLEEERRSEDAQSKAALTDWLRAKASFVIEGLKEADKDEFCRCELKLQKWYGDLRGKPFAIEAENSILDISGFSKQYNCAFIWQKDGVKKLNLYLIINYFKGGKLRFKKIKPEAFEANRFYTVINKKSGEIVPMEVNFNFDDPNLIILPLAFGKRQGREFIWNDLLSLETGSLKLANGRVIEKTLYNRRTRQDEPALFVALTFERREVLDSSNIKPMNLIGVDRGENIPAVIALTDPEGCPLSRFKDSLGNPTHILRIGESYKEKQRTIQAKKEVEQRRAGGYSRKYASKAKNLADDMVRNTARDLLYYAVTQDAMLIFENLSRGFGRQGKRTFMAERQYTRMEDWLTAKLAYEGLPSKTYLSKTLAQYTSKTCSNCGFTITSADYDRVLEKLKKTATGWMTTINGKELKVEGQITYYNRYKRQNVVKDLSVELDRLSEESVNNDISSWTKGRSGEALSLLKKRFSHRPVQEKFVCLNCGFETHADEQAALNIARSWLFLRSQEYKKYQTNKTTGNTDKRAFVETWQSFYRKKLKEVWKPAV

SEQ ID NO: 253 - protein, 978 aa, synthetic construct
  REGION 1..978: note = CasX variant
QEIKRINKIRRRLVKDSNTKKAGKTGPMKTLLVRVMTPDLRERLENLRKKPENIPQPISNTSRANLNKLLTDYTEMKKAILHVYWEEFQKDPVGLMSRVAQPASKKIDQNKLKPEMDEKGNLTTAGFACSQCGQPLFVYKLEQVSEKGKAYTNYFGRCNVAEHEKLILLAQLKPEKDSDEAVTYSLGKFGQRALDFYSIHVTKESTHPVKPLAQIAGNRYASGPVGKALSDACMGTIASFLSKYQDIIIEHQKVVKGNQKRLESLRELAGKENLEYPSVTLPPQPHTKEGVDAYNEVIARVRMWVNLNLWQKLKLSRDDAKPLLRLKGFPSFPLPERQANEVDWWDMVCNVKKLINEKKEDGKVFWQNLAGYKRQEALRPYLSSEEDRKKGKKFARYQLGDLLLHLEKKHGEDWGKVYDEAWERIDKKVEGLSKHIKLEEERRSEDAQSKAALTDWLRAKASFVIEGLKEADKDEFCRCELKLQKWYGDLRGKPFAIEAENSILDISGFSKQYNCAFIWQKDGVKKLNLYLIINYFKGGKLRFKKIKPEAFEANRFYTVINKKSGEIVPMEVNFNFDDPNLIILPLAFGKRQGREFIWNDLLSLETGSLKLANGRVIEKTLYNRRTRQDEPALFVALTFERREVLDSSNIKPMNLIGVDRGENIPAVIALTDPEGCPLSRFKDSLGNPTHILRIGESYKEKQRTIQAKKEVEQRRAGGYSRKYASKAKNLADDMVRNTARDLLYYAVTQDAMLIFENLSRGFGRQGKRTFMAERQYTRMEDWLTAKLAYEGLPSKTYLSKTLAQYTSKTCSNCGFTITSADYDRVLEKLKKTATGWMTTINGKELKVEGQITYYNRYKRQNVVKDLSVELDRLSEESVNNDISSWTKGRSGEALSLLKKRFSHRPVQEKFVCLNCGFETHADEQAALNIARSWLFLRSQEYKKYQTNKTTGNTDKRAFVETWQSFYRKKLKEVWKPAV

SEQ ID NO: 254 - protein, 978 aa, synthetic construct
  REGION 1..978: note = CasX variant
QEIKRINKIRRRLVKDSNTKKAGKTGPMKTLLVRVMTPDLRERLENLRKKPENIPQPISNTSRANLNKLLTDYTEMKKAILHVYWEEFQKDPVGLMSRVAQPASKKIDQNKLKPEMDEKGNLTTAGFACSQCGQPLFVYKLEQVSEKGKAYTNYFGRCNVAEHEKLIDLAQLKPEKDSDEAVTYSLGKFGQRALDFYSIHVTKESTHPVKPLAQIAGNRYASGPVGKALSDACMGTIASFLSKYQDIIIEHQKVVKGNQKRLESLRELAGKENLEYPSVTLPPQPHTKEGVDAYNEVIARVRMWVNLNLWQKLKLSRDDAKPLLRLKGFPSFPLVERQANEVDWWDMVCNVKKLINEKKEDGKVFWQNLAGYKRQEALRPYLSSEEDRKKGKKFARYQLGDLLLHLEKKHGEDWGKVYDEAWERIDKKVEGLSKHIKLEEERRSEDAQSKAALTDWLRAKASFVIEGLKEADKDEFCRCELKLQKWYGDLRGKPFAIEAENSILDISGFSKQYNCAFIWQKDGVKKLNLYLIINYFKGGKLRFKKIKPEAFEANRFYTVINKKSGEIVPMEVNFNFDDPNLIILPLAFGKRQGREFIWNDLLSLETGSLKLANGRVIEKTLYNRRTRQDEPALFVALTFERREVLDSSNIKPMNLIGVDRGENIPAVIALTDPEGCPLSRFKDSLGNPTHILRIGESYKEKQRTIQAKKEVEQRRAGGYSRKYASKAKNLADDMVRNTARDLLYYAVTQDAMLIFENLSRGFGRQGKRTFMAERQYTRMEDWLTAKLAYEGLPSKTYLSKTLAQYTSKTCSNCGFTITSADYDRVLEKLKKTATGWMTTINGKELKVEGQITYYNRYKRQNVVKDLSVELDRLSEESVNNDISSWTKGRSGEALSLLKKRFSHRPVQEKFVCLNCGFETHADEQAALNIARSWLFLRSQEYKKYQTNKTTGNTDKRAFVETWQSFYRKKLKEVWKPAV

SEQ ID NO: 255 - protein, 978 aa, synthetic construct
  REGION 1..978: note = CasX variant
QEIKRINKIRRRLVKDSNTKKAGKTGPMKTLLVRVMTPDLRERLENLRKKPENIPQPISNTSRANLNKLLTDYTEMKKAILHVYWEEFQKDPVGLMSRVAQPASKKIDQNKLKPEMDEKGNLTTAGFACSQCGQPLFVYKLEQVSEKGKAYTNYFGRCNVAEHEKLIELAQLKPEKDSDEAVTYSLGKFGQRALDFYSIHVTKESTHPVKPLAQIAGNRYASGPVGKALSDACMGTIASFLSKYQDIIIEHQKVVKGNQKRLESLRELAGKENLEYPSVTLPPQPHTKEGVDAYNEVIARVRMWVNLNLWQKLKLSRDDAKPLLRLKGFPSFPLVERQANEVDWWDMVCNVKKLINEKKEDGKVFWQNLAGYKRQEALRPYLSSEEDRKKGKKFARYQLGDLLLHLEKKHGEDWGKVYDEAWERIDKKVEGLSKHIKLEEERRSEDAQSKAALTDWLRAKASFVIEGLKEADKDEFCRCELKLQKWYGDLRGKPFAIEAENSILDISGFSKQYNCAFIWQKDGVKKLNLYLIINYFKGGKLRFKKIKPEAFEANRFYTVINKKSGEIVPMEVNFNFDDPNLIILPLAFGKRQGREFIWNDLLSLETGSLKLANGRVIEKTLYNRRTRQDEPALFVALTFERREVLDSSNIKPMNLIGVDRGENIPAVIALTDPEGCPLSRFKDSLGNPTHILRIGESYKEKQRTIQAKKEVEQRRAGGYSRKYASKAKNLADDMVRNTARDLLYYAVTQDAMLIFENLSRGFGRQGKRTFMAERQYTRMEDWLTAKLAYEGLPSKTYLSKTLAQYTSKTCSNCGFTITSADYDRVLEKLKKTATGWMTTINGKELKVEGQITYYNRYKRQNVVKDLSVELDRLSEESVNNDISSWTKGRSGEALSLLKKRFSHRPVQEKFVCLNCGFETHADEQAALNIARSWLFLRSQEYKKYQTNKTTGNTDKRAFVETWQSFYRKKLKEVWKPAV

SEQ ID NO: 256 - protein, 979 aa, synthetic construct
  REGION 1..978: note = CasX variant
QEIKRINKIRRRLVKDSNTKKAGKTPGPMKTLLVRVMTPDLRERLENLRKKPENIPQPISNTSRANLNKLLTDYTEMKKAILHVYWEEFQKDPVGLMSRVAQPASKKIDQNKLKPEMDEKGNLTTAGFACSQCGQPLFVYKLEQVSEKGKAYTNYFGRCNVAEHEKLILLAQLKPEKDSDEAVTYSLGKFGQRALDFYSIHVTKESTHPVKPLAQIAGNRYASGPVGKALSDACMGTIASFLSKYQDIIIEHQKVVKGNQKRLESLRELAGKENLEYPSVTLPPQPHTKEGVDAYNEVIARVRMWVNLNLWQKLKLSRDDAKPLLRLKGFPSFPLVERQANEVDWWDMVCNVKKLINEKKEDGKVFWQNLAGYKRQEALRPYLSSEEDRKKGKKFARYQLGDLLLHLEKKHGEDWGKVYDEAWERIDKKVEGLSKHIKLEEERRSEDAQSKAALTDWLRAKASFVIEGLKEADKDEFCRCELKLQKWYGDLRGKPFAIEAENSILDISGFSKQYNCAFIWQKDGVKKLNLYLIINYFKGGKLRFKKIKPEAFEANRFYTVINKKSGEIVPMEVNFNFDDPNLIILPLAFGKRQGREFIWNDLLSLETGSLKLANGRVIEKTLYNRRTRQDEPALFVALTFERREVLDSSNIKPMNLIGVDRGENIPAVIALTDPEGCPLSRFKDSLGNPTHILRIGESYKEKQRTIQAKKEVEQRRAGGYSRKYASKAKNLADDMVRNTARDLLYYAVTQDAMLIFENLSRGFGRQGKRTFMAERQYTRMEDWLTAKLAYEGLPSKTYLSKTLAQYTSKTCSNCGFTITSADYDRVLEKLKKTATGWMTTINGKELKVEGQITYYNRYKRQNVVKDLSVELDRLSEESVNNDISSWTKGRSGEALSLLKKRFSHRPVQEKFVCLNCGFETHADEQAALNIARSWLFLRSQEYKKYQTNKTTGNTDKRAFVETWQSFYRKKLKEVWKPAV

SEQ ID NO: 257 - protein, 978 aa, synthetic construct
  REGION 1..978: note = CasX variant
QEIKRINKIRRRLVKDSNTKKAGKTGPPKTLLVRVMTPDLRERLENLRKKPENIPQPISNTSRANLNKLLTDYTEMKKAILHVYWEEFQKDPVGLMSRVAQPASKKIDQNKLKPEMDEKGNLTTAGFACSQCGQPLFVYKLEQVSEKGKAYTNYFGRCNVAEHEKLILLAQLKPEKDSDEAVTYSLGKFGQRALDFYSIHVTKESTHPVKPLAQIAGNRYASGPVGKALSDACMGTIASFLSKYQDIIIEHQKVVKGNQKRLESLRELAGKENLEYPSVTLPPQPHTKEGVDAYNEVIARVRMWVNLNLWQKLKLSRDDAKPLLRLKGFPSFPLVERQANEVDWWDMVCNVKKLINEKKEDGKVFWQNLAGYKRQEALRPYLSSEEDRKKGKKFARYQLGDLLLHLEKKHGEDWGKVYDEAWERIDKKVEGLSKHIKLEEERRSEDAQSKAALTDWLRAKASFVIEGLKEADKDEFCRCELKLQKWYGDLRGKPFAIEAENSILDISGFSKQYNCAFIWQKDGVKKLNLYLIINYFKGGKLRFKKIKPEAFEANRFYTVINKKSGEIVPMEVNFNFDDPNLIILPLAFGKRQGREFIWNDLLSLETGSLKLANGRVIEKTLYNRRTRQDEPALFVALTFERREVLDSSNIKPMNLIGVDRGENIPAVIALTDPEGCPLSRFKDSLGNPTHILRIGESYKEKQRTIQAKKEVEQRRAGGYSRKYASKAKNLADDMVRNTARDLLYYAVTQDAMLIFENLSRGFGRQGKRTFMAERQYTRMEDWLTAKLAYEGLPSKTYLSKTLAQYTSKTCSNCGFTITSADYDRVLEKLKKTATGWMTTINGKELKVEGQITYYNRYKRQNVVKDLSVELDRLSEESVNNDISSWTKGRSGEALSLLKKRFSHRPVQEKFVCLNCGFETHADEQAALNIARSWLFLRSQEYKKYQTNKTTGNTDKRAFVETWQSFYRKKLKEVWKPAV

SEQ ID NO: 258 - protein, 977 aa, synthetic construct
  REGION 1..977: note = CasX variant
QEIKRINKIRRRLVKDSNTKKAGKTGPMKTLLVRVMTPDLRERLENLRKKPENIPQPISNTSRANLNKLLTDYTEMKKAILHVYWEEFQKDPVGLMSRVAQPASKKIDQNKLKPEMDEKGNLTTAGFACSQCGQPLFVYKLEQVSEKGKAYTNYFGRCNVAEHEKLILLAQLKPEKDSDEAVTYSLGKFGQRALDFYSIHVTKESTHPVKPLAQIAGNRYASPVGKALSDACMGTIASFLSKYQDIIIEHQKVVKGNQKRLESLRELAGKENLEYPSVTLPPQPHTKEGVDAYNEVIARVRMWVNLNLWQKLKLSRDDAKPLLRLKGFPSFPLVERQANEVDWWDMVCNVKKLINEKKEDGKVFWQNLAGYKRQEALRPYLSSEEDRKKGKKFARYQLGDLLLHLEKKHGEDWGKVYDEAWERIDKKVEGLSKHIKLEEERRSEDAQSKAALTDWLRAKASFVIEGLKEADKDEFCRCELKLQKWYGDLRGKPFAIEAENSILDISGFSKQYNCAFIWQKDGVKKLNLYLIINYFKGGKLRFKKIKPEAFEANRFYTVINKKSGEIVPMEVNFNFDDPNLIILPLAFGKRQGREFIWNDLLSLETGSLKLANGRVIEKTLYNRRTRQDEPALFVALTFERREVLDSSNIKPMNLIGVDRGENIPAVIALTDPEGCPLSRFKDSLGNPTHILRIGESYKEKQRTIQAKKEVEQRRAGGYSRKYASKAKNLADDMVRNTARDLLYYAVTQDAMLIFENLSRGFGRQGKRTFMAERQYTRMEDWLTAKLAYEGLPSKTYLSKTLAQYTSKTCSNCGFTITSADYDRVLEKLKKTATGWMTTINGKELKVEGQITYYNRYKRQNVVKDLSVELDRLSEESVNNDISSWTKGRSGEALSLLKKRFSHRPVQEKFVCLNCGFETHADEQAALNIARSWLFLRSQEYKKYQTNKTTGNTDKRAFVETWQSFYRKKLKEVWKPAV

SEQ ID NO: 259 - protein, 977 aa, synthetic construct
  REGION 1..977: note = CasX variant
QEIKRINKIRRRLVKDSNTKKAGKTGPMKTLLVRVMTPDLRERLENLRKKPENIPQPISNTSRANLNKLLTDYTEMKKAILHVYWEEFQKDPVGLMSRVAQPASKKIDQNKLKPEMDEKGNLTTAGFACQCGQPLFVYKLEQVSEKGKAYTNYFGRCNVAEHEKLILLAQLKPEKDSDEAVTYSLGKFGQRALDFYSIHVTKESTHPVKPLAQIAGNRYASGPVGKALSDACMGTIASFLSKYQDIIIEHQKVVKGNQKRLESLRELAGKENLEYPSVTLPPQPHTKEGVDAYNEVIARVRMWVNLNLWQKLKLSRDDAKPLLRLKGFPSFPLVERQANEVDWWDMVCNVKKLINEKKEDGKVFWQNLAGYKRQEALRPYLSSEEDRKKGKKFARYQLGDLLLHLEKKHGEDWGKVYDEAWERIDKKVEGLSKHIKLEEERRSEDAQSKAALTDWLRAKASFVIEGLKEADKDEFCRCELKLQKWYGDLRGKPFAIEAENSILDISGFSKQYNCAFIWQKDGVKKLNLYLIINYFKGGKLRFKKIKPEAFEANRFYTVINKKSGEIVPMEVNFNFDDPNLIILPLAFGKRQGREFIWNDLLSLETGSLKLANGRVIEKTLYNRRTRQDEPALFVALTFERREVLDSSNIKPMNLIGVDRGENIPAVIALTDPEGCPLSRFKDSLGNPTHILRIGESYKEKQRTIQAKKEVEQRRAGGYSRKYASKAKNLADDMVRNTARDLLYYAVTQDAMLIFENLSRGFGRQGKRTFMAERQYTRMEDWLTAKLAYEGLPSKTYLSKTLAQYTSKTCSNCGFTITSADYDRVLEKLKKTATGWMTTINGKELKVEGQITYYNRYKRQNVVKDLSVELDRLSEESVNNDISSWTKGRSGEALSLLKKRFSHRPVQEKFVCLNCGFETHADEQAALNIARSWLFLRSQEYKKYQTNKTTGNTDKRAFVETWQSFYRKKLKEVWKPAV

SEQ ID NO: 260 - protein, 978 aa, synthetic construct
  REGION 1..978: note = CasX variant
QEIKRINKIRRRLVKDSNTKKAGKTGPMKTLLVRVMTPDLRERLENLRKKPENIPQPISNTSRANLNKLLTDYTEMKKAILHVYWEEFQKDPVGLMSRVAQPASKKIDQNKLKPEMDEKGNLTTAGFACSQCGQPLFVYKLEQVSEKGKAYTNYFGRCNVAEHEKLILLAQLKPEKDSDEAVTYSLGKFGQRALDFYSIHVTKESTHPVKPLAQIAGNRYASGPVGKALSDACMGTIASFLSKYHDIIIEHQKVVKGNQKRLESLRELAGKENLEYPSVTLPPQPHTKEGVDAYNEVIARVRMWVNLNLWQKLKLSRDDAKPLLRLKGFPSFPLVERQANEVDWWDMVCNVKKLINEKKEDGKVFWQNLAGYKRQEALRPYLSSEEDRKKGKKFARYQLGDLLLHLEKKHGEDWGKVYDEAWERIDKKVEGLSKHIKLEEERRSEDAQSKAALTDWLRAKASFVIEGLKEADKDEFCRCELKLQKWYGDLRGKPFAIEAENSILDISGFSKQYNCAFIWQKDGVKKLNLYLIINYFKGGKLRFKKIKPEAFEANRFYTVINKKSGEIVPMEVNFNFDDPNLIILPLAFGKRQGREFIWNDLLSLETGSLKLANGRVIEKTLYNRRTRQDEPALFVALTFERREVLDSSNIKPMNLIGVDRGENIPAVIALTDPEGCPLSRFKDSLGNPTHILRIGESYKEKQRTIQAKKEVEQRRAGGYSRKYASKAKNLADDMVRNTARDLLYYAVTQDAMLIFENLSRGFGRQGKRTFMAERQYTRMEDWLTAKLAYEGLPSKTYLSKTLAQYTSKTCSNCGFTITSADYDRVLEKLKKTATGWMTTINGKELKVEGQITYYNRYKRQNVVKDLSVELDRLSEESVNNDISSWTKGRSGEALSLLKKRFSHRPVQEKFVCLNCGFETHADEQAALNIARSWLFLRSQEYKKYQTNKTTGNTDKRAFVETWQSFYRKKLKEVWKPAV

SEQ ID NO: 261 - protein, 978 aa, synthetic construct
  REGION 1..978: note = CasX variant
QEIKRINKIRRRLVKDSNTKKAGKTGPMKTLLVRVMTPDLRERLENLRKKPENIPQPISNTSRANLNKLLTDYTEMKKAILHVYWEEFQKDPVGLMSRVAQPASKKIDQNKLKPEMDEKGNLTTAGFACSQCGQPLFVYKLEQVSEKGKAYTNYFGRCNVAEHEKLILLAQLKPEKDSDEAVTYSLGKFGQRALDFYSIHVTKESTHPVKPLAQIAGNRYASGPVGKALSDACMGTIAHFLSKYQDIIIEHQKVVKGNQKRLESLRELAGKENLEYPSVTLPPQPHTKEGVDAYNEVIARVRMWVNLNLWQKLKLSRDDAKPLLRLKGFPSFPLVERQANEVDWWDMVCNVKKLINEKKEDGKVFWQNLAGYKRQEALRPYLSSEEDRKKGKKFARYQLGDLLLHLEKKHGEDWGKVYDEAWERIDKKVEGLSKHIKLEEERRSEDAQSKAALTDWLRAKASFVIEGLKEADKDEFCRCELKLQKWYGDLRGKPFAIEAENSILDISGFSKQYNCAFIWQKDGVKKLNLYLIINYFKGGKLRFKKIKPEAFEANRFYTVINKKSGEIVPMEVNFNFDDPNLIILPLAFGKRQGREFIWNDLLSLETGSLKLANGRVIEKTLYNRRTRQDEPALFVALTFERREVLDSSNIKPMNLIGVDRGENIPAVIALTDPEGCPLSRFKDSLGNPTHILRIGESYKEKQRTIQAKKEVEQRRAGGYSRKYASKAKNLADDMVRNTARDLLYYAVTQDAMLIFENLSRGFGRQGKRTFMAERQYTRMEDWLTAKLAYEGLPSKTYLSKTLAQYTSKTCSNCGFTITSADYDRVLEKLKKTATGWMTTINGKELKVEGQITYYNRYKRQNVVKDLSVELDRLSEESVNNDISSWTKGRSGEALSLLKKRFSHRPVQEKFVCLNCGFETHADEQAALNIARSWLFLRSQEYKKYQTNKTTGNTDKRAFVETWQSFYRKKLKEVWKPAV

SEQ ID NO: 262 - protein, 978 aa, synthetic construct
  REGION 1..978: note = CasX variant
QEIKRINKIRRRLVKDSNTKKAGKTGPMKTLLVRVMTPDLRERLENLRKKPENIPQPISNTSRANLNKLLTDYTEMKKAILHVYWEEFQKDPVGLMSRVAQPASKKIDQNKLKPEMDEKGNLTTAGFACSQCGQPLFVYKLEQVSEKGKAYTNYFGRCNVAEHEKLILLAQLKPEKDSDEAVTYSLGKFGQRALDFYSIHVTKESTHPVKPLAQIAGNRYASGPVGKALSDACMGTIATFLSKYQDIIIEHQKVVKGNQKRLESLRELAGKENLEYPSVTLPPQPHTKEGVDAYNEVIARVRMWVNLNLWQKLKLSRDDAKPLLRLKGFPSFPLVERQANEVDWWDMVCNVKKLINEKKEDGKVFWQNLAGYKRQEALRPYLSSEEDRKKGKKFARYQLGDLLLHLEKKHGEDWGKVYDEAWERIDKKVEGLSKHIKLEEERRSEDAQSKAALTDWLRAKASFVIEGLKEADKDEFCRCELKLQKWYGDLRGKPFAIEAENSILDISGFSKQYNCAFIWQKDGVKKLNLYLIINYFKGGKLRFKKIKPEAFEANRFYTVINKKSGEIVPMEVNFNFDDPNLIILPLAFGKRQGREFIWNDLLSLETGSLKLANGRVIEKTLYNRRTRQDEPALFVALTFERREVLDSSNIKPMNLIGVDRGENIPAVIALTDPEGCPLSRFKDSLGNPTHILRIGESYKEKQRTIQAKKEVEQRRAGGYSRKYASKAKNLADDMVRNTARDLLYYAVTQDAMLIFENLSRGFGRQGKRTFMAERQYTRMEDWLTAKLAYEGLPSKTYLSKTLAQYTSKTCSNCGFTITSADYDRVLEKLKKTATGWMTTINGKELKVEGQITYYNRYKRQNVVKDLSVELDRLSEESVNNDISSWTKGRSGEALSLLKKRFSHRPVQEKFVCLNCGFETHADEQAALNIARSWLFLRSQEYKKYQTNKTTGNTDKRAFVETWQSFYRKKLKEVWKPAV

SEQ ID NO: 263 - protein, 978 aa, synthetic construct
  REGION 1..978: note = CasX variant
QEIKRINKIRRRLVKDSNTKKAGKTGPMKTLLVRVMTPDLRERLENLRKKPENIPQPISNTSRANLNKLLTDYTEMKKAILHVYWEEFQKDPVGLMSRVAQPASKKIDQNKLKPEMDEKGNLTTAGFACSQCGQPLFVYKLEQVSEKGKAYTNYFGRCNVAEHEKLILLAQLKPEKDSDEAVTYSLGKFGQRALDFYSIHVTKESTHPVKPLAQIAGNRYASGPVGKALSDACMGTIASFLSKYQDIIIEHQKVVKGNQKRLESLRELAGKENLEYPSVTLPPQPHTDEGVDAYNEVIARVRMWVNLNLWQKLKLSRDDAKPLLRLKGFPSFPLVERQANEVDWWDMVCNVKKLINEKKEDGKVFWQNLAGYKRQEALRPYLSSEEDRKKGKKFARYQLGDLLLHLEKKHGEDWGKVYDEAWERIDKKVEGLSKHIKLEEERRSEDAQSKAALTDWLRAKASFVIEGLKEADKDEFCRCELKLQKWYGDLRGKPFAIEAENSILDISGFSKQYNCAFIWQKDGVKKLNLYLIINYFKGGKLRFKKIKPEAFEANRFYTVINKKSGEIVPMEVNFNFDDPNLIILPLAFGKRQGREFIWNDLLSLETGSLKLANGRVIEKTLYNRRTRQDEPALFVALTFERREVLDSSNIKPMNLIGVDRGENIPAVIALTDPEGCPLSRFKDSLGNPTHILRIGESYKEKQRTIQAKKEVEQRRAGGYSRKYASKAKNLADDMVRNTARDLLYYAVTQDAMLIFENLSRGFGRQGKRTFMAERQYTRMEDWLTAKLAYEGLPSKTYLSKTLAQYTSKTCSNCGFTITSADYDRVLEKLKKTATGWMTTINGKELKVEGQITYYNRYKRQNVVKDLSVELDRLSEESVNNDISSWTKGRSGEALSLLKKRFSHRPVQEKFVCLNCGFETHADEQAALNIARSWLFLRSQEYKKYQTNKTTGNTDKRAFVETWQSFYRKKLKEVWKPAV

SEQ ID NO: 264 - protein, 978 aa, synthetic construct
  REGION 1..978: note = CasX variant
QEIKRINKIRRRLVKDSNTKKAGKTGPMKTLLVRVMTPDLRERLENLRKKPENIPQPISNTSRANLNKLLTDYTEMKKAILHVYWEEFQKDPVGLMSRVAQPASKKIDQNKLKPEMDEKGNLTTAGFACSQCGQPLFVYKLEQVSEKGKAYTNYFGRCNVAEHEKLILLAQLKPEKDSDEAVTYSLGKFGQRALDFYSIHVTKESTHPVKPLAQIAGNRYASGPVGKALSDACMGTIASFLSKYQDIIIEHQKVVKGNQKRLESLRELAGKENLEYPSVTLPPQPHTEEGVDAYNEVIARVRMWVNLNLWQKLKLSRDDAKPLLRLKGFPSFPLVERQANEVDWWDMVCNVKKLINEKKEDGKVFWQNLAGYKRQEALRPYLSSEEDRKKGKKFARYQLGDLLLHLEKKHGEDWGKVYDEAWERIDKKVEGLSKHIKLEEERRSEDAQSKAALTDWLRAKASFVIEGLKEADKDEFCRCELKLQKWYGDLRGKPFAIEAENSILDISGFSKQYNCAFIWQKDGVKKLNLYLIINYFKGGKLRFKKIKPEAFEANRFYTVINKKSGEIVPMEVNFNFDDPNLIILPLAFGKRQGREFIWNDLLSLETGSLKLANGRVIEKTLYNRRTRQDEPALFVALTFERREVLDSSNIKPMNLIGVDRGENIPAVIALTDPEGCPLSRFKDSLGNPTHILRIGESYKEKQRTIQAKKEVEQRRAGGYSRKYASKAKNLADDMVRNTARDLLYYAVTQDAMLIFENLSRGFGRQGKRTFMAERQYTRMEDWLTAKLAYEGLPSKTYLSKTLAQYTSKTCSNCGFTITSADYDRVLEKLKKTATGWMTTINGKELKVEGQITYYNRYKRQNVVKDLSVELDRLSEESVNNDISSWTKGRSGEALSLLKKRFSHRPVQEKFVCLNCGFETHADEQAALNIARSWLFLRSQEYKKYQTNKTTGNTDKRAFVETWQSFYRKKLKEVWKPAV

SEQ ID NO: 265 - protein, 978 aa, synthetic construct
  REGION 1..978: note = CasX variant
QEIKRINKIRRRLVKDSNTKKAGKTGPMKTLLVRVMTPDLRERLENLRKKPENIPQPISNTSRANLNKLLTDYTEMKKAILHVYWEEFQKDPVGLMSRVAQPASKKIDQNKLKPEMDEKGNLTTAGFACSQCGQPLFVYKLEQVSEKGKAYTNYFGRCNVAEHEKLILLAQLKPEKDSDEAVTYSLGKFGQRALDFYSIHVTKESTHPVKPLAQIAGNRYASGPVGKALSDACMGTIASFLSKYQDIIIEHQKVVKGNQKRLESLRELAGKENLEYPSVTLPPQPHTKEGVDAYNEVIARVRMWVNLNLWQKLKLSRDDAKPLLRLKRFPSFPLVERQANEVDWWDMVCNVKKLINEKKEDGKVFWQNLAGYKRQEALRPYLSSEEDRKKGKKFARYQLGDLLLHLEKKHGEDWGKVYDEAWERIDKKVEGLSKHIKLEEERRSEDAQSKAALTDWLRAKASFVIEGLKEADKDEFCRCELKLQKWYGDLRGKPFAIEAENSILDISGFSKQYNCAFIWQKDGVKKLNLYLIINYFKGGKLRFKKIKPEAFEANRFYTVINKKSGEIVPMEVNFNFDDPNLIILPLAFGKRQGREFIWNDLLSLETGSLKLANGRVIEKTLYNRRTRQDEPALFVALTFERREVLDSSNIKPMNLIGVDRGENIPAVIALTDPEGCPLSRFKDSLGNPTHILRIGESYKEKQRTIQAKKEVEQRRAGGYSRKYASKAKNLADDMVRNTARDLLYYAVTQDAMLIFENLSRGFGRQGKRTFMAERQYTRMEDWLTAKLAYEGLPSKTYLSKTLAQYTSKTCSNCGFTITSADYDRVLEKLKKTATGWMTTINGKELKVEGQITYYNRYKRQNVVKDLSVELDRLSEESVNNDISSWTKGRSGEALSLLKKRFSHRPVQEKFVCLNCGFETHADEQAALNIARSWLFLRSQEYKKYQTNKTTGNTDKRAFVETWQSFYRKKLKEVWKPAV

SEQ ID NO: 266 - protein, 978 aa, synthetic construct
  REGION 1..978: note = CasX variant
QEIKRINKIRRRLVKDSNTKKAGKTGPMKTLLVRVMTPDLRERLENLRKKPENIPQPISNTSRANLNKLLTDYTEMKKAILHVYWEEFQKDPVGLMSRVAQPASKKIDQNKLKPEMDEKGNLTTAGFACSQCGQPLFVYKLEQVSEKGKAYTNYFGRCNVAEHEKLILLAQLKPEKDSDEAVTYSLGKFGQRALDFYSIHVTKESTHPVKPLAQIAGNRYASGPVGKALSDACMGTIASFLSKYQDIIIEHQKVVKGNQKRLESLRELAGKENLEYPSVTLPPQPHTKEGVDAYNEVIARVRMWVNLNLWQKLKLSRDDAKPLLRLKKFPSFPLVERQANEVDWWDMVCNVKKLINEKKEDGKVFWQNLAGYKRQEALRPYLSSEEDRKKGKKFARYQLGDLLLHLEKKHGEDWGKVYDEAWERIDKKVEGLSKHIKLEEERRSEDAQSKAALTDWLRAKASFVIEGLKEADKDEFCRCELKLQKWYGDLRGKPFAIEAENSILDISGFSKQYNCAFIWQKDGVKKLNLYLIINYFKGGKLRFKKIKPEAFEANRFYTVINKKSGEIVPMEVNFNFDDPNLIILPLAFGKRQGREFIWNDLLSLETGSLKLANGRVIEKTLYNRRTRQDEPALFVALTFERREVLDSSNIKPMNLIGVDRGENIPAVIALTDPEGCPLSRFKDSLGNPTHILRIGESYKEKQRTIQAKKEVEQRRAGGYSRKYASKAKNLADDMVRNTARDLLYYAVTQDAMLIFENLSRGFGRQGKRTFMAERQYTRMEDWLTAKLAYEGLPSKTYLSKTLAQYTSKTCSNCGFTITSADYDRVLEKLKKTATGWMTTINGKELKVEGQITYYNRYKRQNVVKDLSVELDRLSEESVNNDISSWTKGRSGEALSLLKKRFSHRPVQEKFVCLNCGFETHADEQAALNIARSWLFLRSQEYKKYQTNKTTGNTDKRAFVETWQSFYRKKLKEVWKPAV

SEQ ID NO: 267 - protein, 978 aa, synthetic construct
  REGION 1..978: note = CasX variant
QEIKRINKIRRRLVKDSNTKKAGKTGPMKTLLVRVMTPDLRERLENLRKKPENIPQPISNTSRANLNKLLTDYTEMKKAILHVYWEEFQKDPVGLMSRVAQPASKKIDQNKLKPEMDEKGNLTTAGFACSQCGQPLFVYKLEQVSEKGKAYTNYFGRCNVAEHEKLILLAQLKPEKDSDEAVTYSLGKFGQRALDFYSIHVTKESTHPVKPLAQIAGNRYASGPVGKALSDACMGTIASFLSKYQDIIIEHQKVVKGNQKRLESLRELAGKENLEYPSVTLPPQPHTKEGVDAYNEVIARVRMWVNKNLWQKLKLSRDDAKPLLRLKGFPSFPLVERQANEVDWWDMVCNVKKLINEKKEDGKVFWQNLAGYKRQEALRPYLSSEEDRKKGKKFARYQLGDLLLHLEKKHGEDWGKVYDEAWERIDKKVEGLSKHIKLEEERRSEDAQSKAALTDWLRAKASFVIEGLKEADKDEFCRCELKLQKWYGDLRGKPFAIEAENSILDISGFSKQYNCAFIWQKDGVKKLNLYLIINYFKGGKLRFKKIKPEAFEANRFYTVINKKSGEIVPMEVNFNFDDPNLIILPLAFGKRQGREFIWNDLLSLETGSLKLANGRVIEKTLYNRRTRQDEPALFVALTFERREVLDSSNIKPMNLIGVDRGENIPAVIALTDPEGCPLSRFKDSLGNPTHILRIGESYKEKQRTIQAKKEVEQRRAGGYSRKYASKAKNLADDMVRNTARDLLYYAVTQDAMLIFENLSRGFGRQGKRTFMAERQYTRMEDWLTAKLAYEGLPSKTYLSKTLAQYTSKTCSNCGFTITSADYDRVLEKLKKTATGWMTTINGKELKVEGQITYYNRYKRQNVVKDLSVELDRLSEESVNNDISSWTKGRSGEALSLLKKRFSHRPVQEKFVCLNCGFETHADEQAALNIARSWLFLRSQEYKKYQTNKTTGNTDKRAFVETWQSFYRKKLKEVWKPAV

SEQ ID NO: 268 - protein, 978 aa, synthetic construct
  REGION 1..978: note = CasX variant
QEIKRINKIRRRLVKDSNTKKAGKTGPMKTLLVRVMTPDLRERLENLRKKPENIPQPISNTSRANLNKLLTDYTEMKKAILHVYWEEFQKDPVGLMSRVAQPASKKIDQNKLKPEMDEKGNLTTAGFACSQCGQPLFVYKLEQVSEKGKAYTNYFGRCNVAEHEKLILLAQLKPEKDSDEAVTYSLGKFGQRALDFYSIHVTKESTHPVKPLAQIAGNRYASGPVGKALSDACMGTIASFLSKYQDIIIEHQKVVKGNQKRLESLRELAGKENLEYPSVTLPPQPHTKEGVDAYNEVIARVRRWVNLNLWQKLKLSRDDAKPLLRLKGFPSFPLVERQANEVDWWDMVCNVKKLINEKKEDGKVFWQNLAGYKRQEALRPYLSSEEDRKKGKKFARYQLGDLLLHLEKKHGEDWGKVYDEAWERIDKKVEGLSKHIKLEEERRSEDAQSKAALTDWLRAKASFVIEGLKEADKDEFCRCELKLQKWYGDLRGKPFAIEAENSILDISGFSKQYNCAFIWQKDGVKKLNLYLIINYFKGGKLRFKKIKPEAFEANRFYTVINKKSGEIVPMEVNFNFDDPNLIILPLAFGKRQGREFIWNDLLSLETGSLKLANGRVIEKTLYNRRTRQDEPALFVALTFERREVLDSSNIKPMNLIGVDRGENIPAVIALTDPEGCPLSRFKDSLGNPTHILRIGESYKEKQRTIQAKKEVEQRRAGGYSRKYASKAKNLADDMVRNTARDLLYYAVTQDAMLIFENLSRGFGRQGKRTFMAERQYTRMEDWLTAKLAYEGLPSKTYLSKTLAQYTSKTCSNCGFTITSADYDRVLEKLKKTATGWMTTINGKELKVEGQITYYNRYKRQNVVKDLSVELDRLSEESVNNDISSWTKGRSGEALSLLKKRFSHRPVQEKFVCLNCGFETHADEQAALNIARSWLFLRSQEYKKYQTNKTTGNTDKRAFVETWQSFYRKKLKEVWKPAV

SEQ ID NO: 269 - protein, 978 aa, synthetic construct
  REGION 1..978: note = CasX variant
QEIKRINKIRRRLVKDSNTKKAGKTGPMKTLLVRVMTPDLRERLENLRKKPENIPQPISNTSRANLNKLLTDYTEMKKAILHVYWEEFQKDPVGLMSRVAQPASKKIDQNKLKPEMDEKGNLTTAGFACSQCGQPLFVYKLEQVSEKGKAYTNYFGRCNVAEHEKLILLAQLKPEKDSDEAVTYSLGKFGQRALDFYSIHVTKESTHPVKPLAQIAGNRYASGPVGKALSDACMGTIASFLSKYQDIIIEHQKVVKGNQKRLESLRELAGKENLEYPSVTLPPQPHTKEGVDAYNEVIARVRKWVNLNLWQKLKLSRDDAKPLLRLKGFPSFPLVERQANEVDWWDMVCNVKKLINEKKEDGKVFWQNLAGYKRQEALRPYLSSEEDRKKGKKFARYQLGDLLLHLEKKHGEDWGKVYDEAWERIDKKVEGLSKHIKLEEERRSEDAQSKAALTDWLRAKASFVIEGLKEADKDEFCRCELKLQKWYGDLRGKPFAIEAENSILDISGFSKQYNCAFIWQKDGVKKLNLYLIINYFKGGKLRFKKIKPEAFEANRFYTVINKKSGEIVPMEVNFNFDDPNLIILPLAFGKRQGREFIWNDLLSLETGSLKLANGRVIEKTLYNRRTRQDEPALFVALTFERREVLDSSNIKPMNLIGVDRGENIPAVIALTDPEGCPLSRFKDSLGNPTHILRIGESYKEKQRTIQAKKEVEQRRAGGYSRKYASKAKNLADDMVRNTARDLLYYAVTQDAMLIFENLSRGFGRQGKRTFMAERQYTRMEDWLTAKLAYEGLPSKTYLSKTLAQYTSKTCSNCGFTITSADYDRVLEKLKKTATGWMTTINGKELKVEGQITYYNRYKRQNVVKDLSVELDRLSEESVNNDISSWTKGRSGEALSLLKKRFSHRPVQEKFVCLNCGFETHADEQAALNIARSWLFLRSQEYKKYQTNKTTGNTDKRAFVETWQSFYRKKLKEVWKPAV

SEQ ID NO: 270 - protein, 978 aa, synthetic construct
  REGION 1..978: note = CasX variant
QEIKRINKIRRRLVKDSNTKKAGKTGPMKTLLVRVMTPDLRERLENLRKKPENIPQPISNTSRANLNKLLTDYTEMKKAILHVYWEEFQKDPVGLMSRVAQPASKKIDQNKLKPEMDEKGNLTTAGFACSQCGQPLFVYKLEQVSEKGKAYTNYFGRCNVAEHEKLILLAQLKPEKDSDEAVTYSLGKFGQRALDFYSIHVTKESTHPVKPLAQIAGNRYASGPVGKALSDACMGTIASFLSKYQDIIIEHQKVVKGNQKRLESLRELAGKENLEYPSVTLPPQPHTKEGVDAYNEVIARVRMWVNLNLWQKLKLSRDDAKPLLRLKGFPSFPLVERQANEVDWWDMVCNVKKLINEKKEDGKVFWQNLAGYKRQEALRPYLSSEEDRKKGKKFARYQLGDLLLHLEKKHGEDWGKVYDEAWERIDKKVEGLSKHIKLEEERRSEDAQSKAALTDWLRAKASFVIEGLKEADKDEFRRCELKLQKWYGDLRGKPFAIEAENSILDISGFSKQYNCAFIWQKDGVKKLNLYLIINYFKGGKLRFKKIKPEAFEANRFYTVINKKSGEIVPMEVNFNFDDPNLIILPLAFGKRQGREFIWNDLLSLETGSLKLANGRVIEKTLYNRRTRQDEPALFVALTFERREVLDSSNIKPMNLIGVDRGENIPAVIALTDPEGCPLSRFKDSLGNPTHILRIGESYKEKQRTIQAKKEVEQRRAGGYSRKYASKAKNLADDMVRNTARDLLYYAVTQDAMLIFENLSRGFGRQGKRTFMAERQYTRMEDWLTAKLAYEGLPSKTYLSKTLAQYTSKTCSNCGFTITSADYDRVLEKLKKTATGWMTTINGKELKVEGQITYYNRYKRQNVVKDLSVELDRLSEESVNNDISSWTKGRSGEALSLLKKRFSHRPVQEKFVCLNCGFETHADEQAALNIARSWLFLRSQEYKKYQTNKTTGNTDKRAFVETWQSFYRKKLKEVWKPAV

SEQ ID NO: 271 - protein, 978 aa, synthetic construct
  REGION 1..978: note = CasX variant
QEIKRINKIRRRLVKDSNTKKAGKTGPMKTLLVRVMTPDLRERLENLRKKPENIPQPISNTSRANLNKLLTDYTEMKKAILHVYWEEFQKDPVGLMSRVAQPASKKIDQNKLKPEMDEKGNLTTAGFACSQCGQPLFVYKLEQVSEKGKAYTNYFGRCNVAEHEKLILLAQLKPEKDSDEAVTYSLGKFGQRALDFYSIHVTKESTHPVKPLAQIAGNRYASGPVGKALSDACMGTIASFLSKYQDIIIEHQKVVKGNQKRLESLRELAGKENLEYPSVTLPPQPHTKEGVDAYNEVIARVRMWVNLNLWQKLKLSRDDAKPLLRLKGFPSFPLVERQANEVDWWDMVCNVKKLINEKKEDGKVFWQNLAGYKRQEALRPYLSSEEDRKKGKKFARYQLGDLLLHLEKKHGEDWGKVYDEAWERIDKKVEGLSKHIKLEEERRSEDAQSKAALTDWLRAKASFVIEGLKEADKDEFKRCELKLQKWYGDLRGKPFAIEAENSILDISGFSKQYNCAFIWQKDGVKKLNLYLIINYFKGGKLRFKKIKPEAFEANRFYTVINKKSGEIVPMEVNFNFDDPNLIILPLAFGKRQGREFIWNDLLSLETGSLKLANGRVIEKTLYNRRTRQDEPALFVALTFERREVLDSSNIKPMNLIGVDRGENIPAVIALTDPEGCPLSRFKDSLGNPTHILRIGESYKEKQRTIQAKKEVEQRRAGGYSRKYASKAKNLADDMVRNTARDLLYYAVTQDAMLIFENLSRGFGRQGKRTFMAERQYTRMEDWLTAKLAYEGLPSKTYLSKTLAQYTSKTCSNCGFTITSADYDRVLEKLKKTATGWMTTINGKELKVEGQITYYNRYKRQNVVKDLSVELDRLSEESVNNDISSWTKGRSGEALSLLKKRFSHRPVQEKFVCLNCGFETHADEQAALNIARSWLFLRSQEYKKYQTNKTTGNTDKRAFVETWQSFYRKKLKEVWKPAV

SEQ ID NO: 272 - protein, 978 aa, synthetic construct
  REGION 1..978: note = CasX variant
QEIKRINKIRRRLVKDSNTKKAGKTGPMKTLLVRVMTPDLRERLENLRKKPENIPQPISNTSRANLNKLLTDYTEMKKAILHVYWEEFQKDPVGLMSRVAQPASKKIDQNKLKPEMDEKGNLTTAGFACSQCGQPLFVYKLEQVSEKGKAYTNYFGRCNVAEHEKLILLAQLKPEKDSDEAVTYSLGKFGQRALDFYSIHVTKESTHPVKPLAQIAGNRYASGPVGKALSDACMGTIASFLSKYQDIIIEHQKVVKGNQKRLESLRELAGKENLEYPSVTLPPQPHTKEGVDAYNEVIARVRMWVNLNLWQKLKLSRDDAKPLLRLKGFPSFPLVERQANEVDWWDMVCNVKKLINEKKEDGKVFWQNLAGYKRQEALRPYLSSEEDRKKGKKFARYQLGDLLLHLEKKHGEDWGKVYDEAWERIDKKVEGLSKHIKLEEERRSEDAQSKAALTDWLRAKASFVIEGLKEADKDEFCRCELKLQKWYGDLRGKPFAIEAENSILDISGFSKQYNCAFIWQKDGVKKLNLYLIINYFKGGKLRFKKIKPEAFEANRFYTVINKKSGEIVPMEVNFNFDDPNLIILPLAFGKRQGREFIWNDLLSLETGSLKLANGRVIEKTLYNRRTRQDEPALFVALTFERREVLDSSNIKPMNLIGVDRGENIPAVIALTDPEGCPLSRFKDSLGNPTHILRIGERYKEKQRTIQAKKEVEQRRAGGYSRKYASKAKNLADDMVRNTARDLLYYAVTQDAMLIFENLSRGFGRQGKRTFMAERQYTRMEDWLTAKLAYEGLPSKTYLSKTLAQYTSKTCSNCGFTITSADYDRVLEKLKKTATGWMTTINGKELKVEGQITYYNRYKRQNVVKDLSVELDRLSEESVNNDISSWTKGRSGEALSLLKKRFSHRPVQEKFVCLNCGFETHADEQAALNIARSWLFLRSQEYKKYQTNKTTGNTDKRAFVETWQSFYRKKLKEVWKPAV

SEQ ID NO: 273 - protein, 978 aa, synthetic construct
  REGION 1..978: note = CasX variant
QEIKRINKIRRRLVKDSNTKKAGKTGPMKTLLVRVMTPDLRERLENLRKKPENIPQPISNTSRANLNKLLTDYTEMKKAILHVYWEEFQKDPVGLMSRVAQPASKKIDQNKLKPEMDEKGNLTTAGFACSQCGQPLFVYKLEQVSEKGKAYTNYFGRCNVAEHEKLILLAQLKPEKDSDEAVTYSLGKFGQRALDFYSIHVTKESTHPVKPLAQIAGNRYASGPVGKALSDACMGTIASFLSKYQDIIIEHQKVVKGNQKRLESLRELAGKENLEYPSVTLPPQPHTKEGVDAYNEVIARVRMWVNLNLWQKLKLSRDDAKPLLRLKGFPSFPLVERQANEVDWWDMVCNVKKLINEKKEDGKVFWQNLAGYKRQEALRPYLSSEEDRKKGKKFARYQLGDLLLHLEKKHGEDWGKVYDEAWERIDKKVEGLSKHIKLEEERRSEDAQSKAALTDWLRAKASFVIEGLKEADKDEFCRCELKLQKWYGDLRGKPFAIEAENSILDISGFSKQYNCAFIWQKDGVKKLNLYLIINYFKGGKLRFKKIKPEAFEANRFYTVINKKSGEIVPMEVNFNFDDPNLIILPLAFGKRQGREFIWNDLLSLETGSLKLANGRVIEKTLYNRRTRQDEPALFVALTFERREVLDSSNIKPMNLIGVDRGENIPAVIALTDPEGCPLSRFKDSLGNPTHILRIGEKYKEKQRTIQAKKEVEQRRAGGYSRKYASKAKNLADDMVRNTARDLLYYAVTQDAMLIFENLSRGFGRQGKRTFMAERQYTRMEDWLTAKLAYEGLPSKTYLSKTLAQYTSKTCSNCGFTITSADYDRVLEKLKKTATGWMTTINGKELKVEGQITYYNRYKRQNVVKDLSVELDRLSEESVNNDISSWTKGRSGEALSLLKKRFSHRPVQEKFVCLNCGFETHADEQAALNIARSWLFLRSQEYKKYQTNKTTGNTDKRAFVETWQSFYRKKLKEVWKPAV

SEQ ID NO: 274 - protein, 977 aa, synthetic construct
  REGION 1..977: note = CasX variant
QEIKRINKIRRRLVKDSNTKKAGKTGPMKTLLVRVMTPDLRERLENLRKKPENIPQPISNTSRANLNKLLTDYTEMKKAILHVYWEEFQKDPVGLMSRVAQPASKKIDQNKLKPEMDEKGNLTTAGFACSQCGQPLFVYKLEQVSEKGKAYTNYFGRCNVAEHEKLILLAQLKPEKDSDEAVTYSLGKFGQRALDFYSIHVTKESTHPVKPLAQIAGNRYASGPVGKALSDACMGTIASFLSKYQDIIIEHQKVVKGNQKRLESLRELAGKENLEYPSVTLPPQPHTKEGVDAYNEVIARVRMWVNLNLWQKLKLSRDDAKPLLRLKGFPSFPLVERQANEVDWWDMVCNVKKLINEKKEDGKVFWQNLAGYKRQEALRPYLSSEEDRKKGKKFARYQLGDLLLHLEKKHGEDWGKVYDEAWERIDKKVEGLSKHIKLEEERRSEDAQSKAALTDWLRAKASFVIEGLKEADKDEFCRCELKLQKWYGDLRGKPFAIEAENILDISGFSKQYNCAFIWQKDGVKKLNLYLIINYFKGGKLRFKKIKPEAFEANRFYTVINKKSGEIVPMEVNFNFDDPNLIILPLAFGKRQGREFIWNDLLSLETGSLKLANGRVIEKTLYNRRTRQDEPALFVALTFERREVLDSSNIKPMNLIGVDRGENIPAVIALTDPEGCPLSRFKDSLGNPTHILRIGESYKEKQRTIQAKKEVEQRRAGGYSRKYASKAKNLADDMVRNTARDLLYYAVTQDAMLIFENLSRGFGRQGKRTFMAERQYTRMEDWLTAKLAYEGLPSKTYLSKTLAQYTSKTCSNCGFTITSADYDRVLEKLKKTATGWMTTINGKELKVEGQITYYNRYKRQNVVKDLSVELDRLSEESVNNDISSWTKGRSGEALSLLKKRFSHRPVQEKFVCLNCGFETHADEQAALNIARSWLFLRSQEYKKYQTNKTTGNTDKRAFVETWQSFYRKKLKEVWKPAV

SEQ ID NO: 275 - protein, 977 aa, synthetic construct
  REGION 1..977: note = CasX variant
QEIKRINKIRRRLVKDSNTKKAGKTGPMKTLLVRVMTPDLRERLENLRKKPENIPQPISNTSRANLNKLLTDYTEMKKAILHVYWEEFQKDPVGLMSRVAQPASKKIDQNKLKPEMDEKGNLTTAGFACSQCGQPLFVYKLEQVSEKGKAYTNYFGRCNVAEHEKLILLAQLKPEKDSDEAVTYSLGKFGQRALDFYSIHVTKESTHPVKPLAQIAGNRYASGPVGKALSDACMGTIASFLSKYQDIIIEHQKVVKGNQKRLESLRELAGKENLEYPSVTLPPQPHTKEGVDAYNEVIARVRMWVNLNLWQKLKLSRDDAKPLLRLKGFPSFPLVERQANEVDWWDMVCNVKKLINEKKEDGKVFWQNLAGYKRQEALRPYLSSEEDRKKGKKFARYQLGDLLLHLEKKHGEDWGKVYDEAWERIDKKVEGLSKHIKLEEERRSEDAQSKAALTDWLRAKASFVIEGLKEADKDEFCRCELKLQKWYGDLRGKPFAIEAENSIDISGFSKQYNCAFIWQKDGVKKLNLYLIINYFKGGKLRFKKIKPEAFEANRFYTVINKKSGEIVPMEVNFNFDDPNLIILPLAFGKRQGREFIWNDLLSLETGSLKLANGRVIEKTLYNRRTRQDEPALFVALTFERREVLDSSNIKPMNLIGVDRGENIPAVIALTDPEGCPLSRFKDSLGNPTHILRIGESYKEKQRTIQAKKEVEQRRAGGYSRKYASKAKNLADDMVRNTARDLLYYAVTQDAMLIFENLSRGFGRQGKRTFMAERQYTRMEDWLTAKLAYEGLPSKTYLSKTLAQYTSKTCSNCGFTITSADYDRVLEKLKKTATGWMTTINGKELKVEGQITYYNRYKRQNVVKDLSVELDRLSEESVNNDISSWTKGRSGEALSLLKKRFSHRPVQEKFVCLNCGFETHADEQAALNIARSWLFLRSQEYKKYQTNKTTGNTDKRAFVETWQSFYRKKLKEVWKPAV

SEQ ID NO: 276 - protein, 978 aa, synthetic construct
  REGION 1..978: note = CasX variant
QEIKRINKIRRRLVKDSNTKKAGKTGPMKTLLVRVMTPDLRERLENLRKKPENIPQPISNTSRANLNKLLTDYTEMKKAILHVYWEEFQKDPVGLMSRVAQPASKKIDQNKLKPEMDEKGNLTTAGFACSQCGQPLFVYKLEQVSEKGKAYTNYFGRCNVAEHEKLILLAQLKPEKDSDEAVTYSLGKFGQRALDFYSIHVTKESTHPVKPLAQIAGNRYASGPVGKALSDACMGTIASFLSKYQDIIIEHQKVVKGNQKRLESLRELAGKENLEYPSVTLPPQPHTKEGVDAYNEVIARVRMWVNLNLWQKLKLSRDDAKPLLRLKGFPSFPLVERQANEVDWWDMVCNVKKLINEKKEDGKVFWQNLAGYKRQEALRPYLSSEEDRKKGKKFARYQLGDLLLHLEKKHGEDWGKVYDEAWERIDKKVEGLSKHIKLEEERRSEDAQSKAALTDWLRAKASFVIEGLKEADKDEFCRCELKLQKWYGDLRGKPFAIEAENSRLDISGFSKQYNCAFIWQKDGVKKLNLYLIINYFKGGKLRFKKIKPEAFEANRFYTVINKKSGEIVPMEVNFNFDDPNLIILPLAFGKRQGREFIWNDLLSLETGSLKLANGRVIEKTLYNRRTRQDEPALFVALTFERREVLDSSNIKPMNLIGVDRGENIPAVIALTDPEGCPLSRFKDSLGNPTHILRIGESYKEKQRTIQAKKEVEQRRAGGYSRKYASKAKNLADDMVRNTARDLLYYAVTQDAMLIFENLSRGFGRQGKRTFMAERQYTRMEDWLTAKLAYEGLPSKTYLSKTLAQYTSKTCSNCGFTITSADYDRVLEKLKKTATGWMTTINGKELKVEGQITYYNRYKRQNVVKDLSVELDRLSEESVNNDISSWTKGRSGEALSLLKKRFSHRPVQEKFVCLNCGFETHADEQAALNIARSWLFLRSQEYKKYQTNKTTGNTDKRAFVETWQSFYRKKLKEVWKPAV

SEQ ID NO: 277 - protein, 978 aa, synthetic construct
  REGION 1..978: note = CasX variant
QEIKRINKIRRRLVKDSNTKKAGKTGPMKTLLVRVMTPDLRERLENLRKKPENIPQPISNTSRANLNKLLTDYTEMKKAILHVYWEEFQKDPVGLMSRVAQPASKKIDQNKLKPEMDEKGNLTTAGFACSQCGQPLFVYKLEQVSEKGKAYTNYFGRCNVAEHEKLILLAQLKPEKDSDEAVTYSLGKFGQRALDFYSIHVTKESTHPVKPLAQIAGNRYASGPVGKALSDACMGTIASFLSKYQDIIIEHQKVVKGNQKRLESLRELAGKENLEYPSVTLPPQPHTKEGVDAYNEVIARVRMWVNLNLWQKLKLSRDDAKPLLRLKGFPSFPLVERQANEVDWWDMVCNVKKLINEKKEDGKVFWQNLAGYKRQEALRPYLSSEEDRKKGKKFARYQLGDLLLHLEKKHGEDWGKVYDEAWERIDKKVEGLSKHIKLEEERRSEDAQSKAALTDWLRAKASFVIEGLKEADKDEFCRCELKLQKWYGDLRGKPFAIEAENSKLDISGFSKQYNCAFIWQKDGVKKLNLYLIINYFKGGKLRFKKIKPEAFEANRFYTVINKKSGEIVPMEVNFNFDDPNLIILPLAFGKRQGREFIWNDLLSLETGSLKLANGRVIEKTLYNRRTRQDEPALFVALTFERREVLDSSNIKPMNLIGVDRGENIPAVIALTDPEGCPLSRFKDSLGNPTHILRIGESYKEKQRTIQAKKEVEQRRAGGYSRKYASKAKNLADDMVRNTARDLLYYAVTQDAMLIFENLSRGFGRQGKRTFMAERQYTRMEDWLTAKLAYEGLPSKTYLSKTLAQYTSKTCSNCGFTITSADYDRVLEKLKKTATGWMTTINGKELKVEGQITYYNRYKRQNVVKDLSVELDRLSEESVNNDISSWTKGRSGEALSLLKKRFSHRPVQEKFVCLNCGFETHADEQAALNIARSWLFLRSQEYKKYQTNKTTGNTDKRAFVETWQSFYRKKLKEVWKPAV

SEQ ID NO: 278 - protein, 978 aa, synthetic construct
  REGION 1..978: note = CasX variant
QEIKRINKIRRRLVKDSNTKKAGKTGPMKTLLVRVMTPDLRERLENLRKKPENIPQPISNTSRANLNKLLTDYTEMKKAILHVYWEEFQKDPVGLMSRVAQPASKKIDQNKLKPEMDEKGNLTTAGFACSQCGQPLFVYKLEQVSEKGKAYTNYFGRCNVAEHEKLILLAQLKPEKDSDEAVTYSLGKFGQRALDFYSIHVTKESTHPVKPLAQIAGNRYASGPVGKALSDACMGTIASFLSKYQDIIIEHQKVVKGNQKRLESLRELAGKENLEYPSVTLPPQPHTKEGVDAYNEVIARVRMWVNLNLWQKLKLSRDDAKPLLRLKGFPSFPLVERQANEVDWWDMVCNVKKLINEKKEDGKVFWQNLAGYKRQEALRPYLSSEEDRKKGKKFARYQLGDLLLHLEKKHGEDWGKVYDEAWERIDKKVEGLSKHIKLEEERRSEDAQSKAALTDWLRAKASFVIEGLKEADKDEFCRCELKLQKWYGDLRGKPFAIEAENSILDISGFSKQYNCAFIWQKDGVKKLNLYLIINYFKGGKLRFKKIKPEAFEANRFYTVINKKSGEIVPMEVNFNFDDPNLIILPLAFGKRQGREFIWNDLLSLETGSLQLANGRVIEKTLYNRRTRQDEPALFVALTFERREVLDSSNIKPMNLIGVDRGENIPAVIALTDPEGCPLSRFKDSLGNPTHILRIGESYKEKQRTIQAKKEVEQRRAGGYSRKYASKAKNLADDMVRNTARDLLYYAVTQDAMLIFENLSRGFGRQGKRTFMAERQYTRMEDWLTAKLAYEGLPSKTYLSKTLAQYTSKTCSNCGFTITSADYDRVLEKLKKTATGWMTTINGKELKVEGQITYYNRYKRQNVVKDLSVELDRLSEESVNNDISSWTKGRSGEALSLLKKRFSHRPVQEKFVCLNCGFETHADEQAALNIARSWLFLRSQEYKKYQTNKTTGNTDKRAFVETWQSFYRKKLKEVWKPAV

SEQ ID NO: 279 - protein, 978 aa, synthetic construct
  REGION 1..978: note = CasX variant
QEIKRINKIRRRLVKDSNTKKAGKTGPMKTLLVRVMTPDLRERLENLRKKPENIPQPISNTSRANLNKLLTDYTEMKKAILHVYWEEFQKDPVGLMSRVAQPASKKIDQNKLKPEMDEKGNLTTAGFACSQCGQPLFVYKLEQVSEKGKAYTNYFGRCNVAEHEKLILLAQLKPEKDSDEAVTYSLGKFGQRALDFYSIHVTKESTHPVKPLAQIAGNRYASGPVGKALSDACMGTIASFLSKYQDIIIEHQKVVKGNQKRLESLRELAGKENLEYPSVTLPPQPHTKEGVDAYNEVIARVRMWVNLNLWQKLKLSRDDAKPLLRLKGFPSFPLVERQANEVDWWDMVCNVKKLINEKKEDGKVFWQNLAGYKRQEALRPYLSSEEDRKKGKKFARYQLGDLLLHLEKKHGEDWGKVYDEAWERIDKKVEGLSKHIKLEEERRSEDAQSKAALTDWLRAKASFVIEGLKEADKDEFCRCELKLQKWYGDLRGKPFAIEAENSILDISGFSKQYNCAFIWQKDGVKKLNLYLIINYFKGGKLRFKKIKPEAFEANRFYTVINKKSGEIVPMEVNFNFDDPNLIILPLAFGKRQGREFIWNDLLSLETGSLKLANGQVIEKTLYNRRTRQDEPALFVALTFERREVLDSSNIKPMNLIGVDRGENIPAVIALTDPEGCPLSRFKDSLGNPTHILRIGESYKEKQRTIQAKKEVEQRRAGGYSRKYASKAKNLADDMVRNTARDLLYYAVTQDAMLIFENLSRGFGRQGKRTFMAERQYTRMEDWLTAKLAYEGLPSKTYLSKTLAQYTSKTCSNCGFTITSADYDRVLEKLKKTATGWMTTINGKELKVEGQITYYNRYKRQNVVKDLSVELDRLSEESVNNDISSWTKGRSGEALSLLKKRFSHRPVQEKFVCLNCGFETHADEQAALNIARSWLFLRSQEYKKYQTNKTTGNTDKRAFVETWQSFYRKKLKEVWKPAV

SEQ ID NO: 280 - protein, 978 aa, synthetic construct
  REGION 1..978: note = CasX variant
QEIKRINKIRRRLVKDSNTKKAGKTGPMKTLLVRVMTPDLRERLENLRKKPENIPQPISNTSRANLNKLLTDYTEMKKAILHVYWEEFQKDPVGLMSRVAQPASKKIDQNKLKPEMDEKGNLTTAGFACSQCGQPLFVYKLEQVSEKGKATTNYFGRCNVAEHEKLILLAQLKPEKDSDEAVTYSLGKFGQRALDFYSIHVTKESTHPVKPLAQIAGNRYASGPVGKALSDACMGTIASFLSKYQDIIIEHQKVVKGNQKRLESLRELAGKENLEYPSVTLPPQPHTKEGVDAYNEVIARVRMWVNLNLWQKLKLSRDDAKPLLRLKGFPSFPLVERQANEVDWWDMVCNVKKLINEKKEDGKVFWQNLAGYKRQEALRPYLSSEEDRKKGKKFARYQLGDLLLHLEKKHGEDWGKVYDEAWERIDKKVEGLSKHIKLEEERRSEDAQSKAALTDWLRAKASFVIEGLKEADKDEFCRCELKLQKWYGDLRGKPFAIEAENSILDISGFSKQYNCAFIWQKDGVKKLNLYLIINYFKGGKLRFKKIKPEAFEANRFYTVINKKSGEIVPMEVNFNFDDPNLIILPLAFGKRQGREFIWNDLLSLETGSLKLANGRVIEKTLYNRRTRQDEPALFVALTFERREVLDSSNIKPMNLIGVDRGENIPAVIALTDPEGCPLSRFKDSLGNPTHILRIGESYKEKQRTIQAKKEVEQRRAGGYSRKYASKAKNLADDMVRNTARDLLYYAVTQDAMLIFENLSRGFGRQGKRTFMAERQYTRMEDWLTAKLAYEGLPSKTYLSKTLAQYTSKTCSNCGFTITSADYDRVLEKLKKTATGWMTTINGKELKVEGQITYYNRYKRQNVVKDLSVELDRLSEESVNNDISSWTKGRSGEALSLLKKRFSHRPVQEKFVCLNCGFETHADEQAALNIARSWLFLRSQEYKKYQTNKTTGNTDKRAFVETWQSFYRKKLKEVWKPAV

SEQ ID NO: 281 - protein, 978 aa, synthetic construct
  REGION 1..978: note = CasX variant
QEIKRINKIRRRLVKDSNTKKAGKTGPMKTLLVRVMTPDLRERLENLRKKPENIPQPISNTSRANLNKLLTDYTEMKKAILHVYWEEFQKDPVGLMSRVAQPASKKIDQNKLKPEMDEKGNLTTAGFACSQCGQPLFVYKLEQVSEKGKAYTNYFGRCNVAEHEKLILLAQLKPEKDSDEAVTYSLGQFGQRALDFYSIHVTKESTHPVKPLAQIAGNRYASGPVGKALSDACMGTIASFLSKYQDIIIEHQKVVKGNQKRLESLRELAGKENLEYPSVTLPPQPHTKEGVDAYNEVIARVRMWVNLNLWQKLKLSRDDAKPLLRLKGFPSFPLVERQANEVDWWDMVCNVKKLINEKKEDGKVFWQNLAGYKRQEALRPYLSSEEDRKKGKKFARYQLGDLLLHLEKKHGEDWGKVYDEAWERIDKKVEGLSKHIKLEEERRSEDAQSKAALTDWLRAKASFVIEGLKEADKDEFCRCELKLQKWYGDLRGKPFAIEAENSILDISGFSKQYNCAFIWQKDGVKKLNLYLIINYFKGGKLRFKKIKPEAFEANRFYTVINKKSGEIVPMEVNFNFDDPNLIILPLAFGKRQGREFIWNDLLSLETGSLKLANGRVIEKTLYNRRTRQDEPALFVALTFERREVLDSSNIKPMNLIGVDRGENIPAVIALTDPEGCPLSRFKDSLGNPTHILRIGESYKEKQRTIQAKKEVEQRRAGGYSRKYASKAKNLADDMVRNTARDLLYYAVTQDAMLIFENLSRGFGRQGKRTFMAERQYTRMEDWLTAKLAYEGLPSKTYLSKTLAQYTSKTCSNCGFTITSADYDRVLEKLKKTATGWMTTINGKELKVEGQITYYNRYKRQNVVKDLSVELDRLSEESVNNDISSWTKGRSGEALSLLKKRFSHRPVQEKFVCLNCGFETHADEQAALNIARSWLFLRSQEYKKYQTNKTTGNTDKRAFVETWQSFYRKKLKEVWKPAV

SEQ ID NO: 282 - protein, 978 aa, synthetic construct
  REGION 1..978: note = CasX variant
QEIKRINKIRRRLVKDSNTKKAGKTGPMKTLLVRVMTPDLRERLENLRKKPENIPQPISNTSRANLNKLLTDYTEMKKAILHVYWEEFQKDPVGLMSRVAQPASKKIDQNKLKPEMDEKGNLTTAGFACSQCGQPLFVYKLEQVSEKGKAYTNYFGRCNVAEHEKLILLAQLKPEKDSDEAVTYSLGKFQQRALDFYSIHVTKESTHPVKPLAQIAGNRYASGPVGKALSDACMGTIASFLSKYQDIIIEHQKVVKGNQKRLESLRELAGKENLEYPSVTLPPQPHTKEGVDAYNEVIARVRMWVNLNLWQKLKLSRDDAKPLLRLKGFPSFPLVERQANEVDWWDMVCNVKKLINEKKEDGKVFWQNLAGYKRQEALRPYLSSEEDRKKGKKFARYQLGDLLLHLEKKHGEDWGKVYDEAWERIDKKVEGLSKHIKLEEERRSEDAQSKAALTDWLRAKASFVIEGLKEADKDEFCRCELKLQKWYGDLRGKPFAIEAENSILDISGFSKQYNCAFIWQKDGVKKLNLYLIINYFKGGKLRFKKIKPEAFEANRFYTVINKKSGEIVPMEVNFNFDDPNLIILPLAFGKRQGREFIWNDLLSLETGSLKLANGRVIEKTLYNRRTRQDEPALFVALTFERREVLDSSNIKPMNLIGVDRGENIPAVIALTDPEGCPLSRFKDSLGNPTHILRIGESYKEKQRTIQAKKEVEQRRAGGYSRKYASKAKNLADDMVRNTARDLLYYAVTQDAMLIFENLSRGFGRQGKRTFMAERQYTRMEDWLTAKLAYEGLPSKTYLSKTLAQYTSKTCSNCGFTITSADYDRVLEKLKKTATGWMTTINGKELKVEGQITYYNRYKRQNVVKDLSVELDRLSEESVNNDISSWTKGRSGEALSLLKKRFSHRPVQEKFVCLNCGFETHADEQAALNIARSWLFLRSQEYKKYQTNKTTGNTDKRAFVETWQSFYRKKLKEVWKPAV

SEQ ID NO: 283 - protein, 978 aa, synthetic construct
  REGION 1..978: note = CasX variant
QEIKRINKIRRRLVKDSNTKKAGKTGPMKTLLVRVMTPDLRERLENLRKKPENIPQPISNTSRANLNKLLTDYTEMKKAILHVYAEEFQKDPVGLMSRVAQPASKKIDQNKLKPEMDEKGNLTTAGFACSQCGQPLFVYKLEQVSEKGKAYTNYFGRCNVAEHEKLILLAQLKPEKDSDEAVTYSLGKFGQRALDFYSIHVTKESTHPVKPLAQIAGNRYASGPVGKALSDACMGTIASFLSKYQDIIIEHQKVVKGNQKRLESLRELAGKENLEYPSVTLPPQPHTKEGVDAYNEVIARVRMWVNLNLWQKLKLSRDDAKPLLRLKGFPSFPLVERQANEVDWWDMVCNVKKLINEKKEDGKVFWQNLAGYKRQEALRPYLSSEEDRKKGKKFARYQLGDLLLHLEKKHGEDWGKVYDEAWERIDKKVEGLSKHIKLEEERRSEDAQSKAALTDWLRAKASFVIEGLKEADKDEFCRCELKLQKWYGDLRGKPFAIEAENSILDISGFSKQYNCAFIWQKDGVKKLNLYLIINYFKGGKLRFKKIKPEAFEANRFYTVINKKSGEIVPMEVNFNFDDPNLIILPLAFGKRQGREFIWNDLLSLETGSLKLANGRVIEKTLYNRRTRQDEPALFVALTFERREVLDSSNIKPMNLIGVDRGENIPAVIALTDPEGCPLSRFKDSLGNPTHILRIGESYKEKQRTIQAKKEVEQRRAGGYSRKYASKAKNLADDMVRNTARDLLYYAVTQDAMLIFENLSRGFGRQGKRTFMAERQYTRMEDWLTAKLAYEGLPSKTYLSKTLAQYTSKTCSNCGFTITSADYDRVLEKLKKTATGWMTTINGKELKVEGQITYYNRYKRQNVVKDLSVELDRLSEESVNNDISSWTKGRSGEALSLLKKRFSHRPVQEKFVCLNCGFETHADEQAALNIARSWLFLRSQEYKKYQTNKTTGNTDKRAFVETWQSFYRKKLKEVWKPAV

SEQ ID NO: 284 - protein, 978 aa, synthetic construct
  REGION 1..978: note = CasX variant
QEIKPINKIRRRLVKDSNTKKAGKTGPMKTLLVRVMTPDLRERLENLRKKPENIPQPISNTSRANLNKLLTDYTEMKKAILHVYWEEFQKDPVGLMSRVAQPASKKIDQNKLKPEMDEKGNLTTAGFACSQCGQPLFVYKLEQVSEKGKAYTNYFGRCNVAEHEKLILLAQLKPEKDSDEAVTYSLGKFGQRALDFYSIHVTKESTHPVKPLAQIAGNRYASGPVGKALSDACMGTIASFLSKYQDIIIEHQKVVKGNQKRLESLRELAGKENLEYPSVTLPPQPHTKEGVDAYNEVIARVRMWVNLNLWQKLKLSRDDAKPLLRLKGFPSFPLVERQANEVDWWDMVCNVKKLINEKKEDGKVFWQNLAGYKRQEALRPYLSSEEDRKKGKKFARYQLGDLLLHLEKKHGEDWGKVYDEAWERIDKKVEGLSKHIKLEEERRSEDAQSKAALTDWLRAKASFVIEGLKEADKDEFCRCELKLQKWYGDLRGKPFAIEAENSILDISGFSKQYNCAFIWQKDGVKKLNLYLIINYFKGGKLRFKKIKPEAFEANRFYTVINKKSGEIVPMEVNFNFDDPNLIILPLAFGKRQGREFIWNDLLSLETGSLKLANGRVIEKTLYNRRTRQDEPALFVALTFERREVLDSSNIKPMNLIGVDRGENIPAVIALTDPEGCPLSRFKDSLGNPTHILRIGESYKEKQRTIQAKKEVEQRRAGGYSRKYASKAKNLADDMVRNTARDLLYYAVTQDAMLIFENLSRGFGRQGKRTFMAERQYTRMEDWLTAKLAYEGLPSKTYLSKTLAQYTSKTCSNCGFTITSADYDRVLEKLKKTATGWMTTINGKELKVEGQITYYNRYKRQNVVKDLSVELDRLSEESVNNDISSWTKGRSGEALSLLKKRFSHRPVQEKFVCLNCGFETHADEQAALNIARSWLFLRSQEYKKYQTNKTTGNTDKRAFVETWQSFYRKKLKEVWKPAV

SEQ ID NO: 285 - protein, 978 aa, synthetic construct
  REGION 1..978: note = CasX variant
QEIWRINKIRRRLVKDSNTKKAGKTGPMKTLLVRVMTPDLRERLENLRKKPENIPQPISNTSRANLNKLLTDYTEMKKAILHVYWEEFQKDPVGLMSRVAQPASKKIDQNKLKPEMDEKGNLTTAGFACSQCGQPLFVYKLEQVSEKGKAYTNYFGRCNVAEHEKLILLAQLKPEKDSDEAVTYSLGKFGQRALDFYSIHVTKESTHPVKPLAQIAGNRYASGPVGKALSDACMGTIASFLSKYQDIIIEHQKVVKGNQKRLESLRELAGKENLEYPSVTLPPQPHTKEGVDAYNEVIARVRMWVNLNLWQKLKLSRDDAKPLLRLKGFPSFPLVERQANEVDWWDMVCNVKKLINEKKEDGKVFWQNLAGYKRQEALRPYLSSEEDRKKGKKFARYQLGDLLLHLEKKHGEDWGKVYDEAWERIDKKVEGLSKHIKLEEERRSEDAQSKAALTDWLRAKASFVIEGLKEADKDEFCRCELKLQKWYGDLRGKPFAIEAENSILDISGFSKQYNCAFIWQKDGVKKLNLYLIINYFKGGKLRFKKIKPEAFEANRFYTVINKKSGEIVPMEVNFNFDDPNLIILPLAFGKRQGREFIWNDLLSLETGSLKLANGRVIEKTLYNRRTRQDEPALFVALTFERREVLDSSNIKPMNLIGVDRGENIPAVIALTDPEGCPLSRFKDSLGNPTHILRIGESYKEKQRTIQAKKEVEQRRAGGYSRKYASKAKNLADDMVRNTARDLLYYAVTQDAMLIFENLSRGFGRQGKRTFMAERQYTRMEDWLTAKLAYEGLPSKTYLSKTLAQYTSKTCSNCGFTITSADYDRVLEKLKKTATGWMTTINGKELKVEGQITYYNRYKRQNVVKDLSVELDRLSEESVNNDISSWTKGRSGEALSLLKKRFSHRPVQEKFVCLNCGFETHADEQAALNIARSWLFLRSQEYKKYQTNKTTGNTDKRAFVETWQSFYRKKLKEVWKPAV

SEQ ID NO: 286 - protein, 978 aa, synthetic construct
  REGION 1..978: note = CasX variant
QEIKRINKIRRRLVKDSNTKKAGKTGPMKTLLVRVMTPDLRERLENLRKKPENIPPPISNTSRANLNKLLTDYTEMKKAILHVYWEEFQKDPVGLMSRVAQPASKKIDQNKLKPEMDEKGNLTTAGFACSQCGQPLFVYKLEQVSEKGKAYTNYFGRCNVAEHEKLILLAQLKPEKDSDEAVTYSLGKFGQRALDFYSIHVTKESTHPVKPLAQIAGNRYASGPVGKALSDACMGTIASFLSKYQDIIIEHQKVVKGNQKRLESLRELAGKENLEYPSVTLPPQPHTKEGVDAYNEVIARVRMWVNLNLWQKLKLSRDDAKPLLRLKGFPSFPLVERQANEVDWWDMVCNVKKLINEKKEDGKVFWQNLAGYKRQEALRPYLSSEEDRKKGKKFARYQLGDLLLHLEKKHGEDWGKVYDEAWERIDKKVEGLSKHIKLEEERRSEDAQSKAALTDWLRAKASFVIEGLKEADKDEFCRCELKLQKWYGDLRGKPFAIEAENSILDISGFSKQYNCAFIWQKDGVKKLNLYLIINYFKGGKLRFKKIKPEAFEANRFYTVINKKSGEIVPMEVNFNFDDPNLIILPLAFGKRQGREFIWNDLLSLETGSLKLANGRVIEKTLYNRRTRQDEPALFVALTFERREVLDSSNIKPMNLIGVDRGENIPAVIALTDPEGCPLSRFKDSLGNPTHILRIGESYKEKQRTIQAKKEVEQRRAGGYSRKYASKAKNLADDMVRNTARDLLYYAVTQDAMLIFENLSRGFGRQGKRTFMAERQYTRMEDWLTAKLAYEGLPSKTYLSKTLAQYTSKTCSNCGFTITSADYDRVLEKLKKTATGWMTTINGKELKVEGQITYYNRYKRQNVVKDLSVELDRLSEESVNNDISSWTKGRSGEALSLLKKRFSHRPVQEKFVCLNCGFETHADEQAALNIARSWLFLRSQEYKKYQTNKTTGNTDKRAFVETWQSFYRKKLKEVWKPAV

SEQ ID NO: 287 - protein, 979 aa, synthetic construct
  REGION 1..978: note = CasX variant
QEIKRINKIRRRLVKDSNTKKAGKTGPMKTLLVRVMTPDLRERLENLRKKPENIPQPISNTSRANLNKLLTDYTEMKKAILHVYWEEFQKDPVGLMSRVAQPASKKIDQNKLKPEMDEKGNLTTAGFACSQCGQPLFVYKLEQVSEKGKAYTNYFGRCNVAEHEKLILLAQLKPEKDSDEAVTYSLGKFGQRALDFYSIHVTKESTHPVKPLAQIAGNRYASGPVGKALSDACMGTIASFLSKYQDIIIEHQKVVKGNQKRLESLRELAGKENLEYPSVTLPPQPHTKEGVDAYNEVIARVRMWVNLNLWQKLKLSRDDAKPLLRLKGFPSFPLVERQANEVDWWDMVCNVKKLINEKKEDGKVFWQNLAGYKRQEALRPYLSSEEDRKKGKKFARYQLGDLLLHLEKKHGEDWGKVYDEAWERIDKKVEGLSKHIKLEEERRSEDAQSKAALTDWLRAKASFVIEGLKEADKDEFCRCELKLQKWYGDLRGKPFAIEAENSILDISGFSKQYNCAFIWQKDGVKKLNLYLIINYFKGGKLRFKKIKPEAFEANRFYTVINKKSGEIVPMEVNFNFDDPNLIILPLAFGKRQGREFIWNDLLSLETGSLKLANGRVIEKTLYNRRTRQDEPALFVALTFERAREVLDSSNIKPMNLIGVDRGENIPAVIALTDPEGCPLSRFKDSLGNPTHILRIGESYKEKQRTIQAKKEVEQRRAGGYSRKYASKAKNLADDMVRNTARDLLYYAVTQDAMLIFENLSRGFGRQGKRTFMAERQYTRMEDWLTAKLAYEGLPSKTYLSKTLAQYTSKTCSNCGFTITSADYDRVLEKLKKTATGWMTTINGKELKVEGQITYYNRYKRQNVVKDLSVELDRLSEESVNNDISSWTKGRSGEALSLLKKRFSHRPVQEKFVCLNCGFETHADEQAALNIARSWLFLRSQEYKKYQTNKTTGNTDKRAFVETWQSFYRKKLKEVWKPAV

SEQ ID NO: 288 - protein, 978 aa, synthetic construct
  REGION 1..978: note = CasX variant
QEIKRINKIRRRLVKDSNTKKAGKTGPMKTLLVRVMTPDLRERLENLRKKPENIPQPISNTSRANLNKLLTDYTEMKKAILHVYWEEFQKDPVGLMSRVAQPASKKIDQNKLKPEMDEKGNLTTAGFACSQCGQPLFVYKLEQVSEKGKAYTNYFGRCNVAEHEKLILLAQLKPEKDSDEAVTYSLGKFGQRALDFYSIHVTKESTHPVKPLAQIAGNRYASGPVGKALSDACMLTIASFLSKYQDIIIEHQKVVKGNQKRLESLRELAGKENLEYPSVTLPPQPHTKEGVDAYNEVIARVRMWVNLNLWQKLKLSRDDAKPLLRLKGFPSFPLVERQANEVDWWDMVCNVKKLINEKKEDGKVFWQNLAGYKRQEALRPYLSSEEDRKKGKKFARYQLGDLLLHLEKKHGEDWGKVYDEAWERIDKKVEGLSKHIKLEEERRSEDAQSKAALTDWLRAKASFVIEGLKEADKDEFCRCELKLQKWYGDLRGKPFAIEAENSILDISGFSKQYNCAFIWQKDGVKKLNLYLIINYFKGGKLRFKKIKPEAFEANRFYTVINKKSGEIVPMEVNFNFDDPNLIILPLAFGKRQGREFIWNDLLSLETGSLKLANGRVIEKTLYNRRTRQDEPALFVALTFERREVLDSSNIKPMNLIGVDRGENIPAVIALTDPEGCPLSRFKDSLGNPTHILRIGESYKEKQRTIQAKKEVEQRRAGGYSRKYASKAKNLADDMVRNTARDLLYYAVTQDAMLIFENLSRGFGRQGKRTFMAERQYTRMEDWLTAKLAYEGLPSKTYLSKTLAQYTSKTCSNCGFTITSADYDRVLEKLKKTATGWMTTINGKELKVEGQITYYNRYKRQNVVKDLSVELDRLSEESVNNDISSWTKGRSGEALSLLKKRFSHRPVQEKFVCLNCGFETHADEQAALNIARSWLFLRSQEYKKYQTNKTTGNTDKRAFVETWQSFYRKKLKEVWKPAV

SEQ ID NO: 289 - protein, 978 aa, synthetic construct
  REGION 1..978: note = CasX variant
QEIKRINKIRRRLVKDSNTKKAGKTGPMKTLLVRVMTPDLRERLENLRKKPENIPQPISNTSRANLNKLLTDYTEMKKAILHVYWEEFQKDPVGLMSRVAQPASKKIDQNKLKPEMDEKGNLTTAGFACSQCGQPLFVYKLEQVSEKGKAYTNYFGRCNVAEHEKLILLAQLKPEKDSDEAVTYSLGKFGQRALDFYSIHVTKESTHPVKPLAQIAGNRYASGPVGKALSDACMHTIASFLSKYQDIIIEHQKVVKGNQKRLESLRELAGKENLEYPSVTLPPQPHTKEGVDAYNEVIARVRMWVNLNLWQKLKLSRDDAKPLLRLKGFPSFPLVERQANEVDWWDMVCNVKKLINEKKEDGKVFWQNLAGYKRQEALRPYLSSEEDRKKGKKFARYQLGDLLLHLEKKHGEDWGKVYDEAWERIDKKVEGLSKHIKLEEERRSEDAQSKAALTDWLRAKASFVIEGLKEADKDEFCRCELKLQKWYGDLRGKPFAIEAENSILDISGFSKQYNCAFIWQKDGVKKLNLYLIINYFKGGKLRFKKIKPEAFEANRFYTVINKKSGEIVPMEVNFNFDDPNLIILPLAFGKRQGREFIWNDLLSLETGSLKLANGRVIEKTLYNRRTRQDEPALFVALTFERREVLDSSNIKPMNLIGVDRGENIPAVIALTDPEGCPLSRFKDSLGNPTHILRIGESYKEKQRTIQAKKEVEQRRAGGYSRKYASKAKNLADDMVRNTARDLLYYAVTQDAMLIFENLSRGFGRQGKRTFMAERQYTRMEDWLTAKLAYEGLPSKTYLSKTLAQYTSKTCSNCGFTITSADYDRVLEKLKKTATGWMTTINGKELKVEGQITYYNRYKRQNVVKDLSVELDRLSEESVNNDISSWTKGRSGEALSLLKKRFSHRPVQEKFVCLNCGFETHADEQAALNIARSWLFLRSQEYKKYQTNKTTGNTDKRAFVETWQSFYRKKLKEVWKPAV

SEQ ID NO: 290 - protein, 978 aa, synthetic construct
  REGION 1..978: note = CasX variant
QEIKRINKIRRRLVKDSNTKKAGKTGPMKTLLVRVMTPDLRERLENLRKKPENIPQPISNTSRANLNKLLTDYTEMKKAILHVYWEEFQKDPVGLMSRVAQPASKKIDQNKLKPEMDEKGNLTTAGFACSQCGQPLFVYKLEQVSEKGKAYTNYFGRCNVAEHEKLILLAQLKPEKDSDEAVTYSLGKFGQRALDFYSIHVTKESTHPVKPLAQIAGNRYASGPVGKALSDACMGTIASFLSKYQDIIIEHQKVVKGNQKRLESLRELAGKENLEYPSVTLPPQPHTKEGVDAYNEVIARVRMWVNLNLWQKLKLSRDDAKPLLRLKGFPSFPLVERQANEVDWWDMVCNVKKLINEKKEDGKVFWQNLAGYKRQEALRPYLSSEEDRKKGKKFARYQLGDLLLHLEKKHGEDWGKVYDEAWERIDKKVEGLSKHIKLEEERRSEDAQSKAALTDWLRAKASFVIEGLKEADKDEFCRCELKLQKWYGDLRGKPFAIEAENSILDISGFSKQYNCAFIWQKDGVKKLNLYLIINYFKGGKLRFKKIKPEAFEANRFYTVINKKSGEIVPMEVNFNFDDPNLIILPLAFGKRQGREFIWNDLLSLETGSLKLANGRVIEKTLYNRRTRQDEPALFVALTFERREVLDSSNIKPMNLIGVDRGENIPAVIALTDPEGCPLSRFKDSLGNPTHILRIGESYKEKQRTIQAKKEVEQRRAGGYSRKYASKAKNLADDMVRNTARDLLYYAVTQDAMLIFENLSRGFGRQGKRTFMAERQYTRMEDWLTAKLAYEGLPSKTYLSKTLAQYTSKTCSNCGFTITSADYDRVLEKLKKTATGWMTTINGKELKVEGQITYYNRYKRQNVVKDLSVELDRLSEESVNNDISSWTKGRSGEALSLLKKRFSHRPTQEKFVCLNCGFETHADEQAALNIARSWLFLRSQEYKKYQTNKTTGNTDKRAFVETWQSFYRKKLKEVWKPAV

SEQ ID NO: 291 - protein, 978 aa, synthetic construct
  REGION 1..978: note = CasX variant
QEIKRINKIRRRLVKDSNTKKAGKTGPMKTLLVRVMTPDLRERLENLRKKPENIPQPISNTSRANLNKLLTDYTEMKKAILHVYWEEFQKDPVGLMSRVAQPASKKIDQNKLKPEMDEKGNLTTAGFACSQCGQPLFVYKLEQVSEKGKAYTNYFGRCNVAEHEKLILLAQLKPEKDSDEAVTYSLGKFGQRALDFYSIHVTKESTHPVKPLAQIAGNRYASGPVGKALSDACMGTIASFLSKYQDIIIEHQKVVKGNQKRLESLRELAGKENLEYPSVTLPPQPHTKEGVDAYNEVIARVRMWVNLNLWQKLKLSRDDAKPLLRLKGFPSFPLVERQANEVDWWDMVCNVKKLINEKKEDGKVFWQNLAGYKRQEALRPYLSSEEDRKKGKKFARYQLGDLLLHLEKKHGEDWGKVYDEAWERIDKKVEGLSKHIKLEEERRSEDAQSKAALTDWLRAKASFVIEGLKEADKDEFCRCELKLQKWYGDLRGKPFAIEAENSILDISGFSKQYNCAFIWQKDGVKKLNLYLIINYFKGGKLEFKKIKPEAFEANRFYTVINKKSGEIVPMEVNFNFDDPNLIILPLAFGKRQGREFIWNDLLSLETGSLKLANGRVIEKTLYNRRTRQDEPALFVALTFERREVLDSSNIKPMNLIGVDRGENIPAVIALTDPEGCPLSRFKDSLGNPTHILRIGESYKEKQRTIQAKKEVEQRRAGGYSRKYASKAKNLADDMVRNTARDLLYYAVTQDAMLIFENLSRGFGRQGKRTFMAERQYTRMEDWLTAKLAYEGLPSKTYLSKTLAQYTSKTCSNCGFTITSADYDRVLEKLKKTATGWMTTINGKELKVEGQITYYNRYKRQNVVKDLSVELDRLSEESVNNDISSWTKGRSGEALSLLKKRFSHRPVQEKFVCLNCGFETHADEQAALNIARSWLFLRSQEYKKYQTNKTTGNTDKRAFVETWQSFYRKKLKEVWKPAV

SEQ ID NO: 292 - protein, 977 aa, synthetic construct
  REGION 1..977: note = CasX variant
QEIKRINKIRRRLVKDSNTKKAGKTGPMKTLLVRVMTPDLRERLENLRKKPENIPQPISNTSRANLNKLLTDYTEMKKAILHVYWEEFQKDPVGLMSRVAQPASKKIDQNKLKPEMDEKGNLTTAGFACSQCGQPLFVYKLEQVSEKGKAYTNYFGRCNVAEHEKLILLAQLKPEKDSDEAVTYSLGKFGQRALDFYSIHVTKESTHPVKPLAQIAGNRYASGPVGKALSDACMGTIASFLSKYQDIIIEHQKVVKGNQKRLESLRELAGKENLEYPSVTLPPQPHTKEGVDAYNEVIARVRMWVNLNLWQKLKLSRDDAKPLLRLKGFPSFPLVERQANEVDWWDMVCNVKKLINEKKEDGKVFWQNLAGYKRQEALRPYLSSEEDRKKGKKFARYQLGDLLLHLEKKHGEDWGKVYDEAWERIDKKVEGLSKHIKLEEERRSEDAQSKAALTDWLRAKASFVIEGLKEADKDEFCRCELKLQKWYGDLRGKPFAIEAENSILDISGFSKQYNCAFIWQKDGVKKLNLYLIINYFKGGKLRFKKIKPEAFEANRFYTVINKSGEIVPMEVNFNFDDPNLIILPLAFGKRQGREFIWNDLLSLETGSLKLANGRVIEKTLYNRRTRQDEPALFVALTFERREVLDSSNIKPMNLIGVDRGENIPAVIALTDPEGCPLSRFKDSLGNPTHILRIGESYKEKQRTIQAKKEVEQRRAGGYSRKYASKAKNLADDMVRNTARDLLYYAVTQDAMLIFENLSRGFGRQGKRTFMAERQYTRMEDWLTAKLAYEGLPSKTYLSKTLAQYTSKTCSNCGFTITSADYDRVLEKLKKTATGWMTTINGKELKVEGQITYYNRYKRQNVVKDLSVELDRLSEESVNNDISSWTKGRSGEALSLLKKRFSHRPVQEKFVCLNCGFETHADEQAALNIARSWLFLRSQEYKKYQTNKTTGNTDKRAFVETWQSFYRKKLKEVWKPAV

SEQ ID NO: 293 - protein, 979 aa, synthetic construct
  REGION 1..979: note = CasX variant
QEIKRINKIRRRLVKDSNTKKAGKTGPMKTLLVRVMTPDLRERLENLRKKPENIPQPISNTSRANLNKLLTDYTEMKKAILHVYWEEFQKDPVGLMSRVAQPASKKIDQNKLKPEMDEKGNLTTAGFACSQCGQPLFVYKLEQVSEKGKAYTNYFGRCNVAEHEKLILLAQLKPEKDSDEAVTYSLGKFGQRALDFYSIHVTKESTHPVKPLAQIAGNRYASGPVGKALSDACMGTIASFLSKYQDIIIEHQKVVKGNQKRLESLRELAGKENLEYPSVTLPPQPHTKEGVDAYNEVIARVRMWVNLNLWQKLKLSRDDAKPLLRLKGFPSFPLVERQANEVDWWDMVCNVKKLINEKKEDGKVFWQNLAGYKRQEALRPYLSSEEDRKKGKKFARYQLGDLLLHLEKKHGEDWGKVYDEAWERIDKKVEGLSKHIKLEEERRSEDAQSKAALTDWLRAKASFVIEGLKEADKDEFCRCELKLQKWYGDLRGKPFAIEAENSILDISGFSKQYNCAFIWQKDGVKKLNLYLIINYFKGGKLRFKKIKPEAFEANRFYTVINKKSGEIVPMEVNFNFDDPNLIILPLAFGKRQAGREFIWNDLLSLETGSLKLANGRVIEKTLYNRRTRQDEPALFVALTFERREVLDSSNIKPMNLIGVDRGENIPAVIALTDPEGCPLSRFKDSLGNPTHILRIGESYKEKQRTIQAKKEVEQRRAGGYSRKYASKAKNLADDMVRNTARDLLYYAVTQDAMLIFENLSRGFGRQGKRTFMAERQYTRMEDWLTAKLAYEGLPSKTYLSKTLAQYTSKTCSNCGFTITSADYDRVLEKLKKTATGWMTTINGKELKVEGQITYYNRYKRQNVVKDLSVELDRLSEESVNNDISSWTKGRSGEALSLLKKRFSHRPVQEKFVCLNCGFETHADEQAALNIARSWLFLRSQEYKKYQTNKTTGNTDKRAFVETWQSFYRKKLKEVWKPAV

SEQ ID NO: 294 - protein, 979 aa, synthetic construct
  REGION 1..978: note = CasX variant
QEIKRINKIRRRLVKDSNTKKAGKTGPMKTLLVRVMTPDLRERLENLRKKPENIPQPISNTSRANLNKLLTDYTEMKKAILHVYWEEFQKDPVGLMSRVAQPASKKIDQNKLKPEMDEKGNLTTAGFACSQCGQPLFVYKLEQVSEKGKAYTNYFGRCNVAEHEKLILLAQLKPEKDSDEAVTYSLGKFGQRALDFYSIHVTKESTHPVKPLAQIAGNRYASGPVGKALSDACMGTIASFLSKYQDIIIEHQKVVKGNQKRLESLRELAGKENLEYPSVTLPPQPHTKEGVDAYNEVIARVRMWVNLNLWQKLKLSRDDAKPLLRLKGFPSFPLVERQANEVDWWDMVCNVKKLINEKKEDGKVFWQNLAGYKRQEALRPYLSSEEDRKKGKKFARYQLGDLLLHLEKKHGEDWGKVYDEAWERIDKKVEGLSKHIKLEKEERRSEDAQSKAALTDWLRAKASFVIEGLKEADKDEFCRCELKLQKWYGDLRGKPFAIEAENSILDISGFSKQYNCAFIWQKDGVKKLNLYLIINYFKGGKLRFKKIKPEAFEANRFYTVINKKSGEIVPMEVNFNFDDPNLIILPLAFGKRQGREFIWNDLLSLETGSLKLANGRVIEKTLYNRRTRQDEPALFVALTFERREVLDSSNIKPMNLIGVDRGENIPAVIALTDPEGCPLSRFKDSLGNPTHILRIGESYKEKQRTIQAKKEVEQRRAGGYSRKYASKAKNLADDMVRNTARDLLYYAVTQDAMLIFENLSRGFGRQGKRTFMAERQYTRMEDWLTAKLAYEGLPSKTYLSKTLAQYTSKTCSNCGFTITSADYDRVLEKLKKTATGWMTTINGKELKVEGQITYYNRYKRQNVVKDLSVELDRLSEESVNNDISSWTKGRSGEALSLLKKRFSHRPVQEKFVCLNCGFETHADEQAALNIARSWLFLRSQEYKKYQTNKTTGNTDKRAFVETWQSFYRKKLKEVWKPAV

SEQ ID NO: 295 - protein, 56 aa, synthetic construct; identical to SEQ ID NO: 238
  REGION 1..56: note = CasX 515 ODB-I

SEQ ID NO: 296 - protein, 44 aa, synthetic construct; identical to SEQ ID NO: 239
  REGION 1..44: note = CasX 515 Helical I-I

SEQ ID NO: 297 - protein, 91 aa, synthetic construct; identical to SEQ ID NO: 231
  REGION 1..91: note = CasX 515 NTSB

SEQ ID NO: 298 - protein, 141 aa, synthetic construct; identical to SEQ ID NO: 232
  REGION 1..141: note = CasX 515 Helical I-II

SEQ ID NO: 299 - protein, 168 aa, synthetic construct
  REGION 1..168: note = CasX 515 Helical II
PLVERQANEVDWWDMVCNVKKLINEKKEDGKVFWQNLAGYKRQEALRPYLSSEEDRKKGKKFARYQLGDLLLHLEKKHGEDWGKVYDEAWERIDKKVEGLSKHIKLEEERRSEDAQSKAALTDWLRAKASFVIEGLKEADKDEFCRCELKLQKWYGDLRGKPFAIEAE

SEQ ID NO: 300 - protein, 146 aa, synthetic construct; identical to SEQ ID NO: 243
  REGION 1..146: note = CasX 515 OBD-II

SEQ ID NO: 301 - protein, 164 aa, synthetic construct
  REGION 1..164: note = CasX 515 RuvC-I
SSNIKPMNLIGVDRGENIPAVIALTDPEGCPLSRFKDSLGNPTHILRIGESYKEKQRTIQAKKEVEQRRAGGYSRKYASKAKNLADDMVRNTARDLLYYAVTQDAMLIFENLSRGFGRQGKRTFMAERQYTRMEDWLTAKLAYEGLPSKTYLSKTLAQYTSKTC

SEQ ID NO: 302 - protein, 110 aa, synthetic construct; identical to SEQ ID NO: 245
  REGION 1..110: note = CasX 515 TSL

SEQ ID NO: 303 - protein, 58 aa, synthetic construct; identical to SEQ ID NO: 246
  REGION 1..58: note = CasX 515 RuvC-II

SEQ ID NO: 304-308 - skipped (5 entries)

SEQ ID NO: 309 - protein, 20 aa, synthetic construct
  REGION 1..20: note = endosomal escape polypeptide
  VARIANT 4: note = X can be any naturally occurring amino acid
  VARIANT 8: note = X can be any naturally occurring amino acid
  VARIANT 11: note = X can be any naturally occurring amino acid
  VARIANT 15: note = X can be any naturally occurring amino acid
  VARIANT 19: note = X can be any naturally occurring amino acid
GLFXALLXLLXSLWXLLLXA

SEQ ID NO: 310 - protein, 20 aa, synthetic construct
  REGION 1..20: note = endosomal escape polypeptide
GLFHALLHLLHSLWHLLLHA

SEQ ID NO: 311 - protein, 9 aa, synthetic construct
  REGION 1..9: note = endosomal escape polypeptide
HHHHHHHHH

SEQ ID NO: 312 - protein, 16 aa, synthetic construct
  REGION 1..16: note = Peptide Transduction Domain
RQIKIWFQNRRMKWKK

SEQ ID NO: 313 - protein, 7 aa, synthetic construct
  REGION 1..7: note = nuclear localization signal
PKKKRKV

SEQ ID NO: 314 - protein, 16 aa, synthetic construct
  REGION 1..16: note = nuclear localization signal
KRPAATKKAGQAKKKK

SEQ ID NO: 315 - protein, 9 aa, synthetic construct
  REGION 1..9: note = nuclear localization signal
PAAKRVKLD

SEQ ID NO: 316 - protein, 11 aa, synthetic construct
  REGION 1..11: note = nuclear localization signal
RQRRNELKRSP

SEQ ID NO: 317 - protein, 38 aa, synthetic construct
  REGION 1..38: note = nuclear localization signal
NQSSNFGPMKGGNFGGRSSGPYGGGGQYFAKPRNQGGY

SEQ ID NO: 318 - protein, 42 aa, synthetic construct
  REGION 1..42: note = nuclear localization signal
RMRIZFKNKGKDTAELRRRRVEVSVELRKAKKDEQILKRRNV

SEQ ID NO: 319 - protein, 8 aa, synthetic construct
  REGION 1..8: note = nuclear localization signal
VSRKRPRP

SEQ ID NO: 320 - protein, 8 aa, synthetic construct
  REGION 1..8: note = nuclear localization signal
PPKKARED

SEQ ID NO: 321 - protein, 8 aa, synthetic construct
  REGION 1..8: note = nuclear localization signal
PQPKKKPL

SEQ ID NO: 322 - protein, 12 aa, synthetic construct
  REGION 1..12: note = nuclear localization signal
SALIKKKKKMAP

SEQ ID NO: 323 - protein, 5 aa, synthetic construct
  REGION 1..5: note = nuclear localization signal
DRLRR

SEQ ID NO: 324 - protein, 7 aa, synthetic construct
  REGION 1..7: note = nuclear localization signal
PKQKKRK

SEQ ID NO: 325 - protein, 10 aa, synthetic construct
  REGION 1..10: note = nuclear localization signal
RKLKKKIKKL

SEQ ID NO: 326 - protein, 10 aa, synthetic construct
  REGION 1..10: note = nuclear localization signal
REKKKFLKRR

SEQ ID NO: 327 - protein, 20 aa, synthetic construct
  REGION 1..20: note = nuclear localization signal
KRKGDEVDGVDEVAKKKSKK

SEQ ID NO: 328 - protein, 17 aa, synthetic construct
  REGION 1..17: note = nuclear localization signal
RKCLQAGMNLEARKTKK

SEQ ID NO: 329 - protein, 8 aa, synthetic construct
  REGION 1..8: note = nuclear localization signal
PRPRKIPR

SEQ ID NO: 330 - protein, 9 aa, synthetic construct
  REGION 1..9: note = nuclear localization signal
PPRKKRTVV

SEQ ID NO: 331 - protein, 12 aa, synthetic construct
  REGION 1..12: note = nuclear localization signal
NLSKKKKRKREK

SEQ ID NO: 332 - protein, 10 aa, synthetic construct
  REGION 1..10: note = nuclear localization signal
RRPSRPFRKP

SEQ ID NO: 333 - protein, 8 aa, synthetic construct
  REGION 1..8: note = nuclear localization signal
KRPRSPSS

SEQ ID NO: 334 - protein, 19 aa, synthetic construct
  REGION 1..19: note = nuclear localization signal
KRGINDRNFWRGENERKTR

SEQ ID NO: 335 - protein, 11 aa, synthetic construct
  REGION 1..11: note = nuclear localization signal
PRPPKMARYDN

SEQ ID NO: 336 - protein, 8 aa, synthetic construct
  REGION 1..8: note = nuclear localization signal
KRSFSKAF

SEQ ID NO: 337 - protein, 9 aa, synthetic construct
  REGION 1..9: note = nuclear localization signal
KLKIKRPVK

SEQ ID NO: 338 - protein, 19 aa, synthetic construct
  REGION 1..19: note = nuclear localization signal
PKKKRKVPPPPAAKRVKLD

SEQ ID NO: 339 - protein, 17 aa, synthetic construct
  REGION 1..17: note = nuclear localization signal
PKTRRRPRRSQRKRPPT

SEQ ID NO: 340 - protein, 24 aa, synthetic construct
  REGION 1..24: note = nuclear localization signal
SRRRKANPTKLSENAKKLAKEVEN

SEQ ID NO: 341 - protein, 16 aa, synthetic construct
  REGION 1..16: note = nuclear localization signal
KTRRRPRRSQRKRPPT

SEQ ID NO: 342 - protein, 13 aa, synthetic construct
  REGION 1..13: note = nuclear localization signal
RRKKRRPRRKKRR

SEQ ID NO: 343 - protein, 14 aa, synthetic construct
  REGION 1..14: note = nuclear localization signal
PKKKSRKPKKKSRK

SEQ ID NO: 344 - protein, 17 aa, synthetic construct
  REGION 1..17: note = nuclear localization signal
HKKKHPDASVNFSEFSK

SEQ ID NO: 345 - protein, 18 aa, synthetic construct
  REGION 1..18: note = nuclear localization signal
QRPGPYDRPQRPGPYDRP

SEQ ID NO: 346 - protein, 16 aa, synthetic construct
  REGION 1..16: note = nuclear localization signal
LSPSLSPLLSPSLSPL

SEQ ID NO: 347 - protein, 18 aa, synthetic construct
  REGION 1..18: note = nuclear localization signal
RGKGGKGLGKGGAKRHRK

SEQ ID NO: 348 - protein, 14 aa, synthetic construct
  REGION 1..14: note = nuclear localization signal
PKRGRGRPKRGRGR

SEQ ID NO: 349 - protein, 19 aa, synthetic construct
  REGION 1..19: note = nuclear localization signal
PKKKRKVPPPPAAKRVKLD

SEQ ID NO: 350 - protein, 17 aa, synthetic construct
  REGION 1..17: note = nuclear localization signal
PKKKRKVPPPPKKKRKV

SEQ ID NO: 351 - protein, 10 aa, synthetic construct
  REGION 1..10: note = nuclear localization signal
PAKRARRGYK

SEQ ID NO: 352 - protein, 11 aa, synthetic construct
  REGION 1..11: note = nuclear localization signal
KLGPRKATGRW

SEQ ID NO: 353 - protein, 7 aa, synthetic construct
  REGION 1..7: note = nuclear localization signal
PRRKREE

SEQ ID NO: 354 - protein, 7 aa, synthetic construct
  REGION 1..7: note = nuclear localization signal
PYRGRKE

SEQ ID NO: 355 - protein, 8 aa, synthetic construct
  REGION 1..8: note = nuclear localization signal
PLRKRPRR

SEQ ID NO: 356 - protein, 18 aa, synthetic construct
  REGION 1..18: note = nuclear localization signal
PLRKRPRRGSPLRKRPRR

SEQ ID NO: 357 - protein, 29 aa, synthetic construct
  REGION 1..29: note = nuclear localization signal
PAAKRVKLDGGKRTADGSEFESPKKKRKV

SEQ ID NO: 358 - protein, 37 aa, synthetic construct
  REGION 1..37: note = nuclear localization signal
PAAKRVKLDGGKRTADGSEFESPKKKRKVGIHGVPAA

SEQ ID NO: 359 - protein, 46 aa, synthetic construct
  REGION 1..46: note = nuclear localization signal
PAAKRVKLDGGKRTADGSEFESPKKKRKVAEAAAKEAAAKEAAAKA

SEQ ID NO: 360 - protein, 31 aa, synthetic construct
  REGION 1..31: note = nuclear localization signal
PAAKRVKLDGGKRTADGSEFESPKKKRKVPG

SEQ ID NO: 361 - protein, 15 aa, synthetic construct
  REGION 1..15: note = nuclear localization signal
KRKGSPERGERKRHW

SEQ ID NO: 362 - protein, 28 aa, synthetic construct
  REGION 1..28: note = nuclear localization signal
KRTADSQHSTPPKTKRKVEFEPKKKRKV

SEQ ID NO: 363 - protein, 38 aa, synthetic construct
  REGION 1..38: note = nuclear localization signal
PKKKRKVGGSKRTADSQHSTPPKTKRKVEFEPKKKRKV

SEQ ID NO: 364 - protein, 46 aa, synthetic construct
  REGION 1..46: note = nuclear localization signal
PKKKRKVGGSPKKKRKVSRQEIKRINKIRRRLVKDSNTKKAGKTGP

SEQ ID NO: 365 - protein, 66 aa, synthetic construct
  REGION 1..66: note = nuclear localization signal
PKKKRKVGGSPKKKRKVGGSPKKKRKVGGSPKKKRKVSRQEIKRINKIRRRLVKDSNTKKAGKTGP

SEQ ID NO: 366 - protein, 86 aa, synthetic construct
  REGION 1..86: note = nuclear localization signal
PKKKRKVGGSPKKKRKVGGSPKKKRKVGGSPKKKRKVGGSPKKKRKVGGSPKKKRKVSRQEIKRINKIRRRLVKDSNTKKAGKTGP

SEQ ID NO: 367 - protein, 50 aa, synthetic construct
  REGION 1..50: note = nuclear localization signal
PAAKRVKLDGGSPAAKRVKLDSRQEIKRINKIRRRLVKDSNTKKAGKTGP

SEQ ID NO: 368 - protein, 74 aa, synthetic construct
  REGION 1..74: note = nuclear localization signal
PAAKRVKLDGGSPAAKRVKLDGGSPAAKRVKLDGGSPAAKRVKLDSRQEIKRINKIRRRLVKDSNTKKAGKTGP

SEQ ID NO: 369 - protein, 98 aa, synthetic construct
  REGION 1..98: note = nuclear localization signal
PAAKRVKLDGGSPAAKRVKLDGGSPAAKRVKLDGGSPAAKRVKLDGGSPAAKRVKLDGGSPAAKRVKLDSRQEIKRINKIRRRLVKDSNTKKAGKTGP

SEQ ID NO: 370 - protein, 49 aa, synthetic construct
  REGION 1..49: note = nuclear localization signal
KRPAATKKAGQAKKKKSRDISRQEIKRINKIRRRLVKDSNTKKAGKTGP

SEQ ID NO: 371 - protein, 45 aa, synthetic construct
  REGION 1..45: note = nuclear localization signal
KRPAATKKAGQAKKKKSRQEIKRINKIRRRLVKDSNTKKAGKTGP

SEQ ID NO: 372 - protein, 68 aa, synthetic construct
  REGION 1..68: note = nuclear localization signal
KRPAATKKAGQAKKKKGGSKRPAATKKAGQAKKKKSRDISRQEIKRINKIRRRLVKDSNTKKAGKTGP

SEQ ID NO: 373 - protein, 106 aa, synthetic construct
  REGION 1..106: note = nuclear localization signal
KRPAATKKAGQAKKKKGGSKRPAATKKAGQAKKKKGGSKRPAATKKAGQAKKKKGGSKRPAATKKAGQAKKKKSRDISRQEIKRINKIRRRLVKDSNTKKAGKTGP

SEQ ID NO: 374 - protein, 144 aa, synthetic construct
  REGION 1..144: note = nuclear localization signal
KRPAATKKAGQAKKKKGGSKRPAATKKAGQAKKKKGGSKRPAATKKAGQAKKKKGGSKRPAATKKAGQAKKKKGGSKRPAATKKAGQAKKKKGGSKRPAATKKAGQAKKKKSRDISRQEIKRINKIRRRLVKDSNTKKAGKTGP

SEQ ID NO: 375 - protein, 70 aa, synthetic construct
  REGION 1..70: note = nuclear localization signal
PKKKRKVGGSPKKKRKVGGSPKKKRKVGGSPKKKRKVSRDISRQEIKRINKIRRRLVKDSNTKKAGKTGP

SEQ ID NO: 376 - protein, 70 aa, synthetic construct; identical to SEQ ID NO: 375
  REGION 1..70: note = nuclear localization signal

SEQ ID NO: 377 - protein, 78 aa, synthetic construct
  REGION 1..78: note = nuclear localization signal
PAAKRVKLDGGSPAAKRVKLDGGSPAAKRVKLDGGSPAAKRVKLDSRDISRQEIKRINKIRRRLVKDSNTKKAGKTGP

SEQ ID NO: 378 - protein, 102 aa, synthetic construct
  REGION 1..102: note = nuclear localization signal
PAAKRVKLDGGSPAAKRVKLDGGSPAAKRVKLDGGSPAAKRVKLDGGSPAAKRVKLDGGSPAAKRVKLDSRDISRQEIKRINKIRRRLVKDSNTKKAGKTGP

SEQ ID NO: 379 - protein, 49 aa, synthetic construct; identical to SEQ ID NO: 370
  REGION 1..49: note = nuclear localization signal

SEQ ID NO: 380 - protein, 68 aa, synthetic construct; identical to SEQ ID NO: 372
  REGION 1..68: note = nuclear localization signal

SEQ ID NO: 381 - protein, 65 aa, synthetic construct
  REGION 1..65: note = nuclear localization signal
PAAKRVKLDGGKRTADGSEFESPKKKRKVGGSSRDISRQEIKRINKIRRRLVKDSNTKKAGKTGP

SEQ ID NO: 382 - protein, 67 aa, synthetic construct
  REGION 1..67: note = nuclear localization signal
PAAKRVKLDGGKRTADGSEFESPKKKRKVPPPPGSRDISRQEIKRINKIRRRLVKDSNTKKAGKTGP

SEQ ID NO: 383 - protein, 72 aa, synthetic construct
  REGION 1..72: note = nuclear localization signal
PAAKRVKLDGGKRTADGSEFESPKKKRKVGIHGVPAAPGSRDISRQEIKRINKIRRRLVKDSNTKKAGKTGP

SEQ ID NO: 384 - protein, 72 aa, synthetic construct
  REGION 1..72: note = nuclear localization signal
PAAKRVKLDGGKRTADGSEFESPKKKRKVGGGSGGGSPGSRDISRQEIKRINKIRRRLVKDSNTKKAGKTGP

SEQ ID NO: 385 - protein, 73 aa, synthetic construct
  REGION 1..73: note = nuclear localization signal
PAAKRVKLDGGKRTADGSEFESPKKKRKVPGGGSGGGSPGSRDISRQEIKRINKIRRRLVKDSNTKKAGKTGP

SEQ ID NO: 386 - protein, 81 aa, synthetic construct
  REGION 1..81: note = nuclear localization signal
PAAKRVKLDGGKRTADGSEFESPKKKRKVAEAAAKEAAAKEAAAKAPGSRDISRQEIKRINKIRRRLVKDSNTKKAGKTGP

SEQ ID NO: 387 - protein, 64 aa, synthetic construct
  REGION 1..64: note = nuclear localization signal
PAAKRVKLDGGKRTADGSEFESPKKKRKVPGSRDISRQEIKRINKIRRRLVKDSNTKKAGKTGP

SEQ ID NO: 388 - protein, 55 aa, synthetic construct
  REGION 1..55: note = nuclear localization signal
PAAKRVKLDGGSPKKKRKVGGSSRDISRQEIKRINKIRRRLVKDSNTKKAGKTGP

SEQ ID NO: 389 - protein, 54 aa, synthetic construct
  REGION 1..54: note = nuclear localization signal
PAAKRVKLDPPPPKKKRKVPGSRDISRQEIKRINKIRRRLVKDSNTKKAGKTGP

SEQ ID NO: 390 - protein, 45 aa, synthetic construct
  REGION 1..45: note = nuclear localization signal
PAAKRVKLDPGRSRDISRQEIKRINKIRRRLVKDSNTKKAGKTGP

SEQ ID NO: 391 - protein, 40 aa, synthetic construct
  REGION 1..40: note = nuclear localization signal
PKKKRKVSRDISRQEIKRINKIRRRLVKDSNTKKAGKTGP

SEQ ID NO: 392 - protein, 65 aa, synthetic construct; identical to SEQ ID NO: 381
  REGION 1..65: note = nuclear localization signal

SEQ ID NO: 393 - protein, 72 aa, synthetic construct; identical to SEQ ID NO: 384
  REGION 1..72: note = nuclear localization signal

SEQ ID NO: 394 - protein, 36 aa, synthetic construct
  REGION 1..36: note = nuclear localization signal
PKKKRKVSRQEIKRINKIRRRLVKDSNTKKAGKTGP

SEQ ID NO: 395 - protein, 66 aa, synthetic construct; identical to SEQ ID NO: 365
  REGION 1..66: note = nuclear localization signal

SEQ ID NO: 396 - protein, 86 aa, synthetic construct; identical to SEQ ID NO: 366
  REGION 1..86: note = nuclear localization signal

SEQ ID NO: 397 - protein, 38 aa, synthetic construct
  REGION 1..38: note = nuclear localization signal
PAAKRVKLDSRQEIKRINKIRRRLVKDSNTKKAGKTGP

SEQ ID NO: 398 - protein, 50 aa, synthetic construct; identical to SEQ ID NO: 367
  REGION 1..50: note = nuclear localization signal

SEQ ID NO: 399 - protein, 74 aa, synthetic construct; identical to SEQ ID NO: 368
  REGION 1..74: note = nuclear localization signal

SEQ ID NO: 400 - protein, 98 aa, synthetic construct; identical to SEQ ID NO: 369
  REGION 1..98: note = nuclear localization signal

SEQ ID NO: 401 - protein, 45 aa, synthetic construct; identical to SEQ ID NO: 371
  REGION 1..45: note = nuclear localization signal

SEQ ID NO: 402 - protein, 21 aa, synthetic construct
  REGION 1..21: note = nuclear localization signal
TSPKKKRKVALEYPYDVPDYA

SEQ ID NO: 403 - protein, 33 aa, synthetic construct
  REGION 1..33: note = nuclear localization signal
TLESKRPAATKKAGQAKKKKAPGEYPYDVPDYA

SEQ ID NO: 404 - protein, 27 aa, synthetic construct
  REGION 1..27: note = nuclear localization signal
GSKRPAATKKAGQAKKKKYPYDVPDYA

SEQ ID NO: 405 - protein, 73 aa, synthetic construct
  REGION 1..73: note = nuclear localization signal
TLESKRPAATKKAGQAKKKKGGSKRPAATKKAGQAKKKKAPGEYPYDVPDYATSPKKKRKVALEYPYDVPDYA

SEQ ID NO: 406 - protein, 98 aa, synthetic construct
  REGION 1..98: note = nuclear localization signal
TLESKRPAATKKAGQAKKKKGGSKRPAATKKAGQAKKKKGGSKRPAATKKAGQAKKKKGGSKRPAATKKAGQAKKKKTSPKKKRKVALEYPYDVPDYA

SEQ ID NO: 407 - protein, 136 aa, synthetic construct
  REGION 1..136: note = nuclear localization signal
TLESKRPAATKKAGQAKKKKGGSKRPAATKKAGQAKKKKGGSKRPAATKKAGQAKKKKGGSKRPAATKKAGQAKKKKGGSKRPAATKKAGQAKKKKGGSKRPAATKKAGQAKKKKTSPKKKRKVALEYPYDVPDYA

SEQ ID NO: 408 - protein, 74 aa, synthetic construct
  REGION 1..74: note = nuclear localization signal
TLESPKKKRKVGGSPKKKRKVGGSPKKKRKVGGSPKKKRKVTLESKRPAATKKAGQAKKKKAPGEYPYDVPDYA

SEQ ID NO: 409 - protein, 68 aa, synthetic construct
  REGION 1..68: note = nuclear localization signal
TLESPKKKRKVGGSPKKKRKVGGSPKKKRKVGGSPKKKRKVGSKRPAATKKAGQAKKKKYPYDVPDYA

SEQ ID NO: 410 - protein, 101 aa, synthetic construct
  REGION 1..101: note = nuclear localization signal
TLESPAAKRVKLDGGSPAAKRVKLDGGSPAAKRVKLDGGSPAAKRVKLDTLESKRPAATKKAGQAKKKKGGSKRPAATKKAGQAKKKKAPGEYPYDVPDYA

SEQ ID NO: 411 - protein, 150 aa, synthetic construct
  REGION 1..150: note = nuclear localization signal
TLESPAAKRVKLDGGSPAAKRVKLDGGSPAAKRVKLDGGSPAAKRVKLDGGSPAAKRVKLDGGSPAAKRVKLDTLESKRPAATKKAGQAKKKKGGSKRPAATKKAGQAKKKKGGSKRPAATKKAGQAKKKKGGSKRPAATKKAGQAKKKK

SEQ ID NO: 412 - protein, 135 aa, synthetic construct
  REGION 1..135: note = nuclear localization signal
TLESKRPAATKKAGQAKKKKTLESKRPAATKKAGQAKKKKGGSKRPAATKKAGQAKKKKGGSKRPAATKKAGQAKKKKGGSKRPAATKKAGQAKKKKGGSKRPAATKKAGQAKKKKGGSKRPAATKKAGQAKKKK

SEQ ID NO: 413 - protein, 80 aa, synthetic construct
  REGION 1..80: note = nuclear localization signal
TLESKRPAATKKAGQAKKKKGGSKRPAATKKAGQAKKKKTLESPKKKRKVGGSPKKKRKVGGSPKKKRKVGGSPKKKRKV

SEQ ID NO: 414 - protein, 54 aa, synthetic construct
  REGION 1..54: note = nuclear localization signal
TLEGGSPKKKRKVTLESPKKKRKVGGSPKKKRKVGGSPKKKRKVGGSPKKKRKV

SEQ ID NO: 415 - protein, 62 aa, synthetic construct
  REGION 1..62: note = nuclear localization signal
TLEGGSPKKKRKVTLESPAAKRVKLDGGSPAAKRVKLDGGSPAAKRVKLDGGSPAAKRVKLD

SEQ ID NO: 416 - protein, 86 aa, synthetic construct
  REGION 1..86: note = nuclear localization signal
TLEGGSPKKKRKVTLESPAAKRVKLDGGSPAAKRVKLDGGSPAAKRVKLDGGSPAAKRVKLDGGSPAAKRVKLDGGSPAAKRVKLD

SEQ ID NO: 417 - protein, 33 aa, synthetic construct
  REGION 1..33: note = nuclear localization signal
TLEGGSPKKKRKVTLESKRPAATKKAGQAKKKK

SEQ ID NO: 418 - protein, 52 aa, synthetic construct
  REGION 1..52: note = nuclear localization signal
TLEGGSPKKKRKVTLESKRPAATKKAGQAKKKKGGSKRPAATKKAGQAKKKK

SEQ ID NO: 419 - protein, 26 aa, synthetic construct
  REGION 1..26: note = nuclear localization signal
TLEGGSPKKKRKVTLEGGSPKKKRKV

SEQ ID NO: 420 - protein, 26 aa, synthetic construct
  REGION 1..26: note = nuclear localization signal
TLEGGSPKKKRKVTLEGGSPKKKRKV

SEQ ID NO: 421 - protein, 26 aa, synthetic construct
  REGION 1..26: note = nuclear localization signal
TLEGGSPKKKRKVTLEGGSPKKKRKV

SEQ ID NO: 422 - protein, 26 aa, synthetic construct
  REGION 1..26: note = nuclear localization signal
TLEGGSPKKKRKVTLEGGSPKKKRKV

SEQ ID NO: 423 - protein, 26 aa, synthetic construct
  REGION 1..26: note = nuclear localization signal
TLEGGSPKKKRKVTLEGGSPKKKRKV

SEQ ID NO: 424 - protein, 47 aa, synthetic construct
  REGION 1..47: note = nuclear localization signal
TLEVGPKRTADSQHSTPPKTKRKVEFEPKKKRKVTLEGGSPKKKRKV

SEQ ID NO: 425 - protein, 53 aa, synthetic construct
  REGION 1..53: note = nuclear localization signal
TLEVGGGSGGGSKRTADSQHSTPPKTKRKVEFEPKKKRKVTLEGGSPKKKRKV

SEQ ID NO: 426 - protein, 62 aa, synthetic construct
  REGION 1..62: note = nuclear localization signal
TLEVAEAAAKEAAAKEAAAKAKRTADSQHSTPPKTKRKVEFEPKKKRKVTLEGGSPKKKRKV

SEQ ID NO: 427 - protein, 57 aa, synthetic construct
  REGION 1..57: note = nuclear localization signal
TLEVGPPKKKRKVGGSKRTADSQHSTPPKTKRKVEFEPKKKRKVTLEGGSPKKKRKV

SEQ ID NO: 428 - protein, 45 aa, synthetic construct
  REGION 1..45: note = nuclear localization signal
TLEVGPAEAAAKEAAAKEAAAKAPAAKRVKLDTLEGGSPKKKRKV

SEQ ID NO: 429 - protein, 61 aa, synthetic construct
  REGION 1..61: note = nuclear localization signal
TLEVGPGGGSGGGSGGGSPAAKRVKLDTLEVGPKRTADSQHSTPPKTKRKVEFEPKKKRKV

SEQ ID NO: 430 - protein, 65 aa, synthetic construct
  REGION 1..65: note = nuclear localization signal
TLEVGPPKKKRKVPPPPAAKRVKLDTLEVGGGSGGGSKRTADSQHSTPPKTKRKVEFEPKKKRKV

SEQ ID NO: 431 - protein, 64 aa, synthetic construct
  REGION 1..64: note = nuclear localization signal
TLEVGPPAAKRVKLDTLEVAEAAAKEAAAKEAAAKAKRTADSQHSTPPKTKRKVEFEPKKKRKV

SEQ ID NO: 432 - protein, 78 aa, synthetic construct
  REGION 1..78: note = nuclear localization signal
TLEVGPKRTADSQHSTPPKTKRKVEFEPKKKRKVTLEVGPPKKKRKVGGSKRTADSQHSTPPKTKRKVEFEPKKKRKV

SEQ ID NO: 433 - protein, 72 aa, synthetic construct
  REGION 1..72: note = nuclear localization signal
TLEVGGGSGGGSKRTADSQHSTPPKTKRKVEFEPKKKRKVTLEVGPAEAAAKEAAAKEAAAKAPAAKRVKLD

SEQ ID NO: 434 - protein, 45 aa, synthetic construct
  REGION 1..45: note = nuclear localization signal
GSKRPAATKKAGQAKKKKTLEVGPGGGSGGGSGGGSPAAKRVKLD

SEQ ID NO: 435 - protein, 43 aa, synthetic construct
  REGION 1..43: note = nuclear localization signal
GSKRPAATKKAGQAKKKKTLEVGPPKKKRKVPPPPAAKRVKLD

SEQ ID NO: 436 - protein, 33 aa, synthetic construct
  REGION 1..33: note = nuclear localization signal
GSKRPAATKKAGQAKKKKTLEVGPPAAKRVKLD

SEQ ID NO: 437 - protein, 43 aa, synthetic construct
  REGION 1..43: note = nuclear localization signal
GSPKKKRKVTLEVGPKRTADSQHSTPPKTKRKVEFEPKKKRKV

SEQ ID NO: 438 - protein, 58 aa, synthetic construct
  REGION 1..58: note = nuclear localization signal
GSKRPAATKKAGQAKKKKTLEVGGGSGGGSKRTADSQHSTPPKTKRKVEFEPKKKRKV

SEQ ID NO: 439 - protein, 36 aa, synthetic construct
  REGION 1..36: note = nuclear localization signal
GSKRPAATKKAGQAKKKKGSKRPAATKKAGQAKKKK

SEQ ID NO: 440 - protein, 36 aa, synthetic construct; identical to SEQ ID NO: 439
  REGION 1..36: note = nuclear localization signal

SEQ ID NO: 441 - protein, 36 aa, synthetic construct; identical to SEQ ID NO: 439
  REGION 1..36: note = nuclear localization signal

SEQ ID NO: 442 - protein, 18 aa, synthetic construct
  REGION 1..18: note = nuclear localization signal
GSPKKKRKVGSPKKKRKV

SEQ ID NO: 443 - protein, 54 aa, synthetic construct
  REGION 1..54: note = nuclear localization signal
GGGSGGGSKRTADSQHSTPPKTKRKVEFEPKKKRKVGSKRPAATKKAGQAKKKK

SEQ ID NO: 444 - protein, 58 aa, synthetic construct
  REGION 1..58: note = nuclear localization signal
GPPKKKRKVGGSKRTADSQHSTPPKTKRKVEFEPKKKRKVGSKRPAATKKAGQAKKKK

SEQ ID NO: 445 - protein, 44 aa, synthetic construct
  REGION 1..44: note = nuclear localization signal
TGGGPGGGAAAGSGSPKKKRKVGSGSGSKRPAATKKAGQAKKKK

SEQ ID NO: 446 - protein, 48 aa, synthetic construct
  REGION 1..48: note = nuclear localization signal
GPKRTADSQHSTPPKTKRKVEFEPKKKRKVGSKRPAATKKAGQAKKKK

SEQ ID NO: 447 - protein, 54 aa, synthetic construct
  REGION 1..54: note = nuclear localization signal
AEAAAKEAAAKEAAAKAKRTADSQHSTPPKTKRKVEFEPKKKRKVGSPKKKRKV

SEQ ID NO: 448 - protein, 57 aa, synthetic construct
  REGION 1..57: note = nuclear localization signal
GPPKKKRKVPPPPAAKRVKLDGGGSGGGSKRTADSQHSTPPKTKRKVEFEPKKKRKV

SEQ ID NO: 449 - protein, 111 aa, synthetic construct
  REGION 1..111: note = nuclear localization signal
GSPAAKRVKLDGGSPAAKRVKLDGGSPAAKRVKLDGGSPAAKRVKLDGGSPAAKRVKLDGGSPAAKRVKLDGPPKKKRKVGGSKRTADSQHSTPPKTKRKVEFEPKKKRKV

SEQ ID NO: 450 - protein, 67 aa, synthetic construct
  REGION 1..67: note = nuclear localization signal
GSPAAKRVKLGGSPAAKRVKLGGSPKKKRKVGGSPKKKRKVTGGGPGGGAAAGSGSPKKKRKVGSGS

SEQ ID NO: 451 - protein, 67 aa, synthetic construct
  REGION 1..67: note = nuclear localization signal
GSKRPAATKKAGQAKKKKGGSKRPAATKKAGQAKKKKGPKRTADSQHSTPPKTKRKVEFEPKKKRKV

SEQ ID NO: 452 - protein, 82 aa, synthetic construct
  REGION 1..82: note = nuclear localization signal
GSKRPAATKKAGQAKKKKGGSKRPAATKKAGQAKKKKAEAAAKEAAAKEAAAKAKRTADSQHSTPPKTKRKVEFEPKKKRKV

SEQ ID NO: 453 - protein, 21 aa, synthetic construct
  REGION 1..21: note = nuclear localization signal
GPPKKKRKVPPPPAAKRVKLD

SEQ ID NO: 454 - protein, 71 aa, synthetic construct
  REGION 1..71: note = nuclear localization signal
GSPAAKRVKLDGGSPAAKRVKLDGGSPAAKRVKLDGGSPAAKRVKLDGGSPAAKRVKLDGGSPAAKRVKLD

SEQ ID NO: 455 - protein, 41 aa, synthetic construct
  REGION 1..41: note = nuclear localization signal
GSPAAKRVKLGGSPAAKRVKLGGSPKKKRKVGGSPKKKRKV

SEQ ID NO: 456 - protein, 37 aa, synthetic construct
  REGION 1..37: note = nuclear localization signal
GSKRPAATKKAGQAKKKKGGSKRPAATKKAGQAKKKK

SEQ ID NO: 457 - protein, 37 aa, synthetic construct; identical to SEQ ID NO: 456
  REGION 1..37: note = nuclear localization signal

SEQ ID NO: 458 - protein, 11 aa, synthetic construct
  REGION 1..11: note = peptide transduction domain
YGRKKRRQRRR

SEQ ID NO: 459 - protein, 8 aa, synthetic construct
  REGION 1..8: note = peptide transduction domain
RKKRRQRR

SEQ ID NO: 460 - protein, 11 aa, synthetic construct
  REGION 1..11: note = peptide transduction domain
YARAAARQARA

SEQ ID NO: 461 - protein, 11 aa, synthetic construct
  REGION 1..11: note = peptide transduction domain
THRLPRRRRRR

SEQ ID NO: 462 - protein, 11 aa, synthetic construct
  REGION 1..11: note = peptide transduction domain
GGRRARRRRRR

SEQ ID NO: 463 - protein, 50 aa, synthetic construct
  REGION 1..50: note = peptide transduction domain
RRRRRRRRRRRRRRRRRRRRRRRRRRRRRRRRRRRRRRRRRRRRRRRRRR

SEQ ID NO: 464 - protein, 12 aa, synthetic construct
  REGION 1..12: note = peptide transduction domain
RRQRRTSKLMKR

SEQ ID NO: 465 - protein, 27 aa, synthetic construct
  REGION 1..27: note = peptide transduction domain
GWTLNSAGYLLGKINLKALAALAKKIL

SEQ ID NO: 466 - protein, 33 aa, synthetic construct
  REGION 1..33: note = peptide transduction domain
KALAWEAKLAKALAKALAKHLAKALAKALKCEA

SEQ ID NO: 467 - protein, 16 aa, synthetic construct
  REGION 1..16: note = peptide transduction domain
RQIKIWFQNRRMKWKK

SEQ ID NO: 468 - protein, 5 aa, synthetic construct
  REGION 1..5: note = Linker
GGGGG

SEQ ID NO: 469 - protein, 10 aa, synthetic construct
  REGION 1..10: note = Linker
GSGSGSGSGS

SEQ ID NO: 470 - protein, 25 aa, synthetic construct
  REGION 1..25: note = Linker
GSGGSGSGGSGSGGSGSGGSGSGGS

SEQ ID NO: 471 - protein, 30 aa, synthetic construct
  REGION 1..30: note = Linker
GGSGGSGGSGGSGGSGGSGGSGGSGGSGGS

SEQ ID NO: 472 - protein, 20 aa, synthetic construct
  REGION 1..20: note = Linker
GGGSGGGSGGGSGGGSGGGS

SEQ ID NO: 473 - protein, 4 aa, synthetic construct
  REGION 1..4: note = Linker
GGSG

SEQ ID NO: 474 - protein, 5 aa, synthetic construct
  REGION 1..5: note = Linker
GGSGG

SEQ ID NO: 475 - protein, 5 aa, synthetic construct
  REGION 1..5: note = Linker
GSGSG

SEQ ID NO: 476 - protein, 5 aa, synthetic construct
  REGION 1..5: note = Linker
GSGGG

SEQ ID NO: 477 - protein, 5 aa, synthetic construct
  REGION 1..5: note = Linker
GGGSG

SEQ ID NO: 478 - protein, 5 aa, synthetic construct
  REGION 1..5: note = Linker
GSSSG

SEQ ID NO: 479 - protein, 4 aa, synthetic construct
  REGION 1..4: note = Linker
GPGP

SEQ ID NO: 480 - protein, 6 aa, synthetic construct
  REGION 1..6: note = Linker
PPAPPA

SEQ ID NO: 481 - protein, 4 aa, synthetic construct
  REGION 1..4: note = Linker
PPPG

SEQ ID NO: 482 - protein, 7 aa, synthetic construct
  REGION 1..7: note = Linker
PPPGPPP

SEQ ID NO: 483 - protein, 23 aa, synthetic construct
  REGION 1..23: note = Linker
GGGSGGGSGGGSGGGSGGGSPPP

SEQ ID NO: 484 - protein, 23 aa, synthetic construct
  REGION 1..23: note = Linker
PPPGGGSGGGSGGGSGGGSGGGS

SEQ ID NO: 485 - protein, 17 aa, synthetic construct
  REGION 1..17: note = Linker
AEAAAKEAAAKEAAAKA

SEQ ID NO: 486 - protein, 12 aa, synthetic construct
  REGION 1..12: note = Linker
TPPKTKRKVEFE

SEQ ID NO: 487 - DNA, 130 bp, synthetic construct
  misc_feature 1..130: note = 5' ITR
  source 1..130: mol_type = other DNA
cctgcaggcagctgcgcgctcgctcgctcactgaggccgcccgggcgtcgggcgacctttggtcgcccggcctcagtgagcgagcgagcgcgcagagagggagtggccaactccatcactaggggttcct

SEQ ID NO: 488 - DNA, 141 bp, synthetic construct
  misc_feature 1..141: note = 3' ITR
  source 1..141: mol_type = other DNA
aggaacccctagtgatggagttggccactccctctctgcgcgctcgctcgctcactgaggccgggcgaccaaaggtcgcccgacgcccgggctttgcccgggcggcctcagtgagcgagcgagcgcgcagctgcctgcagg

SEQ ID NO: 489 - DNA, 129 bp, synthetic construct
  misc_feature 1..129: note = 5' ITR
  source 1..129: mol_type = other DNA
tgctcactcactcactcactgaggcctgcagagcaaagctctgcagtctggggacctttggtccccaggcctcagtgagtgagtgagtgagcagagagggagtggccaactccatcactaggggttcct

SEQ ID NO: 490 - DNA, 131 bp, synthetic construct
  misc_feature 1..131: note = 3' ITR
  source 1..131: mol_type = other DNA
tctgctcactcactcactcactgaggcctgcagagcaaagctctgcagtctggggacctttggtccccaggcctcagtgagtgagtgagtgagcagagagggagtggccaactccatcactaggggttcct

SEQ ID NO: 491 - RNA, 20 nt, synthetic construct
  misc_feature 1..20: note = spacer 23.2
  source 1..20: mol_type = other RNA
agagcgtgatattaccctgt

SEQ ID NO: 492 - protein, 978 aa, synthetic construct
  REGION 1..978: note = CasX variant
QEIKRINKIRRRLVKDSNTKKAGKTGPMKTLLVRVMTPDLRERLENLRKKPENIPQPISNTSRANLNKLLTDYTEMKKAILHVYWEEFQKDPVGLMSRVAQPASKKIDQNKLKPEMDEKGNLTTAGFACSQCGQPLFVYKLEQVSEKGKAYTNYFGRCNVAEHEKLILLAQLKPEKDSDEAVTYSLGKFGQRALDFYSIHVTKESTHPVKPLAQIAGNRYASGPVGKALSDACMGTIASFLSKYQDIIIEHQKVVKGNQKRLESLRELAGKENLEYPSVTLPPQPHTKEGLDAYNEVIARVRMWVNLNLWQKLKLSRDDAKPLLRLKGFPSFPLVERQANEVDWWDMVCNVKKLINEKKEDGKVFWQNLAGYKRQEALRPYLSSEEDRKKGKKFARYQLGDLLLHLEKKHGEDWGKVYDEAWERIDKKVEGLSKHIKLEEERRSEDAQSKAALTDWLRAKASFVIEGLKEADKDEFCRCELKLQKWYGDLRGKPFAIEAENSILDISGFSKQYNCAFIWQKDGVKKLNLYLIINYFKGGKLRFKKIKPEAFEANRFYTVINKKSGEIVPMEVNFNFDDPNLIILPLAFGKRQGREFIWNDLLSLETGSLKLANGRVIEKTLYNRRTRQDEPALFVALTFERREVLDSSNIKPMNLIGVDRGENIPAVIALTDPEGCPLSRFKDSLGNPTHILRIGESYKEKQRTIQAKKEVEQRRAGGYSRKYASKAKNLADDMVRNTARDLLYYAVTQDAMLIFENLSRGFGRQGKRTFMAERQYTRMEDWLTAKLAYEGLPSKTYLSKTLAQYTSKTCSNCGFTITSADYDRVLEKLKKTATGWMTTINGKELKVEGQITYYNRYKRQNVVKDLSVELDRLSEESVNNDISSWTKGRSGEALSLLKKRFSHRPVQEKFVCLNCGFETHADEQAALNIARSWLFLRSQEYKKYQTNKTTGNTDKRAFVETWQSFYRKKLKEVWKPAV

SEQ ID NO: 493 - protein, 978 aa, synthetic construct
  REGION 1..978: note = CasX variant
QEIKRINKIRRRLVKDSNTKKAGKTGPMKTLLVRVMTPDLRERLENLRKKPENIPQPISNTSRANLNKLLTDYTEMKKAILHVYWEEFQKDPVGLMSRVAQPASKKIDQNKLKPEMDEKGNLTTAGFACSQCGQPLFVYKLEQVSEKGKAYTNYFGRCNVAEHEKLILLAQLKPEKDSDEAVTYSLGKFGQRALDFYSIHVTKESTHPVKPLAQIAGNRYASGPVGKALSDACMGTIASFLSKYQDIIIEHQKVVKGNQKRLESLRELAGKENLEYPSVTLPPQPHTKEGVDAYNEVIARVRWWVNLNLWQKLKLSRDDAKPLLRLKGFPSFPLVERQANEVDWWDMVCNVKKLINEKKEDGKVFWQNLAGYKRQEALRPYLSSEEDRKKGKKFARYQLGDLLLHLEKKHGEDWGKVYDEAWERIDKKVEGLSKHIKLEEERRSEDAQSKAALTDWLRAKASFVIEGLKEADKDEFCRCELKLQKWYGDLRGKPFAIEAENSILDISGFSKQYNCAFIWQKDGVKKLNLYLIINYFKGGKLRFKKIKPEAFEANRFYTVINKKSGEIVPMEVNFNFDDPNLIILPLAFGKRQGREFIWNDLLSLETGSLKLANGRVIEKTLYNRRTRQDEPALFVALTFERREVLDSSNIKPMNLIGVDRGENIPAVIALTDPEGCPLSRFKDSLGNPTHILRIGESYKEKQRTIQAKKEVEQRRAGGYSRKYASKAKNLADDMVRNTARDLLYYAVTQDAMLIFENLSRGFGRQGKRTFMAERQYTRMEDWLTAKLAYEGLPSKTYLSKTLAQYTSKTCSNCGFTITSADYDRVLEKLKKTATGWMTTINGKELKVEGQITYYNRYKRQNVVKDLSVELDRLSEESVNNDISSWTKGRSGEALSLLKKRFSHRPVQEKFVCLNCGFETHADEQAALNIARSWLFLRSQEYKKYQTNKTTGNTDKRAFVETWQSFYRKKLKEVWKPAV

SEQ ID NO: 494 - protein, 978 aa, synthetic construct
  REGION 1..978: note = CasX variant
QEIKRINKIRRRLVKDSNTKKAGKTGPMKTLLVRVMTPDLRERLENLRKKPENIPQPISNTSRANLNKLLTDYTEMKKAILHVYWEEFQKDPVGLMSRVAQPASKKIDQNKLKPEMDEKGNLTTAGFACSQCGQPLFVYKLEQVSEKGKAYTNYFGRCNVAEHEKLILLAQLKPEKDSDEAVTYSLGKFGQRALDFYSIHVTKESTHPVKPLAQIAGNRYASGPVGKALSDACMGTIASFLSKYQDIIIEHQKVVKGNQKRLESLRELAGKENLEYPSVTLPPQPHTKEGLDAYNEVIARVRWWVNLNLWQKLKLSRDDAKPLLRLKGFPSFPLVERQANEVDWWDMVCNVKKLINEKKEDGKVFWQNLAGYKRQEALRPYLSSEEDRKKGKKFARYQLGDLLLHLEKKHGEDWGKVYDEAWERIDKKVEGLSKHIKLEEERRSEDAQSKAALTDWLRAKASFVIEGLKEADKDEFCRCELKLQKWYGDLRGKPFAIEAENSILDISGFSKQYNCAFIWQKDGVKKLNLYLIINYFKGGKLRFKKIKPEAFEANRFYTVINKKSGEIVPMEVNFNFDDPNLIILPLAFGKRQGREFIWNDLLSLETGSLKLANGRVIEKTLYNRRTRQDEPALFVALTFERREVLDSSNIKPMNLIGVDRGENIPAVIALTDPEGCPLSRFKDSLGNPTHILRIGESYKEKQRTIQAKKEVEQRRAGGYSRKYASKAKNLADDMVRNTARDLLYYAVTQDAMLIFENLSRGFGRQGKRTFMAERQYTRMEDWLTAKLAYEGLPSKTYLSKTLAQYTSKTCSNCGFTITSADYDRVLEKLKKTATGWMTTINGKELKVEGQITYYNRYKRQNVVKDLSVELDRLSEESVNNDISSWTKGRSGEALSLLKKRFSHRPVQEKFVCLNCGFETHADEQAALNIARSWLFLRSQEYKKYQTNKTTGNTDKRAFVETWQSFYRKKLKEVWKPAV

SEQ ID NO: 495 - protein, 979 aa, synthetic construct
  REGION 1..979: note = CasX variant
QEIKRINKIRRRLVKDSNTKKAGKTRGPMKTLLVRVMTPDLRERLENLRKKPENIPQPISNTSRANLNKLLTDYTEMKKAILHVYWEEFQKDPVGLMSRVAQPASKKIDQNKLKPEMDEKGNLTTAGFACSQCGQPLFVYKLEQVSEKGKAYTNYFGRCNVAEHEKLILLAQLKPEKDSDEAVTYSLGKFGQRALDFYSIHVTKESTHPVKPLAQIAGNRYASGPVGKALSDACMGTIASFLSKYQDIIIEHQKVVKGNQKRLESLRELAGKENLEYPSVTLPPQPHTKEGVDAYNEVIARVRMWVNLNLWQKLKLSRDDAKPLLRLKGFPSFPLVERQANEVDWWDMVCNVKKLINEKKEDGKVFWQNLAGYKRQEALRPYLSSEEDRKKGKKFARYQLGDLLLHLEKKHGEDWGKVYDEAWERIDKKVEGLSKHIKLEEERRSEDAQSKAALTDWLRAKASFVIEGLKEADKDEFCRCELKLQKWYGDLRGKPFAIEAENSILDISGFSKQYNCAFIWQKDGVKKLNLYLIINYFKGGKLRFKKIKPEAFEANRFYTVINKKSGEIVPMEVNFNFDDPNLIILPLAFGKRQGREFIWNDLLSLETGSLKLANGRVIEKTLYNRRTRQDEPALFVALTFERREVLDSSNIKPMNLIGVDRGENIPAVIALTDPEGCPLSRFKDSLGNPTHILRIGESYKEKQRTIQAKKEVEQRRAGGYSRKYASKAKNLADDMVRNTARDLLYYAVTQDAMLIFENLSRGFGRQGKRTFMAERQYTRMEDWLTAKLAYEGLPSKTYLSKTLAQYTSKTCSNCGFTITSADYDRVLEKLKKTATGWMTTINGKELKVEGQITYYNRYKRQNVVKDLSVELDRLSEESVNNDISSWTKGRSGEALSLLKKRFSHRPVQEKFVCLNCGFETHADEQAALNIARSWLFLRSQEYKKYQTNKTTGNTDKRAFVETWQSFYRKKLKEVWKPAV

SEQ ID NO: 496 - protein, 978 aa, synthetic construct
  REGION 1..978: note = CasX variant
QEIKRINKIRRRLVKDSNTKKAGKTGPMKTLLVRVMTPDLRERLENLRKKPENIPQPISNTSRANLNKLLTDYTEMKKAILHVYWEEFQKDPVGLMSRVAQPASKKIDQNKLKPEMDEKGNLTTAGFACSQCGQPLFVYKLEQVSEKGKAYTNYFGRCNVAEHEKLILLAQLKPEKDSDEAVTYSLGKFGQRALDFYSIHVTKESTHPVKPLAQIAGNRYASSPVGKALSDACMGTIASFLSKYQDIIIEHQKVVKGNQKRLESLRELAGKENLEYPSVTLPPQPHTKEGVDAYNEVIARVRMWVNLNLWQKLKLSRDDAKPLLRLKGFPSFPLVERQANEVDWWDMVCNVKKLINEKKEDGKVFWQNLAGYKRQEALRPYLSSEEDRKKGKKFARYQLGDLLLHLEKKHGEDWGKVYDEAWERIDKKVEGLSKHIKLEEERRSEDAQSKAALTDWLRAKASFVIEGLKEADKDEFCRCELKLQKWYGDLRGKPFAIEAENSILDISGFSKQYNCAFIWQKDGVKKLNLYLIINYFKGGKLRFKKIKPEAFEANRFYTVINKKSGEIVPMEVNFNFDDPNLIILPLAFGKRQGREFIWNDLLSLETGSLKLANGRVIEKTLYNRRTRQDEPALFVALTFERREVLDSSNIKPMNLIGVDRGENIPAVIALTDPEGCPLSRFKDSLGNPTHILRIGESYKEKQRTIQAKKEVEQRRAGGYSRKYASKAKNLADDMVRNTARDLLYYAVTQDAMLIFENLSRGFGRQGKRTFMAERQYTRMEDWLTAKLAYEGLPSKTYLSKTLAQYTSKTCSNCGFTITSADYDRVLEKLKKTATGWMTTINGKELKVEGQITYYNRYKRQNVVKDLSVELDRLSEESVNNDISSWTKGRSGEALSLLKKRFSHRPVQEKFVCLNCGFETHADEQAALNIARSWLFLRSQEYKKYQTNKTTGNTDKRAFVETWQSFYRKKLKEVWKPAV

SEQ ID NO: 497 - protein, 979 aa, synthetic construct
  REGION 1..979: note = CasX variant
QEIKRINKIRRRLVKDSNTKKAGKTRGPMKTLLVRVMTPDLRERLENLRKKPENIPQPISNTSRANLNKLLTDYTEMKKAILHVYWEEFQKDPVGLMSRVAQPASKKIDQNKLKPEMDEKGNLTTAGFACSQCGQPLFVYKLEQVSEKGKAYTNYFGRCNVAEHEKLILLAQLKPEKDSDEAVTYSLGKFGQRALDFYSIHVTKESTHPVKPLAQIAGNRYASSPVGKALSDACMGTIASFLSKYQDIIIEHQKVVKGNQKRLESLRELAGKENLEYPSVTLPPQPHTKEGVDAYNEVIARVRMWVNLNLWQKLKLSRDDAKPLLRLKGFPSFPLVERQANEVDWWDMVCNVKKLINEKKEDGKVFWQNLAGYKRQEALRPYLSSEEDRKKGKKFARYQLGDLLLHLEKKHGEDWGKVYDEAWERIDKKVEGLSKHIKLEEERRSEDAQSKAALTDWLRAKASFVIEGLKEADKDEFCRCELKLQKWYGDLRGKPFAIEAENSILDISGFSKQYNCAFIWQKDGVKKLNLYLIINYFKGGKLRFKKIKPEAFEANRFYTVINKKSGEIVPMEVNFNFDDPNLIILPLAFGKRQGREFIWNDLLSLETGSLKLANGRVIEKTLYNRRTRQDEPALFVALTFERREVLDSSNIKPMNLIGVDRGENIPAVIALTDPEGCPLSRFKDSLGNPTHILRIGESYKEKQRTIQAKKEVEQRRAGGYSRKYASKAKNLADDMVRNTARDLLYYAVTQDAMLIFENLSRGFGRQGKRTFMAERQYTRMEDWLTAKLAYEGLPSKTYLSKTLAQYTSKTCSNCGFTITSADYDRVLEKLKKTATGWMTTINGKELKVEGQITYYNRYKRQNVVKDLSVELDRLSEESVNNDISSWTKGRSGEALSLLKKRFSHRPVQEKFVCLNCGFETHADEQAALNIARSWLFLRSQEYKKYQTNKTTGNTDKRAFVETWQSFYRKKLKEVWKPAV

SEQ ID NO: 498 - protein, 978 aa, synthetic construct
  REGION 1..978: note = CasX variant
QEIKRINKIRRRLVKDSNTKKAGKTGPMKTLLVRVMTPDLRERLENLRKKPENIPQPISNTSRANLNKLLTDYTEMKKAILHVYWEEFQKDPVGLMSRVAQPASKKIDQNKLKPEMDEKGNLTTAGFACSQCGQPLFVYKLEQVSEKGKAYTNYFGRCNVAEHEKLILLAQLKPEKDSDEAVTYSLGKFGQRALDFYSIHVTKESTHPVKPLAQIAGNRYASGPVGKALSDACMGTIASFLSKYQDIIIEHQKVVKGNQKRLESLRELAGKENLEYPSVTLPPQPHTKEGVDAYNEVIARVRMWVNLNLWQKLKLSRDDAKPLLRLKGFPSFPLVERQANEVDWWDMVCNVKKLINEKKEDGKVFWQNLAGYKRQEALRPYLSSEEDRKKGKKFARYQLGDLLLHLEKKHGEDWGKVYDEAWERIDKKVEGLSKHIKLEEERRSEDAQSKAALTDWLRAKASFVIEGLKEADKDEFCRCELKLQKWYGDLRGKPFAIEAENSILDISGFSKQYNCAFIWQKDGVKKLNLYLIINYFKGGKLRFKKIKPEAFEANRFYTVINKKSGEIVPMEVNFNFDDPNLIILPLAFGKRQGREFIWNDLLSLETGSLKLANGRVIEKTLYNRRTRQDEPALFVALTFERREVLDSSNIKPMNLIGVDRGENIPAVIALTDPEGCPLSRFKDSLGNPTHILRIGESYKHKQRTIQAKKEVEQRRAGGYSRKYASKAKNLADDMVRNTARDLLYYAVTQDAMLIFENLSRGFGRQGKRTFMAERQYTRMEDWLTAKLAYEGLPSKTYLSKTLAQYTSKTCSNCGFTITSADYDRVLEKLKKTATGWMTTINGKELKVEGQITYYNRYKRQNVVKDLSVELDRLSEESVNNDISSWTKGRSGEALSLLKKRFSHRPVQEKFVCLNCGFETHADEQAALNIARSWLFLRSQEYKKYQTNKTTGNTDKRAFVETWQSFYRKKLKEVWKPAV

SEQ ID NO: 499 - protein, 978 aa, synthetic construct
  REGION 1..978: note = CasX variant
QEIKRINKIRRRLVKDSNTKKAGKTGPMKTLLVRVMTPDLRERLENLRKKPENIPQPISNTSRANLNKLLTDYTEMKKAILHVYWEEFQKDPVGLMSRVAQPASKKIDQNKLKPEMDEKGNLTTAGFACSQCGQPLFVYKLEQVSEKGKAYTNYFGRCNVAEHEKLILLAQLKPEKDSDEAVTYSLGKFGQRALDFYSIHVTKESTHPVKPLAQIAGNRYASGPVGKALSDACMGTIASFLSKYQDIIIEHQKVVKGNQKRLESLRELAGKENLEYPSVTLPPQPHTKEGVDAYNEVIARVRMWVNLNLWQKLKLSRDDAKPLLRLKGFPSFPLVERQANEVDWWDMVCNVKKLINEKKEDGKVFWQNLAGYKRQEALRPYLSSEEDRKKGKKFARYQLGDLLLHLEKKHGEDWGKVYDEAWERIDKKVEGLSKHIKLEEERRSEDAQSKAALTDWLRAKASFVIEGLKEADKDEFCRCELKLQKWYGDLRGKPFAIEAENSILDISGFSKQYNCAFIWQKDGVKKLNLYLIINYFKGGKLRFKKIKPEAFEANRFYTVINKKSGEIVPMEVNFNFDDPNLIILPLAFGKRQGREFIWNDLLSLETGSLKLANGRVIEKTLYNRRTRQDEPALFVALTFERREVLDSSNIKPMNLIGVDRGENIPAVIALTDPEGCPLSRFKDSLGNPTHILRIGESYKEKQRTIQAYKEVEQRRAGGYSRKYASKAKNLADDMVRNTARDLLYYAVTQDAMLIFENLSRGFGRQGKRTFMAERQYTRMEDWLTAKLAYEGLPSKTYLSKTLAQYTSKTCSNCGFTITSADYDRVLEKLKKTATGWMTTINGKELKVEGQITYYNRYKRQNVVKDLSVELDRLSEESVNNDISSWTKGRSGEALSLLKKRFSHRPVQEKFVCLNCGFETHADEQAALNIARSWLFLRSQEYKKYQTNKTTGNTDKRAFVETWQSFYRKKLKEVWKPAV

SEQ ID NO: 500 - protein, 978 aa, synthetic construct
  REGION 1..978: note = CasX variant
QEIKRINKIRRRLVKDSNTKKAGKTGPMKTLLVRVMTPDLRERLENLRKKPENIPQPISNTSRANLNKLLTDYTEMKKAILHVYWEEFQKDPVGLMSRVAQPASKKIDQNKLKPEMDEKGNLTTAGFACSQCGQPLFVYKLEQVSEKGKAYTNYFGRCNVAEHEKLILLAQLKPEKDSDEAVTYSLGKFGQRALDFYSIHVTKESTHPVKPLAQIAGNRYASGPVGKALSDACMGTIASFLSKYQDIIIEHQKVVKGNQKRLESLRELAGKENLEYPSVTLPPQPHTKEGVDAYNEVIARVRMWVNLNLWQKLKLSRDDAKPLLRLKGFPSFPLVERQANEVDWWDMVCNVKKLINEKKEDGKVFWQNLAGYKRQEALRPYLSSEEDRKKGKKFARYQLGDLLLHLEKKHGEDWGKVYDEAWERIDKKVEGLSKHIKLEEERRSEDAQSKAALTDWLRAKASFVIEGLKEADKDEFCRCELKLQKWYGDLRGKPFAIEAENSILDISGFSKQYNCAFIWQKDGVKKLNLYLIINYFKGGKLRFKKIKPEAFEANRFYTVINKKSGEIVPMEVNFNFDDPNLIILPLAFGKRQGREFIWNDLLSLETGSLKLANGRVIEKTLYNRRTRQDEPALFVALTFERREVLDSSNIKPMNLIGVDRGENIPAVIALTDPEGCPLSRFKDSLGNPTHILRIGESYKHKQRTIQAYKEVEQRRAGGYSRKYASKAKNLADDMVRNTARDLLYYAVTQDAMLIFENLSRGFGRQGKRTFMAERQYTRMEDWLTAKLAYEGLPSKTYLSKTLAQYTSKTCSNCGFTITSADYDRVLEKLKKTATGWMTTINGKELKVEGQITYYNRYKRQNVVKDLSVELDRLSEESVNNDISSWTKGRSGEALSLLKKRFSHRPVQEKFVCLNCGFETHADEQAALNIARSWLFLRSQEYKKYQTNKTTGNTDKRAFVETWQSFYRKKLKEVWKPAV

SEQ ID NO: 501 - RNA, 109 nt, synthetic construct
  misc_feature 1..109: note = gRNA
  source 1..109: mol_type = other RNA
actggcgcttttatctgattactttgagagccatcaccagcgactatgtcgtagtgggtaaagctccctcttcggagggagcatcaaagtcctggcttcctggtgaaga

SEQ ID NO: 502 - RNA, 109 nt, synthetic construct; identical to SEQ ID NO: 501
  misc_feature 1..109: note = gRNA
  source 1..109: mol_type = other RNA

SEQ ID NO: 503 - RNA, 109 nt, synthetic construct
  misc_feature 1..109: note = gRNA
  source 1..109: mol_type = other RNA
actggcgcttttatctgattactttgagagccatcaccagcgactatgtcgtagtgggtaaagctccctcttcggagggagcatcaaagtggcttcctggtgaagatga

SEQ ID NO: 504 - RNA, 109 nt, synthetic construct; identical to SEQ ID NO: 503
  misc_feature 1..109: note = gRNA
  source 1..109: mol_type = other RNA

SEQ ID NO: 505 - RNA, 109 nt, synthetic construct
  misc_feature 1..109: note = gRNA
  source 1..109: mol_type = other RNA
actggcgcttttatctgattactttgagagccatcaccagcgactatgtcgtagtgggtaaagctccctcttcggagggagcatcaaaggtgtagtacaagagatagaa

SEQ ID NO: 506 - RNA, 109 nt, synthetic construct; identical to SEQ ID NO: 505
  misc_feature 1..109: note = gRNA
  source 1..109: mol_type = other RNA

SEQ ID NO: 507 - RNA, 109 nt, synthetic construct
  misc_feature 1..109: note = gRNA
  source 1..109: mol_type = other RNA
actggcgcttctatctgattactctgagcgccatcaccagcgactatgtcgtagtgggtaaagctccctcttcggagggagcatcagagtcctggcttcctggtgaaga

SEQ ID NO: 508 - RNA, 109 nt, synthetic construct; identical to SEQ ID NO: 507
  misc_feature 1..109: note = gRNA
  source 1..109: mol_type = other RNA

SEQ ID NO: 509 - RNA, 109 nt, synthetic construct
  misc_feature 1..109: note = gRNA
  source 1..109: mol_type = other RNA
actggcgcttctatctgattactctgagcgccatcaccagcgactatgtcgtagtgggtaaagctccctcttcggagggagcatcagagtggcttcctggtgaagatga

SEQ ID NO: 510 - RNA, 109 nt, synthetic construct; identical to SEQ ID NO: 509
  misc_feature 1..109: note = gRNA
  source 1..109: mol_type = other RNA

SEQ ID NO: 511 - RNA, 109 nt, synthetic construct
  misc_feature 1..109: note = gRNA
  source 1..109: mol_type = other RNA
actggcgcttctatctgattactctgagcgccatcaccagcgactatgtcgtagtgggtaaagctccctcttcggagggagcatcagaggtgtagtacaagagatagaa

SEQ ID NO: 512 - RNA, 109 nt, synthetic construct; identical to SEQ ID NO: 511
  misc_feature 1..109: note = gRNA
  source 1..109: mol_type = other RNA

SEQ ID NO: 513 - RNA, 107 nt, synthetic construct
  misc_feature 1..107: note = gRNA
  source 1..107: mol_type = other RNA
actggcgcttttatctgattactttgagagccatcaccagcgactatgtcgtagtgggtaaagctccctcttcggagggagcatcaaagggccgagatgtctcgctc

SEQ ID NO: 514 - RNA, 107 nt, synthetic construct; identical to SEQ ID NO: 513
  misc_feature 1..107: note = gRNA
  source 1..107: mol_type = other RNA

SEQ ID NO: 515 - RNA, 119 nt, synthetic construct
  misc_feature 1..119: note = gRNA
  source 1..119: mol_type = other RNA
actggcgcttctatctgattactctgagcgccatcaccagcgactatgtcgtagtgggtaaagccgcttacggacttcggtccgtaagaggcatcagagtcctggcttcctggtgaaga

SEQ ID NO: 516 - RNA, 119 nt, synthetic construct; identical to SEQ ID NO: 515
  misc_feature 1..119: note = gRNA
  source 1..119: mol_type = other RNA

SEQ ID NO: 517 - RNA, 123 nt, synthetic construct
  misc_feature 1..123: note = gRNA
  source 1..123: mol_type = other RNA
actggcgcttctatctgattactctgagcgccatcaccagcgactatgtcgtagtgggtaaagccgcttacggacttcggtccgtaagaggcatcagagtcctggcttcctggtgaagatttt

SEQ ID NO: 518 - RNA, 119 nt, synthetic construct; identical to SEQ ID NO: 515
  misc_feature 1..119: note = gRNA
  source 1..119: mol_type = other RNA

SEQ ID NO: 519 - RNA, 119 nt, synthetic construct; identical to SEQ ID NO: 515
  misc_feature 1..119: note = gRNA
  source 1..119: mol_type = other RNA

SEQ ID NO: 520 - RNA, 119 nt, synthetic construct; identical to SEQ ID NO: 515
  misc_feature 1..119: note = gRNA
  source 1..119: mol_type = other RNA

SEQ ID NO: 521 - RNA, 119 nt, synthetic construct; identical to SEQ ID NO: 515
  misc_feature 1..119: note = gRNA
  source 1..119: mol_type = other RNA

SEQ ID NO: 522 - RNA, 119 nt, synthetic construct
  misc_feature 1..119: note = gRNA
  source 1..119: mol_type = other RNA
actggcgcttctatctgattactctgagcgccatcaccagcgactatgtcgtagtgggtaaagccgcttacggacttcggtccgtaagaggcatcagagtggcttcctggtgaagatga

SEQ ID NO: 523 - RNA, 119 nt, synthetic construct; identical to SEQ ID NO: 522
  misc_feature 1..119: note = gRNA
  source 1..119: mol_type = other RNA

SEQ ID NO: 524 - RNA, 122 nt, synthetic construct
  misc_feature 1..122: note = gRNA
  source 1..122: mol_type = other RNA
actggcgcttctatctgattactctgagcgccatcaccagcgactatgtcgtagtgggtaaagccgcttacggacttcggtccgtaagaggcatcagagtggcttcctggtgaagatgattt

SEQ ID NO: 525 - RNA, 119 nt, synthetic construct; identical to SEQ ID NO: 522
  misc_feature 1..119: note = gRNA
  source 1..119: mol_type = other RNA

SEQ ID NO: 526 - RNA, 119 nt, synthetic construct; identical to SEQ ID NO: 522
  misc_feature 1..119: note = gRNA
  source 1..119: mol_type = other RNA

SEQ ID NO: 527 - RNA, 119 nt, synthetic construct; identical to SEQ ID NO: 522
  misc_feature 1..119: note = gRNA
  source 1..119: mol_type = other RNA

SEQ ID NO: 528 - RNA, 119 nt, synthetic construct; identical to SEQ ID NO: 522
  misc_feature 1..119: note = gRNA
  source 1..119: mol_type = other RNA

SEQ ID NO: 529 - RNA, 109 nt, synthetic construct
  misc_feature 1..109: note = gRNA
  source 1..109: mol_type = other RNA
actggcgcttctatctgattactctgagcgccatcaccagcgactatgtcgtagtgggtaaagctccctcttcggagggagcatcagagctggcttcttggtgaagatg

SEQ ID NO: 530 - RNA, 109 nt, synthetic construct; identical to SEQ ID NO: 529
  misc_feature 1..109: note = gRNA
  source 1..109: mol_type = other RNA

SEQ ID NO: 531 - RNA, 109 nt, synthetic construct; identical to SEQ ID NO: 529
  misc_feature 1..109: note = gRNA
  source 1..109: mol_type = other RNA

SEQ ID NO: 532 - RNA, 109 nt, synthetic construct; identical to SEQ ID NO: 529
  misc_feature 1..109: note = gRNA
  source 1..109: mol_type = other RNA

SEQ ID NO: 533 - DNA, 60 bp, synthetic construct
  misc_feature 1..60: note = target DNA substrate oligonucleotide
  source 1..60: mol_type = other DNA
catgtcttccatggccttcttcctggcttcctggtgaagatgagtggcgacctgctggag

SEQ ID NO: 534 - DNA, 60 bp, synthetic construct
  misc_feature 1..60: note = target DNA substrate oligonucleotide
  source 1..60: mol_type = other DNA
ctccagcaggtcgccactcatcttcaccaggaagccaggaagaaggccatggaagacatg

SEQ ID NO: 535 - DNA, 99 bp, synthetic construct
  misc_feature 1..99: note = guide RNA scaffold
  source 1..99: mol_type = other DNA
actgggccttctatctgattactctgaggcccatcaccagcgactatgtcgtagtgggtaaagccgcttagggacttcggtccctaagaggcatcagag

SEQ ID NO: 536 - DNA, 97 bp, synthetic construct
  misc_feature 1..97: note = guide RNA scaffold
  source 1..97: mol_type = other DNA
actgggccttctatctgattactctgaggcccatcaccagcgactatgtcgtagtgggtaaagcccttagggacttcggtccctaagggcatcagag

SEQ ID NO: 537 - DNA, 99 bp, synthetic construct
  misc_feature 1..99: note = guide RNA scaffold
  source 1..99: mol_type = other DNA
actgggccttctatctgattactctgaggcccatcaccagcgactatgtcgtagtgggtaaagcctcttagggacttcggtccctaagaggcatcagag

SEQ ID NO: 538 - DNA, 89 bp, synthetic construct
  misc_feature 1..89: note = guide RNA scaffold
  source 1..89: mol_type = other DNA
actgggccttctatctgattactctgaggcccatcaccagcgactatgtcgtagtgggtaaagctccctcttcggagggagcatcagag

SEQ ID NO: 539 - DNA, 97 bp, synthetic construct
  misc_feature 1..97: note = guide RNA scaffold
  source 1..97: mol_type = other DNA
actgggccttctatctgattactctgaggcccatcaccagcgactatgtcgtagtgggtaaagcccttagggaccttggtccctaagggcatcagag

SEQ ID NO: 540 - DNA, 99 bp, synthetic construct
  misc_feature 1..99: note = guide RNA scaffold
  source 1..99: mol_type = other DNA
actgggccttctatctgattactctgaggcccatcaccagcgactatgtcgtagtgggtaaagcctcttagggaccttggtccctaagaggcatcagag

SEQ ID NO: 541 - DNA, 89 bp, synthetic construct
  misc_feature 1..89: note = guide RNA scaffold
  source 1..89: mol_type = other DNA
actgggccttctatctgattactctgaggcccatcaccagcgactatgtcgtagtgggtaaagctccctccttggagggagcatcagag

SEQ ID NO: 542 - DNA, 97 bp, synthetic construct
  misc_feature 1..97: note = guide RNA scaffold
  source 1..97: mol_type = other DNA
actgggccttctatctgattactctgaggcccatcaccagcgactatgtcgtagtgggtaaagcccttagggaggaaactccctaagggcatcagag

SEQ ID NO: 543 - DNA, 99 bp, synthetic construct
  misc_feature 1..99: note = guide RNA scaffold
  source 1..99: mol_type = other DNA
actgggccttctatctgattactctgaggcccatcaccagcgactatgtcgtagtgggtaaagcctcttagggaggaaactccctaagaggcatcagag

SEQ ID NO: 544 - DNA, 89 bp, synthetic construct
  misc_feature 1..89: note = guide RNA scaffold
  source 1..89: mol_type = other DNA
actgggccttctatctgattactctgaggcccatcaccagcgactatgtcgtagtgggtaaagctccctggaaacagggagcatcagag

SEQ ID NO: 545 - DNA, 98 bp, synthetic construct
  misc_feature 1..98: note = guide RNA scaffold
  source 1..98: mol_type = other DNA
actgggccttctatctgattactctgaggcccatcaccagcgactatgtcgtagtgggtaaagcccttagggacttcaggtccctaagggcatcagag

SEQ ID NO: 546 - DNA, 100 bp, synthetic construct
  misc_feature 1..100: note = guide RNA scaffold
  source 1..100: mol_type = other DNA
actgggccttctatctgattactctgaggcccatcaccagcgactatgtcgtagtgggtaaagcctcttagggacttcaggtccctaagaggcatcagag

SEQ ID NO: 547 - DNA, 90 bp, synthetic construct
  misc_feature 1..90: note = guide RNA scaffold
  source 1..90: mol_type = other DNA
actgggccttctatctgattactctgaggcccatcaccagcgactatgtcgtagtgggtaaagctccctcttcaggagggagcatcagag

SEQ ID NO: 548 - DNA, 97 bp, synthetic construct
  misc_feature 1..97: note = guide RNA scaffold
  source 1..97: mol_type = other DNA
actgggccttctatctgattactctgaggcccatcaccaggcactatgtgctagtgggtaaagcccttagggaccttggtccctaagggcatcagag

SEQ ID NO: 549 - DNA, 99 bp, synthetic construct
  misc_feature 1..99: note = guide RNA scaffold
  source 1..99: mol_type = other DNA
actgggccttctatctgattactctgaggcccatcaccaggcactatgtgctagtgggtaaagcctcttagggaccttggtccctaagaggcatcagag

SEQ ID NO: 550 - DNA, 89 bp, synthetic construct
  misc_feature 1..89: note = guide RNA scaffold
  source 1..89: mol_type = other DNA
actgggccttctatctgattactctgaggcccatcaccaggcactatgtgctagtgggtaaagctccctccttggagggagcatcagag

SEQ ID NO: 551 - DNA, 97 bp, synthetic construct
  misc_feature 1..97: note = guide RNA scaffold
  source 1..97: mol_type = other DNA
actgggccttctatctgattactctgaggcccatcaccaggcactatgtgctagtgggtaaagcccttagggaggaaactccctaagggcatcagag

SEQ ID NO: 552 - DNA, 99 bp, synthetic construct
  misc_feature 1..99: note = guide RNA scaffold
  source 1..99: mol_type = other DNA
actgggccttctatctgattactctgaggcccatcaccaggcactatgtgctagtgggtaaagcctcttagggaggaaactccctaagaggcatcagag

SEQ ID NO: 553 - DNA, 89 bp, synthetic construct
  misc_feature 1..89: note = guide RNA scaffold
  source 1..89: mol_type = other DNA
actgggccttctatctgattactctgaggcccatcaccaggcactatgtgctagtgggtaaagctccctggaaacagggagcatcagag

SEQ ID NO: 554 - DNA, 98 bp, synthetic construct
  misc_feature 1..98: note = guide RNA scaffold
  source 1..98: mol_type = other DNA
actgggccttctatctgattactctgaggcccatcaccaggcactatgtgctagtgggtaaagcccttagggacttcaggtccctaagggcatcagag

SEQ ID NO: 555 - DNA, 100 bp, synthetic construct
  misc_feature 1..100: note = guide RNA scaffold
  source 1..100: mol_type = other DNA
actgggccttctatctgattactctgaggcccatcaccaggcactatgtgctagtgggtaaagcctcttagggacttcaggtccctaagaggcatcagag

SEQ ID NO: 556 - DNA, 90 bp, synthetic construct
  misc_feature 1..90: note = guide RNA scaffold
  source 1..90: mol_type = other DNA
actgggccttctatctgattactctgaggcccatcaccaggcactatgtgctagtgggtaaagctccctcttcaggagggagcatcagag

SEQ ID NO: 557 - RNA, 20 nt, synthetic construct
  misc_feature 1..20: note = Spacer 7.37
  source 1..20: mol_type = other RNA
ggccgagatgtctcgctccg

SEQ ID NO: 558 - DNA, 20 bp, synthetic construct
  misc_feature 1..20: note = non-targeting spacer 0.0
  source 1..20: mol_type = other DNA
cgagacgtaattacgtctcg

SEQ ID NO: 559 - DNA, 130 bp, synthetic construct; identical to SEQ ID NO: 487
  misc_feature 1..130: note = AAV2 5' ITR
  source 1..130: mol_type = other DNA

SEQ ID NO: 560 - DNA, 252 bp, synthetic construct
  misc_feature 1..252: note = CpG-depleted U1a promoter
  source 1..252: mol_type = other DNA
aatggaggtggtactatgtagatgagaattcaggagcaaactgggaaaagcaactgcttccaaatatttgtgatttttacagtgtagttttggaaaaactcttagcctaccaattcttctaagtgttttaaaatgtgggagccagtacacatgaagttatagagtgttttaatgaggcttaaatatttactgtaactatgaaatgctacacatatcatgctgttcaggctctgtggccatgcaactcatact

SEQ ID NO: 561 - DNA, 3006 bp, synthetic construct
  misc_feature 1..3006: note = CpG-depleted cMycNLS-CasX491-cMycNLS
  source 1..3006: mol_type = other DNA
atggctccagctgccaagagagtgaagctggactctagacaagagatcaagaggatcaacaagattagaagaaggctggtcaaggacagcaacaccaagaaggcaggcaagacaggccccatgaagaccctgcttgtcagagtgatgacccctgacctgagagagagactggaaaacctgagaaagaagcctgagaacatccctcagcctatctccaacaccagcagagccaacctgaacaagctgctgacagactacacagagatgaagaaagccatcctgcatgtgtactgggaagagttccagaaagaccctgtgggcctgatgagcagagtggcccagcctgccagcaagaagattgaccagaacaaactgaagccagagatggatgagaagggcaacctgaccacagctggctttgcctgctctcagtgtggccagcctctgtttgtgtacaagctggaacaagtgtctgagaaaggcaaggcctacaccaactactttggcagatgcaatgtggctgagcatgagaagctgatcctgctggcccagctgaagcctgaaaaggactctgatgaggctgtgacctacagcctgggcaagtttggacagagagccctggacttctacagcatccatgtgaccaaagaaagcacacaccctgtgaagcccctggctcagattgctggcaacagatatgcctctggacctgtgggcaaagccctgtctgatgcctgcatgggaaccattgccagctttctgagcaagtaccaggacatcatcattgagcaccagaaagtggtcaaggggaaccagaagaggctggaatctctgagagagctggctggcaaagagaacctggaatacccctctgtgaccctgcctcctcagcctcacaccaaagagggtgttgatgcctacaatgaagtgattgccagagtcaggatgtgggtcaacctgaatctgtggcagaagctgaagctgagcagggatgatgccaagcctctgctgagactgaagggcttccctagcttcccactggtggaaaggcaggctaatgaagtggattggtgggacatggtctgcaatgtgaagaaactgatcaatgagaagaaagaggatggcaaggttttctggcagaacctggctggctacaagaggcaagaagccctgaggccttacctgtcctctgaggaagataggaagaaggggaagaagtttgccagataccagctgggagatctgctgctgcacctggaaaagaaacatggggaagattggggcaaagtgtatgatgaggcctgggagagaattgacaagaaggtggaaggcctgagcaagcacattaagctggaagaggaaagaagatctgaggatgcccagagcaaggctgccctgactgattggctgagagccaaggccagctttgtgattgagggcctgaaagaggctgacaaggatgagttctgtagatgtgaactgaagctgcaaaagtggtatggggacctgaggggcaagccctttgccattgaggcagagaacagcatcctggacatcagtggcttcagcaagcagtacaactgtgccttcatttggcagaaggatggggttaagaagctcaacctgtacctgatcatcaactacttcaaaggtggcaagctgaggttcaagaagatcaagccagaggcctttgaggccaacaggttctacacagtgatcaacaaaaagtctggggagattgtgcccatggaagtgaacttcaactttgatgatcccaacctcatcatcctgccactggcctttggcaagagacagggcagagaattcatctggaatgacctgctgagcctggaaacaggcagcctgaaactggccaatggcagagtgattgagaaaaccctgtacaacagaaggaccagacaggatgagcctgcactgtttgtggccctgacctttgagagaagggaagtgctggatagcagcaacatcaagcccatgaacctgattggagtggacagaggggagaatatccctgctgtcattgccctgacagaccctgagggctgtcccctgagcagattcaaggactccctgggcaaccccacacacattctgagaattggggagagctacaaagagaagcagagaaccatccaggccaagaaagaagtggaacagaggagagctggaggctactctaggaagtatgccagcaaagccaagaatctggctgatgacatggtcagaaacacagccagggacctgctgtactatgctgtgacccaggatgccatgctgatctttgagaatctgagcagaggatttgggagacaaggcaagaggaccttcatggctgaaagacagtacaccaggatggaagattggctgactgccaaactggcctatgagggactgagcaagacctacctgtccaagacactggcccagtatacctccaagacctgcagcaattgtggcttcaccatcacctctgcagactatgacagagtgctggaaaagctcaagaaaacagccacaggctggatgaccaccatcaatgggaaagagctgaaggttgagggccagatcacctactacaacagatacaaaaggcagaatgtggttaaggacctgtctgtggaactggacagactgtctgaggaatctgtgaacaatgacatcagcagctggaccaagggcagatctggggaagctctgagcctgctgaagaagagattcagccacagacctgtgcaagagaagtttgtgtgtctgaactgtggctttgagacacatgctgatgaacaggctgctctgaacattgccagaagctggctgttcctgagaagccaagagtacaagaagtaccagaccaacaagaccacaggcaacactgacaagagggcctttgtggaaacctggcagagcttctacagaaagaaactcaaagaagtctggaagcctgctgtgggcagccctgcagctaaaagggtcaagctggactga

SEQ ID NO: 562 - DNA, 208 bp, synthetic construct
  misc_feature 1..208: note = CpG-depleted bGH-polyA sequence
  source 1..208: mol_type = other DNA
ctgtgccttctagttgccagccatctgttgtttgcccctccccagtgccttccttgaccctggaaggtgccactcccactgtcctttcctaataaaatgaggaaattgcatcacattgtctgagtaggtgtcattctattctggggggtggggtggggcaggacagcaagggggaggattgggaagagaatagcaggcatgctgggga

SEQ ID NO: 563 - DNA, 241 bp, synthetic construct
  misc_feature 1..241: note = CpG-depleted U6 promoter
  source 1..241: mol_type = other DNA
gagggcctatttcccatgattccttcatatttgcatatacaatacaaggctgttagagagataattggaattaatttgactgtaaacacaaagatattagtacaaaatatttgatgtagaaagtaataatttcttgggtagtttgcagttttaaaattatgttttaaaatggactatcatatgcttaccataacttgaaagtatttctatttcttggctttatatatcttgtggaaaggac

SEQ ID NO: 564 - DNA, 141 bp, synthetic construct; identical to SEQ ID NO: 488
  misc_feature 1..141: note = AAV2 3' ITR
  source 1..141: mol_type = other DNA

SEQ ID NO: 565 - RNA, 14 nt, synthetic construct
  misc_feature 1..14: note = Pseudoknot stem
  source 1..14: mol_type = other RNA
tggcgctagcgcca

SEQ ID NO: 566 - skipped

SEQ ID NO: 567 - RNA, 15 nt, synthetic construct
  misc_feature 1..15: note = Triplex
  source 1..15: mol_type = other RNA
tctctctgatcagag

SEQ ID NO: 568 - RNA, 29 nt, synthetic construct
  misc_feature 1..29: note = Scaffold stem
  source 1..29: mol_type = other RNA
tcaccagcgactatgtcgtagtgggtaaa

SEQ ID NO: 569 - RNA, 20 nt, synthetic construct
  misc_feature 1..20: note = Extended stem
  source 1..20: mol_type = other RNA
gctccctcttcggagggagc

SEQ ID NO: 570 - DNA, 90 bp, synthetic construct
  misc_feature 1..90: note = scaffold variant
  source 1..90: mol_type = other DNA
aactggcgcttctatctgattactctgagcgccatcaccagcgactatgtcgtagtgggtaaagctccctcttcggagggagcatcagag

SEQ ID NO: 571 - DNA, 89 bp, synthetic construct
  misc_feature 1..89: note = scaffold variant
  source 1..89: mol_type = other DNA
gctggcgcttctatctgattactctgagcgccatcaccagcgactatgtcgtagtgggtaaagctccctcttcggagggagcatcagag

SEQ ID NO: 572 - DNA, 88 bp, synthetic construct
  misc_feature 1..88: note = scaffold variant
  source 1..88: mol_type = other DNA
atggcgcttctatctgattactctgagcgccatcaccagcgactatgtcgtagtgggtaaagctccctcttcggagggagcatcagag

SEQ ID NO: 573 - DNA, 90 bp, synthetic construct
  misc_feature 1..90: note = scaffold variant
  source 1..90: mol_type = other DNA
atctggcgcttctatctgattactctgagcgccatcaccagcgactatgtcgtagtgggtaaagctccctcttcggagggagcatcagag

SEQ ID NO: 574 - DNA, 88 bp, synthetic construct
  misc_feature 1..88: note = scaffold variant
  source 1..88: mol_type = other DNA
acggcgcttctatctgattactctgagcgccatcaccagcgactatgtcgtagtgggtaaagctccctcttcggagggagcatcagag

SEQ ID NO: 575 - DNA, 90 bp, synthetic construct
  misc_feature 1..90: note = scaffold variant
  source 1..90: mol_type = other DNA
actaggcgcttctatctgattactctgagcgccatcaccagcgactatgtcgtagtgggtaaagctccctcttcggagggagcatcagag

SEQ ID NO: 576 - DNA, 89 bp, synthetic construct
  misc_feature 1..89: note = scaffold variant
  source 1..89: mol_type = other DNA
tatggcgcttctatctgattactctgagcgccatcaccagcgactatgtcgtagtgggtaaagctccctcttcggagggagcatcagag

SEQ ID NO: 577 - DNA, 87 bp, synthetic construct
  misc_feature 1..87: note = scaffold variant
  source 1..87: mol_type = other DNA
aggcgcttctatctgattactctgagcgccatcaccagcgactatgtcgtagtgggtaaagctccctcttcggagggagcatcagag

SEQ ID NO: 578 - DNA, 88 bp, synthetic construct
  misc_feature 1..88: note = scaffold variant
  source 1..88: mol_type = other DNA
atggtgcttctatctgattactctgagcgccatcaccagcgactatgtcgtagtgggtaaagctccctcttcggagggagcatcagag

SEQ ID NO: 579 - DNA, 89 bp, synthetic construct
  misc_feature 1..89: note = scaffold variant
  source 1..89: mol_type = other DNA
tctggcgcttctatctgattactctgagcgccatcaccagcgactatgtcgtagtgggtaaagctccctcttcggagggagcatcagag

SEQ ID NO: 580 - DNA, 89 bp, synthetic construct
  misc_feature 1..89: note = scaffold variant
  source 1..89: mol_type = other DNA
aatggcgcttctatctgattactctgagcgccatcaccagcgactatgtcgtagtgggtaaagctccctcttcggagggagcatcagag

SEQ ID NO: 581 - DNA, 89 bp, synthetic construct
  misc_feature 1..89: note = scaffold variant
  source 1..89: mol_type = other DNA
agtggcgcttctatctgattactctgagcgccatcaccagcgactatgtcgtagtgggtaaagctccctcttcggagggagcatcagag

SEQ ID NO: 582 - DNA, 89 bp, synthetic construct
  misc_feature 1..89: note = scaffold variant
  source 1..89: mol_type = other DNA
acaggcgcttctatctgattactctgagcgccatcaccagcgactatgtcgtagtgggtaaagctccctcttcggagggagcatcagag

SEQ ID NO: 583 - DNA, 89 bp, synthetic construct
  misc_feature 1..89: note = scaffold variant
  source 1..89: mol_type = other DNA
acgggcgcttctatctgattactctgagcgccatcaccagcgactatgtcgtagtgggtaaagctccctcttcggagggagcatcagag

SEQ ID NO: 584 - DNA, 87 bp, synthetic construct
  misc_feature 1..87: note = scaffold variant
  source 1..87: mol_type = other DNA
gggcgcttctatctgattactctgagcgccctcaccagcgactatgtcgtagtgggtaaagctccctcttcggagggagcatcagag

SEQ ID NO: 585 - DNA, 90 bp, synthetic construct
  misc_feature 1..90: note = scaffold variant
  source 1..90: mol_type = other DNA
actggcgcttctaatctgattactctgagcgccatcaccagcgactatgtcgtagtgggtaaagctccctcttcggagggagcatcagag

SEQ ID NO: 586 - DNA, 89 bp, synthetic construct
  misc_feature 1..89: note = scaffold variant
  source 1..89: mol_type = other DNA
actggcgcttctaactgattactctgagcgccatcaccagcgactatgtcgtagtgggtaaagctccctcttcggagggagcatcagag

SEQ ID NO: 587 - DNA, 89 bp, synthetic construct
  misc_feature 1..89: note = scaffold variant
  source 1..89: mol_type = other DNA
actggcgcttctagctgattactctgagcgccatcaccagcgactatgtcgtagtgggtaaagctccctcttcggagggagcatcagag

SEQ ID NO: 588 - DNA, 88 bp, synthetic construct
  misc_feature 1..88: note = scaffold variant
  source 1..88: mol_type = other DNA
actggcgcttctactgattactctgagcgccatcaccagcgactatgtcgtagtgggtaaagctccctcttcggagggagcatcagag

SEQ ID NO: 589 - DNA, 89 bp, synthetic construct
  misc_feature 1..89: note = scaffold variant
  source 1..89: mol_type = other DNA
actggcgcttctatatgattactctgagcgccatcaccagcgactatgtcgtagtgggtaaagctccctcttcggagggagcatcagag

SEQ ID NO: 590 - DNA, 89 bp, synthetic construct
  misc_feature 1..89: note = scaffold variant
  source 1..89: mol_type = other DNA
actggcgcttctatttgattactctgagcgccatcaccagcgactatgtcgtagtgggtaaagctccctcttcggagggagcatcagag

SEQ ID NO: 591 - DNA, 89 bp, synthetic construct
  misc_feature 1..89: note = scaffold variant
  source 1..89: mol_type = other DNA
actggcgcttctatgtgattactctgagcgccatcaccagcgactatgtcgtagtgggtaaagctccctcttcggagggagcatcagag

SEQ ID NO: 592 - DNA, 90 bp, synthetic construct
  misc_feature 1..90: note = scaffold variant
  source 1..90: mol_type = other DNA
actggcgcttctatcttgattactctgagcgccatcaccagcgactatgtcgtagtgggtaaagctccctcttcggagggagcatcagag

SEQ ID NO: 593 - DNA, 90 bp, synthetic construct
  misc_feature 1..90: note = scaffold variant
  source 1..90: mol_type = other DNA
actggcgcttctatctgatttactctgagcgccatcaccagcgactatgtcgtagtgggtaaagctccctcttcggagggagcatcagag

SEQ ID NO: 594 - DNA, 90 bp, synthetic construct
  misc_feature 1..90: note = scaffold variant
  source 1..90: mol_type = other DNA
actggcgcttctatctgtattactctgagcgccatcaccagcgactatgtcgtagtgggtaaagctccctcttcggagggagcatcagag

SEQ ID NO: 595 - DNA, 90 bp, synthetic construct
  misc_feature 1..90: note = scaffold variant
  source 1..90: mol_type = other DNA
actggcgcttctatctgaattactctgagcgccatcaccagcgactatgtcgtagtgggtaaagctccctcttcggagggagcatcagag

SEQ ID NO: 596 - DNA, 89 bp, synthetic construct
  misc_feature 1..89: note = scaffold variant
  source 1..89: mol_type = other DNA
actggcgcttctatctggttactctgagcgccatcaccagcgactatgtcgtagtgggtaaagctccctcttcggagggagcatcagag

SEQ ID NO: 597 - DNA, 89 bp, synthetic construct
  misc_feature 1..89: note = scaffold variant
  source 1..89: mol_type = other DNA
actggcgcttctatctgtttactctgagcgccatcaccagcgactatgtcgtagtgggtaaagctccctcttcggagggagcatcagag

SEQ ID NO: 598 - DNA, 89 bp, synthetic construct
  misc_feature 1..89: note = scaffold variant
  source 1..89: mol_type = other DNA
actggcgcttctatctgattgctctgagcgccatcaccagcgactatgtcgtagtgggtaaagctccctcttcggagggagcatcagag

SEQ ID NO: 599 - DNA, 91 bp, synthetic construct
  misc_feature 1..91: note = scaffold variant
  source 1..91: mol_type = other DNA
actggcgcttctatatctgattactctgagcgccatcaccagcgactatgtcgtagtgggtaaagctccctcttcggagggagcatcagag

SEQ ID NO: 600 - DNA, 91 bp, synthetic construct
  misc_feature 1..91: note = scaffold variant
  source 1..91: mol_type = other DNA
actggcgcttctattactgattactctgagcgccatcaccagcgactatgtcgtagtgggtaaagctccctcttcggagggagcatcagag

SEQ ID NO: 601 - DNA, 89 bp, synthetic construct
  misc_feature 1..89: note = scaffold variant
  source 1..89: mol_type = other DNA
actggcgcttctacctgattactctgagcgccatcaccagcgactatgtcgtagtgggtaaagctccctcttcggagggagcatcagag

SEQ ID NO: 602 - DNA, 89 bp, synthetic construct
  misc_feature 1..89: note = scaffold variant
  source 1..89: mol_type = other DNA
actggcgcttctatcagattactctgagcgccatcaccagcgactatgtcgtagtgggtaaagctccctcttcggagggagcatcagag

SEQ ID NO: 603 - DNA, 89 bp, synthetic construct
  misc_feature 1..89: note = scaffold variant
  source 1..89: mol_type = other DNA
actggcgcttctatcggattactctgagcgccatcaccagcgactatgtcgtagtgggtaaagctccctcttcggagggagcatcagag

SEQ ID NO: 604 - DNA, 89 bp, synthetic construct
  misc_feature 1..89: note = scaffold variant
  source 1..89: mol_type = other DNA
actggcgcttctatctgattactctcagcgccatcaccagcgactatgtcgtagtgggtaaagctccctcttcggagggagcatgagag

SEQ ID NO: 605 - DNA, 89 bp, synthetic construct
  misc_feature 1..89: note = scaffold variant
  source 1..89: mol_type = other DNA
actggcgcttttatctgattactctgagcgccatcaccagcgactatgtcgtagtgggtaaagctccctcttcggagggagcatcagag

SEQ ID NO: 606 - DNA, 89 bp, synthetic construct
  misc_feature 1..89: note = scaffold variant
  source 1..89: mol_type = other DNA
actggcgcttctatctgattactttgagcgccatcaccagcgactatgtcgtagtgggtaaagctccctcttcggagggagcatcagag

SEQ ID NO: 607 - DNA, 89 bp, synthetic construct
  misc_feature 1..89: note = scaffold variant
  source 1..89: mol_type = other DNA
actggcgcttctatctgattactctgagcgccatcaccagcgactatgtcgtagtgggtaaagctccctcttcggagggagcatcaaag

SEQ ID NO: 608 - DNA, 89 bp, synthetic construct
  misc_feature 1..89: note = scaffold variant
  source 1..89: mol_type = other DNA
actggcgcttttatctgattactttgagcgccatcaccagcgactatgtcgtagtgggtaaagctccctcttcggagggagcatcagag

SEQ ID NO: 609 - DNA, 89 bp, synthetic construct
  misc_feature 1..89: note = scaffold variant
  source 1..89: mol_type = other DNA
actggcgcttttatctgattactctgagcgccatcaccagcgactatgtcgtagtgggtaaagctccctcttcggagggagcatcaaag

SEQ ID NO: 610 - DNA, 89 bp, synthetic construct
  misc_feature 1..89: note = scaffold variant
  source 1..89: mol_type = other DNA
actggcgcttctatctgattactttgagcgccatcaccagcgactatgtcgtagtgggtaaagctccctcttcggagggagcatcaaag

SEQ ID NO: 611 - DNA, 89 bp, synthetic construct
  misc_feature 1..89: note = scaffold variant
  source 1..89: mol_type = other DNA
actggcgcttgtatctgattactctgagcgccatcaccagcgactatgtcgtagtgggtaaagctccctcttcggagggagcatcagag

SEQ ID NO: 612 - DNA, 89 bp, synthetic construct
  misc_feature 1..89: note = scaffold variant
  source 1..89: mol_type = other DNA
actggcgcttccatctgattaccctgagcgccatcaccagcgactatgtcgtagtgggtaaagctccctcttcggagggagcatcaggg

SEQ ID NO: 613 - DNA, 89 bp, synthetic construct
  misc_feature 1..89: note = scaffold variant
  source 1..89: mol_type = other DNA
actggcgctcctatctgattactccgagcgccatcaccagcgactatgtcgtagtgggtaaagctccctcttcggagggagcatcggag

SEQ ID NO: 614 - DNA, 89 bp, synthetic construct
  misc_feature 1..89: note = scaffold variant
  source 1..89: mol_type = other DNA
actggcgcttggatctgattaccctgagcgccatcaccagcgactatgtcgtagtgggtaaagctccctcttcggagggagcatcaggg

SEQ ID NO: 615 - DNA, 89 bp, synthetic construct
  misc_feature 1..89: note = scaffold variant
  source 1..89: mol_type = other DNA
actggcgctggtatctgattactccgagcgccatcaccagcgactatgtcgtagtgggtaaagctccctcttcggagggagcatcggag

SEQ ID NO: 616 - DNA, 89 bp, synthetic construct
  misc_feature 1..89: note = scaffold variant
  source 1..89: mol_type = other DNA
actggcgctcccatctgattaccccgagcgccatcaccagcgactatgtcgtagtgggtaaagctccctcttcggagggagcatcgggg

SEQ ID NO: 617 - DNA, 89 bp, synthetic construct
  misc_feature 1..89: note = scaffold variant
  source 1..89: mol_type = other DNA
actggcgctgggatctgattaccccgagcgccatcaccagcgactatgtcgtagtgggtaaagctccctcttcggagggagcatcgggg

SEQ ID NO: 618 - DNA, 89 bp, synthetic construct
  misc_feature 1..89: note = scaffold variant
  source 1..89: mol_type = other DNA
actggcgcttctatctgattagtctcagcgccatcaccagcgactatgtcgtagtgggtaaagctccctcttcggagggagcatgagac

SEQ ID NO: 619 - DNA, 89 bp, synthetic construct
  misc_feature 1..89: note = scaffold variant
  source 1..89: mol_type = other DNA
actggcgcttctatctgattagtctgagcgccatcaccagcgactatgtcgtagtgggtaaagctccctcttcggagggagcatcagac

SEQ ID NO: 620 - DNA, 89 bp, synthetic construct
  misc_feature 1..89: note = scaffold variant
  source 1..89: mol_type = other DNA
actggcgcttctatctgattactctcagcgccatcaccagcgactatgtcgtagtgggtaaagctccctcttcggagggagcatcagac

SEQ ID NO: 621 - DNA, 89 bp, synthetic construct
  misc_feature 1..89: note = scaffold variant
  source 1..89: mol_type = other DNA
actggcgcttctatctgattactctgagcgccatcaccagcgactatgtcgtagtgggtaaagctccctcttcggagggagcctcagag

SEQ ID NO: 622 - DNA, 89 bp, synthetic construct
  misc_feature 1..89: note = scaffold variant
  source 1..89: mol_type = other DNA
actggcgcttctatctgattactctgagcgccatcaccagcgactatgtcgtagtgggtaaagctccctcttcggagggagcgtcagag

SEQ ID NO: 623 - DNA, 89 bp, synthetic construct
  misc_feature 1..89: note = scaffold variant
  source 1..89: mol_type = other DNA
actggctcttctatctgattactctgagagccatcaccagcgactatgtcgtagtgggtaaagctccctcttcggagggagcatcagag

SEQ ID NO: 624 - DNA, 89 bp, synthetic construct
  misc_feature 1..89: note = scaffold variant
  source 1..89: mol_type = other DNA
actggcgcttctatctgattactctgagagccatcaccagcgactatgtcgtagtgggtaaagctccctcttcggagggagcatcagag

SEQ ID NO: 625 - DNA, 89 bp, synthetic construct
  misc_feature 1..89: note = scaffold variant
  source 1..89: mol_type = other DNA
actggcgcttctatctgattactctgagcgccatcaccagcgactatgtcgtagtgggtaaagctccctcttcggagggagcatcagag

SEQ ID NO: 626 - DNA, 89 bp, synthetic construct
  misc_feature 1..89: note = scaffold variant
  source 1..89: mol_type = other DNA
actggcgcttctatctgattactctgagtgccatcaccagcgactatgtcgtagtgggtaaagctccctcttcggagggagcatcagag

SEQ ID NO: 627 - DNA, 90 bp, synthetic construct
  misc_feature 1..90: note = scaffold variant
  source 1..90: mol_type = other DNA
actggcgcttctatctgattactctgagcagccatcaccagcgactatgtcgtagtgggtaaagctccctcttcggagggagcatcagag

SEQ ID NO: 628 - DNA, 90 bp, synthetic construct
  misc_feature 1..90: note = scaffold variant
  source 1..90: mol_type = other DNA
actggcgcttctatctgattactctgagtagccatcaccagcgactatgtcgtagtgggtaaagctccctcttcggagggagcatcagag

SEQ ID NO: 629 - DNA, 89 bp, synthetic construct
  misc_feature 1..89: note = scaffold variant
  source 1..89: mol_type = other DNA
actggcgcttctatctgattactctgtgagccatcaccagcgactatgtcgtagtgggtaaagctccctcttcggagggagcatcagag

SEQ ID NO: 630 - DNA, 89 bp, synthetic construct
  misc_feature 1..89: note = scaffold variant
  source 1..89: mol_type = other DNA
actggcgcttctatctgattactctgagggccatcaccagcgactatgtcgtagtgggtaaagctccctcttcggagggagcatcagag

SEQ ID NO: 631 - DNA, 89 bp, synthetic construct
  misc_feature 1..89: note = scaffold variant
  source 1..89: mol_type = other DNA
actggcgcttctatctgattactctgagagccttcaccagcgactatgtcgtagtgggtaaagctccctcttcggagggagcatcagag

SEQ ID NO: 632 - DNA, 89 bp, synthetic construct
  misc_feature 1..89: note = scaffold variant
  source 1..89: mol_type = other DNA
actggggcttctatctgattactctgagacccatcaccagcgactatgtcgtagtgggtaaagctccctcttcggagggagcatcagag

SEQ ID NO: 633 - DNA, 89 bp, synthetic construct
  misc_feature 1..89: note = scaffold variant
  source 1..89: mol_type = other DNA
actggctcttctatctgattactctgagcgccatcaccagcgactatgtcgtagtgggtaaagctccctcttcggagggagcatcagag

SEQ ID NO: 634 - DNA, 89 bp, synthetic construct
  misc_feature 1..89: note = scaffold variant
  source 1..89: mol_type = other DNA
actggcccttctatctgattactctgagggccatcaccagcgactatgtcgtagtgggtaaagctccctcttcggagggagcatcagag

SEQ ID NO: 635 - DNA, 89 bp, synthetic construct
  misc_feature 1..89: note = scaffold variant
  source 1..89: mol_type = other DNA
actggcccttctatctgattactctgagtgccatcaccagcgactatgtcgtagtgggtaaagctccctcttcggagggagcatcagag

SEQ ID NO: 636 - DNA, 89 bp, synthetic construct
  misc_feature 1..89: note = scaffold variant
  source 1..89: mol_type = other DNA
actggctcttctatctgattactctgagggccatcaccagcgactatgtcgtagtgggtaaagctccctcttcggagggagcatcagag

SEQ ID NO: 637 - DNA, 90 bp, synthetic construct
  misc_feature 1..90: note = scaffold variant
  source 1..90: mol_type = other DNA
actggcgcttctatctgattactctgagctgccatcaccagcgactatgtcgtagtgggtaaagctccctcttcggagggagcatcagag

SEQ ID NO: 638 - DNA, 89 bp, synthetic construct
  misc_feature 1..89: note = scaffold variant
  source 1..89: mol_type = other DNA
actggcgcttctatctgattactctgagcaccatcaccagcgactatgtcgtagtgggtaaagctccctcttcggagggagcatcagag

SEQ ID NO: 639 - DNA, 89 bp, synthetic construct
  misc_feature 1..89: note = scaffold variant
  source 1..89: mol_type = other DNA
actggcgcttctatctgattactctgagtgccgtcaccagcgactatgtcgtagtgggtaaagctccctcttcggagggagcatcagag

SEQ ID NO: 640 - DNA, 89 bp, synthetic construct
  misc_feature 1..89: note = scaffold variant
  source 1..89: mol_type = other DNA
actggcacttctatctgattactctgagcgccatcaccagcgactatgtcgtagtgggtaaagctccctcttcggagggagcatcagag

SEQ ID NO: 641 - DNA, 90 bp, synthetic construct
  misc_feature 1..90: note = scaffold variant
  source 1..90: mol_type = other DNA
actggcacttctatctgattactctgagtagccatcaccagcgactatgtcgtagtgggtaaagctccctcttcggagggagcatcagag

SEQ ID NO: 642 - DNA, 89 bp, synthetic construct
  misc_feature 1..89: note = scaffold variant
  source 1..89: mol_type = other DNA
actggcacttctatctgattactctgagtgccatcaccagcgactatgtcgtagtgggtaaagctccctcttcggagggagcatcagag

SEQ ID NO: 643 - DNA, 90 bp, synthetic construct
  misc_feature 1..90: note = scaffold variant
  source 1..90: mol_type = other DNA
actggcccttctatctgattactctgaggagccatcaccagcgactatgtcgtagtgggtaaagctccctcttcggagggagcatcagag

SEQ ID NO: 644 - DNA, 89 bp, synthetic construct
  misc_feature 1..89: note = scaffold variant
  source 1..89: mol_type = other DNA
actggctcttctatctgattactctgagtgccatcaccagcgactatgtcgtagtgggtaaagctccctcttcggagggagcatcagag

SEQ ID NO: 645 - DNA, 90 bp, synthetic construct; identical to SEQ ID NO: 643
  misc_feature 1..90: note = scaffold variant
  source 1..90: mol_type = other DNA

SEQ ID NO: 646 - DNA, 89 bp, synthetic construct
  misc_feature 1..89: note = scaffold variant
  source 1..89: mol_type = other DNA
actggcggttctatctgattactctgagcgccatcaccagcgactatgtcgtagtgggtaaagctccctcttcggagggagcatcagag

SEQ ID NO: 647 - DNA, 89 bp, synthetic construct; identical to SEQ ID NO: 538
  misc_feature 1..89: note = scaffold variant
  source 1..89: mol_type = other DNA

SEQ ID NO: 648 - DNA, 89 bp, synthetic construct
  misc_feature 1..89: note = scaffold variant
  source 1..89: mol_type = other DNA
actggcccttctatctgattactctgagagccatcaccagcgactatgtcgtagtgggtaaagctccctcttcggagggagcatcagag

SEQ ID NO: 649 - DNA, 89 bp, synthetic construct
  misc_feature 1..89: note = scaffold variant
  source 1..89: mol_type = other DNA
actggtgcttctatctgattactctgagagccatcaccagcgactatgtcgtagtgggtaaagctccctcttcggagggagcatcagag

SEQ ID NO: 650 - DNA, 89 bp, synthetic construct
  misc_feature 1..89: note = scaffold variant
  source 1..89: mol_type = other DNA
actggcggttctatctgattactctgagagccatcaccagcgactatgtcgtagtgggtaaagctccctcttcggagggagcatcagag

SEQ ID NO: 651 - DNA, 89 bp, synthetic construct
  misc_feature 1..89: note = scaffold variant
  source 1..89: mol_type = other DNA
actggcgcttctatctgattactctgggagccatcaccagcgactatgtcgtagtgggtaaagctccctcttcggagggagcatcagag

SEQ ID NO: 652 - DNA, 90 bp, synthetic construct
  misc_feature 1..90: note = scaffold variant
  source 1..90: mol_type = other DNA
actggcgcttctatctgattactctgaggagccatcaccagcgactatgtcgtagtgggtaaagctccctcttcggagggagcatcagag

SEQ ID NO: 653 - DNA, 89 bp, synthetic construct
  misc_feature 1..89: note = scaffold variant
  source 1..89: mol_type = other DNA
actggcgcttctatctgattactctgatagccatcaccagcgactatgtcgtagtgggtaaagctccctcttcggagggagcatcagag

SEQ ID NO: 654 - DNA, 90 bp, synthetic construct; identical to SEQ ID NO: 627
  misc_feature 1..90: note = scaffold variant
  source 1..90: mol_type = other DNA

SEQ ID NO: 655 - DNA, 90 bp, synthetic construct; identical to SEQ ID NO: 628
  misc_feature 1..90: note = scaffold variant
  source 1..90: mol_type = other DNA

SEQ ID NO: 656 - DNA, 89 bp, synthetic construct
  misc_feature 1..89: note = scaffold variant
  source 1..89: mol_type = other DNA
actggcgcttctatctgattactctgagaaccatcaccagcgactatgtcgtagtgggtaaagctccctcttcggagggagcatcagag

SEQ ID NO: 657 - DNA, 89 bp, synthetic construct
  misc_feature 1..89: note = scaffold variant
  source 1..89: mol_type = other DNA
actggcgcttctatctgattactctgagagccgtcaccagcgactatgtcgtagtgggtaaagctccctcttcggagggagcatcagag

SEQ ID NO: 658 - DNA, 89 bp, synthetic construct
  misc_feature 1..89: note = scaffold variant
  source 1..89: mol_type = other DNA
actggcgcttctatctgattactctgggcgccatcaccagcgactatgtcgtagtgggtaaagctccctcttcggagggagcatcagag

SEQ ID NO: 659 - DNA, 89 bp, synthetic construct; identical to SEQ ID NO: 658
  misc_feature 1..89: note = scaffold variant
  source 1..89: mol_type = other DNA

SEQ ID NO: 660 - DNA, 89 bp, synthetic construct; identical to SEQ ID NO: 658
  misc_feature 1..89: note = scaffold variant
  source 1..89: mol_type = other DNA

SEQ ID NO: 661 - DNA, 89 bp, synthetic construct
  misc_feature 1..89: note = scaffold variant
  source 1..89: mol_type = other DNA
acctgtagttctatctgattactctgactacagtcaccagcgactatgtcgtagtgggtaaagctccctcttcggagggagcatcagag

SEQ ID NO: 662 - DNA, 89 bp, synthetic construct
  misc_feature 1..89: note = scaffold variant
  source 1..89: mol_type = other DNA
accagcaattctatctgattactctgattgctgtcaccagcgactatgtcgtagtgggtaaagctccctcttcggagggagcatcagag

SEQ ID NO: 663 - DNA, 89 bp, synthetic construct
  misc_feature 1..89: note = scaffold variant
  source 1..89: mol_type = other DNA
accgagacttctatctgattactctgaggctcgtcaccagcgactatgtcgtagtgggtaaagctccctcttcggagggagcatcagag

SEQ ID NO: 664 - DNA, 89 bp, synthetic construct
  misc_feature 1..89: note = scaffold variant
  source 1..89: mol_type = other DNA
acactggtttctatctgattactctgaaccagttcaccagcgactatgtcgtagtgggtaaagctccctcttcggagggagcatcagag

SEQ ID NO: 665 - DNA, 89 bp, synthetic construct
  misc_feature 1..89: note = scaffold variant
  source 1..89: mol_type = other DNA
acaggccgttctatctgattactctgacggccttcaccagcgactatgtcgtagtgggtaaagctccctcttcggagggagcatcagag

SEQ ID NO: 666 - DNA, 89 bp, synthetic construct
  misc_feature 1..89: note = scaffold variant
  source 1..89: mol_type = other DNA
acacacggttctatctgattactctgaccgtgttcaccagcgactatgtcgtagtgggtaaagctccctcttcggagggagcatcagag

SEQ ID NO: 667 - DNA, 89 bp, synthetic construct
  misc_feature 1..89: note = scaffold variant
  source 1..89: mol_type = other DNA
acgggactttctatctgattactctgaagtccctcaccagcgactatgtcgtagtgggtaaagctccctcttcggagggagcatcagag

SEQ ID NO: 668 - DNA, 89 bp, synthetic construct
  misc_feature 1..89: note = scaffold variant
  source 1..89: mol_type = other DNA
acgggcaattctatctgattactctgattgccctcaccagcgactatgtcgtagtgggtaaagctccctcttcggagggagcatcagag

SEQ ID NO: 669 - DNA, 89 bp, synthetic construct
  misc_feature 1..89: note = scaffold variant
  source 1..89: mol_type = other DNA
acgagcacttctatctgattactctgagggctctcaccagcgactatgtcgtagtgggtaaagctccctcttcggagggagcatcagag

SEQ ID NO: 670 - DNA, 89 bp, synthetic construct
  misc_feature 1..89: note = scaffold variant
  source 1..89: mol_type = other DNA
actgtgcgttctatctgattactctgacgcacatcaccagcgactatgtcgtagtgggtaaagctccctcttcggagggagcatcagag

SEQ ID NO: 671 - DNA, 89 bp, synthetic construct
  misc_feature 1..89: note = scaffold variant
  source 1..89: mol_type = other DNA
acaggtccttctatctgattactctgaggaccttcaccagcgactatgtcgtagtgggtaaagctccctcttcggagggagcatcagag

SEQ ID NO: 672 - DNA, 89 bp, synthetic construct
  misc_feature 1..89: note = scaffold variant
  source 1..89: mol_type = other DNA
acgaggtgttctatctgattactctgacacctctcaccagcgactatgtcgtagtgggtaaagctccctcttcggagggagcatcagag

SEQ ID NO: 673 - DNA, 88 bp, synthetic construct
  misc_feature 1..88: note = scaffold variant
  source 1..88: mol_type = other DNA
actggcgcttctatctgattactctgagcgccatcaccagcgacgatgtcgtatgggtaaagctccctcttcggagggagcatcagag

SEQ ID NO: 674 - DNA, 89 bp, synthetic construct; identical to SEQ ID NO: 625
  misc_feature 1..89: note = scaffold variant
  source 1..89: mol_type = other DNA

SEQ ID NO: 675 - DNA, 89 bp, synthetic construct
  misc_feature 1..89: note = scaffold variant
  source 1..89: mol_type = other DNA
actggcgcttctatctgattactctgagcgccatcaccagcgactatgtcgtattgggtaaagctccctcttcggagggagcatcagag

SEQ ID NO: 676 - DNA, 88 bp, synthetic construct
  misc_feature 1..88: note = scaffold variant
  source 1..88: mol_type = other DNA
actggcgcttctatctgattactctgagcgccatctccagcgactatgtcgtatgggtaaagctccctcttcggagggagcatcagag

SEQ ID NO: 677 - DNA, 88 bp, synthetic construct
  misc_feature 1..88: note = scaffold variant
  source 1..88: mol_type = other DNA
actggcgcttctatctgattactctgagcgccatccccagcgactatgtcgtatgggtaaagctccctcttcggagggagcatcagag

SEQ ID NO: 678 - DNA, 88 bp, synthetic construct
  misc_feature 1..88: note = scaffold variant
  source 1..88: mol_type = other DNA
actggcgcttctatctgattactctgagcgccatcaccagcgattatgtcgtatgggtaaagctccctcttcggagggagcatcagag

SEQ ID NO: 679 - DNA, 88 bp, synthetic construct
  misc_feature 1..88: note = scaffold variant
  source 1..88: mol_type = other DNA
actggcgcttctatctgattactctgagcgccatcaccagcgactatgtcgtgtgggtaaagctccctcttcggagggagcatcagag

SEQ ID NO: 680 - DNA, 89 bp, synthetic construct
  misc_feature 1..89: note = scaffold variant
  source 1..89: mol_type = other DNA
actggcgcttctatctgattactctgagcgccatcaccagcgactatgtcgtatggtgtaaagctccctcttcggagggagcatcagag

SEQ ID NO: 681 - DNA, 89 bp, synthetic construct
  misc_feature 1..89: note = scaffold variant
  source 1..89: mol_type = other DNA
actggcgcttctatctgattactctgagcgccatcaccagcgactatgtcgtatggagtaaagctccctcttcggagggagcatcagag

SEQ ID NO: 682 - DNA, 88 bp, synthetic construct
  misc_feature 1..88: note = scaffold variant
  source 1..88: mol_type = other DNA
actggcgcttctatctgattactctgagcgccaacaccagcgactatgtcgtatgggtaaagctccctcttcggagggagcatcagag

SEQ ID NO: 683 - DNA, 88 bp, synthetic construct
  misc_feature 1..88: note = scaffold variant
  source 1..88: mol_type = other DNA
actggcgcttctatctgattactctgagcgccatgaccagcgactatgtcgtatggctaaagctccctcttcggagggagcatcagag

SEQ ID NO: 684 - DNA, 89 bp, synthetic construct
  misc_feature 1..89: note = scaffold variant
  source 1..89: mol_type = other DNA
actggcgcttctatctgattactctgagcgccatgaccagcgactatgtcgtatgggctaaagctccctcttcggagggagcatcagag

SEQ ID NO: 685 - DNA, 89 bp, synthetic construct
  misc_feature 1..89: note = scaffold variant
  source 1..89: mol_type = other DNA
actggcgcttctatctgattactctgagcgccatcgccagcgactatgtcgtatggcgtaaagctccctcttcggagggagcatcagag

SEQ ID NO: 686 - DNA, 88 bp, synthetic construct
  misc_feature 1..88: note = scaffold variant
  source 1..88: mol_type = other DNA
actggcgcttctatctgattactctgagcgccatcacctgcgactatgtcgtaagggtaaagctccctcttcggagggagcatcagag

SEQ ID NO: 687 - DNA, 88 bp, synthetic construct
  misc_feature 1..88: note = scaffold variant
  source 1..88: mol_type = other DNA
actggcgcttctatctgattactctgagcgccatcaccagagactatgtcttatgggtaaagctccctcttcggagggagcatcagag

SEQ ID NO: 688 - DNA, 88 bp, synthetic construct
  misc_feature 1..88: note = scaffold variant
  source 1..88: mol_type = other DNA
actggcgcttctatctgattactctgagcgccatcaccagggactatgtcctatgggtaaagctccctcttcggagggagcatcagag

SEQ ID NO: 689 - DNA, 88 bp, synthetic construct
  misc_feature 1..88: note = scaffold variant
  source 1..88: mol_type = other DNA
actggcgcttctatctgattactctgagcgccatcaccagccactatgtggtatgggtaaagctccctcttcggagggagcatcagag

SEQ ID NO: 690 - DNA, 88 bp, synthetic construct
  misc_feature 1..88: note = scaffold variant
  source 1..88: mol_type = other DNA
actggcgcttctatctgattactctgagcgccatcaccagctactatgtagtatgggtaaagctccctcttcggagggagcatcagag

SEQ ID NO: 691 - DNA, 86 bp, synthetic construct
  misc_feature 1..86: note = scaffold variant
  source 1..86: mol_type = other DNA
actggcgcttctatctgattactctgagcgccatcaccagcgactatgtcgtatgggtagctccctcttcggagggagcatcagag

SEQ ID NO: 692 - DNA, 89 bp, synthetic construct
  misc_feature 1..89: note = scaffold variant
  source 1..89: mol_type = other DNA
actggcgcttctatctgattactctgagcgccatcaccaggcactatgtgctattgggtaaagctccctcttcggagggagcatcagag

SEQ ID NO: 693 - DNA, 88 bp, synthetic construct
  misc_feature 1..88: note = scaffold variant
  source 1..88: mol_type = other DNA
actggcgcttctatctgattactctgagcgccagcaccagcgactatgtcgtatgggtaaagctccctcttcggagggagcatcagag

SEQ ID NO: 694 - DNA, 88 bp, synthetic construct
  misc_feature 1..88: note = scaffold variant
  source 1..88: mol_type = other DNA
actggcgcttctatctgattactctgagcgccatgaccagcgactatgtcgtatgggtaaagctccctcttcggagggagcatcagag

SEQ ID NO: 695 - DNA, 88 bp, synthetic construct
  misc_feature 1..88: note = scaffold variant
  source 1..88: mol_type = other DNA
actggcgcttctatctgattactctgagcgccatcgccagcgactatgtcgtatgggtaaagctccctcttcggagggagcatcagag

SEQ ID NO: 696 - DNA, 88 bp, synthetic construct
  misc_feature 1..88: note = scaffold variant
  source 1..88: mol_type = other DNA
actggcgcttctatctgattactctgagcgccatcaccagcgactctgtcgtatgggtaaagctccctcttcggagggagcatcagag

SEQ ID NO: 697 - DNA, 89 bp, synthetic construct
  misc_feature 1..89: note = scaffold variant
  source 1..89: mol_type = other DNA
actggcgcttctatctgattactctgagcgccatcaccagcgactatgtcgtatggcgtaaagctccctcttcggagggagcatcagag

SEQ ID NO: 698 - DNA, 89 bp, synthetic construct
  misc_feature 1..89: note = scaffold variant
  source 1..89: mol_type = other DNA
actggcgcttctatctgattactctgagcgccatcaccagcgactatgtcgtatgggctaaagctccctcttcggagggagcatcagag

SEQ ID NO: 699 - DNA, 88 bp, synthetic construct
  misc_feature 1..88: note = scaffold variant
  source 1..88: mol_type = other DNA
actggcgcttctatctgattactctgagcgccatcaccagcgactatgtcgtatgggtgaagctccctcttcggagggagcatcagag

SEQ ID NO: 700 - DNA, 88 bp, synthetic construct
  misc_feature 1..88: note = scaffold variant
  source 1..88: mol_type = other DNA
actggcgcttctatctgattactctgagcgccatcaccagcgactatgtcgtatgggtagagctccctcttcggagggagcatcagag

SEQ ID NO: 701 - DNA, 93 bp, synthetic construct
  misc_feature 1..93: note = scaffold variant
  source 1..93: mol_type = other DNA
actggcgcttctatctgattactctgagcgccatcaccagcgactatgtcgtagtgggtaaaggtgacggtcttcggaccgtcaccatcagag

SEQ ID NO: 702 - DNA, 93 bp, synthetic construct
  misc_feature 1..93: note = scaffold variant
  source 1..93: mol_type = other DNA
actggcgcttctatctgattactctgagcgccatcaccagcgactatgtcgtagtgggtaaatcgtaagaacttcggttcttacgaatcagag

SEQ ID NO: 703 - DNA, 93 bp, synthetic construct
  misc_feature 1..93: note = scaffold variant
  source 1..93: mol_type = other DNA
actggcgcttctatctgattactctgagcgccatcaccagcgactatgtcgtagtgggtaaagtgcgcccgcttcggcgggcgcacatcagag

SEQ ID NO: 704 - DNA, 93 bp, synthetic construct
  misc_feature 1..93: note = scaffold variant
  source 1..93: mol_type = other DNA
actggcgcttctatctgattactctgagcgccatcaccagcgactatgtcgtagtgggtaaataatgaaaacttcggttttcattaatcagag

SEQ ID NO: 705 - DNA, 93 bp, synthetic construct
  misc_feature 1..93: note = scaffold variant
  source 1..93: mol_type = other DNA
actggcgcttctatctgattactctgagcgccatcaccagcgactatgtcgtagtgggtaaatggaagatgcttcggcatcttccaatcagag

SEQ ID NO: 706 - DNA, 102 bp, synthetic construct
  misc_feature 1..102: note = scaffold variant
  source 1..102: mol_type = other DNA
actggcgcttctatctgattactctgagcgccatcaccagcgactatgtcgtagtgggtaaagcggcagatctgagcctccgagctctctgccgcatcagag

SEQ ID NO: 707 - DNA, 95 bp, synthetic construct
  misc_feature 1..95: note = scaffold variant
  source 1..95: mol_type = other DNA
actggcgcttctatctgattactctgagcgccatcaccagcgactatgtcgtagtgggtaaagctccctcacagggatgtgagggagcatcagag

SEQ ID NO: 708 - DNA, 94 bp, synthetic construct
  misc_feature 1..94: note = scaffold variant
  source 1..94: mol_type = other DNA
actggcgcttctatctgattactctgagcgccatcaccagcgactatgtcgtagtgggtaaagctccctcagctgcagtgagggagcatcagag

SEQ ID NO: 709 - DNA, 98 bp, synthetic construct
  misc_feature 1..98: note = scaffold variant
  source 1..98: mol_type = other DNA
actggcgcttctatctgattactctgagcgccatcaccagcgactatgtcgtagtgggtaaagcgcttacggacttcggtccgtaagaagcatcagag

SEQ ID NO: 710 - DNA, 99 bp, synthetic construct
  misc_feature 1..99: note = scaffold variant
  source 1..99: mol_type = other DNA
actggcgcttctatctgattactctgagcgccatcaccagcgactatgtcgtagtgggtaaagcgcttacggaattcgtgtccgtaagaagcatcagag

SEQ ID NO: 711 - DNA, 98 bp, synthetic construct
  misc_feature 1..98: note = scaffold variant
  source 1..98: mol_type = other DNA
actggcgcttctatctgattactctgagcgccatcaccagcgactatgtcgtagtgggtaaagcgctttcggacttcggtccggaagaagcatcagag

SEQ ID NO: 712 - DNA, 99 bp, synthetic construct
  misc_feature 1..99: note = scaffold variant
  source 1..99: mol_type = other DNA
actggcgcttctatctgattactctgagcgccatcaccagcgactatgtcgtagtgggtaaagcgccttacggacttcggtccgtaaggagcatcagag

SEQ ID NO: 713 - DNA, 100 bp, synthetic construct
  misc_feature 1..100: note = scaffold variant
  source 1..100: mol_type = other DNA
actggcgcttctatctgattactctgagcgccatcaccagcgactatgtcgtagtgggtaaagcgcttacggacttcgcggtccgtaagaagcatcagag

SEQ ID NO: 714 - DNA, 98 bp, synthetic construct
  misc_feature 1..98: note = scaffold variant
  source 1..98: mol_type = other DNA
actggcgcttctatctgattactctgagcgccatcaccagcgactatgtcgtagtgggtaaagcgcttacggacttcggtccgtaagtcgcatcagag

SEQ ID NO: 715 - DNA, 98 bp, synthetic construct
  misc_feature 1..98: note = scaffold variant
  source 1..98: mol_type = other DNA
actggcgcttctatctgattactctgagcgccatcaccagcgactatgtcgtagtgggtaaagcgcttacggagttcgatccgtaagaagcatcagag

SEQ ID NO: 716 - DNA, 98 bp, synthetic construct
  misc_feature 1..98: note = scaffold variant
  source 1..98: mol_type = other DNA
actggcgcttctatctgattactctgagcgccatcaccagcgactatgtcgtagtgggtaaagcggttacggacttcggtccgtaagacgcatcagag

SEQ ID NO: 717 - DNA, 89 bp, synthetic construct; identical to SEQ ID NO: 625
  misc_feature 1..89: note = scaffold variant
  source 1..89: mol_type = other DNA

SEQ ID NO: 718 - DNA, 89 bp, synthetic construct
  misc_feature 1..89: note = scaffold variant
  source 1..89: mol_type = other DNA
actggcgcttctatctgattactctgagcgccatcaccagcgactatgtcgtagtgggtaaagctccctcttcggaggaggcatcagag

SEQ ID NO: 719 - DNA, 89 bp, synthetic construct
  misc_feature 1..89: note = scaffold variant
  source 1..89: mol_type = other DNA
actggcgcttctatctgattactctgagcgccatcaccagcgactatgtcgtagtgggtaaagctccctcttcggagagtgcatcagag

SEQ ID NO: 720 - DNA, 89 bp, synthetic construct
  misc_feature 1..89: note = scaffold variant
  source 1..89: mol_type = other DNA
actggcgcttctatctgattactctgagcgccatcaccagcgactatgtcgtagtgggtaaagctccctattcggatggagcatcagag

SEQ ID NO: 721 - DNA, 91 bp, synthetic construct
  misc_feature 1..91: note = scaffold variant
  source 1..91: mol_type = other DNA
actggcgcttctatctgattactctgagcgccatcaccagcgactatgtcgtagtgggtaaagctccctcttcggagggaacgcatcagag

SEQ ID NO: 722 - DNA, 89 bp, synthetic construct
  misc_feature 1..89: note = scaffold variant
  source 1..89: mol_type = other DNA
actggcgcttctatctgattactctgagcgccatcaccagcgactatgtcgtagtgggtaaagctccctcataggagggagcatcagag

SEQ ID NO: 723 - DNA, 91 bp, synthetic construct
  misc_feature 1..91: note = scaffold variant
  source 1..91: mol_type = other DNA
actggcgcttctatctgattactctgagcgccatcaccagcgactatgtcgtagtgggtaaagtctccctcttcggagggaggcatcagag

SEQ ID NO: 724 - DNA, 87 bp, synthetic construct
  misc_feature 1..87: note = scaffold variant
  source 1..87: mol_type = other DNA
actggcgcttctatctgattactctgagcgccatcaccagcgactatgtcgtagtgggtaaagctcctcttcggaggagcatcagag

SEQ ID NO: 725 - DNA, 85 bp, synthetic construct
  misc_feature 1..85: note = scaffold variant
  source 1..85: mol_type = other DNA
actggcgcttctatctgattactctgagcgccatcaccagcgactatgtcgtagtgggtaaagctctcttcggagagcatcagag

SEQ ID NO: 726 - DNA, 85 bp, synthetic construct
  misc_feature 1..85: note = scaffold variant
  source 1..85: mol_type = other DNA
actggcgcttctatctgattactctgagcgccatcaccagcgactatgtcgtagtgggtaaagctcccttcggggagcatcagag

SEQ ID NO: 727 - DNA, 85 bp, synthetic construct
  misc_feature 1..85: note = scaffold variant
  source 1..85: mol_type = other DNA
actggcgcttctatctgattactctgagcgccatcaccagcgactatgtcgtagtgggtaaagctccgttcgcggagcatcagag

SEQ ID NO: 728 - DNA, 83 bp, synthetic construct
  misc_feature 1..83: note = scaffold variant
  source 1..83: mol_type = other DNA
actggcgcttctatctgattactctgagcgccatcaccagcgactatgtcgtagtgggtaaagctgcttcggcagcatcagag

SEQ ID NO: 729 - DNA, 77 bp, synthetic construct
  misc_feature 1..77: note = scaffold variant
  source 1..77: mol_type = other DNA
actggcgcttctatctgattactctgagcgccatcaccagcgactatgtcgtagtgggtaaagctgcagcatcagag

SEQ ID NO: 730 - DNA, 75 bp, synthetic construct
  misc_feature 1..75: note = scaffold variant
  source 1..75: mol_type = other DNA
actggcgcttctatctgattactctgagcgccatcaccagcgactatgtcgtagtgggtaaagctagcatcagag

SEQ ID NO: 731 - DNA, 87 bp, synthetic construct
  misc_feature 1..87: note = scaffold variant
  source 1..87: mol_type = other DNA
actggcgcttctatctgattactctgagcgccatcaccagcgactatgtcgtagtgggtaaactccctcttcggagggagatcagag

SEQ ID NO: 732 - DNA, 89 bp, synthetic construct
  misc_feature 1..89: note = scaffold variant
  source 1..89: mol_type = other DNA
actggcgcttctatctgattactctgagcgccatcaccagcgactatgtcgtagtgggtaaagcgccctcttcggagggagcatcagag

SEQ ID NO: 733 - DNA, 89 bp, synthetic construct
  misc_feature 1..89: note = scaffold variant
  source 1..89: mol_type = other DNA
actggcgcttctatctgattactctgagcgccatcaccagcgactatgtcgtagtgggtaaaggtccctcttcggagggaacatcagag

SEQ ID NO: 734 - DNA, 97 bp, synthetic construct
  misc_feature 1..97: note = scaffold variant
  source 1..97: mol_type = other DNA
actggcgcttctatctgattactctgagcgccatcaccagcgactatgtcgtagtgggtaaagcccttacggacttcggtccgtaagggcatcagag

SEQ ID NO: 735 - DNA, 99 bp, synthetic construct
  misc_feature 1..99: note = scaffold variant
  source 1..99: mol_type = other DNA
actggcgcttctatctgattactctgagcgccatcaccagcgactatgtcgtagtgggtaaagcctcttacggacttcggtccgtaagaggcatcagag

SEQ ID NO: 736 - DNA, 99 bp, synthetic construct
  misc_feature 1..99: note = scaffold variant
  source 1..99: mol_type = other DNA
actggcgcttctatctgattactctgagcgccatcaccagcgactatgtcgtagtgggtaaagccgcttagggacttcggtccctaagaggcatcagag

SEQ ID NO: 737 - DNA, 90 bp, synthetic construct
  misc_feature 1..90: note = scaffold variant
  source 1..90: mol_type = other DNA
actggcgcttctatctgattactctgagcgccatcaccagcgactatgtcgtagtgggtaaagctccctcttcaggagggagcatcagag

SEQ ID NO: 738 - DNA, 89 bp, synthetic construct
  misc_feature 1..89: note = scaffold variant
  source 1..89: mol_type = other DNA
actggcgcttctatctgattactctgagcgccatcaccagcgactatgtcgtagtgggtaaagctccctggaaacagggagcatcagag

SEQ ID NO: 739 - RNA, 90 nt, synthetic construct
  misc_feature 1..90: note = scaffold variant
  source 1..90: mol_type = other RNA
aactggcgcttctatctgattactctgagcgccatcaccagcgactatgtcgtagtgggtaaagctccctcttcggagggagcatcagag

SEQ ID NO: 740 - RNA, 89 nt, synthetic construct
  misc_feature 1..89: note = scaffold variant
  source 1..89: mol_type = other RNA
gctggcgcttctatctgattactctgagcgccatcaccagcgactatgtcgtagtgggtaaagctccctcttcggagggagcatcagag

SEQ ID NO: 741 - RNA, 88 nt, synthetic construct
  misc_feature 1..88: note = scaffold variant
  source 1..88: mol_type = other RNA
atggcgcttctatctgattactctgagcgccatcaccagcgactatgtcgtagtgggtaaagctccctcttcggagggagcatcagag

SEQ ID NO: 742 - RNA, 90 nt, synthetic construct
  misc_feature 1..90: note = scaffold variant
  source 1..90: mol_type = other RNA
atctggcgcttctatctgattactctgagcgccatcaccagcgactatgtcgtagtgggtaaagctccctcttcggagggagcatcagag

SEQ ID NO: 743 - RNA, 88 nt, synthetic construct
  misc_feature 1..88: note = scaffold variant
  source 1..88: mol_type = other RNA
acggcgcttctatctgattactctgagcgccatcaccagcgactatgtcgtagtgggtaaagctccctcttcggagggagcatcagag

SEQ ID NO: 744 - RNA, 90 nt, synthetic construct
  misc_feature 1..90: note = scaffold variant
  source 1..90: mol_type = other RNA
actaggcgcttctatctgattactctgagcgccatcaccagcgactatgtcgtagtgggtaaagctccctcttcggagggagcatcagag

SEQ ID NO: 745 - RNA, 89 nt, synthetic construct
  misc_feature 1..89: note = scaffold variant
  source 1..89: mol_type = other RNA
tatggcgcttctatctgattactctgagcgccatcaccagcgactatgtcgtagtgggtaaagctccctcttcggagggagcatcagag

SEQ ID NO: 746 - RNA, 87 nt, synthetic construct
  misc_feature 1..87: note = scaffold variant
  source 1..87: mol_type = other RNA
aggcgcttctatctgattactctgagcgccatcaccagcgactatgtcgtagtgggtaaagctccctcttcggagggagcatcagag

SEQ ID NO: 747 - RNA, 88 nt, synthetic construct
  misc_feature 1..88: note = scaffold variant
  source 1..88: mol_type = other RNA
atggtgcttctatctgattactctgagcgccatcaccagcgactatgtcgtagtgggtaaagctccctcttcggagggagcatcagag

SEQ ID NO: 748 - RNA, 89 nt, synthetic construct
  misc_feature 1..89: note = scaffold variant
  source 1..89: mol_type = other RNA
tctggcgcttctatctgattactctgagcgccatcaccagcgactatgtcgtagtgggtaaagctccctcttcggagggagcatcagag

SEQ ID NO: 749 - RNA, 89 nt, synthetic construct
  misc_feature 1..89: note = scaffold variant
  source 1..89: mol_type = other RNA
aatggcgcttctatctgattactctgagcgccatcaccagcgactatgtcgtagtgggtaaagctccctcttcggagggagcatcagag

SEQ ID NO: 750 - RNA, 89 nt, synthetic construct
  misc_feature 1..89: note = scaffold variant
  source 1..89: mol_type = other RNA
agtggcgcttctatctgattactctgagcgccatcaccagcgactatgtcgtagtgggtaaagctccctcttcggagggagcatcagag

SEQ ID NO: 751 - RNA, 89 nt, synthetic construct
  misc_feature 1..89: note = scaffold variant
  source 1..89: mol_type = other RNA
acaggcgcttctatctgattactctgagcgccatcaccagcgactatgtcgtagtgggtaaagctccctcttcggagggagcatcagag

SEQ ID NO: 752 - RNA, 89 nt, synthetic construct
  misc_feature 1..89: note = scaffold variant
  source 1..89: mol_type = other RNA
acgggcgcttctatctgattactctgagcgccatcaccagcgactatgtcgtagtgggtaaagctccctcttcggagggagcatcagag

SEQ ID NO: 753 - RNA, 87 nt, synthetic construct
  misc_feature 1..87: note = scaffold variant
  source 1..87: mol_type = other RNA
gggcgcttctatctgattactctgagcgccctcaccagcgactatgtcgtagtgggtaaagctccctcttcggagggagcatcagag

SEQ ID NO: 754 - RNA, 90 nt, synthetic construct
  misc_feature 1..90: note = scaffold variant
  source 1..90: mol_type = other RNA
actggcgcttctaatctgattactctgagcgccatcaccagcgactatgtcgtagtgggtaaagctccctcttcggagggagcatcagag

SEQ ID NO: 755 - RNA, 89 nt, synthetic construct
  misc_feature 1..89: note = scaffold variant
  source 1..89: mol_type = other RNA
actggcgcttctaactgattactctgagcgccatcaccagcgactatgtcgtagtgggtaaagctccctcttcggagggagcatcagag

SEQ ID NO: 756 - RNA, 89 nt, synthetic construct
  misc_feature 1..89: note = scaffold variant
  source 1..89: mol_type = other RNA
actggcgcttctagctgattactctgagcgccatcaccagcgactatgtcgtagtgggtaaagctccctcttcggagggagcatcagag

SEQ ID NO: 757 - RNA, 88 nt, synthetic construct
  misc_feature 1..88: note = scaffold variant
  source 1..88: mol_type = other RNA
actggcgcttctactgattactctgagcgccatcaccagcgactatgtcgtagtgggtaaagctccctcttcggagggagcatcagag

SEQ ID NO: 758 - RNA, 89 nt, synthetic construct
  misc_feature 1..89: note = scaffold variant
  source 1..89: mol_type = other RNA
actggcgcttctatatgattactctgagcgccatcaccagcgactatgtcgtagtgggtaaagctccctcttcggagggagcatcagag

SEQ ID NO: 759 - RNA, 89 nt, synthetic construct
  misc_feature 1..89: note = scaffold variant
  source 1..89: mol_type = other RNA
actggcgcttctatttgattactctgagcgccatcaccagcgactatgtcgtagtgggtaaagctccctcttcggagggagcatcagag

SEQ ID NO: 760 - RNA, 89 nt, synthetic construct
  misc_feature 1..89: note = scaffold variant
  source 1..89: mol_type = other RNA
actggcgcttctatgtgattactctgagcgccatcaccagcgactatgtcgtagtgggtaaagctccctcttcggagggagcatcagag

SEQ ID NO: 761 - RNA, 90 nt, synthetic construct
  misc_feature 1..90: note = scaffold variant
  source 1..90: mol_type = other RNA
actggcgcttctatcttgattactctgagcgccatcaccagcgactatgtcgtagtgggtaaagctccctcttcggagggagcatcagag

SEQ ID NO: 762 - RNA, 90 nt, synthetic construct
  misc_feature 1..90: note = scaffold variant
  source 1..90: mol_type = other RNA
actggcgcttctatctgatttactctgagcgccatcaccagcgactatgtcgtagtgggtaaagctccctcttcggagggagcatcagag

SEQ ID NO: 763 - RNA, 90 nt, synthetic construct
  misc_feature 1..90: note = scaffold variant
  source 1..90: mol_type = other RNA
actggcgcttctatctgtattactctgagcgccatcaccagcgactatgtcgtagtgggtaaagctccctcttcggagggagcatcagag

SEQ ID NO: 764 - RNA, 90 nt, synthetic construct
  misc_feature 1..90: note = scaffold variant
  source 1..90: mol_type = other RNA
actggcgcttctatctgaattactctgagcgccatcaccagcgactatgtcgtagtgggtaaagctccctcttcggagggagcatcagag

SEQ ID NO: 765 - RNA, 89 nt, synthetic construct
  misc_feature 1..89: note = scaffold variant
  source 1..89: mol_type = other RNA
actggcgcttctatctggttactctgagcgccatcaccagcgactatgtcgtagtgggtaaagctccctcttcggagggagcatcagag

SEQ ID NO: 766 - RNA, 89 nt, synthetic construct
  misc_feature 1..89: note = scaffold variant
  source 1..89: mol_type = other RNA
actggcgcttctatctgtttactctgagcgccatcaccagcgactatgtcgtagtgggtaaagctccctcttcggagggagcatcagag

SEQ ID NO: 767 - RNA, 89 nt, synthetic construct
  misc_feature 1..89: note = scaffold variant
  source 1..89: mol_type = other RNA
actggcgcttctatctgattgctctgagcgccatcaccagcgactatgtcgtagtgggtaaagctccctcttcggagggagcatcagag

SEQ ID NO: 768 - RNA, 91 nt, synthetic construct
  misc_feature 1..91: note = scaffold variant
  source 1..91: mol_type = other RNA
actggcgcttctatatctgattactctgagcgccatcaccagcgactatgtcgtagtgggtaaagctccctcttcggagggagcatcagag

SEQ ID NO: 769 - RNA, 91 nt, synthetic construct
  misc_feature 1..91: note = scaffold variant
  source 1..91: mol_type = other RNA
actggcgcttctattactgattactctgagcgccatcaccagcgactatgtcgtagtgggtaaagctccctcttcggagggagcatcagag

SEQ ID NO: 770 - RNA, 89 nt, synthetic construct
  misc_feature 1..89: note = scaffold variant
  source 1..89: mol_type = other RNA
actggcgcttctacctgattactctgagcgccatcaccagcgactatgtcgtagtgggtaaagctccctcttcggagggagcatcagag

SEQ ID NO: 771 - RNA, 89 nt, synthetic construct
  misc_feature 1..89: note = scaffold variant
  source 1..89: mol_type = other RNA
actggcgcttctatcagattactctgagcgccatcaccagcgactatgtcgtagtgggtaaagctccctcttcggagggagcatcagag

SEQ ID NO: 772 - RNA, 89 nt, synthetic construct
  misc_feature 1..89: note = scaffold variant
  source 1..89: mol_type = other RNA
actggcgcttctatcggattactctgagcgccatcaccagcgactatgtcgtagtgggtaaagctccctcttcggagggagcatcagag

SEQ ID NO: 773 - RNA, 89 nt, synthetic construct
  misc_feature 1..89: note = scaffold variant
  source 1..89: mol_type = other RNA
actggcgcttctatctgattactctcagcgccatcaccagcgactatgtcgtagtgggtaaagctccctcttcggagggagcatgagag

SEQ ID NO: 774 - RNA, 89 nt, synthetic construct
  misc_feature 1..89: note = scaffold variant
  source 1..89: mol_type = other RNA
actggcgcttttatctgattactctgagcgccatcaccagcgactatgtcgtagtgggtaaagctccctcttcggagggagcatcagag

SEQ ID NO: 775 - RNA, 89 nt, synthetic construct
  misc_feature 1..89: note = scaffold variant
  source 1..89: mol_type = other RNA
actggcgcttctatctgattactttgagcgccatcaccagcgactatgtcgtagtgggtaaagctccctcttcggagggagcatcagag

SEQ ID NO: 776 - RNA, 89 nt, synthetic construct
  misc_feature 1..89: note = scaffold variant
  source 1..89: mol_type = other RNA
actggcgcttctatctgattactctgagcgccatcaccagcgactatgtcgtagtgggtaaagctccctcttcggagggagcatcaaag

SEQ ID NO: 777 - RNA, 89 nt, synthetic construct
  misc_feature 1..89: note = scaffold variant
  source 1..89: mol_type = other RNA
actggcgcttttatctgattactttgagcgccatcaccagcgactatgtcgtagtgggtaaagctccctcttcggagggagcatcagag

SEQ ID NO: 778 - RNA, 89 nt, synthetic construct
  misc_feature 1..89: note = scaffold variant
  source 1..89: mol_type = other RNA
actggcgcttttatctgattactctgagcgccatcaccagcgactatgtcgtagtgggtaaagctccctcttcggagggagcatcaaag

SEQ ID NO: 779 - RNA, 89 nt, synthetic construct
  misc_feature 1..89: note = scaffold variant
  source 1..89: mol_type = other RNA
actggcgcttctatctgattactttgagcgccatcaccagcgactatgtcgtagtgggtaaagctccctcttcggagggagcatcaaag

SEQ ID NO: 780 - RNA, 89 nt, synthetic construct
  misc_feature 1..89: note = scaffold variant
  source 1..89: mol_type = other RNA
actggcgcttgtatctgattactctgagcgccatcaccagcgactatgtcgtagtgggtaaagctccctcttcggagggagcatcagag

SEQ ID NO: 781 - RNA, 89 nt, synthetic construct
  misc_feature 1..89: note = scaffold variant
  source 1..89: mol_type = other RNA
actggcgcttccatctgattaccctgagcgccatcaccagcgactatgtcgtagtgggtaaagctccctcttcggagggagcatcaggg

SEQ ID NO: 782 - RNA, 89 nt, synthetic construct
  misc_feature 1..89: note = scaffold variant
  source 1..89: mol_type = other RNA
actggcgctcctatctgattactccgagcgccatcaccagcgactatgtcgtagtgggtaaagctccctcttcggagggagcatcggag

SEQ ID NO: 783 - RNA, 89 nt, synthetic construct
  misc_feature 1..89: note = scaffold variant
  source 1..89: mol_type = other RNA
actggcgcttggatctgattaccctgagcgccatcaccagcgactatgtcgtagtgggtaaagctccctcttcggagggagcatcaggg

SEQ ID NO: 784 - RNA, 89 nt, synthetic construct
  misc_feature 1..89: note = scaffold variant
  source 1..89: mol_type = other RNA
actggcgctggtatctgattactccgagcgccatcaccagcgactatgtcgtagtgggtaaagctccctcttcggagggagcatcggag

SEQ ID NO: 785 - RNA, 89 nt, synthetic construct
  misc_feature 1..89: note = scaffold variant
  source 1..89: mol_type = other RNA
actggcgctcccatctgattaccccgagcgccatcaccagcgactatgtcgtagtgggtaaagctccctcttcggagggagcatcgggg

SEQ ID NO: 786 - RNA, 89 nt, synthetic construct
  misc_feature 1..89: note = scaffold variant
  source 1..89: mol_type = other RNA
actggcgctgggatctgattaccccgagcgccatcaccagcgactatgtcgtagtgggtaaagctccctcttcggagggagcatcgggg

SEQ ID NO: 787 - RNA, 89 nt, synthetic construct
  misc_feature 1..89: note = scaffold variant
  source 1..89: mol_type = other RNA
actggcgcttctatctgattagtctcagcgccatcaccagcgactatgtcgtagtgggtaaagctccctcttcggagggagcatgagac

SEQ ID NO: 788 - RNA, 89 nt, synthetic construct
  misc_feature 1..89: note = scaffold variant
  source 1..89: mol_type = other RNA
actggcgcttctatctgattagtctgagcgccatcaccagcgactatgtcgtagtgggtaaagctccctcttcggagggagcatcagac

SEQ ID NO: 789 - RNA, 89 nt, synthetic construct
  misc_feature 1..89: note = scaffold variant
  source 1..89: mol_type = other RNA
actggcgcttctatctgattactctcagcgccatcaccagcgactatgtcgtagtgggtaaagctccctcttcggagggagcatcagac

SEQ ID NO: 790 - RNA, 89 nt, synthetic construct
  misc_feature 1..89: note = scaffold variant
  source 1..89: mol_type = other RNA
actggcgcttctatctgattactctgagcgccatcaccagcgactatgtcgtagtgggtaaagctccctcttcggagggagcctcagag

SEQ ID NO: 791 - RNA, 89 nt, synthetic construct
  misc_feature 1..89: note = scaffold variant
  source 1..89: mol_type = other RNA
actggcgcttctatctgattactctgagcgccatcaccagcgactatgtcgtagtgggtaaagctccctcttcggagggagcgtcagag

SEQ ID NO: 792 - RNA, 89 nt, synthetic construct
  misc_feature 1..89: note = scaffold variant
  source 1..89: mol_type = other RNA
actggctcttctatctgattactctgagagccatcaccagcgactatgtcgtagtgggtaaagctccctcttcggagggagcatcagag

SEQ ID NO: 793 - RNA, 89 nt, synthetic construct; identical to SEQ ID NO: 55
  misc_feature 1..89: note = scaffold variant
  source 1..89: mol_type = other RNA

SEQ ID NO: 794 - RNA, 89 nt, synthetic construct; identical to SEQ ID NO: 156
  misc_feature 1..89: note = scaffold variant
  source 1..89: mol_type = other RNA

SEQ ID NO: 795 - RNA, 89 nt, synthetic construct
  misc_feature 1..89: note = scaffold variant
  source 1..89: mol_type = other RNA
actggcgcttctatctgattactctgagtgccatcaccagcgactatgtcgtagtgggtaaagctccctcttcggagggagcatcagag

SEQ ID NO: 796 - RNA, 90 nt, synthetic construct
  misc_feature 1..90: note = scaffold variant
  source 1..90: mol_type = other RNA
actggcgcttctatctgattactctgagcagccatcaccagcgactatgtcgtagtgggtaaagctccctcttcggagggagcatcagag

SEQ ID NO: 797 - RNA, 90 nt, synthetic construct
  misc_feature 1..90: note = scaffold variant
  source 1..90: mol_type = other RNA
actggcgcttctatctgattactctgagtagccatcaccagcgactatgtcgtagtgggtaaagctccctcttcggagggagcatcagag

SEQ ID NO: 798 - RNA, 89 nt, synthetic construct
  misc_feature 1..89: note = scaffold variant
  source 1..89: mol_type = other RNA
actggcgcttctatctgattactctgtgagccatcaccagcgactatgtcgtagtgggtaaagctccctcttcggagggagcatcagag

SEQ ID NO: 799 - RNA, 89 nt, synthetic construct
  misc_feature 1..89: note = scaffold variant
  source 1..89: mol_type = other RNA
actggcgcttctatctgattactctgagggccatcaccagcgactatgtcgtagtgggtaaagctccctcttcggagggagcatcagag

SEQ ID NO: 800 - RNA, 89 nt, synthetic construct
  misc_feature 1..89: note = scaffold variant
  source 1..89: mol_type = other RNA
actggcgcttctatctgattactctgagagccttcaccagcgactatgtcgtagtgggtaaagctccctcttcggagggagcatcagag

SEQ ID NO: 801 - RNA, 89 nt, synthetic construct
  misc_feature 1..89: note = scaffold variant
  source 1..89: mol_type = other RNA
actggggcttctatctgattactctgagacccatcaccagcgactatgtcgtagtgggtaaagctccctcttcggagggagcatcagag

SEQ ID NO: 802 - RNA, 89 nt, synthetic construct
  misc_feature 1..89: note = scaffold variant
  source 1..89: mol_type = other RNA
actggctcttctatctgattactctgagcgccatcaccagcgactatgtcgtagtgggtaaagctccctcttcggagggagcatcagag

SEQ ID NO: 803 - RNA, 89 nt, synthetic construct
  misc_feature 1..89: note = scaffold variant
  source 1..89: mol_type = other RNA
actggcccttctatctgattactctgagggccatcaccagcgactatgtcgtagtgggtaaagctccctcttcggagggagcatcagag

SEQ ID NO: 804 - RNA, 89 nt, synthetic construct
  misc_feature 1..89: note = scaffold variant
  source 1..89: mol_type = other RNA
actggcccttctatctgattactctgagtgccatcaccagcgactatgtcgtagtgggtaaagctccctcttcggagggagcatcagag

SEQ ID NO: 805 - RNA, 89 nt, synthetic construct
  misc_feature 1..89: note = scaffold variant
  source 1..89: mol_type = other RNA
actggctcttctatctgattactctgagggccatcaccagcgactatgtcgtagtgggtaaagctccctcttcggagggagcatcagag

SEQ ID NO: 806 - RNA, 90 nt, synthetic construct
  misc_feature 1..90: note = scaffold variant
  source 1..90: mol_type = other RNA
actggcgcttctatctgattactctgagctgccatcaccagcgactatgtcgtagtgggtaaagctccctcttcggagggagcatcagag

SEQ ID NO: 807 - RNA, 89 nt, synthetic construct
  misc_feature 1..89: note = scaffold variant
  source 1..89: mol_type = other RNA
actggcgcttctatctgattactctgagcaccatcaccagcgactatgtcgtagtgggtaaagctccctcttcggagggagcatcagag

SEQ ID NO: 808 - RNA, 89 nt, synthetic construct
  misc_feature 1..89: note = scaffold variant
  source 1..89: mol_type = other RNA
actggcgcttctatctgattactctgagtgccgtcaccagcgactatgtcgtagtgggtaaagctccctcttcggagggagcatcagag

SEQ ID NO: 809 - RNA, 89 nt, synthetic construct
  misc_feature 1..89: note = scaffold variant
  source 1..89: mol_type = other RNA
actggcacttctatctgattactctgagcgccatcaccagcgactatgtcgtagtgggtaaagctccctcttcggagggagcatcagag

SEQ ID NO: 810 - RNA, 90 nt, synthetic construct
  misc_feature 1..90: note = scaffold variant
  source 1..90: mol_type = other RNA
actggcacttctatctgattactctgagtagccatcaccagcgactatgtcgtagtgggtaaagctccctcttcggagggagcatcagag

SEQ ID NO: 811 - RNA, 89 nt, synthetic construct
  misc_feature 1..89: note = scaffold variant
  source 1..89: mol_type = other RNA
actggcacttctatctgattactctgagtgccatcaccagcgactatgtcgtagtgggtaaagctccctcttcggagggagcatcagag

SEQ ID NO: 812 - RNA, 90 nt, synthetic construct
  misc_feature 1..90: note = scaffold variant
  source 1..90: mol_type = other RNA
actggcccttctatctgattactctgaggagccatcaccagcgactatgtcgtagtgggtaaagctccctcttcggagggagcatcagag

SEQ ID NO: 813 - RNA, 89 nt, synthetic construct
  misc_feature 1..89: note = scaffold variant
  source 1..89: mol_type = other RNA
actggctcttctatctgattactctgagtgccatcaccagcgactatgtcgtagtgggtaaagctccctcttcggagggagcatcagag

SEQ ID NO: 814 - RNA, 90 nt, synthetic construct; identical to SEQ ID NO: 812
  misc_feature 1..90: note = scaffold variant
  source 1..90: mol_type = other RNA

SEQ ID NO: 815 - RNA, 89 nt, synthetic construct
  misc_feature 1..89: note = scaffold variant
  source 1..89: mol_type = other RNA
actggcggttctatctgattactctgagcgccatcaccagcgactatgtcgtagtgggtaaagctccctcttcggagggagcatcagag

SEQ ID NO: 816 - RNA, 89 nt, synthetic construct; identical to SEQ ID NO: 163
  misc_feature 1..89: note = scaffold variant
  source 1..89: mol_type = other RNA

SEQ ID NO: 817 - RNA, 89 nt, synthetic construct
  misc_feature 1..89: note = scaffold variant
  source 1..89: mol_type = other RNA
actggcccttctatctgattactctgagagccatcaccagcgactatgtcgtagtgggtaaagctccctcttcggagggagcatcagag

SEQ ID NO: 818 - RNA, 89 nt, synthetic construct
  misc_feature 1..89: note = scaffold variant
  source 1..89: mol_type = other RNA
actggtgcttctatctgattactctgagagccatcaccagcgactatgtcgtagtgggtaaagctccctcttcggagggagcatcagag

SEQ ID NO: 819 - RNA, 89 nt, synthetic construct
  misc_feature 1..89: note = scaffold variant
  source 1..89: mol_type = other RNA
actggcggttctatctgattactctgagagccatcaccagcgactatgtcgtagtgggtaaagctccctcttcggagggagcatcagag

SEQ ID NO: 820 - RNA, 89 nt, synthetic construct
  misc_feature 1..89: note = scaffold variant
  source 1..89: mol_type = other RNA
actggcgcttctatctgattactctgggagccatcaccagcgactatgtcgtagtgggtaaagctccctcttcggagggagcatcagag

SEQ ID NO: 821 - RNA, 90 nt, synthetic construct
  misc_feature 1..90: note = scaffold variant
  source 1..90: mol_type = other RNA
actggcgcttctatctgattactctgaggagccatcaccagcgactatgtcgtagtgggtaaagctccctcttcggagggagcatcagag

SEQ ID NO: 822 - RNA, 89 nt, synthetic construct
  misc_feature 1..89: note = scaffold variant
  source 1..89: mol_type = other RNA
actggcgcttctatctgattactctgatagccatcaccagcgactatgtcgtagtgggtaaagctccctcttcggagggagcatcagag

SEQ ID NO: 823 - RNA, 90 nt, synthetic construct; identical to SEQ ID NO: 796
  misc_feature 1..90: note = scaffold variant
  source 1..90: mol_type = other RNA

SEQ ID NO: 824 - RNA, 90 nt, synthetic construct; identical to SEQ ID NO: 797
  misc_feature 1..90: note = scaffold variant
  source 1..90: mol_type = other RNA

SEQ ID NO: 825 - RNA, 89 nt, synthetic construct
  misc_feature 1..89: note = scaffold variant
  source 1..89: mol_type = other RNA
actggcgcttctatctgattactctgagaaccatcaccagcgactatgtcgtagtgggtaaagctccctcttcggagggagcatcagag

SEQ ID NO: 826 - RNA, 89 nt, synthetic construct
  misc_feature 1..89: note = scaffold variant
  source 1..89: mol_type = other RNA
actggcgcttctatctgattactctgagagccgtcaccagcgactatgtcgtagtgggtaaagctccctcttcggagggagcatcagag

SEQ ID NO: 827 - RNA, 89 nt, synthetic construct
  misc_feature 1..89: note = scaffold variant
  source 1..89: mol_type = other RNA
actggcgcttctatctgattactctgggcgccatcaccagcgactatgtcgtagtgggtaaagctccctcttcggagggagcatcagag

SEQ ID NO: 828 - RNA, 89 nt, synthetic construct; identical to SEQ ID NO: 827
  misc_feature 1..89: note = scaffold variant
  source 1..89: mol_type = other RNA

SEQ ID NO: 829 - RNA, 89 nt, synthetic construct; identical to SEQ ID NO: 827
  misc_feature 1..89: note = scaffold variant
  source 1..89: mol_type = other RNA

SEQ ID NO: 830 - RNA, 89 nt, synthetic construct
  misc_feature 1..89: note = scaffold variant
  source 1..89: mol_type = other RNA
acactggtttctatctgattactctgaaccagttcaccagcgactatgtcgtagtgggtaaagctccctcttcggagggagcatcagag

SEQ ID NO: 831 - RNA, 89 nt, synthetic construct
  misc_feature 1..89: note = scaffold variant
  source 1..89: mol_type = other RNA
acaggccgttctatctgattactctgacggccttcaccagcgactatgtcgtagtgggtaaagctccctcttcggagggagcatcagag

SEQ ID NO: 832 - RNA, 89 nt, synthetic construct
  misc_feature 1..89: note = scaffold variant
  source 1..89: mol_type = other RNA
acacacggttctatctgattactctgaccgtgttcaccagcgactatgtcgtagtgggtaaagctccctcttcggagggagcatcagag

SEQ ID NO: 833 - RNA, 89 nt, synthetic construct
  misc_feature 1..89: note = scaffold variant
  source 1..89: mol_type = other RNA
acgggactttctatctgattactctgaagtccctcaccagcgactatgtcgtagtgggtaaagctccctcttcggagggagcatcagag

SEQ ID NO: 834 - RNA, 89 nt, synthetic construct
  misc_feature 1..89: note = scaffold variant
  source 1..89: mol_type = other RNA
acgggcaattctatctgattactctgattgccctcaccagcgactatgtcgtagtgggtaaagctccctcttcggagggagcatcagag

SEQ ID NO: 835 - RNA, 89 nt, synthetic construct
  misc_feature 1..89: note = scaffold variant
  source 1..89: mol_type = other RNA
acgagcacttctatctgattactctgagggctctcaccagcgactatgtcgtagtgggtaaagctccctcttcggagggagcatcagag

SEQ ID NO: 836 - RNA, 89 nt, synthetic construct
  misc_feature 1..89: note = scaffold variant
  source 1..89: mol_type = other RNA
actgtgcgttctatctgattactctgacgcacatcaccagcgactatgtcgtagtgggtaaagctccctcttcggagggagcatcagag

SEQ ID NO: 837 - RNA, 89 nt, synthetic construct
  misc_feature 1..89: note = scaffold variant
  source 1..89: mol_type = other RNA
acaggtccttctatctgattactctgaggaccttcaccagcgactatgtcgtagtgggtaaagctccctcttcggagggagcatcagag

SEQ ID NO: 838 - RNA, 89 nt, synthetic construct
  misc_feature 1..89: note = scaffold variant
  source 1..89: mol_type = other RNA
acgaggtgttctatctgattactctgacacctctcaccagcgactatgtcgtagtgggtaaagctccctcttcggagggagcatcagag

SEQ ID NO: 839 - RNA, 88 nt, synthetic construct
  misc_feature 1..88: note = scaffold variant
  source 1..88: mol_type = other RNA
actggcgcttctatctgattactctgagcgccatcaccagcgacgatgtcgtatgggtaaagctccctcttcggagggagcatcagag

SEQ ID NO: 840 - RNA, 89 nt, synthetic construct; identical to SEQ ID NO: 156
  misc_feature 1..89: note = scaffold variant
  source 1..89: mol_type = other RNA

SEQ ID NO: 841 - RNA, 89 nt, synthetic construct
  misc_feature 1..89: note = scaffold variant
  source 1..89: mol_type = other RNA
actggcgcttctatctgattactctgagcgccatcaccagcgactatgtcgtattgggtaaagctccctcttcggagggagcatcagag

SEQ ID NO: 842 - RNA, 88 nt, synthetic construct; identical to SEQ ID NO: 839
  misc_feature 1..88: note = scaffold variant
  source 1..88: mol_type = other RNA

SEQ ID NO: 843 - RNA, 89 nt, synthetic construct; identical to SEQ ID NO: 156
  misc_feature 1..89: note = scaffold variant
  source 1..89: mol_type = other RNA

SEQ ID NO: 844 - RNA, 89 nt, synthetic construct; identical to SEQ ID NO: 841
  misc_feature 1..89: note = scaffold variant
  source 1..89: mol_type = other RNA

SEQ ID NO: 845 - RNA, 88 nt, synthetic construct
  misc_feature 1..88: note = scaffold variant
  source 1..88: mol_type = other RNA
actggcgcttctatctgattactctgagcgccatctccagcgactatgtcgtatgggtaaagctccctcttcggagggagcatcagag

SEQ ID NO: 846 - RNA, 88 nt, synthetic construct
  misc_feature 1..88: note = scaffold variant
  source 1..88: mol_type = other RNA
actggcgcttctatctgattactctgagcgccatccccagcgactatgtcgtatgggtaaagctccctcttcggagggagcatcagag

SEQ ID NO: 847 - RNA, 88 nt, synthetic construct
  misc_feature 1..88: note = scaffold variant
  source 1..88: mol_type = other RNA
actggcgcttctatctgattactctgagcgccatcaccagcgattatgtcgtatgggtaaagctccctcttcggagggagcatcagag

SEQ ID NO: 848 - RNA, 88 nt, synthetic construct
  misc_feature 1..88: note = scaffold variant
  source 1..88: mol_type = other RNA
actggcgcttctatctgattactctgagcgccatcaccagcgactatgtcgtgtgggtaaagctccctcttcggagggagcatcagag

SEQ ID NO: 849 - RNA, 89 nt, synthetic construct
  misc_feature 1..89: note = scaffold variant
  source 1..89: mol_type = other RNA
actggcgcttctatctgattactctgagcgccatcaccagcgactatgtcgtatggtgtaaagctccctcttcggagggagcatcagag

SEQ ID NO: 850 - RNA, 89 nt, synthetic construct
  misc_feature 1..89: note = scaffold variant
  source 1..89: mol_type = other RNA
actggcgcttctatctgattactctgagcgccatcaccagcgactatgtcgtatggagtaaagctccctcttcggagggagcatcagag

SEQ ID NO: 851 - RNA, 88 nt, synthetic construct
  misc_feature 1..88: note = scaffold variant
  source 1..88: mol_type = other RNA
actggcgcttctatctgattactctgagcgccaacaccagcgactatgtcgtatgggtaaagctccctcttcggagggagcatcagag

SEQ ID NO: 852 - RNA, 88 nt, synthetic construct
  misc_feature 1..88: note = scaffold variant
  source 1..88: mol_type = other RNA
actggcgcttctatctgattactctgagcgccatgaccagcgactatgtcgtatggctaaagctccctcttcggagggagcatcagag

SEQ ID NO: 853 - RNA, 89 nt, synthetic construct
  misc_feature 1..89: note = scaffold variant
  source 1..89: mol_type = other RNA
actggcgcttctatctgattactctgagcgccatgaccagcgactatgtcgtatgggctaaagctccctcttcggagggagcatcagag

SEQ ID NO: 854 - RNA, 89 nt, synthetic construct
  misc_feature 1..89: note = scaffold variant
  source 1..89: mol_type = other RNA
actggcgcttctatctgattactctgagcgccatcgccagcgactatgtcgtatggcgtaaagctccctcttcggagggagcatcagag

SEQ ID NO: 855 - RNA, 88 nt, synthetic construct
  misc_feature 1..88: note = scaffold variant
  source 1..88: mol_type = other RNA
actggcgcttctatctgattactctgagcgccatcacctgcgactatgtcgtaagggtaaagctccctcttcggagggagcatcagag

SEQ ID NO: 856 - RNA, 88 nt, synthetic construct
  misc_feature 1..88: note = scaffold variant
  source 1..88: mol_type = other RNA
actggcgcttctatctgattactctgagcgccatcaccagagactatgtcttatgggtaaagctccctcttcggagggagcatcagag

SEQ ID NO: 857 - RNA, 88 nt, synthetic construct
  misc_feature 1..88: note = scaffold variant
  source 1..88: mol_type = other RNA
actggcgcttctatctgattactctgagcgccatcaccagggactatgtcctatgggtaaagctccctcttcggagggagcatcagag

SEQ ID NO: 858 - RNA, 88 nt, synthetic construct
  misc_feature 1..88: note = scaffold variant
  source 1..88: mol_type = other RNA
actggcgcttctatctgattactctgagcgccatcaccagccactatgtggtatgggtaaagctccctcttcggagggagcatcagag

SEQ ID NO: 859 - RNA, 88 nt, synthetic construct
  misc_feature 1..88: note = scaffold variant
  source 1..88: mol_type = other RNA
actggcgcttctatctgattactctgagcgccatcaccagctactatgtagtatgggtaaagctccctcttcggagggagcatcagag

SEQ ID NO: 860 - RNA, 86 nt, synthetic construct
  misc_feature 1..86: note = scaffold variant
  source 1..86: mol_type = other RNA
actggcgcttctatctgattactctgagcgccatcaccagcgactatgtcgtatgggtagctccctcttcggagggagcatcagag

SEQ ID NO: 861 - RNA, 89 nt, synthetic construct
  misc_feature 1..89: note = scaffold variant
  source 1..89: mol_type = other RNA
actggcgcttctatctgattactctgagcgccatcaccaggcactatgtgctattgggtaaagctccctcttcggagggagcatcagag

SEQ ID NO: 862 - RNA, 88 nt, synthetic construct
  misc_feature 1..88: note = scaffold variant
  source 1..88: mol_type = other RNA
actggcgcttctatctgattactctgagcgccagcaccagcgactatgtcgtatgggtaaagctccctcttcggagggagcatcagag

SEQ ID NO: 863 - RNA, 88 nt, synthetic construct
  misc_feature 1..88: note = scaffold variant
  source 1..88: mol_type = other RNA
actggcgcttctatctgattactctgagcgccatgaccagcgactatgtcgtatgggtaaagctccctcttcggagggagcatcagag

SEQ ID NO: 864 - RNA, 88 nt, synthetic construct
  misc_feature 1..88: note = scaffold variant
  source 1..88: mol_type = other RNA
actggcgcttctatctgattactctgagcgccatcgccagcgactatgtcgtatgggtaaagctccctcttcggagggagcatcagag

SEQ ID NO: 865 - RNA, 88 nt, synthetic construct
  misc_feature 1..88: note = scaffold variant
  source 1..88: mol_type = other RNA
actggcgcttctatctgattactctgagcgccatcaccagcgactctgtcgtatgggtaaagctccctcttcggagggagcatcagag

SEQ ID NO: 866 - RNA, 89 nt, synthetic construct
  misc_feature 1..89: note = scaffold variant
  source 1..89: mol_type = other RNA
actggcgcttctatctgattactctgagcgccatcaccagcgactatgtcgtatggcgtaaagctccctcttcggagggagcatcagag

SEQ ID NO: 867 - RNA, 89 nt, synthetic construct
  misc_feature 1..89: note = scaffold variant
  source 1..89: mol_type = other RNA
actggcgcttctatctgattactctgagcgccatcaccagcgactatgtcgtatgggctaaagctccctcttcggagggagcatcagag

SEQ ID NO: 868 - RNA, 88 nt, synthetic construct
  misc_feature 1..88: note = scaffold variant
  source 1..88: mol_type = other RNA
actggcgcttctatctgattactctgagcgccatcaccagcgactatgtcgtatgggtgaagctccctcttcggagggagcatcagag

SEQ ID NO: 869 - RNA, 88 nt, synthetic construct
  misc_feature 1..88: note = scaffold variant
  source 1..88: mol_type = other RNA
actggcgcttctatctgattactctgagcgccatcaccagcgactatgtcgtatgggtagagctccctcttcggagggagcatcagag

SEQ ID NO: 870 - RNA, 93 nt, synthetic construct
  misc_feature 1..93: note = scaffold variant
  source 1..93: mol_type = other RNA
actggcgcttctatctgattactctgagcgccatcaccagcgactatgtcgtagtgggtaaaggtgacggtcttcggaccgtcaccatcagag

SEQ ID NO: 871 - RNA, 93 nt, synthetic construct
  misc_feature 1..93: note = scaffold variant
  source 1..93: mol_type = other RNA
actggcgcttctatctgattactctgagcgccatcaccagcgactatgtcgtagtgggtaaatcgtaagaacttcggttcttacgaatcagag

SEQ ID NO: 872 - RNA, 93 nt, synthetic construct
  misc_feature 1..93: note = scaffold variant
  source 1..93: mol_type = other RNA
actggcgcttctatctgattactctgagcgccatcaccagcgactatgtcgtagtgggtaaagtgcgcccgcttcggcgggcgcacatcagag

SEQ ID NO: 873 - RNA, 93 nt, synthetic construct
  misc_feature 1..93: note = scaffold variant
  source 1..93: mol_type = other RNA
actggcgcttctatctgattactctgagcgccatcaccagcgactatgtcgtagtgggtaaataatgaaaacttcggttttcattaatcagag

SEQ ID NO: 874 - RNA, 93 nt, synthetic construct
  misc_feature 1..93: note = scaffold variant
  source 1..93: mol_type = other RNA
actggcgcttctatctgattactctgagcgccatcaccagcgactatgtcgtagtgggtaaatggaagatgcttcggcatcttccaatcagag

SEQ ID NO: 875 - RNA, 102 nt, synthetic construct
  misc_feature 1..102: note = scaffold variant
  source 1..102: mol_type = other RNA
actggcgcttctatctgattactctgagcgccatcaccagcgactatgtcgtagtgggtaaagcggcagatctgagcctccgagctctctgccgcatcagag

SEQ ID NO: 876 - RNA, 95 nt, synthetic construct
  misc_feature 1..95: note = scaffold variant
  source 1..95: mol_type = other RNA
actggcgcttctatctgattactctgagcgccatcaccagcgactatgtcgtagtgggtaaagctccctcacagggatgtgagggagcatcagag

SEQ ID NO: 877 - RNA, 94 nt, synthetic construct
  misc_feature 1..94: note = scaffold variant
  source 1..94: mol_type = other RNA
actggcgcttctatctgattactctgagcgccatcaccagcgactatgtcgtagtgggtaaagctccctcagctgcagtgagggagcatcagag

SEQ ID NO: 878 - RNA, 98 nt, synthetic construct
  misc_feature 1..98: note = scaffold variant
  source 1..98: mol_type = other RNA
actggcgcttctatctgattactctgagcgccatcaccagcgactatgtcgtagtgggtaaagcgcttacggacttcggtccgtaagaagcatcagag

SEQ ID NO: 879 - RNA, 99 nt, synthetic construct
  misc_feature 1..99: note = scaffold variant
  source 1..99: mol_type = other RNA
actggcgcttctatctgattactctgagcgccatcaccagcgactatgtcgtagtgggtaaagcgcttacggaattcgtgtccgtaagaagcatcagag

SEQ ID NO: 880 - RNA, 98 nt, synthetic construct
  misc_feature 1..98: note = scaffold variant
  source 1..98: mol_type = other RNA
actggcgcttctatctgattactctgagcgccatcaccagcgactatgtcgtagtgggtaaagcgctttcggacttcggtccggaagaagcatcagag

SEQ ID NO: 881 - RNA, 99 nt, synthetic construct
  misc_feature 1..99: note = scaffold variant
  source 1..99: mol_type = other RNA
actggcgcttctatctgattactctgagcgccatcaccagcgactatgtcgtagtgggtaaagcgccttacggacttcggtccgtaaggagcatcagag

SEQ ID NO: 882 - RNA, 100 nt, synthetic construct
  misc_feature 1..100: note = scaffold variant
  source 1..100: mol_type = other RNA
actggcgcttctatctgattactctgagcgccatcaccagcgactatgtcgtagtgggtaaagcgcttacggacttcgcggtccgtaagaagcatcagag

SEQ ID NO: 883 - RNA, 98 nt, synthetic construct
  misc_feature 1..98: note = scaffold variant
  source 1..98: mol_type = other RNA
actggcgcttctatctgattactctgagcgccatcaccagcgactatgtcgtagtgggtaaagcgcttacggacttcggtccgtaagtcgcatcagag

SEQ ID NO: 884 - RNA, 98 nt, synthetic construct
  misc_feature 1..98: note = scaffold variant
  source 1..98: mol_type = other RNA
actggcgcttctatctgattactctgagcgccatcaccagcgactatgtcgtagtgggtaaagcgcttacggagttcgatccgtaagaagcatcagag

SEQ ID NO: 885 - RNA, 98 nt, synthetic construct
  misc_feature 1..98: note = scaffold variant
  source 1..98: mol_type = other RNA
actggcgcttctatctgattactctgagcgccatcaccagcgactatgtcgtagtgggtaaagcggttacggacttcggtccgtaagacgcatcagag

SEQ ID NO: 886 - RNA, 89 nt, synthetic construct; identical to SEQ ID NO: 156
  misc_feature 1..89: note = scaffold variant
  source 1..89: mol_type = other RNA

SEQ ID NO: 887 - RNA, 89 nt, synthetic construct
  misc_feature 1..89: note = scaffold variant
  source 1..89: mol_type = other RNA
actggcgcttctatctgattactctgagcgccatcaccagcgactatgtcgtagtgggtaaagctccctcttcggaggaggcatcagag

SEQ ID NO: 888 - RNA, 89 nt, synthetic construct
  misc_feature 1..89: note = scaffold variant
  source 1..89: mol_type = other RNA
actggcgcttctatctgattactctgagcgccatcaccagcgactatgtcgtagtgggtaaagctccctcttcggagagtgcatcagag

SEQ ID NO: 889 - RNA, 89 nt, synthetic construct
  misc_feature 1..89: note = scaffold variant
  source 1..89: mol_type = other RNA
actggcgcttctatctgattactctgagcgccatcaccagcgactatgtcgtagtgggtaaagctccctattcggatggagcatcagag

SEQ ID NO: 890 - RNA, 91 nt, synthetic construct
  misc_feature 1..91: note = scaffold variant
  source 1..91: mol_type = other RNA
actggcgcttctatctgattactctgagcgccatcaccagcgactatgtcgtagtgggtaaagctccctcttcggagggaacgcatcagag

SEQ ID NO: 891 - RNA, 89 nt, synthetic construct
  misc_feature 1..89: note = scaffold variant
  source 1..89: mol_type = other RNA
actggcgcttctatctgattactctgagcgccatcaccagcgactatgtcgtagtgggtaaagctccctcataggagggagcatcagag

SEQ ID NO: 892 - RNA, 91 nt, synthetic construct
  misc_feature 1..91: note = scaffold variant
  source 1..91: mol_type = other RNA
actggcgcttctatctgattactctgagcgccatcaccagcgactatgtcgtagtgggtaaagtctccctcttcggagggaggcatcagag

SEQ ID NO: 893 - RNA, 87 nt, synthetic construct
  misc_feature 1..87: note = scaffold variant
  source 1..87: mol_type = other RNA
actggcgcttctatctgattactctgagcgccatcaccagcgactatgtcgtagtgggtaaagctcctcttcggaggagcatcagag

SEQ ID NO: 894 - RNA, 85 nt, synthetic construct
  misc_feature 1..85: note = scaffold variant
  source 1..85: mol_type = other RNA
actggcgcttctatctgattactctgagcgccatcaccagcgactatgtcgtagtgggtaaagctctcttcggagagcatcagag

SEQ ID NO: 895 - RNA, 85 nt, synthetic construct
  misc_feature 1..85: note = scaffold variant
  source 1..85: mol_type = other RNA
actggcgcttctatctgattactctgagcgccatcaccagcgactatgtcgtagtgggtaaagctcccttcggggagcatcagag

SEQ ID NO: 896 - RNA, 85 nt, synthetic construct
  misc_feature 1..85: note = scaffold variant
  source 1..85: mol_type = other RNA
actggcgcttctatctgattactctgagcgccatcaccagcgactatgtcgtagtgggtaaagctccgttcgcggagcatcagag

SEQ ID NO: 897 - RNA, 83 nt, synthetic construct
  misc_feature 1..83: note = scaffold variant
  source 1..83: mol_type = other RNA
actggcgcttctatctgattactctgagcgccatcaccagcgactatgtcgtagtgggtaaagctgcttcggcagcatcagag

SEQ ID NO: 898 - RNA, 77 nt, synthetic construct
  misc_feature 1..77: note = scaffold variant
  source 1..77: mol_type = other RNA
actggcgcttctatctgattactctgagcgccatcaccagcgactatgtcgtagtgggtaaagctgcagcatcagag

SEQ ID NO: 899 - RNA, 75 nt, synthetic construct
  misc_feature 1..75: note = scaffold variant
  source 1..75: mol_type = other RNA
actggcgcttctatctgattactctgagcgccatcaccagcgactatgtcgtagtgggtaaagctagcatcagag

SEQ ID NO: 900 - RNA, 87 nt, synthetic construct
  misc_feature 1..87: note = scaffold variant
  source 1..87: mol_type = other RNA
actggcgcttctatctgattactctgagcgccatcaccagcgactatgtcgtagtgggtaaactccctcttcggagggagatcagag

SEQ ID NO: 901 - RNA, 89 nt, synthetic construct
  misc_feature 1..89: note = scaffold variant
  source 1..89: mol_type = other RNA
actggcgcttctatctgattactctgagcgccatcaccagcgactatgtcgtagtgggtaaagcgccctcttcggagggagcatcagag

SEQ ID NO: 902 - RNA, 89 nt, synthetic construct
  misc_feature 1..89: note = scaffold variant
  source 1..89: mol_type = other RNA
actggcgcttctatctgattactctgagcgccatcaccagcgactatgtcgtagtgggtaaaggtccctcttcggagggaacatcagag

SEQ ID NO: 903 - RNA, 97 nt, synthetic construct
  misc_feature 1..97: note = scaffold variant
  source 1..97: mol_type = other RNA
actggcgcttctatctgattactctgagcgccatcaccagcgactatgtcgtagtgggtaaagcccttacggacttcggtccgtaagggcatcagag

SEQ ID NO: 904 - RNA, 99 nt, synthetic construct
  misc_feature 1..99: note = scaffold variant
  source 1..99: mol_type = other RNA
actggcgcttctatctgattactctgagcgccatcaccagcgactatgtcgtagtgggtaaagcctcttacggacttcggtccgtaagaggcatcagag

SEQ ID NO: 905 - RNA, 99 nt, synthetic construct
  misc_feature 1..99: note = scaffold variant
  source 1..99: mol_type = other RNA
actggcgcttctatctgattactctgagcgccatcaccagcgactatgtcgtagtgggtaaagccgcttagggacttcggtccctaagaggcatcagag

SEQ ID NO: 906 - RNA, 90 nt, synthetic construct
  misc_feature 1..90: note = scaffold variant
  source 1..90: mol_type = other RNA
actggcgcttctatctgattactctgagcgccatcaccagcgactatgtcgtagtgggtaaagctccctcttcaggagggagcatcagag

SEQ ID NO: 907 - RNA, 89 nt, synthetic construct
  misc_feature 1..89: note = scaffold variant
  source 1..89: mol_type = other RNA
actggcgcttctatctgattactctgagcgccatcaccagcgactatgtcgtagtgggtaaagctccctggaaacagggagcatcagag

SEQ ID NO: 908 - DNA, 88 bp, synthetic construct
  misc_feature 1..88: note = engineered ribonucleic acid scaffold (ERS) sequence
  source 1..88: mol_type = other DNA
aactggcgcttctatctgattactctgagcgccatcaccagcgactatgtcgtagtgggtaaactccctcttcggagggagatcagag

SEQ ID NO: 909 - DNA, 90 bp, synthetic construct
  misc_feature 1..90: note = engineered ribonucleic acid scaffold (ERS) sequence
  source 1..90: mol_type = other DNA
aactggcgcttctatctgattactctgagcgccatcaccagcgactatgtcgtagtgggtaaagcgccctcttcggagggagcatcagag

SEQ ID NO: 910 - DNA, 100 bp, synthetic construct
  misc_feature 1..100: note = engineered ribonucleic acid scaffold (ERS) sequence
  source 1..100: mol_type = other DNA
aactggcgcttctatctgattactctgagcgccatcaccagcgactatgtcgtagtgggtaaagcgccttacggacttcggtccgtaaggagcatcagag

SEQ ID NO: 911 - DNA, 100 bp, synthetic construct
  misc_feature 1..100: note = engineered ribonucleic acid scaffold (ERS) sequence
  source 1..100: mol_type = other DNA
aactggcgcttctatctgattactctgagcgccatcaccagcgactatgtcgtagtgggtaaagcgcttacggaattcgtgtccgtaagaagcatcagag

SEQ ID NO: 912 - DNA, 101 bp, synthetic construct
  misc_feature 1..101: note = engineered ribonucleic acid scaffold (ERS) sequence
  source 1..101: mol_type = other DNA
aactggcgcttctatctgattactctgagcgccatcaccagcgactatgtcgtagtgggtaaagcgcttacggacttcgcggtccgtaagaagcatcagag

SEQ ID NO: 913 - DNA, 99 bp, synthetic construct
  misc_feature 1..99: note = engineered ribonucleic acid scaffold (ERS) sequence
  source 1..99: mol_type = other DNA
aactggcgcttctatctgattactctgagcgccatcaccagcgactatgtcgtagtgggtaaagcgcttacggacttcggtccgtaagaagcatcagag

SEQ ID NO: 914 - DNA, 99 bp, synthetic construct
  misc_feature 1..99: note = engineered ribonucleic acid scaffold (ERS) sequence
  source 1..99: mol_type = other DNA
aactggcgcttctatctgattactctgagcgccatcaccagcgactatgtcgtagtgggtaaagcgcttacggacttcggtccgtaagtcgcatcagag

SEQ ID NO: 915 - DNA, 99 bp, synthetic construct
  misc_feature 1..99: note = engineered ribonucleic acid scaffold (ERS) sequence
  source 1..99: mol_type = other DNA
aactggcgcttctatctgattactctgagcgccatcaccagcgactatgtcgtagtgggtaaagcgcttacggagttcgatccgtaagaagcatcagag

SEQ ID NO: 916 - DNA, 99 bp, synthetic construct
  misc_feature 1..99: note = engineered ribonucleic acid scaffold (ERS) sequence
  source 1..99: mol_type = other DNA
aactggcgcttctatctgattactctgagcgccatcaccagcgactatgtcgtagtgggtaaagcgctttcggacttcggtccggaagaagcatcagag

SEQ ID NO: 917 - DNA, 103 bp, synthetic construct
  misc_feature 1..103: note = engineered ribonucleic acid scaffold (ERS) sequence
  source 1..103: mol_type = other DNA
aactggcgcttctatctgattactctgagcgccatcaccagcgactatgtcgtagtgggtaaagcggcagatctgagcctccgagctctctgccgcatcagag

SEQ ID NO: 918 - DNA, 99 bp, synthetic construct
  misc_feature 1..99: note = engineered ribonucleic acid scaffold (ERS) sequence
  source 1..99: mol_type = other DNA
aactggcgcttctatctgattactctgagcgccatcaccagcgactatgtcgtagtgggtaaagcggttacggacttcggtccgtaagacgcatcagag

SEQ ID NO: 919 - DNA, 76 bp, synthetic construct
  misc_feature 1..76: note = engineered ribonucleic acid scaffold (ERS) sequence
  source 1..76: mol_type = other DNA
aactggcgcttctatctgattactctgagcgccatcaccagcgactatgtcgtagtgggtaaagctagcatcagag

SEQ ID NO: 920 - DNA, 90 bp, synthetic construct
  misc_feature 1..90: note = engineered ribonucleic acid scaffold (ERS) sequence
  source 1..90: mol_type = other DNA
aactggcgcttctatctgattactctgagcgccatcaccagcgactatgtcgtagtgggtaaagctccctattcggatggagcatcagag

SEQ ID NO: 921 - DNA, 96 bp, synthetic construct
  misc_feature 1..96: note = engineered ribonucleic acid scaffold (ERS) sequence
  source 1..96: mol_type = other DNA
aactggcgcttctatctgattactctgagcgccatcaccagcgactatgtcgtagtgggtaaagctccctcacagggatgtgagggagcatcagag

SEQ ID NO: 922 - DNA, 95 bp, synthetic construct
  misc_feature 1..95: note = engineered ribonucleic acid scaffold (ERS) sequence
  source 1..95: mol_type = other DNA
aactggcgcttctatctgattactctgagcgccatcaccagcgactatgtcgtagtgggtaaagctccctcagctgcagtgagggagcatcagag

SEQ ID NO: 923 - DNA, 90 bp, synthetic construct
  misc_feature 1..90: note = engineered ribonucleic acid scaffold (ERS) sequence
  source 1..90: mol_type = other DNA
aactggcgcttctatctgattactctgagcgccatcaccagcgactatgtcgtagtgggtaaagctccctcataggagggagcatcagag

SEQ ID NO: 924 - DNA, 91 bp, synthetic construct
  misc_feature 1..91: note = engineered ribonucleic acid scaffold (ERS) sequence
  source 1..91: mol_type = other DNA
aactggcgcttctatctgattactctgagcgccatcaccagcgactatgtcgtagtgggtaaagctccctcttcaggagggagcatcagag

SEQ ID NO: 925 - DNA, 90 bp, synthetic construct
  misc_feature 1..90: note = engineered ribonucleic acid scaffold (ERS) sequence
  source 1..90: mol_type = other DNA
aactggcgcttctatctgattactctgagcgccatcaccagcgactatgtcgtagtgggtaaagctccctcttcggagagtgcatcagag

SEQ ID NO: 926 - DNA, 90 bp, synthetic construct
  misc_feature 1..90: note = engineered ribonucleic acid scaffold (ERS) sequence
  source 1..90: mol_type = other DNA
aactggcgcttctatctgattactctgagcgccatcaccagcgactatgtcgtagtgggtaaagctccctcttcggaggaggcatcagag

SEQ ID NO: 927 - DNA, 92 bp, synthetic construct
  misc_feature 1..92: note = engineered ribonucleic acid scaffold (ERS) sequence
  source 1..92: mol_type = other DNA
aactggcgcttctatctgattactctgagcgccatcaccagcgactatgtcgtagtgggtaaagctccctcttcggagggaacgcatcagag

SEQ ID NO: 928 - DNA, 90 bp, synthetic construct; identical to SEQ ID NO: 570
  misc_feature 1..90: note = engineered ribonucleic acid scaffold (ERS) sequence
  source 1..90: mol_type = other DNA

SEQ ID NO: 929 - DNA, 90 bp, synthetic construct
  misc_feature 1..90: note = engineered ribonucleic acid scaffold (ERS) sequence
  source 1..90: mol_type = other DNA
aactggcgcttctatctgattactctgagcgccatcaccagcgactatgtcgtagtgggtaaagctccctggaaacagggagcatcagag

SEQ ID NO: 930 - DNA, 86 bp, synthetic construct
  misc_feature 1..86: note = engineered ribonucleic acid scaffold (ERS) sequence
  source 1..86: mol_type = other DNA
aactggcgcttctatctgattactctgagcgccatcaccagcgactatgtcgtagtgggtaaagctcccttcggggagcatcagag

SEQ ID NO: 931 - DNA, 86 bp, synthetic construct
  misc_feature 1..86: note = engineered ribonucleic acid scaffold (ERS) sequence
  source 1..86: mol_type = other DNA
aactggcgcttctatctgattactctgagcgccatcaccagcgactatgtcgtagtgggtaaagctccgttcgcggagcatcagag

SEQ ID NO: 932 - DNA, 88 bp, synthetic construct
  misc_feature 1..88: note = engineered ribonucleic acid scaffold (ERS) sequence
  source 1..88: mol_type = other DNA
aactggcgcttctatctgattactctgagcgccatcaccagcgactatgtcgtagtgggtaaagctcctcttcggaggagcatcagag

SEQ ID NO: 933 - DNA, 86 bp, synthetic construct
  misc_feature 1..86: note = engineered ribonucleic acid scaffold (ERS) sequence
  source 1..86: mol_type = other DNA
aactggcgcttctatctgattactctgagcgccatcaccagcgactatgtcgtagtgggtaaagctctcttcggagagcatcagag

SEQ ID NO: 934 - DNA, 78 bp, synthetic construct
  misc_feature 1..78: note = engineered ribonucleic acid scaffold (ERS) sequence
  source 1..78: mol_type = other DNA
aactggcgcttctatctgattactctgagcgccatcaccagcgactatgtcgtagtgggtaaagctgcagcatcagag

SEQ ID NO: 935 - DNA, 84 bp, synthetic construct
  misc_feature 1..84: note = engineered ribonucleic acid scaffold (ERS) sequence
  source 1..84: mol_type = other DNA
aactggcgcttctatctgattactctgagcgccatcaccagcgactatgtcgtagtgggtaaagctgcttcggcagcatcagag

SEQ ID NO: 936 - DNA, 90 bp, synthetic construct
  misc_feature 1..90: note = engineered ribonucleic acid scaffold (ERS) sequence
  source 1..90: mol_type = other DNA
aactggcgcttctatctgattactctgagcgccatcaccagcgactatgtcgtagtgggtaaaggtccctcttcggagggaacatcagag

SEQ ID NO: 937 - DNA, 94 bp, synthetic construct
  misc_feature 1..94: note = engineered ribonucleic acid scaffold (ERS) sequence
  source 1..94: mol_type = other DNA
aactggcgcttctatctgattactctgagcgccatcaccagcgactatgtcgtagtgggtaaaggtgacggtcttcggaccgtcaccatcagag

SEQ ID NO: 938 - DNA, 92 bp, synthetic construct
  misc_feature 1..92: note = engineered ribonucleic acid scaffold (ERS) sequence
  source 1..92: mol_type = other DNA
aactggcgcttctatctgattactctgagcgccatcaccagcgactatgtcgtagtgggtaaagtctccctcttcggagggaggcatcagag

SEQ ID NO: 939 - DNA, 94 bp, synthetic construct
  misc_feature 1..94: note = engineered ribonucleic acid scaffold (ERS) sequence
  source 1..94: mol_type = other DNA
aactggcgcttctatctgattactctgagcgccatcaccagcgactatgtcgtagtgggtaaagtgcgcccgcttcggcgggcgcacatcagag

SEQ ID NO: 940 - DNA, 94 bp, synthetic construct
  misc_feature 1..94: note = engineered ribonucleic acid scaffold (ERS) sequence
  source 1..94: mol_type = other DNA
aactggcgcttctatctgattactctgagcgccatcaccagcgactatgtcgtagtgggtaaataatgaaaacttcggttttcattaatcagag

SEQ ID NO: 941 - DNA, 94 bp, synthetic construct
  misc_feature 1..94: note = engineered ribonucleic acid scaffold (ERS) sequence
  source 1..94: mol_type = other DNA
aactggcgcttctatctgattactctgagcgccatcaccagcgactatgtcgtagtgggtaaatcgtaagaacttcggttcttacgaatcagag

SEQ ID NO: 942 - DNA, 94 bp, synthetic construct
  misc_feature 1..94: note = engineered ribonucleic acid scaffold (ERS) sequence
  source 1..94: mol_type = other DNA
aactggcgcttctatctgattactctgagcgccatcaccagcgactatgtcgtagtgggtaaatggaagatgcttcggcatcttccaatcagag

SEQ ID NO: 943 - DNA, 98 bp, synthetic construct
  misc_feature 1..98: note = engineered ribonucleic acid scaffold (ERS) sequence
  source 1..98: mol_type = other DNA
aactggcgcttctatctgattactctgagcgccatcaccagcgactatgtcgtagtgggtaaagcccttacggacttcggtccgtaagggcatcagag

SEQ ID NO: 944 - DNA, 100 bp, synthetic construct
  misc_feature 1..100: note = engineered ribonucleic acid scaffold (ERS) sequence
  source 1..100: mol_type = other DNA
aactggcgcttctatctgattactctgagcgccatcaccagcgactatgtcgtagtgggtaaagcctcttacggacttcggtccgtaagaggcatcagag

SEQ ID NO: 945 - DNA, 100 bp, synthetic construct
  misc_feature 1..100: note = engineered ribonucleic acid scaffold (ERS) sequence
  source 1..100: mol_type = other DNA
aactggcgcttctatctgattactctgagcgccatcaccagcgactatgtcgtagtgggtaaagccgcttagggacttcggtccctaagaggcatcagag

SEQ ID NO: 946 - DNA, 85 bp, synthetic construct
  misc_feature 1..85: note = engineered ribonucleic acid scaffold (ERS) sequence
  source 1..85: mol_type = other DNA
gggcgcttctatctgattactctgagcgccctcaccagcgactatgtcgtagtgggtaaactccctcttcggagggagatcagag

SEQ ID NO: 947 - DNA, 87 bp, synthetic construct
  misc_feature 1..87: note = engineered ribonucleic acid scaffold (ERS) sequence
  source 1..87: mol_type = other DNA
gggcgcttctatctgattactctgagcgccctcaccagcgactatgtcgtagtgggtaaagcgccctcttcggagggagcatcagag

SEQ ID NO: 948 - DNA, 97 bp, synthetic construct
  misc_feature 1..97: note = engineered ribonucleic acid scaffold (ERS) sequence
  source 1..97: mol_type = other DNA
gggcgcttctatctgattactctgagcgccctcaccagcgactatgtcgtagtgggtaaagcgccttacggacttcggtccgtaaggagcatcagag

SEQ ID NO: 949 - DNA, 97 bp, synthetic construct
  misc_feature 1..97: note = engineered ribonucleic acid scaffold (ERS) sequence
  source 1..97: mol_type = other DNA
gggcgcttctatctgattactctgagcgccctcaccagcgactatgtcgtagtgggtaaagcgcttacggaattcgtgtccgtaagaagcatcagag

SEQ ID NO: 950 - DNA, 98 bp, synthetic construct
  misc_feature 1..98: note = engineered ribonucleic acid scaffold (ERS) sequence
  source 1..98: mol_type = other DNA
gggcgcttctatctgattactctgagcgccctcaccagcgactatgtcgtagtgggtaaagcgcttacggacttcgcggtccgtaagaagcatcagag

SEQ ID NO: 951 - DNA, 96 bp, synthetic construct
  misc_feature 1..96: note = engineered ribonucleic acid scaffold (ERS) sequence
  source 1..96: mol_type = other DNA
gggcgcttctatctgattactctgagcgccctcaccagcgactatgtcgtagtgggtaaagcgcttacggacttcggtccgtaagaagcatcagag

SEQ ID NO: 952 - DNA, 96 bp, synthetic construct
  misc_feature 1..96: note = engineered ribonucleic acid scaffold (ERS) sequence
  source 1..96: mol_type = other DNA
gggcgcttctatctgattactctgagcgccctcaccagcgactatgtcgtagtgggtaaagcgcttacggacttcggtccgtaagtcgcatcagag

SEQ ID NO: 953 - DNA, 96 bp, synthetic construct
  misc_feature 1..96: note = engineered ribonucleic acid scaffold (ERS) sequence
  source 1..96: mol_type = other DNA
gggcgcttctatctgattactctgagcgccctcaccagcgactatgtcgtagtgggtaaagcgcttacggagttcgatccgtaagaagcatcagag

SEQ ID NO: 954 - DNA, 96 bp, synthetic construct
  misc_feature 1..96: note = engineered ribonucleic acid scaffold (ERS) sequence
  source 1..96: mol_type = other DNA
gggcgcttctatctgattactctgagcgccctcaccagcgactatgtcgtagtgggtaaagcgctttcggacttcggtccggaagaagcatcagag

SEQ ID NO: 955 - DNA, 100 bp, synthetic construct
  misc_feature 1..100: note = engineered ribonucleic acid scaffold (ERS) sequence
  source 1..100: mol_type = other DNA
gggcgcttctatctgattactctgagcgccctcaccagcgactatgtcgtagtgggtaaagcggcagatctgagcctccgagctctctgccgcatcagag

SEQ ID NO: 956 - DNA, 96 bp, synthetic construct
  misc_feature 1..96: note = engineered ribonucleic acid scaffold (ERS) sequence
  source 1..96: mol_type = other DNA
gggcgcttctatctgattactctgagcgccctcaccagcgactatgtcgtagtgggtaaagcggttacggacttcggtccgtaagacgcatcagag

SEQ ID NO: 957 - DNA, 73 bp, synthetic construct
  misc_feature 1..73: note = engineered ribonucleic acid scaffold (ERS) sequence
  source 1..73: mol_type = other DNA
gggcgcttctatctgattactctgagcgccctcaccagcgactatgtcgtagtgggtaaagctagcatcagag

SEQ ID NO: 958 - DNA, 87 bp, synthetic construct
  misc_feature 1..87: note = engineered ribonucleic acid scaffold (ERS) sequence
  source 1..87: mol_type = other DNA
gggcgcttctatctgattactctgagcgccctcaccagcgactatgtcgtagtgggtaaagctccctattcggatggagcatcagag

SEQ ID NO: 959 - DNA, 93 bp, synthetic construct
  misc_feature 1..93: note = engineered ribonucleic acid scaffold (ERS) sequence
  source 1..93: mol_type = other DNA
gggcgcttctatctgattactctgagcgccctcaccagcgactatgtcgtagtgggtaaagctccctcacagggatgtgagggagcatcagag

SEQ ID NO: 960 - DNA, 92 bp, synthetic construct
  misc_feature 1..92: note = engineered ribonucleic acid scaffold (ERS) sequence
  source 1..92: mol_type = other DNA
gggcgcttctatctgattactctgagcgccctcaccagcgactatgtcgtagtgggtaaagctccctcagctgcagtgagggagcatcagag

SEQ ID NO: 961 - DNA, 87 bp, synthetic construct
  misc_feature 1..87: note = engineered ribonucleic acid scaffold (ERS) sequence
  source 1..87: mol_type = other DNA
gggcgcttctatctgattactctgagcgccctcaccagcgactatgtcgtagtgggtaaagctccctcataggagggagcatcagag

SEQ ID NO: 962 - DNA, 88 bp, synthetic construct
  misc_feature 1..88: note = engineered ribonucleic acid scaffold (ERS) sequence
  source 1..88: mol_type = other DNA
gggcgcttctatctgattactctgagcgccctcaccagcgactatgtcgtagtgggtaaagctccctcttcaggagggagcatcagag

SEQ ID NO: 963 - DNA, 87 bp, synthetic construct
  misc_feature 1..87: note = engineered ribonucleic acid scaffold (ERS) sequence
  source 1..87: mol_type = other DNA
gggcgcttctatctgattactctgagcgccctcaccagcgactatgtcgtagtgggtaaagctccctcttcggagagtgcatcagag

SEQ ID NO: 964 - DNA, 87 bp, synthetic construct
  misc_feature 1..87: note = engineered ribonucleic acid scaffold (ERS) sequence
  source 1..87: mol_type = other DNA
gggcgcttctatctgattactctgagcgccctcaccagcgactatgtcgtagtgggtaaagctccctcttcggaggaggcatcagag

SEQ ID NO: 965 - DNA, 89 bp, synthetic construct
  misc_feature 1..89: note = engineered ribonucleic acid scaffold (ERS) sequence
  source 1..89: mol_type = other DNA
gggcgcttctatctgattactctgagcgccctcaccagcgactatgtcgtagtgggtaaagctccctcttcggagggaacgcatcagag

SEQ ID NO: 966 - DNA, 87 bp, synthetic construct; identical to SEQ ID NO: 584
  misc_feature 1..87: note = engineered ribonucleic acid scaffold (ERS) sequence
  source 1..87: mol_type = other DNA

SEQ ID NO: 967 - DNA, 87 bp, synthetic construct
  misc_feature 1..87: note = engineered ribonucleic acid scaffold (ERS) sequence
  source 1..87: mol_type = other DNA
gggcgcttctatctgattactctgagcgccctcaccagcgactatgtcgtagtgggtaaagctccctggaaacagggagcatcagag

SEQ ID NO: 968 - DNA, 83 bp, synthetic construct
  misc_feature 1..83: note = engineered ribonucleic acid scaffold (ERS) sequence
  source 1..83: mol_type = other DNA
gggcgcttctatctgattactctgagcgccctcaccagcgactatgtcgtagtgggtaaagctcccttcggggagcatcagag

SEQ ID NO: 969 - DNA, 83 bp, synthetic construct
  misc_feature 1..83: note = engineered ribonucleic acid scaffold (ERS) sequence
  source 1..83: mol_type = other DNA
gggcgcttctatctgattactctgagcgccctcaccagcgactatgtcgtagtgggtaaagctccgttcgcggagcatcagag

SEQ ID NO: 970 - DNA, 85 bp, synthetic construct
  misc_feature 1..85: note = engineered ribonucleic acid scaffold (ERS) sequence
  source 1..85: mol_type = other DNA
gggcgcttctatctgattactctgagcgccctcaccagcgactatgtcgtagtgggtaaagctcctcttcggaggagcatcagag

SEQ ID NO: 971 - DNA, 83 bp, synthetic construct
  misc_feature 1..83: note = engineered ribonucleic acid scaffold (ERS) sequence
  source 1..83: mol_type = other DNA
gggcgcttctatctgattactctgagcgccctcaccagcgactatgtcgtagtgggtaaagctctcttcggagagcatcagag

SEQ ID NO: 972 - DNA, 75 bp, synthetic construct
  misc_feature 1..75: note = engineered ribonucleic acid scaffold (ERS) sequence
  source 1..75: mol_type = other DNA
gggcgcttctatctgattactctgagcgccctcaccagcgactatgtcgtagtgggtaaagctgcagcatcagag

SEQ ID NO: 973 - DNA, 81 bp, synthetic construct
  misc_feature 1..81: note = engineered ribonucleic acid scaffold (ERS) sequence
  source 1..81: mol_type = other DNA
gggcgcttctatctgattactctgagcgccctcaccagcgactatgtcgtagtgggtaaagctgcttcggcagcatcagag

SEQ ID NO: 974 - DNA, 87 bp, synthetic construct
  misc_feature 1..87: note = engineered ribonucleic acid scaffold (ERS) sequence
  source 1..87: mol_type = other DNA
gggcgcttctatctgattactctgagcgccctcaccagcgactatgtcgtagtgggtaaaggtccctcttcggagggaacatcagag

SEQ ID NO: 975 - DNA, 91 bp, synthetic construct
  misc_feature 1..91: note = engineered ribonucleic acid scaffold (ERS) sequence
  source 1..91: mol_type = other DNA
gggcgcttctatctgattactctgagcgccctcaccagcgactatgtcgtagtgggtaaaggtgacggtcttcggaccgtcaccatcagag

SEQ ID NO: 976 - DNA, 89 bp, synthetic construct
  misc_feature 1..89: note = engineered ribonucleic acid scaffold (ERS) sequence
  source 1..89: mol_type = other DNA
gggcgcttctatctgattactctgagcgccctcaccagcgactatgtcgtagtgggtaaagtctccctcttcggagggaggcatcagag

SEQ ID NO: 977 - DNA, 91 bp, synthetic construct
  misc_feature 1..91: note = engineered ribonucleic acid scaffold (ERS) sequence
  source 1..91: mol_type = other DNA
gggcgcttctatctgattactctgagcgccctcaccagcgactatgtcgtagtgggtaaagtgcgcccgcttcggcgggcgcacatcagag

SEQ ID NO: 978 - DNA, 91 bp, synthetic construct
  misc_feature 1..91: note = engineered ribonucleic acid scaffold (ERS) sequence
  source 1..91: mol_type = other DNA
gggcgcttctatctgattactctgagcgccctcaccagcgactatgtcgtagtgggtaaataatgaaaacttcggttttcattaatcagag

SEQ ID NO: 979 - DNA, 91 bp, synthetic construct
  misc_feature 1..91: note = engineered ribonucleic acid scaffold (ERS) sequence
  source 1..91: mol_type = other DNA
gggcgcttctatctgattactctgagcgccctcaccagcgactatgtcgtagtgggtaaatcgtaagaacttcggttcttacgaatcagag

SEQ ID NO: 980 - DNA, 91 bp, synthetic construct
  misc_feature 1..91: note = engineered ribonucleic acid scaffold (ERS) sequence
  source 1..91: mol_type = other DNA
gggcgcttctatctgattactctgagcgccctcaccagcgactatgtcgtagtgggtaaatggaagatgcttcggcatcttccaatcagag

SEQ ID NO: 981 - DNA, 95 bp, synthetic construct
  misc_feature 1..95: note = engineered ribonucleic acid scaffold (ERS) sequence
  source 1..95: mol_type = other DNA
gggcgcttctatctgattactctgagcgccctcaccagcgactatgtcgtagtgggtaaagcccttacggacttcggtccgtaagggcatcagag

SEQ ID NO: 982 - DNA, 97 bp, synthetic construct
  misc_feature 1..97: note = engineered ribonucleic acid scaffold (ERS) sequence
  source 1..97: mol_type = other DNA
gggcgcttctatctgattactctgagcgccctcaccagcgactatgtcgtagtgggtaaagcctcttacggacttcggtccgtaagaggcatcagag

SEQ ID NO: 983 - DNA, 97 bp, synthetic construct
  misc_feature 1..97: note = engineered ribonucleic acid scaffold (ERS) sequence
  source 1..97: mol_type = other DNA
gggcgcttctatctgattactctgagcgccctcaccagcgactatgtcgtagtgggtaaagccgcttagggacttcggtccctaagaggcatcagag

SEQ ID NO: 984 - DNA, 87 bp, synthetic construct
  misc_feature 1..87: note = engineered ribonucleic acid scaffold (ERS) sequence
  source 1..87: mol_type = other DNA
gctggcgcttctatctgattactctgagcgccatcaccagcgactatgtcgtagtgggtaaactccctcttcggagggagatcagag

SEQ ID NO: 985 - DNA, 89 bp, synthetic construct
  misc_feature 1..89: note = engineered ribonucleic acid scaffold (ERS) sequence
  source 1..89: mol_type = other DNA
gctggcgcttctatctgattactctgagcgccatcaccagcgactatgtcgtagtgggtaaagcgccctcttcggagggagcatcagag

SEQ ID NO: 986 - DNA, 99 bp, synthetic construct
  misc_feature 1..99: note = engineered ribonucleic acid scaffold (ERS) sequence
  source 1..99: mol_type = other DNA
gctggcgcttctatctgattactctgagcgccatcaccagcgactatgtcgtagtgggtaaagcgccttacggacttcggtccgtaaggagcatcagag

SEQ ID NO: 987 - DNA, 99 bp, synthetic construct
  misc_feature 1..99: note = engineered ribonucleic acid scaffold (ERS) sequence
  source 1..99: mol_type = other DNA
gctggcgcttctatctgattactctgagcgccatcaccagcgactatgtcgtagtgggtaaagcgcttacggaattcgtgtccgtaagaagcatcagag

SEQ ID NO: 988 - DNA, 100 bp, synthetic construct
  misc_feature 1..100: note = engineered ribonucleic acid scaffold (ERS) sequence
  source 1..100: mol_type = other DNA
gctggcgcttctatctgattactctgagcgccatcaccagcgactatgtcgtagtgggtaaagcgcttacggacttcgcggtccgtaagaagcatcagag

SEQ ID NO: 989 - DNA, 98 bp, synthetic construct
  misc_feature 1..98: note = engineered ribonucleic acid scaffold (ERS) sequence
  source 1..98: mol_type = other DNA
gctggcgcttctatctgattactctgagcgccatcaccagcgactatgtcgtagtgggtaaagcgcttacggacttcggtccgtaagaagcatcagag

SEQ ID NO: 990 - DNA, 98 bp, synthetic construct
  misc_feature 1..98: note = engineered ribonucleic acid scaffold (ERS) sequence
  source 1..98: mol_type = other DNA
gctggcgcttctatctgattactctgagcgccatcaccagcgactatgtcgtagtgggtaaagcgcttacggacttcggtccgtaagtcgcatcagag

SEQ ID NO: 991 - DNA, 98 bp, synthetic construct
  misc_feature 1..98: note = engineered ribonucleic acid scaffold (ERS) sequence
  source 1..98: mol_type = other DNA
gctggcgcttctatctgattactctgagcgccatcaccagcgactatgtcgtagtgggtaaagcgcttacggagttcgatccgtaagaagcatcagag

SEQ ID NO: 992 - DNA, 98 bp, synthetic construct
  misc_feature 1..98: note = engineered ribonucleic acid scaffold (ERS) sequence
  source 1..98: mol_type = other DNA
gctggcgcttctatctgattactctgagcgccatcaccagcgactatgtcgtagtgggtaaagcgctttcggacttcggtccggaagaagcatcagag

SEQ ID NO: 993 - DNA, 102 bp, synthetic construct
  misc_feature 1..102: note = engineered ribonucleic acid scaffold (ERS) sequence
  source 1..102: mol_type = other DNA
gctggcgcttctatctgattactctgagcgccatcaccagcgactatgtcgtagtgggtaaagcggcagatctgagcctccgagctctctgccgcatcagag

SEQ ID NO: 994 - DNA, 98 bp, synthetic construct
  misc_feature 1..98: note = engineered ribonucleic acid scaffold (ERS) sequence
  source 1..98: mol_type = other DNA
gctggcgcttctatctgattactctgagcgccatcaccagcgactatgtcgtagtgggtaaagcggttacggacttcggtccgtaagacgcatcagag

SEQ ID NO: 995 - DNA, 75 bp, synthetic construct
  misc_feature 1..75: note = engineered ribonucleic acid scaffold (ERS) sequence
  source 1..75: mol_type = other DNA
gctggcgcttctatctgattactctgagcgccatcaccagcgactatgtcgtagtgggtaaagctagcatcagag

SEQ ID NO: 996 - DNA, 89 bp, synthetic construct
  misc_feature 1..89: note = engineered ribonucleic acid scaffold (ERS) sequence
  source 1..89: mol_type = other DNA
gctggcgcttctatctgattactctgagcgccatcaccagcgactatgtcgtagtgggtaaagctccctattcggatggagcatcagag

SEQ ID NO: 997 - DNA, 95 bp, synthetic construct
  misc_feature 1..95: note = engineered ribonucleic acid scaffold (ERS) sequence
  source 1..95: mol_type = other DNA
gctggcgcttctatctgattactctgagcgccatcaccagcgactatgtcgtagtgggtaaagctccctcacagggatgtgagggagcatcagag

SEQ ID NO: 998 - DNA, 94 bp, synthetic construct
  misc_feature 1..94: note = engineered ribonucleic acid scaffold (ERS) sequence
  source 1..94: mol_type = other DNA
gctggcgcttctatctgattactctgagcgccatcaccagcgactatgtcgtagtgggtaaagctccctcagctgcagtgagggagcatcagag

SEQ ID NO: 999 - DNA, 89 bp, synthetic construct
  misc_feature 1..89: note = engineered ribonucleic acid scaffold (ERS) sequence
  source 1..89: mol_type = other DNA
gctggcgcttctatctgattactctgagcgccatcaccagcgactatgtcgtagtgggtaaagctccctcataggagggagcatcagag

SEQ ID NO: 1000 - DNA, 90 bp, synthetic construct
  misc_feature 1..90: note = engineered ribonucleic acid scaffold (ERS) sequence
  source 1..90: mol_type = other DNA
gctggcgcttctatctgattactctgagcgccatcaccagcgactatgtcgtagtgggtaaagctccctcttcaggagggagcatcagag

SEQ ID NO: 1001 - DNA, 89 bp, synthetic construct
  misc_feature 1..89: note = engineered ribonucleic acid scaffold (ERS) sequence
  source 1..89: mol_type = other DNA
gctggcgcttctatctgattactctgagcgccatcaccagcgactatgtcgtagtgggtaaagctccctcttcggagagtgcatcagag

SEQ ID NO: 1002 - DNA, 89 bp, synthetic construct
  misc_feature 1..89: note = engineered ribonucleic acid scaffold (ERS) sequence
  source 1..89: mol_type = other DNA
gctggcgcttctatctgattactctgagcgccatcaccagcgactatgtcgtagtgggtaaagctccctcttcggaggaggcatcagag

SEQ ID NO: 1003 - DNA, 91 bp, synthetic construct
  misc_feature 1..91: note = engineered ribonucleic acid scaffold (ERS) sequence
  source 1..91: mol_type = other DNA
gctggcgcttctatctgattactctgagcgccatcaccagcgactatgtcgtagtgggtaaagctccctcttcggagggaacgcatcagag

SEQ ID NO: 1004 - DNA, 89 bp, synthetic construct; identical to SEQ ID NO: 571
  misc_feature 1..89: note = engineered ribonucleic acid scaffold (ERS) sequence
  source 1..89: mol_type = other DNA

SEQ ID NO: 1005 - DNA, 89 bp, synthetic construct
  misc_feature 1..89: note = engineered ribonucleic acid scaffold (ERS) sequence
  source 1..89: mol_type = other DNA
gctggcgcttctatctgattactctgagcgccatcaccagcgactatgtcgtagtgggtaaagctccctggaaacagggagcatcagag

SEQ ID NO: 1006 - DNA, 85 bp, synthetic construct
  misc_feature 1..85: note = engineered ribonucleic acid scaffold (ERS) sequence
  source 1..85: mol_type = other DNA
gctggcgcttctatctgattactctgagcgccatcaccagcgactatgtcgtagtgggtaaagctcccttcggggagcatcagag

SEQ ID NO: 1007 - DNA, 85 bp, synthetic construct
  misc_feature 1..85: note = engineered ribonucleic acid scaffold (ERS) sequence
  source 1..85: mol_type = other DNA
gctggcgcttctatctgattactctgagcgccatcaccagcgactatgtcgtagtgggtaaagctccgttcgcggagcatcagag

SEQ ID NO: 1008 - DNA, 87 bp, synthetic construct
  misc_feature 1..87: note = engineered ribonucleic acid scaffold (ERS) sequence
  source 1..87: mol_type = other DNA
gctggcgcttctatctgattactctgagcgccatcaccagcgactatgtcgtagtgggtaaagctcctcttcggaggagcatcagag

SEQ ID NO: 1009 - DNA, 85 bp, synthetic construct
  misc_feature 1..85: note = engineered ribonucleic acid scaffold (ERS) sequence
  source 1..85: mol_type = other DNA
gctggcgcttctatctgattactctgagcgccatcaccagcgactatgtcgtagtgggtaaagctctcttcggagagcatcagag

SEQ ID NO: 1010 - DNA, 77 bp, synthetic construct
  misc_feature 1..77: note = engineered ribonucleic acid scaffold (ERS) sequence
  source 1..77: mol_type = other DNA
gctggcgcttctatctgattactctgagcgccatcaccagcgactatgtcgtagtgggtaaagctgcagcatcagag

SEQ ID NO: 1011 - DNA, 83 bp, synthetic construct
  misc_feature 1..83: note = engineered ribonucleic acid scaffold (ERS) sequence
  source 1..83: mol_type = other DNA
gctggcgcttctatctgattactctgagcgccatcaccagcgactatgtcgtagtgggtaaagctgcttcggcagcatcagag

SEQ ID NO: 1012 - DNA, 89 bp, synthetic construct
  misc_feature 1..89: note = engineered ribonucleic acid scaffold (ERS) sequence
  source 1..89: mol_type = other DNA
gctggcgcttctatctgattactctgagcgccatcaccagcgactatgtcgtagtgggtaaaggtccctcttcggagggaacatcagag

SEQ ID NO: 1013 - DNA, 93 bp, synthetic construct
  misc_feature 1..93: note = engineered ribonucleic acid scaffold (ERS) sequence
  source 1..93: mol_type = other DNA
gctggcgcttctatctgattactctgagcgccatcaccagcgactatgtcgtagtgggtaaaggtgacggtcttcggaccgtcaccatcagag

SEQ ID NO: 1014 - DNA, 91 bp, synthetic construct
  misc_feature 1..91: note = engineered ribonucleic acid scaffold (ERS) sequence
  source 1..91: mol_type = other DNA
gctggcgcttctatctgattactctgagcgccatcaccagcgactatgtcgtagtgggtaaagtctccctcttcggagggaggcatcagag

SEQ ID NO: 1015 - DNA, 93 bp, synthetic construct
  misc_feature 1..93: note = engineered ribonucleic acid scaffold (ERS) sequence
  source 1..93: mol_type = other DNA
gctggcgcttctatctgattactctgagcgccatcaccagcgactatgtcgtagtgggtaaagtgcgcccgcttcggcgggcgcacatcagag

SEQ ID NO: 1016 - DNA, 93 bp, synthetic construct
  misc_feature 1..93: note = engineered ribonucleic acid scaffold (ERS) sequence
  source 1..93: mol_type = other DNA
gctggcgcttctatctgattactctgagcgccatcaccagcgactatgtcgtagtgggtaaataatgaaaacttcggttttcattaatcagag

SEQ ID NO: 1017 - DNA, 93 bp, synthetic construct
  misc_feature 1..93: note = engineered ribonucleic acid scaffold (ERS) sequence
  source 1..93: mol_type = other DNA
gctggcgcttctatctgattactctgagcgccatcaccagcgactatgtcgtagtgggtaaatcgtaagaacttcggttcttacgaatcagag

SEQ ID NO: 1018 - DNA, 93 bp, synthetic construct
  misc_feature 1..93: note = engineered ribonucleic acid scaffold (ERS) sequence
  source 1..93: mol_type = other DNA
gctggcgcttctatctgattactctgagcgccatcaccagcgactatgtcgtagtgggtaaatggaagatgcttcggcatcttccaatcagag

SEQ ID NO: 1019 - DNA, 97 bp, synthetic construct
  misc_feature 1..97: note = engineered ribonucleic acid scaffold (ERS) sequence
  source 1..97: mol_type = other DNA
gctggcgcttctatctgattactctgagcgccatcaccagcgactatgtcgtagtgggtaaagcccttacggacttcggtccgtaagggcatcagag

SEQ ID NO: 1020 - DNA, 99 bp, synthetic construct
  misc_feature 1..99: note = engineered ribonucleic acid scaffold (ERS) sequence
  source 1..99: mol_type = other DNA
gctggcgcttctatctgattactctgagcgccatcaccagcgactatgtcgtagtgggtaaagcctcttacggacttcggtccgtaagaggcatcagag

SEQ ID NO: 1021 - DNA, 99 bp, synthetic construct
  misc_feature 1..99: note = engineered ribonucleic acid scaffold (ERS) sequence
  source 1..99: mol_type = other DNA
gctggcgcttctatctgattactctgagcgccatcaccagcgactatgtcgtagtgggtaaagccgcttagggacttcggtccctaagaggcatcagag

SEQ ID NO: 1022 - DNA, 87 bp, synthetic construct
  misc_feature 1..87: note = engineered ribonucleic acid scaffold (ERS) sequence
  source 1..87: mol_type = other DNA
tatggcgcttctatctgattactctgagcgccatcaccagcgactatgtcgtagtgggtaaactccctcttcggagggagatcagag

SEQ ID NO: 1023 - DNA, 89 bp, synthetic construct
  misc_feature 1..89: note = engineered ribonucleic acid scaffold (ERS) sequence
  source 1..89: mol_type = other DNA
tatggcgcttctatctgattactctgagcgccatcaccagcgactatgtcgtagtgggtaaagcgccctcttcggagggagcatcagag

SEQ ID NO: 1024 - DNA, 99 bp, synthetic construct
  misc_feature 1..99: note = engineered ribonucleic acid scaffold (ERS) sequence
  source 1..99: mol_type = other DNA
tatggcgcttctatctgattactctgagcgccatcaccagcgactatgtcgtagtgggtaaagcgccttacggacttcggtccgtaaggagcatcagag

SEQ ID NO: 1025 - DNA, 99 bp, synthetic construct
  misc_feature 1..99: note = engineered ribonucleic acid scaffold (ERS) sequence
  source 1..99: mol_type = other DNA
tatggcgcttctatctgattactctgagcgccatcaccagcgactatgtcgtagtgggtaaagcgcttacggaattcgtgtccgtaagaagcatcagag

SEQ ID NO: 1026 - DNA, 100 bp, synthetic construct
  misc_feature 1..100: note = engineered ribonucleic acid scaffold (ERS) sequence
  source 1..100: mol_type = other DNA
tatggcgcttctatctgattactctgagcgccatcaccagcgactatgtcgtagtgggtaaagcgcttacggacttcgcggtccgtaagaagcatcagag

SEQ ID NO: 1027 - DNA, 98 bp, synthetic construct
  misc_feature 1..98: note = engineered ribonucleic acid scaffold (ERS) sequence
  source 1..98: mol_type = other DNA
tatggcgcttctatctgattactctgagcgccatcaccagcgactatgtcgtagtgggtaaagcgcttacggacttcggtccgtaagaagcatcagag

SEQ ID NO: 1028 - DNA, 98 bp, synthetic construct
  misc_feature 1..98: note = engineered ribonucleic acid scaffold (ERS) sequence
  source 1..98: mol_type = other DNA
tatggcgcttctatctgattactctgagcgccatcaccagcgactatgtcgtagtgggtaaagcgcttacggacttcggtccgtaagtcgcatcagag

SEQ ID NO: 1029 - DNA, 98 bp, synthetic construct
  misc_feature 1..98: note = engineered ribonucleic acid scaffold (ERS) sequence
  source 1..98: mol_type = other DNA
tatggcgcttctatctgattactctgagcgccatcaccagcgactatgtcgtagtgggtaaagcgcttacggagttcgatccgtaagaagcatcagag

SEQ ID NO: 1030 - DNA, 98 bp, synthetic construct
  misc_feature 1..98: note = engineered ribonucleic acid scaffold (ERS) sequence
  source 1..98: mol_type = other DNA
tatggcgcttctatctgattactctgagcgccatcaccagcgactatgtcgtagtgggtaaagcgctttcggacttcggtccggaagaagcatcagag

SEQ ID NO: 1031 - DNA, 102 bp, synthetic construct
  misc_feature 1..102: note = engineered ribonucleic acid scaffold (ERS) sequence
  source 1..102: mol_type = other DNA
tatggcgcttctatctgattactctgagcgccatcaccagcgactatgtcgtagtgggtaaagcggcagatctgagcctccgagctctctgccgcatcagag

SEQ ID NO: 1032 - DNA, 98 bp, synthetic construct
  misc_feature 1..98: note = engineered ribonucleic acid scaffold (ERS) sequence
  source 1..98: mol_type = other DNA
tatggcgcttctatctgattactctgagcgccatcaccagcgactatgtcgtagtgggtaaagcggttacggacttcggtccgtaagacgcatcagag

SEQ ID NO: 1033 - DNA, 75 bp, synthetic construct
  misc_feature 1..75: note = engineered ribonucleic acid scaffold (ERS) sequence
  source 1..75: mol_type = other DNA
tatggcgcttctatctgattactctgagcgccatcaccagcgactatgtcgtagtgggtaaagctagcatcagag

SEQ ID NO: 1034 - DNA, 89 bp, synthetic construct
  misc_feature 1..89: note = engineered ribonucleic acid scaffold (ERS) sequence
  source 1..89: mol_type = other DNA
tatggcgcttctatctgattactctgagcgccatcaccagcgactatgtcgtagtgggtaaagctccctattcggatggagcatcagag

SEQ ID NO: 1035 - DNA, 95 bp, synthetic construct
  misc_feature 1..95: note = engineered ribonucleic acid scaffold (ERS) sequence
  source 1..95: mol_type = other DNA
tatggcgcttctatctgattactctgagcgccatcaccagcgactatgtcgtagtgggtaaagctccctcacagggatgtgagggagcatcagag

SEQ ID NO: 1036 - DNA, 94 bp, synthetic construct
  misc_feature 1..94: note = engineered ribonucleic acid scaffold (ERS) sequence
  source 1..94: mol_type = other DNA
tatggcgcttctatctgattactctgagcgccatcaccagcgactatgtcgtagtgggtaaagctccctcagctgcagtgagggagcatcagag

SEQ ID NO: 1037 - DNA, 89 bp, synthetic construct
  misc_feature 1..89: note = engineered ribonucleic acid scaffold (ERS) sequence
  source 1..89: mol_type = other DNA
tatggcgcttctatctgattactctgagcgccatcaccagcgactatgtcgtagtgggtaaagctccctcataggagggagcatcagag

SEQ ID NO: 1038 - DNA, 90 bp, synthetic construct
  misc_feature 1..90: note = engineered ribonucleic acid scaffold (ERS) sequence
  source 1..90: mol_type = other DNA
tatggcgcttctatctgattactctgagcgccatcaccagcgactatgtcgtagtgggtaaagctccctcttcaggagggagcatcagag

SEQ ID NO: 1039 - DNA, 89 bp, synthetic construct
  misc_feature 1..89: note = engineered ribonucleic acid scaffold (ERS) sequence
  source 1..89: mol_type = other DNA
tatggcgcttctatctgattactctgagcgccatcaccagcgactatgtcgtagtgggtaaagctccctcttcggagagtgcatcagag

SEQ ID NO: 1040 - DNA, 89 bp, synthetic construct
  misc_feature 1..89: note = engineered ribonucleic acid scaffold (ERS) sequence
  source 1..89: mol_type = other DNA
tatggcgcttctatctgattactctgagcgccatcaccagcgactatgtcgtagtgggtaaagctccctcttcggaggaggcatcagag

SEQ ID NO: 1041 - DNA, 91 bp, synthetic construct
  misc_feature 1..91: note = engineered ribonucleic acid scaffold (ERS) sequence
  source 1..91: mol_type = other DNA
tatggcgcttctatctgattactctgagcgccatcaccagcgactatgtcgtagtgggtaaagctccctcttcggagggaacgcatcagag

SEQ ID NO: 1042 - DNA, 89 bp, synthetic construct; identical to SEQ ID NO: 576
  misc_feature 1..89: note = engineered ribonucleic acid scaffold (ERS) sequence
  source 1..89: mol_type = other DNA

SEQ ID NO: 1043 - DNA, 89 bp, synthetic construct
  misc_feature 1..89: note = engineered ribonucleic acid scaffold (ERS) sequence
  source 1..89: mol_type = other DNA
tatggcgcttctatctgattactctgagcgccatcaccagcgactatgtcgtagtgggtaaagctccctggaaacagggagcatcagag

SEQ ID NO: 1044 - DNA, 85 bp, synthetic construct
  misc_feature 1..85: note = engineered ribonucleic acid scaffold (ERS) sequence
  source 1..85: mol_type = other DNA
tatggcgcttctatctgattactctgagcgccatcaccagcgactatgtcgtagtgggtaaagctcccttcggggagcatcagag

SEQ ID NO: 1045 - DNA, 85 bp, synthetic construct
  misc_feature 1..85: note = engineered ribonucleic acid scaffold (ERS) sequence
  source 1..85: mol_type = other DNA
tatggcgcttctatctgattactctgagcgccatcaccagcgactatgtcgtagtgggtaaagctccgttcgcggagcatcagag

SEQ ID NO: 1046 - DNA, 87 bp, synthetic construct
  misc_feature 1..87: note = engineered ribonucleic acid scaffold (ERS) sequence
  source 1..87: mol_type = other DNA
tatggcgcttctatctgattactctgagcgccatcaccagcgactatgtcgtagtgggtaaagctcctcttcggaggagcatcagag

SEQ ID NO: 1047 - DNA, 85 bp, synthetic construct
  misc_feature 1..85: note = engineered ribonucleic acid scaffold (ERS) sequence
  source 1..85: mol_type = other DNA
tatggcgcttctatctgattactctgagcgccatcaccagcgactatgtcgtagtgggtaaagctctcttcggagagcatcagag

SEQ ID NO: 1048 - DNA, 77 bp, synthetic construct
  misc_feature 1..77: note = engineered ribonucleic acid scaffold (ERS) sequence
  source 1..77: mol_type = other DNA
tatggcgcttctatctgattactctgagcgccatcaccagcgactatgtcgtagtgggtaaagctgcagcatcagag

SEQ ID NO: 1049 - DNA, 83 bp, synthetic construct
  misc_feature 1..83: note = engineered ribonucleic acid scaffold (ERS) sequence
  source 1..83: mol_type = other DNA
tatggcgcttctatctgattactctgagcgccatcaccagcgactatgtcgtagtgggtaaagctgcttcggcagcatcagag

SEQ ID NO: 1050 - DNA, 89 bp, synthetic construct
  misc_feature 1..89: note = engineered ribonucleic acid scaffold (ERS) sequence
  source 1..89: mol_type = other DNA
tatggcgcttctatctgattactctgagcgccatcaccagcgactatgtcgtagtgggtaaaggtccctcttcggagggaacatcagag

SEQ ID NO: 1051 - DNA, 93 bp, synthetic construct
  misc_feature 1..93: note = engineered ribonucleic acid scaffold (ERS) sequence
  source 1..93: mol_type = other DNA
tatggcgcttctatctgattactctgagcgccatcaccagcgactatgtcgtagtgggtaaaggtgacggtcttcggaccgtcaccatcagag

SEQ ID NO: 1052 - DNA, 91 bp, synthetic construct
  misc_feature 1..91: note = engineered ribonucleic acid scaffold (ERS) sequence
  source 1..91: mol_type = other DNA
tatggcgcttctatctgattactctgagcgccatcaccagcgactatgtcgtagtgggtaaagtctccctcttcggagggaggcatcagag

SEQ ID NO: 1053 - DNA, 93 bp, synthetic construct
  misc_feature 1..93: note = engineered ribonucleic acid scaffold (ERS) sequence
  source 1..93: mol_type = other DNA
tatggcgcttctatctgattactctgagcgccatcaccagcgactatgtcgtagtgggtaaagtgcgcccgcttcggcgggcgcacatcagag

SEQ ID NO: 1054 - DNA, 93 bp, synthetic construct
  misc_feature 1..93: note = engineered ribonucleic acid scaffold (ERS) sequence
  source 1..93: mol_type = other DNA
tatggcgcttctatctgattactctgagcgccatcaccagcgactatgtcgtagtgggtaaataatgaaaacttcggttttcattaatcagag

SEQ ID NO: 1055 - DNA, 93 bp, synthetic construct
  misc_feature 1..93: note = engineered ribonucleic acid scaffold (ERS) sequence
  source 1..93: mol_type = other DNA
tatggcgcttctatctgattactctgagcgccatcaccagcgactatgtcgtagtgggtaaatcgtaagaacttcggttcttacgaatcagag

SEQ ID NO: 1056 - DNA, 93 bp, synthetic construct
  misc_feature 1..93: note = engineered ribonucleic acid scaffold (ERS) sequence
  source 1..93: mol_type = other DNA
tatggcgcttctatctgattactctgagcgccatcaccagcgactatgtcgtagtgggtaaatggaagatgcttcggcatcttccaatcagag

SEQ ID NO: 1057 - DNA, 97 bp, synthetic construct
  misc_feature 1..97: note = engineered ribonucleic acid scaffold (ERS) sequence
  source 1..97: mol_type = other DNA
tatggcgcttctatctgattactctgagcgccatcaccagcgactatgtcgtagtgggtaaagcccttacggacttcggtccgtaagggcatcagag

SEQ ID NO: 1058 - DNA, 99 bp, synthetic construct
  misc_feature 1..99: note = engineered ribonucleic acid scaffold (ERS) sequence
  source 1..99: mol_type = other DNA
tatggcgcttctatctgattactctgagcgccatcaccagcgactatgtcgtagtgggtaaagcctcttacggacttcggtccgtaagaggcatcagag

SEQ ID NO: 1059 - DNA, 99 bp, synthetic construct
  misc_feature 1..99: note = engineered ribonucleic acid scaffold (ERS) sequence
  source 1..99: mol_type = other DNA
tatggcgcttctatctgattactctgagcgccatcaccagcgactatgtcgtagtgggtaaagccgcttagggacttcggtccctaagaggcatcagag

SEQ ID NO: 1060 - DNA, 87 bp, synthetic construct
  misc_feature 1..87: note = engineered ribonucleic acid scaffold (ERS) sequence
  source 1..87: mol_type = other DNA
tctggcgcttctatctgattactctgagcgccatcaccagcgactatgtcgtagtgggtaaactccctcttcggagggagatcagag

SEQ ID NO: 1061 - DNA, 89 bp, synthetic construct
  misc_feature 1..89: note = engineered ribonucleic acid scaffold (ERS) sequence
  source 1..89: mol_type = other DNA
tctggcgcttctatctgattactctgagcgccatcaccagcgactatgtcgtagtgggtaaagcgccctcttcggagggagcatcagag

SEQ ID NO: 1062 - DNA, 99 bp, synthetic construct
  misc_feature 1..99: note = engineered ribonucleic acid scaffold (ERS) sequence
  source 1..99: mol_type = other DNA
tctggcgcttctatctgattactctgagcgccatcaccagcgactatgtcgtagtgggtaaagcgccttacggacttcggtccgtaaggagcatcagag

SEQ ID NO: 1063 - DNA, 99 bp, synthetic construct
  misc_feature 1..99: note = engineered ribonucleic acid scaffold (ERS) sequence
  source 1..99: mol_type = other DNA
tctggcgcttctatctgattactctgagcgccatcaccagcgactatgtcgtagtgggtaaagcgcttacggaattcgtgtccgtaagaagcatcagag

SEQ ID NO: 1064 - DNA, 100 bp, synthetic construct
  misc_feature 1..100: note = engineered ribonucleic acid scaffold (ERS) sequence
  source 1..100: mol_type = other DNA
tctggcgcttctatctgattactctgagcgccatcaccagcgactatgtcgtagtgggtaaagcgcttacggacttcgcggtccgtaagaagcatcagag

SEQ ID NO: 1065 - DNA, 98 bp, synthetic construct
  misc_feature 1..98: note = engineered ribonucleic acid scaffold (ERS) sequence
  source 1..98: mol_type = other DNA
tctggcgcttctatctgattactctgagcgccatcaccagcgactatgtcgtagtgggtaaagcgcttacggacttcggtccgtaagaagcatcagag

SEQ ID NO: 1066 - DNA, 98 bp, synthetic construct
  misc_feature 1..98: note = engineered ribonucleic acid scaffold (ERS) sequence
  source 1..98: mol_type = other DNA
tctggcgcttctatctgattactctgagcgccatcaccagcgactatgtcgtagtgggtaaagcgcttacggacttcggtccgtaagtcgcatcagag

SEQ ID NO: 1067 - DNA, 98 bp, synthetic construct
  misc_feature 1..98: note = engineered ribonucleic acid scaffold (ERS) sequence
  source 1..98: mol_type = other DNA
tctggcgcttctatctgattactctgagcgccatcaccagcgactatgtcgtagtgggtaaagcgcttacggagttcgatccgtaagaagcatcagag

SEQ ID NO: 1068 - DNA, 98 bp, synthetic construct
  misc_feature 1..98: note = engineered ribonucleic acid scaffold (ERS) sequence
  source 1..98: mol_type = other DNA
tctggcgcttctatctgattactctgagcgccatcaccagcgactatgtcgtagtgggtaaagcgctttcggacttcggtccggaagaagcatcagag

SEQ ID NO: 1069 - DNA, 102 bp, synthetic construct
  misc_feature 1..102: note = engineered ribonucleic acid scaffold (ERS) sequence
  source 1..102: mol_type = other DNA
tctggcgcttctatctgattactctgagcgccatcaccagcgactatgtcgtagtgggtaaagcggcagatctgagcctccgagctctctgccgcatcagag

SEQ ID NO: 1070 - DNA, 98 bp, synthetic construct
  misc_feature 1..98: note = engineered ribonucleic acid scaffold (ERS) sequence
  source 1..98: mol_type = other DNA
tctggcgcttctatctgattactctgagcgccatcaccagcgactatgtcgtagtgggtaaagcggttacggacttcggtccgtaagacgcatcagag

SEQ ID NO: 1071 - DNA, 75 bp, synthetic construct
  misc_feature 1..75: note = engineered ribonucleic acid scaffold (ERS) sequence
  source 1..75: mol_type = other DNA
tctggcgcttctatctgattactctgagcgccatcaccagcgactatgtcgtagtgggtaaagctagcatcagag

SEQ ID NO: 1072 - DNA, 89 bp, synthetic construct
  misc_feature 1..89: note = engineered ribonucleic acid scaffold (ERS) sequence
  source 1..89: mol_type = other DNA
tctggcgcttctatctgattactctgagcgccatcaccagcgactatgtcgtagtgggtaaagctccctattcggatggagcatcagag

SEQ ID NO: 1073 - DNA, 95 bp, synthetic construct
  misc_feature 1..95: note = engineered ribonucleic acid scaffold (ERS) sequence
  source 1..95: mol_type = other DNA
tctggcgcttctatctgattactctgagcgccatcaccagcgactatgtcgtagtgggtaaagctccctcacagggatgtgagggagcatcagag

SEQ ID NO: 1074 - DNA, 94 bp, synthetic construct
  misc_feature 1..94: note = engineered ribonucleic acid scaffold (ERS) sequence
  source 1..94: mol_type = other DNA
tctggcgcttctatctgattactctgagcgccatcaccagcgactatgtcgtagtgggtaaagctccctcagctgcagtgagggagcatcagag

SEQ ID NO: 1075 - DNA, 89 bp, synthetic construct
  misc_feature 1..89: note = engineered ribonucleic acid scaffold (ERS) sequence
  source 1..89: mol_type = other DNA
tctggcgcttctatctgattactctgagcgccatcaccagcgactatgtcgtagtgggtaaagctccctcataggagggagcatcagag

SEQ ID NO: 1076 - DNA, 90 bp, synthetic construct
  misc_feature 1..90: note = engineered ribonucleic acid scaffold (ERS) sequence
  source 1..90: mol_type = other DNA
tctggcgcttctatctgattactctgagcgccatcaccagcgactatgtcgtagtgggtaaagctccctcttcaggagggagcatcagag

SEQ ID NO: 1077 - DNA, 89 bp, synthetic construct
  misc_feature 1..89: note = engineered ribonucleic acid scaffold (ERS) sequence
  source 1..89: mol_type = other DNA
tctggcgcttctatctgattactctgagcgccatcaccagcgactatgtcgtagtgggtaaagctccctcttcggagagtgcatcagag

SEQ ID NO: 1078 - DNA, 89 bp, synthetic construct
  misc_feature 1..89: note = engineered ribonucleic acid scaffold (ERS) sequence
  source 1..89: mol_type = other DNA
tctggcgcttctatctgattactctgagcgccatcaccagcgactatgtcgtagtgggtaaagctccctcttcggaggaggcatcagag

SEQ ID NO: 1079 - DNA, 91 bp, synthetic construct
  misc_feature 1..91: note = engineered ribonucleic acid scaffold (ERS) sequence
  source 1..91: mol_type = other DNA
tctggcgcttctatctgattactctgagcgccatcaccagcgactatgtcgtagtgggtaaagctccctcttcggagggaacgcatcagag

SEQ ID NO: 1080 - DNA, 89 bp, synthetic construct; identical to SEQ ID NO: 579
  misc_feature 1..89: note = engineered ribonucleic acid scaffold (ERS) sequence
  source 1..89: mol_type = other DNA

SEQ ID NO: 1081 - DNA, 89 bp, synthetic construct
  misc_feature 1..89: note = engineered ribonucleic acid scaffold (ERS) sequence
  source 1..89: mol_type = other DNA
tctggcgcttctatctgattactctgagcgccatcaccagcgactatgtcgtagtgggtaaagctccctggaaacagggagcatcagag

SEQ ID NO: 1082 - DNA, 85 bp, synthetic construct
  misc_feature 1..85: note = engineered ribonucleic acid scaffold (ERS) sequence
  source 1..85: mol_type = other DNA
tctggcgcttctatctgattactctgagcgccatcaccagcgactatgtcgtagtgggtaaagctcccttcggggagcatcagag

SEQ ID NO: 1083 - DNA, 85 bp, synthetic construct
  misc_feature 1..85: note = engineered ribonucleic acid scaffold (ERS) sequence
  source 1..85: mol_type = other DNA
tctggcgcttctatctgattactctgagcgccatcaccagcgactatgtcgtagtgggtaaagctccgttcgcggagcatcagag

SEQ ID NO: 1084 - DNA, 87 bp, synthetic construct
  misc_feature 1..87: note = engineered ribonucleic acid scaffold (ERS) sequence
  source 1..87: mol_type = other DNA
tctggcgcttctatctgattactctgagcgccatcaccagcgactatgtcgtagtgggtaaagctcctcttcggaggagcatcagag

SEQ ID NO: 1085 - DNA, 85 bp, synthetic construct
  misc_feature 1..85: note = engineered ribonucleic acid scaffold (ERS) sequence
  source 1..85: mol_type = other DNA
tctggcgcttctatctgattactctgagcgccatcaccagcgactatgtcgtagtgggtaaagctctcttcggagagcatcagag

SEQ ID NO: 1086 - DNA, 77 bp, synthetic construct
  misc_feature 1..77: note = engineered ribonucleic acid scaffold (ERS) sequence
  source 1..77: mol_type = other DNA
tctggcgcttctatctgattactctgagcgccatcaccagcgactatgtcgtagtgggtaaagctgcagcatcagag

SEQ ID NO: 1087 - DNA, 83 bp, synthetic construct
  misc_feature 1..83: note = engineered ribonucleic acid scaffold (ERS) sequence
  source 1..83: mol_type = other DNA
tctggcgcttctatctgattactctgagcgccatcaccagcgactatgtcgtagtgggtaaagctgcttcggcagcatcagag

SEQ ID NO: 1088 - DNA, 89 bp, synthetic construct
  misc_feature 1..89: note = engineered ribonucleic acid scaffold (ERS) sequence
  source 1..89: mol_type = other DNA
tctggcgcttctatctgattactctgagcgccatcaccagcgactatgtcgtagtgggtaaaggtccctcttcggagggaacatcagag

SEQ ID NO: 1089 - DNA, 93 bp, synthetic construct
  misc_feature 1..93: note = engineered ribonucleic acid scaffold (ERS) sequence
  source 1..93: mol_type = other DNA
tctggcgcttctatctgattactctgagcgccatcaccagcgactatgtcgtagtgggtaaaggtgacggtcttcggaccgtcaccatcagag

SEQ ID NO: 1090 - DNA, 91 bp, synthetic construct
  misc_feature 1..91: note = engineered ribonucleic acid scaffold (ERS) sequence
  source 1..91: mol_type = other DNA
tctggcgcttctatctgattactctgagcgccatcaccagcgactatgtcgtagtgggtaaagtctccctcttcggagggaggcatcagag

SEQ ID NO: 1091 - DNA, 93 bp, synthetic construct
  misc_feature 1..93: note = engineered ribonucleic acid scaffold (ERS) sequence
  source 1..93: mol_type = other DNA
tctggcgcttctatctgattactctgagcgccatcaccagcgactatgtcgtagtgggtaaagtgcgcccgcttcggcgggcgcacatcagag

SEQ ID NO: 1092 - DNA, 93 bp, synthetic construct
  misc_feature 1..93: note = engineered ribonucleic acid scaffold (ERS) sequence
  source 1..93: mol_type = other DNA
tctggcgcttctatctgattactctgagcgccatcaccagcgactatgtcgtagtgggtaaataatgaaaacttcggttttcattaatcagag

SEQ ID NO: 1093 - DNA, 93 bp, synthetic construct
  misc_feature 1..93: note = engineered ribonucleic acid scaffold (ERS) sequence
  source 1..93: mol_type = other DNA
tctggcgcttctatctgattactctgagcgccatcaccagcgactatgtcgtagtgggtaaatcgtaagaacttcggttcttacgaatcagag

SEQ ID NO: 1094 - DNA, 93 bp, synthetic construct
  misc_feature 1..93: note = engineered ribonucleic acid scaffold (ERS) sequence
  source 1..93: mol_type = other DNA
tctggcgcttctatctgattactctgagcgccatcaccagcgactatgtcgtagtgggtaaatggaagatgcttcggcatcttccaatcagag

SEQ ID NO: 1095 - DNA, 97 bp, synthetic construct
  misc_feature 1..97: note = engineered ribonucleic acid scaffold (ERS) sequence
  source 1..97: mol_type = other DNA
tctggcgcttctatctgattactctgagcgccatcaccagcgactatgtcgtagtgggtaaagcccttacggacttcggtccgtaagggcatcagag

SEQ ID NO: 1096 - DNA, 99 bp, synthetic construct
  misc_feature 1..99: note = engineered ribonucleic acid scaffold (ERS) sequence
  source 1..99: mol_type = other DNA
tctggcgcttctatctgattactctgagcgccatcaccagcgactatgtcgtagtgggtaaagcctcttacggacttcggtccgtaagaggcatcagag

SEQ ID NO: 1097 - DNA, 99 bp, synthetic construct
  misc_feature 1..99: note = engineered ribonucleic acid scaffold (ERS) sequence
  source 1..99: mol_type = other DNA
tctggcgcttctatctgattactctgagcgccatcaccagcgactatgtcgtagtgggtaaagccgcttagggacttcggtccctaagaggcatcagag

SEQ ID NO: 1098 - DNA, 88 bp, synthetic construct
  misc_feature 1..88: note = engineered ribonucleic acid scaffold (ERS) sequence
  source 1..88: mol_type = other DNA
atctggcgcttctatctgattactctgagcgccatcaccagcgactatgtcgtagtgggtaaactccctcttcggagggagatcagag

SEQ ID NO: 1099 - DNA, 90 bp, synthetic construct
  misc_feature 1..90: note = engineered ribonucleic acid scaffold (ERS) sequence
  source 1..90: mol_type = other DNA
atctggcgcttctatctgattactctgagcgccatcaccagcgactatgtcgtagtgggtaaagcgccctcttcggagggagcatcagag

SEQ ID NO: 1100 - DNA, 100 bp, synthetic construct
  misc_feature 1..100: note = engineered ribonucleic acid scaffold (ERS) sequence
  source 1..100: mol_type = other DNA
atctggcgcttctatctgattactctgagcgccatcaccagcgactatgtcgtagtgggtaaagcgccttacggacttcggtccgtaaggagcatcagag

SEQ ID NO: 1101 - DNA, 100 bp, synthetic construct
  misc_feature 1..100: note = engineered ribonucleic acid scaffold (ERS) sequence
  source 1..100: mol_type = other DNA
atctggcgcttctatctgattactctgagcgccatcaccagcgactatgtcgtagtgggtaaagcgcttacggaattcgtgtccgtaagaagcatcagag

SEQ ID NO: 1102 - DNA, 101 bp, synthetic construct
  misc_feature 1..101: note = engineered ribonucleic acid scaffold (ERS) sequence
  source 1..101: mol_type = other DNA
atctggcgcttctatctgattactctgagcgccatcaccagcgactatgtcgtagtgggtaaagcgcttacggacttcgcggtccgtaagaagcatcagag

SEQ ID NO: 1103 - DNA, 99 bp, synthetic construct
  misc_feature 1..99: note = engineered ribonucleic acid scaffold (ERS) sequence
  source 1..99: mol_type = other DNA
atctggcgcttctatctgattactctgagcgccatcaccagcgactatgtcgtagtgggtaaagcgcttacggacttcggtccgtaagaagcatcagag

SEQ ID NO: 1104 - DNA, 99 bp, synthetic construct
  misc_feature 1..99: note = engineered ribonucleic acid scaffold (ERS) sequence
  source 1..99: mol_type = other DNA
atctggcgcttctatctgattactctgagcgccatcaccagcgactatgtcgtagtgggtaaagcgcttacggacttcggtccgtaagtcgcatcagag

SEQ ID NO: 1105 - DNA, 99 bp, synthetic construct
  misc_feature 1..99: note = engineered ribonucleic acid scaffold (ERS) sequence
  source 1..99: mol_type = other DNA
atctggcgcttctatctgattactctgagcgccatcaccagcgactatgtcgtagtgggtaaagcgcttacggagttcgatccgtaagaagcatcagag

SEQ ID NO: 1106 - DNA, 99 bp, synthetic construct
  misc_feature 1..99: note = engineered ribonucleic acid scaffold (ERS) sequence
  source 1..99: mol_type = other DNA
atctggcgcttctatctgattactctgagcgccatcaccagcgactatgtcgtagtgggtaaagcgctttcggacttcggtccggaagaagcatcagag

SEQ ID NO: 1107 - DNA, 103 bp, synthetic construct
  misc_feature 1..103: note = engineered ribonucleic acid scaffold (ERS) sequence
  source 1..103: mol_type = other DNA
atctggcgcttctatctgattactctgagcgccatcaccagcgactatgtcgtagtgggtaaagcggcagatctgagcctccgagctctctgccgcatcagag

SEQ ID NO: 1108 - DNA, 99 bp, synthetic construct
  misc_feature 1..99: note = engineered ribonucleic acid scaffold (ERS) sequence
  source 1..99: mol_type = other DNA
atctggcgcttctatctgattactctgagcgccatcaccagcgactatgtcgtagtgggtaaagcggttacggacttcggtccgtaagacgcatcagag

SEQ ID NO: 1109 - DNA, 76 bp, synthetic construct
  misc_feature 1..76: note = engineered ribonucleic acid scaffold (ERS) sequence
  source 1..76: mol_type = other DNA
atctggcgcttctatctgattactctgagcgccatcaccagcgactatgtcgtagtgggtaaagctagcatcagag

SEQ ID NO: 1110 - DNA, 90 bp, synthetic construct
  misc_feature 1..90: note = engineered ribonucleic acid scaffold (ERS) sequence
  source 1..90: mol_type = other DNA
atctggcgcttctatctgattactctgagcgccatcaccagcgactatgtcgtagtgggtaaagctccctattcggatggagcatcagag

SEQ ID NO: 1111 - DNA, 96 bp, synthetic construct
  misc_feature 1..96: note = engineered ribonucleic acid scaffold (ERS) sequence
  source 1..96: mol_type = other DNA
atctggcgcttctatctgattactctgagcgccatcaccagcgactatgtcgtagtgggtaaagctccctcacagggatgtgagggagcatcagag

SEQ ID NO: 1112 - DNA, 95 bp, synthetic construct
  misc_feature 1..95: note = engineered ribonucleic acid scaffold (ERS) sequence
  source 1..95: mol_type = other DNA
atctggcgcttctatctgattactctgagcgccatcaccagcgactatgtcgtagtgggtaaagctccctcagctgcagtgagggagcatcagag

SEQ ID NO: 1113 - DNA, 90 bp, synthetic construct
  misc_feature 1..90: note = engineered ribonucleic acid scaffold (ERS) sequence
  source 1..90: mol_type = other DNA
atctggcgcttctatctgattactctgagcgccatcaccagcgactatgtcgtagtgggtaaagctccctcataggagggagcatcagag

SEQ ID NO: 1114 - DNA, 91 bp, synthetic construct
  misc_feature 1..91: note = engineered ribonucleic acid scaffold (ERS) sequence
  source 1..91: mol_type = other DNA
atctggcgcttctatctgattactctgagcgccatcaccagcgactatgtcgtagtgggtaaagctccctcttcaggagggagcatcagag

SEQ ID NO: 1115 - DNA, 90 bp, synthetic construct
  misc_feature 1..90: note = engineered ribonucleic acid scaffold (ERS) sequence
  source 1..90: mol_type = other DNA
atctggcgcttctatctgattactctgagcgccatcaccagcgactatgtcgtagtgggtaaagctccctcttcggagagtgcatcagag

SEQ ID NO: 1116 - DNA, 90 bp, synthetic construct
  misc_feature 1..90: note = engineered ribonucleic acid scaffold (ERS) sequence
  source 1..90: mol_type = other DNA
atctggcgcttctatctgattactctgagcgccatcaccagcgactatgtcgtagtgggtaaagctccctcttcggaggaggcatcagag

SEQ ID NO: 1117 - DNA, 92 bp, synthetic construct
  misc_feature 1..92: note = engineered ribonucleic acid scaffold (ERS) sequence
  source 1..92: mol_type = other DNA
atctggcgcttctatctgattactctgagcgccatcaccagcgactatgtcgtagtgggtaaagctccctcttcggagggaacgcatcagag

SEQ ID NO: 1118 - DNA, 90 bp, synthetic construct; identical to SEQ ID NO: 573
  misc_feature 1..90: note = engineered ribonucleic acid scaffold (ERS) sequence
  source 1..90: mol_type = other DNA

SEQ ID NO: 1119 - DNA, 90 bp, synthetic construct
  misc_feature 1..90: note = engineered ribonucleic acid scaffold (ERS) sequence
  source 1..90: mol_type = other DNA
atctggcgcttctatctgattactctgagcgccatcaccagcgactatgtcgtagtgggtaaagctccctggaaacagggagcatcagag

SEQ ID NO: 1120 - DNA, 86 bp, synthetic construct
  misc_feature 1..86: note = engineered ribonucleic acid scaffold (ERS) sequence
  source 1..86: mol_type = other DNA
atctggcgcttctatctgattactctgagcgccatcaccagcgactatgtcgtagtgggtaaagctcccttcggggagcatcagag

SEQ ID NO: 1121 - DNA, 86 bp, synthetic construct
  misc_feature 1..86: note = engineered ribonucleic acid scaffold (ERS) sequence
  source 1..86: mol_type = other DNA
atctggcgcttctatctgattactctgagcgccatcaccagcgactatgtcgtagtgggtaaagctccgttcgcggagcatcagag

SEQ ID NO: 1122 - DNA, 88 bp, synthetic construct
  misc_feature 1..88: note = engineered ribonucleic acid scaffold (ERS) sequence
  source 1..88: mol_type = other DNA
atctggcgcttctatctgattactctgagcgccatcaccagcgactatgtcgtagtgggtaaagctcctcttcggaggagcatcagag

SEQ ID NO: 1123 - DNA, 86 bp, synthetic construct
  misc_feature 1..86: note = engineered ribonucleic acid scaffold (ERS) sequence
  source 1..86: mol_type = other DNA
atctggcgcttctatctgattactctgagcgccatcaccagcgactatgtcgtagtgggtaaagctctcttcggagagcatcagag

SEQ ID NO: 1124 - DNA, 78 bp, synthetic construct
  misc_feature 1..78: note = engineered ribonucleic acid scaffold (ERS) sequence
  source 1..78: mol_type = other DNA
atctggcgcttctatctgattactctgagcgccatcaccagcgactatgtcgtagtgggtaaagctgcagcatcagag

SEQ ID NO: 1125 - DNA, 84 bp, synthetic construct
  misc_feature 1..84: note = engineered ribonucleic acid scaffold (ERS) sequence
  source 1..84: mol_type = other DNA
atctggcgcttctatctgattactctgagcgccatcaccagcgactatgtcgtagtgggtaaagctgcttcggcagcatcagag

SEQ ID NO: 1126 - DNA, 90 bp, synthetic construct
  misc_feature 1..90: note = engineered ribonucleic acid scaffold (ERS) sequence
  source 1..90: mol_type = other DNA
atctggcgcttctatctgattactctgagcgccatcaccagcgactatgtcgtagtgggtaaaggtccctcttcggagggaacatcagag

SEQ ID NO: 1127 - DNA, 94 bp, synthetic construct
  misc_feature 1..94: note = engineered ribonucleic acid scaffold (ERS) sequence
  source 1..94: mol_type = other DNA
atctggcgcttctatctgattactctgagcgccatcaccagcgactatgtcgtagtgggtaaaggtgacggtcttcggaccgtcaccatcagag

SEQ ID NO: 1128 - DNA, 92 bp, synthetic construct
  misc_feature 1..92: note = engineered ribonucleic acid scaffold (ERS) sequence
  source 1..92: mol_type = other DNA
atctggcgcttctatctgattactctgagcgccatcaccagcgactatgtcgtagtgggtaaagtctccctcttcggagggaggcatcagag

SEQ ID NO: 1129 - DNA, 94 bp, synthetic construct
  misc_feature 1..94: note = engineered ribonucleic acid scaffold (ERS) sequence
  source 1..94: mol_type = other DNA
atctggcgcttctatctgattactctgagcgccatcaccagcgactatgtcgtagtgggtaaagtgcgcccgcttcggcgggcgcacatcagag

SEQ ID NO: 1130 - DNA, 94 bp, synthetic construct
  misc_feature 1..94: note = engineered ribonucleic acid scaffold (ERS) sequence
  source 1..94: mol_type = other DNA
atctggcgcttctatctgattactctgagcgccatcaccagcgactatgtcgtagtgggtaaataatgaaaacttcggttttcattaatcagag

SEQ ID NO: 1131 - DNA, 94 bp, synthetic construct
  misc_feature 1..94: note = engineered ribonucleic acid scaffold (ERS) sequence
  source 1..94: mol_type = other DNA
atctggcgcttctatctgattactctgagcgccatcaccagcgactatgtcgtagtgggtaaatcgtaagaacttcggttcttacgaatcagag

SEQ ID NO: 1132 - DNA, 94 bp, synthetic construct
  misc_feature 1..94: note = engineered ribonucleic acid scaffold (ERS) sequence
  source 1..94: mol_type = other DNA
atctggcgcttctatctgattactctgagcgccatcaccagcgactatgtcgtagtgggtaaatggaagatgcttcggcatcttccaatcagag

SEQ ID NO: 1133 - DNA, 98 bp, synthetic construct
  misc_feature 1..98: note = engineered ribonucleic acid scaffold (ERS) sequence
  source 1..98: mol_type = other DNA
atctggcgcttctatctgattactctgagcgccatcaccagcgactatgtcgtagtgggtaaagcccttacggacttcggtccgtaagggcatcagag

SEQ ID NO: 1134 - DNA, 100 bp, synthetic construct
  misc_feature 1..100: note = engineered ribonucleic acid scaffold (ERS) sequence
  source 1..100: mol_type = other DNA
atctggcgcttctatctgattactctgagcgccatcaccagcgactatgtcgtagtgggtaaagcctcttacggacttcggtccgtaagaggcatcagag

SEQ ID NO: 1135 - DNA, 100 bp, synthetic construct
  misc_feature 1..100: note = engineered ribonucleic acid scaffold (ERS) sequence
  source 1..100: mol_type = other DNA
atctggcgcttctatctgattactctgagcgccatcaccagcgactatgtcgtagtgggtaaagccgcttagggacttcggtccctaagaggcatcagag

SEQ ID NO: 1136 - DNA, 85 bp, synthetic construct
  misc_feature 1..85: note = engineered ribonucleic acid scaffold (ERS) sequence
  source 1..85: mol_type = other DNA
aggcgcttctatctgattactctgagcgccatcaccagcgactatgtcgtagtgggtaaactccctcttcggagggagatcagag

SEQ ID NO: 1137 - DNA, 87 bp, synthetic construct
  misc_feature 1..87: note = engineered ribonucleic acid scaffold (ERS) sequence
  source 1..87: mol_type = other DNA
aggcgcttctatctgattactctgagcgccatcaccagcgactatgtcgtagtgggtaaagcgccctcttcggagggagcatcagag

SEQ ID NO: 1138 - DNA, 97 bp, synthetic construct
  misc_feature 1..97: note = engineered ribonucleic acid scaffold (ERS) sequence
  source 1..97: mol_type = other DNA
aggcgcttctatctgattactctgagcgccatcaccagcgactatgtcgtagtgggtaaagcgccttacggacttcggtccgtaaggagcatcagag

SEQ ID NO: 1139 - DNA, 97 bp, synthetic construct
  misc_feature 1..97: note = engineered ribonucleic acid scaffold (ERS) sequence
  source 1..97: mol_type = other DNA
aggcgcttctatctgattactctgagcgccatcaccagcgactatgtcgtagtgggtaaagcgcttacggaattcgtgtccgtaagaagcatcagag

SEQ ID NO: 1140 - DNA, 98 bp, synthetic construct
  misc_feature 1..98: note = engineered ribonucleic acid scaffold (ERS) sequence
  source 1..98: mol_type = other DNA
aggcgcttctatctgattactctgagcgccatcaccagcgactatgtcgtagtgggtaaagcgcttacggacttcgcggtccgtaagaagcatcagag

SEQ ID NO: 1141 - DNA, 96 bp, synthetic construct
  misc_feature 1..96: note = engineered ribonucleic acid scaffold (ERS) sequence
  source 1..96: mol_type = other DNA
aggcgcttctatctgattactctgagcgccatcaccagcgactatgtcgtagtgggtaaagcgcttacggacttcggtccgtaagaagcatcagag

SEQ ID NO: 1142 - DNA, 96 bp, synthetic construct
  misc_feature 1..96: note = engineered ribonucleic acid scaffold (ERS) sequence
  source 1..96: mol_type = other DNA
aggcgcttctatctgattactctgagcgccatcaccagcgactatgtcgtagtgggtaaagcgcttacggacttcggtccgtaagtcgcatcagag

SEQ ID NO: 1143 - DNA, 96 bp, synthetic construct
  misc_feature 1..96: note = engineered ribonucleic acid scaffold (ERS) sequence
  source 1..96: mol_type = other DNA
aggcgcttctatctgattactctgagcgccatcaccagcgactatgtcgtagtgggtaaagcgcttacggagttcgatccgtaagaagcatcagag

SEQ ID NO: 1144 - DNA, 96 bp, synthetic construct
  misc_feature 1..96: note = engineered ribonucleic acid scaffold (ERS) sequence
  source 1..96: mol_type = other DNA
aggcgcttctatctgattactctgagcgccatcaccagcgactatgtcgtagtgggtaaagcgctttcggacttcggtccggaagaagcatcagag

SEQ ID NO: 1145 - DNA, 100 bp, synthetic construct
  misc_feature 1..100: note = engineered ribonucleic acid scaffold (ERS) sequence
  source 1..100: mol_type = other DNA
aggcgcttctatctgattactctgagcgccatcaccagcgactatgtcgtagtgggtaaagcggcagatctgagcctccgagctctctgccgcatcagag

SEQ ID NO: 1146 - DNA, 96 bp, synthetic construct
  misc_feature 1..96: note = engineered ribonucleic acid scaffold (ERS) sequence
  source 1..96: mol_type = other DNA
aggcgcttctatctgattactctgagcgccatcaccagcgactatgtcgtagtgggtaaagcggttacggacttcggtccgtaagacgcatcagag

SEQ ID NO: 1147 - DNA, 73 bp, synthetic construct
  misc_feature 1..73: note = engineered ribonucleic acid scaffold (ERS) sequence
  source 1..73: mol_type = other DNA
aggcgcttctatctgattactctgagcgccatcaccagcgactatgtcgtagtgggtaaagctagcatcagag

SEQ ID NO: 1148 - DNA, 87 bp, synthetic construct
  misc_feature 1..87: note = engineered ribonucleic acid scaffold (ERS) sequence
  source 1..87: mol_type = other DNA
aggcgcttctatctgattactctgagcgccatcaccagcgactatgtcgtagtgggtaaagctccctattcggatggagcatcagag

SEQ ID NO: 1149 - DNA, 93 bp, synthetic construct
  misc_feature 1..93: note = engineered ribonucleic acid scaffold (ERS) sequence
  source 1..93: mol_type = other DNA
aggcgcttctatctgattactctgagcgccatcaccagcgactatgtcgtagtgggtaaagctccctcacagggatgtgagggagcatcagag

SEQ ID NO: 1150 - DNA, 92 bp, synthetic construct
  misc_feature 1..92: note = engineered ribonucleic acid scaffold (ERS) sequence
  source 1..92: mol_type = other DNA
aggcgcttctatctgattactctgagcgccatcaccagcgactatgtcgtagtgggtaaagctccctcagctgcagtgagggagcatcagag

SEQ ID NO: 1151 - DNA, 87 bp, synthetic construct
  misc_feature 1..87: note = engineered ribonucleic acid scaffold (ERS) sequence
  source 1..87: mol_type = other DNA
aggcgcttctatctgattactctgagcgccatcaccagcgactatgtcgtagtgggtaaagctccctcataggagggagcatcagag

SEQ ID NO: 1152 - DNA, 88 bp, synthetic construct
  misc_feature 1..88: note = engineered ribonucleic acid scaffold (ERS) sequence
  source 1..88: mol_type = other DNA
aggcgcttctatctgattactctgagcgccatcaccagcgactatgtcgtagtgggtaaagctccctcttcaggagggagcatcagag

SEQ ID NO: 1153 - DNA, 87 bp, synthetic construct
  misc_feature 1..87: note = engineered ribonucleic acid scaffold (ERS) sequence
  source 1..87: mol_type = other DNA
aggcgcttctatctgattactctgagcgccatcaccagcgactatgtcgtagtgggtaaagctccctcttcggagagtgcatcagag

SEQ ID NO: 1154 - DNA, 87 bp, synthetic construct
  misc_feature 1..87: note = engineered ribonucleic acid scaffold (ERS) sequence
  source 1..87: mol_type = other DNA
aggcgcttctatctgattactctgagcgccatcaccagcgactatgtcgtagtgggtaaagctccctcttcggaggaggcatcagag

SEQ ID NO: 1155 - DNA, 89 bp, synthetic construct
  misc_feature 1..89: note = engineered ribonucleic acid scaffold (ERS) sequence
  source 1..89: mol_type = other DNA
aggcgcttctatctgattactctgagcgccatcaccagcgactatgtcgtagtgggtaaagctccctcttcggagggaacgcatcagag

SEQ ID NO: 1156 - DNA, 87 bp, synthetic construct; identical to SEQ ID NO: 577
  misc_feature 1..87: note = engineered ribonucleic acid scaffold (ERS) sequence
  source 1..87: mol_type = other DNA

SEQ ID NO: 1157 - DNA, 87 bp, synthetic construct
  misc_feature 1..87: note = engineered ribonucleic acid scaffold (ERS) sequence
  source 1..87: mol_type = other DNA
aggcgcttctatctgattactctgagcgccatcaccagcgactatgtcgtagtgggtaaagctccctggaaacagggagcatcagag

SEQ ID NO: 1158 - DNA, 83 bp, synthetic construct
  misc_feature 1..83: note = engineered ribonucleic acid scaffold (ERS) sequence
  source 1..83: mol_type = other DNA
aggcgcttctatctgattactctgagcgccatcaccagcgactatgtcgtagtgggtaaagctcccttcggggagcatcagag

SEQ ID NO: 1159 - DNA, 83 bp, synthetic construct
  misc_feature 1..83: note = engineered ribonucleic acid scaffold (ERS) sequence
  source 1..83: mol_type = other DNA
aggcgcttctatctgattactctgagcgccatcaccagcgactatgtcgtagtgggtaaagctccgttcgcggagcatcagag

SEQ ID NO: 1160 - DNA, 85 bp, synthetic construct
  misc_feature 1..85: note = engineered ribonucleic acid scaffold (ERS) sequence
  source 1..85: mol_type = other DNA
aggcgcttctatctgattactctgagcgccatcaccagcgactatgtcgtagtgggtaaagctcctcttcggaggagcatcagag

SEQ ID NO: 1161 - DNA, 83 bp, synthetic construct
  misc_feature 1..83: note = engineered ribonucleic acid scaffold (ERS) sequence
  source 1..83: mol_type = other DNA
aggcgcttctatctgattactctgagcgccatcaccagcgactatgtcgtagtgggtaaagctctcttcggagagcatcagag

SEQ ID NO: 1162 - DNA, 75 bp, synthetic construct
  misc_feature 1..75: note = engineered ribonucleic acid scaffold (ERS) sequence
  source 1..75: mol_type = other DNA
aggcgcttctatctgattactctgagcgccatcaccagcgactatgtcgtagtgggtaaagctgcagcatcagag

SEQ ID NO: 1163 - DNA, 81 bp, synthetic construct
  misc_feature 1..81: note = engineered ribonucleic acid scaffold (ERS) sequence
  source 1..81: mol_type = other DNA
aggcgcttctatctgattactctgagcgccatcaccagcgactatgtcgtagtgggtaaagctgcttcggcagcatcagag

SEQ ID NO: 1164 - DNA, 87 bp, synthetic construct
  misc_feature 1..87: note = engineered ribonucleic acid scaffold (ERS) sequence
  source 1..87: mol_type = other DNA
aggcgcttctatctgattactctgagcgccatcaccagcgactatgtcgtagtgggtaaaggtccctcttcggagggaacatcagag

SEQ ID NO: 1165 - DNA, 91 bp, synthetic construct
  misc_feature 1..91: note = engineered ribonucleic acid scaffold (ERS) sequence
  source 1..91: mol_type = other DNA
aggcgcttctatctgattactctgagcgccatcaccagcgactatgtcgtagtgggtaaaggtgacggtcttcggaccgtcaccatcagag

SEQ ID NO: 1166 - DNA, 89 bp, synthetic construct
  misc_feature 1..89: note = engineered ribonucleic acid scaffold (ERS) sequence
  source 1..89: mol_type = other DNA
aggcgcttctatctgattactctgagcgccatcaccagcgactatgtcgtagtgggtaaagtctccctcttcggagggaggcatcagag

SEQ ID NO: 1167 - DNA, 91 bp, synthetic construct
  misc_feature 1..91: note = engineered ribonucleic acid scaffold (ERS) sequence
  source 1..91: mol_type = other DNA
aggcgcttctatctgattactctgagcgccatcaccagcgactatgtcgtagtgggtaaagtgcgcccgcttcggcgggcgcacatcagag

SEQ ID NO: 1168 - DNA, 91 bp, synthetic construct
  misc_feature 1..91: note = engineered ribonucleic acid scaffold (ERS) sequence
  source 1..91: mol_type = other DNA
aggcgcttctatctgattactctgagcgccatcaccagcgactatgtcgtagtgggtaaataatgaaaacttcggttttcattaatcagag

SEQ ID NO: 1169 - DNA, 91 bp, synthetic construct
  misc_feature 1..91: note = engineered ribonucleic acid scaffold (ERS) sequence
  source 1..91: mol_type = other DNA
aggcgcttctatctgattactctgagcgccatcaccagcgactatgtcgtagtgggtaaatcgtaagaacttcggttcttacgaatcagag

SEQ ID NO: 1170 - DNA, 91 bp, synthetic construct
  misc_feature 1..91: note = engineered ribonucleic acid scaffold (ERS) sequence
  source 1..91: mol_type = other DNA
aggcgcttctatctgattactctgagcgccatcaccagcgactatgtcgtagtgggtaaatggaagatgcttcggcatcttccaatcagag

SEQ ID NO: 1171 - DNA, 95 bp, synthetic construct
  misc_feature 1..95: note = engineered ribonucleic acid scaffold (ERS) sequence
  source 1..95: mol_type = other DNA
aggcgcttctatctgattactctgagcgccatcaccagcgactatgtcgtagtgggtaaagcccttacggacttcggtccgtaagggcatcagag

SEQ ID NO: 1172 - DNA, 97 bp, synthetic construct
  misc_feature 1..97: note = engineered ribonucleic acid scaffold (ERS) sequence
  source 1..97: mol_type = other DNA
aggcgcttctatctgattactctgagcgccatcaccagcgactatgtcgtagtgggtaaagcctcttacggacttcggtccgtaagaggcatcagag

SEQ ID NO: 1173 - DNA, 97 bp, synthetic construct
  misc_feature 1..97: note = engineered ribonucleic acid scaffold (ERS) sequence
  source 1..97: mol_type = other DNA
aggcgcttctatctgattactctgagcgccatcaccagcgactatgtcgtagtgggtaaagccgcttagggacttcggtccctaagaggcatcagag

SEQ ID NO: 1174 - DNA, 86 bp, synthetic construct
  misc_feature 1..86: note = engineered ribonucleic acid scaffold (ERS) sequence
  source 1..86: mol_type = other DNA
atggtgcttctatctgattactctgagcgccatcaccagcgactatgtcgtagtgggtaaactccctcttcggagggagatcagag

SEQ ID NO: 1175 - DNA, 88 bp, synthetic construct
  misc_feature 1..88: note = engineered ribonucleic acid scaffold (ERS) sequence
  source 1..88: mol_type = other DNA
atggtgcttctatctgattactctgagcgccatcaccagcgactatgtcgtagtgggtaaagcgccctcttcggagggagcatcagag

SEQ ID NO: 1176 - DNA, 98 bp, synthetic construct
  misc_feature 1..98: note = engineered ribonucleic acid scaffold (ERS) sequence
  source 1..98: mol_type = other DNA
atggtgcttctatctgattactctgagcgccatcaccagcgactatgtcgtagtgggtaaagcgccttacggacttcggtccgtaaggagcatcagag

SEQ ID NO: 1177 - DNA, 98 bp, synthetic construct
  misc_feature 1..98: note = engineered ribonucleic acid scaffold (ERS) sequence
  source 1..98: mol_type = other DNA
atggtgcttctatctgattactctgagcgccatcaccagcgactatgtcgtagtgggtaaagcgcttacggaattcgtgtccgtaagaagcatcagag

SEQ ID NO: 1178 - DNA, 99 bp, synthetic construct
  misc_feature 1..99: note = engineered ribonucleic acid scaffold (ERS) sequence
  source 1..99: mol_type = other DNA
atggtgcttctatctgattactctgagcgccatcaccagcgactatgtcgtagtgggtaaagcgcttacggacttcgcggtccgtaagaagcatcagag

SEQ ID NO: 1179 - DNA, 97 bp, synthetic construct
  misc_feature 1..97: note = engineered ribonucleic acid scaffold (ERS) sequence
  source 1..97: mol_type = other DNA
atggtgcttctatctgattactctgagcgccatcaccagcgactatgtcgtagtgggtaaagcgcttacggacttcggtccgtaagaagcatcagag

SEQ ID NO: 1180 - DNA, 97 bp, synthetic construct
  misc_feature 1..97: note = engineered ribonucleic acid scaffold (ERS) sequence
  source 1..97: mol_type = other DNA
atggtgcttctatctgattactctgagcgccatcaccagcgactatgtcgtagtgggtaaagcgcttacggacttcggtccgtaagtcgcatcagag

SEQ ID NO: 1181 - DNA, 97 bp, synthetic construct
  misc_feature 1..97: note = engineered ribonucleic acid scaffold (ERS) sequence
  source 1..97: mol_type = other DNA
atggtgcttctatctgattactctgagcgccatcaccagcgactatgtcgtagtgggtaaagcgcttacggagttcgatccgtaagaagcatcagag

SEQ ID NO: 1182 - DNA, 97 bp, synthetic construct
  misc_feature 1..97: note = engineered ribonucleic acid scaffold (ERS) sequence
  source 1..97: mol_type = other DNA
atggtgcttctatctgattactctgagcgccatcaccagcgactatgtcgtagtgggtaaagcgctttcggacttcggtccggaagaagcatcagag

SEQ ID NO: 1183 - DNA, 101 bp, synthetic construct
  misc_feature 1..101: note = engineered ribonucleic acid scaffold (ERS) sequence
  source 1..101: mol_type = other DNA
atggtgcttctatctgattactctgagcgccatcaccagcgactatgtcgtagtgggtaaagcggcagatctgagcctccgagctctctgccgcatcagag

SEQ ID NO: 1184 - DNA, 97 bp, synthetic construct
  misc_feature 1..97: note = engineered ribonucleic acid scaffold (ERS) sequence
  source 1..97: mol_type = other DNA
atggtgcttctatctgattactctgagcgccatcaccagcgactatgtcgtagtgggtaaagcggttacggacttcggtccgtaagacgcatcagag

SEQ ID NO: 1185 - DNA, 74 bp, synthetic construct
  misc_feature 1..74: note = engineered ribonucleic acid scaffold (ERS) sequence
  source 1..74: mol_type = other DNA
atggtgcttctatctgattactctgagcgccatcaccagcgactatgtcgtagtgggtaaagctagcatcagag

SEQ ID NO: 1186 - DNA, 88 bp, synthetic construct
  misc_feature 1..88: note = engineered ribonucleic acid scaffold (ERS) sequence
  source 1..88: mol_type = other DNA
atggtgcttctatctgattactctgagcgccatcaccagcgactatgtcgtagtgggtaaagctccctattcggatggagcatcagag

SEQ ID NO: 1187 - DNA, 94 bp, synthetic construct
  misc_feature 1..94: note = engineered ribonucleic acid scaffold (ERS) sequence
  source 1..94: mol_type = other DNA
atggtgcttctatctgattactctgagcgccatcaccagcgactatgtcgtagtgggtaaagctccctcacagggatgtgagggagcatcagag

SEQ ID NO: 1188 - DNA, 93 bp, synthetic construct
  misc_feature 1..93: note = engineered ribonucleic acid scaffold (ERS) sequence
  source 1..93: mol_type = other DNA
atggtgcttctatctgattactctgagcgccatcaccagcgactatgtcgtagtgggtaaagctccctcagctgcagtgagggagcatcagag

SEQ ID NO: 1189 - DNA, 88 bp, synthetic construct
  misc_feature 1..88: note = engineered ribonucleic acid scaffold (ERS) sequence
  source 1..88: mol_type = other DNA
atggtgcttctatctgattactctgagcgccatcaccagcgactatgtcgtagtgggtaaagctccctcataggagggagcatcagag

SEQ ID NO: 1190 - DNA, 89 bp, synthetic construct
  misc_feature 1..89: note = engineered ribonucleic acid scaffold (ERS) sequence
  source 1..89: mol_type = other DNA
atggtgcttctatctgattactctgagcgccatcaccagcgactatgtcgtagtgggtaaagctccctcttcaggagggagcatcagag

SEQ ID NO: 1191 - DNA, 88 bp, synthetic construct
  misc_feature 1..88: note = engineered ribonucleic acid scaffold (ERS) sequence
  source 1..88: mol_type = other DNA
atggtgcttctatctgattactctgagcgccatcaccagcgactatgtcgtagtgggtaaagctccctcttcggagagtgcatcagag

SEQ ID NO: 1192 - DNA, 88 bp, synthetic construct
  misc_feature 1..88: note = engineered ribonucleic acid scaffold (ERS) sequence
  source 1..88: mol_type = other DNA
atggtgcttctatctgattactctgagcgccatcaccagcgactatgtcgtagtgggtaaagctccctcttcggaggaggcatcagag

SEQ ID NO: 1193 - DNA, 90 bp, synthetic construct
  misc_feature 1..90: note = engineered ribonucleic acid scaffold (ERS) sequence
  source 1..90: mol_type = other DNA
atggtgcttctatctgattactctgagcgccatcaccagcgactatgtcgtagtgggtaaagctccctcttcggagggaacgcatcagag

SEQ ID NO: 1194 - DNA, 88 bp, synthetic construct; identical to SEQ ID NO: 578
  misc_feature 1..88: note = engineered ribonucleic acid scaffold (ERS) sequence
  source 1..88: mol_type = other DNA

SEQ ID NO: 1195 - DNA, 88 bp, synthetic construct
  misc_feature 1..88: note = engineered ribonucleic acid scaffold (ERS) sequence
  source 1..88: mol_type = other DNA
atggtgcttctatctgattactctgagcgccatcaccagcgactatgtcgtagtgggtaaagctccctggaaacagggagcatcagag

SEQ ID NO: 1196 - DNA, 84 bp, synthetic construct
  misc_feature 1..84: note = engineered ribonucleic acid scaffold (ERS) sequence
  source 1..84: mol_type = other DNA
atggtgcttctatctgattactctgagcgccatcaccagcgactatgtcgtagtgggtaaagctcccttcggggagcatcagag

SEQ ID NO: 1197 - DNA, 84 bp, synthetic construct
  misc_feature 1..84: note = engineered ribonucleic acid scaffold (ERS) sequence
  source 1..84: mol_type = other DNA
atggtgcttctatctgattactctgagcgccatcaccagcgactatgtcgtagtgggtaaagctccgttcgcggagcatcagag

SEQ ID NO: 1198 - DNA, 86 bp, synthetic construct
  misc_feature 1..86: note = engineered ribonucleic acid scaffold (ERS) sequence
  source 1..86: mol_type = other DNA
atggtgcttctatctgattactctgagcgccatcaccagcgactatgtcgtagtgggtaaagctcctcttcggaggagcatcagag

SEQ ID NO: 1199 - DNA, 84 bp, synthetic construct
  misc_feature 1..84: note = engineered ribonucleic acid scaffold (ERS) sequence
  source 1..84: mol_type = other DNA
atggtgcttctatctgattactctgagcgccatcaccagcgactatgtcgtagtgggtaaagctctcttcggagagcatcagag

SEQ ID NO: 1200 - DNA, 76 bp, synthetic construct
  misc_feature 1..76: note = engineered ribonucleic acid scaffold (ERS) sequence
  source 1..76: mol_type = other DNA
atggtgcttctatctgattactctgagcgccatcaccagcgactatgtcgtagtgggtaaagctgcagcatcagag

SEQ ID NO: 1201 - DNA, 82 bp, synthetic construct
  misc_feature 1..82: note = engineered ribonucleic acid scaffold (ERS) sequence
  source 1..82: mol_type = other DNA
atggtgcttctatctgattactctgagcgccatcaccagcgactatgtcgtagtgggtaaagctgcttcggcagcatcagag

SEQ ID NO: 1202 - DNA, 88 bp, synthetic construct
  misc_feature 1..88: note = engineered ribonucleic acid scaffold (ERS) sequence
  source 1..88: mol_type = other DNA
atggtgcttctatctgattactctgagcgccatcaccagcgactatgtcgtagtgggtaaaggtccctcttcggagggaacatcagag

SEQ ID NO: 1203 - DNA, 92 bp, synthetic construct
  misc_feature 1..92: note = engineered ribonucleic acid scaffold (ERS) sequence
  source 1..92: mol_type = other DNA
atggtgcttctatctgattactctgagcgccatcaccagcgactatgtcgtagtgggtaaaggtgacggtcttcggaccgtcaccatcagag

SEQ ID NO: 1204 - DNA, 90 bp, synthetic construct
  misc_feature 1..90: note = engineered ribonucleic acid scaffold (ERS) sequence
  source 1..90: mol_type = other DNA
atggtgcttctatctgattactctgagcgccatcaccagcgactatgtcgtagtgggtaaagtctccctcttcggagggaggcatcagag

SEQ ID NO: 1205 - DNA, 92 bp, synthetic construct
  misc_feature 1..92: note = engineered ribonucleic acid scaffold (ERS) sequence
  source 1..92: mol_type = other DNA
atggtgcttctatctgattactctgagcgccatcaccagcgactatgtcgtagtgggtaaagtgcgcccgcttcggcgggcgcacatcagag

SEQ ID NO: 1206 - DNA, 92 bp, synthetic construct
  misc_feature 1..92: note = engineered ribonucleic acid scaffold (ERS) sequence
  source 1..92: mol_type = other DNA
atggtgcttctatctgattactctgagcgccatcaccagcgactatgtcgtagtgggtaaataatgaaaacttcggttttcattaatcagag

SEQ ID NO: 1207 - DNA, 92 bp, synthetic construct
  misc_feature 1..92: note = engineered ribonucleic acid scaffold (ERS) sequence
  source 1..92: mol_type = other DNA
atggtgcttctatctgattactctgagcgccatcaccagcgactatgtcgtagtgggtaaatcgtaagaacttcggttcttacgaatcagag

SEQ ID NO: 1208 - DNA, 92 bp, synthetic construct
  misc_feature 1..92: note = engineered ribonucleic acid scaffold (ERS) sequence
  source 1..92: mol_type = other DNA
atggtgcttctatctgattactctgagcgccatcaccagcgactatgtcgtagtgggtaaatggaagatgcttcggcatcttccaatcagag

SEQ ID NO: 1209 - DNA, 96 bp, synthetic construct
  misc_feature 1..96: note = engineered ribonucleic acid scaffold (ERS) sequence
  source 1..96: mol_type = other DNA
atggtgcttctatctgattactctgagcgccatcaccagcgactatgtcgtagtgggtaaagcccttacggacttcggtccgtaagggcatcagag

SEQ ID NO: 1210 - DNA, 98 bp, synthetic construct
  misc_feature 1..98: note = engineered ribonucleic acid scaffold (ERS) sequence
  source 1..98: mol_type = other DNA
atggtgcttctatctgattactctgagcgccatcaccagcgactatgtcgtagtgggtaaagcctcttacggacttcggtccgtaagaggcatcagag

SEQ ID NO: 1211 - DNA, 98 bp, synthetic construct
  misc_feature 1..98: note = engineered ribonucleic acid scaffold (ERS) sequence
  source 1..98: mol_type = other DNA
atggtgcttctatctgattactctgagcgccatcaccagcgactatgtcgtagtgggtaaagccgcttagggacttcggtccctaagaggcatcagag

SEQ ID NO: 1212 - DNA, 86 bp, synthetic construct
  misc_feature 1..86: note = engineered ribonucleic acid scaffold (ERS) sequence
  source 1..86: mol_type = other DNA
atggcgcttctatctgattactctgagcgccatcaccagcgactatgtcgtagtgggtaaactccctcttcggagggagatcagag

SEQ ID NO: 1213 - DNA, 88 bp, synthetic construct
  misc_feature 1..88: note = engineered ribonucleic acid scaffold (ERS) sequence
  source 1..88: mol_type = other DNA
atggcgcttctatctgattactctgagcgccatcaccagcgactatgtcgtagtgggtaaagcgccctcttcggagggagcatcagag

SEQ ID NO: 1214 - DNA, 98 bp, synthetic construct
  misc_feature 1..98: note = engineered ribonucleic acid scaffold (ERS) sequence
  source 1..98: mol_type = other DNA
atggcgcttctatctgattactctgagcgccatcaccagcgactatgtcgtagtgggtaaagcgccttacggacttcggtccgtaaggagcatcagag

SEQ ID NO: 1215 - DNA, 98 bp, synthetic construct
  misc_feature 1..98: note = engineered ribonucleic acid scaffold (ERS) sequence
  source 1..98: mol_type = other DNA
atggcgcttctatctgattactctgagcgccatcaccagcgactatgtcgtagtgggtaaagcgcttacggaattcgtgtccgtaagaagcatcagag

SEQ ID NO: 1216 - DNA, 99 bp, synthetic construct
  misc_feature 1..99: note = engineered ribonucleic acid scaffold (ERS) sequence
  source 1..99: mol_type = other DNA
atggcgcttctatctgattactctgagcgccatcaccagcgactatgtcgtagtgggtaaagcgcttacggacttcgcggtccgtaagaagcatcagag

SEQ ID NO: 1217 - DNA, 97 bp, synthetic construct
  misc_feature 1..97: note = engineered ribonucleic acid scaffold (ERS) sequence
  source 1..97: mol_type = other DNA
atggcgcttctatctgattactctgagcgccatcaccagcgactatgtcgtagtgggtaaagcgcttacggacttcggtccgtaagaagcatcagag

SEQ ID NO: 1218 - DNA, 97 bp, synthetic construct
  misc_feature 1..97: note = engineered ribonucleic acid scaffold (ERS) sequence
  source 1..97: mol_type = other DNA
atggcgcttctatctgattactctgagcgccatcaccagcgactatgtcgtagtgggtaaagcgcttacggacttcggtccgtaagtcgcatcagag

SEQ ID NO: 1219 - DNA, 97 bp, synthetic construct
  misc_feature 1..97: note = engineered ribonucleic acid scaffold (ERS) sequence
  source 1..97: mol_type = other DNA
atggcgcttctatctgattactctgagcgccatcaccagcgactatgtcgtagtgggtaaagcgcttacggagttcgatccgtaagaagcatcagag

SEQ ID NO: 1220 - DNA, 97 bp, synthetic construct
  misc_feature 1..97: note = engineered ribonucleic acid scaffold (ERS) sequence
  source 1..97: mol_type = other DNA
atggcgcttctatctgattactctgagcgccatcaccagcgactatgtcgtagtgggtaaagcgctttcggacttcggtccggaagaagcatcagag

SEQ ID NO: 1221 - DNA, 101 bp, synthetic construct
  misc_feature 1..101: note = engineered ribonucleic acid scaffold (ERS) sequence
  source 1..101: mol_type = other DNA
atggcgcttctatctgattactctgagcgccatcaccagcgactatgtcgtagtgggtaaagcggcagatctgagcctccgagctctctgccgcatcagag

SEQ ID NO: 1222 - DNA, 97 bp, synthetic construct
  misc_feature 1..97: note = engineered ribonucleic acid scaffold (ERS) sequence
  source 1..97: mol_type = other DNA
atggcgcttctatctgattactctgagcgccatcaccagcgactatgtcgtagtgggtaaagcggttacggacttcggtccgtaagacgcatcagag

SEQ ID NO: 1223 - DNA, 74 bp, synthetic construct
  misc_feature 1..74: note = engineered ribonucleic acid scaffold (ERS) sequence
  source 1..74: mol_type = other DNA
atggcgcttctatctgattactctgagcgccatcaccagcgactatgtcgtagtgggtaaagctagcatcagag

SEQ ID NO: 1224 - DNA, 88 bp, synthetic construct
  misc_feature 1..88: note = engineered ribonucleic acid scaffold (ERS) sequence
  source 1..88: mol_type = other DNA
atggcgcttctatctgattactctgagcgccatcaccagcgactatgtcgtagtgggtaaagctccctattcggatggagcatcagag

SEQ ID NO: 1225 - DNA, 94 bp, synthetic construct
  misc_feature 1..94: note = engineered ribonucleic acid scaffold (ERS) sequence
  source 1..94: mol_type = other DNA
atggcgcttctatctgattactctgagcgccatcaccagcgactatgtcgtagtgggtaaagctccctcacagggatgtgagggagcatcagag

SEQ ID NO: 1226 - DNA, 93 bp, synthetic construct
  misc_feature 1..93: note = engineered ribonucleic acid scaffold (ERS) sequence
  source 1..93: mol_type = other DNA
atggcgcttctatctgattactctgagcgccatcaccagcgactatgtcgtagtgggtaaagctccctcagctgcagtgagggagcatcagag

SEQ ID NO: 1227 - DNA, 88 bp, synthetic construct
  misc_feature 1..88: note = engineered ribonucleic acid scaffold (ERS) sequence
  source 1..88: mol_type = other DNA
atggcgcttctatctgattactctgagcgccatcaccagcgactatgtcgtagtgggtaaagctccctcataggagggagcatcagag

SEQ ID NO: 1228 - DNA, 89 bp, synthetic construct
  misc_feature 1..89: note = engineered ribonucleic acid scaffold (ERS) sequence
  source 1..89: mol_type = other DNA
atggcgcttctatctgattactctgagcgccatcaccagcgactatgtcgtagtgggtaaagctccctcttcaggagggagcatcagag

SEQ ID NO: 1229 - DNA, 88 bp, synthetic construct
  misc_feature 1..88: note = engineered ribonucleic acid scaffold (ERS) sequence
  source 1..88: mol_type = other DNA
atggcgcttctatctgattactctgagcgccatcaccagcgactatgtcgtagtgggtaaagctccctcttcggagagtgcatcagag

SEQ ID NO: 1230 - DNA, 88 bp, synthetic construct
  misc_feature 1..88: note = engineered ribonucleic acid scaffold (ERS) sequence
  source 1..88: mol_type = other DNA
atggcgcttctatctgattactctgagcgccatcaccagcgactatgtcgtagtgggtaaagctccctcttcggaggaggcatcagag

SEQ ID NO: 1231 - DNA, 90 bp, synthetic construct
  misc_feature 1..90: note = engineered ribonucleic acid scaffold (ERS) sequence
  source 1..90: mol_type = other DNA
atggcgcttctatctgattactctgagcgccatcaccagcgactatgtcgtagtgggtaaagctccctcttcggagggaacgcatcagag

SEQ ID NO: 1232 - DNA, 88 bp, synthetic construct; identical to SEQ ID NO: 572
  misc_feature 1..88: note = engineered ribonucleic acid scaffold (ERS) sequence
  source 1..88: mol_type = other DNA

SEQ ID NO: 1233 - DNA, 88 bp, synthetic construct
  misc_feature 1..88: note = engineered ribonucleic acid scaffold (ERS) sequence
  source 1..88: mol_type = other DNA
atggcgcttctatctgattactctgagcgccatcaccagcgactatgtcgtagtgggtaaagctccctggaaacagggagcatcagag

SEQ ID NO: 1234 - DNA, 84 bp, synthetic construct
  misc_feature 1..84: note = engineered ribonucleic acid scaffold (ERS) sequence
  source 1..84: mol_type = other DNA
atggcgcttctatctgattactctgagcgccatcaccagcgactatgtcgtagtgggtaaagctcccttcggggagcatcagag

SEQ ID NO: 1235 - DNA, 84 bp, synthetic construct
  misc_feature 1..84: note = engineered ribonucleic acid scaffold (ERS) sequence
  source 1..84: mol_type = other DNA
atggcgcttctatctgattactctgagcgccatcaccagcgactatgtcgtagtgggtaaagctccgttcgcggagcatcagag

SEQ ID NO: 1236 - DNA, 86 bp, synthetic construct
  misc_feature 1..86: note = engineered ribonucleic acid scaffold (ERS) sequence
  source 1..86: mol_type = other DNA
atggcgcttctatctgattactctgagcgccatcaccagcgactatgtcgtagtgggtaaagctcctcttcggaggagcatcagag

SEQ ID NO: 1237 - DNA, 84 bp, synthetic construct
  misc_feature 1..84: note = engineered ribonucleic acid scaffold (ERS) sequence
  source 1..84: mol_type = other DNA
atggcgcttctatctgattactctgagcgccatcaccagcgactatgtcgtagtgggtaaagctctcttcggagagcatcagag

SEQ ID NO: 1238 - DNA, 76 bp, synthetic construct
  misc_feature 1..76: note = engineered ribonucleic acid scaffold (ERS) sequence
  source 1..76: mol_type = other DNA
atggcgcttctatctgattactctgagcgccatcaccagcgactatgtcgtagtgggtaaagctgcagcatcagag

SEQ ID NO: 1239 - DNA, 82 bp, synthetic construct
  misc_feature 1..82: note = engineered ribonucleic acid scaffold (ERS) sequence
  source 1..82: mol_type = other DNA
atggcgcttctatctgattactctgagcgccatcaccagcgactatgtcgtagtgggtaaagctgcttcggcagcatcagag

SEQ ID NO: 1240 - DNA, 88 bp, synthetic construct
  misc_feature 1..88: note = engineered ribonucleic acid scaffold (ERS) sequence
  source 1..88: mol_type = other DNA
atggcgcttctatctgattactctgagcgccatcaccagcgactatgtcgtagtgggtaaaggtccctcttcggagggaacatcagag

SEQ ID NO: 1241 - DNA, 92 bp, synthetic construct
  misc_feature 1..92: note = engineered ribonucleic acid scaffold (ERS) sequence
  source 1..92: mol_type = other DNA
atggcgcttctatctgattactctgagcgccatcaccagcgactatgtcgtagtgggtaaaggtgacggtcttcggaccgtcaccatcagag

SEQ ID NO: 1242 - DNA, 90 bp, synthetic construct
  misc_feature 1..90: note = engineered ribonucleic acid scaffold (ERS) sequence
  source 1..90: mol_type = other DNA
atggcgcttctatctgattactctgagcgccatcaccagcgactatgtcgtagtgggtaaagtctccctcttcggagggaggcatcagag

SEQ ID NO: 1243 - DNA, 92 bp, synthetic construct
  misc_feature 1..92: note = engineered ribonucleic acid scaffold (ERS) sequence
  source 1..92: mol_type = other DNA
atggcgcttctatctgattactctgagcgccatcaccagcgactatgtcgtagtgggtaaagtgcgcccgcttcggcgggcgcacatcagag

SEQ ID NO: 1244 - DNA, 92 bp, synthetic construct
  misc_feature 1..92: note = engineered ribonucleic acid scaffold (ERS) sequence
  source 1..92: mol_type = other DNA
atggcgcttctatctgattactctgagcgccatcaccagcgactatgtcgtagtgggtaaataatgaaaacttcggttttcattaatcagag

SEQ ID NO: 1245 - DNA, 92 bp, synthetic construct
  misc_feature 1..92: note = engineered ribonucleic acid scaffold (ERS) sequence
  source 1..92: mol_type = other DNA
atggcgcttctatctgattactctgagcgccatcaccagcgactatgtcgtagtgggtaaatcgtaagaacttcggttcttacgaatcagag

SEQ ID NO: 1246 - DNA, 92 bp, synthetic construct
  misc_feature 1..92: note = engineered ribonucleic acid scaffold (ERS) sequence
  source 1..92: mol_type = other DNA
atggcgcttctatctgattactctgagcgccatcaccagcgactatgtcgtagtgggtaaatggaagatgcttcggcatcttccaatcagag

SEQ ID NO: 1247 - DNA, 96 bp, synthetic construct
  misc_feature 1..96: note = engineered ribonucleic acid scaffold (ERS) sequence
  source 1..96: mol_type = other DNA
atggcgcttctatctgattactctgagcgccatcaccagcgactatgtcgtagtgggtaaagcccttacggacttcggtccgtaagggcatcagag

SEQ ID NO: 1248 - DNA, 98 bp, synthetic construct
  misc_feature 1..98: note = engineered ribonucleic acid scaffold (ERS) sequence
  source 1..98: mol_type = other DNA
atggcgcttctatctgattactctgagcgccatcaccagcgactatgtcgtagtgggtaaagcctcttacggacttcggtccgtaagaggcatcagag

SEQ ID NO: 1249 - DNA, 98 bp, synthetic construct
  misc_feature 1..98: note = engineered ribonucleic acid scaffold (ERS) sequence
  source 1..98: mol_type = other DNA
atggcgcttctatctgattactctgagcgccatcaccagcgactatgtcgtagtgggtaaagccgcttagggacttcggtccctaagaggcatcagag

SEQ ID NO: 1250 - DNA, 87 bp, synthetic construct
  misc_feature 1..87: note = engineered ribonucleic acid scaffold (ERS) sequence
  source 1..87: mol_type = other DNA
aatggcgcttctatctgattactctgagcgccatcaccagcgactatgtcgtagtgggtaaactccctcttcggagggagatcagag

SEQ ID NO: 1251 - DNA, 89 bp, synthetic construct
  misc_feature 1..89: note = engineered ribonucleic acid scaffold (ERS) sequence
  source 1..89: mol_type = other DNA
aatggcgcttctatctgattactctgagcgccatcaccagcgactatgtcgtagtgggtaaagcgccctcttcggagggagcatcagag

SEQ ID NO: 1252 - DNA, 99 bp, synthetic construct
  misc_feature 1..99: note = engineered ribonucleic acid scaffold (ERS) sequence
  source 1..99: mol_type = other DNA
aatggcgcttctatctgattactctgagcgccatcaccagcgactatgtcgtagtgggtaaagcgccttacggacttcggtccgtaaggagcatcagag

SEQ ID NO: 1253 - DNA, 99 bp, synthetic construct
  misc_feature 1..99: note = engineered ribonucleic acid scaffold (ERS) sequence
  source 1..99: mol_type = other DNA
aatggcgcttctatctgattactctgagcgccatcaccagcgactatgtcgtagtgggtaaagcgcttacggaattcgtgtccgtaagaagcatcagag

SEQ ID NO: 1254 - DNA, 100 bp, synthetic construct
  misc_feature 1..100: note = engineered ribonucleic acid scaffold (ERS) sequence
  source 1..100: mol_type = other DNA
aatggcgcttctatctgattactctgagcgccatcaccagcgactatgtcgtagtgggtaaagcgcttacggacttcgcggtccgtaagaagcatcagag

SEQ ID NO: 1255 - DNA, 98 bp, synthetic construct
  misc_feature 1..98: note = engineered ribonucleic acid scaffold (ERS) sequence
  source 1..98: mol_type = other DNA
aatggcgcttctatctgattactctgagcgccatcaccagcgactatgtcgtagtgggtaaagcgcttacggacttcggtccgtaagaagcatcagag

SEQ ID NO: 1256 - DNA, 98 bp, synthetic construct
  misc_feature 1..98: note = engineered ribonucleic acid scaffold (ERS) sequence
  source 1..98: mol_type = other DNA
aatggcgcttctatctgattactctgagcgccatcaccagcgactatgtcgtagtgggtaaagcgcttacggacttcggtccgtaagtcgcatcagag

SEQ ID NO: 1257 - DNA, 98 bp, synthetic construct
  misc_feature 1..98: note = engineered ribonucleic acid scaffold (ERS) sequence
  source 1..98: mol_type = other DNA
aatggcgcttctatctgattactctgagcgccatcaccagcgactatgtcgtagtgggtaaagcgcttacggagttcgatccgtaagaagcatcagag

SEQ ID NO: 1258 - DNA, 98 bp, synthetic construct
  misc_feature 1..98: note = engineered ribonucleic acid scaffold (ERS) sequence
  source 1..98: mol_type = other DNA
aatggcgcttctatctgattactctgagcgccatcaccagcgactatgtcgtagtgggtaaagcgctttcggacttcggtccggaagaagcatcagag

SEQ ID NO: 1259 - DNA, 102 bp, synthetic construct
  misc_feature 1..102: note = engineered ribonucleic acid scaffold (ERS) sequence
  source 1..102: mol_type = other DNA
aatggcgcttctatctgattactctgagcgccatcaccagcgactatgtcgtagtgggtaaagcggcagatctgagcctccgagctctctgccgcatcagag

SEQ ID NO: 1260 - DNA, 98 bp, synthetic construct
  misc_feature 1..98: note = engineered ribonucleic acid scaffold (ERS) sequence
  source 1..98: mol_type = other DNA
aatggcgcttctatctgattactctgagcgccatcaccagcgactatgtcgtagtgggtaaagcggttacggacttcggtccgtaagacgcatcagag

SEQ ID NO: 1261 - DNA, 75 bp, synthetic construct
  misc_feature 1..75: note = engineered ribonucleic acid scaffold (ERS) sequence
  source 1..75: mol_type = other DNA
aatggcgcttctatctgattactctgagcgccatcaccagcgactatgtcgtagtgggtaaagctagcatcagag

SEQ ID NO: 1262 - DNA, 89 bp, synthetic construct
  misc_feature 1..89: note = engineered ribonucleic acid scaffold (ERS) sequence
  source 1..89: mol_type = other DNA
aatggcgcttctatctgattactctgagcgccatcaccagcgactatgtcgtagtgggtaaagctccctattcggatggagcatcagag

SEQ ID NO: 1263 - DNA, 95 bp, synthetic construct
  misc_feature 1..95: note = engineered ribonucleic acid scaffold (ERS) sequence
  source 1..95: mol_type = other DNA
aatggcgcttctatctgattactctgagcgccatcaccagcgactatgtcgtagtgggtaaagctccctcacagggatgtgagggagcatcagag

SEQ ID NO: 1264 - DNA, 94 bp, synthetic construct
  misc_feature 1..94: note = engineered ribonucleic acid scaffold (ERS) sequence
  source 1..94: mol_type = other DNA
aatggcgcttctatctgattactctgagcgccatcaccagcgactatgtcgtagtgggtaaagctccctcagctgcagtgagggagcatcagag

SEQ ID NO: 1265 - DNA, 89 bp, synthetic construct
  misc_feature 1..89: note = engineered ribonucleic acid scaffold (ERS) sequence
  source 1..89: mol_type = other DNA
aatggcgcttctatctgattactctgagcgccatcaccagcgactatgtcgtagtgggtaaagctccctcataggagggagcatcagag

SEQ ID NO: 1266 - DNA, 90 bp, synthetic construct
  misc_feature 1..90: note = engineered ribonucleic acid scaffold (ERS) sequence
  source 1..90: mol_type = other DNA
aatggcgcttctatctgattactctgagcgccatcaccagcgactatgtcgtagtgggtaaagctccctcttcaggagggagcatcagag

SEQ ID NO: 1267 - DNA, 89 bp, synthetic construct
  misc_feature 1..89: note = engineered ribonucleic acid scaffold (ERS) sequence
  source 1..89: mol_type = other DNA
aatggcgcttctatctgattactctgagcgccatcaccagcgactatgtcgtagtgggtaaagctccctcttcggagagtgcatcagag

SEQ ID NO: 1268 - DNA, 89 bp, synthetic construct
  misc_feature 1..89: note = engineered ribonucleic acid scaffold (ERS) sequence
  source 1..89: mol_type = other DNA
aatggcgcttctatctgattactctgagcgccatcaccagcgactatgtcgtagtgggtaaagctccctcttcggaggaggcatcagag

SEQ ID NO: 1269 - DNA, 91 bp, synthetic construct
  misc_feature 1..91: note = engineered ribonucleic acid scaffold (ERS) sequence
  source 1..91: mol_type = other DNA
aatggcgcttctatctgattactctgagcgccatcaccagcgactatgtcgtagtgggtaaagctccctcttcggagggaacgcatcagag

SEQ ID NO: 1270 - DNA, 89 bp, synthetic construct; identical to SEQ ID NO: 580
  misc_feature 1..89: note = engineered ribonucleic acid scaffold (ERS) sequence
  source 1..89: mol_type = other DNA

SEQ ID NO: 1271 - DNA, 89 bp, synthetic construct
  misc_feature 1..89: note = engineered ribonucleic acid scaffold (ERS) sequence
  source 1..89: mol_type = other DNA
aatggcgcttctatctgattactctgagcgccatcaccagcgactatgtcgtagtgggtaaagctccctggaaacagggagcatcagag

SEQ ID NO: 1272 - DNA, 85 bp, synthetic construct
  misc_feature 1..85: note = engineered ribonucleic acid scaffold (ERS) sequence
  source 1..85: mol_type = other DNA
aatggcgcttctatctgattactctgagcgccatcaccagcgactatgtcgtagtgggtaaagctcccttcggggagcatcagag

SEQ ID NO: 1273 - DNA, 85 bp, synthetic construct
  misc_feature 1..85: note = engineered ribonucleic acid scaffold (ERS) sequence
  source 1..85: mol_type = other DNA
aatggcgcttctatctgattactctgagcgccatcaccagcgactatgtcgtagtgggtaaagctccgttcgcggagcatcagag

SEQ ID NO: 1274 - DNA, 87 bp, synthetic construct
  misc_feature 1..87: note = engineered ribonucleic acid scaffold (ERS) sequence
  source 1..87: mol_type = other DNA
aatggcgcttctatctgattactctgagcgccatcaccagcgactatgtcgtagtgggtaaagctcctcttcggaggagcatcagag

SEQ ID NO: 1275 - DNA, 85 bp, synthetic construct
  misc_feature 1..85: note = engineered ribonucleic acid scaffold (ERS) sequence
  source 1..85: mol_type = other DNA
aatggcgcttctatctgattactctgagcgccatcaccagcgactatgtcgtagtgggtaaagctctcttcggagagcatcagag

SEQ ID NO: 1276 - DNA, 77 bp, synthetic construct
  misc_feature 1..77: note = engineered ribonucleic acid scaffold (ERS) sequence
  source 1..77: mol_type = other DNA
aatggcgcttctatctgattactctgagcgccatcaccagcgactatgtcgtagtgggtaaagctgcagcatcagag

SEQ ID NO: 1277 - DNA, 83 bp, synthetic construct
  misc_feature 1..83: note = engineered ribonucleic acid scaffold (ERS) sequence
  source 1..83: mol_type = other DNA
aatggcgcttctatctgattactctgagcgccatcaccagcgactatgtcgtagtgggtaaagctgcttcggcagcatcagag

SEQ ID NO: 1278 - DNA, 89 bp, synthetic construct
  misc_feature 1..89: note = engineered ribonucleic acid scaffold (ERS) sequence
  source 1..89: mol_type = other DNA
aatggcgcttctatctgattactctgagcgccatcaccagcgactatgtcgtagtgggtaaaggtccctcttcggagggaacatcagag

SEQ ID NO: 1279 - DNA, 93 bp, synthetic construct
  misc_feature 1..93: note = engineered ribonucleic acid scaffold (ERS) sequence
  source 1..93: mol_type = other DNA
aatggcgcttctatctgattactctgagcgccatcaccagcgactatgtcgtagtgggtaaaggtgacggtcttcggaccgtcaccatcagag

SEQ ID NO: 1280 - DNA, 91 bp, synthetic construct
  misc_feature 1..91: note = engineered ribonucleic acid scaffold (ERS) sequence
  source 1..91: mol_type = other DNA
aatggcgcttctatctgattactctgagcgccatcaccagcgactatgtcgtagtgggtaaagtctccctcttcggagggaggcatcagag

SEQ ID NO: 1281 - DNA, 93 bp, synthetic construct
  misc_feature 1..93: note = engineered ribonucleic acid scaffold (ERS) sequence
  source 1..93: mol_type = other DNA
aatggcgcttctatctgattactctgagcgccatcaccagcgactatgtcgtagtgggtaaagtgcgcccgcttcggcgggcgcacatcagag

SEQ ID NO: 1282 - DNA, 93 bp, synthetic construct
  misc_feature 1..93: note = engineered ribonucleic acid scaffold (ERS) sequence
  source 1..93: mol_type = other DNA
aatggcgcttctatctgattactctgagcgccatcaccagcgactatgtcgtagtgggtaaataatgaaaacttcggttttcattaatcagag

SEQ ID NO: 1283 - DNA, 93 bp, synthetic construct
  misc_feature 1..93: note = engineered ribonucleic acid scaffold (ERS) sequence
  source 1..93: mol_type = other DNA
aatggcgcttctatctgattactctgagcgccatcaccagcgactatgtcgtagtgggtaaatcgtaagaacttcggttcttacgaatcagag

SEQ ID NO: 1284 - DNA, 93 bp, synthetic construct
  misc_feature 1..93: note = engineered ribonucleic acid scaffold (ERS) sequence
  source 1..93: mol_type = other DNA
aatggcgcttctatctgattactctgagcgccatcaccagcgactatgtcgtagtgggtaaatggaagatgcttcggcatcttccaatcagag

SEQ ID NO: 1285 - DNA, 97 bp, synthetic construct
  misc_feature 1..97: note = engineered ribonucleic acid scaffold (ERS) sequence
  source 1..97: mol_type = other DNA
aatggcgcttctatctgattactctgagcgccatcaccagcgactatgtcgtagtgggtaaagcccttacggacttcggtccgtaagggcatcagag

SEQ ID NO: 1286 - DNA, 99 bp, synthetic construct
  misc_feature 1..99: note = engineered ribonucleic acid scaffold (ERS) sequence
  source 1..99: mol_type = other DNA
aatggcgcttctatctgattactctgagcgccatcaccagcgactatgtcgtagtgggtaaagcctcttacggacttcggtccgtaagaggcatcagag

SEQ ID NO: 1287 - DNA, 99 bp, synthetic construct
  misc_feature 1..99: note = engineered ribonucleic acid scaffold (ERS) sequence
  source 1..99: mol_type = other DNA
aatggcgcttctatctgattactctgagcgccatcaccagcgactatgtcgtagtgggtaaagccgcttagggacttcggtccctaagaggcatcagag

SEQ ID NO: 1288 - DNA, 87 bp, synthetic construct
  misc_feature 1..87: note = engineered ribonucleic acid scaffold (ERS) sequence
  source 1..87: mol_type = other DNA
agtggcgcttctatctgattactctgagcgccatcaccagcgactatgtcgtagtgggtaaactccctcttcggagggagatcagag

SEQ ID NO: 1289 - DNA, 89 bp, synthetic construct
  misc_feature 1..89: note = engineered ribonucleic acid scaffold (ERS) sequence
  source 1..89: mol_type = other DNA
agtggcgcttctatctgattactctgagcgccatcaccagcgactatgtcgtagtgggtaaagcgccctcttcggagggagcatcagag

SEQ ID NO: 1290 - DNA, 99 bp, synthetic construct
  misc_feature 1..99: note = engineered ribonucleic acid scaffold (ERS) sequence
  source 1..99: mol_type = other DNA
agtggcgcttctatctgattactctgagcgccatcaccagcgactatgtcgtagtgggtaaagcgccttacggacttcggtccgtaaggagcatcagag

SEQ ID NO: 1291 - DNA, 99 bp, synthetic construct
  misc_feature 1..99: note = engineered ribonucleic acid scaffold (ERS) sequence
  source 1..99: mol_type = other DNA
agtggcgcttctatctgattactctgagcgccatcaccagcgactatgtcgtagtgggtaaagcgcttacggaattcgtgtccgtaagaagcatcagag

SEQ ID NO: 1292 - DNA, 100 bp, synthetic construct
  misc_feature 1..100: note = engineered ribonucleic acid scaffold (ERS) sequence
  source 1..100: mol_type = other DNA
agtggcgcttctatctgattactctgagcgccatcaccagcgactatgtcgtagtgggtaaagcgcttacggacttcgcggtccgtaagaagcatcagag

SEQ ID NO: 1293 - DNA, 98 bp, synthetic construct
  misc_feature 1..98: note = engineered ribonucleic acid scaffold (ERS) sequence
  source 1..98: mol_type = other DNA
agtggcgcttctatctgattactctgagcgccatcaccagcgactatgtcgtagtgggtaaagcgcttacggacttcggtccgtaagaagcatcagag

SEQ ID NO: 1294 - DNA, 98 bp, synthetic construct
  misc_feature 1..98: note = engineered ribonucleic acid scaffold (ERS) sequence
  source 1..98: mol_type = other DNA
agtggcgcttctatctgattactctgagcgccatcaccagcgactatgtcgtagtgggtaaagcgcttacggacttcggtccgtaagtcgcatcagag

SEQ ID NO: 1295 - DNA, 98 bp, synthetic construct
  misc_feature 1..98: note = engineered ribonucleic acid scaffold (ERS) sequence
  source 1..98: mol_type = other DNA
agtggcgcttctatctgattactctgagcgccatcaccagcgactatgtcgtagtgggtaaagcgcttacggagttcgatccgtaagaagcatcagag

SEQ ID NO: 1296 - DNA, 98 bp, synthetic construct
  misc_feature 1..98: note = engineered ribonucleic acid scaffold (ERS) sequence
  source 1..98: mol_type = other DNA
agtggcgcttctatctgattactctgagcgccatcaccagcgactatgtcgtagtgggtaaagcgctttcggacttcggtccggaagaagcatcagag

SEQ ID NO: 1297 - DNA, 102 bp, synthetic construct
  misc_feature 1..102: note = engineered ribonucleic acid scaffold (ERS) sequence
  source 1..102: mol_type = other DNA
agtggcgcttctatctgattactctgagcgccatcaccagcgactatgtcgtagtgggtaaagcggcagatctgagcctccgagctctctgccgcatcagag

SEQ ID NO: 1298 - DNA, 98 bp, synthetic construct
  misc_feature 1..98: note = engineered ribonucleic acid scaffold (ERS) sequence
  source 1..98: mol_type = other DNA
agtggcgcttctatctgattactctgagcgccatcaccagcgactatgtcgtagtgggtaaagcggttacggacttcggtccgtaagacgcatcagag

SEQ ID NO: 1299 - DNA, 75 bp, synthetic construct
  misc_feature 1..75: note = engineered ribonucleic acid scaffold (ERS) sequence
  source 1..75: mol_type = other DNA
agtggcgcttctatctgattactctgagcgccatcaccagcgactatgtcgtagtgggtaaagctagcatcagag

SEQ ID NO: 1300 - DNA, 89 bp, synthetic construct
  misc_feature 1..89: note = engineered ribonucleic acid scaffold (ERS) sequence
  source 1..89: mol_type = other DNA
agtggcgcttctatctgattactctgagcgccatcaccagcgactatgtcgtagtgggtaaagctccctattcggatggagcatcagag

SEQ ID NO: 1301 - DNA, 95 bp, synthetic construct
  misc_feature 1..95: note = engineered ribonucleic acid scaffold (ERS) sequence
  source 1..95: mol_type = other DNA
agtggcgcttctatctgattactctgagcgccatcaccagcgactatgtcgtagtgggtaaagctccctcacagggatgtgagggagcatcagag

SEQ ID NO: 1302 - DNA, 94 bp, synthetic construct
  misc_feature 1..94: note = engineered ribonucleic acid scaffold (ERS) sequence
  source 1..94: mol_type = other DNA
agtggcgcttctatctgattactctgagcgccatcaccagcgactatgtcgtagtgggtaaagctccctcagctgcagtgagggagcatcagag

SEQ ID NO: 1303 - DNA, 89 bp, synthetic construct
  misc_feature 1..89: note = engineered ribonucleic acid scaffold (ERS) sequence
  source 1..89: mol_type = other DNA
agtggcgcttctatctgattactctgagcgccatcaccagcgactatgtcgtagtgggtaaagctccctcataggagggagcatcagag

SEQ ID NO: 1304 - DNA, 90 bp, synthetic construct
  misc_feature 1..90: note = engineered ribonucleic acid scaffold (ERS) sequence
  source 1..90: mol_type = other DNA
agtggcgcttctatctgattactctgagcgccatcaccagcgactatgtcgtagtgggtaaagctccctcttcaggagggagcatcagag

SEQ ID NO: 1305 - DNA, 89 bp, synthetic construct
  misc_feature 1..89: note = engineered ribonucleic acid scaffold (ERS) sequence
  source 1..89: mol_type = other DNA
agtggcgcttctatctgattactctgagcgccatcaccagcgactatgtcgtagtgggtaaagctccctcttcggagagtgcatcagag

SEQ ID NO: 1306 - DNA, 89 bp, synthetic construct
  misc_feature 1..89: note = engineered ribonucleic acid scaffold (ERS) sequence
  source 1..89: mol_type = other DNA
agtggcgcttctatctgattactctgagcgccatcaccagcgactatgtcgtagtgggtaaagctccctcttcggaggaggcatcagag

SEQ ID NO: 1307 - DNA, 91 bp, synthetic construct
  misc_feature 1..91: note = engineered ribonucleic acid scaffold (ERS) sequence
  source 1..91: mol_type = other DNA
agtggcgcttctatctgattactctgagcgccatcaccagcgactatgtcgtagtgggtaaagctccctcttcggagggaacgcatcagag

SEQ ID NO: 1308 - DNA, 89 bp, synthetic construct; identical to SEQ ID NO: 581
  misc_feature 1..89: note = engineered ribonucleic acid scaffold (ERS) sequence
  source 1..89: mol_type = other DNA

SEQ ID NO: 1309 - DNA, 89 bp, synthetic construct
  misc_feature 1..89: note = engineered ribonucleic acid scaffold (ERS) sequence
  source 1..89: mol_type = other DNA
agtggcgcttctatctgattactctgagcgccatcaccagcgactatgtcgtagtgggtaaagctccctggaaacagggagcatcagag

SEQ ID NO: 1310 - DNA, 85 bp, synthetic construct
  misc_feature 1..85: note = engineered ribonucleic acid scaffold (ERS) sequence
  source 1..85: mol_type = other DNA
agtggcgcttctatctgattactctgagcgccatcaccagcgactatgtcgtagtgggtaaagctcccttcggggagcatcagag

SEQ ID NO: 1311 - DNA, 85 bp, synthetic construct
  misc_feature 1..85: note = engineered ribonucleic acid scaffold (ERS) sequence
  source 1..85: mol_type = other DNA
agtggcgcttctatctgattactctgagcgccatcaccagcgactatgtcgtagtgggtaaagctccgttcgcggagcatcagag

SEQ ID NO: 1312 - DNA, 87 bp, synthetic construct
  misc_feature 1..87: note = engineered ribonucleic acid scaffold (ERS) sequence
  source 1..87: mol_type = other DNA
agtggcgcttctatctgattactctgagcgccatcaccagcgactatgtcgtagtgggtaaagctcctcttcggaggagcatcagag

SEQ ID NO: 1313 - DNA, 85 bp, synthetic construct
  misc_feature 1..85: note = engineered ribonucleic acid scaffold (ERS) sequence
  source 1..85: mol_type = other DNA
agtggcgcttctatctgattactctgagcgccatcaccagcgactatgtcgtagtgggtaaagctctcttcggagagcatcagag

SEQ ID NO: 1314 - DNA, 77 bp, synthetic construct
  misc_feature 1..77: note = engineered ribonucleic acid scaffold (ERS) sequence
  source 1..77: mol_type = other DNA
agtggcgcttctatctgattactctgagcgccatcaccagcgactatgtcgtagtgggtaaagctgcagcatcagag

SEQ ID NO: 1315 - DNA, 83 bp, synthetic construct
  misc_feature 1..83: note = engineered ribonucleic acid scaffold (ERS) sequence
  source 1..83: mol_type = other DNA
agtggcgcttctatctgattactctgagcgccatcaccagcgactatgtcgtagtgggtaaagctgcttcggcagcatcagag

SEQ ID NO: 1316 - DNA, 89 bp, synthetic construct
  misc_feature 1..89: note = engineered ribonucleic acid scaffold (ERS) sequence
  source 1..89: mol_type = other DNA
agtggcgcttctatctgattactctgagcgccatcaccagcgactatgtcgtagtgggtaaaggtccctcttcggagggaacatcagag

SEQ ID NO: 1317 - DNA, 93 bp, synthetic construct
  misc_feature 1..93: note = engineered ribonucleic acid scaffold (ERS) sequence
  source 1..93: mol_type = other DNA
agtggcgcttctatctgattactctgagcgccatcaccagcgactatgtcgtagtgggtaaaggtgacggtcttcggaccgtcaccatcagag

SEQ ID NO: 1318 - DNA, 91 bp, synthetic construct
  misc_feature 1..91: note = engineered ribonucleic acid scaffold (ERS) sequence
  source 1..91: mol_type = other DNA
agtggcgcttctatctgattactctgagcgccatcaccagcgactatgtcgtagtgggtaaagtctccctcttcggagggaggcatcagag

SEQ ID NO: 1319 - DNA, 93 bp, synthetic construct
  misc_feature 1..93: note = engineered ribonucleic acid scaffold (ERS) sequence
  source 1..93: mol_type = other DNA
agtggcgcttctatctgattactctgagcgccatcaccagcgactatgtcgtagtgggtaaagtgcgcccgcttcggcgggcgcacatcagag

SEQ ID NO: 1320 - DNA, 93 bp, synthetic construct
  misc_feature 1..93: note = engineered ribonucleic acid scaffold (ERS) sequence
  source 1..93: mol_type = other DNA
agtggcgcttctatctgattactctgagcgccatcaccagcgactatgtcgtagtgggtaaataatgaaaacttcggttttcattaatcagag

SEQ ID NO: 1321 - DNA, 93 bp, synthetic construct
  misc_feature 1..93: note = engineered ribonucleic acid scaffold (ERS) sequence
  source 1..93: mol_type = other DNA
agtggcgcttctatctgattactctgagcgccatcaccagcgactatgtcgtagtgggtaaatcgtaagaacttcggttcttacgaatcagag

SEQ ID NO: 1322 - DNA, 93 bp, synthetic construct
  misc_feature 1..93: note = engineered ribonucleic acid scaffold (ERS) sequence
  source 1..93: mol_type = other DNA
agtggcgcttctatctgattactctgagcgccatcaccagcgactatgtcgtagtgggtaaatggaagatgcttcggcatcttccaatcagag

SEQ ID NO: 1323 - DNA, 97 bp, synthetic construct
  misc_feature 1..97: note = engineered ribonucleic acid scaffold (ERS) sequence
  source 1..97: mol_type = other DNA
agtggcgcttctatctgattactctgagcgccatcaccagcgactatgtcgtagtgggtaaagcccttacggacttcggtccgtaagggcatcagag

SEQ ID NO: 1324 - DNA, 99 bp, synthetic construct
  misc_feature 1..99: note = engineered ribonucleic acid scaffold (ERS) sequence
  source 1..99: mol_type = other DNA
agtggcgcttctatctgattactctgagcgccatcaccagcgactatgtcgtagtgggtaaagcctcttacggacttcggtccgtaagaggcatcagag

SEQ ID NO: 1325 - DNA, 99 bp, synthetic construct
  misc_feature 1..99: note = engineered ribonucleic acid scaffold (ERS) sequence
  source 1..99: mol_type = other DNA
agtggcgcttctatctgattactctgagcgccatcaccagcgactatgtcgtagtgggtaaagccgcttagggacttcggtccctaagaggcatcagag

SEQ ID NO: 1326 - DNA, 86 bp, synthetic construct
  misc_feature 1..86: note = engineered ribonucleic acid scaffold (ERS) sequence
  source 1..86: mol_type = other DNA
acggcgcttctatctgattactctgagcgccatcaccagcgactatgtcgtagtgggtaaactccctcttcggagggagatcagag

SEQ ID NO: 1327 - DNA, 88 bp, synthetic construct
  misc_feature 1..88: note = engineered ribonucleic acid scaffold (ERS) sequence
  source 1..88: mol_type = other DNA
acggcgcttctatctgattactctgagcgccatcaccagcgactatgtcgtagtgggtaaagcgccctcttcggagggagcatcagag

SEQ ID NO: 1328 - DNA, 98 bp, synthetic construct
  misc_feature 1..98: note = engineered ribonucleic acid scaffold (ERS) sequence
  source 1..98: mol_type = other DNA
acggcgcttctatctgattactctgagcgccatcaccagcgactatgtcgtagtgggtaaagcgccttacggacttcggtccgtaaggagcatcagag

SEQ ID NO: 1329 - DNA, 98 bp, synthetic construct
  misc_feature 1..98: note = engineered ribonucleic acid scaffold (ERS) sequence
  source 1..98: mol_type = other DNA
acggcgcttctatctgattactctgagcgccatcaccagcgactatgtcgtagtgggtaaagcgcttacggaattcgtgtccgtaagaagcatcagag

SEQ ID NO: 1330 - DNA, 99 bp, synthetic construct
  misc_feature 1..99: note = engineered ribonucleic acid scaffold (ERS) sequence
  source 1..99: mol_type = other DNA
acggcgcttctatctgattactctgagcgccatcaccagcgactatgtcgtagtgggtaaagcgcttacggacttcgcggtccgtaagaagcatcagag

SEQ ID NO: 1331 - DNA, 97 bp, synthetic construct
  misc_feature 1..97: note = engineered ribonucleic acid scaffold (ERS) sequence
  source 1..97: mol_type = other DNA
acggcgcttctatctgattactctgagcgccatcaccagcgactatgtcgtagtgggtaaagcgcttacggacttcggtccgtaagaagcatcagag

SEQ ID NO: 1332 - DNA, 97 bp, synthetic construct
  misc_feature 1..97: note = engineered ribonucleic acid scaffold (ERS) sequence
  source 1..97: mol_type = other DNA
acggcgcttctatctgattactctgagcgccatcaccagcgactatgtcgtagtgggtaaagcgcttacggacttcggtccgtaagtcgcatcagag

SEQ ID NO: 1333 - DNA, 97 bp, synthetic construct
  misc_feature 1..97: note = engineered ribonucleic acid scaffold (ERS) sequence
  source 1..97: mol_type = other DNA
acggcgcttctatctgattactctgagcgccatcaccagcgactatgtcgtagtgggtaaagcgcttacggagttcgatccgtaagaagcatcagag

SEQ ID NO: 1334 - DNA, 97 bp, synthetic construct
  misc_feature 1..97: note = engineered ribonucleic acid scaffold (ERS) sequence
  source 1..97: mol_type = other DNA
acggcgcttctatctgattactctgagcgccatcaccagcgactatgtcgtagtgggtaaagcgctttcggacttcggtccggaagaagcatcagag

SEQ ID NO: 1335 - DNA, 101 bp, synthetic construct
  misc_feature 1..101: note = engineered ribonucleic acid scaffold (ERS) sequence
  source 1..101: mol_type = other DNA
acggcgcttctatctgattactctgagcgccatcaccagcgactatgtcgtagtgggtaaagcggcagatctgagcctccgagctctctgccgcatcagag

SEQ ID NO: 1336 - DNA, 97 bp, synthetic construct
  misc_feature 1..97: note = engineered ribonucleic acid scaffold (ERS) sequence
  source 1..97: mol_type = other DNA
acggcgcttctatctgattactctgagcgccatcaccagcgactatgtcgtagtgggtaaagcggttacggacttcggtccgtaagacgcatcagag

SEQ ID NO: 1337 - DNA, 74 bp, synthetic construct
  misc_feature 1..74: note = engineered ribonucleic acid scaffold (ERS) sequence
  source 1..74: mol_type = other DNA
acggcgcttctatctgattactctgagcgccatcaccagcgactatgtcgtagtgggtaaagctagcatcagag

SEQ ID NO: 1338 - DNA, 88 bp, synthetic construct
  misc_feature 1..88: note = engineered ribonucleic acid scaffold (ERS) sequence
  source 1..88: mol_type = other DNA
acggcgcttctatctgattactctgagcgccatcaccagcgactatgtcgtagtgggtaaagctccctattcggatggagcatcagag

SEQ ID NO: 1339 - DNA, 94 bp, synthetic construct
  misc_feature 1..94: note = engineered ribonucleic acid scaffold (ERS) sequence
  source 1..94: mol_type = other DNA
acggcgcttctatctgattactctgagcgccatcaccagcgactatgtcgtagtgggtaaagctccctcacagggatgtgagggagcatcagag

SEQ ID NO: 1340 - DNA, 93 bp, synthetic construct
  misc_feature 1..93: note = engineered ribonucleic acid scaffold (ERS) sequence
  source 1..93: mol_type = other DNA
acggcgcttctatctgattactctgagcgccatcaccagcgactatgtcgtagtgggtaaagctccctcagctgcagtgagggagcatcagag

SEQ ID NO: 1341 - DNA, 88 bp, synthetic construct
  misc_feature 1..88: note = engineered ribonucleic acid scaffold (ERS) sequence
  source 1..88: mol_type = other DNA
acggcgcttctatctgattactctgagcgccatcaccagcgactatgtcgtagtgggtaaagctccctcataggagggagcatcagag

SEQ ID NO: 1342 - DNA, 89 bp, synthetic construct
  misc_feature 1..89: note = engineered ribonucleic acid scaffold (ERS) sequence
  source 1..89: mol_type = other DNA
acggcgcttctatctgattactctgagcgccatcaccagcgactatgtcgtagtgggtaaagctccctcttcaggagggagcatcagag

SEQ ID NO: 1343 - DNA, 88 bp, synthetic construct
  misc_feature 1..88: note = engineered ribonucleic acid scaffold (ERS) sequence
  source 1..88: mol_type = other DNA
acggcgcttctatctgattactctgagcgccatcaccagcgactatgtcgtagtgggtaaagctccctcttcggagagtgcatcagag

SEQ ID NO: 1344 - DNA, 88 bp, synthetic construct
  misc_feature 1..88: note = engineered ribonucleic acid scaffold (ERS) sequence
  source 1..88: mol_type = other DNA
acggcgcttctatctgattactctgagcgccatcaccagcgactatgtcgtagtgggtaaagctccctcttcggaggaggcatcagag

SEQ ID NO: 1345 - DNA, 90 bp, synthetic construct
  misc_feature 1..90: note = engineered ribonucleic acid scaffold (ERS) sequence
  source 1..90: mol_type = other DNA
acggcgcttctatctgattactctgagcgccatcaccagcgactatgtcgtagtgggtaaagctccctcttcggagggaacgcatcagag

SEQ ID NO: 1346 - DNA, 88 bp, synthetic construct; identical to SEQ ID NO: 574
  misc_feature 1..88: note = engineered ribonucleic acid scaffold (ERS) sequence
  source 1..88: mol_type = other DNA

SEQ ID NO: 1347 - DNA, 88 bp, synthetic construct
  misc_feature 1..88: note = engineered ribonucleic acid scaffold (ERS) sequence
  source 1..88: mol_type = other DNA
acggcgcttctatctgattactctgagcgccatcaccagcgactatgtcgtagtgggtaaagctccctggaaacagggagcatcagag

SEQ ID NO: 1348 - DNA, 84 bp, synthetic construct
  misc_feature 1..84: note = engineered ribonucleic acid scaffold (ERS) sequence
  source 1..84: mol_type = other DNA
acggcgcttctatctgattactctgagcgccatcaccagcgactatgtcgtagtgggtaaagctcccttcggggagcatcagag

SEQ ID NO: 1349 - DNA, 84 bp, synthetic construct
  misc_feature 1..84: note = engineered ribonucleic acid scaffold (ERS) sequence
  source 1..84: mol_type = other DNA
acggcgcttctatctgattactctgagcgccatcaccagcgactatgtcgtagtgggtaaagctccgttcgcggagcatcagag

SEQ ID NO: 1350 - DNA, 86 bp, synthetic construct
  misc_feature 1..86: note = engineered ribonucleic acid scaffold (ERS) sequence
  source 1..86: mol_type = other DNA
acggcgcttctatctgattactctgagcgccatcaccagcgactatgtcgtagtgggtaaagctcctcttcggaggagcatcagag

SEQ ID NO: 1351 - DNA, 84 bp, synthetic construct
  misc_feature 1..84: note = engineered ribonucleic acid scaffold (ERS) sequence
  source 1..84: mol_type = other DNA
acggcgcttctatctgattactctgagcgccatcaccagcgactatgtcgtagtgggtaaagctctcttcggagagcatcagag

SEQ ID NO: 1352 - DNA, 76 bp, synthetic construct
  misc_feature 1..76: note = engineered ribonucleic acid scaffold (ERS) sequence
  source 1..76: mol_type = other DNA
acggcgcttctatctgattactctgagcgccatcaccagcgactatgtcgtagtgggtaaagctgcagcatcagag

SEQ ID NO: 1353 - DNA, 82 bp, synthetic construct
  misc_feature 1..82: note = engineered ribonucleic acid scaffold (ERS) sequence
  source 1..82: mol_type = other DNA
acggcgcttctatctgattactctgagcgccatcaccagcgactatgtcgtagtgggtaaagctgcttcggcagcatcagag

SEQ ID NO: 1354 - DNA, 88 bp, synthetic construct
  misc_feature 1..88: note = engineered ribonucleic acid scaffold (ERS) sequence
  source 1..88: mol_type = other DNA
acggcgcttctatctgattactctgagcgccatcaccagcgactatgtcgtagtgggtaaaggtccctcttcggagggaacatcagag

SEQ ID NO: 1355 - DNA, 92 bp, synthetic construct
  misc_feature 1..92: note = engineered ribonucleic acid scaffold (ERS) sequence
  source 1..92: mol_type = other DNA
acggcgcttctatctgattactctgagcgccatcaccagcgactatgtcgtagtgggtaaaggtgacggtcttcggaccgtcaccatcagag

SEQ ID NO: 1356 - DNA, 90 bp, synthetic construct
  misc_feature 1..90: note = engineered ribonucleic acid scaffold (ERS) sequence
  source 1..90: mol_type = other DNA
acggcgcttctatctgattactctgagcgccatcaccagcgactatgtcgtagtgggtaaagtctccctcttcggagggaggcatcagag

SEQ ID NO: 1357 - DNA, 92 bp, synthetic construct
  misc_feature 1..92: note = engineered ribonucleic acid scaffold (ERS) sequence
  source 1..92: mol_type = other DNA
acggcgcttctatctgattactctgagcgccatcaccagcgactatgtcgtagtgggtaaagtgcgcccgcttcggcgggcgcacatcagag

SEQ ID NO: 1358 - DNA, 92 bp, synthetic construct
  misc_feature 1..92: note = engineered ribonucleic acid scaffold (ERS) sequence
  source 1..92: mol_type = other DNA
acggcgcttctatctgattactctgagcgccatcaccagcgactatgtcgtagtgggtaaataatgaaaacttcggttttcattaatcagag

SEQ ID NO: 1359 - DNA, 92 bp, synthetic construct
  misc_feature 1..92: note = engineered ribonucleic acid scaffold (ERS) sequence
  source 1..92: mol_type = other DNA
acggcgcttctatctgattactctgagcgccatcaccagcgactatgtcgtagtgggtaaatcgtaagaacttcggttcttacgaatcagag

SEQ ID NO: 1360 - DNA, 92 bp, synthetic construct
  misc_feature 1..92: note = engineered ribonucleic acid scaffold (ERS) sequence
  source 1..92: mol_type = other DNA
acggcgcttctatctgattactctgagcgccatcaccagcgactatgtcgtagtgggtaaatggaagatgcttcggcatcttccaatcagag

SEQ ID NO: 1361 - DNA, 96 bp, synthetic construct
  misc_feature 1..96: note = engineered ribonucleic acid scaffold (ERS) sequence
  source 1..96: mol_type = other DNA
acggcgcttctatctgattactctgagcgccatcaccagcgactatgtcgtagtgggtaaagcccttacggacttcggtccgtaagggcatcagag

SEQ ID NO: 1362 - DNA, 98 bp, synthetic construct
  misc_feature 1..98: note = engineered ribonucleic acid scaffold (ERS) sequence
  source 1..98: mol_type = other DNA
acggcgcttctatctgattactctgagcgccatcaccagcgactatgtcgtagtgggtaaagcctcttacggacttcggtccgtaagaggcatcagag

SEQ ID NO: 1363 - DNA, 98 bp, synthetic construct
  misc_feature 1..98: note = engineered ribonucleic acid scaffold (ERS) sequence
  source 1..98: mol_type = other DNA
acggcgcttctatctgattactctgagcgccatcaccagcgactatgtcgtagtgggtaaagccgcttagggacttcggtccctaagaggcatcagag

SEQ ID NO: 1364 - DNA, 87 bp, synthetic construct
  misc_feature 1..87: note = engineered ribonucleic acid scaffold (ERS) sequence
  source 1..87: mol_type = other DNA
acaggcgcttctatctgattactctgagcgccatcaccagcgactatgtcgtagtgggtaaactccctcttcggagggagatcagag

SEQ ID NO: 1365 - DNA, 89 bp, synthetic construct
  misc_feature 1..89: note = engineered ribonucleic acid scaffold (ERS) sequence
  source 1..89: mol_type = other DNA
acaggcgcttctatctgattactctgagcgccatcaccagcgactatgtcgtagtgggtaaagcgccctcttcggagggagcatcagag

SEQ ID NO: 1366 - DNA, 99 bp, synthetic construct
  misc_feature 1..99: note = engineered ribonucleic acid scaffold (ERS) sequence
  source 1..99: mol_type = other DNA
acaggcgcttctatctgattactctgagcgccatcaccagcgactatgtcgtagtgggtaaagcgccttacggacttcggtccgtaaggagcatcagag

SEQ ID NO: 1367 - DNA, 99 bp, synthetic construct
  misc_feature 1..99: note = engineered ribonucleic acid scaffold (ERS) sequence
  source 1..99: mol_type = other DNA
acaggcgcttctatctgattactctgagcgccatcaccagcgactatgtcgtagtgggtaaagcgcttacggaattcgtgtccgtaagaagcatcagag

SEQ ID NO: 1368 - DNA, 100 bp, synthetic construct
  misc_feature 1..100: note = engineered ribonucleic acid scaffold (ERS) sequence
  source 1..100: mol_type = other DNA
acaggcgcttctatctgattactctgagcgccatcaccagcgactatgtcgtagtgggtaaagcgcttacggacttcgcggtccgtaagaagcatcagag

SEQ ID NO: 1369 - DNA, 98 bp, synthetic construct
  misc_feature 1..98: note = engineered ribonucleic acid scaffold (ERS) sequence
  source 1..98: mol_type = other DNA
acaggcgcttctatctgattactctgagcgccatcaccagcgactatgtcgtagtgggtaaagcgcttacggacttcggtccgtaagaagcatcagag

SEQ ID NO: 1370 - DNA, 98 bp, synthetic construct
  misc_feature 1..98: note = engineered ribonucleic acid scaffold (ERS) sequence
  source 1..98: mol_type = other DNA
acaggcgcttctatctgattactctgagcgccatcaccagcgactatgtcgtagtgggtaaagcgcttacggacttcggtccgtaagtcgcatcagag

SEQ ID NO: 1371 - DNA, 98 bp, synthetic construct
  misc_feature 1..98: note = engineered ribonucleic acid scaffold (ERS) sequence
  source 1..98: mol_type = other DNA
acaggcgcttctatctgattactctgagcgccatcaccagcgactatgtcgtagtgggtaaagcgcttacggagttcgatccgtaagaagcatcagag

SEQ ID NO: 1372 - DNA, 98 bp, synthetic construct
  misc_feature 1..98: note = engineered ribonucleic acid scaffold (ERS) sequence
  source 1..98: mol_type = other DNA
acaggcgcttctatctgattactctgagcgccatcaccagcgactatgtcgtagtgggtaaagcgctttcggacttcggtccggaagaagcatcagag

SEQ ID NO: 1373 - DNA, 102 bp, synthetic construct
  misc_feature 1..102: note = engineered ribonucleic acid scaffold (ERS) sequence
  source 1..102: mol_type = other DNA
acaggcgcttctatctgattactctgagcgccatcaccagcgactatgtcgtagtgggtaaagcggcagatctgagcctccgagctctctgccgcatcagag

SEQ ID NO: 1374 - DNA, 98 bp, synthetic construct
  misc_feature 1..98: note = engineered ribonucleic acid scaffold (ERS) sequence
  source 1..98: mol_type = other DNA
acaggcgcttctatctgattactctgagcgccatcaccagcgactatgtcgtagtgggtaaagcggttacggacttcggtccgtaagacgcatcagag

SEQ ID NO: 1375 - DNA, 75 bp, synthetic construct
  misc_feature 1..75: note = engineered ribonucleic acid scaffold (ERS) sequence
  source 1..75: mol_type = other DNA
acaggcgcttctatctgattactctgagcgccatcaccagcgactatgtcgtagtgggtaaagctagcatcagag

SEQ ID NO: 1376 - DNA, 89 bp, synthetic construct
  misc_feature 1..89: note = engineered ribonucleic acid scaffold (ERS) sequence
  source 1..89: mol_type = other DNA
acaggcgcttctatctgattactctgagcgccatcaccagcgactatgtcgtagtgggtaaagctccctattcggatggagcatcagag

SEQ ID NO: 1377 - DNA, 95 bp, synthetic construct
  misc_feature 1..95: note = engineered ribonucleic acid scaffold (ERS) sequence
  source 1..95: mol_type = other DNA
acaggcgcttctatctgattactctgagcgccatcaccagcgactatgtcgtagtgggtaaagctccctcacagggatgtgagggagcatcagag

SEQ ID NO: 1378 - DNA, 94 bp, synthetic construct
  misc_feature 1..94: note = engineered ribonucleic acid scaffold (ERS) sequence
  source 1..94: mol_type = other DNA
acaggcgcttctatctgattactctgagcgccatcaccagcgactatgtcgtagtgggtaaagctccctcagctgcagtgagggagcatcagag

SEQ ID NO: 1379 - DNA, 89 bp, synthetic construct
  misc_feature 1..89: note = engineered ribonucleic acid scaffold (ERS) sequence
  source 1..89: mol_type = other DNA
acaggcgcttctatctgattactctgagcgccatcaccagcgactatgtcgtagtgggtaaagctccctcataggagggagcatcagag

SEQ ID NO: 1380 - DNA, 90 bp, synthetic construct
  misc_feature 1..90: note = engineered ribonucleic acid scaffold (ERS) sequence
  source 1..90: mol_type = other DNA
acaggcgcttctatctgattactctgagcgccatcaccagcgactatgtcgtagtgggtaaagctccctcttcaggagggagcatcagag

SEQ ID NO: 1381 - DNA, 89 bp, synthetic construct
  misc_feature 1..89: note = engineered ribonucleic acid scaffold (ERS) sequence
  source 1..89: mol_type = other DNA
acaggcgcttctatctgattactctgagcgccatcaccagcgactatgtcgtagtgggtaaagctccctcttcggagagtgcatcagag

SEQ ID NO: 1382 - DNA, 89 bp, synthetic construct
  misc_feature 1..89: note = engineered ribonucleic acid scaffold (ERS) sequence
  source 1..89: mol_type = other DNA
acaggcgcttctatctgattactctgagcgccatcaccagcgactatgtcgtagtgggtaaagctccctcttcggaggaggcatcagag

SEQ ID NO: 1383 - DNA, 91 bp, synthetic construct
  misc_feature 1..91: note = engineered ribonucleic acid scaffold (ERS) sequence
  source 1..91: mol_type = other DNA
acaggcgcttctatctgattactctgagcgccatcaccagcgactatgtcgtagtgggtaaagctccctcttcggagggaacgcatcagag

SEQ ID NO: 1384 - DNA, 89 bp, synthetic construct; identical to SEQ ID NO: 582
  misc_feature 1..89: note = engineered ribonucleic acid scaffold (ERS) sequence
  source 1..89: mol_type = other DNA

SEQ ID NO: 1385 - DNA, 89 bp, synthetic construct
  misc_feature 1..89: note = engineered ribonucleic acid scaffold (ERS) sequence
  source 1..89: mol_type = other DNA
acaggcgcttctatctgattactctgagcgccatcaccagcgactatgtcgtagtgggtaaagctccctggaaacagggagcatcagag

SEQ ID NO: 1386 - DNA, 85 bp, synthetic construct
  misc_feature 1..85: note = engineered ribonucleic acid scaffold (ERS) sequence
  source 1..85: mol_type = other DNA
acaggcgcttctatctgattactctgagcgccatcaccagcgactatgtcgtagtgggtaaagctcccttcggggagcatcagag

SEQ ID NO: 1387 - DNA, 85 bp, synthetic construct
  misc_feature 1..85: note = engineered ribonucleic acid scaffold (ERS) sequence
  source 1..85: mol_type = other DNA
acaggcgcttctatctgattactctgagcgccatcaccagcgactatgtcgtagtgggtaaagctccgttcgcggagcatcagag

SEQ ID NO: 1388 - DNA, 87 bp, synthetic construct
  misc_feature 1..87: note = engineered ribonucleic acid scaffold (ERS) sequence
  source 1..87: mol_type = other DNA
acaggcgcttctatctgattactctgagcgccatcaccagcgactatgtcgtagtgggtaaagctcctcttcggaggagcatcagag

SEQ ID NO: 1389 - DNA, 85 bp, synthetic construct
  misc_feature 1..85: note = engineered ribonucleic acid scaffold (ERS) sequence
  source 1..85: mol_type = other DNA
acaggcgcttctatctgattactctgagcgccatcaccagcgactatgtcgtagtgggtaaagctctcttcggagagcatcagag

SEQ ID NO: 1390 - DNA, 77 bp, synthetic construct
  misc_feature 1..77: note = engineered ribonucleic acid scaffold (ERS) sequence
  source 1..77: mol_type = other DNA
acaggcgcttctatctgattactctgagcgccatcaccagcgactatgtcgtagtgggtaaagctgcagcatcagag

SEQ ID NO: 1391 - DNA, 83 bp, synthetic construct
  misc_feature 1..83: note = engineered ribonucleic acid scaffold (ERS) sequence
  source 1..83: mol_type = other DNA
acaggcgcttctatctgattactctgagcgccatcaccagcgactatgtcgtagtgggtaaagctgcttcggcagcatcagag

SEQ ID NO: 1392 - DNA, 89 bp, synthetic construct
  misc_feature 1..89: note = engineered ribonucleic acid scaffold (ERS) sequence
  source 1..89: mol_type = other DNA
acaggcgcttctatctgattactctgagcgccatcaccagcgactatgtcgtagtgggtaaaggtccctcttcggagggaacatcagag

SEQ ID NO: 1393 - DNA, 93 bp, synthetic construct
  misc_feature 1..93: note = engineered ribonucleic acid scaffold (ERS) sequence
  source 1..93: mol_type = other DNA
acaggcgcttctatctgattactctgagcgccatcaccagcgactatgtcgtagtgggtaaaggtgacggtcttcggaccgtcaccatcagag

SEQ ID NO: 1394 - DNA, 91 bp, synthetic construct
  misc_feature 1..91: note = engineered ribonucleic acid scaffold (ERS) sequence
  source 1..91: mol_type = other DNA
acaggcgcttctatctgattactctgagcgccatcaccagcgactatgtcgtagtgggtaaagtctccctcttcggagggaggcatcagag

SEQ ID NO: 1395 - DNA, 93 bp, synthetic construct
  misc_feature 1..93: note = engineered ribonucleic acid scaffold (ERS) sequence
  source 1..93: mol_type = other DNA
acaggcgcttctatctgattactctgagcgccatcaccagcgactatgtcgtagtgggtaaagtgcgcccgcttcggcgggcgcacatcagag

SEQ ID NO: 1396 - DNA, 93 bp, synthetic construct
  misc_feature 1..93: note = engineered ribonucleic acid scaffold (ERS) sequence
  source 1..93: mol_type = other DNA
acaggcgcttctatctgattactctgagcgccatcaccagcgactatgtcgtagtgggtaaataatgaaaacttcggttttcattaatcagag

SEQ ID NO: 1397 - DNA, 93 bp, synthetic construct
  misc_feature 1..93: note = engineered ribonucleic acid scaffold (ERS) sequence
  source 1..93: mol_type = other DNA
acaggcgcttctatctgattactctgagcgccatcaccagcgactatgtcgtagtgggtaaatcgtaagaacttcggttcttacgaatcagag

SEQ ID NO: 1398 - DNA, 93 bp, synthetic construct
  misc_feature 1..93: note = engineered ribonucleic acid scaffold (ERS) sequence
  source 1..93: mol_type = other DNA
acaggcgcttctatctgattactctgagcgccatcaccagcgactatgtcgtagtgggtaaatggaagatgcttcggcatcttccaatcagag

SEQ ID NO: 1399 - DNA, 97 bp, synthetic construct
  misc_feature 1..97: note = engineered ribonucleic acid scaffold (ERS) sequence
  source 1..97: mol_type = other DNA
acaggcgcttctatctgattactctgagcgccatcaccagcgactatgtcgtagtgggtaaagcccttacggacttcggtccgtaagggcatcagag

SEQ ID NO: 1400 - DNA, 99 bp, synthetic construct
  misc_feature 1..99: note = engineered ribonucleic acid scaffold (ERS) sequence
  source 1..99: mol_type = other DNA
acaggcgcttctatctgattactctgagcgccatcaccagcgactatgtcgtagtgggtaaagcctcttacggacttcggtccgtaagaggcatcagag

SEQ ID NO: 1401 - DNA, 99 bp, synthetic construct
  misc_feature 1..99: note = engineered ribonucleic acid scaffold (ERS) sequence
  source 1..99: mol_type = other DNA
acaggcgcttctatctgattactctgagcgccatcaccagcgactatgtcgtagtgggtaaagccgcttagggacttcggtccctaagaggcatcagag

SEQ ID NO: 1402 - DNA, 87 bp, synthetic construct
  misc_feature 1..87: note = engineered ribonucleic acid scaffold (ERS) sequence
  source 1..87: mol_type = other DNA
acgggcgcttctatctgattactctgagcgccatcaccagcgactatgtcgtagtgggtaaactccctcttcggagggagatcagag

SEQ ID NO: 1403 - DNA, 89 bp, synthetic construct
  misc_feature 1..89: note = engineered ribonucleic acid scaffold (ERS) sequence
  source 1..89: mol_type = other DNA
acgggcgcttctatctgattactctgagcgccatcaccagcgactatgtcgtagtgggtaaagcgccctcttcggagggagcatcagag

SEQ ID NO: 1404 - DNA, 99 bp, synthetic construct
  misc_feature 1..99: note = engineered ribonucleic acid scaffold (ERS) sequence
  source 1..99: mol_type = other DNA
acgggcgcttctatctgattactctgagcgccatcaccagcgactatgtcgtagtgggtaaagcgccttacggacttcggtccgtaaggagcatcagag

SEQ ID NO: 1405 - DNA, 99 bp, synthetic construct
  misc_feature 1..99: note = engineered ribonucleic acid scaffold (ERS) sequence
  source 1..99: mol_type = other DNA
acgggcgcttctatctgattactctgagcgccatcaccagcgactatgtcgtagtgggtaaagcgcttacggaattcgtgtccgtaagaagcatcagag

SEQ ID NO: 1406 - DNA, 100 bp, synthetic construct
  misc_feature 1..100: note = engineered ribonucleic acid scaffold (ERS) sequence
  source 1..100: mol_type = other DNA
acgggcgcttctatctgattactctgagcgccatcaccagcgactatgtcgtagtgggtaaagcgcttacggacttcgcggtccgtaagaagcatcagag

SEQ ID NO: 1407 - DNA, 98 bp, synthetic construct
  misc_feature 1..98: note = engineered ribonucleic acid scaffold (ERS) sequence
  source 1..98: mol_type = other DNA
acgggcgcttctatctgattactctgagcgccatcaccagcgactatgtcgtagtgggtaaagcgcttacggacttcggtccgtaagaagcatcagag

SEQ ID NO: 1408 - DNA, 98 bp, synthetic construct
  misc_feature 1..98: note = engineered ribonucleic acid scaffold (ERS) sequence
  source 1..98: mol_type = other DNA
acgggcgcttctatctgattactctgagcgccatcaccagcgactatgtcgtagtgggtaaagcgcttacggacttcggtccgtaagtcgcatcagag

SEQ ID NO: 1409 - DNA, 98 bp, synthetic construct
  misc_feature 1..98: note = engineered ribonucleic acid scaffold (ERS) sequence
  source 1..98: mol_type = other DNA
acgggcgcttctatctgattactctgagcgccatcaccagcgactatgtcgtagtgggtaaagcgcttacggagttcgatccgtaagaagcatcagag

SEQ ID NO: 1410 - DNA, 98 bp, synthetic construct
  misc_feature 1..98: note = engineered ribonucleic acid scaffold (ERS) sequence
  source 1..98: mol_type = other DNA
acgggcgcttctatctgattactctgagcgccatcaccagcgactatgtcgtagtgggtaaagcgctttcggacttcggtccggaagaagcatcagag

SEQ ID NO: 1411 - DNA, 102 bp, synthetic construct
  misc_feature 1..102: note = engineered ribonucleic acid scaffold (ERS) sequence
  source 1..102: mol_type = other DNA
acgggcgcttctatctgattactctgagcgccatcaccagcgactatgtcgtagtgggtaaagcggcagatctgagcctccgagctctctgccgcatcagag

SEQ ID NO: 1412 - DNA, 98 bp, synthetic construct
  misc_feature 1..98: note = engineered ribonucleic acid scaffold (ERS) sequence
  source 1..98: mol_type = other DNA
acgggcgcttctatctgattactctgagcgccatcaccagcgactatgtcgtagtgggtaaagcggttacggacttcggtccgtaagacgcatcagag

SEQ ID NO: 1413 - DNA, 75 bp, synthetic construct
  misc_feature 1..75: note = engineered ribonucleic acid scaffold (ERS) sequence
  source 1..75: mol_type = other DNA
acgggcgcttctatctgattactctgagcgccatcaccagcgactatgtcgtagtgggtaaagctagcatcagag

SEQ ID NO: 1414 - DNA, 89 bp, synthetic construct
  misc_feature 1..89: note = engineered ribonucleic acid scaffold (ERS) sequence
  source 1..89: mol_type = other DNA
acgggcgcttctatctgattactctgagcgccatcaccagcgactatgtcgtagtgggtaaagctccctattcggatggagcatcagag

SEQ ID NO: 1415 - DNA, 95 bp, synthetic construct
  misc_feature 1..95: note = engineered ribonucleic acid scaffold (ERS) sequence
  source 1..95: mol_type = other DNA
acgggcgcttctatctgattactctgagcgccatcaccagcgactatgtcgtagtgggtaaagctccctcacagggatgtgagggagcatcagag

SEQ ID NO: 1416 - DNA, 94 bp, synthetic construct
  misc_feature 1..94: note = engineered ribonucleic acid scaffold (ERS) sequence
  source 1..94: mol_type = other DNA
acgggcgcttctatctgattactctgagcgccatcaccagcgactatgtcgtagtgggtaaagctccctcagctgcagtgagggagcatcagag

SEQ ID NO: 1417 - DNA, 89 bp, synthetic construct
  misc_feature 1..89: note = engineered ribonucleic acid scaffold (ERS) sequence
  source 1..89: mol_type = other DNA
acgggcgcttctatctgattactctgagcgccatcaccagcgactatgtcgtagtgggtaaagctccctcataggagggagcatcagag

SEQ ID NO: 1418 - DNA, 90 bp, synthetic construct
  misc_feature 1..90: note = engineered ribonucleic acid scaffold (ERS) sequence
  source 1..90: mol_type = other DNA
acgggcgcttctatctgattactctgagcgccatcaccagcgactatgtcgtagtgggtaaagctccctcttcaggagggagcatcagag

SEQ ID NO: 1419 - DNA, 89 bp, synthetic construct
  misc_feature 1..89: note = engineered ribonucleic acid scaffold (ERS) sequence
  source 1..89: mol_type = other DNA
acgggcgcttctatctgattactctgagcgccatcaccagcgactatgtcgtagtgggtaaagctccctcttcggagagtgcatcagag

SEQ ID NO: 1420 - DNA, 89 bp, synthetic construct
  misc_feature 1..89: note = engineered ribonucleic acid scaffold (ERS) sequence
  source 1..89: mol_type = other DNA
acgggcgcttctatctgattactctgagcgccatcaccagcgactatgtcgtagtgggtaaagctccctcttcggaggaggcatcagag

SEQ ID NO: 1421 - DNA, 91 bp, synthetic construct
  misc_feature 1..91: note = engineered ribonucleic acid scaffold (ERS) sequence
  source 1..91: mol_type = other DNA
acgggcgcttctatctgattactctgagcgccatcaccagcgactatgtcgtagtgggtaaagctccctcttcggagggaacgcatcagag

SEQ ID NO: 1422 - DNA, 89 bp, synthetic construct; identical to SEQ ID NO: 583
  misc_feature 1..89: note = engineered ribonucleic acid scaffold (ERS) sequence
  source 1..89: mol_type = other DNA

SEQ ID NO: 1423 - DNA, 89 bp, synthetic construct
  misc_feature 1..89: note = engineered ribonucleic acid scaffold (ERS) sequence
  source 1..89: mol_type = other DNA
acgggcgcttctatctgattactctgagcgccatcaccagcgactatgtcgtagtgggtaaagctccctggaaacagggagcatcagag

SEQ ID NO: 1424 - DNA, 85 bp, synthetic construct
  misc_feature 1..85: note = engineered ribonucleic acid scaffold (ERS) sequence
  source 1..85: mol_type = other DNA
acgggcgcttctatctgattactctgagcgccatcaccagcgactatgtcgtagtgggtaaagctcccttcggggagcatcagag

SEQ ID NO: 1425 - DNA, 85 bp, synthetic construct
  misc_feature 1..85: note = engineered ribonucleic acid scaffold (ERS) sequence
  source 1..85: mol_type = other DNA
acgggcgcttctatctgattactctgagcgccatcaccagcgactatgtcgtagtgggtaaagctccgttcgcggagcatcagag

SEQ ID NO: 1426 - DNA, 87 bp, synthetic construct
  misc_feature 1..87: note = engineered ribonucleic acid scaffold (ERS) sequence
  source 1..87: mol_type = other DNA
acgggcgcttctatctgattactctgagcgccatcaccagcgactatgtcgtagtgggtaaagctcctcttcggaggagcatcagag

SEQ ID NO: 1427 - DNA, 85 bp, synthetic construct
  misc_feature 1..85: note = engineered ribonucleic acid scaffold (ERS) sequence
  source 1..85: mol_type = other DNA
acgggcgcttctatctgattactctgagcgccatcaccagcgactatgtcgtagtgggtaaagctctcttcggagagcatcagag

SEQ ID NO: 1428 - DNA, 77 bp, synthetic construct
  misc_feature 1..77: note = engineered ribonucleic acid scaffold (ERS) sequence
  source 1..77: mol_type = other DNA
acgggcgcttctatctgattactctgagcgccatcaccagcgactatgtcgtagtgggtaaagctgcagcatcagag

SEQ ID NO: 1429 - DNA, 83 bp, synthetic construct
  misc_feature 1..83: note = engineered ribonucleic acid scaffold (ERS) sequence
  source 1..83: mol_type = other DNA
acgggcgcttctatctgattactctgagcgccatcaccagcgactatgtcgtagtgggtaaagctgcttcggcagcatcagag

SEQ ID NO: 1430 - DNA, 89 bp, synthetic construct
  misc_feature 1..89: note = engineered ribonucleic acid scaffold (ERS) sequence
  source 1..89: mol_type = other DNA
acgggcgcttctatctgattactctgagcgccatcaccagcgactatgtcgtagtgggtaaaggtccctcttcggagggaacatcagag

SEQ ID NO: 1431 - DNA, 93 bp, synthetic construct
  misc_feature 1..93: note = engineered ribonucleic acid scaffold (ERS) sequence
  source 1..93: mol_type = other DNA
acgggcgcttctatctgattactctgagcgccatcaccagcgactatgtcgtagtgggtaaaggtgacggtcttcggaccgtcaccatcagag

SEQ ID NO: 1432 - DNA, 91 bp, synthetic construct
  misc_feature 1..91: note = engineered ribonucleic acid scaffold (ERS) sequence
  source 1..91: mol_type = other DNA
acgggcgcttctatctgattactctgagcgccatcaccagcgactatgtcgtagtgggtaaagtctccctcttcggagggaggcatcagag

SEQ ID NO: 1433 - DNA, 93 bp, synthetic construct
  misc_feature 1..93: note = engineered ribonucleic acid scaffold (ERS) sequence
  source 1..93: mol_type = other DNA
acgggcgcttctatctgattactctgagcgccatcaccagcgactatgtcgtagtgggtaaagtgcgcccgcttcggcgggcgcacatcagag

SEQ ID NO: 1434 - DNA, 93 bp, synthetic construct
  misc_feature 1..93: note = engineered ribonucleic acid scaffold (ERS) sequence
  source 1..93: mol_type = other DNA
acgggcgcttctatctgattactctgagcgccatcaccagcgactatgtcgtagtgggtaaataatgaaaacttcggttttcattaatcagag

SEQ ID NO: 1435 - DNA, 93 bp, synthetic construct
  misc_feature 1..93: note = engineered ribonucleic acid scaffold (ERS) sequence
  source 1..93: mol_type = other DNA
acgggcgcttctatctgattactctgagcgccatcaccagcgactatgtcgtagtgggtaaatcgtaagaacttcggttcttacgaatcagag

SEQ ID NO: 1436 - DNA, 93 bp, synthetic construct
  misc_feature 1..93: note = engineered ribonucleic acid scaffold (ERS) sequence
  source 1..93: mol_type = other DNA
acgggcgcttctatctgattactctgagcgccatcaccagcgactatgtcgtagtgggtaaatggaagatgcttcggcatcttccaatcagag

SEQ ID NO: 1437 - DNA, 97 bp, synthetic construct
  misc_feature 1..97: note = engineered ribonucleic acid scaffold (ERS) sequence
  source 1..97: mol_type = other DNA
acgggcgcttctatctgattactctgagcgccatcaccagcgactatgtcgtagtgggtaaagcccttacggacttcggtccgtaagggcatcagag

SEQ ID NO: 1438 - DNA, 99 bp, synthetic construct
  misc_feature 1..99: note = engineered ribonucleic acid scaffold (ERS) sequence
  source 1..99: mol_type = other DNA
acgggcgcttctatctgattactctgagcgccatcaccagcgactatgtcgtagtgggtaaagcctcttacggacttcggtccgtaagaggcatcagag

SEQ ID NO: 1439 - DNA, 99 bp, synthetic construct
  misc_feature 1..99: note = engineered ribonucleic acid scaffold (ERS) sequence
  source 1..99: mol_type = other DNA
acgggcgcttctatctgattactctgagcgccatcaccagcgactatgtcgtagtgggtaaagccgcttagggacttcggtccctaagaggcatcagag

SEQ ID NO: 1440 - DNA, 88 bp, synthetic construct
  misc_feature 1..88: note = engineered ribonucleic acid scaffold (ERS) sequence
  source 1..88: mol_type = other DNA
actaggcgcttctatctgattactctgagcgccatcaccagcgactatgtcgtagtgggtaaactccctcttcggagggagatcagag

SEQ ID NO: 1441 - DNA, 90 bp, synthetic construct
  misc_feature 1..90: note = engineered ribonucleic acid scaffold (ERS) sequence
  source 1..90: mol_type = other DNA
actaggcgcttctatctgattactctgagcgccatcaccagcgactatgtcgtagtgggtaaagcgccctcttcggagggagcatcagag

SEQ ID NO: 1442 - DNA, 100 bp, synthetic construct
  misc_feature 1..100: note = engineered ribonucleic acid scaffold (ERS) sequence
  source 1..100: mol_type = other DNA
actaggcgcttctatctgattactctgagcgccatcaccagcgactatgtcgtagtgggtaaagcgccttacggacttcggtccgtaaggagcatcagag

SEQ ID NO: 1443 - DNA, 100 bp, synthetic construct
  misc_feature 1..100: note = engineered ribonucleic acid scaffold (ERS) sequence
  source 1..100: mol_type = other DNA
actaggcgcttctatctgattactctgagcgccatcaccagcgactatgtcgtagtgggtaaagcgcttacggaattcgtgtccgtaagaagcatcagag

SEQ ID NO: 1444 - DNA, 101 bp, synthetic construct
  misc_feature 1..101: note = engineered ribonucleic acid scaffold (ERS) sequence
  source 1..101: mol_type = other DNA
actaggcgcttctatctgattactctgagcgccatcaccagcgactatgtcgtagtgggtaaagcgcttacggacttcgcggtccgtaagaagcatcagag

SEQ ID NO: 1445 - DNA, 99 bp, synthetic construct
  misc_feature 1..99: note = engineered ribonucleic acid scaffold (ERS) sequence
  source 1..99: mol_type = other DNA
actaggcgcttctatctgattactctgagcgccatcaccagcgactatgtcgtagtgggtaaagcgcttacggacttcggtccgtaagaagcatcagag

SEQ ID NO: 1446 - DNA, 99 bp, synthetic construct
  misc_feature 1..99: note = engineered ribonucleic acid scaffold (ERS) sequence
  source 1..99: mol_type = other DNA
actaggcgcttctatctgattactctgagcgccatcaccagcgactatgtcgtagtgggtaaagcgcttacggacttcggtccgtaagtcgcatcagag

SEQ ID NO: 1447 - DNA, 99 bp, synthetic construct
  misc_feature 1..99: note = engineered ribonucleic acid scaffold (ERS) sequence
  source 1..99: mol_type = other DNA
actaggcgcttctatctgattactctgagcgccatcaccagcgactatgtcgtagtgggtaaagcgcttacggagttcgatccgtaagaagcatcagag

SEQ ID NO: 1448 - DNA, 99 bp, synthetic construct
  misc_feature 1..99: note = engineered ribonucleic acid scaffold (ERS) sequence
  source 1..99: mol_type = other DNA
actaggcgcttctatctgattactctgagcgccatcaccagcgactatgtcgtagtgggtaaagcgctttcggacttcggtccggaagaagcatcagag

SEQ ID NO: 1449 - DNA, 103 bp, synthetic construct
  misc_feature 1..103: note = engineered ribonucleic acid scaffold (ERS) sequence
  source 1..103: mol_type = other DNA
actaggcgcttctatctgattactctgagcgccatcaccagcgactatgtcgtagtgggtaaagcggcagatctgagcctccgagctctctgccgcatcagag

SEQ ID NO: 1450 - DNA, 99 bp, synthetic construct
  misc_feature 1..99: note = engineered ribonucleic acid scaffold (ERS) sequence
  source 1..99: mol_type = other DNA
actaggcgcttctatctgattactctgagcgccatcaccagcgactatgtcgtagtgggtaaagcggttacggacttcggtccgtaagacgcatcagag

SEQ ID NO: 1451 - DNA, 76 bp, synthetic construct
  misc_feature 1..76: note = engineered ribonucleic acid scaffold (ERS) sequence
  source 1..76: mol_type = other DNA
actaggcgcttctatctgattactctgagcgccatcaccagcgactatgtcgtagtgggtaaagctagcatcagag

SEQ ID NO: 1452 - DNA, 90 bp, synthetic construct
  misc_feature 1..90: note = engineered ribonucleic acid scaffold (ERS) sequence
  source 1..90: mol_type = other DNA
actaggcgcttctatctgattactctgagcgccatcaccagcgactatgtcgtagtgggtaaagctccctattcggatggagcatcagag

SEQ ID NO: 1453 - DNA, 96 bp, synthetic construct
  misc_feature 1..96: note = engineered ribonucleic acid scaffold (ERS) sequence
  source 1..96: mol_type = other DNA
actaggcgcttctatctgattactctgagcgccatcaccagcgactatgtcgtagtgggtaaagctccctcacagggatgtgagggagcatcagag

SEQ ID NO: 1454 - DNA, 95 bp, synthetic construct
  misc_feature 1..95: note = engineered ribonucleic acid scaffold (ERS) sequence
  source 1..95: mol_type = other DNA
actaggcgcttctatctgattactctgagcgccatcaccagcgactatgtcgtagtgggtaaagctccctcagctgcagtgagggagcatcagag

SEQ ID NO: 1455 - DNA, 90 bp, synthetic construct
  misc_feature 1..90: note = engineered ribonucleic acid scaffold (ERS) sequence
  source 1..90: mol_type = other DNA
actaggcgcttctatctgattactctgagcgccatcaccagcgactatgtcgtagtgggtaaagctccctcataggagggagcatcagag

SEQ ID NO: 1456 - DNA, 91 bp, synthetic construct
  misc_feature 1..91: note = engineered ribonucleic acid scaffold (ERS) sequence
  source 1..91: mol_type = other DNA
actaggcgcttctatctgattactctgagcgccatcaccagcgactatgtcgtagtgggtaaagctccctcttcaggagggagcatcagag

SEQ ID NO: 1457 - DNA, 90 bp, synthetic construct
  misc_feature 1..90: note = engineered ribonucleic acid scaffold (ERS) sequence
  source 1..90: mol_type = other DNA
actaggcgcttctatctgattactctgagcgccatcaccagcgactatgtcgtagtgggtaaagctccctcttcggagagtgcatcagag

SEQ ID NO: 1458 - DNA, 90 bp, synthetic construct
  misc_feature 1..90: note = engineered ribonucleic acid scaffold (ERS) sequence
  source 1..90: mol_type = other DNA
actaggcgcttctatctgattactctgagcgccatcaccagcgactatgtcgtagtgggtaaagctccctcttcggaggaggcatcagag

SEQ ID NO: 1459 - DNA, 92 bp, synthetic construct
  misc_feature 1..92: note = engineered ribonucleic acid scaffold (ERS) sequence
  source 1..92: mol_type = other DNA
actaggcgcttctatctgattactctgagcgccatcaccagcgactatgtcgtagtgggtaaagctccctcttcggagggaacgcatcagag

SEQ ID NO: 1460 - DNA, 90 bp, synthetic construct; identical to SEQ ID NO: 575
  misc_feature 1..90: note = engineered ribonucleic acid scaffold (ERS) sequence
  source 1..90: mol_type = other DNA

SEQ ID NO: 1461 - DNA, 90 bp, synthetic construct
  misc_feature 1..90: note = engineered ribonucleic acid scaffold (ERS) sequence
  source 1..90: mol_type = other DNA
actaggcgcttctatctgattactctgagcgccatcaccagcgactatgtcgtagtgggtaaagctccctggaaacagggagcatcagag

SEQ ID NO: 1462 - DNA, 86 bp, synthetic construct
  misc_feature 1..86: note = engineered ribonucleic acid scaffold (ERS) sequence
  source 1..86: mol_type = other DNA
actaggcgcttctatctgattactctgagcgccatcaccagcgactatgtcgtagtgggtaaagctcccttcggggagcatcagag

SEQ ID NO: 1463 - DNA, 86 bp, synthetic construct
  misc_feature 1..86: note = engineered ribonucleic acid scaffold (ERS) sequence
  source 1..86: mol_type = other DNA
actaggcgcttctatctgattactctgagcgccatcaccagcgactatgtcgtagtgggtaaagctccgttcgcggagcatcagag

SEQ ID NO: 1464 - DNA, 88 bp, synthetic construct
  misc_feature 1..88: note = engineered ribonucleic acid scaffold (ERS) sequence
  source 1..88: mol_type = other DNA
actaggcgcttctatctgattactctgagcgccatcaccagcgactatgtcgtagtgggtaaagctcctcttcggaggagcatcagag

SEQ ID NO: 1465 - DNA, 86 bp, synthetic construct
  misc_feature 1..86: note = engineered ribonucleic acid scaffold (ERS) sequence
  source 1..86: mol_type = other DNA
actaggcgcttctatctgattactctgagcgccatcaccagcgactatgtcgtagtgggtaaagctctcttcggagagcatcagag

SEQ ID NO: 1466 - DNA, 78 bp, synthetic construct
  misc_feature 1..78: note = engineered ribonucleic acid scaffold (ERS) sequence
  source 1..78: mol_type = other DNA
actaggcgcttctatctgattactctgagcgccatcaccagcgactatgtcgtagtgggtaaagctgcagcatcagag

SEQ ID NO: 1467 - DNA, 84 bp, synthetic construct
  misc_feature 1..84: note = engineered ribonucleic acid scaffold (ERS) sequence
  source 1..84: mol_type = other DNA
actaggcgcttctatctgattactctgagcgccatcaccagcgactatgtcgtagtgggtaaagctgcttcggcagcatcagag

SEQ ID NO: 1468 - DNA, 90 bp, synthetic construct
  misc_feature 1..90: note = engineered ribonucleic acid scaffold (ERS) sequence
  source 1..90: mol_type = other DNA
actaggcgcttctatctgattactctgagcgccatcaccagcgactatgtcgtagtgggtaaaggtccctcttcggagggaacatcagag

SEQ ID NO: 1469 - DNA, 94 bp, synthetic construct
  misc_feature 1..94: note = engineered ribonucleic acid scaffold (ERS) sequence
  source 1..94: mol_type = other DNA
actaggcgcttctatctgattactctgagcgccatcaccagcgactatgtcgtagtgggtaaaggtgacggtcttcggaccgtcaccatcagag

SEQ ID NO: 1470 - DNA, 92 bp, synthetic construct
  misc_feature 1..92: note = engineered ribonucleic acid scaffold (ERS) sequence
  source 1..92: mol_type = other DNA
actaggcgcttctatctgattactctgagcgccatcaccagcgactatgtcgtagtgggtaaagtctccctcttcggagggaggcatcagag

SEQ ID NO: 1471 - DNA, 94 bp, synthetic construct
  misc_feature 1..94: note = engineered ribonucleic acid scaffold (ERS) sequence
  source 1..94: mol_type = other DNA
actaggcgcttctatctgattactctgagcgccatcaccagcgactatgtcgtagtgggtaaagtgcgcccgcttcggcgggcgcacatcagag

SEQ ID NO: 1472 - DNA, 94 bp, synthetic construct
  misc_feature 1..94: note = engineered ribonucleic acid scaffold (ERS) sequence
  source 1..94: mol_type = other DNA
actaggcgcttctatctgattactctgagcgccatcaccagcgactatgtcgtagtgggtaaataatgaaaacttcggttttcattaatcagag

SEQ ID NO: 1473 - DNA, 94 bp, synthetic construct
  misc_feature 1..94: note = engineered ribonucleic acid scaffold (ERS) sequence
  source 1..94: mol_type = other DNA
actaggcgcttctatctgattactctgagcgccatcaccagcgactatgtcgtagtgggtaaatcgtaagaacttcggttcttacgaatcagag

SEQ ID NO: 1474 - DNA, 94 bp, synthetic construct
  misc_feature 1..94: note = engineered ribonucleic acid scaffold (ERS) sequence
  source 1..94: mol_type = other DNA
actaggcgcttctatctgattactctgagcgccatcaccagcgactatgtcgtagtgggtaaatggaagatgcttcggcatcttccaatcagag

SEQ ID NO: 1475 - DNA, 98 bp, synthetic construct
  misc_feature 1..98: note = engineered ribonucleic acid scaffold (ERS) sequence
  source 1..98: mol_type = other DNA
actaggcgcttctatctgattactctgagcgccatcaccagcgactatgtcgtagtgggtaaagcccttacggacttcggtccgtaagggcatcagag

SEQ ID NO: 1476 - DNA, 100 bp, synthetic construct
  misc_feature 1..100: note = engineered ribonucleic acid scaffold (ERS) sequence
  source 1..100: mol_type = other DNA
actaggcgcttctatctgattactctgagcgccatcaccagcgactatgtcgtagtgggtaaagcctcttacggacttcggtccgtaagaggcatcagag

SEQ ID NO: 1477 - DNA, 100 bp, synthetic construct
  misc_feature 1..100: note = engineered ribonucleic acid scaffold (ERS) sequence
  source 1..100: mol_type = other DNA
actaggcgcttctatctgattactctgagcgccatcaccagcgactatgtcgtagtgggtaaagccgcttagggacttcggtccctaagaggcatcagag

SEQ ID NO: 1478 - DNA, 89 bp, synthetic construct
  misc_feature 1..89: note = engineered ribonucleic acid scaffold (ERS) sequence
  source 1..89: mol_type = other DNA
aacacacggttctatctgattactctgccgtgttcaccagcgactatgtcgtagtgggtaaagctccctcttcggagggagcatcagag

SEQ ID NO: 1479 - DNA, 89 bp, synthetic construct
  misc_feature 1..89: note = engineered ribonucleic acid scaffold (ERS) sequence
  source 1..89: mol_type = other DNA
aacactggtttctatctgattactctgaccagttcaccagcgactatgtcgtagtgggtaaagctccctcttcggagggagcatcagag

SEQ ID NO: 1480 - DNA, 89 bp, synthetic construct
  misc_feature 1..89: note = engineered ribonucleic acid scaffold (ERS) sequence
  source 1..89: mol_type = other DNA
aacaggccgttctatctgattactctgcggccttcaccagcgactatgtcgtagtgggtaaagctccctcttcggagggagcatcagag

SEQ ID NO: 1481 - DNA, 89 bp, synthetic construct
  misc_feature 1..89: note = engineered ribonucleic acid scaffold (ERS) sequence
  source 1..89: mol_type = other DNA
aacaggtccttctatctgattactctgggaccttcaccagcgactatgtcgtagtgggtaaagctccctcttcggagggagcatcagag

SEQ ID NO: 1482 - DNA, 89 bp, synthetic construct
  misc_feature 1..89: note = engineered ribonucleic acid scaffold (ERS) sequence
  source 1..89: mol_type = other DNA
aaccagcaattctatctgattactctgttgctgtcaccagcgactatgtcgtagtgggtaaagctccctcttcggagggagcatcagag

SEQ ID NO: 1483 - DNA, 89 bp, synthetic construct
  misc_feature 1..89: note = engineered ribonucleic acid scaffold (ERS) sequence
  source 1..89: mol_type = other DNA
aaccgagacttctatctgattactctgggctcgtcaccagcgactatgtcgtagtgggtaaagctccctcttcggagggagcatcagag

SEQ ID NO: 1484 - DNA, 89 bp, synthetic construct
  misc_feature 1..89: note = engineered ribonucleic acid scaffold (ERS) sequence
  source 1..89: mol_type = other DNA
aacctgtagttctatctgattactctgctacagtcaccagcgactatgtcgtagtgggtaaagctccctcttcggagggagcatcagag

SEQ ID NO: 1485 - DNA, 89 bp, synthetic construct
  misc_feature 1..89: note = engineered ribonucleic acid scaffold (ERS) sequence
  source 1..89: mol_type = other DNA
aacgagcacttctatctgattactctggggctctcaccagcgactatgtcgtagtgggtaaagctccctcttcggagggagcatcagag

SEQ ID NO: 1486 - DNA, 89 bp, synthetic construct
  misc_feature 1..89: note = engineered ribonucleic acid scaffold (ERS) sequence
  source 1..89: mol_type = other DNA
aacgaggtgttctatctgattactctgcacctctcaccagcgactatgtcgtagtgggtaaagctccctcttcggagggagcatcagag

SEQ ID NO: 1487 - DNA, 89 bp, synthetic construct
  misc_feature 1..89: note = engineered ribonucleic acid scaffold (ERS) sequence
  source 1..89: mol_type = other DNA
aacgggactttctatctgattactctgagtccctcaccagcgactatgtcgtagtgggtaaagctccctcttcggagggagcatcagag

SEQ ID NO: 1488 - DNA, 89 bp, synthetic construct
  misc_feature 1..89: note = engineered ribonucleic acid scaffold (ERS) sequence
  source 1..89: mol_type = other DNA
aacgggcaattctatctgattactctgttgccctcaccagcgactatgtcgtagtgggtaaagctccctcttcggagggagcatcagag

SEQ ID NO: 1489 - DNA, 89 bp, synthetic construct
  misc_feature 1..89: note = engineered ribonucleic acid scaffold (ERS) sequence
  source 1..89: mol_type = other DNA
aactgtgcgttctatctgattactctgcgcacatcaccagcgactatgtcgtagtgggtaaagctccctcttcggagggagcatcagag

SEQ ID NO: 1490 - DNA, 90 bp, synthetic construct
  misc_feature 1..90: note = engineered ribonucleic acid scaffold (ERS) sequence
  source 1..90: mol_type = other DNA
aactggcgcttctatctgattactctgggcgccatcaccagcgactatgtcgtagtgggtaaagctccctcttcggagggagcatcagag

SEQ ID NO: 1491 - DNA, 90 bp, synthetic construct
  misc_feature 1..90: note = engineered ribonucleic acid scaffold (ERS) sequence
  source 1..90: mol_type = other DNA
aactggcgcttctatctgattactctgggagccatcaccagcgactatgtcgtagtgggtaaagctccctcttcggagggagcatcagag

SEQ ID NO: 1492 - DNA, 90 bp, synthetic construct
  misc_feature 1..90: note = engineered ribonucleic acid scaffold (ERS) sequence
  source 1..90: mol_type = other DNA
aactggcgcttctatctgattactctgtgagccatcaccagcgactatgtcgtagtgggtaaagctccctcttcggagggagcatcagag

SEQ ID NO: 1493 - DNA, 91 bp, synthetic construct
  misc_feature 1..91: note = engineered ribonucleic acid scaffold (ERS) sequence
  source 1..91: mol_type = other DNA
aactggcgcttctatctgattactctgaggagccatcaccagcgactatgtcgtagtgggtaaagctccctcttcggagggagcatcagag

SEQ ID NO: 1494 - DNA, 90 bp, synthetic construct
  misc_feature 1..90: note = engineered ribonucleic acid scaffold (ERS) sequence
  source 1..90: mol_type = other DNA
aactggcgcttctatctgattactctgatagccatcaccagcgactatgtcgtagtgggtaaagctccctcttcggagggagcatcagag

SEQ ID NO: 1495 - DNA, 91 bp, synthetic construct
  misc_feature 1..91: note = engineered ribonucleic acid scaffold (ERS) sequence
  source 1..91: mol_type = other DNA
aactggcgcttctatctgattactctgagctgccatcaccagcgactatgtcgtagtgggtaaagctccctcttcggagggagcatcagag

SEQ ID NO: 1496 - DNA, 91 bp, synthetic construct
  misc_feature 1..91: note = engineered ribonucleic acid scaffold (ERS) sequence
  source 1..91: mol_type = other DNA
aactggcgcttctatctgattactctgagtagccatcaccagcgactatgtcgtagtgggtaaagctccctcttcggagggagcatcagag

SEQ ID NO: 1497 - DNA, 91 bp, synthetic construct
  misc_feature 1..91: note = engineered ribonucleic acid scaffold (ERS) sequence
  source 1..91: mol_type = other DNA
aactggcacttctatctgattactctgagtagccatcaccagcgactatgtcgtagtgggtaaagctccctcttcggagggagcatcagag

SEQ ID NO: 1498 - DNA, 90 bp, synthetic construct
  misc_feature 1..90: note = engineered ribonucleic acid scaffold (ERS) sequence
  source 1..90: mol_type = other DNA
aactggcgcttctatctgattactctgagcaccatcaccagcgactatgtcgtagtgggtaaagctccctcttcggagggagcatcagag

SEQ ID NO: 1499 - DNA, 90 bp, synthetic construct
  misc_feature 1..90: note = engineered ribonucleic acid scaffold (ERS) sequence
  source 1..90: mol_type = other DNA
aactggcacttctatctgattactctgagcgccatcaccagcgactatgtcgtagtgggtaaagctccctcttcggagggagcatcagag

SEQ ID NO: 1500 - DNA, 90 bp, synthetic construct
  misc_feature 1..90: note = engineered ribonucleic acid scaffold (ERS) sequence
  source 1..90: mol_type = other DNA
aactggcgcttctatctgattactctgagggccatcaccagcgactatgtcgtagtgggtaaagctccctcttcggagggagcatcagag

SEQ ID NO: 1501 - DNA, 90 bp, synthetic construct
  misc_feature 1..90: note = engineered ribonucleic acid scaffold (ERS) sequence
  source 1..90: mol_type = other DNA
aactggcgcttctatctgattactctgagtgccgtcaccagcgactatgtcgtagtgggtaaagctccctcttcggagggagcatcagag

SEQ ID NO: 1502 - DNA, 90 bp, synthetic construct
  misc_feature 1..90: note = engineered ribonucleic acid scaffold (ERS) sequence
  source 1..90: mol_type = other DNA
aactggcacttctatctgattactctgagtgccatcaccagcgactatgtcgtagtgggtaaagctccctcttcggagggagcatcagag

SEQ ID NO: 1503 - DNA, 90 bp, synthetic construct
  misc_feature 1..90: note = engineered ribonucleic acid scaffold (ERS) sequence
  source 1..90: mol_type = other DNA
aactggcgcttctatctgattactctgagaaccatcaccagcgactatgtcgtagtgggtaaagctccctcttcggagggagcatcagag

SEQ ID NO: 1504 - DNA, 90 bp, synthetic construct
  misc_feature 1..90: note = engineered ribonucleic acid scaffold (ERS) sequence
  source 1..90: mol_type = other DNA
aactggcgcttctatctgattactctgagagccgtcaccagcgactatgtcgtagtgggtaaagctccctcttcggagggagcatcagag

SEQ ID NO: 1505 - DNA, 90 bp, synthetic construct
  misc_feature 1..90: note = engineered ribonucleic acid scaffold (ERS) sequence
  source 1..90: mol_type = other DNA
aactggcgcttctatctgattactctgagagccttcaccagcgactatgtcgtagtgggtaaagctccctcttcggagggagcatcagag

SEQ ID NO: 1506 - DNA, 90 bp, synthetic construct
  misc_feature 1..90: note = engineered ribonucleic acid scaffold (ERS) sequence
  source 1..90: mol_type = other DNA
aactggggcttctatctgattactctgagacccatcaccagcgactatgtcgtagtgggtaaagctccctcttcggagggagcatcagag

SEQ ID NO: 1507 - DNA, 90 bp, synthetic construct
  misc_feature 1..90: note = engineered ribonucleic acid scaffold (ERS) sequence
  source 1..90: mol_type = other DNA
aactggtgcttctatctgattactctgagagccatcaccagcgactatgtcgtagtgggtaaagctccctcttcggagggagcatcagag

SEQ ID NO: 1508 - DNA, 90 bp, synthetic construct
  misc_feature 1..90: note = engineered ribonucleic acid scaffold (ERS) sequence
  source 1..90: mol_type = other DNA
aactgggccttctatctgattactctgaggcccatcaccagcgactatgtcgtagtgggtaaagctccctcttcggagggagcatcagag

SEQ ID NO: 1509 - DNA, 91 bp, synthetic construct
  misc_feature 1..91: note = engineered ribonucleic acid scaffold (ERS) sequence
  source 1..91: mol_type = other DNA
aactggcccttctatctgattactctgaggagccatcaccagcgactatgtcgtagtgggtaaagctccctcttcggagggagcatcagag

SEQ ID NO: 1510 - DNA, 90 bp, synthetic construct
  misc_feature 1..90: note = engineered ribonucleic acid scaffold (ERS) sequence
  source 1..90: mol_type = other DNA
aactggcccttctatctgattactctgagggccatcaccagcgactatgtcgtagtgggtaaagctccctcttcggagggagcatcagag

SEQ ID NO: 1511 - DNA, 90 bp, synthetic construct
  misc_feature 1..90: note = engineered ribonucleic acid scaffold (ERS) sequence
  source 1..90: mol_type = other DNA
aactggcccttctatctgattactctgagtgccatcaccagcgactatgtcgtagtgggtaaagctccctcttcggagggagcatcagag

SEQ ID NO: 1512 - DNA, 90 bp, synthetic construct
  misc_feature 1..90: note = engineered ribonucleic acid scaffold (ERS) sequence
  source 1..90: mol_type = other DNA
aactggcccttctatctgattactctgagagccatcaccagcgactatgtcgtagtgggtaaagctccctcttcggagggagcatcagag

SEQ ID NO: 1513 - DNA, 91 bp, synthetic construct
  misc_feature 1..91: note = engineered ribonucleic acid scaffold (ERS) sequence
  source 1..91: mol_type = other DNA
aactggcgcttctatctgattactctgagcagccatcaccagcgactatgtcgtagtgggtaaagctccctcttcggagggagcatcagag

SEQ ID NO: 1514 - DNA, 90 bp, synthetic construct
  misc_feature 1..90: note = engineered ribonucleic acid scaffold (ERS) sequence
  source 1..90: mol_type = other DNA
aactggcgcttctatctgattactctgagtgccatcaccagcgactatgtcgtagtgggtaaagctccctcttcggagggagcatcagag

SEQ ID NO: 1515 - DNA, 90 bp, synthetic construct
  misc_feature 1..90: note = engineered ribonucleic acid scaffold (ERS) sequence
  source 1..90: mol_type = other DNA
aactggcgcttctatctgattactctgagagccatcaccagcgactatgtcgtagtgggtaaagctccctcttcggagggagcatcagag

SEQ ID NO: 1516 - DNA, 90 bp, synthetic construct
  misc_feature 1..90: note = engineered ribonucleic acid scaffold (ERS) sequence
  source 1..90: mol_type = other DNA
aactggctcttctatctgattactctgagcgccatcaccagcgactatgtcgtagtgggtaaagctccctcttcggagggagcatcagag

SEQ ID NO: 1517 - DNA, 90 bp, synthetic construct
  misc_feature 1..90: note = engineered ribonucleic acid scaffold (ERS) sequence
  source 1..90: mol_type = other DNA
aactggctcttctatctgattactctgagggccatcaccagcgactatgtcgtagtgggtaaagctccctcttcggagggagcatcagag

SEQ ID NO: 1518 - DNA, 90 bp, synthetic construct
  misc_feature 1..90: note = engineered ribonucleic acid scaffold (ERS) sequence
  source 1..90: mol_type = other DNA
aactggctcttctatctgattactctgagtgccatcaccagcgactatgtcgtagtgggtaaagctccctcttcggagggagcatcagag

SEQ ID NO: 1519 - DNA, 90 bp, synthetic construct
  misc_feature 1..90: note = engineered ribonucleic acid scaffold (ERS) sequence
  source 1..90: mol_type = other DNA
aactggctcttctatctgattactctgagagccatcaccagcgactatgtcgtagtgggtaaagctccctcttcggagggagcatcagag

SEQ ID NO: 1520 - DNA, 90 bp, synthetic construct
  misc_feature 1..90: note = engineered ribonucleic acid scaffold (ERS) sequence
  source 1..90: mol_type = other DNA
aactggcggttctatctgattactctgagcgccatcaccagcgactatgtcgtagtgggtaaagctccctcttcggagggagcatcagag

SEQ ID NO: 1521 - DNA, 90 bp, synthetic construct
  misc_feature 1..90: note = engineered ribonucleic acid scaffold (ERS) sequence
  source 1..90: mol_type = other DNA
aactggcggttctatctgattactctgagagccatcaccagcgactatgtcgtagtgggtaaagctccctcttcggagggagcatcagag

SEQ ID NO: 1522 - DNA, 88 bp, synthetic construct
  misc_feature 1..88: note = engineered ribonucleic acid scaffold (ERS) sequence
  source 1..88: mol_type = other DNA
gacacggttctatctgattactctgccgtgtctcaccagcgactatgtcgtagtgggtaaagctccctcttcggagggagcatcagag

SEQ ID NO: 1523 - DNA, 88 bp, synthetic construct
  misc_feature 1..88: note = engineered ribonucleic acid scaffold (ERS) sequence
  source 1..88: mol_type = other DNA
gactggtttctatctgattactctgaccagtctcaccagcgactatgtcgtagtgggtaaagctccctcttcggagggagcatcagag

SEQ ID NO: 1524 - DNA, 88 bp, synthetic construct
  misc_feature 1..88: note = engineered ribonucleic acid scaffold (ERS) sequence
  source 1..88: mol_type = other DNA
gaggccgttctatctgattactctgcggcctctcaccagcgactatgtcgtagtgggtaaagctccctcttcggagggagcatcagag

SEQ ID NO: 1525 - DNA, 88 bp, synthetic construct
  misc_feature 1..88: note = engineered ribonucleic acid scaffold (ERS) sequence
  source 1..88: mol_type = other DNA
gaggtccttctatctgattactctgggacctctcaccagcgactatgtcgtagtgggtaaagctccctcttcggagggagcatcagag

SEQ ID NO: 1526 - DNA, 88 bp, synthetic construct
  misc_feature 1..88: note = engineered ribonucleic acid scaffold (ERS) sequence
  source 1..88: mol_type = other DNA
gcagcaattctatctgattactctgttgctgctcaccagcgactatgtcgtagtgggtaaagctccctcttcggagggagcatcagag

SEQ ID NO: 1527 - DNA, 88 bp, synthetic construct
  misc_feature 1..88: note = engineered ribonucleic acid scaffold (ERS) sequence
  source 1..88: mol_type = other DNA
gcgagacttctatctgattactctgggctcgctcaccagcgactatgtcgtagtgggtaaagctccctcttcggagggagcatcagag

SEQ ID NO: 1528 - DNA, 88 bp, synthetic construct
  misc_feature 1..88: note = engineered ribonucleic acid scaffold (ERS) sequence
  source 1..88: mol_type = other DNA
gctgtagttctatctgattactctgctacagctcaccagcgactatgtcgtagtgggtaaagctccctcttcggagggagcatcagag

SEQ ID NO: 1529 - DNA, 88 bp, synthetic construct
  misc_feature 1..88: note = engineered ribonucleic acid scaffold (ERS) sequence
  source 1..88: mol_type = other DNA
ggagcacttctatctgattactctggggctcctcaccagcgactatgtcgtagtgggtaaagctccctcttcggagggagcatcagag

SEQ ID NO: 1530 - DNA, 88 bp, synthetic construct
  misc_feature 1..88: note = engineered ribonucleic acid scaffold (ERS) sequence
  source 1..88: mol_type = other DNA
ggaggtgttctatctgattactctgcacctcctcaccagcgactatgtcgtagtgggtaaagctccctcttcggagggagcatcagag

SEQ ID NO: 1531 - DNA, 88 bp, synthetic construct
  misc_feature 1..88: note = engineered ribonucleic acid scaffold (ERS) sequence
  source 1..88: mol_type = other DNA
ggggactttctatctgattactctgagtcccctcaccagcgactatgtcgtagtgggtaaagctccctcttcggagggagcatcagag

SEQ ID NO: 1532 - DNA, 88 bp, synthetic construct
  misc_feature 1..88: note = engineered ribonucleic acid scaffold (ERS) sequence
  source 1..88: mol_type = other DNA
ggggcaattctatctgattactctgttgcccctcaccagcgactatgtcgtagtgggtaaagctccctcttcggagggagcatcagag

SEQ ID NO: 1533 - DNA, 88 bp, synthetic construct
  misc_feature 1..88: note = engineered ribonucleic acid scaffold (ERS) sequence
  source 1..88: mol_type = other DNA
gtgtgcgttctatctgattactctgcgcacactcaccagcgactatgtcgtagtgggtaaagctccctcttcggagggagcatcagag

SEQ ID NO: 1534 - DNA, 87 bp, synthetic construct
  misc_feature 1..87: note = engineered ribonucleic acid scaffold (ERS) sequence
  source 1..87: mol_type = other DNA
gggcgcttctatctgattactctgggcgccctcaccagcgactatgtcgtagtgggtaaagctccctcttcggagggagcatcagag

SEQ ID NO: 1535 - DNA, 87 bp, synthetic construct
  misc_feature 1..87: note = engineered ribonucleic acid scaffold (ERS) sequence
  source 1..87: mol_type = other DNA
gggcgcttctatctgattactctgggagccctcaccagcgactatgtcgtagtgggtaaagctccctcttcggagggagcatcagag

SEQ ID NO: 1536 - DNA, 87 bp, synthetic construct
  misc_feature 1..87: note = engineered ribonucleic acid scaffold (ERS) sequence
  source 1..87: mol_type = other DNA
gggcgcttctatctgattactctgtgagccctcaccagcgactatgtcgtagtgggtaaagctccctcttcggagggagcatcagag

SEQ ID NO: 1537 - DNA, 88 bp, synthetic construct
  misc_feature 1..88: note = engineered ribonucleic acid scaffold (ERS) sequence
  source 1..88: mol_type = other DNA
gggcgcttctatctgattactctgaggagccctcaccagcgactatgtcgtagtgggtaaagctccctcttcggagggagcatcagag

SEQ ID NO: 1538 - DNA, 87 bp, synthetic construct
  misc_feature 1..87: note = engineered ribonucleic acid scaffold (ERS) sequence
  source 1..87: mol_type = other DNA
gggcgcttctatctgattactctgatagccctcaccagcgactatgtcgtagtgggtaaagctccctcttcggagggagcatcagag

SEQ ID NO: 1539 - DNA, 88 bp, synthetic construct
  misc_feature 1..88: note = engineered ribonucleic acid scaffold (ERS) sequence
  source 1..88: mol_type = other DNA
gggcgcttctatctgattactctgagctgccctcaccagcgactatgtcgtagtgggtaaagctccctcttcggagggagcatcagag

SEQ ID NO: 1540 - DNA, 88 bp, synthetic construct
  misc_feature 1..88: note = engineered ribonucleic acid scaffold (ERS) sequence
  source 1..88: mol_type = other DNA
gggcgcttctatctgattactctgagtagccctcaccagcgactatgtcgtagtgggtaaagctccctcttcggagggagcatcagag

SEQ ID NO: 1541 - DNA, 88 bp, synthetic construct
  misc_feature 1..88: note = engineered ribonucleic acid scaffold (ERS) sequence
  source 1..88: mol_type = other DNA
gggcacttctatctgattactctgagtagccctcaccagcgactatgtcgtagtgggtaaagctccctcttcggagggagcatcagag

SEQ ID NO: 1542 - DNA, 87 bp, synthetic construct
  misc_feature 1..87: note = engineered ribonucleic acid scaffold (ERS) sequence
  source 1..87: mol_type = other DNA
gggcgcttctatctgattactctgagcaccctcaccagcgactatgtcgtagtgggtaaagctccctcttcggagggagcatcagag

SEQ ID NO: 1543 - DNA, 87 bp, synthetic construct
  misc_feature 1..87: note = engineered ribonucleic acid scaffold (ERS) sequence
  source 1..87: mol_type = other DNA
gggcacttctatctgattactctgagcgccctcaccagcgactatgtcgtagtgggtaaagctccctcttcggagggagcatcagag

SEQ ID NO: 1544 - DNA, 87 bp, synthetic construct
  misc_feature 1..87: note = engineered ribonucleic acid scaffold (ERS) sequence
  source 1..87: mol_type = other DNA
gggcgcttctatctgattactctgagggccctcaccagcgactatgtcgtagtgggtaaagctccctcttcggagggagcatcagag

SEQ ID NO: 1545 - DNA, 88 bp, synthetic construct
  misc_feature 1..88: note = engineered ribonucleic acid scaffold (ERS) sequence
  source 1..88: mol_type = other DNA
gggcgcttctatctgattactctgagtgcccgtcaccagcgactatgtcgtagtgggtaaagctccctcttcggagggagcatcagag

SEQ ID NO: 1546 - DNA, 87 bp, synthetic construct
  misc_feature 1..87: note = engineered ribonucleic acid scaffold (ERS) sequence
  source 1..87: mol_type = other DNA
gggcacttctatctgattactctgagtgccctcaccagcgactatgtcgtagtgggtaaagctccctcttcggagggagcatcagag

SEQ ID NO: 1547 - DNA, 87 bp, synthetic construct
  misc_feature 1..87: note = engineered ribonucleic acid scaffold (ERS) sequence
  source 1..87: mol_type = other DNA
gggcgcttctatctgattactctgagaaccctcaccagcgactatgtcgtagtgggtaaagctccctcttcggagggagcatcagag

SEQ ID NO: 1548 - DNA, 88 bp, synthetic construct
  misc_feature 1..88: note = engineered ribonucleic acid scaffold (ERS) sequence
  source 1..88: mol_type = other DNA
gggcgcttctatctgattactctgagagcccgtcaccagcgactatgtcgtagtgggtaaagctccctcttcggagggagcatcagag

SEQ ID NO: 1549 - DNA, 88 bp, synthetic construct
  misc_feature 1..88: note = engineered ribonucleic acid scaffold (ERS) sequence
  source 1..88: mol_type = other DNA
gggcgcttctatctgattactctgagagcccttcaccagcgactatgtcgtagtgggtaaagctccctcttcggagggagcatcagag

SEQ ID NO: 1550 - DNA, 87 bp, synthetic construct
  misc_feature 1..87: note = engineered ribonucleic acid scaffold (ERS) sequence
  source 1..87: mol_type = other DNA
gggggcttctatctgattactctgagacccctcaccagcgactatgtcgtagtgggtaaagctccctcttcggagggagcatcagag

SEQ ID NO: 1551 - DNA, 87 bp, synthetic construct
  misc_feature 1..87: note = engineered ribonucleic acid scaffold (ERS) sequence
  source 1..87: mol_type = other DNA
gggtgcttctatctgattactctgagagccctcaccagcgactatgtcgtagtgggtaaagctccctcttcggagggagcatcagag

SEQ ID NO: 1552 - DNA, 87 bp, synthetic construct
  misc_feature 1..87: note = engineered ribonucleic acid scaffold (ERS) sequence
  source 1..87: mol_type = other DNA
ggggccttctatctgattactctgaggcccctcaccagcgactatgtcgtagtgggtaaagctccctcttcggagggagcatcagag

SEQ ID NO: 1553 - DNA, 88 bp, synthetic construct
  misc_feature 1..88: note = engineered ribonucleic acid scaffold (ERS) sequence
  source 1..88: mol_type = other DNA
gggcccttctatctgattactctgaggagccctcaccagcgactatgtcgtagtgggtaaagctccctcttcggagggagcatcagag

SEQ ID NO: 1554 - DNA, 87 bp, synthetic construct
  misc_feature 1..87: note = engineered ribonucleic acid scaffold (ERS) sequence
  source 1..87: mol_type = other DNA
gggcccttctatctgattactctgagggccctcaccagcgactatgtcgtagtgggtaaagctccctcttcggagggagcatcagag

SEQ ID NO: 1555 - DNA, 87 bp, synthetic construct
  misc_feature 1..87: note = engineered ribonucleic acid scaffold (ERS) sequence
  source 1..87: mol_type = other DNA
gggcccttctatctgattactctgagtgccctcaccagcgactatgtcgtagtgggtaaagctccctcttcggagggagcatcagag

SEQ ID NO: 1556 - DNA, 87 bp, synthetic construct
  misc_feature 1..87: note = engineered ribonucleic acid scaffold (ERS) sequence
  source 1..87: mol_type = other DNA
gggcccttctatctgattactctgagagccctcaccagcgactatgtcgtagtgggtaaagctccctcttcggagggagcatcagag

SEQ ID NO: 1557 - DNA, 88 bp, synthetic construct
  misc_feature 1..88: note = engineered ribonucleic acid scaffold (ERS) sequence
  source 1..88: mol_type = other DNA
gggcgcttctatctgattactctgagcagccctcaccagcgactatgtcgtagtgggtaaagctccctcttcggagggagcatcagag

SEQ ID NO: 1558 - DNA, 87 bp, synthetic construct
  misc_feature 1..87: note = engineered ribonucleic acid scaffold (ERS) sequence
  source 1..87: mol_type = other DNA
gggcgcttctatctgattactctgagtgccctcaccagcgactatgtcgtagtgggtaaagctccctcttcggagggagcatcagag

SEQ ID NO: 1559 - DNA, 87 bp, synthetic construct
  misc_feature 1..87: note = engineered ribonucleic acid scaffold (ERS) sequence
  source 1..87: mol_type = other DNA
gggcgcttctatctgattactctgagagccctcaccagcgactatgtcgtagtgggtaaagctccctcttcggagggagcatcagag

SEQ ID NO: 1560 - DNA, 87 bp, synthetic construct
  misc_feature 1..87: note = engineered ribonucleic acid scaffold (ERS) sequence
  source 1..87: mol_type = other DNA
gggctcttctatctgattactctgagcgccctcaccagcgactatgtcgtagtgggtaaagctccctcttcggagggagcatcagag

SEQ ID NO: 1561 - DNA, 87 bp, synthetic construct
  misc_feature 1..87: note = engineered ribonucleic acid scaffold (ERS) sequence
  source 1..87: mol_type = other DNA
gggctcttctatctgattactctgagggccctcaccagcgactatgtcgtagtgggtaaagctccctcttcggagggagcatcagag

SEQ ID NO: 1562 - DNA, 87 bp, synthetic construct
  misc_feature 1..87: note = engineered ribonucleic acid scaffold (ERS) sequence
  source 1..87: mol_type = other DNA
gggctcttctatctgattactctgagtgccctcaccagcgactatgtcgtagtgggtaaagctccctcttcggagggagcatcagag

SEQ ID NO: 1563 - DNA, 87 bp, synthetic construct
  misc_feature 1..87: note = engineered ribonucleic acid scaffold (ERS) sequence
  source 1..87: mol_type = other DNA
gggctcttctatctgattactctgagagccctcaccagcgactatgtcgtagtgggtaaagctccctcttcggagggagcatcagag

SEQ ID NO: 1564 - DNA, 87 bp, synthetic construct
  misc_feature 1..87: note = engineered ribonucleic acid scaffold (ERS) sequence
  source 1..87: mol_type = other DNA
gggcggttctatctgattactctgagcgccctcaccagcgactatgtcgtagtgggtaaagctccctcttcggagggagcatcagag

SEQ ID NO: 1565 - DNA, 87 bp, synthetic construct
  misc_feature 1..87: note = engineered ribonucleic acid scaffold (ERS) sequence
  source 1..87: mol_type = other DNA
gggcggttctatctgattactctgagagccctcaccagcgactatgtcgtagtgggtaaagctccctcttcggagggagcatcagag

SEQ ID NO: 1566 - DNA, 88 bp, synthetic construct
  misc_feature 1..88: note = engineered ribonucleic acid scaffold (ERS) sequence
  source 1..88: mol_type = other DNA
gcacacggttctatctgattactctgccgtgttcaccagcgactatgtcgtagtgggtaaagctccctcttcggagggagcatcagag

SEQ ID NO: 1567 - DNA, 88 bp, synthetic construct
  misc_feature 1..88: note = engineered ribonucleic acid scaffold (ERS) sequence
  source 1..88: mol_type = other DNA
gcactggtttctatctgattactctgaccagttcaccagcgactatgtcgtagtgggtaaagctccctcttcggagggagcatcagag

SEQ ID NO: 1568 - DNA, 88 bp, synthetic construct
  misc_feature 1..88: note = engineered ribonucleic acid scaffold (ERS) sequence
  source 1..88: mol_type = other DNA
gcaggccgttctatctgattactctgcggccttcaccagcgactatgtcgtagtgggtaaagctccctcttcggagggagcatcagag

SEQ ID NO: 1569 - DNA, 88 bp, synthetic construct
  misc_feature 1..88: note = engineered ribonucleic acid scaffold (ERS) sequence
  source 1..88: mol_type = other DNA
gcaggtccttctatctgattactctgggaccttcaccagcgactatgtcgtagtgggtaaagctccctcttcggagggagcatcagag

SEQ ID NO: 1570 - DNA, 88 bp, synthetic construct
  misc_feature 1..88: note = engineered ribonucleic acid scaffold (ERS) sequence
  source 1..88: mol_type = other DNA
gccagcaattctatctgattactctgttgctgtcaccagcgactatgtcgtagtgggtaaagctccctcttcggagggagcatcagag

SEQ ID NO: 1571 - DNA, 88 bp, synthetic construct
  misc_feature 1..88: note = engineered ribonucleic acid scaffold (ERS) sequence
  source 1..88: mol_type = other DNA
gccgagacttctatctgattactctgggctcgtcaccagcgactatgtcgtagtgggtaaagctccctcttcggagggagcatcagag

SEQ ID NO: 1572 - DNA, 88 bp, synthetic construct
  misc_feature 1..88: note = engineered ribonucleic acid scaffold (ERS) sequence
  source 1..88: mol_type = other DNA
gcctgtagttctatctgattactctgctacagtcaccagcgactatgtcgtagtgggtaaagctccctcttcggagggagcatcagag

SEQ ID NO: 1573 - DNA, 88 bp, synthetic construct
  misc_feature 1..88: note = engineered ribonucleic acid scaffold (ERS) sequence
  source 1..88: mol_type = other DNA
gcgagcacttctatctgattactctggggctctcaccagcgactatgtcgtagtgggtaaagctccctcttcggagggagcatcagag

SEQ ID NO: 1574 - DNA, 88 bp, synthetic construct
  misc_feature 1..88: note = engineered ribonucleic acid scaffold (ERS) sequence
  source 1..88: mol_type = other DNA
gcgaggtgttctatctgattactctgcacctctcaccagcgactatgtcgtagtgggtaaagctccctcttcggagggagcatcagag

SEQ ID NO: 1575 - DNA, 88 bp, synthetic construct
  misc_feature 1..88: note = engineered ribonucleic acid scaffold (ERS) sequence
  source 1..88: mol_type = other DNA
gcgggactttctatctgattactctgagtccctcaccagcgactatgtcgtagtgggtaaagctccctcttcggagggagcatcagag

SEQ ID NO: 1576 - DNA, 88 bp, synthetic construct
  misc_feature 1..88: note = engineered ribonucleic acid scaffold (ERS) sequence
  source 1..88: mol_type = other DNA
gcgggcaattctatctgattactctgttgccctcaccagcgactatgtcgtagtgggtaaagctccctcttcggagggagcatcagag

SEQ ID NO: 1577 - DNA, 88 bp, synthetic construct
  misc_feature 1..88: note = engineered ribonucleic acid scaffold (ERS) sequence
  source 1..88: mol_type = other DNA
gctgtgcgttctatctgattactctgcgcacatcaccagcgactatgtcgtagtgggtaaagctccctcttcggagggagcatcagag

SEQ ID NO: 1578 - DNA, 89 bp, synthetic construct
  misc_feature 1..89: note = engineered ribonucleic acid scaffold (ERS) sequence
  source 1..89: mol_type = other DNA
gctggcgcttctatctgattactctgggcgccatcaccagcgactatgtcgtagtgggtaaagctccctcttcggagggagcatcagag

SEQ ID NO: 1579 - DNA, 89 bp, synthetic construct
  misc_feature 1..89: note = engineered ribonucleic acid scaffold (ERS) sequence
  source 1..89: mol_type = other DNA
gctggcgcttctatctgattactctgggagccatcaccagcgactatgtcgtagtgggtaaagctccctcttcggagggagcatcagag

SEQ ID NO: 1580 - DNA, 89 bp, synthetic construct
  misc_feature 1..89: note = engineered ribonucleic acid scaffold (ERS) sequence
  source 1..89: mol_type = other DNA
gctggcgcttctatctgattactctgtgagccatcaccagcgactatgtcgtagtgggtaaagctccctcttcggagggagcatcagag

SEQ ID NO: 1581 - DNA, 90 bp, synthetic construct
  misc_feature 1..90: note = engineered ribonucleic acid scaffold (ERS) sequence
  source 1..90: mol_type = other DNA
gctggcgcttctatctgattactctgaggagccatcaccagcgactatgtcgtagtgggtaaagctccctcttcggagggagcatcagag

SEQ ID NO: 1582 - DNA, 89 bp, synthetic construct
  misc_feature 1..89: note = engineered ribonucleic acid scaffold (ERS) sequence
  source 1..89: mol_type = other DNA
gctggcgcttctatctgattactctgatagccatcaccagcgactatgtcgtagtgggtaaagctccctcttcggagggagcatcagag

SEQ ID NO: 1583 - DNA, 90 bp, synthetic construct
  misc_feature 1..90: note = engineered ribonucleic acid scaffold (ERS) sequence
  source 1..90: mol_type = other DNA
gctggcgcttctatctgattactctgagctgccatcaccagcgactatgtcgtagtgggtaaagctccctcttcggagggagcatcagag

SEQ ID NO: 1584 - DNA, 90 bp, synthetic construct
  misc_feature 1..90: note = engineered ribonucleic acid scaffold (ERS) sequence
  source 1..90: mol_type = other DNA
gctggcgcttctatctgattactctgagtagccatcaccagcgactatgtcgtagtgggtaaagctccctcttcggagggagcatcagag

SEQ ID NO: 1585 - DNA, 90 bp, synthetic construct
  misc_feature 1..90: note = engineered ribonucleic acid scaffold (ERS) sequence
  source 1..90: mol_type = other DNA
gctggcacttctatctgattactctgagtagccatcaccagcgactatgtcgtagtgggtaaagctccctcttcggagggagcatcagag

SEQ ID NO: 1586 - DNA, 89 bp, synthetic construct
  misc_feature 1..89: note = engineered ribonucleic acid scaffold (ERS) sequence
  source 1..89: mol_type = other DNA
gctggcgcttctatctgattactctgagcaccatcaccagcgactatgtcgtagtgggtaaagctccctcttcggagggagcatcagag

SEQ ID NO: 1587 - DNA, 89 bp, synthetic construct
  misc_feature 1..89: note = engineered ribonucleic acid scaffold (ERS) sequence
  source 1..89: mol_type = other DNA
gctggcacttctatctgattactctgagcgccatcaccagcgactatgtcgtagtgggtaaagctccctcttcggagggagcatcagag

SEQ ID NO: 1588 - DNA, 89 bp, synthetic construct
  misc_feature 1..89: note = engineered ribonucleic acid scaffold (ERS) sequence
  source 1..89: mol_type = other DNA
gctggcgcttctatctgattactctgagggccatcaccagcgactatgtcgtagtgggtaaagctccctcttcggagggagcatcagag

SEQ ID NO: 1589 - DNA, 89 bp, synthetic construct
  misc_feature 1..89: note = engineered ribonucleic acid scaffold (ERS) sequence
  source 1..89: mol_type = other DNA
gctggcgcttctatctgattactctgagtgccgtcaccagcgactatgtcgtagtgggtaaagctccctcttcggagggagcatcagag

SEQ ID NO: 1590 - DNA, 89 bp, synthetic construct
  misc_feature 1..89: note = engineered ribonucleic acid scaffold (ERS) sequence
  source 1..89: mol_type = other DNA
gctggcacttctatctgattactctgagtgccatcaccagcgactatgtcgtagtgggtaaagctccctcttcggagggagcatcagag

SEQ ID NO: 1591 - DNA, 89 bp, synthetic construct
  misc_feature 1..89: note = engineered ribonucleic acid scaffold (ERS) sequence
  source 1..89: mol_type = other DNA
gctggcgcttctatctgattactctgagaaccatcaccagcgactatgtcgtagtgggtaaagctccctcttcggagggagcatcagag

SEQ ID NO: 1592 - DNA, 89 bp, synthetic construct
  misc_feature 1..89: note = engineered ribonucleic acid scaffold (ERS) sequence
  source 1..89: mol_type = other DNA
gctggcgcttctatctgattactctgagagccgtcaccagcgactatgtcgtagtgggtaaagctccctcttcggagggagcatcagag

SEQ ID NO: 1593 - DNA, 89 bp, synthetic construct
  misc_feature 1..89: note = engineered ribonucleic acid scaffold (ERS) sequence
  source 1..89: mol_type = other DNA
gctggcgcttctatctgattactctgagagccttcaccagcgactatgtcgtagtgggtaaagctccctcttcggagggagcatcagag

SEQ ID NO: 1594 - DNA, 89 bp, synthetic construct
  misc_feature 1..89: note = engineered ribonucleic acid scaffold (ERS) sequence
  source 1..89: mol_type = other DNA
gctggggcttctatctgattactctgagacccatcaccagcgactatgtcgtagtgggtaaagctccctcttcggagggagcatcagag

SEQ ID NO: 1595 - DNA, 89 bp, synthetic construct
  misc_feature 1..89: note = engineered ribonucleic acid scaffold (ERS) sequence
  source 1..89: mol_type = other DNA
gctggtgcttctatctgattactctgagagccatcaccagcgactatgtcgtagtgggtaaagctccctcttcggagggagcatcagag

SEQ ID NO: 1596 - DNA, 89 bp, synthetic construct
  misc_feature 1..89: note = engineered ribonucleic acid scaffold (ERS) sequence
  source 1..89: mol_type = other DNA
gctgggccttctatctgattactctgaggcccatcaccagcgactatgtcgtagtgggtaaagctccctcttcggagggagcatcagag

SEQ ID NO: 1597 - DNA, 90 bp, synthetic construct
  misc_feature 1..90: note = engineered ribonucleic acid scaffold (ERS) sequence
  source 1..90: mol_type = other DNA
gctggcccttctatctgattactctgaggagccatcaccagcgactatgtcgtagtgggtaaagctccctcttcggagggagcatcagag

SEQ ID NO: 1598 - DNA, 89 bp, synthetic construct
  misc_feature 1..89: note = engineered ribonucleic acid scaffold (ERS) sequence
  source 1..89: mol_type = other DNA
gctggcccttctatctgattactctgagggccatcaccagcgactatgtcgtagtgggtaaagctccctcttcggagggagcatcagag

SEQ ID NO: 1599 - DNA, 89 bp, synthetic construct
  misc_feature 1..89: note = engineered ribonucleic acid scaffold (ERS) sequence
  source 1..89: mol_type = other DNA
gctggcccttctatctgattactctgagtgccatcaccagcgactatgtcgtagtgggtaaagctccctcttcggagggagcatcagag

SEQ ID NO: 1600 - DNA, 89 bp, synthetic construct
  misc_feature 1..89: note = engineered ribonucleic acid scaffold (ERS) sequence
  source 1..89: mol_type = other DNA
gctggcccttctatctgattactctgagagccatcaccagcgactatgtcgtagtgggtaaagctccctcttcggagggagcatcagag

SEQ ID NO: 1601 - DNA, 90 bp, synthetic construct
  misc_feature 1..90: note = engineered ribonucleic acid scaffold (ERS) sequence
  source 1..90: mol_type = other DNA
gctggcgcttctatctgattactctgagcagccatcaccagcgactatgtcgtagtgggtaaagctccctcttcggagggagcatcagag

SEQ ID NO: 1602 - DNA, 89 bp, synthetic construct
  misc_feature 1..89: note = engineered ribonucleic acid scaffold (ERS) sequence
  source 1..89: mol_type = other DNA
gctggcgcttctatctgattactctgagtgccatcaccagcgactatgtcgtagtgggtaaagctccctcttcggagggagcatcagag

SEQ ID NO: 1603 - DNA, 89 bp, synthetic construct
  misc_feature 1..89: note = engineered ribonucleic acid scaffold (ERS) sequence
  source 1..89: mol_type = other DNA
gctggcgcttctatctgattactctgagagccatcaccagcgactatgtcgtagtgggtaaagctccctcttcggagggagcatcagag

SEQ ID NO: 1604 - DNA, 89 bp, synthetic construct
  misc_feature 1..89: note = engineered ribonucleic acid scaffold (ERS) sequence
  source 1..89: mol_type = other DNA
gctggctcttctatctgattactctgagcgccatcaccagcgactatgtcgtagtgggtaaagctccctcttcggagggagcatcagag

SEQ ID NO: 1605 - DNA, 89 bp, synthetic construct
  misc_feature 1..89: note = engineered ribonucleic acid scaffold (ERS) sequence
  source 1..89: mol_type = other DNA
gctggctcttctatctgattactctgagggccatcaccagcgactatgtcgtagtgggtaaagctccctcttcggagggagcatcagag

SEQ ID NO: 1606 - DNA, 89 bp, synthetic construct
  misc_feature 1..89: note = engineered ribonucleic acid scaffold (ERS) sequence
  source 1..89: mol_type = other DNA
gctggctcttctatctgattactctgagtgccatcaccagcgactatgtcgtagtgggtaaagctccctcttcggagggagcatcagag

SEQ ID NO: 1607 - DNA, 89 bp, synthetic construct
  misc_feature 1..89: note = engineered ribonucleic acid scaffold (ERS) sequence
  source 1..89: mol_type = other DNA
gctggctcttctatctgattactctgagagccatcaccagcgactatgtcgtagtgggtaaagctccctcttcggagggagcatcagag

SEQ ID NO: 1608 - DNA, 89 bp, synthetic construct
  misc_feature 1..89: note = engineered ribonucleic acid scaffold (ERS) sequence
  source 1..89: mol_type = other DNA
gctggcggttctatctgattactctgagcgccatcaccagcgactatgtcgtagtgggtaaagctccctcttcggagggagcatcagag

SEQ ID NO: 1609 - DNA, 89 bp, synthetic construct
  misc_feature 1..89: note = engineered ribonucleic acid scaffold (ERS) sequence
  source 1..89: mol_type = other DNA
gctggcggttctatctgattactctgagagccatcaccagcgactatgtcgtagtgggtaaagctccctcttcggagggagcatcagag

SEQ ID NO: 1610 - DNA, 88 bp, synthetic construct
  misc_feature 1..88: note = engineered ribonucleic acid scaffold (ERS) sequence
  source 1..88: mol_type = other DNA
taacacggttctatctgattactctgccgtgttcaccagcgactatgtcgtagtgggtaaagctccctcttcggagggagcatcagag

SEQ ID NO: 1611 - DNA, 88 bp, synthetic construct
  misc_feature 1..88: note = engineered ribonucleic acid scaffold (ERS) sequence
  source 1..88: mol_type = other DNA
taactggtttctatctgattactctgaccagttcaccagcgactatgtcgtagtgggtaaagctccctcttcggagggagcatcagag

SEQ ID NO: 1612 - DNA, 88 bp, synthetic construct
  misc_feature 1..88: note = engineered ribonucleic acid scaffold (ERS) sequence
  source 1..88: mol_type = other DNA
taaggccgttctatctgattactctgcggccttcaccagcgactatgtcgtagtgggtaaagctccctcttcggagggagcatcagag

SEQ ID NO: 1613 - DNA, 88 bp, synthetic construct
  misc_feature 1..88: note = engineered ribonucleic acid scaffold (ERS) sequence
  source 1..88: mol_type = other DNA
taaggtccttctatctgattactctgggaccttcaccagcgactatgtcgtagtgggtaaagctccctcttcggagggagcatcagag

SEQ ID NO: 1614 - DNA, 88 bp, synthetic construct
  misc_feature 1..88: note = engineered ribonucleic acid scaffold (ERS) sequence
  source 1..88: mol_type = other DNA
tacagcaattctatctgattactctgttgctgtcaccagcgactatgtcgtagtgggtaaagctccctcttcggagggagcatcagag

SEQ ID NO: 1615 - DNA, 88 bp, synthetic construct
  misc_feature 1..88: note = engineered ribonucleic acid scaffold (ERS) sequence
  source 1..88: mol_type = other DNA
tacgagacttctatctgattactctgggctcgtcaccagcgactatgtcgtagtgggtaaagctccctcttcggagggagcatcagag

SEQ ID NO: 1616 - DNA, 88 bp, synthetic construct
  misc_feature 1..88: note = engineered ribonucleic acid scaffold (ERS) sequence
  source 1..88: mol_type = other DNA
tactgtagttctatctgattactctgctacagtcaccagcgactatgtcgtagtgggtaaagctccctcttcggagggagcatcagag

SEQ ID NO: 1617 - DNA, 88 bp, synthetic construct
  misc_feature 1..88: note = engineered ribonucleic acid scaffold (ERS) sequence
  source 1..88: mol_type = other DNA
tagagcacttctatctgattactctggggctctcaccagcgactatgtcgtagtgggtaaagctccctcttcggagggagcatcagag

SEQ ID NO: 1618 - DNA, 88 bp, synthetic construct
  misc_feature 1..88: note = engineered ribonucleic acid scaffold (ERS) sequence
  source 1..88: mol_type = other DNA
tagaggtgttctatctgattactctgcacctctcaccagcgactatgtcgtagtgggtaaagctccctcttcggagggagcatcagag

SEQ ID NO: 1619 - DNA, 88 bp, synthetic construct
  misc_feature 1..88: note = engineered ribonucleic acid scaffold (ERS) sequence
  source 1..88: mol_type = other DNA
tagggactttctatctgattactctgagtccctcaccagcgactatgtcgtagtgggtaaagctccctcttcggagggagcatcagag

SEQ ID NO: 1620 - DNA, 88 bp, synthetic construct
  misc_feature 1..88: note = engineered ribonucleic acid scaffold (ERS) sequence
  source 1..88: mol_type = other DNA
tagggcaattctatctgattactctgttgccctcaccagcgactatgtcgtagtgggtaaagctccctcttcggagggagcatcagag

SEQ ID NO: 1621 - DNA, 88 bp, synthetic construct
  misc_feature 1..88: note = engineered ribonucleic acid scaffold (ERS) sequence
  source 1..88: mol_type = other DNA
tatgtgcgttctatctgattactctgcgcacatcaccagcgactatgtcgtagtgggtaaagctccctcttcggagggagcatcagag

SEQ ID NO: 1622 - DNA, 89 bp, synthetic construct
  misc_feature 1..89: note = engineered ribonucleic acid scaffold (ERS) sequence
  source 1..89: mol_type = other DNA
tatggcgcttctatctgattactctgggcgccatcaccagcgactatgtcgtagtgggtaaagctccctcttcggagggagcatcagag

SEQ ID NO: 1623 - DNA, 89 bp, synthetic construct
  misc_feature 1..89: note = engineered ribonucleic acid scaffold (ERS) sequence
  source 1..89: mol_type = other DNA
tatggcgcttctatctgattactctgggagccatcaccagcgactatgtcgtagtgggtaaagctccctcttcggagggagcatcagag

SEQ ID NO: 1624 - DNA, 89 bp, synthetic construct
  misc_feature 1..89: note = engineered ribonucleic acid scaffold (ERS) sequence
  source 1..89: mol_type = other DNA
tatggcgcttctatctgattactctgtgagccatcaccagcgactatgtcgtagtgggtaaagctccctcttcggagggagcatcagag

SEQ ID NO: 1625 - DNA, 90 bp, synthetic construct
  misc_feature 1..90: note = engineered ribonucleic acid scaffold (ERS) sequence
  source 1..90: mol_type = other DNA
tatggcgcttctatctgattactctgaggagccatcaccagcgactatgtcgtagtgggtaaagctccctcttcggagggagcatcagag

SEQ ID NO: 1626 - DNA, 89 bp, synthetic construct
  misc_feature 1..89: note = engineered ribonucleic acid scaffold (ERS) sequence
  source 1..89: mol_type = other DNA
tatggcgcttctatctgattactctgatagccatcaccagcgactatgtcgtagtgggtaaagctccctcttcggagggagcatcagag

SEQ ID NO: 1627 - DNA, 90 bp, synthetic construct
  misc_feature 1..90: note = engineered ribonucleic acid scaffold (ERS) sequence
  source 1..90: mol_type = other DNA
tatggcgcttctatctgattactctgagctgccatcaccagcgactatgtcgtagtgggtaaagctccctcttcggagggagcatcagag

SEQ ID NO: 1628 - DNA, 90 bp, synthetic construct
  misc_feature 1..90: note = engineered ribonucleic acid scaffold (ERS) sequence
  source 1..90: mol_type = other DNA
tatggcgcttctatctgattactctgagtagccatcaccagcgactatgtcgtagtgggtaaagctccctcttcggagggagcatcagag

SEQ ID NO: 1629 - DNA, 90 bp, synthetic construct
  misc_feature 1..90: note = engineered ribonucleic acid scaffold (ERS) sequence
  source 1..90: mol_type = other DNA
tatggcacttctatctgattactctgagtagccatcaccagcgactatgtcgtagtgggtaaagctccctcttcggagggagcatcagag

SEQ ID NO: 1630 - DNA, 89 bp, synthetic construct
  misc_feature 1..89: note = engineered ribonucleic acid scaffold (ERS) sequence
  source 1..89: mol_type = other DNA
tatggcgcttctatctgattactctgagcaccatcaccagcgactatgtcgtagtgggtaaagctccctcttcggagggagcatcagag

SEQ ID NO: 1631 - DNA, 89 bp, synthetic construct
  misc_feature 1..89: note = engineered ribonucleic acid scaffold (ERS) sequence
  source 1..89: mol_type = other DNA
tatggcacttctatctgattactctgagcgccatcaccagcgactatgtcgtagtgggtaaagctccctcttcggagggagcatcagag

SEQ ID NO: 1632 - DNA, 89 bp, synthetic construct
  misc_feature 1..89: note = engineered ribonucleic acid scaffold (ERS) sequence
  source 1..89: mol_type = other DNA
tatggcgcttctatctgattactctgagggccatcaccagcgactatgtcgtagtgggtaaagctccctcttcggagggagcatcagag

SEQ ID NO: 1633 - DNA, 89 bp, synthetic construct
  misc_feature 1..89: note = engineered ribonucleic acid scaffold (ERS) sequence
  source 1..89: mol_type = other DNA
tatggcgcttctatctgattactctgagtgccgtcaccagcgactatgtcgtagtgggtaaagctccctcttcggagggagcatcagag

SEQ ID NO: 1634 - DNA, 89 bp, synthetic construct
  misc_feature 1..89: note = engineered ribonucleic acid scaffold (ERS) sequence
  source 1..89: mol_type = other DNA
tatggcacttctatctgattactctgagtgccatcaccagcgactatgtcgtagtgggtaaagctccctcttcggagggagcatcagag

SEQ ID NO: 1635 - DNA, 89 bp, synthetic construct
  misc_feature 1..89: note = engineered ribonucleic acid scaffold (ERS) sequence
  source 1..89: mol_type = other DNA
tatggcgcttctatctgattactctgagaaccatcaccagcgactatgtcgtagtgggtaaagctccctcttcggagggagcatcagag

SEQ ID NO: 1636 - DNA, 89 bp, synthetic construct
  misc_feature 1..89: note = engineered ribonucleic acid scaffold (ERS) sequence
  source 1..89: mol_type = other DNA
tatggcgcttctatctgattactctgagagccgtcaccagcgactatgtcgtagtgggtaaagctccctcttcggagggagcatcagag

SEQ ID NO: 1637 - DNA, 89 bp, synthetic construct
  misc_feature 1..89: note = engineered ribonucleic acid scaffold (ERS) sequence
  source 1..89: mol_type = other DNA
tatggcgcttctatctgattactctgagagccttcaccagcgactatgtcgtagtgggtaaagctccctcttcggagggagcatcagag

SEQ ID NO: 1638 - DNA, 89 bp, synthetic construct
  misc_feature 1..89: note = engineered ribonucleic acid scaffold (ERS) sequence
  source 1..89: mol_type = other DNA
tatggggcttctatctgattactctgagacccatcaccagcgactatgtcgtagtgggtaaagctccctcttcggagggagcatcagag

SEQ ID NO: 1639 - DNA, 89 bp, synthetic construct
  misc_feature 1..89: note = engineered ribonucleic acid scaffold (ERS) sequence
  source 1..89: mol_type = other DNA
tatggtgcttctatctgattactctgagagccatcaccagcgactatgtcgtagtgggtaaagctccctcttcggagggagcatcagag

SEQ ID NO: 1640 - DNA, 89 bp, synthetic construct
  misc_feature 1..89: note = engineered ribonucleic acid scaffold (ERS) sequence
  source 1..89: mol_type = other DNA
tatgggccttctatctgattactctgaggcccatcaccagcgactatgtcgtagtgggtaaagctccctcttcggagggagcatcagag

SEQ ID NO: 1641 - DNA, 90 bp, synthetic construct
  misc_feature 1..90: note = engineered ribonucleic acid scaffold (ERS) sequence
  source 1..90: mol_type = other DNA
tatggcccttctatctgattactctgaggagccatcaccagcgactatgtcgtagtgggtaaagctccctcttcggagggagcatcagag

SEQ ID NO: 1642 - DNA, 89 bp, synthetic construct
  misc_feature 1..89: note = engineered ribonucleic acid scaffold (ERS) sequence
  source 1..89: mol_type = other DNA
tatggcccttctatctgattactctgagggccatcaccagcgactatgtcgtagtgggtaaagctccctcttcggagggagcatcagag

SEQ ID NO: 1643 - DNA, 89 bp, synthetic construct
  misc_feature 1..89: note = engineered ribonucleic acid scaffold (ERS) sequence
  source 1..89: mol_type = other DNA
tatggcccttctatctgattactctgagtgccatcaccagcgactatgtcgtagtgggtaaagctccctcttcggagggagcatcagag

SEQ ID NO: 1644 - DNA, 89 bp, synthetic construct
  misc_feature 1..89: note = engineered ribonucleic acid scaffold (ERS) sequence
  source 1..89: mol_type = other DNA
tatggcccttctatctgattactctgagagccatcaccagcgactatgtcgtagtgggtaaagctccctcttcggagggagcatcagag

SEQ ID NO: 1645 - DNA, 90 bp, synthetic construct
  misc_feature 1..90: note = engineered ribonucleic acid scaffold (ERS) sequence
  source 1..90: mol_type = other DNA
tatggcgcttctatctgattactctgagcagccatcaccagcgactatgtcgtagtgggtaaagctccctcttcggagggagcatcagag

SEQ ID NO: 1646 - DNA, 89 bp, synthetic construct
  misc_feature 1..89: note = engineered ribonucleic acid scaffold (ERS) sequence
  source 1..89: mol_type = other DNA
tatggcgcttctatctgattactctgagtgccatcaccagcgactatgtcgtagtgggtaaagctccctcttcggagggagcatcagag

SEQ ID NO: 1647 - DNA, 89 bp, synthetic construct
  misc_feature 1..89: note = engineered ribonucleic acid scaffold (ERS) sequence
  source 1..89: mol_type = other DNA
tatggcgcttctatctgattactctgagagccatcaccagcgactatgtcgtagtgggtaaagctccctcttcggagggagcatcagag

SEQ ID NO: 1648 - DNA, 89 bp, synthetic construct
  misc_feature 1..89: note = engineered ribonucleic acid scaffold (ERS) sequence
  source 1..89: mol_type = other DNA
tatggctcttctatctgattactctgagcgccatcaccagcgactatgtcgtagtgggtaaagctccctcttcggagggagcatcagag

SEQ ID NO: 1649 - DNA, 89 bp, synthetic construct
  misc_feature 1..89: note = engineered ribonucleic acid scaffold (ERS) sequence
  source 1..89: mol_type = other DNA
tatggctcttctatctgattactctgagggccatcaccagcgactatgtcgtagtgggtaaagctccctcttcggagggagcatcagag

SEQ ID NO: 1650 - DNA, 89 bp, synthetic construct
  misc_feature 1..89: note = engineered ribonucleic acid scaffold (ERS) sequence
  source 1..89: mol_type = other DNA
tatggctcttctatctgattactctgagtgccatcaccagcgactatgtcgtagtgggtaaagctccctcttcggagggagcatcagag

SEQ ID NO: 1651 - DNA, 89 bp, synthetic construct
  misc_feature 1..89: note = engineered ribonucleic acid scaffold (ERS) sequence
  source 1..89: mol_type = other DNA
tatggctcttctatctgattactctgagagccatcaccagcgactatgtcgtagtgggtaaagctccctcttcggagggagcatcagag

SEQ ID NO: 1652 - DNA, 89 bp, synthetic construct
  misc_feature 1..89: note = engineered ribonucleic acid scaffold (ERS) sequence
  source 1..89: mol_type = other DNA
tatggcggttctatctgattactctgagcgccatcaccagcgactatgtcgtagtgggtaaagctccctcttcggagggagcatcagag

SEQ ID NO: 1653 - DNA, 89 bp, synthetic construct
  misc_feature 1..89: note = engineered ribonucleic acid scaffold (ERS) sequence
  source 1..89: mol_type = other DNA
tatggcggttctatctgattactctgagagccatcaccagcgactatgtcgtagtgggtaaagctccctcttcggagggagcatcagag

SEQ ID NO: 1654 - DNA, 88 bp, synthetic construct
  misc_feature 1..88: note = engineered ribonucleic acid scaffold (ERS) sequence
  source 1..88: mol_type = other DNA
tcacacggttctatctgattactctgccgtgttcaccagcgactatgtcgtagtgggtaaagctccctcttcggagggagcatcagag

SEQ ID NO: 1655 - DNA, 88 bp, synthetic construct
  misc_feature 1..88: note = engineered ribonucleic acid scaffold (ERS) sequence
  source 1..88: mol_type = other DNA
tcactggtttctatctgattactctgaccagttcaccagcgactatgtcgtagtgggtaaagctccctcttcggagggagcatcagag

SEQ ID NO: 1656 - DNA, 88 bp, synthetic construct
  misc_feature 1..88: note = engineered ribonucleic acid scaffold (ERS) sequence
  source 1..88: mol_type = other DNA
tcaggccgttctatctgattactctgcggccttcaccagcgactatgtcgtagtgggtaaagctccctcttcggagggagcatcagag

SEQ ID NO: 1657 - DNA, 88 bp, synthetic construct
  misc_feature 1..88: note = engineered ribonucleic acid scaffold (ERS) sequence
  source 1..88: mol_type = other DNA
tcaggtccttctatctgattactctgggaccttcaccagcgactatgtcgtagtgggtaaagctccctcttcggagggagcatcagag

SEQ ID NO: 1658 - DNA, 88 bp, synthetic construct
  misc_feature 1..88: note = engineered ribonucleic acid scaffold (ERS) sequence
  source 1..88: mol_type = other DNA
tccagcaattctatctgattactctgttgctgtcaccagcgactatgtcgtagtgggtaaagctccctcttcggagggagcatcagag

SEQ ID NO: 1659 - DNA, 88 bp, synthetic construct
  misc_feature 1..88: note = engineered ribonucleic acid scaffold (ERS) sequence
  source 1..88: mol_type = other DNA
tccgagacttctatctgattactctgggctcgtcaccagcgactatgtcgtagtgggtaaagctccctcttcggagggagcatcagag

SEQ ID NO: 1660 - DNA, 88 bp, synthetic construct
  misc_feature 1..88: note = engineered ribonucleic acid scaffold (ERS) sequence
  source 1..88: mol_type = other DNA
tcctgtagttctatctgattactctgctacagtcaccagcgactatgtcgtagtgggtaaagctccctcttcggagggagcatcagag

SEQ ID NO: 1661 - DNA, 88 bp, synthetic construct
  misc_feature 1..88: note = engineered ribonucleic acid scaffold (ERS) sequence
  source 1..88: mol_type = other DNA
tcgagcacttctatctgattactctggggctctcaccagcgactatgtcgtagtgggtaaagctccctcttcggagggagcatcagag

SEQ ID NO: 1662 - DNA, 88 bp, synthetic construct
  misc_feature 1..88: note = engineered ribonucleic acid scaffold (ERS) sequence
  source 1..88: mol_type = other DNA
tcgaggtgttctatctgattactctgcacctctcaccagcgactatgtcgtagtgggtaaagctccctcttcggagggagcatcagag

SEQ ID NO: 1663 - DNA, 88 bp, synthetic construct
  misc_feature 1..88: note = engineered ribonucleic acid scaffold (ERS) sequence
  source 1..88: mol_type = other DNA
tcgggactttctatctgattactctgagtccctcaccagcgactatgtcgtagtgggtaaagctccctcttcggagggagcatcagag

SEQ ID NO: 1664 - DNA, 88 bp, synthetic construct
  misc_feature 1..88: note = engineered ribonucleic acid scaffold (ERS) sequence
  source 1..88: mol_type = other DNA
tcgggcaattctatctgattactctgttgccctcaccagcgactatgtcgtagtgggtaaagctccctcttcggagggagcatcagag

SEQ ID NO: 1665 - DNA, 88 bp, synthetic construct
  misc_feature 1..88: note = engineered ribonucleic acid scaffold (ERS) sequence
  source 1..88: mol_type = other DNA
tctgtgcgttctatctgattactctgcgcacatcaccagcgactatgtcgtagtgggtaaagctccctcttcggagggagcatcagag

SEQ ID NO: 1666 - DNA, 89 bp, synthetic construct
  misc_feature 1..89: note = engineered ribonucleic acid scaffold (ERS) sequence
  source 1..89: mol_type = other DNA
tctggcgcttctatctgattactctgggcgccatcaccagcgactatgtcgtagtgggtaaagctccctcttcggagggagcatcagag

SEQ ID NO: 1667 - DNA, 89 bp, synthetic construct
  misc_feature 1..89: note = engineered ribonucleic acid scaffold (ERS) sequence
  source 1..89: mol_type = other DNA
tctggcgcttctatctgattactctgggagccatcaccagcgactatgtcgtagtgggtaaagctccctcttcggagggagcatcagag

SEQ ID NO: 1668 - DNA, 89 bp, synthetic construct
  misc_feature 1..89: note = engineered ribonucleic acid scaffold (ERS) sequence
  source 1..89: mol_type = other DNA
tctggcgcttctatctgattactctgtgagccatcaccagcgactatgtcgtagtgggtaaagctccctcttcggagggagcatcagag

SEQ ID NO: 1669 - DNA, 90 bp, synthetic construct
  misc_feature 1..90: note = engineered ribonucleic acid scaffold (ERS) sequence
  source 1..90: mol_type = other DNA
tctggcgcttctatctgattactctgaggagccatcaccagcgactatgtcgtagtgggtaaagctccctcttcggagggagcatcagag

SEQ ID NO: 1670 - DNA, 89 bp, synthetic construct
  misc_feature 1..89: note = engineered ribonucleic acid scaffold (ERS) sequence
  source 1..89: mol_type = other DNA
tctggcgcttctatctgattactctgatagccatcaccagcgactatgtcgtagtgggtaaagctccctcttcggagggagcatcagag

SEQ ID NO: 1671 - DNA, 90 bp, synthetic construct
  misc_feature 1..90: note = engineered ribonucleic acid scaffold (ERS) sequence
  source 1..90: mol_type = other DNA
tctggcgcttctatctgattactctgagctgccatcaccagcgactatgtcgtagtgggtaaagctccctcttcggagggagcatcagag

SEQ ID NO: 1672 - DNA, 90 bp, synthetic construct
  misc_feature 1..90: note = engineered ribonucleic acid scaffold (ERS) sequence
  source 1..90: mol_type = other DNA
tctggcgcttctatctgattactctgagtagccatcaccagcgactatgtcgtagtgggtaaagctccctcttcggagggagcatcagag

SEQ ID NO: 1673 - DNA, 90 bp, synthetic construct
  misc_feature 1..90: note = engineered ribonucleic acid scaffold (ERS) sequence
  source 1..90: mol_type = other DNA
tctggcacttctatctgattactctgagtagccatcaccagcgactatgtcgtagtgggtaaagctccctcttcggagggagcatcagag

SEQ ID NO: 1674 - DNA, 89 bp, synthetic construct
  misc_feature 1..89: note = engineered ribonucleic acid scaffold (ERS) sequence
  source 1..89: mol_type = other DNA
tctggcgcttctatctgattactctgagcaccatcaccagcgactatgtcgtagtgggtaaagctccctcttcggagggagcatcagag

SEQ ID NO: 1675 - DNA, 89 bp, synthetic construct
  misc_feature 1..89: note = engineered ribonucleic acid scaffold (ERS) sequence
  source 1..89: mol_type = other DNA
tctggcacttctatctgattactctgagcgccatcaccagcgactatgtcgtagtgggtaaagctccctcttcggagggagcatcagag

SEQ ID NO: 1676 - DNA, 89 bp, synthetic construct
  misc_feature 1..89: note = engineered ribonucleic acid scaffold (ERS) sequence
  source 1..89: mol_type = other DNA
tctggcgcttctatctgattactctgagggccatcaccagcgactatgtcgtagtgggtaaagctccctcttcggagggagcatcagag

SEQ ID NO: 1677 - DNA, 89 bp, synthetic construct
  misc_feature 1..89: note = engineered ribonucleic acid scaffold (ERS) sequence
  source 1..89: mol_type = other DNA
tctggcgcttctatctgattactctgagtgccgtcaccagcgactatgtcgtagtgggtaaagctccctcttcggagggagcatcagag

SEQ ID NO: 1678 - DNA, 89 bp, synthetic construct
  misc_feature 1..89: note = engineered ribonucleic acid scaffold (ERS) sequence
  source 1..89: mol_type = other DNA
tctggcacttctatctgattactctgagtgccatcaccagcgactatgtcgtagtgggtaaagctccctcttcggagggagcatcagag

SEQ ID NO: 1679 - DNA, 89 bp, synthetic construct
  misc_feature 1..89: note = engineered ribonucleic acid scaffold (ERS) sequence
  source 1..89: mol_type = other DNA
tctggcgcttctatctgattactctgagaaccatcaccagcgactatgtcgtagtgggtaaagctccctcttcggagggagcatcagag

SEQ ID NO: 1680 - DNA, 89 bp, synthetic construct
  misc_feature 1..89: note = engineered ribonucleic acid scaffold (ERS) sequence
  source 1..89: mol_type = other DNA
tctggcgcttctatctgattactctgagagccgtcaccagcgactatgtcgtagtgggtaaagctccctcttcggagggagcatcagag

SEQ ID NO: 1681 - DNA, 89 bp, synthetic construct
  misc_feature 1..89: note = engineered ribonucleic acid scaffold (ERS) sequence
  source 1..89: mol_type = other DNA
tctggcgcttctatctgattactctgagagccttcaccagcgactatgtcgtagtgggtaaagctccctcttcggagggagcatcagag

SEQ ID NO: 1682 - DNA, 89 bp, synthetic construct
  misc_feature 1..89: note = engineered ribonucleic acid scaffold (ERS) sequence
  source 1..89: mol_type = other DNA
tctggggcttctatctgattactctgagacccatcaccagcgactatgtcgtagtgggtaaagctccctcttcggagggagcatcagag

SEQ ID NO: 1683 - DNA, 89 bp, synthetic construct
  misc_feature 1..89: note = engineered ribonucleic acid scaffold (ERS) sequence
  source 1..89: mol_type = other DNA
tctggtgcttctatctgattactctgagagccatcaccagcgactatgtcgtagtgggtaaagctccctcttcggagggagcatcagag

SEQ ID NO: 1684 - DNA, 89 bp, synthetic construct
  misc_feature 1..89: note = engineered ribonucleic acid scaffold (ERS) sequence
  source 1..89: mol_type = other DNA
tctgggccttctatctgattactctgaggcccatcaccagcgactatgtcgtagtgggtaaagctccctcttcggagggagcatcagag

SEQ ID NO: 1685 - DNA, 90 bp, synthetic construct
  misc_feature 1..90: note = engineered ribonucleic acid scaffold (ERS) sequence
  source 1..90: mol_type = other DNA
tctggcccttctatctgattactctgaggagccatcaccagcgactatgtcgtagtgggtaaagctccctcttcggagggagcatcagag

SEQ ID NO: 1686 - DNA, 89 bp, synthetic construct
  misc_feature 1..89: note = engineered ribonucleic acid scaffold (ERS) sequence
  source 1..89: mol_type = other DNA
tctggcccttctatctgattactctgagggccatcaccagcgactatgtcgtagtgggtaaagctccctcttcggagggagcatcagag

SEQ ID NO: 1687 - DNA, 89 bp, synthetic construct
  misc_feature 1..89: note = engineered ribonucleic acid scaffold (ERS) sequence
  source 1..89: mol_type = other DNA
tctggcccttctatctgattactctgagtgccatcaccagcgactatgtcgtagtgggtaaagctccctcttcggagggagcatcagag

SEQ ID NO: 1688 - DNA, 89 bp, synthetic construct
  misc_feature 1..89: note = engineered ribonucleic acid scaffold (ERS) sequence
  source 1..89: mol_type = other DNA
tctggcccttctatctgattactctgagagccatcaccagcgactatgtcgtagtgggtaaagctccctcttcggagggagcatcagag

SEQ ID NO: 1689 - DNA, 90 bp, synthetic construct
  misc_feature 1..90: note = engineered ribonucleic acid scaffold (ERS) sequence
  source 1..90: mol_type = other DNA
tctggcgcttctatctgattactctgagcagccatcaccagcgactatgtcgtagtgggtaaagctccctcttcggagggagcatcagag

SEQ ID NO: 1690 - DNA, 89 bp, synthetic construct
  misc_feature 1..89: note = engineered ribonucleic acid scaffold (ERS) sequence
  source 1..89: mol_type = other DNA
tctggcgcttctatctgattactctgagtgccatcaccagcgactatgtcgtagtgggtaaagctccctcttcggagggagcatcagag

SEQ ID NO: 1691 - DNA, 89 bp, synthetic construct
  misc_feature 1..89: note = engineered ribonucleic acid scaffold (ERS) sequence
  source 1..89: mol_type = other DNA
tctggcgcttctatctgattactctgagagccatcaccagcgactatgtcgtagtgggtaaagctccctcttcggagggagcatcagag

SEQ ID NO: 1692 - DNA, 89 bp, synthetic construct
  misc_feature 1..89: note = engineered ribonucleic acid scaffold (ERS) sequence
  source 1..89: mol_type = other DNA
tctggctcttctatctgattactctgagcgccatcaccagcgactatgtcgtagtgggtaaagctccctcttcggagggagcatcagag

SEQ ID NO: 1693 - DNA, 89 bp, synthetic construct
  misc_feature 1..89: note = engineered ribonucleic acid scaffold (ERS) sequence
  source 1..89: mol_type = other DNA
tctggctcttctatctgattactctgagggccatcaccagcgactatgtcgtagtgggtaaagctccctcttcggagggagcatcagag

SEQ ID NO: 1694 - DNA, 89 bp, synthetic construct
  misc_feature 1..89: note = engineered ribonucleic acid scaffold (ERS) sequence
  source 1..89: mol_type = other DNA
tctggctcttctatctgattactctgagtgccatcaccagcgactatgtcgtagtgggtaaagctccctcttcggagggagcatcagag

SEQ ID NO: 1695 - DNA, 89 bp, synthetic construct
  misc_feature 1..89: note = engineered ribonucleic acid scaffold (ERS) sequence
  source 1..89: mol_type = other DNA
tctggctcttctatctgattactctgagagccatcaccagcgactatgtcgtagtgggtaaagctccctcttcggagggagcatcagag

SEQ ID NO: 1696 - DNA, 89 bp, synthetic construct
  misc_feature 1..89: note = engineered ribonucleic acid scaffold (ERS) sequence
  source 1..89: mol_type = other DNA
tctggcggttctatctgattactctgagcgccatcaccagcgactatgtcgtagtgggtaaagctccctcttcggagggagcatcagag

SEQ ID NO: 1697 - DNA, 89 bp, synthetic construct
  misc_feature 1..89: note = engineered ribonucleic acid scaffold (ERS) sequence
  source 1..89: mol_type = other DNA
tctggcggttctatctgattactctgagagccatcaccagcgactatgtcgtagtgggtaaagctccctcttcggagggagcatcagag

SEQ ID NO: 1698 - DNA, 89 bp, synthetic construct
  misc_feature 1..89: note = engineered ribonucleic acid scaffold (ERS) sequence
  source 1..89: mol_type = other DNA
atcacacggttctatctgattactctgccgtgttcaccagcgactatgtcgtagtgggtaaagctccctcttcggagggagcatcagag

SEQ ID NO: 1699 - DNA, 89 bp, synthetic construct
  misc_feature 1..89: note = engineered ribonucleic acid scaffold (ERS) sequence
  source 1..89: mol_type = other DNA
atcactggtttctatctgattactctgaccagttcaccagcgactatgtcgtagtgggtaaagctccctcttcggagggagcatcagag

SEQ ID NO: 1700 - DNA, 89 bp, synthetic construct
  misc_feature 1..89: note = engineered ribonucleic acid scaffold (ERS) sequence
  source 1..89: mol_type = other DNA
atcaggccgttctatctgattactctgcggccttcaccagcgactatgtcgtagtgggtaaagctccctcttcggagggagcatcagag

SEQ ID NO: 1701 - DNA, 89 bp, synthetic construct
  misc_feature 1..89: note = engineered ribonucleic acid scaffold (ERS) sequence
  source 1..89: mol_type = other DNA
atcaggtccttctatctgattactctgggaccttcaccagcgactatgtcgtagtgggtaaagctccctcttcggagggagcatcagag

SEQ ID NO: 1702 - DNA, 89 bp, synthetic construct
  misc_feature 1..89: note = engineered ribonucleic acid scaffold (ERS) sequence
  source 1..89: mol_type = other DNA
atccagcaattctatctgattactctgttgctgtcaccagcgactatgtcgtagtgggtaaagctccctcttcggagggagcatcagag

SEQ ID NO: 1703 - DNA, 89 bp, synthetic construct
  misc_feature 1..89: note = engineered ribonucleic acid scaffold (ERS) sequence
  source 1..89: mol_type = other DNA
atccgagacttctatctgattactctgggctcgtcaccagcgactatgtcgtagtgggtaaagctccctcttcggagggagcatcagag

SEQ ID NO: 1704 - DNA, 89 bp, synthetic construct
  misc_feature 1..89: note = engineered ribonucleic acid scaffold (ERS) sequence
  source 1..89: mol_type = other DNA
atcctgtagttctatctgattactctgctacagtcaccagcgactatgtcgtagtgggtaaagctccctcttcggagggagcatcagag

SEQ ID NO: 1705 - DNA, 89 bp, synthetic construct
  misc_feature 1..89: note = engineered ribonucleic acid scaffold (ERS) sequence
  source 1..89: mol_type = other DNA
atcgagcacttctatctgattactctggggctctcaccagcgactatgtcgtagtgggtaaagctccctcttcggagggagcatcagag

SEQ ID NO: 1706 - DNA, 89 bp, synthetic construct
  misc_feature 1..89: note = engineered ribonucleic acid scaffold (ERS) sequence
  source 1..89: mol_type = other DNA
atcgaggtgttctatctgattactctgcacctctcaccagcgactatgtcgtagtgggtaaagctccctcttcggagggagcatcagag

SEQ ID NO: 1707 - DNA, 89 bp, synthetic construct
  misc_feature 1..89: note = engineered ribonucleic acid scaffold (ERS) sequence
  source 1..89: mol_type = other DNA
atcgggactttctatctgattactctgagtccctcaccagcgactatgtcgtagtgggtaaagctccctcttcggagggagcatcagag

SEQ ID NO: 1708 - DNA, 89 bp, synthetic construct
  misc_feature 1..89: note = engineered ribonucleic acid scaffold (ERS) sequence
  source 1..89: mol_type = other DNA
atcgggcaattctatctgattactctgttgccctcaccagcgactatgtcgtagtgggtaaagctccctcttcggagggagcatcagag

SEQ ID NO: 1709 - DNA, 89 bp, synthetic construct
  misc_feature 1..89: note = engineered ribonucleic acid scaffold (ERS) sequence
  source 1..89: mol_type = other DNA
atctgtgcgttctatctgattactctgcgcacatcaccagcgactatgtcgtagtgggtaaagctccctcttcggagggagcatcagag

SEQ ID NO: 1710 - DNA, 90 bp, synthetic construct
  misc_feature 1..90: note = engineered ribonucleic acid scaffold (ERS) sequence
  source 1..90: mol_type = other DNA
atctggcgcttctatctgattactctgggcgccatcaccagcgactatgtcgtagtgggtaaagctccctcttcggagggagcatcagag

SEQ ID NO: 1711 - DNA, 90 bp, synthetic construct
  misc_feature 1..90: note = engineered ribonucleic acid scaffold (ERS) sequence
  source 1..90: mol_type = other DNA
atctggcgcttctatctgattactctgggagccatcaccagcgactatgtcgtagtgggtaaagctccctcttcggagggagcatcagag

SEQ ID NO: 1712 - DNA, 90 bp, synthetic construct
  misc_feature 1..90: note = engineered ribonucleic acid scaffold (ERS) sequence
  source 1..90: mol_type = other DNA
atctggcgcttctatctgattactctgtgagccatcaccagcgactatgtcgtagtgggtaaagctccctcttcggagggagcatcagag

SEQ ID NO: 1713 - DNA, 91 bp, synthetic construct
  misc_feature 1..91: note = engineered ribonucleic acid scaffold (ERS) sequence
  source 1..91: mol_type = other DNA
atctggcgcttctatctgattactctgaggagccatcaccagcgactatgtcgtagtgggtaaagctccctcttcggagggagcatcagag

SEQ ID NO: 1714 - DNA, 90 bp, synthetic construct
  misc_feature 1..90: note = engineered ribonucleic acid scaffold (ERS) sequence
  source 1..90: mol_type = other DNA
atctggcgcttctatctgattactctgatagccatcaccagcgactatgtcgtagtgggtaaagctccctcttcggagggagcatcagag

SEQ ID NO: 1715 - DNA, 91 bp, synthetic construct
  misc_feature 1..91: note = engineered ribonucleic acid scaffold (ERS) sequence
  source 1..91: mol_type = other DNA
atctggcgcttctatctgattactctgagctgccatcaccagcgactatgtcgtagtgggtaaagctccctcttcggagggagcatcagag

SEQ ID NO: 1716 - DNA, 91 bp, synthetic construct
  misc_feature 1..91: note = engineered ribonucleic acid scaffold (ERS) sequence
  source 1..91: mol_type = other DNA
atctggcgcttctatctgattactctgagtagccatcaccagcgactatgtcgtagtgggtaaagctccctcttcggagggagcatcagag

SEQ ID NO: 1717 - DNA, 91 bp, synthetic construct
  misc_feature 1..91: note = engineered ribonucleic acid scaffold (ERS) sequence
  source 1..91: mol_type = other DNA
atctggcacttctatctgattactctgagtagccatcaccagcgactatgtcgtagtgggtaaagctccctcttcggagggagcatcagag

SEQ ID NO: 1718 - DNA, 90 bp, synthetic construct
  misc_feature 1..90: note = engineered ribonucleic acid scaffold (ERS) sequence
  source 1..90: mol_type = other DNA
atctggcgcttctatctgattactctgagcaccatcaccagcgactatgtcgtagtgggtaaagctccctcttcggagggagcatcagag

SEQ ID NO: 1719 - DNA, 90 bp, synthetic construct
  misc_feature 1..90: note = engineered ribonucleic acid scaffold (ERS) sequence
  source 1..90: mol_type = other DNA
atctggcacttctatctgattactctgagcgccatcaccagcgactatgtcgtagtgggtaaagctccctcttcggagggagcatcagag

SEQ ID NO: 1720 - DNA, 90 bp, synthetic construct
  misc_feature 1..90: note = engineered ribonucleic acid scaffold (ERS) sequence
  source 1..90: mol_type = other DNA
atctggcgcttctatctgattactctgagggccatcaccagcgactatgtcgtagtgggtaaagctccctcttcggagggagcatcagag

SEQ ID NO: 1721 - DNA, 90 bp, synthetic construct
  misc_feature 1..90: note = engineered ribonucleic acid scaffold (ERS) sequence
  source 1..90: mol_type = other DNA
atctggcgcttctatctgattactctgagtgccgtcaccagcgactatgtcgtagtgggtaaagctccctcttcggagggagcatcagag

SEQ ID NO: 1722 - DNA, 90 bp, synthetic construct
  misc_feature 1..90: note = engineered ribonucleic acid scaffold (ERS) sequence
  source 1..90: mol_type = other DNA
atctggcacttctatctgattactctgagtgccatcaccagcgactatgtcgtagtgggtaaagctccctcttcggagggagcatcagag

SEQ ID NO: 1723 - DNA, 90 bp, synthetic construct
  misc_feature 1..90: note = engineered ribonucleic acid scaffold (ERS) sequence
  source 1..90: mol_type = other DNA
atctggcgcttctatctgattactctgagaaccatcaccagcgactatgtcgtagtgggtaaagctccctcttcggagggagcatcagag

SEQ ID NO: 1724 - DNA, 90 bp, synthetic construct
  misc_feature 1..90: note = engineered ribonucleic acid scaffold (ERS) sequence
  source 1..90: mol_type = other DNA
atctggcgcttctatctgattactctgagagccgtcaccagcgactatgtcgtagtgggtaaagctccctcttcggagggagcatcagag

SEQ ID NO: 1725 - DNA, 90 bp, synthetic construct
  misc_feature 1..90: note = engineered ribonucleic acid scaffold (ERS) sequence
  source 1..90: mol_type = other DNA
atctggcgcttctatctgattactctgagagccttcaccagcgactatgtcgtagtgggtaaagctccctcttcggagggagcatcagag

SEQ ID NO: 1726 - DNA, 90 bp, synthetic construct
  misc_feature 1..90: note = engineered ribonucleic acid scaffold (ERS) sequence
  source 1..90: mol_type = other DNA
atctggggcttctatctgattactctgagacccatcaccagcgactatgtcgtagtgggtaaagctccctcttcggagggagcatcagag

SEQ ID NO: 1727 - DNA, 90 bp, synthetic construct
  misc_feature 1..90: note = engineered ribonucleic acid scaffold (ERS) sequence
  source 1..90: mol_type = other DNA
atctggtgcttctatctgattactctgagagccatcaccagcgactatgtcgtagtgggtaaagctccctcttcggagggagcatcagag

SEQ ID NO: 1728 - DNA, 90 bp, synthetic construct
  misc_feature 1..90: note = engineered ribonucleic acid scaffold (ERS) sequence
  source 1..90: mol_type = other DNA
atctgggccttctatctgattactctgaggcccatcaccagcgactatgtcgtagtgggtaaagctccctcttcggagggagcatcagag

SEQ ID NO: 1729 - DNA, 91 bp, synthetic construct
  misc_feature 1..91: note = engineered ribonucleic acid scaffold (ERS) sequence
  source 1..91: mol_type = other DNA
atctggcccttctatctgattactctgaggagccatcaccagcgactatgtcgtagtgggtaaagctccctcttcggagggagcatcagag

SEQ ID NO: 1730 - DNA, 90 bp, synthetic construct
  misc_feature 1..90: note = engineered ribonucleic acid scaffold (ERS) sequence
  source 1..90: mol_type = other DNA
atctggcccttctatctgattactctgagggccatcaccagcgactatgtcgtagtgggtaaagctccctcttcggagggagcatcagag

SEQ ID NO: 1731 - DNA, 90 bp, synthetic construct
  misc_feature 1..90: note = engineered ribonucleic acid scaffold (ERS) sequence
  source 1..90: mol_type = other DNA
atctggcccttctatctgattactctgagtgccatcaccagcgactatgtcgtagtgggtaaagctccctcttcggagggagcatcagag

SEQ ID NO: 1732 - DNA, 90 bp, synthetic construct
  misc_feature 1..90: note = engineered ribonucleic acid scaffold (ERS) sequence
  source 1..90: mol_type = other DNA
atctggcccttctatctgattactctgagagccatcaccagcgactatgtcgtagtgggtaaagctccctcttcggagggagcatcagag

SEQ ID NO: 1733 - DNA, 91 bp, synthetic construct
  misc_feature 1..91: note = engineered ribonucleic acid scaffold (ERS) sequence
  source 1..91: mol_type = other DNA
atctggcgcttctatctgattactctgagcagccatcaccagcgactatgtcgtagtgggtaaagctccctcttcggagggagcatcagag

SEQ ID NO: 1734 - DNA, 90 bp, synthetic construct
  misc_feature 1..90: note = engineered ribonucleic acid scaffold (ERS) sequence
  source 1..90: mol_type = other DNA
atctggcgcttctatctgattactctgagtgccatcaccagcgactatgtcgtagtgggtaaagctccctcttcggagggagcatcagag

SEQ ID NO: 1735 - DNA, 90 bp, synthetic construct
  misc_feature 1..90: note = engineered ribonucleic acid scaffold (ERS) sequence
  source 1..90: mol_type = other DNA
atctggcgcttctatctgattactctgagagccatcaccagcgactatgtcgtagtgggtaaagctccctcttcggagggagcatcagag

SEQ ID NO: 1736 - DNA, 90 bp, synthetic construct
  misc_feature 1..90: note = engineered ribonucleic acid scaffold (ERS) sequence
  source 1..90: mol_type = other DNA
atctggctcttctatctgattactctgagcgccatcaccagcgactatgtcgtagtgggtaaagctccctcttcggagggagcatcagag

SEQ ID NO: 1737 - DNA, 90 bp, synthetic construct
  misc_feature 1..90: note = engineered ribonucleic acid scaffold (ERS) sequence
  source 1..90: mol_type = other DNA
atctggctcttctatctgattactctgagggccatcaccagcgactatgtcgtagtgggtaaagctccctcttcggagggagcatcagag

SEQ ID NO: 1738 - DNA, 90 bp, synthetic construct
  misc_feature 1..90: note = engineered ribonucleic acid scaffold (ERS) sequence
  source 1..90: mol_type = other DNA
atctggctcttctatctgattactctgagtgccatcaccagcgactatgtcgtagtgggtaaagctccctcttcggagggagcatcagag

SEQ ID NO: 1739 - DNA, 90 bp, synthetic construct
  misc_feature 1..90: note = engineered ribonucleic acid scaffold (ERS) sequence
  source 1..90: mol_type = other DNA
atctggctcttctatctgattactctgagagccatcaccagcgactatgtcgtagtgggtaaagctccctcttcggagggagcatcagag

SEQ ID NO: 1740 - DNA, 90 bp, synthetic construct
  misc_feature 1..90: note = engineered ribonucleic acid scaffold (ERS) sequence
  source 1..90: mol_type = other DNA
atctggcggttctatctgattactctgagcgccatcaccagcgactatgtcgtagtgggtaaagctccctcttcggagggagcatcagag

SEQ ID NO: 1741 - DNA, 90 bp, synthetic construct
  misc_feature 1..90: note = engineered ribonucleic acid scaffold (ERS) sequence
  source 1..90: mol_type = other DNA
atctggcggttctatctgattactctgagagccatcaccagcgactatgtcgtagtgggtaaagctccctcttcggagggagcatcagag

SEQ ID NO: 1742 - DNA, 87 bp, synthetic construct
  misc_feature 1..87: note = engineered ribonucleic acid scaffold (ERS) sequence
  source 1..87: mol_type = other DNA
aggcgcttctatctgattactctgggcgccatcaccagcgactatgtcgtagtgggtaaagctccctcttcggagggagcatcagag

SEQ ID NO: 1743 - DNA, 87 bp, synthetic construct
  misc_feature 1..87: note = engineered ribonucleic acid scaffold (ERS) sequence
  source 1..87: mol_type = other DNA
aggcgcttctatctgattactctgggagccatcaccagcgactatgtcgtagtgggtaaagctccctcttcggagggagcatcagag

SEQ ID NO: 1744 - DNA, 87 bp, synthetic construct
  misc_feature 1..87: note = engineered ribonucleic acid scaffold (ERS) sequence
  source 1..87: mol_type = other DNA
aggcgcttctatctgattactctgtgagccatcaccagcgactatgtcgtagtgggtaaagctccctcttcggagggagcatcagag

SEQ ID NO: 1745 - DNA, 88 bp, synthetic construct
  misc_feature 1..88: note = engineered ribonucleic acid scaffold (ERS) sequence
  source 1..88: mol_type = other DNA
aggcgcttctatctgattactctgaggagccatcaccagcgactatgtcgtagtgggtaaagctccctcttcggagggagcatcagag

SEQ ID NO: 1746 - DNA, 87 bp, synthetic construct
  misc_feature 1..87: note = engineered ribonucleic acid scaffold (ERS) sequence
  source 1..87: mol_type = other DNA
aggcgcttctatctgattactctgatagccatcaccagcgactatgtcgtagtgggtaaagctccctcttcggagggagcatcagag

SEQ ID NO: 1747 - DNA, 88 bp, synthetic construct
  misc_feature 1..88: note = engineered ribonucleic acid scaffold (ERS) sequence
  source 1..88: mol_type = other DNA
aggcgcttctatctgattactctgagctgccatcaccagcgactatgtcgtagtgggtaaagctccctcttcggagggagcatcagag

SEQ ID NO: 1748 - DNA, 88 bp, synthetic construct
  misc_feature 1..88: note = engineered ribonucleic acid scaffold (ERS) sequence
  source 1..88: mol_type = other DNA
aggcgcttctatctgattactctgagtagccatcaccagcgactatgtcgtagtgggtaaagctccctcttcggagggagcatcagag

SEQ ID NO: 1749 - DNA, 88 bp, synthetic construct
  misc_feature 1..88: note = engineered ribonucleic acid scaffold (ERS) sequence
  source 1..88: mol_type = other DNA
aggcacttctatctgattactctgagtagccatcaccagcgactatgtcgtagtgggtaaagctccctcttcggagggagcatcagag

SEQ ID NO: 1750 - DNA, 87 bp, synthetic construct
  misc_feature 1..87: note = engineered ribonucleic acid scaffold (ERS) sequence
  source 1..87: mol_type = other DNA
aggcgcttctatctgattactctgagcaccatcaccagcgactatgtcgtagtgggtaaagctccctcttcggagggagcatcagag

SEQ ID NO: 1751 - DNA, 87 bp, synthetic construct
  misc_feature 1..87: note = engineered ribonucleic acid scaffold (ERS) sequence
  source 1..87: mol_type = other DNA
aggcacttctatctgattactctgagcgccatcaccagcgactatgtcgtagtgggtaaagctccctcttcggagggagcatcagag

SEQ ID NO: 1752 - DNA, 87 bp, synthetic construct
  misc_feature 1..87: note = engineered ribonucleic acid scaffold (ERS) sequence
  source 1..87: mol_type = other DNA
aggcgcttctatctgattactctgagggccatcaccagcgactatgtcgtagtgggtaaagctccctcttcggagggagcatcagag

SEQ ID NO: 1753 - DNA, 87 bp, synthetic construct
  misc_feature 1..87: note = engineered ribonucleic acid scaffold (ERS) sequence
  source 1..87: mol_type = other DNA
aggcgcttctatctgattactctgagtgccgtcaccagcgactatgtcgtagtgggtaaagctccctcttcggagggagcatcagag

SEQ ID NO: 1754 - DNA, 87 bp, synthetic construct
  misc_feature 1..87: note = engineered ribonucleic acid scaffold (ERS) sequence
  source 1..87: mol_type = other DNA
aggcacttctatctgattactctgagtgccatcaccagcgactatgtcgtagtgggtaaagctccctcttcggagggagcatcagag

SEQ ID NO: 1755 - DNA, 87 bp, synthetic construct
  misc_feature 1..87: note = engineered ribonucleic acid scaffold (ERS) sequence
  source 1..87: mol_type = other DNA
aggcgcttctatctgattactctgagaaccatcaccagcgactatgtcgtagtgggtaaagctccctcttcggagggagcatcagag

SEQ ID NO: 1756 - DNA, 87 bp, synthetic construct
  misc_feature 1..87: note = engineered ribonucleic acid scaffold (ERS) sequence
  source 1..87: mol_type = other DNA
aggcgcttctatctgattactctgagagccgtcaccagcgactatgtcgtagtgggtaaagctccctcttcggagggagcatcagag

SEQ ID NO: 1757 - DNA, 87 bp, synthetic construct
  misc_feature 1..87: note = engineered ribonucleic acid scaffold (ERS) sequence
  source 1..87: mol_type = other DNA
aggcgcttctatctgattactctgagagccttcaccagcgactatgtcgtagtgggtaaagctccctcttcggagggagcatcagag

SEQ ID NO: 1758 - DNA, 87 bp, synthetic construct
  misc_feature 1..87: note = engineered ribonucleic acid scaffold (ERS) sequence
  source 1..87: mol_type = other DNA
aggggcttctatctgattactctgagacccatcaccagcgactatgtcgtagtgggtaaagctccctcttcggagggagcatcagag

SEQ ID NO: 1759 - DNA, 87 bp, synthetic construct
  misc_feature 1..87: note = engineered ribonucleic acid scaffold (ERS) sequence
  source 1..87: mol_type = other DNA
aggtgcttctatctgattactctgagagccatcaccagcgactatgtcgtagtgggtaaagctccctcttcggagggagcatcagag

SEQ ID NO: 1760 - DNA, 87 bp, synthetic construct
  misc_feature 1..87: note = engineered ribonucleic acid scaffold (ERS) sequence
  source 1..87: mol_type = other DNA
agggccttctatctgattactctgaggcccatcaccagcgactatgtcgtagtgggtaaagctccctcttcggagggagcatcagag

SEQ ID NO: 1761 - DNA, 88 bp, synthetic construct
  misc_feature 1..88: note = engineered ribonucleic acid scaffold (ERS) sequence
  source 1..88: mol_type = other DNA
aggcccttctatctgattactctgaggagccatcaccagcgactatgtcgtagtgggtaaagctccctcttcggagggagcatcagag

SEQ ID NO: 1762 - DNA, 87 bp, synthetic construct
  misc_feature 1..87: note = engineered ribonucleic acid scaffold (ERS) sequence
  source 1..87: mol_type = other DNA
aggcccttctatctgattactctgagggccatcaccagcgactatgtcgtagtgggtaaagctccctcttcggagggagcatcagag

SEQ ID NO: 1763 - DNA, 87 bp, synthetic construct
  misc_feature 1..87: note = engineered ribonucleic acid scaffold (ERS) sequence
  source 1..87: mol_type = other DNA
aggcccttctatctgattactctgagtgccatcaccagcgactatgtcgtagtgggtaaagctccctcttcggagggagcatcagag

SEQ ID NO: 1764 - DNA, 87 bp, synthetic construct
  misc_feature 1..87: note = engineered ribonucleic acid scaffold (ERS) sequence
  source 1..87: mol_type = other DNA
aggcccttctatctgattactctgagagccatcaccagcgactatgtcgtagtgggtaaagctccctcttcggagggagcatcagag

SEQ ID NO: 1765 - DNA, 88 bp, synthetic construct
  misc_feature 1..88: note = engineered ribonucleic acid scaffold (ERS) sequence
  source 1..88: mol_type = other DNA
aggcgcttctatctgattactctgagcagccatcaccagcgactatgtcgtagtgggtaaagctccctcttcggagggagcatcagag

SEQ ID NO: 1766 - DNA, 87 bp, synthetic construct
  misc_feature 1..87: note = engineered ribonucleic acid scaffold (ERS) sequence
  source 1..87: mol_type = other DNA
aggcgcttctatctgattactctgagtgccatcaccagcgactatgtcgtagtgggtaaagctccctcttcggagggagcatcagag

SEQ ID NO: 1767 - DNA, 87 bp, synthetic construct
  misc_feature 1..87: note = engineered ribonucleic acid scaffold (ERS) sequence
  source 1..87: mol_type = other DNA
aggcgcttctatctgattactctgagagccatcaccagcgactatgtcgtagtgggtaaagctccctcttcggagggagcatcagag

SEQ ID NO: 1768 - DNA, 87 bp, synthetic construct
  misc_feature 1..87: note = engineered ribonucleic acid scaffold (ERS) sequence
  source 1..87: mol_type = other DNA
aggctcttctatctgattactctgagcgccatcaccagcgactatgtcgtagtgggtaaagctccctcttcggagggagcatcagag

SEQ ID NO: 1769 - DNA, 87 bp, synthetic construct
  misc_feature 1..87: note = engineered ribonucleic acid scaffold (ERS) sequence
  source 1..87: mol_type = other DNA
aggctcttctatctgattactctgagggccatcaccagcgactatgtcgtagtgggtaaagctccctcttcggagggagcatcagag

SEQ ID NO: 1770 - DNA, 87 bp, synthetic construct
  misc_feature 1..87: note = engineered ribonucleic acid scaffold (ERS) sequence
  source 1..87: mol_type = other DNA
aggctcttctatctgattactctgagtgccatcaccagcgactatgtcgtagtgggtaaagctccctcttcggagggagcatcagag

SEQ ID NO: 1771 - DNA, 87 bp, synthetic construct
  misc_feature 1..87: note = engineered ribonucleic acid scaffold (ERS) sequence
  source 1..87: mol_type = other DNA
aggctcttctatctgattactctgagagccatcaccagcgactatgtcgtagtgggtaaagctccctcttcggagggagcatcagag

SEQ ID NO: 1772 - DNA, 87 bp, synthetic construct
  misc_feature 1..87: note = engineered ribonucleic acid scaffold (ERS) sequence
  source 1..87: mol_type = other DNA
aggcggttctatctgattactctgagcgccatcaccagcgactatgtcgtagtgggtaaagctccctcttcggagggagcatcagag

SEQ ID NO: 1773 - DNA, 87 bp, synthetic construct
  misc_feature 1..87: note = engineered ribonucleic acid scaffold (ERS) sequence
  source 1..87: mol_type = other DNA
aggcggttctatctgattactctgagagccatcaccagcgactatgtcgtagtgggtaaagctccctcttcggagggagcatcagag

SEQ ID NO: 1774 - DNA, 87 bp, synthetic construct
  misc_feature 1..87: note = engineered ribonucleic acid scaffold (ERS) sequence
  source 1..87: mol_type = other DNA
aacacggttctatctgattactctgccgtgttcaccagcgactatgtcgtagtgggtaaagctccctcttcggagggagcatcagag

SEQ ID NO: 1775 - DNA, 87 bp, synthetic construct
  misc_feature 1..87: note = engineered ribonucleic acid scaffold (ERS) sequence
  source 1..87: mol_type = other DNA
aactggtttctatctgattactctgaccagttcaccagcgactatgtcgtagtgggtaaagctccctcttcggagggagcatcagag

SEQ ID NO: 1776 - DNA, 87 bp, synthetic construct
  misc_feature 1..87: note = engineered ribonucleic acid scaffold (ERS) sequence
  source 1..87: mol_type = other DNA
aaggccgttctatctgattactctgcggccttcaccagcgactatgtcgtagtgggtaaagctccctcttcggagggagcatcagag

SEQ ID NO: 1777 - DNA, 87 bp, synthetic construct
  misc_feature 1..87: note = engineered ribonucleic acid scaffold (ERS) sequence
  source 1..87: mol_type = other DNA
aaggtccttctatctgattactctgggaccttcaccagcgactatgtcgtagtgggtaaagctccctcttcggagggagcatcagag

SEQ ID NO: 1778 - DNA, 87 bp, synthetic construct
  misc_feature 1..87: note = engineered ribonucleic acid scaffold (ERS) sequence
  source 1..87: mol_type = other DNA
acagcaattctatctgattactctgttgctgtcaccagcgactatgtcgtagtgggtaaagctccctcttcggagggagcatcagag

SEQ ID NO: 1779 - DNA, 87 bp, synthetic construct
  misc_feature 1..87: note = engineered ribonucleic acid scaffold (ERS) sequence
  source 1..87: mol_type = other DNA
acgagacttctatctgattactctgggctcgtcaccagcgactatgtcgtagtgggtaaagctccctcttcggagggagcatcagag

SEQ ID NO: 1780 - DNA, 87 bp, synthetic construct
  misc_feature 1..87: note = engineered ribonucleic acid scaffold (ERS) sequence
  source 1..87: mol_type = other DNA
actgtagttctatctgattactctgctacagtcaccagcgactatgtcgtagtgggtaaagctccctcttcggagggagcatcagag

SEQ ID NO: 1781 - DNA, 87 bp, synthetic construct
  misc_feature 1..87: note = engineered ribonucleic acid scaffold (ERS) sequence
  source 1..87: mol_type = other DNA
agagcacttctatctgattactctggggctctcaccagcgactatgtcgtagtgggtaaagctccctcttcggagggagcatcagag

SEQ ID NO: 1782 - DNA, 87 bp, synthetic construct
  misc_feature 1..87: note = engineered ribonucleic acid scaffold (ERS) sequence
  source 1..87: mol_type = other DNA
agaggtgttctatctgattactctgcacctctcaccagcgactatgtcgtagtgggtaaagctccctcttcggagggagcatcagag

SEQ ID NO: 1783 - DNA, 87 bp, synthetic construct
  misc_feature 1..87: note = engineered ribonucleic acid scaffold (ERS) sequence
  source 1..87: mol_type = other DNA
agggactttctatctgattactctgagtccctcaccagcgactatgtcgtagtgggtaaagctccctcttcggagggagcatcagag

SEQ ID NO: 1784 - DNA, 87 bp, synthetic construct
  misc_feature 1..87: note = engineered ribonucleic acid scaffold (ERS) sequence
  source 1..87: mol_type = other DNA
agggcaattctatctgattactctgttgccctcaccagcgactatgtcgtagtgggtaaagctccctcttcggagggagcatcagag

SEQ ID NO: 1785 - DNA, 87 bp, synthetic construct
  misc_feature 1..87: note = engineered ribonucleic acid scaffold (ERS) sequence
  source 1..87: mol_type = other DNA
atgtgcgttctatctgattactctgcgcacatcaccagcgactatgtcgtagtgggtaaagctccctcttcggagggagcatcagag

SEQ ID NO: 1786 - DNA, 88 bp, synthetic construct
  misc_feature 1..88: note = engineered ribonucleic acid scaffold (ERS) sequence
  source 1..88: mol_type = other DNA
atggcgcttctatctgattactctgggcgccatcaccagcgactatgtcgtagtgggtaaagctccctcttcggagggagcatcagag

SEQ ID NO: 1787 - DNA, 88 bp, synthetic construct
  misc_feature 1..88: note = engineered ribonucleic acid scaffold (ERS) sequence
  source 1..88: mol_type = other DNA
atggcgcttctatctgattactctgggagccatcaccagcgactatgtcgtagtgggtaaagctccctcttcggagggagcatcagag

SEQ ID NO: 1788 - DNA, 88 bp, synthetic construct
  misc_feature 1..88: note = engineered ribonucleic acid scaffold (ERS) sequence
  source 1..88: mol_type = other DNA
atggcgcttctatctgattactctgtgagccatcaccagcgactatgtcgtagtgggtaaagctccctcttcggagggagcatcagag

SEQ ID NO: 1789 - DNA, 89 bp, synthetic construct
  misc_feature 1..89: note = engineered ribonucleic acid scaffold (ERS) sequence
  source 1..89: mol_type = other DNA
atggcgcttctatctgattactctgaggagccatcaccagcgactatgtcgtagtgggtaaagctccctcttcggagggagcatcagag

SEQ ID NO: 1790 - DNA, 88 bp, synthetic construct
  misc_feature 1..88: note = engineered ribonucleic acid scaffold (ERS) sequence
  source 1..88: mol_type = other DNA
atggcgcttctatctgattactctgatagccatcaccagcgactatgtcgtagtgggtaaagctccctcttcggagggagcatcagag

SEQ ID NO: 1791 - DNA, 89 bp, synthetic construct
  misc_feature 1..89: note = engineered ribonucleic acid scaffold (ERS) sequence
  source 1..89: mol_type = other DNA
atggcgcttctatctgattactctgagctgccatcaccagcgactatgtcgtagtgggtaaagctccctcttcggagggagcatcagag

SEQ ID NO: 1792 - DNA, 89 bp, synthetic construct
  misc_feature 1..89: note = engineered ribonucleic acid scaffold (ERS) sequence
  source 1..89: mol_type = other DNA
atggcgcttctatctgattactctgagtagccatcaccagcgactatgtcgtagtgggtaaagctccctcttcggagggagcatcagag

SEQ ID NO: 1793 - DNA, 89 bp, synthetic construct
  misc_feature 1..89: note = engineered ribonucleic acid scaffold (ERS) sequence
  source 1..89: mol_type = other DNA
atggcacttctatctgattactctgagtagccatcaccagcgactatgtcgtagtgggtaaagctccctcttcggagggagcatcagag

SEQ ID NO: 1794 - DNA, 88 bp, synthetic construct
  misc_feature 1..88: note = engineered ribonucleic acid scaffold (ERS) sequence
  source 1..88: mol_type = other DNA
atggcgcttctatctgattactctgagcaccatcaccagcgactatgtcgtagtgggtaaagctccctcttcggagggagcatcagag

SEQ ID NO: 1795 - DNA, 88 bp, synthetic construct
  misc_feature 1..88: note = engineered ribonucleic acid scaffold (ERS) sequence
  source 1..88: mol_type = other DNA
atggcacttctatctgattactctgagcgccatcaccagcgactatgtcgtagtgggtaaagctccctcttcggagggagcatcagag

SEQ ID NO: 1796 - DNA, 88 bp, synthetic construct
  misc_feature 1..88: note = engineered ribonucleic acid scaffold (ERS) sequence
  source 1..88: mol_type = other DNA
atggcgcttctatctgattactctgagggccatcaccagcgactatgtcgtagtgggtaaagctccctcttcggagggagcatcagag

SEQ ID NO: 1797 - DNA, 88 bp, synthetic construct
  misc_feature 1..88: note = engineered ribonucleic acid scaffold (ERS) sequence
  source 1..88: mol_type = other DNA
atggcgcttctatctgattactctgagtgccgtcaccagcgactatgtcgtagtgggtaaagctccctcttcggagggagcatcagag

SEQ ID NO: 1798 - DNA, 88 bp, synthetic construct
  misc_feature 1..88: note = engineered ribonucleic acid scaffold (ERS) sequence
  source 1..88: mol_type = other DNA
atggcacttctatctgattactctgagtgccatcaccagcgactatgtcgtagtgggtaaagctccctcttcggagggagcatcagag

SEQ ID NO: 1799 - DNA, 88 bp, synthetic construct
  misc_feature 1..88: note = engineered ribonucleic acid scaffold (ERS) sequence
  source 1..88: mol_type = other DNA
atggcgcttctatctgattactctgagaaccatcaccagcgactatgtcgtagtgggtaaagctccctcttcggagggagcatcagag

SEQ ID NO: 1800 - DNA, 88 bp, synthetic construct
  misc_feature 1..88: note = engineered ribonucleic acid scaffold (ERS) sequence
  source 1..88: mol_type = other DNA
atggcgcttctatctgattactctgagagccgtcaccagcgactatgtcgtagtgggtaaagctccctcttcggagggagcatcagag

SEQ ID NO: 1801 - DNA, 88 bp, synthetic construct
  misc_feature 1..88: note = engineered ribonucleic acid scaffold (ERS) sequence
  source 1..88: mol_type = other DNA
atggcgcttctatctgattactctgagagccttcaccagcgactatgtcgtagtgggtaaagctccctcttcggagggagcatcagag

SEQ ID NO: 1802 - DNA, 88 bp, synthetic construct
  misc_feature 1..88: note = engineered ribonucleic acid scaffold (ERS) sequence
  source 1..88: mol_type = other DNA
atggggcttctatctgattactctgagacccatcaccagcgactatgtcgtagtgggtaaagctccctcttcggagggagcatcagag

SEQ ID NO: 1803 - DNA, 90 bp, synthetic construct
  misc_feature 1..90: note = engineered ribonucleic acid scaffold (ERS) sequence
  source 1..90: mol_type = other DNA
aacacggtacttctatctgattactctgccgtgttcaccagcgactatgtcgtagtgggtaaagctccctcttcggagggagcatcagag

SEQ ID NO: 1804 - DNA, 90 bp, synthetic construct
  misc_feature 1..90: note = engineered ribonucleic acid scaffold (ERS) sequence
  source 1..90: mol_type = other DNA
aactggttacttctatctgattactctgaccagttcaccagcgactatgtcgtagtgggtaaagctccctcttcggagggagcatcagag

SEQ ID NO: 1805 - DNA, 90 bp, synthetic construct
  misc_feature 1..90: note = engineered ribonucleic acid scaffold (ERS) sequence
  source 1..90: mol_type = other DNA
aaggccgtacttctatctgattactctgcggccttcaccagcgactatgtcgtagtgggtaaagctccctcttcggagggagcatcagag

SEQ ID NO: 1806 - DNA, 90 bp, synthetic construct
  misc_feature 1..90: note = engineered ribonucleic acid scaffold (ERS) sequence
  source 1..90: mol_type = other DNA
aaggtcctacttctatctgattactctgggaccttcaccagcgactatgtcgtagtgggtaaagctccctcttcggagggagcatcagag

SEQ ID NO: 1807 - DNA, 90 bp, synthetic construct
  misc_feature 1..90: note = engineered ribonucleic acid scaffold (ERS) sequence
  source 1..90: mol_type = other DNA
acagcaatacttctatctgattactctgttgctgtcaccagcgactatgtcgtagtgggtaaagctccctcttcggagggagcatcagag

SEQ ID NO: 1808 - DNA, 90 bp, synthetic construct
  misc_feature 1..90: note = engineered ribonucleic acid scaffold (ERS) sequence
  source 1..90: mol_type = other DNA
acgagactacttctatctgattactctgggctcgtcaccagcgactatgtcgtagtgggtaaagctccctcttcggagggagcatcagag

SEQ ID NO: 1809 - DNA, 90 bp, synthetic construct
  misc_feature 1..90: note = engineered ribonucleic acid scaffold (ERS) sequence
  source 1..90: mol_type = other DNA
actgtagtacttctatctgattactctgctacagtcaccagcgactatgtcgtagtgggtaaagctccctcttcggagggagcatcagag

SEQ ID NO: 1810 - DNA, 90 bp, synthetic construct
  misc_feature 1..90: note = engineered ribonucleic acid scaffold (ERS) sequence
  source 1..90: mol_type = other DNA
agagcactacttctatctgattactctggggctctcaccagcgactatgtcgtagtgggtaaagctccctcttcggagggagcatcagag

SEQ ID NO: 1811 - DNA, 90 bp, synthetic construct
  misc_feature 1..90: note = engineered ribonucleic acid scaffold (ERS) sequence
  source 1..90: mol_type = other DNA
agaggtgtacttctatctgattactctgcacctctcaccagcgactatgtcgtagtgggtaaagctccctcttcggagggagcatcagag

SEQ ID NO: 1812 - DNA, 90 bp, synthetic construct
  misc_feature 1..90: note = engineered ribonucleic acid scaffold (ERS) sequence
  source 1..90: mol_type = other DNA
agggacttacttctatctgattactctgagtccctcaccagcgactatgtcgtagtgggtaaagctccctcttcggagggagcatcagag

SEQ ID NO: 1813 - DNA, 90 bp, synthetic construct
  misc_feature 1..90: note = engineered ribonucleic acid scaffold (ERS) sequence
  source 1..90: mol_type = other DNA
agggcaatacttctatctgattactctgttgccctcaccagcgactatgtcgtagtgggtaaagctccctcttcggagggagcatcagag

SEQ ID NO: 1814 - DNA, 90 bp, synthetic construct
  misc_feature 1..90: note = engineered ribonucleic acid scaffold (ERS) sequence
  source 1..90: mol_type = other DNA
atgtgcgtacttctatctgattactctgcgcacatcaccagcgactatgtcgtagtgggtaaagctccctcttcggagggagcatcagag

SEQ ID NO: 1815 - DNA, 88 bp, synthetic construct
  misc_feature 1..88: note = engineered ribonucleic acid scaffold (ERS) sequence
  source 1..88: mol_type = other DNA
atggtgcttctatctgattactctgggcgccatcaccagcgactatgtcgtagtgggtaaagctccctcttcggagggagcatcagag

SEQ ID NO: 1816 - DNA, 88 bp, synthetic construct
  misc_feature 1..88: note = engineered ribonucleic acid scaffold (ERS) sequence
  source 1..88: mol_type = other DNA
atggtgcttctatctgattactctgggagccatcaccagcgactatgtcgtagtgggtaaagctccctcttcggagggagcatcagag

SEQ ID NO: 1817 - DNA, 88 bp, synthetic construct
  misc_feature 1..88: note = engineered ribonucleic acid scaffold (ERS) sequence
  source 1..88: mol_type = other DNA
atggtgcttctatctgattactctgtgagccatcaccagcgactatgtcgtagtgggtaaagctccctcttcggagggagcatcagag

SEQ ID NO: 1818 - DNA, 89 bp, synthetic construct
  misc_feature 1..89: note = engineered ribonucleic acid scaffold (ERS) sequence
  source 1..89: mol_type = other DNA
atggtgcttctatctgattactctgaggagccatcaccagcgactatgtcgtagtgggtaaagctccctcttcggagggagcatcagag

SEQ ID NO: 1819 - DNA, 88 bp, synthetic construct
  misc_feature 1..88: note = engineered ribonucleic acid scaffold (ERS) sequence
  source 1..88: mol_type = other DNA
atggtgcttctatctgattactctgatagccatcaccagcgactatgtcgtagtgggtaaagctccctcttcggagggagcatcagag

SEQ ID NO: 1820 - DNA, 89 bp, synthetic construct
  misc_feature 1..89: note = engineered ribonucleic acid scaffold (ERS) sequence
  source 1..89: mol_type = other DNA
atggtgcttctatctgattactctgagctgccatcaccagcgactatgtcgtagtgggtaaagctccctcttcggagggagcatcagag

SEQ ID NO: 1821 - DNA, 89 bp, synthetic construct
  misc_feature 1..89: note = engineered ribonucleic acid scaffold (ERS) sequence
  source 1..89: mol_type = other DNA
atggtgcttctatctgattactctgagtagccatcaccagcgactatgtcgtagtgggtaaagctccctcttcggagggagcatcagag

SEQ ID NO: 1822 - DNA, 89 bp, synthetic construct
  misc_feature 1..89: note = engineered ribonucleic acid scaffold (ERS) sequence
  source 1..89: mol_type = other DNA
atggtacttctatctgattactctgagtagccatcaccagcgactatgtcgtagtgggtaaagctccctcttcggagggagcatcagag

SEQ ID NO: 1823 - DNA, 88 bp, synthetic construct
  misc_feature 1..88: note = engineered ribonucleic acid scaffold (ERS) sequence
  source 1..88: mol_type = other DNA
atggtgcttctatctgattactctgagcaccatcaccagcgactatgtcgtagtgggtaaagctccctcttcggagggagcatcagag

SEQ ID NO: 1824 - DNA, 88 bp, synthetic construct
  misc_feature 1..88: note = engineered ribonucleic acid scaffold (ERS) sequence
  source 1..88: mol_type = other DNA
atggtacttctatctgattactctgagcgccatcaccagcgactatgtcgtagtgggtaaagctccctcttcggagggagcatcagag

SEQ ID NO: 1825 - DNA, 88 bp, synthetic construct
  misc_feature 1..88: note = engineered ribonucleic acid scaffold (ERS) sequence
  source 1..88: mol_type = other DNA
atggtgcttctatctgattactctgagggccatcaccagcgactatgtcgtagtgggtaaagctccctcttcggagggagcatcagag

SEQ ID NO: 1826 - DNA, 88 bp, synthetic construct
  misc_feature 1..88: note = engineered ribonucleic acid scaffold (ERS) sequence
  source 1..88: mol_type = other DNA
atggtgcttctatctgattactctgagtgccgtcaccagcgactatgtcgtagtgggtaaagctccctcttcggagggagcatcagag

SEQ ID NO: 1827 - DNA, 88 bp, synthetic construct
  misc_feature 1..88: note = engineered ribonucleic acid scaffold (ERS) sequence
  source 1..88: mol_type = other DNA
atggtacttctatctgattactctgagtgccatcaccagcgactatgtcgtagtgggtaaagctccctcttcggagggagcatcagag

SEQ ID NO: 1828 - DNA, 88 bp, synthetic construct
  misc_feature 1..88: note = engineered ribonucleic acid scaffold (ERS) sequence
  source 1..88: mol_type = other DNA
atggtgcttctatctgattactctgagaaccatcaccagcgactatgtcgtagtgggtaaagctccctcttcggagggagcatcagag

SEQ ID NO: 1829 - DNA, 88 bp, synthetic construct
  misc_feature 1..88: note = engineered ribonucleic acid scaffold (ERS) sequence
  source 1..88: mol_type = other DNA
atggtgcttctatctgattactctgagagccgtcaccagcgactatgtcgtagtgggtaaagctccctcttcggagggagcatcagag

SEQ ID NO: 1830 - DNA, 88 bp, synthetic construct
  misc_feature 1..88: note = engineered ribonucleic acid scaffold (ERS) sequence
  source 1..88: mol_type = other DNA
atggtgcttctatctgattactctgagagccttcaccagcgactatgtcgtagtgggtaaagctccctcttcggagggagcatcagag

SEQ ID NO: 1831 - DNA, 89 bp, synthetic construct
  misc_feature 1..89: note = engineered ribonucleic acid scaffold (ERS) sequence
  source 1..89: mol_type = other DNA
atggtggcttctatctgattactctgagacccatcaccagcgactatgtcgtagtgggtaaagctccctcttcggagggagcatcagag

SEQ ID NO: 1832 - DNA, 89 bp, synthetic construct
  misc_feature 1..89: note = engineered ribonucleic acid scaffold (ERS) sequence
  source 1..89: mol_type = other DNA
atggttgcttctatctgattactctgagagccatcaccagcgactatgtcgtagtgggtaaagctccctcttcggagggagcatcagag

SEQ ID NO: 1833 - DNA, 89 bp, synthetic construct
  misc_feature 1..89: note = engineered ribonucleic acid scaffold (ERS) sequence
  source 1..89: mol_type = other DNA
atggtgccttctatctgattactctgaggcccatcaccagcgactatgtcgtagtgggtaaagctccctcttcggagggagcatcagag

SEQ ID NO: 1834 - DNA, 89 bp, synthetic construct
  misc_feature 1..89: note = engineered ribonucleic acid scaffold (ERS) sequence
  source 1..89: mol_type = other DNA
atggtccttctatctgattactctgaggagccatcaccagcgactatgtcgtagtgggtaaagctccctcttcggagggagcatcagag

SEQ ID NO: 1835 - DNA, 88 bp, synthetic construct
  misc_feature 1..88: note = engineered ribonucleic acid scaffold (ERS) sequence
  source 1..88: mol_type = other DNA
atggtccttctatctgattactctgagggccatcaccagcgactatgtcgtagtgggtaaagctccctcttcggagggagcatcagag

SEQ ID NO: 1836 - DNA, 88 bp, synthetic construct
  misc_feature 1..88: note = engineered ribonucleic acid scaffold (ERS) sequence
  source 1..88: mol_type = other DNA
atggtccttctatctgattactctgagtgccatcaccagcgactatgtcgtagtgggtaaagctccctcttcggagggagcatcagag

SEQ ID NO: 1837 - DNA, 88 bp, synthetic construct
  misc_feature 1..88: note = engineered ribonucleic acid scaffold (ERS) sequence
  source 1..88: mol_type = other DNA
atggtccttctatctgattactctgagagccatcaccagcgactatgtcgtagtgggtaaagctccctcttcggagggagcatcagag

SEQ ID NO: 1838 - DNA, 89 bp, synthetic construct
  misc_feature 1..89: note = engineered ribonucleic acid scaffold (ERS) sequence
  source 1..89: mol_type = other DNA
atggtgcttctatctgattactctgagcagccatcaccagcgactatgtcgtagtgggtaaagctccctcttcggagggagcatcagag

SEQ ID NO: 1839 - DNA, 88 bp, synthetic construct
  misc_feature 1..88: note = engineered ribonucleic acid scaffold (ERS) sequence
  source 1..88: mol_type = other DNA
atggtgcttctatctgattactctgagtgccatcaccagcgactatgtcgtagtgggtaaagctccctcttcggagggagcatcagag

SEQ ID NO: 1840 - DNA, 88 bp, synthetic construct
  misc_feature 1..88: note = engineered ribonucleic acid scaffold (ERS) sequence
  source 1..88: mol_type = other DNA
atggtgcttctatctgattactctgagagccatcaccagcgactatgtcgtagtgggtaaagctccctcttcggagggagcatcagag

SEQ ID NO: 1841 - DNA, 88 bp, synthetic construct
  misc_feature 1..88: note = engineered ribonucleic acid scaffold (ERS) sequence
  source 1..88: mol_type = other DNA
atggttcttctatctgattactctgagcgccatcaccagcgactatgtcgtagtgggtaaagctccctcttcggagggagcatcagag

SEQ ID NO: 1842 - DNA, 88 bp, synthetic construct
  misc_feature 1..88: note = engineered ribonucleic acid scaffold (ERS) sequence
  source 1..88: mol_type = other DNA
atggttcttctatctgattactctgagggccatcaccagcgactatgtcgtagtgggtaaagctccctcttcggagggagcatcagag

SEQ ID NO: 1843 - DNA, 88 bp, synthetic construct
  misc_feature 1..88: note = engineered ribonucleic acid scaffold (ERS) sequence
  source 1..88: mol_type = other DNA
atggttcttctatctgattactctgagtgccatcaccagcgactatgtcgtagtgggtaaagctccctcttcggagggagcatcagag

SEQ ID NO: 1844 - DNA, 88 bp, synthetic construct
  misc_feature 1..88: note = engineered ribonucleic acid scaffold (ERS) sequence
  source 1..88: mol_type = other DNA
atggttcttctatctgattactctgagagccatcaccagcgactatgtcgtagtgggtaaagctccctcttcggagggagcatcagag

SEQ ID NO: 1845 - DNA, 88 bp, synthetic construct
  misc_feature 1..88: note = engineered ribonucleic acid scaffold (ERS) sequence
  source 1..88: mol_type = other DNA
atggtggttctatctgattactctgagcgccatcaccagcgactatgtcgtagtgggtaaagctccctcttcggagggagcatcagag

SEQ ID NO: 1846 - DNA, 88 bp, synthetic construct
  misc_feature 1..88: note = engineered ribonucleic acid scaffold (ERS) sequence
  source 1..88: mol_type = other DNA
atggtggttctatctgattactctgagagccatcaccagcgactatgtcgtagtgggtaaagctccctcttcggagggagcatcagag

SEQ ID NO: 1847 - DNA, 88 bp, synthetic construct
  misc_feature 1..88: note = engineered ribonucleic acid scaffold (ERS) sequence
  source 1..88: mol_type = other DNA
atgggccttctatctgattactctgaggcccatcaccagcgactatgtcgtagtgggtaaagctccctcttcggagggagcatcagag

SEQ ID NO: 1848 - DNA, 89 bp, synthetic construct
  misc_feature 1..89: note = engineered ribonucleic acid scaffold (ERS) sequence
  source 1..89: mol_type = other DNA
atggcccttctatctgattactctgaggagccatcaccagcgactatgtcgtagtgggtaaagctccctcttcggagggagcatcagag

SEQ ID NO: 1849 - DNA, 88 bp, synthetic construct
  misc_feature 1..88: note = engineered ribonucleic acid scaffold (ERS) sequence
  source 1..88: mol_type = other DNA
atggcccttctatctgattactctgagggccatcaccagcgactatgtcgtagtgggtaaagctccctcttcggagggagcatcagag

SEQ ID NO: 1850 - DNA, 88 bp, synthetic construct
  misc_feature 1..88: note = engineered ribonucleic acid scaffold (ERS) sequence
  source 1..88: mol_type = other DNA
atggcccttctatctgattactctgagtgccatcaccagcgactatgtcgtagtgggtaaagctccctcttcggagggagcatcagag

SEQ ID NO: 1851 - DNA, 88 bp, synthetic construct
  misc_feature 1..88: note = engineered ribonucleic acid scaffold (ERS) sequence
  source 1..88: mol_type = other DNA
atggcccttctatctgattactctgagagccatcaccagcgactatgtcgtagtgggtaaagctccctcttcggagggagcatcagag

SEQ ID NO: 1852 - DNA, 89 bp, synthetic construct
  misc_feature 1..89: note = engineered ribonucleic acid scaffold (ERS) sequence
  source 1..89: mol_type = other DNA
atggcgcttctatctgattactctgagcagccatcaccagcgactatgtcgtagtgggtaaagctccctcttcggagggagcatcagag

SEQ ID NO: 1853 - DNA, 88 bp, synthetic construct
  misc_feature 1..88: note = engineered ribonucleic acid scaffold (ERS) sequence
  source 1..88: mol_type = other DNA
atggcgcttctatctgattactctgagtgccatcaccagcgactatgtcgtagtgggtaaagctccctcttcggagggagcatcagag

SEQ ID NO: 1854 - DNA, 88 bp, synthetic construct
  misc_feature 1..88: note = engineered ribonucleic acid scaffold (ERS) sequence
  source 1..88: mol_type = other DNA
atggcgcttctatctgattactctgagagccatcaccagcgactatgtcgtagtgggtaaagctccctcttcggagggagcatcagag

SEQ ID NO: 1855 - DNA, 88 bp, synthetic construct
  misc_feature 1..88: note = engineered ribonucleic acid scaffold (ERS) sequence
  source 1..88: mol_type = other DNA
atggctcttctatctgattactctgagcgccatcaccagcgactatgtcgtagtgggtaaagctccctcttcggagggagcatcagag

SEQ ID NO: 1856 - DNA, 88 bp, synthetic construct
  misc_feature 1..88: note = engineered ribonucleic acid scaffold (ERS) sequence
  source 1..88: mol_type = other DNA
atggctcttctatctgattactctgagggccatcaccagcgactatgtcgtagtgggtaaagctccctcttcggagggagcatcagag

SEQ ID NO: 1857 - DNA, 88 bp, synthetic construct
  misc_feature 1..88: note = engineered ribonucleic acid scaffold (ERS) sequence
  source 1..88: mol_type = other DNA
atggctcttctatctgattactctgagtgccatcaccagcgactatgtcgtagtgggtaaagctccctcttcggagggagcatcagag

SEQ ID NO: 1858 - DNA, 88 bp, synthetic construct
  misc_feature 1..88: note = engineered ribonucleic acid scaffold (ERS) sequence
  source 1..88: mol_type = other DNA
atggctcttctatctgattactctgagagccatcaccagcgactatgtcgtagtgggtaaagctccctcttcggagggagcatcagag

SEQ ID NO: 1859 - DNA, 88 bp, synthetic construct
  misc_feature 1..88: note = engineered ribonucleic acid scaffold (ERS) sequence
  source 1..88: mol_type = other DNA
atggcggttctatctgattactctgagcgccatcaccagcgactatgtcgtagtgggtaaagctccctcttcggagggagcatcagag

SEQ ID NO: 1860 - DNA, 88 bp, synthetic construct
  misc_feature 1..88: note = engineered ribonucleic acid scaffold (ERS) sequence
  source 1..88: mol_type = other DNA
atggcggttctatctgattactctgagagccatcaccagcgactatgtcgtagtgggtaaagctccctcttcggagggagcatcagag

SEQ ID NO: 1861 - DNA, 88 bp, synthetic construct
  misc_feature 1..88: note = engineered ribonucleic acid scaffold (ERS) sequence
  source 1..88: mol_type = other DNA
aaacacggttctatctgattactctgccgtgttcaccagcgactatgtcgtagtgggtaaagctccctcttcggagggagcatcagag

SEQ ID NO: 1862 - DNA, 88 bp, synthetic construct
  misc_feature 1..88: note = engineered ribonucleic acid scaffold (ERS) sequence
  source 1..88: mol_type = other DNA
aaactggtttctatctgattactctgaccagttcaccagcgactatgtcgtagtgggtaaagctccctcttcggagggagcatcagag

SEQ ID NO: 1863 - DNA, 88 bp, synthetic construct
  misc_feature 1..88: note = engineered ribonucleic acid scaffold (ERS) sequence
  source 1..88: mol_type = other DNA
aaaggccgttctatctgattactctgcggccttcaccagcgactatgtcgtagtgggtaaagctccctcttcggagggagcatcagag

SEQ ID NO: 1864 - DNA, 88 bp, synthetic construct
  misc_feature 1..88: note = engineered ribonucleic acid scaffold (ERS) sequence
  source 1..88: mol_type = other DNA
aaaggtccttctatctgattactctgggaccttcaccagcgactatgtcgtagtgggtaaagctccctcttcggagggagcatcagag

SEQ ID NO: 1865 - DNA, 88 bp, synthetic construct
  misc_feature 1..88: note = engineered ribonucleic acid scaffold (ERS) sequence
  source 1..88: mol_type = other DNA
aacagcaattctatctgattactctgttgctgtcaccagcgactatgtcgtagtgggtaaagctccctcttcggagggagcatcagag

SEQ ID NO: 1866 - DNA, 88 bp, synthetic construct
  misc_feature 1..88: note = engineered ribonucleic acid scaffold (ERS) sequence
  source 1..88: mol_type = other DNA
aacgagacttctatctgattactctgggctcgtcaccagcgactatgtcgtagtgggtaaagctccctcttcggagggagcatcagag

SEQ ID NO: 1867 - DNA, 88 bp, synthetic construct
  misc_feature 1..88: note = engineered ribonucleic acid scaffold (ERS) sequence
  source 1..88: mol_type = other DNA
aactgtagttctatctgattactctgctacagtcaccagcgactatgtcgtagtgggtaaagctccctcttcggagggagcatcagag

SEQ ID NO: 1868 - DNA, 88 bp, synthetic construct
  misc_feature 1..88: note = engineered ribonucleic acid scaffold (ERS) sequence
  source 1..88: mol_type = other DNA
aagagcacttctatctgattactctggggctctcaccagcgactatgtcgtagtgggtaaagctccctcttcggagggagcatcagag

SEQ ID NO: 1869 - DNA, 88 bp, synthetic construct
  misc_feature 1..88: note = engineered ribonucleic acid scaffold (ERS) sequence
  source 1..88: mol_type = other DNA
aagaggtgttctatctgattactctgcacctctcaccagcgactatgtcgtagtgggtaaagctccctcttcggagggagcatcagag

SEQ ID NO: 1870 - DNA, 88 bp, synthetic construct
  misc_feature 1..88: note = engineered ribonucleic acid scaffold (ERS) sequence
  source 1..88: mol_type = other DNA
aagggactttctatctgattactctgagtccctcaccagcgactatgtcgtagtgggtaaagctccctcttcggagggagcatcagag

SEQ ID NO: 1871 - DNA, 88 bp, synthetic construct
  misc_feature 1..88: note = engineered ribonucleic acid scaffold (ERS) sequence
  source 1..88: mol_type = other DNA
aagggcaattctatctgattactctgttgccctcaccagcgactatgtcgtagtgggtaaagctccctcttcggagggagcatcagag

SEQ ID NO: 1872 - DNA, 88 bp, synthetic construct
  misc_feature 1..88: note = engineered ribonucleic acid scaffold (ERS) sequence
  source 1..88: mol_type = other DNA
aatgtgcgttctatctgattactctgcgcacatcaccagcgactatgtcgtagtgggtaaagctccctcttcggagggagcatcagag

SEQ ID NO: 1873 - DNA, 89 bp, synthetic construct
  misc_feature 1..89: note = engineered ribonucleic acid scaffold (ERS) sequence
  source 1..89: mol_type = other DNA
aatggcgcttctatctgattactctgggcgccatcaccagcgactatgtcgtagtgggtaaagctccctcttcggagggagcatcagag

SEQ ID NO: 1874 - DNA, 89 bp, synthetic construct
  misc_feature 1..89: note = engineered ribonucleic acid scaffold (ERS) sequence
  source 1..89: mol_type = other DNA
aatggcgcttctatctgattactctgggagccatcaccagcgactatgtcgtagtgggtaaagctccctcttcggagggagcatcagag

SEQ ID NO: 1875 - DNA, 89 bp, synthetic construct
  misc_feature 1..89: note = engineered ribonucleic acid scaffold (ERS) sequence
  source 1..89: mol_type = other DNA
aatggcgcttctatctgattactctgtgagccatcaccagcgactatgtcgtagtgggtaaagctccctcttcggagggagcatcagag

SEQ ID NO: 1876 - DNA, 90 bp, synthetic construct
  misc_feature 1..90: note = engineered ribonucleic acid scaffold (ERS) sequence
  source 1..90: mol_type = other DNA
aatggcgcttctatctgattactctgaggagccatcaccagcgactatgtcgtagtgggtaaagctccctcttcggagggagcatcagag

SEQ ID NO: 1877 - DNA, 89 bp, synthetic construct
  misc_feature 1..89: note = engineered ribonucleic acid scaffold (ERS) sequence
  source 1..89: mol_type = other DNA
aatggcgcttctatctgattactctgatagccatcaccagcgactatgtcgtagtgggtaaagctccctcttcggagggagcatcagag

SEQ ID NO: 1878 - DNA, 90 bp, synthetic construct
  misc_feature 1..90: note = engineered ribonucleic acid scaffold (ERS) sequence
  source 1..90: mol_type = other DNA
aatggcgcttctatctgattactctgagctgccatcaccagcgactatgtcgtagtgggtaaagctccctcttcggagggagcatcagag

SEQ ID NO: 1879 - DNA, 90 bp, synthetic construct
  misc_feature 1..90: note = engineered ribonucleic acid scaffold (ERS) sequence
  source 1..90: mol_type = other DNA
aatggcgcttctatctgattactctgagtagccatcaccagcgactatgtcgtagtgggtaaagctccctcttcggagggagcatcagag

SEQ ID NO: 1880 - DNA, 90 bp, synthetic construct
  misc_feature 1..90: note = engineered ribonucleic acid scaffold (ERS) sequence
  source 1..90: mol_type = other DNA
aatggcacttctatctgattactctgagtagccatcaccagcgactatgtcgtagtgggtaaagctccctcttcggagggagcatcagag

SEQ ID NO: 1881 - DNA, 89 bp, synthetic construct
  misc_feature 1..89: note = engineered ribonucleic acid scaffold (ERS) sequence
  source 1..89: mol_type = other DNA
aatggcgcttctatctgattactctgagcaccatcaccagcgactatgtcgtagtgggtaaagctccctcttcggagggagcatcagag

SEQ ID NO: 1882 - DNA, 89 bp, synthetic construct
  misc_feature 1..89: note = engineered ribonucleic acid scaffold (ERS) sequence
  source 1..89: mol_type = other DNA
aatggcacttctatctgattactctgagcgccatcaccagcgactatgtcgtagtgggtaaagctccctcttcggagggagcatcagag

SEQ ID NO: 1883 - DNA, 89 bp, synthetic construct
  misc_feature 1..89: note = engineered ribonucleic acid scaffold (ERS) sequence
  source 1..89: mol_type = other DNA
aatggcgcttctatctgattactctgagggccatcaccagcgactatgtcgtagtgggtaaagctccctcttcggagggagcatcagag

SEQ ID NO: 1884 - DNA, 89 bp, synthetic construct
  misc_feature 1..89: note = engineered ribonucleic acid scaffold (ERS) sequence
  source 1..89: mol_type = other DNA
aatggcgcttctatctgattactctgagtgccgtcaccagcgactatgtcgtagtgggtaaagctccctcttcggagggagcatcagag

SEQ ID NO: 1885 - DNA, 89 bp, synthetic construct
  misc_feature 1..89: note = engineered ribonucleic acid scaffold (ERS) sequence
  source 1..89: mol_type = other DNA
aatggcacttctatctgattactctgagtgccatcaccagcgactatgtcgtagtgggtaaagctccctcttcggagggagcatcagag

SEQ ID NO: 1886 - DNA, 89 bp, synthetic construct
  misc_feature 1..89: note = engineered ribonucleic acid scaffold (ERS) sequence
  source 1..89: mol_type = other DNA
aatggcgcttctatctgattactctgagaaccatcaccagcgactatgtcgtagtgggtaaagctccctcttcggagggagcatcagag

SEQ ID NO: 1887 - DNA, 89 bp, synthetic construct
  misc_feature 1..89: note = engineered ribonucleic acid scaffold (ERS) sequence
  source 1..89: mol_type = other DNA
aatggcgcttctatctgattactctgagagccgtcaccagcgactatgtcgtagtgggtaaagctccctcttcggagggagcatcagag

SEQ ID NO: 1888 - DNA, 89 bp, synthetic construct
  misc_feature 1..89: note = engineered ribonucleic acid scaffold (ERS) sequence
  source 1..89: mol_type = other DNA
aatggcgcttctatctgattactctgagagccttcaccagcgactatgtcgtagtgggtaaagctccctcttcggagggagcatcagag

SEQ ID NO: 1889 - DNA, 89 bp, synthetic construct
  misc_feature 1..89: note = engineered ribonucleic acid scaffold (ERS) sequence
  source 1..89: mol_type = other DNA
aatggggcttctatctgattactctgagacccatcaccagcgactatgtcgtagtgggtaaagctccctcttcggagggagcatcagag

SEQ ID NO: 1890 - DNA, 89 bp, synthetic construct
  misc_feature 1..89: note = engineered ribonucleic acid scaffold (ERS) sequence
  source 1..89: mol_type = other DNA
aatggtgcttctatctgattactctgagagccatcaccagcgactatgtcgtagtgggtaaagctccctcttcggagggagcatcagag

SEQ ID NO: 1891 - DNA, 89 bp, synthetic construct
  misc_feature 1..89: note = engineered ribonucleic acid scaffold (ERS) sequence
  source 1..89: mol_type = other DNA
aatgggccttctatctgattactctgaggcccatcaccagcgactatgtcgtagtgggtaaagctccctcttcggagggagcatcagag

SEQ ID NO: 1892 - DNA, 90 bp, synthetic construct
  misc_feature 1..90: note = engineered ribonucleic acid scaffold (ERS) sequence
  source 1..90: mol_type = other DNA
aatggcccttctatctgattactctgaggagccatcaccagcgactatgtcgtagtgggtaaagctccctcttcggagggagcatcagag

SEQ ID NO: 1893 - DNA, 89 bp, synthetic construct
  misc_feature 1..89: note = engineered ribonucleic acid scaffold (ERS) sequence
  source 1..89: mol_type = other DNA
aatggcccttctatctgattactctgagggccatcaccagcgactatgtcgtagtgggtaaagctccctcttcggagggagcatcagag

SEQ ID NO: 1894 - DNA, 89 bp, synthetic construct
  misc_feature 1..89: note = engineered ribonucleic acid scaffold (ERS) sequence
  source 1..89: mol_type = other DNA
aatggcccttctatctgattactctgagtgccatcaccagcgactatgtcgtagtgggtaaagctccctcttcggagggagcatcagag

SEQ ID NO: 1895 - DNA, 89 bp, synthetic construct
  misc_feature 1..89: note = engineered ribonucleic acid scaffold (ERS) sequence
  source 1..89: mol_type = other DNA
aatggcccttctatctgattactctgagagccatcaccagcgactatgtcgtagtgggtaaagctccctcttcggagggagcatcagag

SEQ ID NO: 1896 - DNA, 90 bp, synthetic construct
  misc_feature 1..90: note = engineered ribonucleic acid scaffold (ERS) sequence
  source 1..90: mol_type = other DNA
aatggcgcttctatctgattactctgagcagccatcaccagcgactatgtcgtagtgggtaaagctccctcttcggagggagcatcagag

SEQ ID NO: 1897 - DNA, 89 bp, synthetic construct
  misc_feature 1..89: note = engineered ribonucleic acid scaffold (ERS) sequence
  source 1..89: mol_type = other DNA
aatggcgcttctatctgattactctgagtgccatcaccagcgactatgtcgtagtgggtaaagctccctcttcggagggagcatcagag

SEQ ID NO: 1898 - DNA, 89 bp, synthetic construct
  misc_feature 1..89: note = engineered ribonucleic acid scaffold (ERS) sequence
  source 1..89: mol_type = other DNA
aatggcgcttctatctgattactctgagagccatcaccagcgactatgtcgtagtgggtaaagctccctcttcggagggagcatcagag

SEQ ID NO: 1899 - DNA, 89 bp, synthetic construct
  misc_feature 1..89: note = engineered ribonucleic acid scaffold (ERS) sequence
  source 1..89: mol_type = other DNA
aatggctcttctatctgattactctgagcgccatcaccagcgactatgtcgtagtgggtaaagctccctcttcggagggagcatcagag

SEQ ID NO: 1900 - DNA, 89 bp, synthetic construct
  misc_feature 1..89: note = engineered ribonucleic acid scaffold (ERS) sequence
  source 1..89: mol_type = other DNA
aatggctcttctatctgattactctgagggccatcaccagcgactatgtcgtagtgggtaaagctccctcttcggagggagcatcagag

SEQ ID NO: 1901 - DNA, 89 bp, synthetic construct
  misc_feature 1..89: note = engineered ribonucleic acid scaffold (ERS) sequence
  source 1..89: mol_type = other DNA
aatggctcttctatctgattactctgagtgccatcaccagcgactatgtcgtagtgggtaaagctccctcttcggagggagcatcagag

SEQ ID NO: 1902 - DNA, 89 bp, synthetic construct
  misc_feature 1..89: note = engineered ribonucleic acid scaffold (ERS) sequence
  source 1..89: mol_type = other DNA
aatggctcttctatctgattactctgagagccatcaccagcgactatgtcgtagtgggtaaagctccctcttcggagggagcatcagag

SEQ ID NO: 1903 - DNA, 89 bp, synthetic construct
  misc_feature 1..89: note = engineered ribonucleic acid scaffold (ERS) sequence
  source 1..89: mol_type = other DNA
aatggcggttctatctgattactctgagcgccatcaccagcgactatgtcgtagtgggtaaagctccctcttcggagggagcatcagag

SEQ ID NO: 1904 - DNA, 89 bp, synthetic construct
  misc_feature 1..89: note = engineered ribonucleic acid scaffold (ERS) sequence
  source 1..89: mol_type = other DNA
aatggcggttctatctgattactctgagagccatcaccagcgactatgtcgtagtgggtaaagctccctcttcggagggagcatcagag

SEQ ID NO: 1905 - DNA, 88 bp, synthetic construct
  misc_feature 1..88: note = engineered ribonucleic acid scaffold (ERS) sequence
  source 1..88: mol_type = other DNA
agacacggttctatctgattactctgccgtgttcaccagcgactatgtcgtagtgggtaaagctccctcttcggagggagcatcagag

SEQ ID NO: 1906 - DNA, 88 bp, synthetic construct
  misc_feature 1..88: note = engineered ribonucleic acid scaffold (ERS) sequence
  source 1..88: mol_type = other DNA
agactggtttctatctgattactctgaccagttcaccagcgactatgtcgtagtgggtaaagctccctcttcggagggagcatcagag

SEQ ID NO: 1907 - DNA, 88 bp, synthetic construct
  misc_feature 1..88: note = engineered ribonucleic acid scaffold (ERS) sequence
  source 1..88: mol_type = other DNA
agaggccgttctatctgattactctgcggccttcaccagcgactatgtcgtagtgggtaaagctccctcttcggagggagcatcagag

SEQ ID NO: 1908 - DNA, 88 bp, synthetic construct
  misc_feature 1..88: note = engineered ribonucleic acid scaffold (ERS) sequence
  source 1..88: mol_type = other DNA
agaggtccttctatctgattactctgggaccttcaccagcgactatgtcgtagtgggtaaagctccctcttcggagggagcatcagag

SEQ ID NO: 1909 - DNA, 88 bp, synthetic construct
  misc_feature 1..88: note = engineered ribonucleic acid scaffold (ERS) sequence
  source 1..88: mol_type = other DNA
agcagcaattctatctgattactctgttgctgtcaccagcgactatgtcgtagtgggtaaagctccctcttcggagggagcatcagag

SEQ ID NO: 1910 - DNA, 88 bp, synthetic construct
  misc_feature 1..88: note = engineered ribonucleic acid scaffold (ERS) sequence
  source 1..88: mol_type = other DNA
agcgagacttctatctgattactctgggctcgtcaccagcgactatgtcgtagtgggtaaagctccctcttcggagggagcatcagag

SEQ ID NO: 1911 - DNA, 88 bp, synthetic construct
  misc_feature 1..88: note = engineered ribonucleic acid scaffold (ERS) sequence
  source 1..88: mol_type = other DNA
agctgtagttctatctgattactctgctacagtcaccagcgactatgtcgtagtgggtaaagctccctcttcggagggagcatcagag

SEQ ID NO: 1912 - DNA, 88 bp, synthetic construct
  misc_feature 1..88: note = engineered ribonucleic acid scaffold (ERS) sequence
  source 1..88: mol_type = other DNA
aggagcacttctatctgattactctggggctctcaccagcgactatgtcgtagtgggtaaagctccctcttcggagggagcatcagag

SEQ ID NO: 1913 - DNA, 88 bp, synthetic construct
  misc_feature 1..88: note = engineered ribonucleic acid scaffold (ERS) sequence
  source 1..88: mol_type = other DNA
aggaggtgttctatctgattactctgcacctctcaccagcgactatgtcgtagtgggtaaagctccctcttcggagggagcatcagag

SEQ ID NO: 1914 - DNA, 88 bp, synthetic construct
  misc_feature 1..88: note = engineered ribonucleic acid scaffold (ERS) sequence
  source 1..88: mol_type = other DNA
aggggactttctatctgattactctgagtccctcaccagcgactatgtcgtagtgggtaaagctccctcttcggagggagcatcagag

SEQ ID NO: 1915 - DNA, 88 bp, synthetic construct
  misc_feature 1..88: note = engineered ribonucleic acid scaffold (ERS) sequence
  source 1..88: mol_type = other DNA
aggggcaattctatctgattactctgttgccctcaccagcgactatgtcgtagtgggtaaagctccctcttcggagggagcatcagag

SEQ ID NO: 1916 - DNA, 88 bp, synthetic construct
  misc_feature 1..88: note = engineered ribonucleic acid scaffold (ERS) sequence
  source 1..88: mol_type = other DNA
agtgtgcgttctatctgattactctgcgcacatcaccagcgactatgtcgtagtgggtaaagctccctcttcggagggagcatcagag

SEQ ID NO: 1917 - DNA, 89 bp, synthetic construct
  misc_feature 1..89: note = engineered ribonucleic acid scaffold (ERS) sequence
  source 1..89: mol_type = other DNA
agtggcgcttctatctgattactctgggcgccatcaccagcgactatgtcgtagtgggtaaagctccctcttcggagggagcatcagag

SEQ ID NO: 1918 - DNA, 89 bp, synthetic construct
  misc_feature 1..89: note = engineered ribonucleic acid scaffold (ERS) sequence
  source 1..89: mol_type = other DNA
agtggcgcttctatctgattactctgggagccatcaccagcgactatgtcgtagtgggtaaagctccctcttcggagggagcatcagag

SEQ ID NO: 1919 - DNA, 89 bp, synthetic construct
  misc_feature 1..89: note = engineered ribonucleic acid scaffold (ERS) sequence
  source 1..89: mol_type = other DNA
agtggcgcttctatctgattactctgtgagccatcaccagcgactatgtcgtagtgggtaaagctccctcttcggagggagcatcagag

SEQ ID NO: 1920 - DNA, 90 bp, synthetic construct
  misc_feature 1..90: note = engineered ribonucleic acid scaffold (ERS) sequence
  source 1..90: mol_type = other DNA
agtggcgcttctatctgattactctgaggagccatcaccagcgactatgtcgtagtgggtaaagctccctcttcggagggagcatcagag

SEQ ID NO: 1921 - DNA, 89 bp, synthetic construct
  misc_feature 1..89: note = engineered ribonucleic acid scaffold (ERS) sequence
  source 1..89: mol_type = other DNA
agtggcgcttctatctgattactctgatagccatcaccagcgactatgtcgtagtgggtaaagctccctcttcggagggagcatcagag

SEQ ID NO: 1922 - DNA, 90 bp, synthetic construct
  misc_feature 1..90: note = engineered ribonucleic acid scaffold (ERS) sequence
  source 1..90: mol_type = other DNA
agtggcgcttctatctgattactctgagctgccatcaccagcgactatgtcgtagtgggtaaagctccctcttcggagggagcatcagag

SEQ ID NO: 1923 - DNA, 90 bp, synthetic construct
  misc_feature 1..90: note = engineered ribonucleic acid scaffold (ERS) sequence
  source 1..90: mol_type = other DNA
agtggcgcttctatctgattactctgagtagccatcaccagcgactatgtcgtagtgggtaaagctccctcttcggagggagcatcagag

SEQ ID NO: 1924 - DNA, 90 bp, synthetic construct
  misc_feature 1..90: note = engineered ribonucleic acid scaffold (ERS) sequence
  source 1..90: mol_type = other DNA
agtggcacttctatctgattactctgagtagccatcaccagcgactatgtcgtagtgggtaaagctccctcttcggagggagcatcagag

SEQ ID NO: 1925 - DNA, 89 bp, synthetic construct
  misc_feature 1..89: note = engineered ribonucleic acid scaffold (ERS) sequence
  source 1..89: mol_type = other DNA
agtggcgcttctatctgattactctgagcaccatcaccagcgactatgtcgtagtgggtaaagctccctcttcggagggagcatcagag

SEQ ID NO: 1926 - DNA, 89 bp, synthetic construct
  misc_feature 1..89: note = engineered ribonucleic acid scaffold (ERS) sequence
  source 1..89: mol_type = other DNA
agtggcacttctatctgattactctgagcgccatcaccagcgactatgtcgtagtgggtaaagctccctcttcggagggagcatcagag

SEQ ID NO: 1927 - DNA, 89 bp, synthetic construct
  misc_feature 1..89: note = engineered ribonucleic acid scaffold (ERS) sequence
  source 1..89: mol_type = other DNA
agtggcgcttctatctgattactctgagggccatcaccagcgactatgtcgtagtgggtaaagctccctcttcggagggagcatcagag

SEQ ID NO: 1928 - DNA, 89 bp, synthetic construct
  misc_feature 1..89: note = engineered ribonucleic acid scaffold (ERS) sequence
  source 1..89: mol_type = other DNA
agtggcgcttctatctgattactctgagtgccgtcaccagcgactatgtcgtagtgggtaaagctccctcttcggagggagcatcagag

SEQ ID NO: 1929 - DNA, 89 bp, synthetic construct
  misc_feature 1..89: note = engineered ribonucleic acid scaffold (ERS) sequence
  source 1..89: mol_type = other DNA
agtggcacttctatctgattactctgagtgccatcaccagcgactatgtcgtagtgggtaaagctccctcttcggagggagcatcagag

SEQ ID NO: 1930 - DNA, 89 bp, synthetic construct
  misc_feature 1..89: note = engineered ribonucleic acid scaffold (ERS) sequence
  source 1..89: mol_type = other DNA
agtggcgcttctatctgattactctgagaaccatcaccagcgactatgtcgtagtgggtaaagctccctcttcggagggagcatcagag

SEQ ID NO: 1931 - DNA, 89 bp, synthetic construct
  misc_feature 1..89: note = engineered ribonucleic acid scaffold (ERS) sequence
  source 1..89: mol_type = other DNA
agtggcgcttctatctgattactctgagagccgtcaccagcgactatgtcgtagtgggtaaagctccctcttcggagggagcatcagag

SEQ ID NO: 1932 - DNA, 89 bp, synthetic construct
  misc_feature 1..89: note = engineered ribonucleic acid scaffold (ERS) sequence
  source 1..89: mol_type = other DNA
agtggcgcttctatctgattactctgagagccttcaccagcgactatgtcgtagtgggtaaagctccctcttcggagggagcatcagag

SEQ ID NO: 1933 - DNA, 89 bp, synthetic construct
  misc_feature 1..89: note = engineered ribonucleic acid scaffold (ERS) sequence
  source 1..89: mol_type = other DNA
agtggggcttctatctgattactctgagacccatcaccagcgactatgtcgtagtgggtaaagctccctcttcggagggagcatcagag

SEQ ID NO: 1934 - DNA, 89 bp, synthetic construct
  misc_feature 1..89: note = engineered ribonucleic acid scaffold (ERS) sequence
  source 1..89: mol_type = other DNA
agtggtgcttctatctgattactctgagagccatcaccagcgactatgtcgtagtgggtaaagctccctcttcggagggagcatcagag

SEQ ID NO: 1935 - DNA, 89 bp, synthetic construct
  misc_feature 1..89: note = engineered ribonucleic acid scaffold (ERS) sequence
  source 1..89: mol_type = other DNA
agtgggccttctatctgattactctgaggcccatcaccagcgactatgtcgtagtgggtaaagctccctcttcggagggagcatcagag

SEQ ID NO: 1936 - DNA, 90 bp, synthetic construct
  misc_feature 1..90: note = engineered ribonucleic acid scaffold (ERS) sequence
  source 1..90: mol_type = other DNA
agtggcccttctatctgattactctgaggagccatcaccagcgactatgtcgtagtgggtaaagctccctcttcggagggagcatcagag

SEQ ID NO: 1937 - DNA, 89 bp, synthetic construct
  misc_feature 1..89: note = engineered ribonucleic acid scaffold (ERS) sequence
  source 1..89: mol_type = other DNA
agtggcccttctatctgattactctgagggccatcaccagcgactatgtcgtagtgggtaaagctccctcttcggagggagcatcagag

SEQ ID NO: 1938 - DNA, 89 bp, synthetic construct
  misc_feature 1..89: note = engineered ribonucleic acid scaffold (ERS) sequence
  source 1..89: mol_type = other DNA
agtggcccttctatctgattactctgagtgccatcaccagcgactatgtcgtagtgggtaaagctccctcttcggagggagcatcagag

SEQ ID NO: 1939 - DNA, 89 bp, synthetic construct
  misc_feature 1..89: note = engineered ribonucleic acid scaffold (ERS) sequence
  source 1..89: mol_type = other DNA
agtggcccttctatctgattactctgagagccatcaccagcgactatgtcgtagtgggtaaagctccctcttcggagggagcatcagag

SEQ ID NO: 1940 - DNA, 90 bp, synthetic construct
  misc_feature 1..90: note = engineered ribonucleic acid scaffold (ERS) sequence
  source 1..90: mol_type = other DNA
agtggcgcttctatctgattactctgagcagccatcaccagcgactatgtcgtagtgggtaaagctccctcttcggagggagcatcagag

SEQ ID NO: 1941 - DNA, 89 bp, synthetic construct
  misc_feature 1..89: note = engineered ribonucleic acid scaffold (ERS) sequence
  source 1..89: mol_type = other DNA
agtggcgcttctatctgattactctgagtgccatcaccagcgactatgtcgtagtgggtaaagctccctcttcggagggagcatcagag

SEQ ID NO: 1942 - DNA, 89 bp, synthetic construct
  misc_feature 1..89: note = engineered ribonucleic acid scaffold (ERS) sequence
  source 1..89: mol_type = other DNA
agtggcgcttctatctgattactctgagagccatcaccagcgactatgtcgtagtgggtaaagctccctcttcggagggagcatcagag

SEQ ID NO: 1943 - DNA, 89 bp, synthetic construct
  misc_feature 1..89: note = engineered ribonucleic acid scaffold (ERS) sequence
  source 1..89: mol_type = other DNA
agtggctcttctatctgattactctgagcgccatcaccagcgactatgtcgtagtgggtaaagctccctcttcggagggagcatcagag

SEQ ID NO: 1944 - DNA, 89 bp, synthetic construct
  misc_feature 1..89: note = engineered ribonucleic acid scaffold (ERS) sequence
  source 1..89: mol_type = other DNA
agtggctcttctatctgattactctgagggccatcaccagcgactatgtcgtagtgggtaaagctccctcttcggagggagcatcagag

SEQ ID NO: 1945 - DNA, 89 bp, synthetic construct
  misc_feature 1..89: note = engineered ribonucleic acid scaffold (ERS) sequence
  source 1..89: mol_type = other DNA
agtggctcttctatctgattactctgagtgccatcaccagcgactatgtcgtagtgggtaaagctccctcttcggagggagcatcagag

SEQ ID NO: 1946 - DNA, 89 bp, synthetic construct
  misc_feature 1..89: note = engineered ribonucleic acid scaffold (ERS) sequence
  source 1..89: mol_type = other DNA
agtggctcttctatctgattactctgagagccatcaccagcgactatgtcgtagtgggtaaagctccctcttcggagggagcatcagag

SEQ ID NO: 1947 - DNA, 89 bp, synthetic construct
  misc_feature 1..89: note = engineered ribonucleic acid scaffold (ERS) sequence
  source 1..89: mol_type = other DNA
agtggcggttctatctgattactctgagcgccatcaccagcgactatgtcgtagtgggtaaagctccctcttcggagggagcatcagag

SEQ ID NO: 1948 - DNA, 89 bp, synthetic construct
  misc_feature 1..89: note = engineered ribonucleic acid scaffold (ERS) sequence
  source 1..89: mol_type = other DNA
agtggcggttctatctgattactctgagagccatcaccagcgactatgtcgtagtgggtaaagctccctcttcggagggagcatcagag

SEQ ID NO: 1949 - DNA, 88 bp, synthetic construct
  misc_feature 1..88: note = engineered ribonucleic acid scaffold (ERS) sequence
  source 1..88: mol_type = other DNA
acacacggttctatctgattactctgccgtgttcaccagcgactatgtcgtagtgggtaaagctccctcttcggagggagcatcagag

SEQ ID NO: 1950 - DNA, 88 bp, synthetic construct
  misc_feature 1..88: note = engineered ribonucleic acid scaffold (ERS) sequence
  source 1..88: mol_type = other DNA
acactggtttctatctgattactctgaccagttcaccagcgactatgtcgtagtgggtaaagctccctcttcggagggagcatcagag

SEQ ID NO: 1951 - DNA, 88 bp, synthetic construct
  misc_feature 1..88: note = engineered ribonucleic acid scaffold (ERS) sequence
  source 1..88: mol_type = other DNA
acaggccgttctatctgattactctgcggccttcaccagcgactatgtcgtagtgggtaaagctccctcttcggagggagcatcagag

SEQ ID NO: 1952 - DNA, 88 bp, synthetic construct
  misc_feature 1..88: note = engineered ribonucleic acid scaffold (ERS) sequence
  source 1..88: mol_type = other DNA
acaggtccttctatctgattactctgggaccttcaccagcgactatgtcgtagtgggtaaagctccctcttcggagggagcatcagag

SEQ ID NO: 1953 - DNA, 88 bp, synthetic construct
  misc_feature 1..88: note = engineered ribonucleic acid scaffold (ERS) sequence
  source 1..88: mol_type = other DNA
accagcaattctatctgattactctgttgctgtcaccagcgactatgtcgtagtgggtaaagctccctcttcggagggagcatcagag

SEQ ID NO: 1954 - DNA, 88 bp, synthetic construct
  misc_feature 1..88: note = engineered ribonucleic acid scaffold (ERS) sequence
  source 1..88: mol_type = other DNA
accgagacttctatctgattactctgggctcgtcaccagcgactatgtcgtagtgggtaaagctccctcttcggagggagcatcagag

SEQ ID NO: 1955 - DNA, 88 bp, synthetic construct
  misc_feature 1..88: note = engineered ribonucleic acid scaffold (ERS) sequence
  source 1..88: mol_type = other DNA
acctgtagttctatctgattactctgctacagtcaccagcgactatgtcgtagtgggtaaagctccctcttcggagggagcatcagag

SEQ ID NO: 1956 - DNA, 88 bp, synthetic construct
  misc_feature 1..88: note = engineered ribonucleic acid scaffold (ERS) sequence
  source 1..88: mol_type = other DNA
acgagcacttctatctgattactctggggctctcaccagcgactatgtcgtagtgggtaaagctccctcttcggagggagcatcagag

SEQ ID NO: 1957 - DNA, 88 bp, synthetic construct
  misc_feature 1..88: note = engineered ribonucleic acid scaffold (ERS) sequence
  source 1..88: mol_type = other DNA
acgaggtgttctatctgattactctgcacctctcaccagcgactatgtcgtagtgggtaaagctccctcttcggagggagcatcagag

SEQ ID NO: 1958 - DNA, 88 bp, synthetic construct
  misc_feature 1..88: note = engineered ribonucleic acid scaffold (ERS) sequence
  source 1..88: mol_type = other DNA
acgggactttctatctgattactctgagtccctcaccagcgactatgtcgtagtgggtaaagctccctcttcggagggagcatcagag

SEQ ID NO: 1959 - DNA, 88 bp, synthetic construct
  misc_feature 1..88: note = engineered ribonucleic acid scaffold (ERS) sequence
  source 1..88: mol_type = other DNA
acgggcaattctatctgattactctgttgccctcaccagcgactatgtcgtagtgggtaaagctccctcttcggagggagcatcagag

SEQ ID NO: 1960 - DNA, 88 bp, synthetic construct
  misc_feature 1..88: note = engineered ribonucleic acid scaffold (ERS) sequence
  source 1..88: mol_type = other DNA
actgtgcgttctatctgattactctgcgcacatcaccagcgactatgtcgtagtgggtaaagctccctcttcggagggagcatcagag

SEQ ID NO: 1961 - DNA, 88 bp, synthetic construct
  misc_feature 1..88: note = engineered ribonucleic acid scaffold (ERS) sequence
  source 1..88: mol_type = other DNA
acggcgcttctatctgattactctgggcgccatcaccagcgactatgtcgtagtgggtaaagctccctcttcggagggagcatcagag

SEQ ID NO: 1962 - DNA, 88 bp, synthetic construct
  misc_feature 1..88: note = engineered ribonucleic acid scaffold (ERS) sequence
  source 1..88: mol_type = other DNA
acggcgcttctatctgattactctgggagccatcaccagcgactatgtcgtagtgggtaaagctccctcttcggagggagcatcagag

SEQ ID NO: 1963 - DNA, 88 bp, synthetic construct
  misc_feature 1..88: note = engineered ribonucleic acid scaffold (ERS) sequence
  source 1..88: mol_type = other DNA
acggcgcttctatctgattactctgtgagccatcaccagcgactatgtcgtagtgggtaaagctccctcttcggagggagcatcagag

SEQ ID NO: 1964 - DNA, 89 bp, synthetic construct
  misc_feature 1..89: note = engineered ribonucleic acid scaffold (ERS) sequence
  source 1..89: mol_type = other DNA
acggcgcttctatctgattactctgaggagccatcaccagcgactatgtcgtagtgggtaaagctccctcttcggagggagcatcagag

SEQ ID NO: 1965 - DNA, 88 bp, synthetic construct
  misc_feature 1..88: note = engineered ribonucleic acid scaffold (ERS) sequence
  source 1..88: mol_type = other DNA
acggcgcttctatctgattactctgatagccatcaccagcgactatgtcgtagtgggtaaagctccctcttcggagggagcatcagag

SEQ ID NO: 1966 - DNA, 89 bp, synthetic construct
  misc_feature 1..89: note = engineered ribonucleic acid scaffold (ERS) sequence
  source 1..89: mol_type = other DNA
acggcgcttctatctgattactctgagctgccatcaccagcgactatgtcgtagtgggtaaagctccctcttcggagggagcatcagag

SEQ ID NO: 1967 - DNA, 89 bp, synthetic construct
  misc_feature 1..89: note = engineered ribonucleic acid scaffold (ERS) sequence
  source 1..89: mol_type = other DNA
acggcgcttctatctgattactctgagtagccatcaccagcgactatgtcgtagtgggtaaagctccctcttcggagggagcatcagag

SEQ ID NO: 1968 - DNA, 89 bp, synthetic construct
  misc_feature 1..89: note = engineered ribonucleic acid scaffold (ERS) sequence
  source 1..89: mol_type = other DNA
acggcacttctatctgattactctgagtagccatcaccagcgactatgtcgtagtgggtaaagctccctcttcggagggagcatcagag

SEQ ID NO: 1969 - DNA, 88 bp, synthetic construct
  misc_feature 1..88: note = engineered ribonucleic acid scaffold (ERS) sequence
  source 1..88: mol_type = other DNA
acggcgcttctatctgattactctgagcaccatcaccagcgactatgtcgtagtgggtaaagctccctcttcggagggagcatcagag

SEQ ID NO: 1970 - DNA, 88 bp, synthetic construct
  misc_feature 1..88: note = engineered ribonucleic acid scaffold (ERS) sequence
  source 1..88: mol_type = other DNA
acggcacttctatctgattactctgagcgccatcaccagcgactatgtcgtagtgggtaaagctccctcttcggagggagcatcagag

SEQ ID NO: 1971 - DNA, 88 bp, synthetic construct
  misc_feature 1..88: note = engineered ribonucleic acid scaffold (ERS) sequence
  source 1..88: mol_type = other DNA
acggcgcttctatctgattactctgagggccatcaccagcgactatgtcgtagtgggtaaagctccctcttcggagggagcatcagag

SEQ ID NO: 1972 - DNA, 88 bp, synthetic construct
  misc_feature 1..88: note = engineered ribonucleic acid scaffold (ERS) sequence
  source 1..88: mol_type = other DNA
acggcgcttctatctgattactctgagtgccgtcaccagcgactatgtcgtagtgggtaaagctccctcttcggagggagcatcagag

SEQ ID NO: 1973 - DNA, 88 bp, synthetic construct
  misc_feature 1..88: note = engineered ribonucleic acid scaffold (ERS) sequence
  source 1..88: mol_type = other DNA
acggcacttctatctgattactctgagtgccatcaccagcgactatgtcgtagtgggtaaagctccctcttcggagggagcatcagag

SEQ ID NO: 1974 - DNA, 88 bp, synthetic construct
  misc_feature 1..88: note = engineered ribonucleic acid scaffold (ERS) sequence
  source 1..88: mol_type = other DNA
acggcgcttctatctgattactctgagaaccatcaccagcgactatgtcgtagtgggtaaagctccctcttcggagggagcatcagag

SEQ ID NO: 1975 - DNA, 88 bp, synthetic construct
  misc_feature 1..88: note = engineered ribonucleic acid scaffold (ERS) sequence
  source 1..88: mol_type = other DNA
acggcgcttctatctgattactctgagagccgtcaccagcgactatgtcgtagtgggtaaagctccctcttcggagggagcatcagag

SEQ ID NO: 1976 - DNA, 88 bp, synthetic construct
  misc_feature 1..88: note = engineered ribonucleic acid scaffold (ERS) sequence
  source 1..88: mol_type = other DNA
acggcgcttctatctgattactctgagagccttcaccagcgactatgtcgtagtgggtaaagctccctcttcggagggagcatcagag

SEQ ID NO: 1977 - DNA, 88 bp, synthetic construct
  misc_feature 1..88: note = engineered ribonucleic acid scaffold (ERS) sequence
  source 1..88: mol_type = other DNA
acggggcttctatctgattactctgagacccatcaccagcgactatgtcgtagtgggtaaagctccctcttcggagggagcatcagag

SEQ ID NO: 1978 - DNA, 88 bp, synthetic construct
  misc_feature 1..88: note = engineered ribonucleic acid scaffold (ERS) sequence
  source 1..88: mol_type = other DNA
acggtgcttctatctgattactctgagagccatcaccagcgactatgtcgtagtgggtaaagctccctcttcggagggagcatcagag

SEQ ID NO: 1979 - DNA, 88 bp, synthetic construct
  misc_feature 1..88: note = engineered ribonucleic acid scaffold (ERS) sequence
  source 1..88: mol_type = other DNA
acgggccttctatctgattactctgaggcccatcaccagcgactatgtcgtagtgggtaaagctccctcttcggagggagcatcagag

SEQ ID NO: 1980 - DNA, 89 bp, synthetic construct
  misc_feature 1..89: note = engineered ribonucleic acid scaffold (ERS) sequence
  source 1..89: mol_type = other DNA
acggcccttctatctgattactctgaggagccatcaccagcgactatgtcgtagtgggtaaagctccctcttcggagggagcatcagag

SEQ ID NO: 1981 - DNA, 88 bp, synthetic construct
  misc_feature 1..88: note = engineered ribonucleic acid scaffold (ERS) sequence
  source 1..88: mol_type = other DNA
acggcccttctatctgattactctgagggccatcaccagcgactatgtcgtagtgggtaaagctccctcttcggagggagcatcagag

SEQ ID NO: 1982 - DNA, 88 bp, synthetic construct
  misc_feature 1..88: note = engineered ribonucleic acid scaffold (ERS) sequence
  source 1..88: mol_type = other DNA
acggcccttctatctgattactctgagtgccatcaccagcgactatgtcgtagtgggtaaagctccctcttcggagggagcatcagag

SEQ ID NO: 1983 - DNA, 88 bp, synthetic construct
  misc_feature 1..88: note = engineered ribonucleic acid scaffold (ERS) sequence
  source 1..88: mol_type = other DNA
acggcccttctatctgattactctgagagccatcaccagcgactatgtcgtagtgggtaaagctccctcttcggagggagcatcagag

SEQ ID NO: 1984 - DNA, 89 bp, synthetic construct
  misc_feature 1..89: note = engineered ribonucleic acid scaffold (ERS) sequence
  source 1..89: mol_type = other DNA
acggcgcttctatctgattactctgagcagccatcaccagcgactatgtcgtagtgggtaaagctccctcttcggagggagcatcagag

SEQ ID NO: 1985 - DNA, 88 bp, synthetic construct
  misc_feature 1..88: note = engineered ribonucleic acid scaffold (ERS) sequence
  source 1..88: mol_type = other DNA
acggcgcttctatctgattactctgagtgccatcaccagcgactatgtcgtagtgggtaaagctccctcttcggagggagcatcagag

SEQ ID NO: 1986 - DNA, 88 bp, synthetic construct
  misc_feature 1..88: note = engineered ribonucleic acid scaffold (ERS) sequence
  source 1..88: mol_type = other DNA
acggcgcttctatctgattactctgagagccatcaccagcgactatgtcgtagtgggtaaagctccctcttcggagggagcatcagag

SEQ ID NO: 1987 - DNA, 88 bp, synthetic construct
  misc_feature 1..88: note = engineered ribonucleic acid scaffold (ERS) sequence
  source 1..88: mol_type = other DNA
acggctcttctatctgattactctgagcgccatcaccagcgactatgtcgtagtgggtaaagctccctcttcggagggagcatcagag

SEQ ID NO: 1988 - DNA, 88 bp, synthetic construct
  misc_feature 1..88: note = engineered ribonucleic acid scaffold (ERS) sequence
  source 1..88: mol_type = other DNA
acggctcttctatctgattactctgagggccatcaccagcgactatgtcgtagtgggtaaagctccctcttcggagggagcatcagag

SEQ ID NO: 1989 - DNA, 88 bp, synthetic construct
  misc_feature 1..88: note = engineered ribonucleic acid scaffold (ERS) sequence
  source 1..88: mol_type = other DNA
acggctcttctatctgattactctgagtgccatcaccagcgactatgtcgtagtgggtaaagctccctcttcggagggagcatcagag

SEQ ID NO: 1990 - DNA, 88 bp, synthetic construct
  misc_feature 1..88: note = engineered ribonucleic acid scaffold (ERS) sequence
  source 1..88: mol_type = other DNA
acggctcttctatctgattactctgagagccatcaccagcgactatgtcgtagtgggtaaagctccctcttcggagggagcatcagag

SEQ ID NO: 1991 - DNA, 88 bp, synthetic construct
  misc_feature 1..88: note = engineered ribonucleic acid scaffold (ERS) sequence
  source 1..88: mol_type = other DNA
acggcggttctatctgattactctgagcgccatcaccagcgactatgtcgtagtgggtaaagctccctcttcggagggagcatcagag

SEQ ID NO: 1992 - DNA, 88 bp, synthetic construct
  misc_feature 1..88: note = engineered ribonucleic acid scaffold (ERS) sequence
  source 1..88: mol_type = other DNA
acggcggttctatctgattactctgagagccatcaccagcgactatgtcgtagtgggtaaagctccctcttcggagggagcatcagag

SEQ ID NO: 1993 - DNA, 89 bp, synthetic construct
  misc_feature 1..89: note = engineered ribonucleic acid scaffold (ERS) sequence
  source 1..89: mol_type = other DNA
acaacacggttctatctgattactctgccgtgttcaccagcgactatgtcgtagtgggtaaagctccctcttcggagggagcatcagag

SEQ ID NO: 1994 - DNA, 89 bp, synthetic construct
  misc_feature 1..89: note = engineered ribonucleic acid scaffold (ERS) sequence
  source 1..89: mol_type = other DNA
acaactggtttctatctgattactctgaccagttcaccagcgactatgtcgtagtgggtaaagctccctcttcggagggagcatcagag

SEQ ID NO: 1995 - DNA, 89 bp, synthetic construct
  misc_feature 1..89: note = engineered ribonucleic acid scaffold (ERS) sequence
  source 1..89: mol_type = other DNA
acaaggccgttctatctgattactctgcggccttcaccagcgactatgtcgtagtgggtaaagctccctcttcggagggagcatcagag

SEQ ID NO: 1996 - DNA, 89 bp, synthetic construct
  misc_feature 1..89: note = engineered ribonucleic acid scaffold (ERS) sequence
  source 1..89: mol_type = other DNA
acaaggtccttctatctgattactctgggaccttcaccagcgactatgtcgtagtgggtaaagctccctcttcggagggagcatcagag

SEQ ID NO: 1997 - DNA, 89 bp, synthetic construct
  misc_feature 1..89: note = engineered ribonucleic acid scaffold (ERS) sequence
  source 1..89: mol_type = other DNA
acacagcaattctatctgattactctgttgctgtcaccagcgactatgtcgtagtgggtaaagctccctcttcggagggagcatcagag

SEQ ID NO: 1998 - DNA, 89 bp, synthetic construct
  misc_feature 1..89: note = engineered ribonucleic acid scaffold (ERS) sequence
  source 1..89: mol_type = other DNA
acacgagacttctatctgattactctgggctcgtcaccagcgactatgtcgtagtgggtaaagctccctcttcggagggagcatcagag

SEQ ID NO: 1999 - DNA, 89 bp, synthetic construct
  misc_feature 1..89: note = engineered ribonucleic acid scaffold (ERS) sequence
  source 1..89: mol_type = other DNA
acactgtagttctatctgattactctgctacagtcaccagcgactatgtcgtagtgggtaaagctccctcttcggagggagcatcagag

SEQ ID NO: 2000 - DNA, 89 bp, synthetic construct
  misc_feature 1..89: note = engineered ribonucleic acid scaffold (ERS) sequence
  source 1..89: mol_type = other DNA
acagagcacttctatctgattactctggggctctcaccagcgactatgtcgtagtgggtaaagctccctcttcggagggagcatcagag

SEQ ID NO: 2001 - DNA, 89 bp, synthetic construct
  misc_feature 1..89: note = engineered ribonucleic acid scaffold (ERS) sequence
  source 1..89: mol_type = other DNA
acagaggtgttctatctgattactctgcacctctcaccagcgactatgtcgtagtgggtaaagctccctcttcggagggagcatcagag

SEQ ID NO: 2002 - DNA, 89 bp, synthetic construct
  misc_feature 1..89: note = engineered ribonucleic acid scaffold (ERS) sequence
  source 1..89: mol_type = other DNA
acagggactttctatctgattactctgagtccctcaccagcgactatgtcgtagtgggtaaagctccctcttcggagggagcatcagag

SEQ ID NO: 2003 - DNA, 89 bp, synthetic construct
  misc_feature 1..89: note = engineered ribonucleic acid scaffold (ERS) sequence
  source 1..89: mol_type = other DNA
acagggcaattctatctgattactctgttgccctcaccagcgactatgtcgtagtgggtaaagctccctcttcggagggagcatcagag

SEQ ID NO: 2004 - DNA, 89 bp, synthetic construct
  misc_feature 1..89: note = engineered ribonucleic acid scaffold (ERS) sequence
  source 1..89: mol_type = other DNA
acatgtgcgttctatctgattactctgcgcacatcaccagcgactatgtcgtagtgggtaaagctccctcttcggagggagcatcagag

SEQ ID NO: 2005 - DNA, 89 bp, synthetic construct
  misc_feature 1..89: note = engineered ribonucleic acid scaffold (ERS) sequence
  source 1..89: mol_type = other DNA
acaggcgcttctatctgattactctgggcgccatcaccagcgactatgtcgtagtgggtaaagctccctcttcggagggagcatcagag

SEQ ID NO: 2006 - DNA, 89 bp, synthetic construct
  misc_feature 1..89: note = engineered ribonucleic acid scaffold (ERS) sequence
  source 1..89: mol_type = other DNA
acaggcgcttctatctgattactctgggagccatcaccagcgactatgtcgtagtgggtaaagctccctcttcggagggagcatcagag

SEQ ID NO: 2007 - DNA, 89 bp, synthetic construct
  misc_feature 1..89: note = engineered ribonucleic acid scaffold (ERS) sequence
  source 1..89: mol_type = other DNA
acaggcgcttctatctgattactctgtgagccatcaccagcgactatgtcgtagtgggtaaagctccctcttcggagggagcatcagag

SEQ ID NO: 2008 - DNA, 90 bp, synthetic construct
  misc_feature 1..90: note = engineered ribonucleic acid scaffold (ERS) sequence
  source 1..90: mol_type = other DNA
acaggcgcttctatctgattactctgaggagccatcaccagcgactatgtcgtagtgggtaaagctccctcttcggagggagcatcagag

SEQ ID NO: 2009 - DNA, 89 bp, synthetic construct
  misc_feature 1..89: note = engineered ribonucleic acid scaffold (ERS) sequence
  source 1..89: mol_type = other DNA
acaggcgcttctatctgattactctgatagccatcaccagcgactatgtcgtagtgggtaaagctccctcttcggagggagcatcagag

SEQ ID NO: 2010 - DNA, 90 bp, synthetic construct
  misc_feature 1..90: note = engineered ribonucleic acid scaffold (ERS) sequence
  source 1..90: mol_type = other DNA
acaggcgcttctatctgattactctgagctgccatcaccagcgactatgtcgtagtgggtaaagctccctcttcggagggagcatcagag

SEQ ID NO: 2011 - DNA, 90 bp, synthetic construct
  misc_feature 1..90: note = engineered ribonucleic acid scaffold (ERS) sequence
  source 1..90: mol_type = other DNA
acaggcgcttctatctgattactctgagtagccatcaccagcgactatgtcgtagtgggtaaagctccctcttcggagggagcatcagag

SEQ ID NO: 2012 - DNA, 90 bp, synthetic construct
  misc_feature 1..90: note = engineered ribonucleic acid scaffold (ERS) sequence
  source 1..90: mol_type = other DNA
acaggcacttctatctgattactctgagtagccatcaccagcgactatgtcgtagtgggtaaagctccctcttcggagggagcatcagag

SEQ ID NO: 2013 - DNA, 89 bp, synthetic construct
  misc_feature 1..89: note = engineered ribonucleic acid scaffold (ERS) sequence
  source 1..89: mol_type = other DNA
acaggcgcttctatctgattactctgagcaccatcaccagcgactatgtcgtagtgggtaaagctccctcttcggagggagcatcagag

SEQ ID NO: 2014 - DNA, 89 bp, synthetic construct
  misc_feature 1..89: note = engineered ribonucleic acid scaffold (ERS) sequence
  source 1..89: mol_type = other DNA
acaggcacttctatctgattactctgagcgccatcaccagcgactatgtcgtagtgggtaaagctccctcttcggagggagcatcagag

SEQ ID NO: 2015 - DNA, 89 bp, synthetic construct
  misc_feature 1..89: note = engineered ribonucleic acid scaffold (ERS) sequence
  source 1..89: mol_type = other DNA
acaggcgcttctatctgattactctgagggccatcaccagcgactatgtcgtagtgggtaaagctccctcttcggagggagcatcagag

SEQ ID NO: 2016 - DNA, 89 bp, synthetic construct
  misc_feature 1..89: note = engineered ribonucleic acid scaffold (ERS) sequence
  source 1..89: mol_type = other DNA
acaggcgcttctatctgattactctgagtgccgtcaccagcgactatgtcgtagtgggtaaagctccctcttcggagggagcatcagag

SEQ ID NO: 2017 - DNA, 89 bp, synthetic construct
  misc_feature 1..89: note = engineered ribonucleic acid scaffold (ERS) sequence
  source 1..89: mol_type = other DNA
acaggcacttctatctgattactctgagtgccatcaccagcgactatgtcgtagtgggtaaagctccctcttcggagggagcatcagag

SEQ ID NO: 2018 - DNA, 89 bp, synthetic construct
  misc_feature 1..89: note = engineered ribonucleic acid scaffold (ERS) sequence
  source 1..89: mol_type = other DNA
acaggcgcttctatctgattactctgagaaccatcaccagcgactatgtcgtagtgggtaaagctccctcttcggagggagcatcagag

SEQ ID NO: 2019 - DNA, 89 bp, synthetic construct
  misc_feature 1..89: note = engineered ribonucleic acid scaffold (ERS) sequence
  source 1..89: mol_type = other DNA
acaggcgcttctatctgattactctgagagccgtcaccagcgactatgtcgtagtgggtaaagctccctcttcggagggagcatcagag

SEQ ID NO: 2020 - DNA, 89 bp, synthetic construct
  misc_feature 1..89: note = engineered ribonucleic acid scaffold (ERS) sequence
  source 1..89: mol_type = other DNA
acaggcgcttctatctgattactctgagagccttcaccagcgactatgtcgtagtgggtaaagctccctcttcggagggagcatcagag

SEQ ID NO: 2021 - DNA, 89 bp, synthetic construct
  misc_feature 1..89: note = engineered ribonucleic acid scaffold (ERS) sequence
  source 1..89: mol_type = other DNA
acaggggcttctatctgattactctgagacccatcaccagcgactatgtcgtagtgggtaaagctccctcttcggagggagcatcagag

SEQ ID NO: 2022 - DNA, 89 bp, synthetic construct
  misc_feature 1..89: note = engineered ribonucleic acid scaffold (ERS) sequence
  source 1..89: mol_type = other DNA
acaggtgcttctatctgattactctgagagccatcaccagcgactatgtcgtagtgggtaaagctccctcttcggagggagcatcagag

SEQ ID NO: 2023 - DNA, 89 bp, synthetic construct
  misc_feature 1..89: note = engineered ribonucleic acid scaffold (ERS) sequence
  source 1..89: mol_type = other DNA
acagggccttctatctgattactctgaggcccatcaccagcgactatgtcgtagtgggtaaagctccctcttcggagggagcatcagag

SEQ ID NO: 2024 - DNA, 90 bp, synthetic construct
  misc_feature 1..90: note = engineered ribonucleic acid scaffold (ERS) sequence
  source 1..90: mol_type = other DNA
acaggcccttctatctgattactctgaggagccatcaccagcgactatgtcgtagtgggtaaagctccctcttcggagggagcatcagag

SEQ ID NO: 2025 - DNA, 89 bp, synthetic construct
  misc_feature 1..89: note = engineered ribonucleic acid scaffold (ERS) sequence
  source 1..89: mol_type = other DNA
acaggcccttctatctgattactctgagggccatcaccagcgactatgtcgtagtgggtaaagctccctcttcggagggagcatcagag

SEQ ID NO: 2026 - DNA, 89 bp, synthetic construct
  misc_feature 1..89: note = engineered ribonucleic acid scaffold (ERS) sequence
  source 1..89: mol_type = other DNA
acaggcccttctatctgattactctgagtgccatcaccagcgactatgtcgtagtgggtaaagctccctcttcggagggagcatcagag

SEQ ID NO: 2027 - DNA, 89 bp, synthetic construct
  misc_feature 1..89: note = engineered ribonucleic acid scaffold (ERS) sequence
  source 1..89: mol_type = other DNA
acaggcccttctatctgattactctgagagccatcaccagcgactatgtcgtagtgggtaaagctccctcttcggagggagcatcagag

SEQ ID NO: 2028 - DNA, 90 bp, synthetic construct
  misc_feature 1..90: note = engineered ribonucleic acid scaffold (ERS) sequence
  source 1..90: mol_type = other DNA
acaggcgcttctatctgattactctgagcagccatcaccagcgactatgtcgtagtgggtaaagctccctcttcggagggagcatcagag

SEQ ID NO: 2029 - DNA, 89 bp, synthetic construct
  misc_feature 1..89: note = engineered ribonucleic acid scaffold (ERS) sequence
  source 1..89: mol_type = other DNA
acaggcgcttctatctgattactctgagtgccatcaccagcgactatgtcgtagtgggtaaagctccctcttcggagggagcatcagag

SEQ ID NO: 2030 - DNA, 89 bp, synthetic construct
  misc_feature 1..89: note = engineered ribonucleic acid scaffold (ERS) sequence
  source 1..89: mol_type = other DNA
acaggcgcttctatctgattactctgagagccatcaccagcgactatgtcgtagtgggtaaagctccctcttcggagggagcatcagag

SEQ ID NO: 2031 - DNA, 89 bp, synthetic construct
  misc_feature 1..89: note = engineered ribonucleic acid scaffold (ERS) sequence
  source 1..89: mol_type = other DNA
acaggctcttctatctgattactctgagcgccatcaccagcgactatgtcgtagtgggtaaagctccctcttcggagggagcatcagag

SEQ ID NO: 2032 - DNA, 89 bp, synthetic construct
  misc_feature 1..89: note = engineered ribonucleic acid scaffold (ERS) sequence
  source 1..89: mol_type = other DNA
acaggctcttctatctgattactctgagggccatcaccagcgactatgtcgtagtgggtaaagctccctcttcggagggagcatcagag

SEQ ID NO: 2033 - DNA, 89 bp, synthetic construct
  misc_feature 1..89: note = engineered ribonucleic acid scaffold (ERS) sequence
  source 1..89: mol_type = other DNA
acaggctcttctatctgattactctgagtgccatcaccagcgactatgtcgtagtgggtaaagctccctcttcggagggagcatcagag

SEQ ID NO: 2034 - DNA, 89 bp, synthetic construct
  misc_feature 1..89: note = engineered ribonucleic acid scaffold (ERS) sequence
  source 1..89: mol_type = other DNA
acaggctcttctatctgattactctgagagccatcaccagcgactatgtcgtagtgggtaaagctccctcttcggagggagcatcagag

SEQ ID NO: 2035 - DNA, 89 bp, synthetic construct
  misc_feature 1..89: note = engineered ribonucleic acid scaffold (ERS) sequence
  source 1..89: mol_type = other DNA
acaggcggttctatctgattactctgagcgccatcaccagcgactatgtcgtagtgggtaaagctccctcttcggagggagcatcagag

SEQ ID NO: 2036 - DNA, 89 bp, synthetic construct
  misc_feature 1..89: note = engineered ribonucleic acid scaffold (ERS) sequence
  source 1..89: mol_type = other DNA
acaggcggttctatctgattactctgagagccatcaccagcgactatgtcgtagtgggtaaagctccctcttcggagggagcatcagag

SEQ ID NO: 2037 - DNA, 89 bp, synthetic construct
  misc_feature 1..89: note = engineered ribonucleic acid scaffold (ERS) sequence
  source 1..89: mol_type = other DNA
acgacacggttctatctgattactctgccgtgttcaccagcgactatgtcgtagtgggtaaagctccctcttcggagggagcatcagag

SEQ ID NO: 2038 - DNA, 89 bp, synthetic construct
  misc_feature 1..89: note = engineered ribonucleic acid scaffold (ERS) sequence
  source 1..89: mol_type = other DNA
acgactggtttctatctgattactctgaccagttcaccagcgactatgtcgtagtgggtaaagctccctcttcggagggagcatcagag

SEQ ID NO: 2039 - DNA, 89 bp, synthetic construct
  misc_feature 1..89: note = engineered ribonucleic acid scaffold (ERS) sequence
  source 1..89: mol_type = other DNA
acgaggccgttctatctgattactctgcggccttcaccagcgactatgtcgtagtgggtaaagctccctcttcggagggagcatcagag

SEQ ID NO: 2040 - DNA, 89 bp, synthetic construct
  misc_feature 1..89: note = engineered ribonucleic acid scaffold (ERS) sequence
  source 1..89: mol_type = other DNA
acgaggtccttctatctgattactctgggaccttcaccagcgactatgtcgtagtgggtaaagctccctcttcggagggagcatcagag

SEQ ID NO: 2041 - DNA, 89 bp, synthetic construct
  misc_feature 1..89: note = engineered ribonucleic acid scaffold (ERS) sequence
  source 1..89: mol_type = other DNA
acgcagcaattctatctgattactctgttgctgtcaccagcgactatgtcgtagtgggtaaagctccctcttcggagggagcatcagag

SEQ ID NO: 2042 - DNA, 89 bp, synthetic construct
  misc_feature 1..89: note = engineered ribonucleic acid scaffold (ERS) sequence
  source 1..89: mol_type = other DNA
acgcgagacttctatctgattactctgggctcgtcaccagcgactatgtcgtagtgggtaaagctccctcttcggagggagcatcagag

SEQ ID NO: 2043 - DNA, 89 bp, synthetic construct
  misc_feature 1..89: note = engineered ribonucleic acid scaffold (ERS) sequence
  source 1..89: mol_type = other DNA
acgctgtagttctatctgattactctgctacagtcaccagcgactatgtcgtagtgggtaaagctccctcttcggagggagcatcagag

SEQ ID NO: 2044 - DNA, 89 bp, synthetic construct
  misc_feature 1..89: note = engineered ribonucleic acid scaffold (ERS) sequence
  source 1..89: mol_type = other DNA
acggagcacttctatctgattactctggggctctcaccagcgactatgtcgtagtgggtaaagctccctcttcggagggagcatcagag

SEQ ID NO: 2045 - DNA, 89 bp, synthetic construct
  misc_feature 1..89: note = engineered ribonucleic acid scaffold (ERS) sequence
  source 1..89: mol_type = other DNA
acggaggtgttctatctgattactctgcacctctcaccagcgactatgtcgtagtgggtaaagctccctcttcggagggagcatcagag

SEQ ID NO: 2046 - DNA, 89 bp, synthetic construct
  misc_feature 1..89: note = engineered ribonucleic acid scaffold (ERS) sequence
  source 1..89: mol_type = other DNA
acggggactttctatctgattactctgagtccctcaccagcgactatgtcgtagtgggtaaagctccctcttcggagggagcatcagag

SEQ ID NO: 2047 - DNA, 89 bp, synthetic construct
  misc_feature 1..89: note = engineered ribonucleic acid scaffold (ERS) sequence
  source 1..89: mol_type = other DNA
acggggcaattctatctgattactctgttgccctcaccagcgactatgtcgtagtgggtaaagctccctcttcggagggagcatcagag

SEQ ID NO: 2048 - DNA, 89 bp, synthetic construct
  misc_feature 1..89: note = engineered ribonucleic acid scaffold (ERS) sequence
  source 1..89: mol_type = other DNA
acgtgtgcgttctatctgattactctgcgcacatcaccagcgactatgtcgtagtgggtaaagctccctcttcggagggagcatcagag

SEQ ID NO: 2049 - DNA, 89 bp, synthetic construct
  misc_feature 1..89: note = engineered ribonucleic acid scaffold (ERS) sequence
  source 1..89: mol_type = other DNA
acgggcgcttctatctgattactctgggcgccatcaccagcgactatgtcgtagtgggtaaagctccctcttcggagggagcatcagag

SEQ ID NO: 2050 - DNA, 89 bp, synthetic construct
  misc_feature 1..89: note = engineered ribonucleic acid scaffold (ERS) sequence
  source 1..89: mol_type = other DNA
acgggcgcttctatctgattactctgggagccatcaccagcgactatgtcgtagtgggtaaagctccctcttcggagggagcatcagag

SEQ ID NO: 2051 - DNA, 89 bp, synthetic construct
  misc_feature 1..89: note = engineered ribonucleic acid scaffold (ERS) sequence
  source 1..89: mol_type = other DNA
acgggcgcttctatctgattactctgtgagccatcaccagcgactatgtcgtagtgggtaaagctccctcttcggagggagcatcagag

SEQ ID NO: 2052 - DNA, 90 bp, synthetic construct
  misc_feature 1..90: note = engineered ribonucleic acid scaffold (ERS) sequence
  source 1..90: mol_type = other DNA
acgggcgcttctatctgattactctgaggagccatcaccagcgactatgtcgtagtgggtaaagctccctcttcggagggagcatcagag

SEQ ID NO: 2053 - DNA, 89 bp, synthetic construct
  misc_feature 1..89: note = engineered ribonucleic acid scaffold (ERS) sequence
  source 1..89: mol_type = other DNA
acgggcgcttctatctgattactctgatagccatcaccagcgactatgtcgtagtgggtaaagctccctcttcggagggagcatcagag

SEQ ID NO: 2054 - DNA, 90 bp, synthetic construct
  misc_feature 1..90: note = engineered ribonucleic acid scaffold (ERS) sequence
  source 1..90: mol_type = other DNA
acgggcgcttctatctgattactctgagctgccatcaccagcgactatgtcgtagtgggtaaagctccctcttcggagggagcatcagag

SEQ ID NO: 2055 - DNA, 90 bp, synthetic construct
  misc_feature 1..90: note = engineered ribonucleic acid scaffold (ERS) sequence
  source 1..90: mol_type = other DNA
acgggcgcttctatctgattactctgagtagccatcaccagcgactatgtcgtagtgggtaaagctccctcttcggagggagcatcagag

SEQ ID NO: 2056 - DNA, 90 bp, synthetic construct
  misc_feature 1..90: note = engineered ribonucleic acid scaffold (ERS) sequence
  source 1..90: mol_type = other DNA
acgggcacttctatctgattactctgagtagccatcaccagcgactatgtcgtagtgggtaaagctccctcttcggagggagcatcagag

SEQ ID NO: 2057 - DNA, 89 bp, synthetic construct
  misc_feature 1..89: note = engineered ribonucleic acid scaffold (ERS) sequence
  source 1..89: mol_type = other DNA
acgggcgcttctatctgattactctgagcaccatcaccagcgactatgtcgtagtgggtaaagctccctcttcggagggagcatcagag

SEQ ID NO: 2058 - DNA, 89 bp, synthetic construct
  misc_feature 1..89: note = engineered ribonucleic acid scaffold (ERS) sequence
  source 1..89: mol_type = other DNA
acgggcacttctatctgattactctgagcgccatcaccagcgactatgtcgtagtgggtaaagctccctcttcggagggagcatcagag

SEQ ID NO: 2059 - DNA, 89 bp, synthetic construct
  misc_feature 1..89: note = engineered ribonucleic acid scaffold (ERS) sequence
  source 1..89: mol_type = other DNA
acgggcgcttctatctgattactctgagggccatcaccagcgactatgtcgtagtgggtaaagctccctcttcggagggagcatcagag

SEQ ID NO: 2060 - DNA, 89 bp, synthetic construct
  misc_feature 1..89: note = engineered ribonucleic acid scaffold (ERS) sequence
  source 1..89: mol_type = other DNA
acgggcgcttctatctgattactctgagtgccgtcaccagcgactatgtcgtagtgggtaaagctccctcttcggagggagcatcagag

SEQ ID NO: 2061 - DNA, 89 bp, synthetic construct
  misc_feature 1..89: note = engineered ribonucleic acid scaffold (ERS) sequence
  source 1..89: mol_type = other DNA
acgggcacttctatctgattactctgagtgccatcaccagcgactatgtcgtagtgggtaaagctccctcttcggagggagcatcagag

SEQ ID NO: 2062 - DNA, 89 bp, synthetic construct
  misc_feature 1..89: note = engineered ribonucleic acid scaffold (ERS) sequence
  source 1..89: mol_type = other DNA
acgggcgcttctatctgattactctgagaaccatcaccagcgactatgtcgtagtgggtaaagctccctcttcggagggagcatcagag

SEQ ID NO: 2063 - DNA, 89 bp, synthetic construct
  misc_feature 1..89: note = engineered ribonucleic acid scaffold (ERS) sequence
  source 1..89: mol_type = other DNA
acgggcgcttctatctgattactctgagagccgtcaccagcgactatgtcgtagtgggtaaagctccctcttcggagggagcatcagag

SEQ ID NO: 2064 - DNA, 89 bp, synthetic construct
  misc_feature 1..89: note = engineered ribonucleic acid scaffold (ERS) sequence
  source 1..89: mol_type = other DNA
acgggcgcttctatctgattactctgagagccttcaccagcgactatgtcgtagtgggtaaagctccctcttcggagggagcatcagag

SEQ ID NO: 2065 - DNA, 89 bp, synthetic construct
  misc_feature 1..89: note = engineered ribonucleic acid scaffold (ERS) sequence
  source 1..89: mol_type = other DNA
acgggggcttctatctgattactctgagacccatcaccagcgactatgtcgtagtgggtaaagctccctcttcggagggagcatcagag

SEQ ID NO: 2066 - DNA, 89 bp, synthetic construct
  misc_feature 1..89: note = engineered ribonucleic acid scaffold (ERS) sequence
  source 1..89: mol_type = other DNA
acgggtgcttctatctgattactctgagagccatcaccagcgactatgtcgtagtgggtaaagctccctcttcggagggagcatcagag

SEQ ID NO: 2067 - DNA, 89 bp, synthetic construct
  misc_feature 1..89: note = engineered ribonucleic acid scaffold (ERS) sequence
  source 1..89: mol_type = other DNA
acggggccttctatctgattactctgaggcccatcaccagcgactatgtcgtagtgggtaaagctccctcttcggagggagcatcagag

SEQ ID NO: 2068 - DNA, 90 bp, synthetic construct
  misc_feature 1..90: note = engineered ribonucleic acid scaffold (ERS) sequence
  source 1..90: mol_type = other DNA
acgggcccttctatctgattactctgaggagccatcaccagcgactatgtcgtagtgggtaaagctccctcttcggagggagcatcagag

SEQ ID NO: 2069 - DNA, 89 bp, synthetic construct
  misc_feature 1..89: note = engineered ribonucleic acid scaffold (ERS) sequence
  source 1..89: mol_type = other DNA
acgggcccttctatctgattactctgagggccatcaccagcgactatgtcgtagtgggtaaagctccctcttcggagggagcatcagag

SEQ ID NO: 2070 - DNA, 89 bp, synthetic construct
  misc_feature 1..89: note = engineered ribonucleic acid scaffold (ERS) sequence
  source 1..89: mol_type = other DNA
acgggcccttctatctgattactctgagtgccatcaccagcgactatgtcgtagtgggtaaagctccctcttcggagggagcatcagag

SEQ ID NO: 2071 - DNA, 89 bp, synthetic construct
  misc_feature 1..89: note = engineered ribonucleic acid scaffold (ERS) sequence
  source 1..89: mol_type = other DNA
acgggcccttctatctgattactctgagagccatcaccagcgactatgtcgtagtgggtaaagctccctcttcggagggagcatcagag

SEQ ID NO: 2072 - DNA, 90 bp, synthetic construct
  misc_feature 1..90: note = engineered ribonucleic acid scaffold (ERS) sequence
  source 1..90: mol_type = other DNA
acgggcgcttctatctgattactctgagcagccatcaccagcgactatgtcgtagtgggtaaagctccctcttcggagggagcatcagag

SEQ ID NO: 2073 - DNA, 89 bp, synthetic construct
  misc_feature 1..89: note = engineered ribonucleic acid scaffold (ERS) sequence
  source 1..89: mol_type = other DNA
acgggcgcttctatctgattactctgagtgccatcaccagcgactatgtcgtagtgggtaaagctccctcttcggagggagcatcagag

SEQ ID NO: 2074 - DNA, 89 bp, synthetic construct
  misc_feature 1..89: note = engineered ribonucleic acid scaffold (ERS) sequence
  source 1..89: mol_type = other DNA
acgggcgcttctatctgattactctgagagccatcaccagcgactatgtcgtagtgggtaaagctccctcttcggagggagcatcagag

SEQ ID NO: 2075 - DNA, 89 bp, synthetic construct
  misc_feature 1..89: note = engineered ribonucleic acid scaffold (ERS) sequence
  source 1..89: mol_type = other DNA
acgggctcttctatctgattactctgagcgccatcaccagcgactatgtcgtagtgggtaaagctccctcttcggagggagcatcagag

SEQ ID NO: 2076 - DNA, 89 bp, synthetic construct
  misc_feature 1..89: note = engineered ribonucleic acid scaffold (ERS) sequence
  source 1..89: mol_type = other DNA
acgggctcttctatctgattactctgagggccatcaccagcgactatgtcgtagtgggtaaagctccctcttcggagggagcatcagag

SEQ ID NO: 2077 - DNA, 89 bp, synthetic construct
  misc_feature 1..89: note = engineered ribonucleic acid scaffold (ERS) sequence
  source 1..89: mol_type = other DNA
acgggctcttctatctgattactctgagtgccatcaccagcgactatgtcgtagtgggtaaagctccctcttcggagggagcatcagag

SEQ ID NO: 2078 - DNA, 89 bp, synthetic construct
  misc_feature 1..89: note = engineered ribonucleic acid scaffold (ERS) sequence
  source 1..89: mol_type = other DNA
acgggctcttctatctgattactctgagagccatcaccagcgactatgtcgtagtgggtaaagctccctcttcggagggagcatcagag

SEQ ID NO: 2079 - DNA, 89 bp, synthetic construct
  misc_feature 1..89: note = engineered ribonucleic acid scaffold (ERS) sequence
  source 1..89: mol_type = other DNA
acgggcggttctatctgattactctgagcgccatcaccagcgactatgtcgtagtgggtaaagctccctcttcggagggagcatcagag

SEQ ID NO: 2080 - DNA, 89 bp, synthetic construct
  misc_feature 1..89: note = engineered ribonucleic acid scaffold (ERS) sequence
  source 1..89: mol_type = other DNA
acgggcggttctatctgattactctgagagccatcaccagcgactatgtcgtagtgggtaaagctccctcttcggagggagcatcagag

SEQ ID NO: 2081 - DNA, 94 bp, synthetic construct
  misc_feature 1..94: note = engineered ribonucleic acid scaffold (ERS) sequence
  source 1..94: mol_type = other DNA
acacacggaggcacttctatctgattactctgccgtgttcaccagcgactatgtcgtagtgggtaaagctccctcttcggagggagcatcagag

SEQ ID NO: 2082 - DNA, 94 bp, synthetic construct
  misc_feature 1..94: note = engineered ribonucleic acid scaffold (ERS) sequence
  source 1..94: mol_type = other DNA
acactggtaggcacttctatctgattactctgaccagttcaccagcgactatgtcgtagtgggtaaagctccctcttcggagggagcatcagag

SEQ ID NO: 2083 - DNA, 94 bp, synthetic construct
  misc_feature 1..94: note = engineered ribonucleic acid scaffold (ERS) sequence
  source 1..94: mol_type = other DNA
acaggccgaggcacttctatctgattactctgcggccttcaccagcgactatgtcgtagtgggtaaagctccctcttcggagggagcatcagag

SEQ ID NO: 2084 - DNA, 94 bp, synthetic construct
  misc_feature 1..94: note = engineered ribonucleic acid scaffold (ERS) sequence
  source 1..94: mol_type = other DNA
acaggtccaggcacttctatctgattactctgggaccttcaccagcgactatgtcgtagtgggtaaagctccctcttcggagggagcatcagag

SEQ ID NO: 2085 - DNA, 94 bp, synthetic construct
  misc_feature 1..94: note = engineered ribonucleic acid scaffold (ERS) sequence
  source 1..94: mol_type = other DNA
accagcaaaggcacttctatctgattactctgttgctgtcaccagcgactatgtcgtagtgggtaaagctccctcttcggagggagcatcagag

SEQ ID NO: 2086 - DNA, 94 bp, synthetic construct
  misc_feature 1..94: note = engineered ribonucleic acid scaffold (ERS) sequence
  source 1..94: mol_type = other DNA
accgagacaggcacttctatctgattactctgggctcgtcaccagcgactatgtcgtagtgggtaaagctccctcttcggagggagcatcagag

SEQ ID NO: 2087 - DNA, 94 bp, synthetic construct
  misc_feature 1..94: note = engineered ribonucleic acid scaffold (ERS) sequence
  source 1..94: mol_type = other DNA
acctgtagaggcacttctatctgattactctgctacagtcaccagcgactatgtcgtagtgggtaaagctccctcttcggagggagcatcagag

SEQ ID NO: 2088 - DNA, 94 bp, synthetic construct
  misc_feature 1..94: note = engineered ribonucleic acid scaffold (ERS) sequence
  source 1..94: mol_type = other DNA
acgagcacaggcacttctatctgattactctggggctctcaccagcgactatgtcgtagtgggtaaagctccctcttcggagggagcatcagag

SEQ ID NO: 2089 - DNA, 94 bp, synthetic construct
  misc_feature 1..94: note = engineered ribonucleic acid scaffold (ERS) sequence
  source 1..94: mol_type = other DNA
acgaggtgaggcacttctatctgattactctgcacctctcaccagcgactatgtcgtagtgggtaaagctccctcttcggagggagcatcagag

SEQ ID NO: 2090 - DNA, 94 bp, synthetic construct
  misc_feature 1..94: note = engineered ribonucleic acid scaffold (ERS) sequence
  source 1..94: mol_type = other DNA
acgggactaggcacttctatctgattactctgagtccctcaccagcgactatgtcgtagtgggtaaagctccctcttcggagggagcatcagag

SEQ ID NO: 2091 - DNA, 94 bp, synthetic construct
  misc_feature 1..94: note = engineered ribonucleic acid scaffold (ERS) sequence
  source 1..94: mol_type = other DNA
acgggcaaaggcacttctatctgattactctgttgccctcaccagcgactatgtcgtagtgggtaaagctccctcttcggagggagcatcagag

SEQ ID NO: 2092 - DNA, 94 bp, synthetic construct
  misc_feature 1..94: note = engineered ribonucleic acid scaffold (ERS) sequence
  source 1..94: mol_type = other DNA
actgtgcgaggcacttctatctgattactctgcgcacatcaccagcgactatgtcgtagtgggtaaagctccctcttcggagggagcatcagag

SEQ ID NO: 2093 - DNA, 90 bp, synthetic construct
  misc_feature 1..90: note = engineered ribonucleic acid scaffold (ERS) sequence
  source 1..90: mol_type = other DNA
actaggcgcttctatctgattactctgggcgccatcaccagcgactatgtcgtagtgggtaaagctccctcttcggagggagcatcagag

SEQ ID NO: 2094 - DNA, 90 bp, synthetic construct
  misc_feature 1..90: note = engineered ribonucleic acid scaffold (ERS) sequence
  source 1..90: mol_type = other DNA
actaggcgcttctatctgattactctgggagccatcaccagcgactatgtcgtagtgggtaaagctccctcttcggagggagcatcagag

SEQ ID NO: 2095 - DNA, 90 bp, synthetic construct
  misc_feature 1..90: note = engineered ribonucleic acid scaffold (ERS) sequence
  source 1..90: mol_type = other DNA
actaggcgcttctatctgattactctgtgagccatcaccagcgactatgtcgtagtgggtaaagctccctcttcggagggagcatcagag

SEQ ID NO: 2096 - DNA, 91 bp, synthetic construct
  misc_feature 1..91: note = engineered ribonucleic acid scaffold (ERS) sequence
  source 1..91: mol_type = other DNA
actaggcgcttctatctgattactctgaggagccatcaccagcgactatgtcgtagtgggtaaagctccctcttcggagggagcatcagag

SEQ ID NO: 2097 - DNA, 90 bp, synthetic construct
  misc_feature 1..90: note = engineered ribonucleic acid scaffold (ERS) sequence
  source 1..90: mol_type = other DNA
actaggcgcttctatctgattactctgatagccatcaccagcgactatgtcgtagtgggtaaagctccctcttcggagggagcatcagag

SEQ ID NO: 2098 - DNA, 91 bp, synthetic construct
  misc_feature 1..91: note = engineered ribonucleic acid scaffold (ERS) sequence
  source 1..91: mol_type = other DNA
actaggcgcttctatctgattactctgagctgccatcaccagcgactatgtcgtagtgggtaaagctccctcttcggagggagcatcagag

SEQ ID NO: 2099 - DNA, 91 bp, synthetic construct
  misc_feature 1..91: note = engineered ribonucleic acid scaffold (ERS) sequence
  source 1..91: mol_type = other DNA
actaggcgcttctatctgattactctgagtagccatcaccagcgactatgtcgtagtgggtaaagctccctcttcggagggagcatcagag

SEQ ID NO: 2100 - DNA, 91 bp, synthetic construct
  misc_feature 1..91: note = engineered ribonucleic acid scaffold (ERS) sequence
  source 1..91: mol_type = other DNA
actaggcacttctatctgattactctgagtagccatcaccagcgactatgtcgtagtgggtaaagctccctcttcggagggagcatcagag

SEQ ID NO: 2101 - DNA, 90 bp, synthetic construct
  misc_feature 1..90: note = engineered ribonucleic acid scaffold (ERS) sequence
  source 1..90: mol_type = other DNA
actaggcgcttctatctgattactctgagcaccatcaccagcgactatgtcgtagtgggtaaagctccctcttcggagggagcatcagag

SEQ ID NO: 2102 - DNA, 90 bp, synthetic construct
  misc_feature 1..90: note = engineered ribonucleic acid scaffold (ERS) sequence
  source 1..90: mol_type = other DNA
actaggcacttctatctgattactctgagcgccatcaccagcgactatgtcgtagtgggtaaagctccctcttcggagggagcatcagag

SEQ ID NO: 2103 - DNA, 90 bp, synthetic construct
  misc_feature 1..90: note = engineered ribonucleic acid scaffold (ERS) sequence
  source 1..90: mol_type = other DNA
actaggcgcttctatctgattactctgagggccatcaccagcgactatgtcgtagtgggtaaagctccctcttcggagggagcatcagag

SEQ ID NO: 2104 - DNA, 90 bp, synthetic construct
  misc_feature 1..90: note = engineered ribonucleic acid scaffold (ERS) sequence
  source 1..90: mol_type = other DNA
actaggcgcttctatctgattactctgagtgccgtcaccagcgactatgtcgtagtgggtaaagctccctcttcggagggagcatcagag

SEQ ID NO: 2105 - DNA, 90 bp, synthetic construct
  misc_feature 1..90: note = engineered ribonucleic acid scaffold (ERS) sequence
  source 1..90: mol_type = other DNA
actaggcacttctatctgattactctgagtgccatcaccagcgactatgtcgtagtgggtaaagctccctcttcggagggagcatcagag

SEQ ID NO: 2106 - DNA, 90 bp, synthetic construct
  misc_feature 1..90: note = engineered ribonucleic acid scaffold (ERS) sequence
  source 1..90: mol_type = other DNA
actaggcgcttctatctgattactctgagaaccatcaccagcgactatgtcgtagtgggtaaagctccctcttcggagggagcatcagag

SEQ ID NO: 2107 - DNA, 90 bp, synthetic construct
  misc_feature 1..90: note = engineered ribonucleic acid scaffold (ERS) sequence
  source 1..90: mol_type = other DNA
actaggcgcttctatctgattactctgagagccgtcaccagcgactatgtcgtagtgggtaaagctccctcttcggagggagcatcagag

SEQ ID NO: 2108 - DNA, 90 bp, synthetic construct
  misc_feature 1..90: note = engineered ribonucleic acid scaffold (ERS) sequence
  source 1..90: mol_type = other DNA
actaggcgcttctatctgattactctgagagccttcaccagcgactatgtcgtagtgggtaaagctccctcttcggagggagcatcagag

SEQ ID NO: 2109 - DNA, 90 bp, synthetic construct
  misc_feature 1..90: note = engineered ribonucleic acid scaffold (ERS) sequence
  source 1..90: mol_type = other DNA
actaggggcttctatctgattactctgagacccatcaccagcgactatgtcgtagtgggtaaagctccctcttcggagggagcatcagag

SEQ ID NO: 2110 - DNA, 90 bp, synthetic construct
  misc_feature 1..90: note = engineered ribonucleic acid scaffold (ERS) sequence
  source 1..90: mol_type = other DNA
actaggtgcttctatctgattactctgagagccatcaccagcgactatgtcgtagtgggtaaagctccctcttcggagggagcatcagag

SEQ ID NO: 2111 - DNA, 90 bp, synthetic construct
  misc_feature 1..90: note = engineered ribonucleic acid scaffold (ERS) sequence
  source 1..90: mol_type = other DNA
actagggccttctatctgattactctgaggcccatcaccagcgactatgtcgtagtgggtaaagctccctcttcggagggagcatcagag

SEQ ID NO: 2112 - DNA, 91 bp, synthetic construct
  misc_feature 1..91: note = engineered ribonucleic acid scaffold (ERS) sequence
  source 1..91: mol_type = other DNA
actaggcccttctatctgattactctgaggagccatcaccagcgactatgtcgtagtgggtaaagctccctcttcggagggagcatcagag

SEQ ID NO: 2113 - DNA, 90 bp, synthetic construct
  misc_feature 1..90: note = engineered ribonucleic acid scaffold (ERS) sequence
  source 1..90: mol_type = other DNA
actaggcccttctatctgattactctgagggccatcaccagcgactatgtcgtagtgggtaaagctccctcttcggagggagcatcagag

SEQ ID NO: 2114 - DNA, 90 bp, synthetic construct
  misc_feature 1..90: note = engineered ribonucleic acid scaffold (ERS) sequence
  source 1..90: mol_type = other DNA
actaggcccttctatctgattactctgagtgccatcaccagcgactatgtcgtagtgggtaaagctccctcttcggagggagcatcagag

SEQ ID NO: 2115 - DNA, 90 bp, synthetic construct
  misc_feature 1..90: note = engineered ribonucleic acid scaffold (ERS) sequence
  source 1..90: mol_type = other DNA
actaggcccttctatctgattactctgagagccatcaccagcgactatgtcgtagtgggtaaagctccctcttcggagggagcatcagag

SEQ ID NO: 2116 - DNA, 91 bp, synthetic construct
  misc_feature 1..91: note = engineered ribonucleic acid scaffold (ERS) sequence
  source 1..91: mol_type = other DNA
actaggcgcttctatctgattactctgagcagccatcaccagcgactatgtcgtagtgggtaaagctccctcttcggagggagcatcagag

SEQ ID NO: 2117 - DNA, 90 bp, synthetic construct
  misc_feature 1..90: note = engineered ribonucleic acid scaffold (ERS) sequence
  source 1..90: mol_type = other DNA
actaggcgcttctatctgattactctgagtgccatcaccagcgactatgtcgtagtgggtaaagctccctcttcggagggagcatcagag

SEQ ID NO: 2118 - DNA, 90 bp, synthetic construct
  misc_feature 1..90: note = engineered ribonucleic acid scaffold (ERS) sequence
  source 1..90: mol_type = other DNA
actaggcgcttctatctgattactctgagagccatcaccagcgactatgtcgtagtgggtaaagctccctcttcggagggagcatcagag

SEQ ID NO: 2119 - DNA, 90 bp, synthetic construct
  misc_feature 1..90: note = engineered ribonucleic acid scaffold (ERS) sequence
  source 1..90: mol_type = other DNA
actaggctcttctatctgattactctgagcgccatcaccagcgactatgtcgtagtgggtaaagctccctcttcggagggagcatcagag

SEQ ID NO: 2120 - DNA, 90 bp, synthetic construct
  misc_feature 1..90: note = engineered ribonucleic acid scaffold (ERS) sequence
  source 1..90: mol_type = other DNA
actaggctcttctatctgattactctgagggccatcaccagcgactatgtcgtagtgggtaaagctccctcttcggagggagcatcagag

SEQ ID NO: 2121 - DNA, 90 bp, synthetic construct
  misc_feature 1..90: note = engineered ribonucleic acid scaffold (ERS) sequence
  source 1..90: mol_type = other DNA
actaggctcttctatctgattactctgagtgccatcaccagcgactatgtcgtagtgggtaaagctccctcttcggagggagcatcagag

SEQ ID NO: 2122 - DNA, 90 bp, synthetic construct
  misc_feature 1..90: note = engineered ribonucleic acid scaffold (ERS) sequence
  source 1..90: mol_type = other DNA
actaggctcttctatctgattactctgagagccatcaccagcgactatgtcgtagtgggtaaagctccctcttcggagggagcatcagag

SEQ ID NO: 2123 - DNA, 90 bp, synthetic construct
  misc_feature 1..90: note = engineered ribonucleic acid scaffold (ERS) sequence
  source 1..90: mol_type = other DNA
actaggcggttctatctgattactctgagcgccatcaccagcgactatgtcgtagtgggtaaagctccctcttcggagggagcatcagag

SEQ ID NO: 2124 - DNA, 90 bp, synthetic construct
  misc_feature 1..90: note = engineered ribonucleic acid scaffold (ERS) sequence
  source 1..90: mol_type = other DNA
actaggcggttctatctgattactctgagagccatcaccagcgactatgtcgtagtgggtaaagctccctcttcggagggagcatcagag

SEQ ID NO: 2125 - DNA, 89 bp, synthetic construct
  misc_feature 1..89: note = engineered ribonucleic acid scaffold (ERS) sequence
  source 1..89: mol_type = other DNA
aactggcgcttctatctgattactctgagcgccaacaccagcgactatgtcgtatgggtaaagctccctcttcggagggagcatcagag

SEQ ID NO: 2126 - DNA, 89 bp, synthetic construct
  misc_feature 1..89: note = engineered ribonucleic acid scaffold (ERS) sequence
  source 1..89: mol_type = other DNA
aactggcgcttctatctgattactctgagcgccagcaccagcgactatgtcgtatgggtaaagctccctcttcggagggagcatcagag

SEQ ID NO: 2127 - DNA, 89 bp, synthetic construct
  misc_feature 1..89: note = engineered ribonucleic acid scaffold (ERS) sequence
  source 1..89: mol_type = other DNA
aactggcgcttctatctgattactctgagcgccatgaccagcgactatgtcgtatggctaaagctccctcttcggagggagcatcagag

SEQ ID NO: 2128 - DNA, 90 bp, synthetic construct
  misc_feature 1..90: note = engineered ribonucleic acid scaffold (ERS) sequence
  source 1..90: mol_type = other DNA
aactggcgcttctatctgattactctgagcgccatgaccagcgactatgtcgtatgggctaaagctccctcttcggagggagcatcagag

SEQ ID NO: 2129 - DNA, 89 bp, synthetic construct
  misc_feature 1..89: note = engineered ribonucleic acid scaffold (ERS) sequence
  source 1..89: mol_type = other DNA
aactggcgcttctatctgattactctgagcgccatgaccagcgactatgtcgtatgggtaaagctccctcttcggagggagcatcagag

SEQ ID NO: 2130 - DNA, 89 bp, synthetic construct
  misc_feature 1..89: note = engineered ribonucleic acid scaffold (ERS) sequence
  source 1..89: mol_type = other DNA
aactggcgcttctatctgattactctgagcgccatccccagcgactatgtcgtatgggtaaagctccctcttcggagggagcatcagag

SEQ ID NO: 2131 - DNA, 90 bp, synthetic construct
  misc_feature 1..90: note = engineered ribonucleic acid scaffold (ERS) sequence
  source 1..90: mol_type = other DNA
aactggcgcttctatctgattactctgagcgccatcgccagcgactatgtcgtatggcgtaaagctccctcttcggagggagcatcagag

SEQ ID NO: 2132 - DNA, 89 bp, synthetic construct
  misc_feature 1..89: note = engineered ribonucleic acid scaffold (ERS) sequence
  source 1..89: mol_type = other DNA
aactggcgcttctatctgattactctgagcgccatcgccagcgactatgtcgtatgggtaaagctccctcttcggagggagcatcagag

SEQ ID NO: 2133 - DNA, 89 bp, synthetic construct
  misc_feature 1..89: note = engineered ribonucleic acid scaffold (ERS) sequence
  source 1..89: mol_type = other DNA
aactggcgcttctatctgattactctgagcgccatctccagcgactatgtcgtatgggtaaagctccctcttcggagggagcatcagag

SEQ ID NO: 2134 - DNA, 89 bp, synthetic construct
  misc_feature 1..89: note = engineered ribonucleic acid scaffold (ERS) sequence
  source 1..89: mol_type = other DNA
aactggcgcttctatctgattactctgagcgccatcacctgcgactatgtcgtaagggtaaagctccctcttcggagggagcatcagag

SEQ ID NO: 2135 - DNA, 89 bp, synthetic construct
  misc_feature 1..89: note = engineered ribonucleic acid scaffold (ERS) sequence
  source 1..89: mol_type = other DNA
aactggcgcttctatctgattactctgagcgccatcaccagagactatgtcttatgggtaaagctccctcttcggagggagcatcagag

SEQ ID NO: 2136 - DNA, 89 bp, synthetic construct
  misc_feature 1..89: note = engineered ribonucleic acid scaffold (ERS) sequence
  source 1..89: mol_type = other DNA
aactggcgcttctatctgattactctgagcgccatcaccagggactatgtcctatgggtaaagctccctcttcggagggagcatcagag

SEQ ID NO: 2137 - DNA, 90 bp, synthetic construct
  misc_feature 1..90: note = engineered ribonucleic acid scaffold (ERS) sequence
  source 1..90: mol_type = other DNA
aactggcgcttctatctgattactctgagcgccatcaccaggcactatgtgctattgggtaaagctccctcttcggagggagcatcagag

SEQ ID NO: 2138 - DNA, 89 bp, synthetic construct
  misc_feature 1..89: note = engineered ribonucleic acid scaffold (ERS) sequence
  source 1..89: mol_type = other DNA
aactggcgcttctatctgattactctgagcgccatcaccagccactatgtggtatgggtaaagctccctcttcggagggagcatcagag

SEQ ID NO: 2139 - DNA, 89 bp, synthetic construct
  misc_feature 1..89: note = engineered ribonucleic acid scaffold (ERS) sequence
  source 1..89: mol_type = other DNA
aactggcgcttctatctgattactctgagcgccatcaccagctactatgtagtatgggtaaagctccctcttcggagggagcatcagag

SEQ ID NO: 2140 - DNA, 89 bp, synthetic construct
  misc_feature 1..89: note = engineered ribonucleic acid scaffold (ERS) sequence
  source 1..89: mol_type = other DNA
aactggcgcttctatctgattactctgagcgccatcaccagcgattatgtcgtatgggtaaagctccctcttcggagggagcatcagag

SEQ ID NO: 2141 - DNA, 89 bp, synthetic construct
  misc_feature 1..89: note = engineered ribonucleic acid scaffold (ERS) sequence
  source 1..89: mol_type = other DNA
aactggcgcttctatctgattactctgagcgccatcaccagcgacgatgtcgtatgggtaaagctccctcttcggagggagcatcagag

SEQ ID NO: 2142 - DNA, 89 bp, synthetic construct
  misc_feature 1..89: note = engineered ribonucleic acid scaffold (ERS) sequence
  source 1..89: mol_type = other DNA
aactggcgcttctatctgattactctgagcgccatcaccagcgactctgtcgtatgggtaaagctccctcttcggagggagcatcagag

SEQ ID NO: 2143 - DNA, 89 bp, synthetic construct
  misc_feature 1..89: note = engineered ribonucleic acid scaffold (ERS) sequence
  source 1..89: mol_type = other DNA
aactggcgcttctatctgattactctgagcgccatcaccagcgactatgtcgtgtgggtaaagctccctcttcggagggagcatcagag

SEQ ID NO: 2144 - DNA, 90 bp, synthetic construct
  misc_feature 1..90: note = engineered ribonucleic acid scaffold (ERS) sequence
  source 1..90: mol_type = other DNA
aactggcgcttctatctgattactctgagcgccatcaccagcgactatgtcgtattgggtaaagctccctcttcggagggagcatcagag

SEQ ID NO: 2145 - DNA, 90 bp, synthetic construct
  misc_feature 1..90: note = engineered ribonucleic acid scaffold (ERS) sequence
  source 1..90: mol_type = other DNA
aactggcgcttctatctgattactctgagcgccatcaccagcgactatgtcgtatggagtaaagctccctcttcggagggagcatcagag

SEQ ID NO: 2146 - DNA, 90 bp, synthetic construct
  misc_feature 1..90: note = engineered ribonucleic acid scaffold (ERS) sequence
  source 1..90: mol_type = other DNA
aactggcgcttctatctgattactctgagcgccatcaccagcgactatgtcgtatggcgtaaagctccctcttcggagggagcatcagag

SEQ ID NO: 2147 - DNA, 90 bp, synthetic construct
  misc_feature 1..90: note = engineered ribonucleic acid scaffold (ERS) sequence
  source 1..90: mol_type = other DNA
aactggcgcttctatctgattactctgagcgccatcaccagcgactatgtcgtatggtgtaaagctccctcttcggagggagcatcagag

SEQ ID NO: 2148 - DNA, 90 bp, synthetic construct
  misc_feature 1..90: note = engineered ribonucleic acid scaffold (ERS) sequence
  source 1..90: mol_type = other DNA
aactggcgcttctatctgattactctgagcgccatcaccagcgactatgtcgtatgggctaaagctccctcttcggagggagcatcagag

SEQ ID NO: 2149 - DNA, 87 bp, synthetic construct
  misc_feature 1..87: note = engineered ribonucleic acid scaffold (ERS) sequence
  source 1..87: mol_type = other DNA
aactggcgcttctatctgattactctgagcgccatcaccagcgactatgtcgtatgggtagctccctcttcggagggagcatcagag

SEQ ID NO: 2150 - DNA, 89 bp, synthetic construct
  misc_feature 1..89: note = engineered ribonucleic acid scaffold (ERS) sequence
  source 1..89: mol_type = other DNA
aactggcgcttctatctgattactctgagcgccatcaccagcgactatgtcgtatgggtgaagctccctcttcggagggagcatcagag

SEQ ID NO: 2151 - DNA, 89 bp, synthetic construct
  misc_feature 1..89: note = engineered ribonucleic acid scaffold (ERS) sequence
  source 1..89: mol_type = other DNA
aactggcgcttctatctgattactctgagcgccatcaccagcgactatgtcgtatgggtagagctccctcttcggagggagcatcagag

SEQ ID NO: 2152 - DNA, 86 bp, synthetic construct
  misc_feature 1..86: note = engineered ribonucleic acid scaffold (ERS) sequence
  source 1..86: mol_type = other DNA
gggcgcttctatctgattactctgagcgcccacaccagcgactatgtcgtatgggtaaagctccctcttcggagggagcatcagag

SEQ ID NO: 2153 - DNA, 86 bp, synthetic construct
  misc_feature 1..86: note = engineered ribonucleic acid scaffold (ERS) sequence
  source 1..86: mol_type = other DNA
gggcgcttctatctgattactctgagcgcccgcaccagcgactatgtcgtatgggtaaagctccctcttcggagggagcatcagag

SEQ ID NO: 2154 - DNA, 86 bp, synthetic construct
  misc_feature 1..86: note = engineered ribonucleic acid scaffold (ERS) sequence
  source 1..86: mol_type = other DNA
gggcgcttctatctgattactctgagcgccctgaccagcgactatgtcgtatggctaaagctccctcttcggagggagcatcagag

SEQ ID NO: 2155 - DNA, 87 bp, synthetic construct
  misc_feature 1..87: note = engineered ribonucleic acid scaffold (ERS) sequence
  source 1..87: mol_type = other DNA
gggcgcttctatctgattactctgagcgccctgaccagcgactatgtcgtatgggctaaagctccctcttcggagggagcatcagag

SEQ ID NO: 2156 - DNA, 86 bp, synthetic construct
  misc_feature 1..86: note = engineered ribonucleic acid scaffold (ERS) sequence
  source 1..86: mol_type = other DNA
gggcgcttctatctgattactctgagcgccctgaccagcgactatgtcgtatgggtaaagctccctcttcggagggagcatcagag

SEQ ID NO: 2157 - DNA, 86 bp, synthetic construct
  misc_feature 1..86: note = engineered ribonucleic acid scaffold (ERS) sequence
  source 1..86: mol_type = other DNA
gggcgcttctatctgattactctgagcgccctccccagcgactatgtcgtatgggtaaagctccctcttcggagggagcatcagag

SEQ ID NO: 2158 - DNA, 87 bp, synthetic construct
  misc_feature 1..87: note = engineered ribonucleic acid scaffold (ERS) sequence
  source 1..87: mol_type = other DNA
gggcgcttctatctgattactctgagcgccctcgccagcgactatgtcgtatggcgtaaagctccctcttcggagggagcatcagag

SEQ ID NO: 2159 - DNA, 86 bp, synthetic construct
  misc_feature 1..86: note = engineered ribonucleic acid scaffold (ERS) sequence
  source 1..86: mol_type = other DNA
gggcgcttctatctgattactctgagcgccctcgccagcgactatgtcgtatgggtaaagctccctcttcggagggagcatcagag

SEQ ID NO: 2160 - DNA, 86 bp, synthetic construct
  misc_feature 1..86: note = engineered ribonucleic acid scaffold (ERS) sequence
  source 1..86: mol_type = other DNA
gggcgcttctatctgattactctgagcgccctctccagcgactatgtcgtatgggtaaagctccctcttcggagggagcatcagag

SEQ ID NO: 2161 - DNA, 86 bp, synthetic construct
  misc_feature 1..86: note = engineered ribonucleic acid scaffold (ERS) sequence
  source 1..86: mol_type = other DNA
gggcgcttctatctgattactctgagcgccctcacctgcgactatgtcgtaagggtaaagctccctcttcggagggagcatcagag

SEQ ID NO: 2162 - DNA, 86 bp, synthetic construct
  misc_feature 1..86: note = engineered ribonucleic acid scaffold (ERS) sequence
  source 1..86: mol_type = other DNA
gggcgcttctatctgattactctgagcgccctcaccagagactatgtcttatgggtaaagctccctcttcggagggagcatcagag

SEQ ID NO: 2163 - DNA, 86 bp, synthetic construct
  misc_feature 1..86: note = engineered ribonucleic acid scaffold (ERS) sequence
  source 1..86: mol_type = other DNA
gggcgcttctatctgattactctgagcgccctcaccagggactatgtcctatgggtaaagctccctcttcggagggagcatcagag

SEQ ID NO: 2164 - DNA, 87 bp, synthetic construct
  misc_feature 1..87: note = engineered ribonucleic acid scaffold (ERS) sequence
  source 1..87: mol_type = other DNA
gggcgcttctatctgattactctgagcgccctcaccaggcactatgtgctattgggtaaagctccctcttcggagggagcatcagag

SEQ ID NO: 2165 - DNA, 86 bp, synthetic construct
  misc_feature 1..86: note = engineered ribonucleic acid scaffold (ERS) sequence
  source 1..86: mol_type = other DNA
gggcgcttctatctgattactctgagcgccctcaccagccactatgtggtatgggtaaagctccctcttcggagggagcatcagag

SEQ ID NO: 2166 - DNA, 86 bp, synthetic construct
  misc_feature 1..86: note = engineered ribonucleic acid scaffold (ERS) sequence
  source 1..86: mol_type = other DNA
gggcgcttctatctgattactctgagcgccctcaccagctactatgtagtatgggtaaagctccctcttcggagggagcatcagag

SEQ ID NO: 2167 - DNA, 86 bp, synthetic construct
  misc_feature 1..86: note = engineered ribonucleic acid scaffold (ERS) sequence
  source 1..86: mol_type = other DNA
gggcgcttctatctgattactctgagcgccctcaccagcgattatgtcgtatgggtaaagctccctcttcggagggagcatcagag

SEQ ID NO: 2168 - DNA, 86 bp, synthetic construct
  misc_feature 1..86: note = engineered ribonucleic acid scaffold (ERS) sequence
  source 1..86: mol_type = other DNA
gggcgcttctatctgattactctgagcgccctcaccagcgacgatgtcgtatgggtaaagctccctcttcggagggagcatcagag

SEQ ID NO: 2169 - DNA, 86 bp, synthetic construct
  misc_feature 1..86: note = engineered ribonucleic acid scaffold (ERS) sequence
  source 1..86: mol_type = other DNA
gggcgcttctatctgattactctgagcgccctcaccagcgactctgtcgtatgggtaaagctccctcttcggagggagcatcagag

SEQ ID NO: 2170 - DNA, 86 bp, synthetic construct
  misc_feature 1..86: note = engineered ribonucleic acid scaffold (ERS) sequence
  source 1..86: mol_type = other DNA
gggcgcttctatctgattactctgagcgccctcaccagcgactatgtcgtgtgggtaaagctccctcttcggagggagcatcagag

SEQ ID NO: 2171 - DNA, 87 bp, synthetic construct
  misc_feature 1..87: note = engineered ribonucleic acid scaffold (ERS) sequence
  source 1..87: mol_type = other DNA
gggcgcttctatctgattactctgagcgccctcaccagcgactatgtcgtattgggtaaagctccctcttcggagggagcatcagag

SEQ ID NO: 2172 - DNA, 87 bp, synthetic construct
  misc_feature 1..87: note = engineered ribonucleic acid scaffold (ERS) sequence
  source 1..87: mol_type = other DNA
gggcgcttctatctgattactctgagcgccctcaccagcgactatgtcgtatggagtaaagctccctcttcggagggagcatcagag

SEQ ID NO: 2173 - DNA, 87 bp, synthetic construct
  misc_feature 1..87: note = engineered ribonucleic acid scaffold (ERS) sequence
  source 1..87: mol_type = other DNA
gggcgcttctatctgattactctgagcgccctcaccagcgactatgtcgtatggcgtaaagctccctcttcggagggagcatcagag

SEQ ID NO: 2174 - DNA, 87 bp, synthetic construct
  misc_feature 1..87: note = engineered ribonucleic acid scaffold (ERS) sequence
  source 1..87: mol_type = other DNA
gggcgcttctatctgattactctgagcgccctcaccagcgactatgtcgtatggtgtaaagctccctcttcggagggagcatcagag

SEQ ID NO: 2175 - DNA, 87 bp, synthetic construct
  misc_feature 1..87: note = engineered ribonucleic acid scaffold (ERS) sequence
  source 1..87: mol_type = other DNA
gggcgcttctatctgattactctgagcgccctcaccagcgactatgtcgtatgggctaaagctccctcttcggagggagcatcagag

SEQ ID NO: 2176 - DNA, 84 bp, synthetic construct
  misc_feature 1..84: note = engineered ribonucleic acid scaffold (ERS) sequence
  source 1..84: mol_type = other DNA
gggcgcttctatctgattactctgagcgccctcaccagcgactatgtcgtatgggtagctccctcttcggagggagcatcagag

SEQ ID NO: 2177 - DNA, 86 bp, synthetic construct
  misc_feature 1..86: note = engineered ribonucleic acid scaffold (ERS) sequence
  source 1..86: mol_type = other DNA
gggcgcttctatctgattactctgagcgccctcaccagcgactatgtcgtatgggtgaagctccctcttcggagggagcatcagag

SEQ ID NO: 2178 - DNA, 86 bp, synthetic construct
  misc_feature 1..86: note = engineered ribonucleic acid scaffold (ERS) sequence
  source 1..86: mol_type = other DNA
gggcgcttctatctgattactctgagcgccctcaccagcgactatgtcgtatgggtagagctccctcttcggagggagcatcagag

SEQ ID NO: 2179 - DNA, 88 bp, synthetic construct
  misc_feature 1..88: note = engineered ribonucleic acid scaffold (ERS) sequence
  source 1..88: mol_type = other DNA
gctggcgcttctatctgattactctgagcgccaacaccagcgactatgtcgtatgggtaaagctccctcttcggagggagcatcagag

SEQ ID NO: 2180 - DNA, 88 bp, synthetic construct
  misc_feature 1..88: note = engineered ribonucleic acid scaffold (ERS) sequence
  source 1..88: mol_type = other DNA
gctggcgcttctatctgattactctgagcgccagcaccagcgactatgtcgtatgggtaaagctccctcttcggagggagcatcagag

SEQ ID NO: 2181 - DNA, 88 bp, synthetic construct
  misc_feature 1..88: note = engineered ribonucleic acid scaffold (ERS) sequence
  source 1..88: mol_type = other DNA
gctggcgcttctatctgattactctgagcgccatgaccagcgactatgtcgtatggctaaagctccctcttcggagggagcatcagag

SEQ ID NO: 2182 - DNA, 89 bp, synthetic construct
  misc_feature 1..89: note = engineered ribonucleic acid scaffold (ERS) sequence
  source 1..89: mol_type = other DNA
gctggcgcttctatctgattactctgagcgccatgaccagcgactatgtcgtatgggctaaagctccctcttcggagggagcatcagag

SEQ ID NO: 2183 - DNA, 88 bp, synthetic construct
  misc_feature 1..88: note = engineered ribonucleic acid scaffold (ERS) sequence
  source 1..88: mol_type = other DNA
gctggcgcttctatctgattactctgagcgccatgaccagcgactatgtcgtatgggtaaagctccctcttcggagggagcatcagag

SEQ ID NO: 2184 - DNA, 88 bp, synthetic construct
  misc_feature 1..88: note = engineered ribonucleic acid scaffold (ERS) sequence
  source 1..88: mol_type = other DNA
gctggcgcttctatctgattactctgagcgccatccccagcgactatgtcgtatgggtaaagctccctcttcggagggagcatcagag

SEQ ID NO: 2185 - DNA, 89 bp, synthetic construct
  misc_feature 1..89: note = engineered ribonucleic acid scaffold (ERS) sequence
  source 1..89: mol_type = other DNA
gctggcgcttctatctgattactctgagcgccatcgccagcgactatgtcgtatggcgtaaagctccctcttcggagggagcatcagag

SEQ ID NO: 2186 - DNA, 88 bp, synthetic construct
  misc_feature 1..88: note = engineered ribonucleic acid scaffold (ERS) sequence
  source 1..88: mol_type = other DNA
gctggcgcttctatctgattactctgagcgccatcgccagcgactatgtcgtatgggtaaagctccctcttcggagggagcatcagag

SEQ ID NO: 2187 - DNA, 88 bp, synthetic construct
  misc_feature 1..88: note = engineered ribonucleic acid scaffold (ERS) sequence
  source 1..88: mol_type = other DNA
gctggcgcttctatctgattactctgagcgccatctccagcgactatgtcgtatgggtaaagctccctcttcggagggagcatcagag

SEQ ID NO: 2188 - DNA, 88 bp, synthetic construct
  misc_feature 1..88: note = engineered ribonucleic acid scaffold (ERS) sequence
  source 1..88: mol_type = other DNA
gctggcgcttctatctgattactctgagcgccatcacctgcgactatgtcgtaagggtaaagctccctcttcggagggagcatcagag

SEQ ID NO: 2189 - DNA, 88 bp, synthetic construct
  misc_feature 1..88: note = engineered ribonucleic acid scaffold (ERS) sequence
  source 1..88: mol_type = other DNA
gctggcgcttctatctgattactctgagcgccatcaccagagactatgtcttatgggtaaagctccctcttcggagggagcatcagag

SEQ ID NO: 2190 - DNA, 88 bp, synthetic construct
  misc_feature 1..88: note = engineered ribonucleic acid scaffold (ERS) sequence
  source 1..88: mol_type = other DNA
gctggcgcttctatctgattactctgagcgccatcaccagggactatgtcctatgggtaaagctccctcttcggagggagcatcagag

SEQ ID NO: 2191 - DNA, 89 bp, synthetic construct
  misc_feature 1..89: note = engineered ribonucleic acid scaffold (ERS) sequence
  source 1..89: mol_type = other DNA
gctggcgcttctatctgattactctgagcgccatcaccaggcactatgtgctattgggtaaagctccctcttcggagggagcatcagag

SEQ ID NO: 2192 - DNA, 88 bp, synthetic construct
  misc_feature 1..88: note = engineered ribonucleic acid scaffold (ERS) sequence
  source 1..88: mol_type = other DNA
gctggcgcttctatctgattactctgagcgccatcaccagccactatgtggtatgggtaaagctccctcttcggagggagcatcagag

SEQ ID NO: 2193 - DNA, 88 bp, synthetic construct
  misc_feature 1..88: note = engineered ribonucleic acid scaffold (ERS) sequence
  source 1..88: mol_type = other DNA
gctggcgcttctatctgattactctgagcgccatcaccagctactatgtagtatgggtaaagctccctcttcggagggagcatcagag

SEQ ID NO: 2194 - DNA, 88 bp, synthetic construct
  misc_feature 1..88: note = engineered ribonucleic acid scaffold (ERS) sequence
  source 1..88: mol_type = other DNA
gctggcgcttctatctgattactctgagcgccatcaccagcgattatgtcgtatgggtaaagctccctcttcggagggagcatcagag

SEQ ID NO: 2195 - DNA, 88 bp, synthetic construct
  misc_feature 1..88: note = engineered ribonucleic acid scaffold (ERS) sequence
  source 1..88: mol_type = other DNA
gctggcgcttctatctgattactctgagcgccatcaccagcgacgatgtcgtatgggtaaagctccctcttcggagggagcatcagag

SEQ ID NO: 2196 - DNA, 88 bp, synthetic construct
  misc_feature 1..88: note = engineered ribonucleic acid scaffold (ERS) sequence
  source 1..88: mol_type = other DNA
gctggcgcttctatctgattactctgagcgccatcaccagcgactctgtcgtatgggtaaagctccctcttcggagggagcatcagag

SEQ ID NO: 2197 - DNA, 88 bp, synthetic construct
  misc_feature 1..88: note = engineered ribonucleic acid scaffold (ERS) sequence
  source 1..88: mol_type = other DNA
gctggcgcttctatctgattactctgagcgccatcaccagcgactatgtcgtgtgggtaaagctccctcttcggagggagcatcagag

SEQ ID NO: 2198 - DNA, 89 bp, synthetic construct
  misc_feature 1..89: note = engineered ribonucleic acid scaffold (ERS) sequence
  source 1..89: mol_type = other DNA
gctggcgcttctatctgattactctgagcgccatcaccagcgactatgtcgtattgggtaaagctccctcttcggagggagcatcagag

SEQ ID NO: 2199 - DNA, 89 bp, synthetic construct
  misc_feature 1..89: note = engineered ribonucleic acid scaffold (ERS) sequence
  source 1..89: mol_type = other DNA
gctggcgcttctatctgattactctgagcgccatcaccagcgactatgtcgtatggagtaaagctccctcttcggagggagcatcagag

SEQ ID NO: 2200 - DNA, 89 bp, synthetic construct
  misc_feature 1..89: note = engineered ribonucleic acid scaffold (ERS) sequence
  source 1..89: mol_type = other DNA
gctggcgcttctatctgattactctgagcgccatcaccagcgactatgtcgtatggcgtaaagctccctcttcggagggagcatcagag

SEQ ID NO: 2201 - DNA, 89 bp, synthetic construct
  misc_feature 1..89: note = engineered ribonucleic acid scaffold (ERS) sequence
  source 1..89: mol_type = other DNA
gctggcgcttctatctgattactctgagcgccatcaccagcgactatgtcgtatggtgtaaagctccctcttcggagggagcatcagag

SEQ ID NO: 2202 - DNA, 89 bp, synthetic construct
  misc_feature 1..89: note = engineered ribonucleic acid scaffold (ERS) sequence
  source 1..89: mol_type = other DNA
gctggcgcttctatctgattactctgagcgccatcaccagcgactatgtcgtatgggctaaagctccctcttcggagggagcatcagag

SEQ ID NO: 2203 - DNA, 86 bp, synthetic construct
  misc_feature 1..86: note = engineered ribonucleic acid scaffold (ERS) sequence
  source 1..86: mol_type = other DNA
gctggcgcttctatctgattactctgagcgccatcaccagcgactatgtcgtatgggtagctccctcttcggagggagcatcagag

SEQ ID NO: 2204 - DNA, 88 bp, synthetic construct
  misc_feature 1..88: note = engineered ribonucleic acid scaffold (ERS) sequence
  source 1..88: mol_type = other DNA
gctggcgcttctatctgattactctgagcgccatcaccagcgactatgtcgtatgggtgaagctccctcttcggagggagcatcagag

SEQ ID NO: 2205 - DNA, 88 bp, synthetic construct
  misc_feature 1..88: note = engineered ribonucleic acid scaffold (ERS) sequence
  source 1..88: mol_type = other DNA
gctggcgcttctatctgattactctgagcgccatcaccagcgactatgtcgtatgggtagagctccctcttcggagggagcatcagag

SEQ ID NO: 2206 - DNA, 88 bp, synthetic construct
  misc_feature 1..88: note = engineered ribonucleic acid scaffold (ERS) sequence
  source 1..88: mol_type = other DNA
tatggcgcttctatctgattactctgagcgccaacaccagcgactatgtcgtatgggtaaagctccctcttcggagggagcatcagag

SEQ ID NO: 2207 - DNA, 88 bp, synthetic construct
  misc_feature 1..88: note = engineered ribonucleic acid scaffold (ERS) sequence
  source 1..88: mol_type = other DNA
tatggcgcttctatctgattactctgagcgccagcaccagcgactatgtcgtatgggtaaagctccctcttcggagggagcatcagag

SEQ ID NO: 2208 - DNA, 88 bp, synthetic construct
  misc_feature 1..88: note = engineered ribonucleic acid scaffold (ERS) sequence
  source 1..88: mol_type = other DNA
tatggcgcttctatctgattactctgagcgccatgaccagcgactatgtcgtatggctaaagctccctcttcggagggagcatcagag

SEQ ID NO: 2209 - DNA, 89 bp, synthetic construct
  misc_feature 1..89: note = engineered ribonucleic acid scaffold (ERS) sequence
  source 1..89: mol_type = other DNA
tatggcgcttctatctgattactctgagcgccatgaccagcgactatgtcgtatgggctaaagctccctcttcggagggagcatcagag

SEQ ID NO: 2210 - DNA, 88 bp, synthetic construct
  misc_feature 1..88: note = engineered ribonucleic acid scaffold (ERS) sequence
  source 1..88: mol_type = other DNA
tatggcgcttctatctgattactctgagcgccatgaccagcgactatgtcgtatgggtaaagctccctcttcggagggagcatcagag

SEQ ID NO: 2211 - DNA, 88 bp, synthetic construct
  misc_feature 1..88: note = engineered ribonucleic acid scaffold (ERS) sequence
  source 1..88: mol_type = other DNA
tatggcgcttctatctgattactctgagcgccatccccagcgactatgtcgtatgggtaaagctccctcttcggagggagcatcagag

SEQ ID NO: 2212 - DNA, 89 bp, synthetic construct
  misc_feature 1..89: note = engineered ribonucleic acid scaffold (ERS) sequence
  source 1..89: mol_type = other DNA
tatggcgcttctatctgattactctgagcgccatcgccagcgactatgtcgtatggcgtaaagctccctcttcggagggagcatcagag

SEQ ID NO: 2213 - DNA, 88 bp, synthetic construct
  misc_feature 1..88: note = engineered ribonucleic acid scaffold (ERS) sequence
  source 1..88: mol_type = other DNA
tatggcgcttctatctgattactctgagcgccatcgccagcgactatgtcgtatgggtaaagctccctcttcggagggagcatcagag

SEQ ID NO: 2214 - DNA, 88 bp, synthetic construct
  misc_feature 1..88: note = engineered ribonucleic acid scaffold (ERS) sequence
  source 1..88: mol_type = other DNA
tatggcgcttctatctgattactctgagcgccatctccagcgactatgtcgtatgggtaaagctccctcttcggagggagcatcagag

SEQ ID NO: 2215 - DNA, 88 bp, synthetic construct
  misc_feature 1..88: note = engineered ribonucleic acid scaffold (ERS) sequence
  source 1..88: mol_type = other DNA
tatggcgcttctatctgattactctgagcgccatcacctgcgactatgtcgtaagggtaaagctccctcttcggagggagcatcagag

SEQ ID NO: 2216 - DNA, 88 bp, synthetic construct
  misc_feature 1..88: note = engineered ribonucleic acid scaffold (ERS) sequence
  source 1..88: mol_type = other DNA
tatggcgcttctatctgattactctgagcgccatcaccagagactatgtcttatgggtaaagctccctcttcggagggagcatcagag

SEQ ID NO: 2217 - DNA, 88 bp, synthetic construct
  misc_feature 1..88: note = engineered ribonucleic acid scaffold (ERS) sequence
  source 1..88: mol_type = other DNA
tatggcgcttctatctgattactctgagcgccatcaccagggactatgtcctatgggtaaagctccctcttcggagggagcatcagag

SEQ ID NO: 2218 - DNA, 89 bp, synthetic construct
  misc_feature 1..89: note = engineered ribonucleic acid scaffold (ERS) sequence
  source 1..89: mol_type = other DNA
tatggcgcttctatctgattactctgagcgccatcaccaggcactatgtgctattgggtaaagctccctcttcggagggagcatcagag

SEQ ID NO: 2219 - DNA, 88 bp, synthetic construct
  misc_feature 1..88: note = engineered ribonucleic acid scaffold (ERS) sequence
  source 1..88: mol_type = other DNA
tatggcgcttctatctgattactctgagcgccatcaccagccactatgtggtatgggtaaagctccctcttcggagggagcatcagag

SEQ ID NO: 2220 - DNA, 88 bp, synthetic construct
  misc_feature 1..88: note = engineered ribonucleic acid scaffold (ERS) sequence
  source 1..88: mol_type = other DNA
tatggcgcttctatctgattactctgagcgccatcaccagctactatgtagtatgggtaaagctccctcttcggagggagcatcagag

SEQ ID NO: 2221 - DNA, 88 bp, synthetic construct
  misc_feature 1..88: note = engineered ribonucleic acid scaffold (ERS) sequence
  source 1..88: mol_type = other DNA
tatggcgcttctatctgattactctgagcgccatcaccagcgattatgtcgtatgggtaaagctccctcttcggagggagcatcagag

SEQ ID NO: 2222 - DNA, 88 bp, synthetic construct
  misc_feature 1..88: note = engineered ribonucleic acid scaffold (ERS) sequence
  source 1..88: mol_type = other DNA
tatggcgcttctatctgattactctgagcgccatcaccagcgacgatgtcgtatgggtaaagctccctcttcggagggagcatcagag

SEQ ID NO: 2223 - DNA, 88 bp, synthetic construct
  misc_feature 1..88: note = engineered ribonucleic acid scaffold (ERS) sequence
  source 1..88: mol_type = other DNA
tatggcgcttctatctgattactctgagcgccatcaccagcgactctgtcgtatgggtaaagctccctcttcggagggagcatcagag

SEQ ID NO: 2224 - DNA, 88 bp, synthetic construct
  misc_feature 1..88: note = engineered ribonucleic acid scaffold (ERS) sequence
  source 1..88: mol_type = other DNA
tatggcgcttctatctgattactctgagcgccatcaccagcgactatgtcgtgtgggtaaagctccctcttcggagggagcatcagag

SEQ ID NO: 2225 - DNA, 89 bp, synthetic construct
  misc_feature 1..89: note = engineered ribonucleic acid scaffold (ERS) sequence
  source 1..89: mol_type = other DNA
tatggcgcttctatctgattactctgagcgccatcaccagcgactatgtcgtattgggtaaagctccctcttcggagggagcatcagag

SEQ ID NO: 2226 - DNA, 89 bp, synthetic construct
  misc_feature 1..89: note = engineered ribonucleic acid scaffold (ERS) sequence
  source 1..89: mol_type = other DNA
tatggcgcttctatctgattactctgagcgccatcaccagcgactatgtcgtatggagtaaagctccctcttcggagggagcatcagag

SEQ ID NO: 2227 - DNA, 89 bp, synthetic construct
  misc_feature 1..89: note = engineered ribonucleic acid scaffold (ERS) sequence
  source 1..89: mol_type = other DNA
tatggcgcttctatctgattactctgagcgccatcaccagcgactatgtcgtatggcgtaaagctccctcttcggagggagcatcagag

SEQ ID NO: 2228 - DNA, 89 bp, synthetic construct
  misc_feature 1..89: note = engineered ribonucleic acid scaffold (ERS) sequence
  source 1..89: mol_type = other DNA
tatggcgcttctatctgattactctgagcgccatcaccagcgactatgtcgtatggtgtaaagctccctcttcggagggagcatcagag

SEQ ID NO: 2229 - DNA, 89 bp, synthetic construct
  misc_feature 1..89: note = engineered ribonucleic acid scaffold (ERS) sequence
  source 1..89: mol_type = other DNA
tatggcgcttctatctgattactctgagcgccatcaccagcgactatgtcgtatgggctaaagctccctcttcggagggagcatcagag

SEQ ID NO: 2230 - DNA, 86 bp, synthetic construct
  misc_feature 1..86: note = engineered ribonucleic acid scaffold (ERS) sequence
  source 1..86: mol_type = other DNA
tatggcgcttctatctgattactctgagcgccatcaccagcgactatgtcgtatgggtagctccctcttcggagggagcatcagag

SEQ ID NO: 2231 - DNA, 88 bp, synthetic construct
  misc_feature 1..88: note = engineered ribonucleic acid scaffold (ERS) sequence
  source 1..88: mol_type = other DNA
tatggcgcttctatctgattactctgagcgccatcaccagcgactatgtcgtatgggtgaagctccctcttcggagggagcatcagag

SEQ ID NO: 2232 - DNA, 88 bp, synthetic construct
  misc_feature 1..88: note = engineered ribonucleic acid scaffold (ERS) sequence
  source 1..88: mol_type = other DNA
tatggcgcttctatctgattactctgagcgccatcaccagcgactatgtcgtatgggtagagctccctcttcggagggagcatcagag

SEQ ID NO: 2233 - DNA, 88 bp, synthetic construct
  misc_feature 1..88: note = engineered ribonucleic acid scaffold (ERS) sequence
  source 1..88: mol_type = other DNA
tctggcgcttctatctgattactctgagcgccaacaccagcgactatgtcgtatgggtaaagctccctcttcggagggagcatcagag

SEQ ID NO: 2234 - DNA, 88 bp, synthetic construct
  misc_feature 1..88: note = engineered ribonucleic acid scaffold (ERS) sequence
  source 1..88: mol_type = other DNA
tctggcgcttctatctgattactctgagcgccagcaccagcgactatgtcgtatgggtaaagctccctcttcggagggagcatcagag

SEQ ID NO: 2235 - DNA, 88 bp, synthetic construct
  misc_feature 1..88: note = engineered ribonucleic acid scaffold (ERS) sequence
  source 1..88: mol_type = other DNA
tctggcgcttctatctgattactctgagcgccatgaccagcgactatgtcgtatggctaaagctccctcttcggagggagcatcagag

SEQ ID NO: 2236 - DNA, 89 bp, synthetic construct
  misc_feature 1..89: note = engineered ribonucleic acid scaffold (ERS) sequence
  source 1..89: mol_type = other DNA
tctggcgcttctatctgattactctgagcgccatgaccagcgactatgtcgtatgggctaaagctccctcttcggagggagcatcagag

SEQ ID NO: 2237 - DNA, 88 bp, synthetic construct
  misc_feature 1..88: note = engineered ribonucleic acid scaffold (ERS) sequence
  source 1..88: mol_type = other DNA
tctggcgcttctatctgattactctgagcgccatgaccagcgactatgtcgtatgggtaaagctccctcttcggagggagcatcagag

SEQ ID NO: 2238 - DNA, 88 bp, synthetic construct
  misc_feature 1..88: note = engineered ribonucleic acid scaffold (ERS) sequence
  source 1..88: mol_type = other DNA
tctggcgcttctatctgattactctgagcgccatccccagcgactatgtcgtatgggtaaagctccctcttcggagggagcatcagag

SEQ ID NO: 2239 - DNA, 89 bp, synthetic construct
  misc_feature 1..89: note = engineered ribonucleic acid scaffold (ERS) sequence
  source 1..89: mol_type = other DNA
tctggcgcttctatctgattactctgagcgccatcgccagcgactatgtcgtatggcgtaaagctccctcttcggagggagcatcagag

SEQ ID NO: 2240 - DNA, 88 bp, synthetic construct
  misc_feature 1..88: note = engineered ribonucleic acid scaffold (ERS) sequence
  source 1..88: mol_type = other DNA
tctggcgcttctatctgattactctgagcgccatcgccagcgactatgtcgtatgggtaaagctccctcttcggagggagcatcagag

SEQ ID NO: 2241 - DNA, 88 bp, synthetic construct
  misc_feature 1..88: note = engineered ribonucleic acid scaffold (ERS) sequence
  source 1..88: mol_type = other DNA
tctggcgcttctatctgattactctgagcgccatctccagcgactatgtcgtatgggtaaagctccctcttcggagggagcatcagag

SEQ ID NO: 2242 - DNA, 88 bp, synthetic construct
  misc_feature 1..88: note = engineered ribonucleic acid scaffold (ERS) sequence
  source 1..88: mol_type = other DNA
tctggcgcttctatctgattactctgagcgccatcacctgcgactatgtcgtaagggtaaagctccctcttcggagggagcatcagag

SEQ ID NO: 2243 - DNA, 88 bp, synthetic construct
  misc_feature 1..88: note = engineered ribonucleic acid scaffold (ERS) sequence
  source 1..88: mol_type = other DNA
tctggcgcttctatctgattactctgagcgccatcaccagagactatgtcttatgggtaaagctccctcttcggagggagcatcagag

SEQ ID NO: 2244 - DNA, 88 bp, synthetic construct
  misc_feature 1..88: note = engineered ribonucleic acid scaffold (ERS) sequence
  source 1..88: mol_type = other DNA
tctggcgcttctatctgattactctgagcgccatcaccagggactatgtcctatgggtaaagctccctcttcggagggagcatcagag

SEQ ID NO: 2245 - DNA, 89 bp, synthetic construct
  misc_feature 1..89: note = engineered ribonucleic acid scaffold (ERS) sequence
  source 1..89: mol_type = other DNA
tctggcgcttctatctgattactctgagcgccatcaccaggcactatgtgctattgggtaaagctccctcttcggagggagcatcagag

SEQ ID NO: 2246 - DNA, 88 bp, synthetic construct
  misc_feature 1..88: note = engineered ribonucleic acid scaffold (ERS) sequence
  source 1..88: mol_type = other DNA
tctggcgcttctatctgattactctgagcgccatcaccagccactatgtggtatgggtaaagctccctcttcggagggagcatcagag

SEQ ID NO: 2247 - DNA, 88 bp, synthetic construct
  misc_feature 1..88: note = engineered ribonucleic acid scaffold (ERS) sequence
  source 1..88: mol_type = other DNA
tctggcgcttctatctgattactctgagcgccatcaccagctactatgtagtatgggtaaagctccctcttcggagggagcatcagag

SEQ ID NO: 2248 - DNA, 88 bp, synthetic construct
  misc_feature 1..88: note = engineered ribonucleic acid scaffold (ERS) sequence
  source 1..88: mol_type = other DNA
tctggcgcttctatctgattactctgagcgccatcaccagcgattatgtcgtatgggtaaagctccctcttcggagggagcatcagag

SEQ ID NO: 2249 - DNA, 88 bp, synthetic construct
  misc_feature 1..88: note = engineered ribonucleic acid scaffold (ERS) sequence
  source 1..88: mol_type = other DNA
tctggcgcttctatctgattactctgagcgccatcaccagcgacgatgtcgtatgggtaaagctccctcttcggagggagcatcagag

SEQ ID NO: 2250 - DNA, 88 bp, synthetic construct
  misc_feature 1..88: note = engineered ribonucleic acid scaffold (ERS) sequence
  source 1..88: mol_type = other DNA
tctggcgcttctatctgattactctgagcgccatcaccagcgactctgtcgtatgggtaaagctccctcttcggagggagcatcagag

SEQ ID NO: 2251 - DNA, 88 bp, synthetic construct
  misc_feature 1..88: note = engineered ribonucleic acid scaffold (ERS) sequence
  source 1..88: mol_type = other DNA
tctggcgcttctatctgattactctgagcgccatcaccagcgactatgtcgtgtgggtaaagctccctcttcggagggagcatcagag

SEQ ID NO: 2252 - DNA, 89 bp, synthetic construct
  misc_feature 1..89: note = engineered ribonucleic acid scaffold (ERS) sequence
  source 1..89: mol_type = other DNA
tctggcgcttctatctgattactctgagcgccatcaccagcgactatgtcgtattgggtaaagctccctcttcggagggagcatcagag

SEQ ID NO: 2253 - DNA, 89 bp, synthetic construct
  misc_feature 1..89: note = engineered ribonucleic acid scaffold (ERS) sequence
  source 1..89: mol_type = other DNA
tctggcgcttctatctgattactctgagcgccatcaccagcgactatgtcgtatggagtaaagctccctcttcggagggagcatcagag

SEQ ID NO: 2254 - DNA, 89 bp, synthetic construct
  misc_feature 1..89: note = engineered ribonucleic acid scaffold (ERS) sequence
  source 1..89: mol_type = other DNA
tctggcgcttctatctgattactctgagcgccatcaccagcgactatgtcgtatggcgtaaagctccctcttcggagggagcatcagag

SEQ ID NO: 2255 - DNA, 89 bp, synthetic construct
  misc_feature 1..89: note = engineered ribonucleic acid scaffold (ERS) sequence
  source 1..89: mol_type = other DNA
tctggcgcttctatctgattactctgagcgccatcaccagcgactatgtcgtatggtgtaaagctccctcttcggagggagcatcagag

SEQ ID NO: 2256 - DNA, 89 bp, synthetic construct
  misc_feature 1..89: note = engineered ribonucleic acid scaffold (ERS) sequence
  source 1..89: mol_type = other DNA
tctggcgcttctatctgattactctgagcgccatcaccagcgactatgtcgtatgggctaaagctccctcttcggagggagcatcagag

SEQ ID NO: 2257 - DNA, 86 bp, synthetic construct
  misc_feature 1..86: note = engineered ribonucleic acid scaffold (ERS) sequence
  source 1..86: mol_type = other DNA
tctggcgcttctatctgattactctgagcgccatcaccagcgactatgtcgtatgggtagctccctcttcggagggagcatcagag

SEQ ID NO: 2258 - DNA, 88 bp, synthetic construct
  misc_feature 1..88: note = engineered ribonucleic acid scaffold (ERS) sequence
  source 1..88: mol_type = other DNA
tctggcgcttctatctgattactctgagcgccatcaccagcgactatgtcgtatgggtgaagctccctcttcggagggagcatcagag

SEQ ID NO: 2259 - DNA, 88 bp, synthetic construct
  misc_feature 1..88: note = engineered ribonucleic acid scaffold (ERS) sequence
  source 1..88: mol_type = other DNA
tctggcgcttctatctgattactctgagcgccatcaccagcgactatgtcgtatgggtagagctccctcttcggagggagcatcagag

SEQ ID NO: 2260 - DNA, 89 bp, synthetic construct
  misc_feature 1..89: note = engineered ribonucleic acid scaffold (ERS) sequence
  source 1..89: mol_type = other DNA
atctggcgcttctatctgattactctgagcgccaacaccagcgactatgtcgtatgggtaaagctccctcttcggagggagcatcagag

SEQ ID NO: 2261 - DNA, 89 bp, synthetic construct
  misc_feature 1..89: note = engineered ribonucleic acid scaffold (ERS) sequence
  source 1..89: mol_type = other DNA
atctggcgcttctatctgattactctgagcgccagcaccagcgactatgtcgtatgggtaaagctccctcttcggagggagcatcagag

SEQ ID NO: 2262 - DNA, 89 bp, synthetic construct
  misc_feature 1..89: note = engineered ribonucleic acid scaffold (ERS) sequence
  source 1..89: mol_type = other DNA
atctggcgcttctatctgattactctgagcgccatgaccagcgactatgtcgtatggctaaagctccctcttcggagggagcatcagag

SEQ ID NO: 2263 - DNA, 90 bp, synthetic construct
  misc_feature 1..90: note = engineered ribonucleic acid scaffold (ERS) sequence
  source 1..90: mol_type = other DNA
atctggcgcttctatctgattactctgagcgccatgaccagcgactatgtcgtatgggctaaagctccctcttcggagggagcatcagag

SEQ ID NO: 2264 - DNA, 89 bp, synthetic construct
  misc_feature 1..89: note = engineered ribonucleic acid scaffold (ERS) sequence
  source 1..89: mol_type = other DNA
atctggcgcttctatctgattactctgagcgccatgaccagcgactatgtcgtatgggtaaagctccctcttcggagggagcatcagag

SEQ ID NO: 2265 - DNA, 89 bp, synthetic construct
  misc_feature 1..89: note = engineered ribonucleic acid scaffold (ERS) sequence
  source 1..89: mol_type = other DNA
atctggcgcttctatctgattactctgagcgccatccccagcgactatgtcgtatgggtaaagctccctcttcggagggagcatcagag

SEQ ID NO: 2266 - DNA, 90 bp, synthetic construct
  misc_feature 1..90: note = engineered ribonucleic acid scaffold (ERS) sequence
  source 1..90: mol_type = other DNA
atctggcgcttctatctgattactctgagcgccatcgccagcgactatgtcgtatggcgtaaagctccctcttcggagggagcatcagag

SEQ ID NO: 2267 - DNA, 89 bp, synthetic construct
  misc_feature 1..89: note = engineered ribonucleic acid scaffold (ERS) sequence
  source 1..89: mol_type = other DNA
atctggcgcttctatctgattactctgagcgccatcgccagcgactatgtcgtatgggtaaagctccctcttcggagggagcatcagag

SEQ ID NO: 2268 - DNA, 89 bp, synthetic construct
  misc_feature 1..89: note = engineered ribonucleic acid scaffold (ERS) sequence
  source 1..89: mol_type = other DNA
atctggcgcttctatctgattactctgagcgccatctccagcgactatgtcgtatgggtaaagctccctcttcggagggagcatcagag

SEQ ID NO: 2269 - DNA, 89 bp, synthetic construct
  misc_feature 1..89: note = engineered ribonucleic acid scaffold (ERS) sequence
  source 1..89: mol_type = other DNA
atctggcgcttctatctgattactctgagcgccatcacctgcgactatgtcgtaagggtaaagctccctcttcggagggagcatcagag

SEQ ID NO: 2270 - DNA, 89 bp, synthetic construct
  misc_feature 1..89: note = engineered ribonucleic acid scaffold (ERS) sequence
  source 1..89: mol_type = other DNA
atctggcgcttctatctgattactctgagcgccatcaccagagactatgtcttatgggtaaagctccctcttcggagggagcatcagag

SEQ ID NO: 2271 - DNA, 89 bp, synthetic construct
  misc_feature 1..89: note = engineered ribonucleic acid scaffold (ERS) sequence
  source 1..89: mol_type = other DNA
atctggcgcttctatctgattactctgagcgccatcaccagggactatgtcctatgggtaaagctccctcttcggagggagcatcagag

SEQ ID NO: 2272 - DNA, 90 bp, synthetic construct
  misc_feature 1..90: note = engineered ribonucleic acid scaffold (ERS) sequence
  source 1..90: mol_type = other DNA
atctggcgcttctatctgattactctgagcgccatcaccaggcactatgtgctattgggtaaagctccctcttcggagggagcatcagag

SEQ ID NO: 2273 - DNA, 89 bp, synthetic construct
  misc_feature 1..89: note = engineered ribonucleic acid scaffold (ERS) sequence
  source 1..89: mol_type = other DNA
atctggcgcttctatctgattactctgagcgccatcaccagccactatgtggtatgggtaaagctccctcttcggagggagcatcagag

SEQ ID NO: 2274 - DNA, 89 bp, synthetic construct
  misc_feature 1..89: note = engineered ribonucleic acid scaffold (ERS) sequence
  source 1..89: mol_type = other DNA
atctggcgcttctatctgattactctgagcgccatcaccagctactatgtagtatgggtaaagctccctcttcggagggagcatcagag

SEQ ID NO: 2275 - DNA, 89 bp, synthetic construct
  misc_feature 1..89: note = engineered ribonucleic acid scaffold (ERS) sequence
  source 1..89: mol_type = other DNA
atctggcgcttctatctgattactctgagcgccatcaccagcgattatgtcgtatgggtaaagctccctcttcggagggagcatcagag

SEQ ID NO: 2276 - DNA, 89 bp, synthetic construct
  misc_feature 1..89: note = engineered ribonucleic acid scaffold (ERS) sequence
  source 1..89: mol_type = other DNA
atctggcgcttctatctgattactctgagcgccatcaccagcgacgatgtcgtatgggtaaagctccctcttcggagggagcatcagag

SEQ ID NO: 2277 - DNA, 89 bp, synthetic construct
  misc_feature 1..89: note = engineered ribonucleic acid scaffold (ERS) sequence
  source 1..89: mol_type = other DNA
atctggcgcttctatctgattactctgagcgccatcaccagcgactctgtcgtatgggtaaagctccctcttcggagggagcatcagag

SEQ ID NO: 2278 - DNA, 89 bp, synthetic construct
  misc_feature 1..89: note = engineered ribonucleic acid scaffold (ERS) sequence
  source 1..89: mol_type = other DNA
atctggcgcttctatctgattactctgagcgccatcaccagcgactatgtcgtgtgggtaaagctccctcttcggagggagcatcagag

SEQ ID NO: 2279 - DNA, 90 bp, synthetic construct
  misc_feature 1..90: note = engineered ribonucleic acid scaffold (ERS) sequence
  source 1..90: mol_type = other DNA
atctggcgcttctatctgattactctgagcgccatcaccagcgactatgtcgtattgggtaaagctccctcttcggagggagcatcagag

SEQ ID NO: 2280 - DNA, 90 bp, synthetic construct
  misc_feature 1..90: note = engineered ribonucleic acid scaffold (ERS) sequence
  source 1..90: mol_type = other DNA
atctggcgcttctatctgattactctgagcgccatcaccagcgactatgtcgtatggagtaaagctccctcttcggagggagcatcagag

SEQ ID NO: 2281 - DNA, 90 bp, synthetic construct
  misc_feature 1..90: note = engineered ribonucleic acid scaffold (ERS) sequence
  source 1..90: mol_type = other DNA
atctggcgcttctatctgattactctgagcgccatcaccagcgactatgtcgtatggcgtaaagctccctcttcggagggagcatcagag

SEQ ID NO: 2282 - DNA, 90 bp, synthetic construct
  misc_feature 1..90: note = engineered ribonucleic acid scaffold (ERS) sequence
  source 1..90: mol_type = other DNA
atctggcgcttctatctgattactctgagcgccatcaccagcgactatgtcgtatggtgtaaagctccctcttcggagggagcatcagag

SEQ ID NO: 2283 - DNA, 90 bp, synthetic construct
  misc_feature 1..90: note = engineered ribonucleic acid scaffold (ERS) sequence
  source 1..90: mol_type = other DNA
atctggcgcttctatctgattactctgagcgccatcaccagcgactatgtcgtatgggctaaagctccctcttcggagggagcatcagag

SEQ ID NO: 2284 - DNA, 87 bp, synthetic construct
  misc_feature 1..87: note = engineered ribonucleic acid scaffold (ERS) sequence
  source 1..87: mol_type = other DNA
atctggcgcttctatctgattactctgagcgccatcaccagcgactatgtcgtatgggtagctccctcttcggagggagcatcagag

SEQ ID NO: 2285 - DNA, 89 bp, synthetic construct
  misc_feature 1..89: note = engineered ribonucleic acid scaffold (ERS) sequence
  source 1..89: mol_type = other DNA
atctggcgcttctatctgattactctgagcgccatcaccagcgactatgtcgtatgggtgaagctccctcttcggagggagcatcagag

SEQ ID NO: 2286 - DNA, 89 bp, synthetic construct
  misc_feature 1..89: note = engineered ribonucleic acid scaffold (ERS) sequence
  source 1..89: mol_type = other DNA
atctggcgcttctatctgattactctgagcgccatcaccagcgactatgtcgtatgggtagagctccctcttcggagggagcatcagag

SEQ ID NO: 2287 - DNA, 86 bp, synthetic construct
  misc_feature 1..86: note = engineered ribonucleic acid scaffold (ERS) sequence
  source 1..86: mol_type = other DNA
aggcgcttctatctgattactctgagcgccaacaccagcgactatgtcgtatgggtaaagctccctcttcggagggagcatcagag

SEQ ID NO: 2288 - DNA, 86 bp, synthetic construct
  misc_feature 1..86: note = engineered ribonucleic acid scaffold (ERS) sequence
  source 1..86: mol_type = other DNA
aggcgcttctatctgattactctgagcgccagcaccagcgactatgtcgtatgggtaaagctccctcttcggagggagcatcagag

SEQ ID NO: 2289 - DNA, 86 bp, synthetic construct
  misc_feature 1..86: note = engineered ribonucleic acid scaffold (ERS) sequence
  source 1..86: mol_type = other DNA
aggcgcttctatctgattactctgagcgccatgaccagcgactatgtcgtatggctaaagctccctcttcggagggagcatcagag

SEQ ID NO: 2290 - DNA, 87 bp, synthetic construct
  misc_feature 1..87: note = engineered ribonucleic acid scaffold (ERS) sequence
  source 1..87: mol_type = other DNA
aggcgcttctatctgattactctgagcgccatgaccagcgactatgtcgtatgggctaaagctccctcttcggagggagcatcagag

SEQ ID NO: 2291 - DNA, 86 bp, synthetic construct
  misc_feature 1..86: note = engineered ribonucleic acid scaffold (ERS) sequence
  source 1..86: mol_type = other DNA
aggcgcttctatctgattactctgagcgccatgaccagcgactatgtcgtatgggtaaagctccctcttcggagggagcatcagag

SEQ ID NO: 2292 - DNA, 86 bp, synthetic construct
  misc_feature 1..86: note = engineered ribonucleic acid scaffold (ERS) sequence
  source 1..86: mol_type = other DNA
aggcgcttctatctgattactctgagcgccatccccagcgactatgtcgtatgggtaaagctccctcttcggagggagcatcagag

SEQ ID NO: 2293 - DNA, 87 bp, synthetic construct
  misc_feature 1..87: note = engineered ribonucleic acid scaffold (ERS) sequence
  source 1..87: mol_type = other DNA
aggcgcttctatctgattactctgagcgccatcgccagcgactatgtcgtatggcgtaaagctccctcttcggagggagcatcagag

SEQ ID NO: 2294 - DNA, 86 bp, synthetic construct
  misc_feature 1..86: note = engineered ribonucleic acid scaffold (ERS) sequence
  source 1..86: mol_type = other DNA
aggcgcttctatctgattactctgagcgccatcgccagcgactatgtcgtatgggtaaagctccctcttcggagggagcatcagag

SEQ ID NO: 2295 - DNA, 86 bp, synthetic construct
  misc_feature 1..86: note = engineered ribonucleic acid scaffold (ERS) sequence
  source 1..86: mol_type = other DNA
aggcgcttctatctgattactctgagcgccatctccagcgactatgtcgtatgggtaaagctccctcttcggagggagcatcagag

SEQ ID NO: 2296 - DNA, 86 bp, synthetic construct
  misc_feature 1..86: note = engineered ribonucleic acid scaffold (ERS) sequence
  source 1..86: mol_type = other DNA
aggcgcttctatctgattactctgagcgccatcacctgcgactatgtcgtaagggtaaagctccctcttcggagggagcatcagag

SEQ ID NO: 2297 - DNA, 86 bp, synthetic construct
  misc_feature 1..86: note = engineered ribonucleic acid scaffold (ERS) sequence
  source 1..86: mol_type = other DNA
aggcgcttctatctgattactctgagcgccatcaccagagactatgtcttatgggtaaagctccctcttcggagggagcatcagag

SEQ ID NO: 2298 - DNA, 86 bp, synthetic construct
  misc_feature 1..86: note = engineered ribonucleic acid scaffold (ERS) sequence
  source 1..86: mol_type = other DNA
aggcgcttctatctgattactctgagcgccatcaccagggactatgtcctatgggtaaagctccctcttcggagggagcatcagag

SEQ ID NO: 2299 - DNA, 87 bp, synthetic construct
  misc_feature 1..87: note = engineered ribonucleic acid scaffold (ERS) sequence
  source 1..87: mol_type = other DNA
aggcgcttctatctgattactctgagcgccatcaccaggcactatgtgctattgggtaaagctccctcttcggagggagcatcagag

SEQ ID NO: 2300 - DNA, 86 bp, synthetic construct
  misc_feature 1..86: note = engineered ribonucleic acid scaffold (ERS) sequence
  source 1..86: mol_type = other DNA
aggcgcttctatctgattactctgagcgccatcaccagccactatgtggtatgggtaaagctccctcttcggagggagcatcagag

SEQ ID NO: 2301 - DNA, 86 bp, synthetic construct
  misc_feature 1..86: note = engineered ribonucleic acid scaffold (ERS) sequence
  source 1..86: mol_type = other DNA
aggcgcttctatctgattactctgagcgccatcaccagctactatgtagtatgggtaaagctccctcttcggagggagcatcagag

SEQ ID NO: 2302 - DNA, 86 bp, synthetic construct
  misc_feature 1..86: note = engineered ribonucleic acid scaffold (ERS) sequence
  source 1..86: mol_type = other DNA
aggcgcttctatctgattactctgagcgccatcaccagcgattatgtcgtatgggtaaagctccctcttcggagggagcatcagag

SEQ ID NO: 2303 - DNA, 86 bp, synthetic construct
  misc_feature 1..86: note = engineered ribonucleic acid scaffold (ERS) sequence
  source 1..86: mol_type = other DNA
aggcgcttctatctgattactctgagcgccatcaccagcgacgatgtcgtatgggtaaagctccctcttcggagggagcatcagag

SEQ ID NO: 2304 - DNA, 86 bp, synthetic construct
  misc_feature 1..86: note = engineered ribonucleic acid scaffold (ERS) sequence
  source 1..86: mol_type = other DNA
aggcgcttctatctgattactctgagcgccatcaccagcgactctgtcgtatgggtaaagctccctcttcggagggagcatcagag

SEQ ID NO: 2305 - DNA, 86 bp, synthetic construct
  misc_feature 1..86: note = engineered ribonucleic acid scaffold (ERS) sequence
  source 1..86: mol_type = other DNA
aggcgcttctatctgattactctgagcgccatcaccagcgactatgtcgtgtgggtaaagctccctcttcggagggagcatcagag

SEQ ID NO: 2306 - DNA, 87 bp, synthetic construct
  misc_feature 1..87: note = engineered ribonucleic acid scaffold (ERS) sequence
  source 1..87: mol_type = other DNA
aggcgcttctatctgattactctgagcgccatcaccagcgactatgtcgtattgggtaaagctccctcttcggagggagcatcagag

SEQ ID NO: 2307 - DNA, 87 bp, synthetic construct
  misc_feature 1..87: note = engineered ribonucleic acid scaffold (ERS) sequence
  source 1..87: mol_type = other DNA
aggcgcttctatctgattactctgagcgccatcaccagcgactatgtcgtatggagtaaagctccctcttcggagggagcatcagag

SEQ ID NO: 2308 - DNA, 87 bp, synthetic construct
  misc_feature 1..87: note = engineered ribonucleic acid scaffold (ERS) sequence
  source 1..87: mol_type = other DNA
aggcgcttctatctgattactctgagcgccatcaccagcgactatgtcgtatggcgtaaagctccctcttcggagggagcatcagag

SEQ ID NO: 2309 - DNA, 87 bp, synthetic construct
  misc_feature 1..87: note = engineered ribonucleic acid scaffold (ERS) sequence
  source 1..87: mol_type = other DNA
aggcgcttctatctgattactctgagcgccatcaccagcgactatgtcgtatggtgtaaagctccctcttcggagggagcatcagag

SEQ ID NO: 2310 - DNA, 87 bp, synthetic construct
  misc_feature 1..87: note = engineered ribonucleic acid scaffold (ERS) sequence
  source 1..87: mol_type = other DNA
aggcgcttctatctgattactctgagcgccatcaccagcgactatgtcgtatgggctaaagctccctcttcggagggagcatcagag

SEQ ID NO: 2311 - DNA, 84 bp, synthetic construct
  misc_feature 1..84: note = engineered ribonucleic acid scaffold (ERS) sequence
  source 1..84: mol_type = other DNA
aggcgcttctatctgattactctgagcgccatcaccagcgactatgtcgtatgggtagctccctcttcggagggagcatcagag

SEQ ID NO: 2312 - DNA, 86 bp, synthetic construct
  misc_feature 1..86: note = engineered ribonucleic acid scaffold (ERS) sequence
  source 1..86: mol_type = other DNA
aggcgcttctatctgattactctgagcgccatcaccagcgactatgtcgtatgggtgaagctccctcttcggagggagcatcagag

SEQ ID NO: 2313 - DNA, 86 bp, synthetic construct
  misc_feature 1..86: note = engineered ribonucleic acid scaffold (ERS) sequence
  source 1..86: mol_type = other DNA
aggcgcttctatctgattactctgagcgccatcaccagcgactatgtcgtatgggtagagctccctcttcggagggagcatcagag

SEQ ID NO: 2314 - DNA, 87 bp, synthetic construct
  misc_feature 1..87: note = engineered ribonucleic acid scaffold (ERS) sequence
  source 1..87: mol_type = other DNA
atggcgcttctatctgattactctgagcgccaacaccagcgactatgtcgtatgggtaaagctccctcttcggagggagcatcagag

SEQ ID NO: 2315 - DNA, 87 bp, synthetic construct
  misc_feature 1..87: note = engineered ribonucleic acid scaffold (ERS) sequence
  source 1..87: mol_type = other DNA
atggcgcttctatctgattactctgagcgccagcaccagcgactatgtcgtatgggtaaagctccctcttcggagggagcatcagag

SEQ ID NO: 2316 - DNA, 87 bp, synthetic construct
  misc_feature 1..87: note = engineered ribonucleic acid scaffold (ERS) sequence
  source 1..87: mol_type = other DNA
atggcgcttctatctgattactctgagcgccatgaccagcgactatgtcgtatggctaaagctccctcttcggagggagcatcagag

SEQ ID NO: 2317 - DNA, 88 bp, synthetic construct
  misc_feature 1..88: note = engineered ribonucleic acid scaffold (ERS) sequence
  source 1..88: mol_type = other DNA
atggcgcttctatctgattactctgagcgccatgaccagcgactatgtcgtatgggctaaagctccctcttcggagggagcatcagag

SEQ ID NO: 2318 - DNA, 87 bp, synthetic construct
  misc_feature 1..87: note = engineered ribonucleic acid scaffold (ERS) sequence
  source 1..87: mol_type = other DNA
atggcgcttctatctgattactctgagcgccatgaccagcgactatgtcgtatgggtaaagctccctcttcggagggagcatcagag

SEQ ID NO: 2319 - DNA, 87 bp, synthetic construct
  misc_feature 1..87: note = engineered ribonucleic acid scaffold (ERS) sequence
  source 1..87: mol_type = other DNA
atggcgcttctatctgattactctgagcgccatccccagcgactatgtcgtatgggtaaagctccctcttcggagggagcatcagag

SEQ ID NO: 2320 - DNA, 88 bp, synthetic construct
  misc_feature 1..88: note = engineered ribonucleic acid scaffold (ERS) sequence
  source 1..88: mol_type = other DNA
atggcgcttctatctgattactctgagcgccatcgccagcgactatgtcgtatggcgtaaagctccctcttcggagggagcatcagag

SEQ ID NO: 2321 - DNA, 87 bp, synthetic construct
  misc_feature 1..87: note = engineered ribonucleic acid scaffold (ERS) sequence
  source 1..87: mol_type = other DNA
atggcgcttctatctgattactctgagcgccatcgccagcgactatgtcgtatgggtaaagctccctcttcggagggagcatcagag

SEQ ID NO: 2322 - DNA, 87 bp, synthetic construct
  misc_feature 1..87: note = engineered ribonucleic acid scaffold (ERS) sequence
  source 1..87: mol_type = other DNA
atggcgcttctatctgattactctgagcgccatctccagcgactatgtcgtatgggtaaagctccctcttcggagggagcatcagag

SEQ ID NO: 2323 - DNA, 87 bp, synthetic construct
  misc_feature 1..87: note = engineered ribonucleic acid scaffold (ERS) sequence
  source 1..87: mol_type = other DNA
atggcgcttctatctgattactctgagcgccatcacctgcgactatgtcgtaagggtaaagctccctcttcggagggagcatcagag

SEQ ID NO: 2324 - DNA, 87 bp, synthetic construct
  misc_feature 1..87: note = engineered ribonucleic acid scaffold (ERS) sequence
  source 1..87: mol_type = other DNA
atggcgcttctatctgattactctgagcgccatcaccagagactatgtcttatgggtaaagctccctcttcggagggagcatcagag

SEQ ID NO: 2325 - DNA, 87 bp, synthetic construct
  misc_feature 1..87: note = engineered ribonucleic acid scaffold (ERS) sequence
  source 1..87: mol_type = other DNA
atggcgcttctatctgattactctgagcgccatcaccagggactatgtcctatgggtaaagctccctcttcggagggagcatcagag

SEQ ID NO: 2326 - DNA, 88 bp, synthetic construct
  misc_feature 1..88: note = engineered ribonucleic acid scaffold (ERS) sequence
  source 1..88: mol_type = other DNA
atggcgcttctatctgattactctgagcgccatcaccaggcactatgtgctattgggtaaagctccctcttcggagggagcatcagag

SEQ ID NO: 2327 - DNA, 87 bp, synthetic construct
  misc_feature 1..87: note = engineered ribonucleic acid scaffold (ERS) sequence
  source 1..87: mol_type = other DNA
atggcgcttctatctgattactctgagcgccatcaccagccactatgtggtatgggtaaagctccctcttcggagggagcatcagag

SEQ ID NO: 2328 - DNA, 87 bp, synthetic construct
  misc_feature 1..87: note = engineered ribonucleic acid scaffold (ERS) sequence
  source 1..87: mol_type = other DNA
atggcgcttctatctgattactctgagcgccatcaccagctactatgtagtatgggtaaagctccctcttcggagggagcatcagag

SEQ ID NO: 2329 - DNA, 87 bp, synthetic construct
  misc_feature 1..87: note = engineered ribonucleic acid scaffold (ERS) sequence
  source 1..87: mol_type = other DNA
atggcgcttctatctgattactctgagcgccatcaccagcgattatgtcgtatgggtaaagctccctcttcggagggagcatcagag

SEQ ID NO: 2330 - DNA, 87 bp, synthetic construct
  misc_feature 1..87: note = engineered ribonucleic acid scaffold (ERS) sequence
  source 1..87: mol_type = other DNA
atggcgcttctatctgattactctgagcgccatcaccagcgacgatgtcgtatgggtaaagctccctcttcggagggagcatcagag

SEQ ID NO: 2331 - DNA, 87 bp, synthetic construct
  misc_feature 1..87: note = engineered ribonucleic acid scaffold (ERS) sequence
  source 1..87: mol_type = other DNA
atggcgcttctatctgattactctgagcgccatcaccagcgactctgtcgtatgggtaaagctccctcttcggagggagcatcagag

SEQ ID NO: 2332 - DNA, 87 bp, synthetic construct
  misc_feature 1..87: note = engineered ribonucleic acid scaffold (ERS) sequence
  source 1..87: mol_type = other DNA
atggtgcttctatctgattactctgagcgccaacaccagcgactatgtcgtatgggtaaagctccctcttcggagggagcatcagag

SEQ ID NO: 2333 - DNA, 87 bp, synthetic construct
  misc_feature 1..87: note = engineered ribonucleic acid scaffold (ERS) sequence
  source 1..87: mol_type = other DNA
atggtgcttctatctgattactctgagcgccagcaccagcgactatgtcgtatgggtaaagctccctcttcggagggagcatcagag

SEQ ID NO: 2334 - DNA, 87 bp, synthetic construct
  misc_feature 1..87: note = engineered ribonucleic acid scaffold (ERS) sequence
  source 1..87: mol_type = other DNA
atggtgcttctatctgattactctgagcgccatgaccagcgactatgtcgtatggctaaagctccctcttcggagggagcatcagag

SEQ ID NO: 2335 - DNA, 88 bp, synthetic construct
  misc_feature 1..88: note = engineered ribonucleic acid scaffold (ERS) sequence
  source 1..88: mol_type = other DNA
atggtgcttctatctgattactctgagcgccatgaccagcgactatgtcgtatgggctaaagctccctcttcggagggagcatcagag

SEQ ID NO: 2336 - DNA, 87 bp, synthetic construct
  misc_feature 1..87: note = engineered ribonucleic acid scaffold (ERS) sequence
  source 1..87: mol_type = other DNA
atggtgcttctatctgattactctgagcgccatgaccagcgactatgtcgtatgggtaaagctccctcttcggagggagcatcagag

SEQ ID NO: 2337 - DNA, 87 bp, synthetic construct
  misc_feature 1..87: note = engineered ribonucleic acid scaffold (ERS) sequence
  source 1..87: mol_type = other DNA
atggtgcttctatctgattactctgagcgccatccccagcgactatgtcgtatgggtaaagctccctcttcggagggagcatcagag

SEQ ID NO: 2338 - DNA, 88 bp, synthetic construct
  misc_feature 1..88: note = engineered ribonucleic acid scaffold (ERS) sequence
  source 1..88: mol_type = other DNA
atggtgcttctatctgattactctgagcgccatcgccagcgactatgtcgtatggcgtaaagctccctcttcggagggagcatcagag

SEQ ID NO: 2339 - DNA, 87 bp, synthetic construct
  misc_feature 1..87: note = engineered ribonucleic acid scaffold (ERS) sequence
  source 1..87: mol_type = other DNA
atggtgcttctatctgattactctgagcgccatcgccagcgactatgtcgtatgggtaaagctccctcttcggagggagcatcagag

SEQ ID NO: 2340 - DNA, 87 bp, synthetic construct
  misc_feature 1..87: note = engineered ribonucleic acid scaffold (ERS) sequence
  source 1..87: mol_type = other DNA
atggtgcttctatctgattactctgagcgccatctccagcgactatgtcgtatgggtaaagctccctcttcggagggagcatcagag

SEQ ID NO: 2341 - DNA, 87 bp, synthetic construct
  misc_feature 1..87: note = engineered ribonucleic acid scaffold (ERS) sequence
  source 1..87: mol_type = other DNA
atggtgcttctatctgattactctgagcgccatcacctgcgactatgtcgtaagggtaaagctccctcttcggagggagcatcagag

SEQ ID NO: 2342 - DNA, 87 bp, synthetic construct
  misc_feature 1..87: note = engineered ribonucleic acid scaffold (ERS) sequence
  source 1..87: mol_type = other DNA
atggtgcttctatctgattactctgagcgccatcaccagagactatgtcttatgggtaaagctccctcttcggagggagcatcagag

SEQ ID NO: 2343 - DNA, 87 bp, synthetic construct
  misc_feature 1..87: note = engineered ribonucleic acid scaffold (ERS) sequence
  source 1..87: mol_type = other DNA
atggtgcttctatctgattactctgagcgccatcaccagggactatgtcctatgggtaaagctccctcttcggagggagcatcagag

SEQ ID NO: 2344 - DNA, 88 bp, synthetic construct
  misc_feature 1..88: note = engineered ribonucleic acid scaffold (ERS) sequence
  source 1..88: mol_type = other DNA
atggtgcttctatctgattactctgagcgccatcaccaggcactatgtgctattgggtaaagctccctcttcggagggagcatcagag

SEQ ID NO: 2345 - DNA, 87 bp, synthetic construct
  misc_feature 1..87: note = engineered ribonucleic acid scaffold (ERS) sequence
  source 1..87: mol_type = other DNA
atggtgcttctatctgattactctgagcgccatcaccagccactatgtggtatgggtaaagctccctcttcggagggagcatcagag

SEQ ID NO: 2346 - DNA, 87 bp, synthetic construct
  misc_feature 1..87: note = engineered ribonucleic acid scaffold (ERS) sequence
  source 1..87: mol_type = other DNA
atggtgcttctatctgattactctgagcgccatcaccagctactatgtagtatgggtaaagctccctcttcggagggagcatcagag

SEQ ID NO: 2347 - DNA, 87 bp, synthetic construct
  misc_feature 1..87: note = engineered ribonucleic acid scaffold (ERS) sequence
  source 1..87: mol_type = other DNA
atggtgcttctatctgattactctgagcgccatcaccagcgattatgtcgtatgggtaaagctccctcttcggagggagcatcagag

SEQ ID NO: 2348 - DNA, 87 bp, synthetic construct
  misc_feature 1..87: note = engineered ribonucleic acid scaffold (ERS) sequence
  source 1..87: mol_type = other DNA
atggtgcttctatctgattactctgagcgccatcaccagcgacgatgtcgtatgggtaaagctccctcttcggagggagcatcagag

SEQ ID NO: 2349 - DNA, 87 bp, synthetic construct
  misc_feature 1..87: note = engineered ribonucleic acid scaffold (ERS) sequence
  source 1..87: mol_type = other DNA
atggtgcttctatctgattactctgagcgccatcaccagcgactctgtcgtatgggtaaagctccctcttcggagggagcatcagag

SEQ ID NO: 2350 - DNA, 87 bp, synthetic construct
  misc_feature 1..87: note = engineered ribonucleic acid scaffold (ERS) sequence
  source 1..87: mol_type = other DNA
atggtgcttctatctgattactctgagcgccatcaccagcgactatgtcgtgtgggtaaagctccctcttcggagggagcatcagag

SEQ ID NO: 2351 - DNA, 88 bp, synthetic construct
  misc_feature 1..88: note = engineered ribonucleic acid scaffold (ERS) sequence
  source 1..88: mol_type = other DNA
atggtgcttctatctgattactctgagcgccatcaccagcgactatgtcgtattgggtaaagctccctcttcggagggagcatcagag

SEQ ID NO: 2352 - DNA, 88 bp, synthetic construct
  misc_feature 1..88: note = engineered ribonucleic acid scaffold (ERS) sequence
  source 1..88: mol_type = other DNA
atggtgcttctatctgattactctgagcgccatcaccagcgactatgtcgtatggagtaaagctccctcttcggagggagcatcagag

SEQ ID NO: 2353 - DNA, 88 bp, synthetic construct
  misc_feature 1..88: note = engineered ribonucleic acid scaffold (ERS) sequence
  source 1..88: mol_type = other DNA
atggtgcttctatctgattactctgagcgccatcaccagcgactatgtcgtatggcgtaaagctccctcttcggagggagcatcagag

SEQ ID NO: 2354 - DNA, 88 bp, synthetic construct
  misc_feature 1..88: note = engineered ribonucleic acid scaffold (ERS) sequence
  source 1..88: mol_type = other DNA
atggtgcttctatctgattactctgagcgccatcaccagcgactatgtcgtatggtgtaaagctccctcttcggagggagcatcagag

SEQ ID NO: 2355 - DNA, 88 bp, synthetic construct
  misc_feature 1..88: note = engineered ribonucleic acid scaffold (ERS) sequence
  source 1..88: mol_type = other DNA
atggtgcttctatctgattactctgagcgccatcaccagcgactatgtcgtatgggctaaagctccctcttcggagggagcatcagag

SEQ ID NO: 2356 - DNA, 85 bp, synthetic construct
  misc_feature 1..85: note = engineered ribonucleic acid scaffold (ERS) sequence
  source 1..85: mol_type = other DNA
atggtgcttctatctgattactctgagcgccatcaccagcgactatgtcgtatgggtagctccctcttcggagggagcatcagag

SEQ ID NO: 2357 - DNA, 87 bp, synthetic construct
  misc_feature 1..87: note = engineered ribonucleic acid scaffold (ERS) sequence
  source 1..87: mol_type = other DNA
atggtgcttctatctgattactctgagcgccatcaccagcgactatgtcgtatgggtgaagctccctcttcggagggagcatcagag

SEQ ID NO: 2358 - DNA, 87 bp, synthetic construct
  misc_feature 1..87: note = engineered ribonucleic acid scaffold (ERS) sequence
  source 1..87: mol_type = other DNA
atggtgcttctatctgattactctgagcgccatcaccagcgactatgtcgtatgggtagagctccctcttcggagggagcatcagag

SEQ ID NO: 2359 - DNA, 87 bp, synthetic construct
  misc_feature 1..87: note = engineered ribonucleic acid scaffold (ERS) sequence
  source 1..87: mol_type = other DNA
atggcgcttctatctgattactctgagcgccatcaccagcgactatgtcgtgtgggtaaagctccctcttcggagggagcatcagag

SEQ ID NO: 2360 - DNA, 88 bp, synthetic construct
  misc_feature 1..88: note = engineered ribonucleic acid scaffold (ERS) sequence
  source 1..88: mol_type = other DNA
atggcgcttctatctgattactctgagcgccatcaccagcgactatgtcgtattgggtaaagctccctcttcggagggagcatcagag

SEQ ID NO: 2361 - DNA, 88 bp, synthetic construct
  misc_feature 1..88: note = engineered ribonucleic acid scaffold (ERS) sequence
  source 1..88: mol_type = other DNA
atggcgcttctatctgattactctgagcgccatcaccagcgactatgtcgtatggagtaaagctccctcttcggagggagcatcagag

SEQ ID NO: 2362 - DNA, 88 bp, synthetic construct
  misc_feature 1..88: note = engineered ribonucleic acid scaffold (ERS) sequence
  source 1..88: mol_type = other DNA
atggcgcttctatctgattactctgagcgccatcaccagcgactatgtcgtatggcgtaaagctccctcttcggagggagcatcagag

SEQ ID NO: 2363 - DNA, 88 bp, synthetic construct
  misc_feature 1..88: note = engineered ribonucleic acid scaffold (ERS) sequence
  source 1..88: mol_type = other DNA
atggcgcttctatctgattactctgagcgccatcaccagcgactatgtcgtatggtgtaaagctccctcttcggagggagcatcagag

SEQ ID NO: 2364 - DNA, 88 bp, synthetic construct
  misc_feature 1..88: note = engineered ribonucleic acid scaffold (ERS) sequence
  source 1..88: mol_type = other DNA
atggcgcttctatctgattactctgagcgccatcaccagcgactatgtcgtatgggctaaagctccctcttcggagggagcatcagag

SEQ ID NO: 2365 - DNA, 85 bp, synthetic construct
  misc_feature 1..85: note = engineered ribonucleic acid scaffold (ERS) sequence
  source 1..85: mol_type = other DNA
atggcgcttctatctgattactctgagcgccatcaccagcgactatgtcgtatgggtagctccctcttcggagggagcatcagag

SEQ ID NO: 2366 - DNA, 87 bp, synthetic construct
  misc_feature 1..87: note = engineered ribonucleic acid scaffold (ERS) sequence
  source 1..87: mol_type = other DNA
atggcgcttctatctgattactctgagcgccatcaccagcgactatgtcgtatgggtgaagctccctcttcggagggagcatcagag

SEQ ID NO: 2367 - DNA, 87 bp, synthetic construct
  misc_feature 1..87: note = engineered ribonucleic acid scaffold (ERS) sequence
  source 1..87: mol_type = other DNA
atggcgcttctatctgattactctgagcgccatcaccagcgactatgtcgtatgggtagagctccctcttcggagggagcatcagag

SEQ ID NO: 2368 - DNA, 88 bp, synthetic construct
  misc_feature 1..88: note = engineered ribonucleic acid scaffold (ERS) sequence
  source 1..88: mol_type = other DNA
aatggcgcttctatctgattactctgagcgccaacaccagcgactatgtcgtatgggtaaagctccctcttcggagggagcatcagag

SEQ ID NO: 2369 - DNA, 88 bp, synthetic construct
  misc_feature 1..88: note = engineered ribonucleic acid scaffold (ERS) sequence
  source 1..88: mol_type = other DNA
aatggcgcttctatctgattactctgagcgccagcaccagcgactatgtcgtatgggtaaagctccctcttcggagggagcatcagag

SEQ ID NO: 2370 - DNA, 88 bp, synthetic construct
  misc_feature 1..88: note = engineered ribonucleic acid scaffold (ERS) sequence
  source 1..88: mol_type = other DNA
aatggcgcttctatctgattactctgagcgccatgaccagcgactatgtcgtatggctaaagctccctcttcggagggagcatcagag

SEQ ID NO: 2371 - DNA, 89 bp, synthetic construct
  misc_feature 1..89: note = engineered ribonucleic acid scaffold (ERS) sequence
  source 1..89: mol_type = other DNA
aatggcgcttctatctgattactctgagcgccatgaccagcgactatgtcgtatgggctaaagctccctcttcggagggagcatcagag

SEQ ID NO: 2372 - DNA, 88 bp, synthetic construct
  misc_feature 1..88: note = engineered ribonucleic acid scaffold (ERS) sequence
  source 1..88: mol_type = other DNA
aatggcgcttctatctgattactctgagcgccatgaccagcgactatgtcgtatgggtaaagctccctcttcggagggagcatcagag

SEQ ID NO: 2373 - DNA, 88 bp, synthetic construct
  misc_feature 1..88: note = engineered ribonucleic acid scaffold (ERS) sequence
  source 1..88: mol_type = other DNA
aatggcgcttctatctgattactctgagcgccatccccagcgactatgtcgtatgggtaaagctccctcttcggagggagcatcagag

SEQ ID NO: 2374 - DNA, 89 bp, synthetic construct
  misc_feature 1..89: note = engineered ribonucleic acid scaffold (ERS) sequence
  source 1..89: mol_type = other DNA
aatggcgcttctatctgattactctgagcgccatcgccagcgactatgtcgtatggcgtaaagctccctcttcggagggagcatcagag

SEQ ID NO: 2375 - DNA, 88 bp, synthetic construct
  misc_feature 1..88: note = engineered ribonucleic acid scaffold (ERS) sequence
  source 1..88: mol_type = other DNA
aatggcgcttctatctgattactctgagcgccatcgccagcgactatgtcgtatgggtaaagctccctcttcggagggagcatcagag

SEQ ID NO: 2376 - DNA, 88 bp, synthetic construct
  misc_feature 1..88: note = engineered ribonucleic acid scaffold (ERS) sequence
  source 1..88: mol_type = other DNA
aatggcgcttctatctgattactctgagcgccatctccagcgactatgtcgtatgggtaaagctccctcttcggagggagcatcagag

SEQ ID NO: 2377 - DNA, 88 bp, synthetic construct
  misc_feature 1..88: note = engineered ribonucleic acid scaffold (ERS) sequence
  source 1..88: mol_type = other DNA
aatggcgcttctatctgattactctgagcgccatcacctgcgactatgtcgtaagggtaaagctccctcttcggagggagcatcagag

SEQ ID NO: 2378 - DNA, 88 bp, synthetic construct
  misc_feature 1..88: note = engineered ribonucleic acid scaffold (ERS) sequence
  source 1..88: mol_type = other DNA
aatggcgcttctatctgattactctgagcgccatcaccagagactatgtcttatgggtaaagctccctcttcggagggagcatcagag

SEQ ID NO: 2379 - DNA, 88 bp, synthetic construct
  misc_feature 1..88: note = engineered ribonucleic acid scaffold (ERS) sequence
  source 1..88: mol_type = other DNA
aatggcgcttctatctgattactctgagcgccatcaccagggactatgtcctatgggtaaagctccctcttcggagggagcatcagag

SEQ ID NO: 2380 - DNA, 89 bp, synthetic construct
  misc_feature 1..89: note = engineered ribonucleic acid scaffold (ERS) sequence
  source 1..89: mol_type = other DNA
aatggcgcttctatctgattactctgagcgccatcaccaggcactatgtgctattgggtaaagctccctcttcggagggagcatcagag

SEQ ID NO: 2381 - DNA, 88 bp, synthetic construct
  misc_feature 1..88: note = engineered ribonucleic acid scaffold (ERS) sequence
  source 1..88: mol_type = other DNA
aatggcgcttctatctgattactctgagcgccatcaccagccactatgtggtatgggtaaagctccctcttcggagggagcatcagag

SEQ ID NO: 2382 - DNA, 88 bp, synthetic construct
  misc_feature 1..88: note = engineered ribonucleic acid scaffold (ERS) sequence
  source 1..88: mol_type = other DNA
aatggcgcttctatctgattactctgagcgccatcaccagctactatgtagtatgggtaaagctccctcttcggagggagcatcagag

SEQ ID NO: 2383 - DNA, 88 bp, synthetic construct
  misc_feature 1..88: note = engineered ribonucleic acid scaffold (ERS) sequence
  source 1..88: mol_type = other DNA
aatggcgcttctatctgattactctgagcgccatcaccagcgattatgtcgtatgggtaaagctccctcttcggagggagcatcagag

SEQ ID NO: 2384 - DNA, 88 bp, synthetic construct
  misc_feature 1..88: note = engineered ribonucleic acid scaffold (ERS) sequence
  source 1..88: mol_type = other DNA
aatggcgcttctatctgattactctgagcgccatcaccagcgacgatgtcgtatgggtaaagctccctcttcggagggagcatcagag

SEQ ID NO: 2385 - DNA, 88 bp, synthetic construct
  misc_feature 1..88: note = engineered ribonucleic acid scaffold (ERS) sequence
  source 1..88: mol_type = other DNA
aatggcgcttctatctgattactctgagcgccatcaccagcgactctgtcgtatgggtaaagctccctcttcggagggagcatcagag

SEQ ID NO: 2386 - DNA, 88 bp, synthetic construct
  misc_feature 1..88: note = engineered ribonucleic acid scaffold (ERS) sequence
  source 1..88: mol_type = other DNA
aatggcgcttctatctgattactctgagcgccatcaccagcgactatgtcgtgtgggtaaagctccctcttcggagggagcatcagag

SEQ ID NO: 2387 - DNA, 89 bp, synthetic construct
  misc_feature 1..89: note = engineered ribonucleic acid scaffold (ERS) sequence
  source 1..89: mol_type = other DNA
aatggcgcttctatctgattactctgagcgccatcaccagcgactatgtcgtattgggtaaagctccctcttcggagggagcatcagag

SEQ ID NO: 2388 - DNA, 89 bp, synthetic construct
  misc_feature 1..89: note = engineered ribonucleic acid scaffold (ERS) sequence
  source 1..89: mol_type = other DNA
aatggcgcttctatctgattactctgagcgccatcaccagcgactatgtcgtatggagtaaagctccctcttcggagggagcatcagag

SEQ ID NO: 2389 - DNA, 89 bp, synthetic construct
  misc_feature 1..89: note = engineered ribonucleic acid scaffold (ERS) sequence
  source 1..89: mol_type = other DNA
aatggcgcttctatctgattactctgagcgccatcaccagcgactatgtcgtatggcgtaaagctccctcttcggagggagcatcagag

SEQ ID NO: 2390 - DNA, 89 bp, synthetic construct
  misc_feature 1..89: note = engineered ribonucleic acid scaffold (ERS) sequence
  source 1..89: mol_type = other DNA
aatggcgcttctatctgattactctgagcgccatcaccagcgactatgtcgtatggtgtaaagctccctcttcggagggagcatcagag

SEQ ID NO: 2391 - DNA, 89 bp, synthetic construct
  misc_feature 1..89: note = engineered ribonucleic acid scaffold (ERS) sequence
  source 1..89: mol_type = other DNA
aatggcgcttctatctgattactctgagcgccatcaccagcgactatgtcgtatgggctaaagctccctcttcggagggagcatcagag

SEQ ID NO: 2392 - DNA, 86 bp, synthetic construct
  misc_feature 1..86: note = engineered ribonucleic acid scaffold (ERS) sequence
  source 1..86: mol_type = other DNA
aatggcgcttctatctgattactctgagcgccatcaccagcgactatgtcgtatgggtagctccctcttcggagggagcatcagag

SEQ ID NO: 2393 - DNA, 88 bp, synthetic construct
  misc_feature 1..88: note = engineered ribonucleic acid scaffold (ERS) sequence
  source 1..88: mol_type = other DNA
aatggcgcttctatctgattactctgagcgccatcaccagcgactatgtcgtatgggtgaagctccctcttcggagggagcatcagag

SEQ ID NO: 2394 - DNA, 88 bp, synthetic construct
  misc_feature 1..88: note = engineered ribonucleic acid scaffold (ERS) sequence
  source 1..88: mol_type = other DNA
aatggcgcttctatctgattactctgagcgccatcaccagcgactatgtcgtatgggtagagctccctcttcggagggagcatcagag

SEQ ID NO: 2395 - DNA, 88 bp, synthetic construct
  misc_feature 1..88: note = engineered ribonucleic acid scaffold (ERS) sequence
  source 1..88: mol_type = other DNA
agtggcgcttctatctgattactctgagcgccaacaccagcgactatgtcgtatgggtaaagctccctcttcggagggagcatcagag

SEQ ID NO: 2396 - DNA, 88 bp, synthetic construct
  misc_feature 1..88: note = engineered ribonucleic acid scaffold (ERS) sequence
  source 1..88: mol_type = other DNA
agtggcgcttctatctgattactctgagcgccagcaccagcgactatgtcgtatgggtaaagctccctcttcggagggagcatcagag

SEQ ID NO: 2397 - DNA, 88 bp, synthetic construct
  misc_feature 1..88: note = engineered ribonucleic acid scaffold (ERS) sequence
  source 1..88: mol_type = other DNA
agtggcgcttctatctgattactctgagcgccatgaccagcgactatgtcgtatggctaaagctccctcttcggagggagcatcagag

SEQ ID NO: 2398 - DNA, 89 bp, synthetic construct
  misc_feature 1..89: note = engineered ribonucleic acid scaffold (ERS) sequence
  source 1..89: mol_type = other DNA
agtggcgcttctatctgattactctgagcgccatgaccagcgactatgtcgtatgggctaaagctccctcttcggagggagcatcagag

SEQ ID NO: 2399 - DNA, 88 bp, synthetic construct
  misc_feature 1..88: note = engineered ribonucleic acid scaffold (ERS) sequence
  source 1..88: mol_type = other DNA
agtggcgcttctatctgattactctgagcgccatgaccagcgactatgtcgtatgggtaaagctccctcttcggagggagcatcagag

SEQ ID NO: 2400 - DNA, 88 bp, synthetic construct
  misc_feature 1..88: note = engineered ribonucleic acid scaffold (ERS) sequence
  source 1..88: mol_type = other DNA
agtggcgcttctatctgattactctgagcgccatccccagcgactatgtcgtatgggtaaagctccctcttcggagggagcatcagag

SEQ ID NO: 2401 - DNA, 89 bp, synthetic construct
  misc_feature 1..89: note = engineered ribonucleic acid scaffold (ERS) sequence
  source 1..89: mol_type = other DNA
agtggcgcttctatctgattactctgagcgccatcgccagcgactatgtcgtatggcgtaaagctccctcttcggagggagcatcagag

SEQ ID NO: 2402 - DNA, 88 bp, synthetic construct
  misc_feature 1..88: note = engineered ribonucleic acid scaffold (ERS) sequence
  source 1..88: mol_type = other DNA
agtggcgcttctatctgattactctgagcgccatcgccagcgactatgtcgtatgggtaaagctccctcttcggagggagcatcagag

SEQ ID NO: 2403 - DNA, 88 bp, synthetic construct
  misc_feature 1..88: note = engineered ribonucleic acid scaffold (ERS) sequence
  source 1..88: mol_type = other DNA
agtggcgcttctatctgattactctgagcgccatctccagcgactatgtcgtatgggtaaagctccctcttcggagggagcatcagag

SEQ ID NO: 2404 - DNA, 88 bp, synthetic construct
  misc_feature 1..88: note = engineered ribonucleic acid scaffold (ERS) sequence
  source 1..88: mol_type = other DNA
agtggcgcttctatctgattactctgagcgccatcacctgcgactatgtcgtaagggtaaagctccctcttcggagggagcatcagag

SEQ ID NO: 2405 - DNA, 88 bp, synthetic construct
  misc_feature 1..88: note = engineered ribonucleic acid scaffold (ERS) sequence
  source 1..88: mol_type = other DNA
agtggcgcttctatctgattactctgagcgccatcaccagagactatgtcttatgggtaaagctccctcttcggagggagcatcagag

SEQ ID NO: 2406 - DNA, 88 bp, synthetic construct
  misc_feature 1..88: note = engineered ribonucleic acid scaffold (ERS) sequence
  source 1..88: mol_type = other DNA
agtggcgcttctatctgattactctgagcgccatcaccagggactatgtcctatgggtaaagctccctcttcggagggagcatcagag

SEQ ID NO: 2407 - DNA, 89 bp, synthetic construct
  misc_feature 1..89: note = engineered ribonucleic acid scaffold (ERS) sequence
  source 1..89: mol_type = other DNA
agtggcgcttctatctgattactctgagcgccatcaccaggcactatgtgctattgggtaaagctccctcttcggagggagcatcagag

SEQ ID NO: 2408 - DNA, 88 bp, synthetic construct
  misc_feature 1..88: note = engineered ribonucleic acid scaffold (ERS) sequence
  source 1..88: mol_type = other DNA
agtggcgcttctatctgattactctgagcgccatcaccagccactatgtggtatgggtaaagctccctcttcggagggagcatcagag

SEQ ID NO: 2409 - DNA, 88 bp, synthetic construct
  misc_feature 1..88: note = engineered ribonucleic acid scaffold (ERS) sequence
  source 1..88: mol_type = other DNA
agtggcgcttctatctgattactctgagcgccatcaccagctactatgtagtatgggtaaagctccctcttcggagggagcatcagag

SEQ ID NO: 2410 - DNA, 88 bp, synthetic construct
  misc_feature 1..88: note = engineered ribonucleic acid scaffold (ERS) sequence
  source 1..88: mol_type = other DNA
agtggcgcttctatctgattactctgagcgccatcaccagcgattatgtcgtatgggtaaagctccctcttcggagggagcatcagag

SEQ ID NO: 2411 - DNA, 88 bp, synthetic construct
  misc_feature 1..88: note = engineered ribonucleic acid scaffold (ERS) sequence
  source 1..88: mol_type = other DNA
agtggcgcttctatctgattactctgagcgccatcaccagcgacgatgtcgtatgggtaaagctccctcttcggagggagcatcagag

SEQ ID NO: 2412 - DNA, 88 bp, synthetic construct
  misc_feature 1..88: note = engineered ribonucleic acid scaffold (ERS) sequence
  source 1..88: mol_type = other DNA
agtggcgcttctatctgattactctgagcgccatcaccagcgactctgtcgtatgggtaaagctccctcttcggagggagcatcagag

SEQ ID NO: 2413 - DNA, 88 bp, synthetic construct
  misc_feature 1..88: note = engineered ribonucleic acid scaffold (ERS) sequence
  source 1..88: mol_type = other DNA
agtggcgcttctatctgattactctgagcgccatcaccagcgactatgtcgtgtgggtaaagctccctcttcggagggagcatcagag

SEQ ID NO: 2414 - DNA, 89 bp, synthetic construct
  misc_feature 1..89: note = engineered ribonucleic acid scaffold (ERS) sequence
  source 1..89: mol_type = other DNA
agtggcgcttctatctgattactctgagcgccatcaccagcgactatgtcgtattgggtaaagctccctcttcggagggagcatcagag

SEQ ID NO: 2415 - DNA, 89 bp, synthetic construct
  misc_feature 1..89: note = engineered ribonucleic acid scaffold (ERS) sequence
  source 1..89: mol_type = other DNA
agtggcgcttctatctgattactctgagcgccatcaccagcgactatgtcgtatggagtaaagctccctcttcggagggagcatcagag

SEQ ID NO: 2416 - DNA, 89 bp, synthetic construct
  misc_feature 1..89: note = engineered ribonucleic acid scaffold (ERS) sequence
  source 1..89: mol_type = other DNA
agtggcgcttctatctgattactctgagcgccatcaccagcgactatgtcgtatggcgtaaagctccctcttcggagggagcatcagag

SEQ ID NO: 2417 - DNA, 89 bp, synthetic construct
  misc_feature 1..89: note = engineered ribonucleic acid scaffold (ERS) sequence
  source 1..89: mol_type = other DNA
agtggcgcttctatctgattactctgagcgccatcaccagcgactatgtcgtatggtgtaaagctccctcttcggagggagcatcagag

SEQ ID NO: 2418 - DNA, 89 bp, synthetic construct
  misc_feature 1..89: note = engineered ribonucleic acid scaffold (ERS) sequence
  source 1..89: mol_type = other DNA
agtggcgcttctatctgattactctgagcgccatcaccagcgactatgtcgtatgggctaaagctccctcttcggagggagcatcagag

SEQ ID NO: 2419 - DNA, 86 bp, synthetic construct
  misc_feature 1..86: note = engineered ribonucleic acid scaffold (ERS) sequence
  source 1..86: mol_type = other DNA
agtggcgcttctatctgattactctgagcgccatcaccagcgactatgtcgtatgggtagctccctcttcggagggagcatcagag

SEQ ID NO: 2420 - DNA, 88 bp, synthetic construct
  misc_feature 1..88: note = engineered ribonucleic acid scaffold (ERS) sequence
  source 1..88: mol_type = other DNA
agtggcgcttctatctgattactctgagcgccatcaccagcgactatgtcgtatgggtgaagctccctcttcggagggagcatcagag

SEQ ID NO: 2421 - DNA, 88 bp, synthetic construct
  misc_feature 1..88: note = engineered ribonucleic acid scaffold (ERS) sequence
  source 1..88: mol_type = other DNA
agtggcgcttctatctgattactctgagcgccatcaccagcgactatgtcgtatgggtagagctccctcttcggagggagcatcagag

SEQ ID NO: 2422 - DNA, 87 bp, synthetic construct
  misc_feature 1..87: note = engineered ribonucleic acid scaffold (ERS) sequence
  source 1..87: mol_type = other DNA
acggcgcttctatctgattactctgagcgccaacaccagcgactatgtcgtatgggtaaagctccctcttcggagggagcatcagag

SEQ ID NO: 2423 - DNA, 87 bp, synthetic construct
  misc_feature 1..87: note = engineered ribonucleic acid scaffold (ERS) sequence
  source 1..87: mol_type = other DNA
acggcgcttctatctgattactctgagcgccagcaccagcgactatgtcgtatgggtaaagctccctcttcggagggagcatcagag

SEQ ID NO: 2424 - DNA, 87 bp, synthetic construct
  misc_feature 1..87: note = engineered ribonucleic acid scaffold (ERS) sequence
  source 1..87: mol_type = other DNA
acggcgcttctatctgattactctgagcgccatgaccagcgactatgtcgtatggctaaagctccctcttcggagggagcatcagag

SEQ ID NO: 2425 - DNA, 88 bp, synthetic construct
  misc_feature 1..88: note = engineered ribonucleic acid scaffold (ERS) sequence
  source 1..88: mol_type = other DNA
acggcgcttctatctgattactctgagcgccatgaccagcgactatgtcgtatgggctaaagctccctcttcggagggagcatcagag

SEQ ID NO: 2426 - DNA, 87 bp, synthetic construct
  misc_feature 1..87: note = engineered ribonucleic acid scaffold (ERS) sequence
  source 1..87: mol_type = other DNA
acggcgcttctatctgattactctgagcgccatgaccagcgactatgtcgtatgggtaaagctccctcttcggagggagcatcagag

SEQ ID NO: 2427 - DNA, 87 bp, synthetic construct
  misc_feature 1..87: note = engineered ribonucleic acid scaffold (ERS) sequence
  source 1..87: mol_type = other DNA
acggcgcttctatctgattactctgagcgccatccccagcgactatgtcgtatgggtaaagctccctcttcggagggagcatcagag

SEQ ID NO: 2428 - DNA, 88 bp, synthetic construct
  misc_feature 1..88: note = engineered ribonucleic acid scaffold (ERS) sequence
  source 1..88: mol_type = other DNA
acggcgcttctatctgattactctgagcgccatcgccagcgactatgtcgtatggcgtaaagctccctcttcggagggagcatcagag

SEQ ID NO: 2429 - DNA, 87 bp, synthetic construct
  misc_feature 1..87: note = engineered ribonucleic acid scaffold (ERS) sequence
  source 1..87: mol_type = other DNA
acggcgcttctatctgattactctgagcgccatcgccagcgactatgtcgtatgggtaaagctccctcttcggagggagcatcagag

SEQ ID NO: 2430 - DNA, 87 bp, synthetic construct
  misc_feature 1..87: note = engineered ribonucleic acid scaffold (ERS) sequence
  source 1..87: mol_type = other DNA
acggcgcttctatctgattactctgagcgccatctccagcgactatgtcgtatgggtaaagctccctcttcggagggagcatcagag

SEQ ID NO: 2431 - DNA, 87 bp, synthetic construct
  misc_feature 1..87: note = engineered ribonucleic acid scaffold (ERS) sequence
  source 1..87: mol_type = other DNA
acggcgcttctatctgattactctgagcgccatcacctgcgactatgtcgtaagggtaaagctccctcttcggagggagcatcagag

SEQ ID NO: 2432 - DNA, 87 bp, synthetic construct
  misc_feature 1..87: note = engineered ribonucleic acid scaffold (ERS) sequence
  source 1..87: mol_type = other DNA
acggcgcttctatctgattactctgagcgccatcaccagagactatgtcttatgggtaaagctccctcttcggagggagcatcagag

SEQ ID NO: 2433 - DNA, 87 bp, synthetic construct
  misc_feature 1..87: note = engineered ribonucleic acid scaffold (ERS) sequence
  source 1..87: mol_type = other DNA
acggcgcttctatctgattactctgagcgccatcaccagggactatgtcctatgggtaaagctccctcttcggagggagcatcagag

SEQ ID NO: 2434 - DNA, 88 bp, synthetic construct
  misc_feature 1..88: note = engineered ribonucleic acid scaffold (ERS) sequence
  source 1..88: mol_type = other DNA
acggcgcttctatctgattactctgagcgccatcaccaggcactatgtgctattgggtaaagctccctcttcggagggagcatcagag

SEQ ID NO: 2435 - DNA, 87 bp, synthetic construct
  misc_feature 1..87: note = engineered ribonucleic acid scaffold (ERS) sequence
  source 1..87: mol_type = other DNA
acggcgcttctatctgattactctgagcgccatcaccagccactatgtggtatgggtaaagctccctcttcggagggagcatcagag

SEQ ID NO: 2436 - DNA, 87 bp, synthetic construct
  misc_feature 1..87: note = engineered ribonucleic acid scaffold (ERS) sequence
  source 1..87: mol_type = other DNA
acggcgcttctatctgattactctgagcgccatcaccagctactatgtagtatgggtaaagctccctcttcggagggagcatcagag

SEQ ID NO: 2437 - DNA, 87 bp, synthetic construct
  misc_feature 1..87: note = engineered ribonucleic acid scaffold (ERS) sequence
  source 1..87: mol_type = other DNA
acggcgcttctatctgattactctgagcgccatcaccagcgattatgtcgtatgggtaaagctccctcttcggagggagcatcagag

SEQ ID NO: 2438 - DNA, 87 bp, synthetic construct
  misc_feature 1..87: note = engineered ribonucleic acid scaffold (ERS) sequence
  source 1..87: mol_type = other DNA
acggcgcttctatctgattactctgagcgccatcaccagcgacgatgtcgtatgggtaaagctccctcttcggagggagcatcagag

SEQ ID NO: 2439 - DNA, 87 bp, synthetic construct
  misc_feature 1..87: note = engineered ribonucleic acid scaffold (ERS) sequence
  source 1..87: mol_type = other DNA
acggcgcttctatctgattactctgagcgccatcaccagcgactctgtcgtatgggtaaagctccctcttcggagggagcatcagag

SEQ ID NO: 2440 - DNA, 87 bp, synthetic construct
  misc_feature 1..87: note = engineered ribonucleic acid scaffold (ERS) sequence
  source 1..87: mol_type = other DNA
acggcgcttctatctgattactctgagcgccatcaccagcgactatgtcgtgtgggtaaagctccctcttcggagggagcatcagag

SEQ ID NO: 2441 - DNA, 88 bp, synthetic construct
  misc_feature 1..88: note = engineered ribonucleic acid scaffold (ERS) sequence
  source 1..88: mol_type = other DNA
acggcgcttctatctgattactctgagcgccatcaccagcgactatgtcgtattgggtaaagctccctcttcggagggagcatcagag

SEQ ID NO: 2442 - DNA, 88 bp, synthetic construct
  misc_feature 1..88: note = engineered ribonucleic acid scaffold (ERS) sequence
  source 1..88: mol_type = other DNA
acggcgcttctatctgattactctgagcgccatcaccagcgactatgtcgtatggagtaaagctccctcttcggagggagcatcagag

SEQ ID NO: 2443 - DNA, 88 bp, synthetic construct
  misc_feature 1..88: note = engineered ribonucleic acid scaffold (ERS) sequence
  source 1..88: mol_type = other DNA
acggcgcttctatctgattactctgagcgccatcaccagcgactatgtcgtatggcgtaaagctccctcttcggagggagcatcagag

SEQ ID NO: 2444 - DNA, 88 bp, synthetic construct
  misc_feature 1..88: note = engineered ribonucleic acid scaffold (ERS) sequence
  source 1..88: mol_type = other DNA
acggcgcttctatctgattactctgagcgccatcaccagcgactatgtcgtatggtgtaaagctccctcttcggagggagcatcagag

SEQ ID NO: 2445 - DNA, 88 bp, synthetic construct
  misc_feature 1..88: note = engineered ribonucleic acid scaffold (ERS) sequence
  source 1..88: mol_type = other DNA
acggcgcttctatctgattactctgagcgccatcaccagcgactatgtcgtatgggctaaagctccctcttcggagggagcatcagag

SEQ ID NO: 2446 - DNA, 85 bp, synthetic construct
  misc_feature 1..85: note = engineered ribonucleic acid scaffold (ERS) sequence
  source 1..85: mol_type = other DNA
acggcgcttctatctgattactctgagcgccatcaccagcgactatgtcgtatgggtagctccctcttcggagggagcatcagag

SEQ ID NO: 2447 - DNA, 87 bp, synthetic construct
  misc_feature 1..87: note = engineered ribonucleic acid scaffold (ERS) sequence
  source 1..87: mol_type = other DNA
acggcgcttctatctgattactctgagcgccatcaccagcgactatgtcgtatgggtgaagctccctcttcggagggagcatcagag

SEQ ID NO: 2448 - DNA, 87 bp, synthetic construct
  misc_feature 1..87: note = engineered ribonucleic acid scaffold (ERS) sequence
  source 1..87: mol_type = other DNA
acggcgcttctatctgattactctgagcgccatcaccagcgactatgtcgtatgggtagagctccctcttcggagggagcatcagag

SEQ ID NO: 2449 - DNA, 88 bp, synthetic construct
  misc_feature 1..88: note = engineered ribonucleic acid scaffold (ERS) sequence
  source 1..88: mol_type = other DNA
acaggcgcttctatctgattactctgagcgccaacaccagcgactatgtcgtatgggtaaagctccctcttcggagggagcatcagag

SEQ ID NO: 2450 - DNA, 88 bp, synthetic construct
  misc_feature 1..88: note = engineered ribonucleic acid scaffold (ERS) sequence
  source 1..88: mol_type = other DNA
acaggcgcttctatctgattactctgagcgccagcaccagcgactatgtcgtatgggtaaagctccctcttcggagggagcatcagag

SEQ ID NO: 2451 - DNA, 88 bp, synthetic construct
  misc_feature 1..88: note = engineered ribonucleic acid scaffold (ERS) sequence
  source 1..88: mol_type = other DNA
acaggcgcttctatctgattactctgagcgccatgaccagcgactatgtcgtatggctaaagctccctcttcggagggagcatcagag

SEQ ID NO: 2452 - DNA, 89 bp, synthetic construct
  misc_feature 1..89: note = engineered ribonucleic acid scaffold (ERS) sequence
  source 1..89: mol_type = other DNA
acaggcgcttctatctgattactctgagcgccatgaccagcgactatgtcgtatgggctaaagctccctcttcggagggagcatcagag

SEQ ID NO: 2453 - DNA, 88 bp, synthetic construct
  misc_feature 1..88: note = engineered ribonucleic acid scaffold (ERS) sequence
  source 1..88: mol_type = other DNA
acaggcgcttctatctgattactctgagcgccatgaccagcgactatgtcgtatgggtaaagctccctcttcggagggagcatcagag

SEQ ID NO: 2454 - DNA, 88 bp, synthetic construct
  misc_feature 1..88: note = engineered ribonucleic acid scaffold (ERS) sequence
  source 1..88: mol_type = other DNA
acaggcgcttctatctgattactctgagcgccatccccagcgactatgtcgtatgggtaaagctccctcttcggagggagcatcagag

SEQ ID NO: 2455 - DNA, 89 bp, synthetic construct
  misc_feature 1..89: note = engineered ribonucleic acid scaffold (ERS) sequence
  source 1..89: mol_type = other DNA
acaggcgcttctatctgattactctgagcgccatcgccagcgactatgtcgtatggcgtaaagctccctcttcggagggagcatcagag

SEQ ID NO: 2456 - DNA, 88 bp, synthetic construct
  misc_feature 1..88: note = engineered ribonucleic acid scaffold (ERS) sequence
  source 1..88: mol_type = other DNA
acaggcgcttctatctgattactctgagcgccatcgccagcgactatgtcgtatgggtaaagctccctcttcggagggagcatcagag

SEQ ID NO: 2457 - DNA, 88 bp, synthetic construct
  misc_feature 1..88: note = engineered ribonucleic acid scaffold (ERS) sequence
  source 1..88: mol_type = other DNA
acaggcgcttctatctgattactctgagcgccatctccagcgactatgtcgtatgggtaaagctccctcttcggagggagcatcagag

SEQ ID NO: 2458 - DNA, 88 bp, synthetic construct
  misc_feature 1..88: note = engineered ribonucleic acid scaffold (ERS) sequence
  source 1..88: mol_type = other DNA
acaggcgcttctatctgattactctgagcgccatcacctgcgactatgtcgtaagggtaaagctccctcttcggagggagcatcagag

SEQ ID NO: 2459 - DNA, 88 bp, synthetic construct
  misc_feature 1..88: note = engineered ribonucleic acid scaffold (ERS) sequence
  source 1..88: mol_type = other DNA
acaggcgcttctatctgattactctgagcgccatcaccagagactatgtcttatgggtaaagctccctcttcggagggagcatcagag

SEQ ID NO: 2460 - DNA, 88 bp, synthetic construct
  misc_feature 1..88: note = engineered ribonucleic acid scaffold (ERS) sequence
  source 1..88: mol_type = other DNA
acaggcgcttctatctgattactctgagcgccatcaccagggactatgtcctatgggtaaagctccctcttcggagggagcatcagag

SEQ ID NO: 2461 - DNA, 89 bp, synthetic construct
  misc_feature 1..89: note = engineered ribonucleic acid scaffold (ERS) sequence
  source 1..89: mol_type = other DNA
acaggcgcttctatctgattactctgagcgccatcaccaggcactatgtgctattgggtaaagctccctcttcggagggagcatcagag

SEQ ID NO: 2462 - DNA, 88 bp, synthetic construct
  misc_feature 1..88: note = engineered ribonucleic acid scaffold (ERS) sequence
  source 1..88: mol_type = other DNA
acaggcgcttctatctgattactctgagcgccatcaccagccactatgtggtatgggtaaagctccctcttcggagggagcatcagag

SEQ ID NO: 2463 - DNA, 88 bp, synthetic construct
  misc_feature 1..88: note = engineered ribonucleic acid scaffold (ERS) sequence
  source 1..88: mol_type = other DNA
acaggcgcttctatctgattactctgagcgccatcaccagctactatgtagtatgggtaaagctccctcttcggagggagcatcagag

SEQ ID NO: 2464 - DNA, 88 bp, synthetic construct
  misc_feature 1..88: note = engineered ribonucleic acid scaffold (ERS) sequence
  source 1..88: mol_type = other DNA
acaggcgcttctatctgattactctgagcgccatcaccagcgattatgtcgtatgggtaaagctccctcttcggagggagcatcagag

SEQ ID NO: 2465 - DNA, 88 bp, synthetic construct
  misc_feature 1..88: note = engineered ribonucleic acid scaffold (ERS) sequence
  source 1..88: mol_type = other DNA
acaggcgcttctatctgattactctgagcgccatcaccagcgacgatgtcgtatgggtaaagctccctcttcggagggagcatcagag

SEQ ID NO: 2466 - DNA, 88 bp, synthetic construct
  misc_feature 1..88: note = engineered ribonucleic acid scaffold (ERS) sequence
  source 1..88: mol_type = other DNA
acaggcgcttctatctgattactctgagcgccatcaccagcgactctgtcgtatgggtaaagctccctcttcggagggagcatcagag

SEQ ID NO: 2467 - DNA, 88 bp, synthetic construct
  misc_feature 1..88: note = engineered ribonucleic acid scaffold (ERS) sequence
  source 1..88: mol_type = other DNA
acaggcgcttctatctgattactctgagcgccatcaccagcgactatgtcgtgtgggtaaagctccctcttcggagggagcatcagag

SEQ ID NO: 2468 - DNA, 89 bp, synthetic construct
  misc_feature 1..89: note = engineered ribonucleic acid scaffold (ERS) sequence
  source 1..89: mol_type = other DNA
acaggcgcttctatctgattactctgagcgccatcaccagcgactatgtcgtattgggtaaagctccctcttcggagggagcatcagag

SEQ ID NO: 2469 - DNA, 89 bp, synthetic construct
  misc_feature 1..89: note = engineered ribonucleic acid scaffold (ERS) sequence
  source 1..89: mol_type = other DNA
acaggcgcttctatctgattactctgagcgccatcaccagcgactatgtcgtatggagtaaagctccctcttcggagggagcatcagag

SEQ ID NO: 2470 - DNA, 89 bp, synthetic construct
  misc_feature 1..89: note = engineered ribonucleic acid scaffold (ERS) sequence
  source 1..89: mol_type = other DNA
acaggcgcttctatctgattactctgagcgccatcaccagcgactatgtcgtatggcgtaaagctccctcttcggagggagcatcagag

SEQ ID NO: 2471 - DNA, 89 bp, synthetic construct
  misc_feature 1..89: note = engineered ribonucleic acid scaffold (ERS) sequence
  source 1..89: mol_type = other DNA
acaggcgcttctatctgattactctgagcgccatcaccagcgactatgtcgtatggtgtaaagctccctcttcggagggagcatcagag

SEQ ID NO: 2472 - DNA, 89 bp, synthetic construct
  misc_feature 1..89: note = engineered ribonucleic acid scaffold (ERS) sequence
  source 1..89: mol_type = other DNA
acaggcgcttctatctgattactctgagcgccatcaccagcgactatgtcgtatgggctaaagctccctcttcggagggagcatcagag

SEQ ID NO: 2473 - DNA, 86 bp, synthetic construct
  misc_feature 1..86: note = engineered ribonucleic acid scaffold (ERS) sequence
  source 1..86: mol_type = other DNA
acaggcgcttctatctgattactctgagcgccatcaccagcgactatgtcgtatgggtagctccctcttcggagggagcatcagag

SEQ ID NO: 2474 - DNA, 88 bp, synthetic construct
  misc_feature 1..88: note = engineered ribonucleic acid scaffold (ERS) sequence
  source 1..88: mol_type = other DNA
acaggcgcttctatctgattactctgagcgccatcaccagcgactatgtcgtatgggtgaagctccctcttcggagggagcatcagag

SEQ ID NO: 2475 - DNA, 88 bp, synthetic construct
  misc_feature 1..88: note = engineered ribonucleic acid scaffold (ERS) sequence
  source 1..88: mol_type = other DNA
acaggcgcttctatctgattactctgagcgccatcaccagcgactatgtcgtatgggtagagctccctcttcggagggagcatcagag

SEQ ID NO: 2476 - DNA, 88 bp, synthetic construct
  misc_feature 1..88: note = engineered ribonucleic acid scaffold (ERS) sequence
  source 1..88: mol_type = other DNA
acgggcgcttctatctgattactctgagcgccaacaccagcgactatgtcgtatgggtaaagctccctcttcggagggagcatcagag

SEQ ID NO: 2477 - DNA, 88 bp, synthetic construct
  misc_feature 1..88: note = engineered ribonucleic acid scaffold (ERS) sequence
  source 1..88: mol_type = other DNA
acgggcgcttctatctgattactctgagcgccagcaccagcgactatgtcgtatgggtaaagctccctcttcggagggagcatcagag

SEQ ID NO: 2478 - DNA, 88 bp, synthetic construct
  misc_feature 1..88: note = engineered ribonucleic acid scaffold (ERS) sequence
  source 1..88: mol_type = other DNA
acgggcgcttctatctgattactctgagcgccatgaccagcgactatgtcgtatggctaaagctccctcttcggagggagcatcagag

SEQ ID NO: 2479 - DNA, 89 bp, synthetic construct
  misc_feature 1..89: note = engineered ribonucleic acid scaffold (ERS) sequence
  source 1..89: mol_type = other DNA
acgggcgcttctatctgattactctgagcgccatgaccagcgactatgtcgtatgggctaaagctccctcttcggagggagcatcagag

SEQ ID NO: 2480 - DNA, 88 bp, synthetic construct
  misc_feature 1..88: note = engineered ribonucleic acid scaffold (ERS) sequence
  source 1..88: mol_type = other DNA
acgggcgcttctatctgattactctgagcgccatgaccagcgactatgtcgtatgggtaaagctccctcttcggagggagcatcagag

SEQ ID NO: 2481 - DNA, 88 bp, synthetic construct
  misc_feature 1..88: note = engineered ribonucleic acid scaffold (ERS) sequence
  source 1..88: mol_type = other DNA
acgggcgcttctatctgattactctgagcgccatccccagcgactatgtcgtatgggtaaagctccctcttcggagggagcatcagag

SEQ ID NO: 2482 - DNA, 89 bp, synthetic construct
  misc_feature 1..89: note = engineered ribonucleic acid scaffold (ERS) sequence
  source 1..89: mol_type = other DNA
acgggcgcttctatctgattactctgagcgccatcgccagcgactatgtcgtatggcgtaaagctccctcttcggagggagcatcagag

SEQ ID NO: 2483 - DNA, 88 bp, synthetic construct
  misc_feature 1..88: note = engineered ribonucleic acid scaffold (ERS) sequence
  source 1..88: mol_type = other DNA
acgggcgcttctatctgattactctgagcgccatcgccagcgactatgtcgtatgggtaaagctccctcttcggagggagcatcagag

SEQ ID NO: 2484 - DNA, 88 bp, synthetic construct
  misc_feature 1..88: note = engineered ribonucleic acid scaffold (ERS) sequence
  source 1..88: mol_type = other DNA
acgggcgcttctatctgattactctgagcgccatctccagcgactatgtcgtatgggtaaagctccctcttcggagggagcatcagag

SEQ ID NO: 2485 - DNA, 88 bp, synthetic construct
  misc_feature 1..88: note = engineered ribonucleic acid scaffold (ERS) sequence
  source 1..88: mol_type = other DNA
acgggcgcttctatctgattactctgagcgccatcacctgcgactatgtcgtaagggtaaagctccctcttcggagggagcatcagag

SEQ ID NO: 2486 - DNA, 88 bp, synthetic construct
  misc_feature 1..88: note = engineered ribonucleic acid scaffold (ERS) sequence
  source 1..88: mol_type = other DNA
acgggcgcttctatctgattactctgagcgccatcaccagagactatgtcttatgggtaaagctccctcttcggagggagcatcagag

SEQ ID NO: 2487 - DNA, 88 bp, synthetic construct
  misc_feature 1..88: note = engineered ribonucleic acid scaffold (ERS) sequence
  source 1..88: mol_type = other DNA
acgggcgcttctatctgattactctgagcgccatcaccagggactatgtcctatgggtaaagctccctcttcggagggagcatcagag

SEQ ID NO: 2488 - DNA, 89 bp, synthetic construct
  misc_feature 1..89: note = engineered ribonucleic acid scaffold (ERS) sequence
  source 1..89: mol_type = other DNA
acgggcgcttctatctgattactctgagcgccatcaccaggcactatgtgctattgggtaaagctccctcttcggagggagcatcagag

SEQ ID NO: 2489 - DNA, 88 bp, synthetic construct
  misc_feature 1..88: note = engineered ribonucleic acid scaffold (ERS) sequence
  source 1..88: mol_type = other DNA
acgggcgcttctatctgattactctgagcgccatcaccagccactatgtggtatgggtaaagctccctcttcggagggagcatcagag

SEQ ID NO: 2490 - DNA, 88 bp, synthetic construct
  misc_feature 1..88: note = engineered ribonucleic acid scaffold (ERS) sequence
  source 1..88: mol_type = other DNA
acgggcgcttctatctgattactctgagcgccatcaccagctactatgtagtatgggtaaagctccctcttcggagggagcatcagag

SEQ ID NO: 2491 - DNA, 88 bp, synthetic construct
  misc_feature 1..88: note = engineered ribonucleic acid scaffold (ERS) sequence
  source 1..88: mol_type = other DNA
acgggcgcttctatctgattactctgagcgccatcaccagcgattatgtcgtatgggtaaagctccctcttcggagggagcatcagag

SEQ ID NO: 2492 - DNA, 88 bp, synthetic construct
  misc_feature 1..88: note = engineered ribonucleic acid scaffold (ERS) sequence
  source 1..88: mol_type = other DNA
acgggcgcttctatctgattactctgagcgccatcaccagcgacgatgtcgtatgggtaaagctccctcttcggagggagcatcagag

SEQ ID NO: 2493 - DNA, 88 bp, synthetic construct
  misc_feature 1..88: note = engineered ribonucleic acid scaffold (ERS) sequence
  source 1..88: mol_type = other DNA
acgggcgcttctatctgattactctgagcgccatcaccagcgactctgtcgtatgggtaaagctccctcttcggagggagcatcagag

SEQ ID NO: 2494 - DNA, 88 bp, synthetic construct
  misc_feature 1..88: note = engineered ribonucleic acid scaffold (ERS) sequence
  source 1..88: mol_type = other DNA
acgggcgcttctatctgattactctgagcgccatcaccagcgactatgtcgtgtgggtaaagctccctcttcggagggagcatcagag

SEQ ID NO: 2495 - DNA, 89 bp, synthetic construct
  misc_feature 1..89: note = engineered ribonucleic acid scaffold (ERS) sequence
  source 1..89: mol_type = other DNA
acgggcgcttctatctgattactctgagcgccatcaccagcgactatgtcgtattgggtaaagctccctcttcggagggagcatcagag

SEQ ID NO: 2496 - DNA, 89 bp, synthetic construct
  misc_feature 1..89: note = engineered ribonucleic acid scaffold (ERS) sequence
  source 1..89: mol_type = other DNA
acgggcgcttctatctgattactctgagcgccatcaccagcgactatgtcgtatggagtaaagctccctcttcggagggagcatcagag

SEQ ID NO: 2497 - DNA, 89 bp, synthetic construct
  misc_feature 1..89: note = engineered ribonucleic acid scaffold (ERS) sequence
  source 1..89: mol_type = other DNA
acgggcgcttctatctgattactctgagcgccatcaccagcgactatgtcgtatggcgtaaagctccctcttcggagggagcatcagag

SEQ ID NO: 2498 - DNA, 89 bp, synthetic construct
  misc_feature 1..89: note = engineered ribonucleic acid scaffold (ERS) sequence
  source 1..89: mol_type = other DNA
acgggcgcttctatctgattactctgagcgccatcaccagcgactatgtcgtatggtgtaaagctccctcttcggagggagcatcagag

SEQ ID NO: 2499 - DNA, 89 bp, synthetic construct
  misc_feature 1..89: note = engineered ribonucleic acid scaffold (ERS) sequence
  source 1..89: mol_type = other DNA
acgggcgcttctatctgattactctgagcgccatcaccagcgactatgtcgtatgggctaaagctccctcttcggagggagcatcagag

SEQ ID NO: 2500 - DNA, 86 bp, synthetic construct
  misc_feature 1..86: note = engineered ribonucleic acid scaffold (ERS) sequence
  source 1..86: mol_type = other DNA
acgggcgcttctatctgattactctgagcgccatcaccagcgactatgtcgtatgggtagctccctcttcggagggagcatcagag

SEQ ID NO: 2501 - DNA, 88 bp, synthetic construct
  misc_feature 1..88: note = engineered ribonucleic acid scaffold (ERS) sequence
  source 1..88: mol_type = other DNA
acgggcgcttctatctgattactctgagcgccatcaccagcgactatgtcgtatgggtgaagctccctcttcggagggagcatcagag

SEQ ID NO: 2502 - DNA, 88 bp, synthetic construct
  misc_feature 1..88: note = engineered ribonucleic acid scaffold (ERS) sequence
  source 1..88: mol_type = other DNA
acgggcgcttctatctgattactctgagcgccatcaccagcgactatgtcgtatgggtagagctccctcttcggagggagcatcagag

SEQ ID NO: 2503 - DNA, 89 bp, synthetic construct
  misc_feature 1..89: note = engineered ribonucleic acid scaffold (ERS) sequence
  source 1..89: mol_type = other DNA
actaggcgcttctatctgattactctgagcgccaacaccagcgactatgtcgtatgggtaaagctccctcttcggagggagcatcagag

SEQ ID NO: 2504 - DNA, 89 bp, synthetic construct
  misc_feature 1..89: note = engineered ribonucleic acid scaffold (ERS) sequence
  source 1..89: mol_type = other DNA
actaggcgcttctatctgattactctgagcgccagcaccagcgactatgtcgtatgggtaaagctccctcttcggagggagcatcagag

SEQ ID NO: 2505 - DNA, 89 bp, synthetic construct
  misc_feature 1..89: note = engineered ribonucleic acid scaffold (ERS) sequence
  source 1..89: mol_type = other DNA
actaggcgcttctatctgattactctgagcgccatgaccagcgactatgtcgtatggctaaagctccctcttcggagggagcatcagag

SEQ ID NO: 2506 - DNA, 90 bp, synthetic construct
  misc_feature 1..90: note = engineered ribonucleic acid scaffold (ERS) sequence
  source 1..90: mol_type = other DNA
actaggcgcttctatctgattactctgagcgccatgaccagcgactatgtcgtatgggctaaagctccctcttcggagggagcatcagag

SEQ ID NO: 2507 - DNA, 89 bp, synthetic construct
  misc_feature 1..89: note = engineered ribonucleic acid scaffold (ERS) sequence
  source 1..89: mol_type = other DNA
actaggcgcttctatctgattactctgagcgccatgaccagcgactatgtcgtatgggtaaagctccctcttcggagggagcatcagag

SEQ ID NO: 2508 - DNA, 89 bp, synthetic construct
  misc_feature 1..89: note = engineered ribonucleic acid scaffold (ERS) sequence
  source 1..89: mol_type = other DNA
actaggcgcttctatctgattactctgagcgccatccccagcgactatgtcgtatgggtaaagctccctcttcggagggagcatcagag

SEQ ID NO: 2509 - DNA, 90 bp, synthetic construct
  misc_feature 1..90: note = engineered ribonucleic acid scaffold (ERS) sequence
  source 1..90: mol_type = other DNA
actaggcgcttctatctgattactctgagcgccatcgccagcgactatgtcgtatggcgtaaagctccctcttcggagggagcatcagag

SEQ ID NO: 2510 - DNA, 89 bp, synthetic construct
  misc_feature 1..89: note = engineered ribonucleic acid scaffold (ERS) sequence
  source 1..89: mol_type = other DNA
actaggcgcttctatctgattactctgagcgccatcgccagcgactatgtcgtatgggtaaagctccctcttcggagggagcatcagag

SEQ ID NO: 2511 - DNA, 89 bp, synthetic construct
  misc_feature 1..89: note = engineered ribonucleic acid scaffold (ERS) sequence
  source 1..89: mol_type = other DNA
actaggcgcttctatctgattactctgagcgccatctccagcgactatgtcgtatgggtaaagctccctcttcggagggagcatcagag

SEQ ID NO: 2512 - DNA, 89 bp, synthetic construct
  misc_feature 1..89: note = engineered ribonucleic acid scaffold (ERS) sequence
  source 1..89: mol_type = other DNA
actaggcgcttctatctgattactctgagcgccatcacctgcgactatgtcgtaagggtaaagctccctcttcggagggagcatcagag

SEQ ID NO: 2513 - DNA, 89 bp, synthetic construct
  misc_feature 1..89: note = engineered ribonucleic acid scaffold (ERS) sequence
  source 1..89: mol_type = other DNA
actaggcgcttctatctgattactctgagcgccatcaccagagactatgtcttatgggtaaagctccctcttcggagggagcatcagag

SEQ ID NO: 2514 - DNA, 89 bp, synthetic construct
  misc_feature 1..89: note = engineered ribonucleic acid scaffold (ERS) sequence
  source 1..89: mol_type = other DNA
actaggcgcttctatctgattactctgagcgccatcaccagggactatgtcctatgggtaaagctccctcttcggagggagcatcagag

SEQ ID NO: 2515 - DNA, 90 bp, synthetic construct
  misc_feature 1..90: note = engineered ribonucleic acid scaffold (ERS) sequence
  source 1..90: mol_type = other DNA
actaggcgcttctatctgattactctgagcgccatcaccaggcactatgtgctattgggtaaagctccctcttcggagggagcatcagag

SEQ ID NO: 2516 - DNA, 89 bp, synthetic construct
  misc_feature 1..89: note = engineered ribonucleic acid scaffold (ERS) sequence
  source 1..89: mol_type = other DNA
actaggcgcttctatctgattactctgagcgccatcaccagccactatgtggtatgggtaaagctccctcttcggagggagcatcagag

SEQ ID NO: 2517 - DNA, 89 bp, synthetic construct
  misc_feature 1..89: note = engineered ribonucleic acid scaffold (ERS) sequence
  source 1..89: mol_type = other DNA
actaggcgcttctatctgattactctgagcgccatcaccagctactatgtagtatgggtaaagctccctcttcggagggagcatcagag

SEQ ID NO: 2518 - DNA, 89 bp, synthetic construct
  misc_feature 1..89: note = engineered ribonucleic acid scaffold (ERS) sequence
  source 1..89: mol_type = other DNA
actaggcgcttctatctgattactctgagcgccatcaccagcgattatgtcgtatgggtaaagctccctcttcggagggagcatcagag

SEQ ID NO: 2519 - DNA, 89 bp, synthetic construct
  misc_feature 1..89: note = engineered ribonucleic acid scaffold (ERS) sequence
  source 1..89: mol_type = other DNA
actaggcgcttctatctgattactctgagcgccatcaccagcgacgatgtcgtatgggtaaagctccctcttcggagggagcatcagag

SEQ ID NO: 2520 - DNA, 89 bp, synthetic construct
  misc_feature 1..89: note = engineered ribonucleic acid scaffold (ERS) sequence
  source 1..89: mol_type = other DNA
actaggcgcttctatctgattactctgagcgccatcaccagcgactctgtcgtatgggtaaagctccctcttcggagggagcatcagag

SEQ ID NO: 2521 - DNA, 89 bp, synthetic construct
  misc_feature 1..89: note = engineered ribonucleic acid scaffold (ERS) sequence
  source 1..89: mol_type = other DNA
actaggcgcttctatctgattactctgagcgccatcaccagcgactatgtcgtgtgggtaaagctccctcttcggagggagcatcagag

SEQ ID NO: 2522 - DNA, 90 bp, synthetic construct
  misc_feature 1..90: note = engineered ribonucleic acid scaffold (ERS) sequence
  source 1..90: mol_type = other DNA
actaggcgcttctatctgattactctgagcgccatcaccagcgactatgtcgtattgggtaaagctccctcttcggagggagcatcagag

SEQ ID NO: 2523 - DNA, 90 bp, synthetic construct
  misc_feature 1..90: note = engineered ribonucleic acid scaffold (ERS) sequence
  source 1..90: mol_type = other DNA
actaggcgcttctatctgattactctgagcgccatcaccagcgactatgtcgtatggagtaaagctccctcttcggagggagcatcagag

SEQ ID NO: 2524 - DNA, 90 bp, synthetic construct
  misc_feature 1..90: note = engineered ribonucleic acid scaffold (ERS) sequence
  source 1..90: mol_type = other DNA
actaggcgcttctatctgattactctgagcgccatcaccagcgactatgtcgtatggcgtaaagctccctcttcggagggagcatcagag

SEQ ID NO: 2525 - DNA, 90 bp, synthetic construct
  misc_feature 1..90: note = engineered ribonucleic acid scaffold (ERS) sequence
  source 1..90: mol_type = other DNA
actaggcgcttctatctgattactctgagcgccatcaccagcgactatgtcgtatggtgtaaagctccctcttcggagggagcatcagag

SEQ ID NO: 2526 - DNA, 90 bp, synthetic construct
  misc_feature 1..90: note = engineered ribonucleic acid scaffold (ERS) sequence
  source 1..90: mol_type = other DNA
actaggcgcttctatctgattactctgagcgccatcaccagcgactatgtcgtatgggctaaagctccctcttcggagggagcatcagag

SEQ ID NO: 2527 - DNA, 87 bp, synthetic construct
  misc_feature 1..87: note = engineered ribonucleic acid scaffold (ERS) sequence
  source 1..87: mol_type = other DNA
actaggcgcttctatctgattactctgagcgccatcaccagcgactatgtcgtatgggtagctccctcttcggagggagcatcagag

SEQ ID NO: 2528 - DNA, 89 bp, synthetic construct
  misc_feature 1..89: note = engineered ribonucleic acid scaffold (ERS) sequence
  source 1..89: mol_type = other DNA
actaggcgcttctatctgattactctgagcgccatcaccagcgactatgtcgtatgggtgaagctccctcttcggagggagcatcagag

SEQ ID NO: 2529 - DNA, 89 bp, synthetic construct
  misc_feature 1..89: note = engineered ribonucleic acid scaffold (ERS) sequence
  source 1..89: mol_type = other DNA
actaggcgcttctatctgattactctgagcgccatcaccagcgactatgtcgtatgggtagagctccctcttcggagggagcatcagag

SEQ ID NO: 2530 - DNA, 90 bp, synthetic construct
  misc_feature 1..90: note = engineered ribonucleic acid scaffold (ERS) sequence
  source 1..90: mol_type = other DNA
aactggcgcttctatctgattactctcagcgccatcaccagcgactatgtcgtagtgggtaaagctccctcttcggagggagcatcagac

SEQ ID NO: 2531 - DNA, 90 bp, synthetic construct
  misc_feature 1..90: note = engineered ribonucleic acid scaffold (ERS) sequence
  source 1..90: mol_type = other DNA
aactggcgcttctatctgattactttgagcgccatcaccagcgactatgtcgtagtgggtaaagctccctcttcggagggagcatcagag

SEQ ID NO: 2532 - DNA, 90 bp, synthetic construct
  misc_feature 1..90: note = engineered ribonucleic acid scaffold (ERS) sequence
  source 1..90: mol_type = other DNA
aactggcgcttctatctgattactttgagcgccatcaccagcgactatgtcgtagtgggtaaagctccctcttcggagggagcatcaaag

SEQ ID NO: 2533 - DNA, 90 bp, synthetic construct
  misc_feature 1..90: note = engineered ribonucleic acid scaffold (ERS) sequence
  source 1..90: mol_type = other DNA
aactggcgcttctatctgattagtctcagcgccatcaccagcgactatgtcgtagtgggtaaagctccctcttcggagggagcatgagac

SEQ ID NO: 2534 - DNA, 90 bp, synthetic construct
  misc_feature 1..90: note = engineered ribonucleic acid scaffold (ERS) sequence
  source 1..90: mol_type = other DNA
aactggcgcttctatctgattagtctgagcgccatcaccagcgactatgtcgtagtgggtaaagctccctcttcggagggagcatcagac

SEQ ID NO: 2535 - DNA, 90 bp, synthetic construct
  misc_feature 1..90: note = engineered ribonucleic acid scaffold (ERS) sequence
  source 1..90: mol_type = other DNA
aactggcgcttctatctgattactctcagcgccatcaccagcgactatgtcgtagtgggtaaagctccctcttcggagggagcatgagag

SEQ ID NO: 2536 - DNA, 90 bp, synthetic construct
  misc_feature 1..90: note = engineered ribonucleic acid scaffold (ERS) sequence
  source 1..90: mol_type = other DNA
aactggcgctcccatctgattaccccgagcgccatcaccagcgactatgtcgtagtgggtaaagctccctcttcggagggagcatcgggg

SEQ ID NO: 2537 - DNA, 90 bp, synthetic construct
  misc_feature 1..90: note = engineered ribonucleic acid scaffold (ERS) sequence
  source 1..90: mol_type = other DNA
aactggcgctcctatctgattactccgagcgccatcaccagcgactatgtcgtagtgggtaaagctccctcttcggagggagcatcggag

SEQ ID NO: 2538 - DNA, 90 bp, synthetic construct
  misc_feature 1..90: note = engineered ribonucleic acid scaffold (ERS) sequence
  source 1..90: mol_type = other DNA
aactggcgctgggatctgattaccccgagcgccatcaccagcgactatgtcgtagtgggtaaagctccctcttcggagggagcatcgggg

SEQ ID NO: 2539 - DNA, 90 bp, synthetic construct
  misc_feature 1..90: note = engineered ribonucleic acid scaffold (ERS) sequence
  source 1..90: mol_type = other DNA
aactggcgctggtatctgattactccgagcgccatcaccagcgactatgtcgtagtgggtaaagctccctcttcggagggagcatcggag

SEQ ID NO: 2540 - DNA, 90 bp, synthetic construct
  misc_feature 1..90: note = engineered ribonucleic acid scaffold (ERS) sequence
  source 1..90: mol_type = other DNA
aactggcgcttccatctgattaccctgagcgccatcaccagcgactatgtcgtagtgggtaaagctccctcttcggagggagcatcaggg

SEQ ID NO: 2541 - DNA, 90 bp, synthetic construct
  misc_feature 1..90: note = engineered ribonucleic acid scaffold (ERS) sequence
  source 1..90: mol_type = other DNA
aactggcgcttggatctgattaccctgagcgccatcaccagcgactatgtcgtagtgggtaaagctccctcttcggagggagcatcaggg

SEQ ID NO: 2542 - DNA, 90 bp, synthetic construct
  misc_feature 1..90: note = engineered ribonucleic acid scaffold (ERS) sequence
  source 1..90: mol_type = other DNA
aactggcgcttgtatctgattactctgagcgccatcaccagcgactatgtcgtagtgggtaaagctccctcttcggagggagcatcagag

SEQ ID NO: 2543 - DNA, 90 bp, synthetic construct
  misc_feature 1..90: note = engineered ribonucleic acid scaffold (ERS) sequence
  source 1..90: mol_type = other DNA
aactggcgcttttatctgattactttgagcgccatcaccagcgactatgtcgtagtgggtaaagctccctcttcggagggagcatcagag

SEQ ID NO: 2544 - DNA, 90 bp, synthetic construct
  misc_feature 1..90: note = engineered ribonucleic acid scaffold (ERS) sequence
  source 1..90: mol_type = other DNA
aactggcgcttttatctgattactctgagcgccatcaccagcgactatgtcgtagtgggtaaagctccctcttcggagggagcatcagag

SEQ ID NO: 2545 - DNA, 90 bp, synthetic construct
  misc_feature 1..90: note = engineered ribonucleic acid scaffold (ERS) sequence
  source 1..90: mol_type = other DNA
aactggcgcttttatctgattactctgagcgccatcaccagcgactatgtcgtagtgggtaaagctccctcttcggagggagcatcaaag

SEQ ID NO: 2546 - DNA, 90 bp, synthetic construct
  misc_feature 1..90: note = engineered ribonucleic acid scaffold (ERS) sequence
  source 1..90: mol_type = other DNA
aactggcgcttctatctgattactctgagcgccatcaccagcgactatgtcgtagtgggtaaagctccctcttcggagggagcctcagag

SEQ ID NO: 2547 - DNA, 90 bp, synthetic construct
  misc_feature 1..90: note = engineered ribonucleic acid scaffold (ERS) sequence
  source 1..90: mol_type = other DNA
aactggcgcttctatctgattactctgagcgccatcaccagcgactatgtcgtagtgggtaaagctccctcttcggagggagcgtcagag

SEQ ID NO: 2548 - DNA, 90 bp, synthetic construct
  misc_feature 1..90: note = engineered ribonucleic acid scaffold (ERS) sequence
  source 1..90: mol_type = other DNA
aactggcgcttctatctgattactctgagcgccatcaccagcgactatgtcgtagtgggtaaagctccctcttcggagggagcatcaaag

SEQ ID NO: 2549 - DNA, 87 bp, synthetic construct
  misc_feature 1..87: note = engineered ribonucleic acid scaffold (ERS) sequence
  source 1..87: mol_type = other DNA
gggcgcttctatctgattactctcagcgccctcaccagcgactatgtcgtagtgggtaaagctccctcttcggagggagcatcagac

SEQ ID NO: 2550 - DNA, 87 bp, synthetic construct
  misc_feature 1..87: note = engineered ribonucleic acid scaffold (ERS) sequence
  source 1..87: mol_type = other DNA
gggcgcttctatctgattactttgagcgccctcaccagcgactatgtcgtagtgggtaaagctccctcttcggagggagcatcagag

SEQ ID NO: 2551 - DNA, 87 bp, synthetic construct
  misc_feature 1..87: note = engineered ribonucleic acid scaffold (ERS) sequence
  source 1..87: mol_type = other DNA
gggcgcttctatctgattactttgagcgccctcaccagcgactatgtcgtagtgggtaaagctccctcttcggagggagcatcaaag

SEQ ID NO: 2552 - DNA, 87 bp, synthetic construct
  misc_feature 1..87: note = engineered ribonucleic acid scaffold (ERS) sequence
  source 1..87: mol_type = other DNA
gggcgcttctatctgattagtctcagcgccctcaccagcgactatgtcgtagtgggtaaagctccctcttcggagggagcatgagac

SEQ ID NO: 2553 - DNA, 87 bp, synthetic construct
  misc_feature 1..87: note = engineered ribonucleic acid scaffold (ERS) sequence
  source 1..87: mol_type = other DNA
gggcgcttctatctgattagtctgagcgccctcaccagcgactatgtcgtagtgggtaaagctccctcttcggagggagcatcagac

SEQ ID NO: 2554 - DNA, 87 bp, synthetic construct
  misc_feature 1..87: note = engineered ribonucleic acid scaffold (ERS) sequence
  source 1..87: mol_type = other DNA
gggcgcttctatctgattactctcagcgccctcaccagcgactatgtcgtagtgggtaaagctccctcttcggagggagcatgagag

SEQ ID NO: 2555 - DNA, 87 bp, synthetic construct
  misc_feature 1..87: note = engineered ribonucleic acid scaffold (ERS) sequence
  source 1..87: mol_type = other DNA
gggcgctcccatctgattaccccgagcgccctcaccagcgactatgtcgtagtgggtaaagctccctcttcggagggagcatcgggg

SEQ ID NO: 2556 - DNA, 87 bp, synthetic construct
  misc_feature 1..87: note = engineered ribonucleic acid scaffold (ERS) sequence
  source 1..87: mol_type = other DNA
gggcgctcctatctgattactccgagcgccctcaccagcgactatgtcgtagtgggtaaagctccctcttcggagggagcatcggag

SEQ ID NO: 2557 - DNA, 87 bp, synthetic construct
  misc_feature 1..87: note = engineered ribonucleic acid scaffold (ERS) sequence
  source 1..87: mol_type = other DNA
gggcgctgggatctgattaccccgagcgccctcaccagcgactatgtcgtagtgggtaaagctccctcttcggagggagcatcgggg

SEQ ID NO: 2558 - DNA, 87 bp, synthetic construct
  misc_feature 1..87: note = engineered ribonucleic acid scaffold (ERS) sequence
  source 1..87: mol_type = other DNA
gggcgctggtatctgattactccgagcgccctcaccagcgactatgtcgtagtgggtaaagctccctcttcggagggagcatcggag

SEQ ID NO: 2559 - DNA, 87 bp, synthetic construct
  misc_feature 1..87: note = engineered ribonucleic acid scaffold (ERS) sequence
  source 1..87: mol_type = other DNA
gggcgcttccatctgattaccctgagcgccctcaccagcgactatgtcgtagtgggtaaagctccctcttcggagggagcatcaggg

SEQ ID NO: 2560 - DNA, 87 bp, synthetic construct
  misc_feature 1..87: note = engineered ribonucleic acid scaffold (ERS) sequence
  source 1..87: mol_type = other DNA
gggcgcttggatctgattaccctgagcgccctcaccagcgactatgtcgtagtgggtaaagctccctcttcggagggagcatcaggg

SEQ ID NO: 2561 - DNA, 87 bp, synthetic construct
  misc_feature 1..87: note = engineered ribonucleic acid scaffold (ERS) sequence
  source 1..87: mol_type = other DNA
gggcgcttgtatctgattactctgagcgccctcaccagcgactatgtcgtagtgggtaaagctccctcttcggagggagcatcagag

SEQ ID NO: 2562 - DNA, 87 bp, synthetic construct
  misc_feature 1..87: note = engineered ribonucleic acid scaffold (ERS) sequence
  source 1..87: mol_type = other DNA
gggcgcttttatctgattactttgagcgccctcaccagcgactatgtcgtagtgggtaaagctccctcttcggagggagcatcagag

SEQ ID NO: 2563 - DNA, 87 bp, synthetic construct
  misc_feature 1..87: note = engineered ribonucleic acid scaffold (ERS) sequence
  source 1..87: mol_type = other DNA
gggcgcttttatctgattactctgagcgccctcaccagcgactatgtcgtagtgggtaaagctccctcttcggagggagcatcagag

SEQ ID NO: 2564 - DNA, 87 bp, synthetic construct
  misc_feature 1..87: note = engineered ribonucleic acid scaffold (ERS) sequence
  source 1..87: mol_type = other DNA
gggcgcttttatctgattactctgagcgccctcaccagcgactatgtcgtagtgggtaaagctccctcttcggagggagcatcaaag

SEQ ID NO: 2565 - DNA, 87 bp, synthetic construct
  misc_feature 1..87: note = engineered ribonucleic acid scaffold (ERS) sequence
  source 1..87: mol_type = other DNA
gggcgcttctatctgattactctgagcgccctcaccagcgactatgtcgtagtgggtaaagctccctcttcggagggagcctcagag

SEQ ID NO: 2566 - DNA, 87 bp, synthetic construct
  misc_feature 1..87: note = engineered ribonucleic acid scaffold (ERS) sequence
  source 1..87: mol_type = other DNA
gggcgcttctatctgattactctgagcgccctcaccagcgactatgtcgtagtgggtaaagctccctcttcggagggagcgtcagag

SEQ ID NO: 2567 - DNA, 87 bp, synthetic construct
  misc_feature 1..87: note = engineered ribonucleic acid scaffold (ERS) sequence
  source 1..87: mol_type = other DNA
gggcgcttctatctgattactctgagcgccctcaccagcgactatgtcgtagtgggtaaagctccctcttcggagggagcatcaaag

SEQ ID NO: 2568 - DNA, 89 bp, synthetic construct
  misc_feature 1..89: note = engineered ribonucleic acid scaffold (ERS) sequence
  source 1..89: mol_type = other DNA
gctggcgcttctatctgattactctcagcgccatcaccagcgactatgtcgtagtgggtaaagctccctcttcggagggagcatcagac

SEQ ID NO: 2569 - DNA, 89 bp, synthetic construct
  misc_feature 1..89: note = engineered ribonucleic acid scaffold (ERS) sequence
  source 1..89: mol_type = other DNA
gctggcgcttctatctgattactttgagcgccatcaccagcgactatgtcgtagtgggtaaagctccctcttcggagggagcatcagag

SEQ ID NO: 2570 - DNA, 89 bp, synthetic construct
  misc_feature 1..89: note = engineered ribonucleic acid scaffold (ERS) sequence
  source 1..89: mol_type = other DNA
gctggcgcttctatctgattactttgagcgccatcaccagcgactatgtcgtagtgggtaaagctccctcttcggagggagcatcaaag

SEQ ID NO: 2571 - DNA, 89 bp, synthetic construct
  misc_feature 1..89: note = engineered ribonucleic acid scaffold (ERS) sequence
  source 1..89: mol_type = other DNA
gctggcgcttctatctgattagtctcagcgccatcaccagcgactatgtcgtagtgggtaaagctccctcttcggagggagcatgagac

SEQ ID NO: 2572 - DNA, 89 bp, synthetic construct
  misc_feature 1..89: note = engineered ribonucleic acid scaffold (ERS) sequence
  source 1..89: mol_type = other DNA
gctggcgcttctatctgattagtctgagcgccatcaccagcgactatgtcgtagtgggtaaagctccctcttcggagggagcatcagac

SEQ ID NO: 2573 - DNA, 89 bp, synthetic construct
  misc_feature 1..89: note = engineered ribonucleic acid scaffold (ERS) sequence
  source 1..89: mol_type = other DNA
gctggcgcttctatctgattactctcagcgccatcaccagcgactatgtcgtagtgggtaaagctccctcttcggagggagcatgagag

SEQ ID NO: 2574 - DNA, 89 bp, synthetic construct
  misc_feature 1..89: note = engineered ribonucleic acid scaffold (ERS) sequence
  source 1..89: mol_type = other DNA
gctggcgctcccatctgattaccccgagcgccatcaccagcgactatgtcgtagtgggtaaagctccctcttcggagggagcatcgggg

SEQ ID NO: 2575 - DNA, 89 bp, synthetic construct
  misc_feature 1..89: note = engineered ribonucleic acid scaffold (ERS) sequence
  source 1..89: mol_type = other DNA
gctggcgctcctatctgattactccgagcgccatcaccagcgactatgtcgtagtgggtaaagctccctcttcggagggagcatcggag

SEQ ID NO: 2576 - DNA, 89 bp, synthetic construct
  misc_feature 1..89: note = engineered ribonucleic acid scaffold (ERS) sequence
  source 1..89: mol_type = other DNA
gctggcgctgggatctgattaccccgagcgccatcaccagcgactatgtcgtagtgggtaaagctccctcttcggagggagcatcgggg

SEQ ID NO: 2577 - DNA, 89 bp, synthetic construct
  misc_feature 1..89: note = engineered ribonucleic acid scaffold (ERS) sequence
  source 1..89: mol_type = other DNA
gctggcgctggtatctgattactccgagcgccatcaccagcgactatgtcgtagtgggtaaagctccctcttcggagggagcatcggag

SEQ ID NO: 2578 - DNA, 89 bp, synthetic construct
  misc_feature 1..89: note = engineered ribonucleic acid scaffold (ERS) sequence
  source 1..89: mol_type = other DNA
gctggcgcttccatctgattaccctgagcgccatcaccagcgactatgtcgtagtgggtaaagctccctcttcggagggagcatcaggg

SEQ ID NO: 2579 - DNA, 89 bp, synthetic construct
  misc_feature 1..89: note = engineered ribonucleic acid scaffold (ERS) sequence
  source 1..89: mol_type = other DNA
gctggcgcttggatctgattaccctgagcgccatcaccagcgactatgtcgtagtgggtaaagctccctcttcggagggagcatcaggg

SEQ ID NO: 2580 - DNA, 89 bp, synthetic construct
  misc_feature 1..89: note = engineered ribonucleic acid scaffold (ERS) sequence
  source 1..89: mol_type = other DNA
gctggcgcttgtatctgattactctgagcgccatcaccagcgactatgtcgtagtgggtaaagctccctcttcggagggagcatcagag

SEQ ID NO: 2581 - DNA, 89 bp, synthetic construct
  misc_feature 1..89: note = engineered ribonucleic acid scaffold (ERS) sequence
  source 1..89: mol_type = other DNA
gctggcgcttttatctgattactttgagcgccatcaccagcgactatgtcgtagtgggtaaagctccctcttcggagggagcatcagag

SEQ ID NO: 2582 - DNA, 89 bp, synthetic construct
  misc_feature 1..89: note = engineered ribonucleic acid scaffold (ERS) sequence
  source 1..89: mol_type = other DNA
gctggcgcttttatctgattactctgagcgccatcaccagcgactatgtcgtagtgggtaaagctccctcttcggagggagcatcagag

SEQ ID NO: 2583 - DNA, 89 bp, synthetic construct
  misc_feature 1..89: note = engineered ribonucleic acid scaffold (ERS) sequence
  source 1..89: mol_type = other DNA
gctggcgcttttatctgattactctgagcgccatcaccagcgactatgtcgtagtgggtaaagctccctcttcggagggagcatcaaag

SEQ ID NO: 2584 - DNA, 89 bp, synthetic construct
  misc_feature 1..89: note = engineered ribonucleic acid scaffold (ERS) sequence
  source 1..89: mol_type = other DNA
gctggcgcttctatctgattactctgagcgccatcaccagcgactatgtcgtagtgggtaaagctccctcttcggagggagcctcagag

SEQ ID NO: 2585 - DNA, 89 bp, synthetic construct
  misc_feature 1..89: note = engineered ribonucleic acid scaffold (ERS) sequence
  source 1..89: mol_type = other DNA
gctggcgcttctatctgattactctgagcgccatcaccagcgactatgtcgtagtgggtaaagctccctcttcggagggagcgtcagag

SEQ ID NO: 2586 - DNA, 89 bp, synthetic construct
  misc_feature 1..89: note = engineered ribonucleic acid scaffold (ERS) sequence
  source 1..89: mol_type = other DNA
gctggcgcttctatctgattactctgagcgccatcaccagcgactatgtcgtagtgggtaaagctccctcttcggagggagcatcaaag

SEQ ID NO: 2587 - DNA, 89 bp, synthetic construct
  misc_feature 1..89: note = engineered ribonucleic acid scaffold (ERS) sequence
  source 1..89: mol_type = other DNA
tatggcgcttctatctgattactctcagcgccatcaccagcgactatgtcgtagtgggtaaagctccctcttcggagggagcatcagac

SEQ ID NO: 2588 - DNA, 89 bp, synthetic construct
  misc_feature 1..89: note = engineered ribonucleic acid scaffold (ERS) sequence
  source 1..89: mol_type = other DNA
tatggcgcttctatctgattactttgagcgccatcaccagcgactatgtcgtagtgggtaaagctccctcttcggagggagcatcagag

SEQ ID NO: 2589 - DNA, 89 bp, synthetic construct
  misc_feature 1..89: note = engineered ribonucleic acid scaffold (ERS) sequence
  source 1..89: mol_type = other DNA
tatggcgcttctatctgattactttgagcgccatcaccagcgactatgtcgtagtgggtaaagctccctcttcggagggagcatcaaag

SEQ ID NO: 2590 - DNA, 89 bp, synthetic construct
  misc_feature 1..89: note = engineered ribonucleic acid scaffold (ERS) sequence
  source 1..89: mol_type = other DNA
tatggcgcttctatctgattagtctcagcgccatcaccagcgactatgtcgtagtgggtaaagctccctcttcggagggagcatgagac

SEQ ID NO: 2591 - DNA, 89 bp, synthetic construct
  misc_feature 1..89: note = engineered ribonucleic acid scaffold (ERS) sequence
  source 1..89: mol_type = other DNA
tatggcgcttctatctgattagtctgagcgccatcaccagcgactatgtcgtagtgggtaaagctccctcttcggagggagcatcagac

SEQ ID NO: 2592 - DNA, 89 bp, synthetic construct
  misc_feature 1..89: note = engineered ribonucleic acid scaffold (ERS) sequence
  source 1..89: mol_type = other DNA
tatggcgcttctatctgattactctcagcgccatcaccagcgactatgtcgtagtgggtaaagctccctcttcggagggagcatgagag

SEQ ID NO: 2593 - DNA, 89 bp, synthetic construct
  misc_feature 1..89: note = engineered ribonucleic acid scaffold (ERS) sequence
  source 1..89: mol_type = other DNA
tatggcgctcccatctgattaccccgagcgccatcaccagcgactatgtcgtagtgggtaaagctccctcttcggagggagcatcgggg

SEQ ID NO: 2594 - DNA, 89 bp, synthetic construct
  misc_feature 1..89: note = engineered ribonucleic acid scaffold (ERS) sequence
  source 1..89: mol_type = other DNA
tatggcgctcctatctgattactccgagcgccatcaccagcgactatgtcgtagtgggtaaagctccctcttcggagggagcatcggag

SEQ ID NO: 2595 - DNA, 89 bp, synthetic construct
  misc_feature 1..89: note = engineered ribonucleic acid scaffold (ERS) sequence
  source 1..89: mol_type = other DNA
tatggcgctgggatctgattaccccgagcgccatcaccagcgactatgtcgtagtgggtaaagctccctcttcggagggagcatcgggg

SEQ ID NO: 2596 - DNA, 89 bp, synthetic construct
  misc_feature 1..89: note = engineered ribonucleic acid scaffold (ERS) sequence
  source 1..89: mol_type = other DNA
tatggcgctggtatctgattactccgagcgccatcaccagcgactatgtcgtagtgggtaaagctccctcttcggagggagcatcggag

SEQ ID NO: 2597 - DNA, 89 bp, synthetic construct
  misc_feature 1..89: note = engineered ribonucleic acid scaffold (ERS) sequence
  source 1..89: mol_type = other DNA
tatggcgcttccatctgattaccctgagcgccatcaccagcgactatgtcgtagtgggtaaagctccctcttcggagggagcatcaggg

SEQ ID NO: 2598 - DNA, 89 bp, synthetic construct
  misc_feature 1..89: note = engineered ribonucleic acid scaffold (ERS) sequence
  source 1..89: mol_type = other DNA
tatggcgcttggatctgattaccctgagcgccatcaccagcgactatgtcgtagtgggtaaagctccctcttcggagggagcatcaggg

SEQ ID NO: 2599 - DNA, 89 bp, synthetic construct
  misc_feature 1..89: note = engineered ribonucleic acid scaffold (ERS) sequence
  source 1..89: mol_type = other DNA
tatggcgcttgtatctgattactctgagcgccatcaccagcgactatgtcgtagtgggtaaagctccctcttcggagggagcatcagag

SEQ ID NO: 2600 - DNA, 89 bp, synthetic construct
  misc_feature 1..89: note = engineered ribonucleic acid scaffold (ERS) sequence
  source 1..89: mol_type = other DNA
tatggcgcttttatctgattactttgagcgccatcaccagcgactatgtcgtagtgggtaaagctccctcttcggagggagcatcagag

SEQ ID NO: 2601 - DNA, 89 bp, synthetic construct
  misc_feature 1..89: note = engineered ribonucleic acid scaffold (ERS) sequence
  source 1..89: mol_type = other DNA
tatggcgcttttatctgattactctgagcgccatcaccagcgactatgtcgtagtgggtaaagctccctcttcggagggagcatcagag

SEQ ID NO: 2602 - DNA, 89 bp, synthetic construct
  misc_feature 1..89: note = engineered ribonucleic acid scaffold (ERS) sequence
  source 1..89: mol_type = other DNA
tatggcgcttttatctgattactctgagcgccatcaccagcgactatgtcgtagtgggtaaagctccctcttcggagggagcatcaaag

SEQ ID NO: 2603 - DNA, 89 bp, synthetic construct
  misc_feature 1..89: note = engineered ribonucleic acid scaffold (ERS) sequence
  source 1..89: mol_type = other DNA
tatggcgcttctatctgattactctgagcgccatcaccagcgactatgtcgtagtgggtaaagctccctcttcggagggagcctcagag

SEQ ID NO: 2604 - DNA, 89 bp, synthetic construct
  misc_feature 1..89: note = engineered ribonucleic acid scaffold (ERS) sequence
  source 1..89: mol_type = other DNA
tatggcgcttctatctgattactctgagcgccatcaccagcgactatgtcgtagtgggtaaagctccctcttcggagggagcgtcagag

SEQ ID NO: 2605 - DNA, 89 bp, synthetic construct
  misc_feature 1..89: note = engineered ribonucleic acid scaffold (ERS) sequence
  source 1..89: mol_type = other DNA
tatggcgcttctatctgattactctgagcgccatcaccagcgactatgtcgtagtgggtaaagctccctcttcggagggagcatcaaag

SEQ ID NO: 2606 - DNA, 89 bp, synthetic construct
  misc_feature 1..89: note = engineered ribonucleic acid scaffold (ERS) sequence
  source 1..89: mol_type = other DNA
tctggcgcttctatctgattactctcagcgccatcaccagcgactatgtcgtagtgggtaaagctccctcttcggagggagcatcagac

SEQ ID NO: 2607 - DNA, 89 bp, synthetic construct
  misc_feature 1..89: note = engineered ribonucleic acid scaffold (ERS) sequence
  source 1..89: mol_type = other DNA
tctggcgcttctatctgattactttgagcgccatcaccagcgactatgtcgtagtgggtaaagctccctcttcggagggagcatcagag

SEQ ID NO: 2608 - DNA, 89 bp, synthetic construct
  misc_feature 1..89: note = engineered ribonucleic acid scaffold (ERS) sequence
  source 1..89: mol_type = other DNA
tctggcgcttctatctgattactttgagcgccatcaccagcgactatgtcgtagtgggtaaagctccctcttcggagggagcatcaaag

SEQ ID NO: 2609 - DNA, 89 bp, synthetic construct
  misc_feature 1..89: note = engineered ribonucleic acid scaffold (ERS) sequence
  source 1..89: mol_type = other DNA
tctggcgcttctatctgattagtctcagcgccatcaccagcgactatgtcgtagtgggtaaagctccctcttcggagggagcatgagac

SEQ ID NO: 2610 - DNA, 89 bp, synthetic construct
  misc_feature 1..89: note = engineered ribonucleic acid scaffold (ERS) sequence
  source 1..89: mol_type = other DNA
tctggcgcttctatctgattagtctgagcgccatcaccagcgactatgtcgtagtgggtaaagctccctcttcggagggagcatcagac

SEQ ID NO: 2611 - DNA, 89 bp, synthetic construct
  misc_feature 1..89: note = engineered ribonucleic acid scaffold (ERS) sequence
  source 1..89: mol_type = other DNA
tctggcgcttctatctgattactctcagcgccatcaccagcgactatgtcgtagtgggtaaagctccctcttcggagggagcatgagag

SEQ ID NO: 2612 - DNA, 89 bp, synthetic construct
  misc_feature 1..89: note = engineered ribonucleic acid scaffold (ERS) sequence
  source 1..89: mol_type = other DNA
tctggcgctcccatctgattaccccgagcgccatcaccagcgactatgtcgtagtgggtaaagctccctcttcggagggagcatcgggg

SEQ ID NO: 2613 - DNA, 89 bp, synthetic construct
  misc_feature 1..89: note = engineered ribonucleic acid scaffold (ERS) sequence
  source 1..89: mol_type = other DNA
tctggcgctcctatctgattactccgagcgccatcaccagcgactatgtcgtagtgggtaaagctccctcttcggagggagcatcggag

SEQ ID NO: 2614 - DNA, 89 bp, synthetic construct
  misc_feature 1..89: note = engineered ribonucleic acid scaffold (ERS) sequence
  source 1..89: mol_type = other DNA
tctggcgctgggatctgattaccccgagcgccatcaccagcgactatgtcgtagtgggtaaagctccctcttcggagggagcatcgggg

SEQ ID NO: 2615 - DNA, 89 bp, synthetic construct
  misc_feature 1..89: note = engineered ribonucleic acid scaffold (ERS) sequence
  source 1..89: mol_type = other DNA
tctggcgctggtatctgattactccgagcgccatcaccagcgactatgtcgtagtgggtaaagctccctcttcggagggagcatcggag

SEQ ID NO: 2616 - DNA, 89 bp, synthetic construct
  misc_feature 1..89: note = engineered ribonucleic acid scaffold (ERS) sequence
  source 1..89: mol_type = other DNA
tctggcgcttccatctgattaccctgagcgccatcaccagcgactatgtcgtagtgggtaaagctccctcttcggagggagcatcaggg

SEQ ID NO: 2617 - DNA, 89 bp, synthetic construct
  misc_feature 1..89: note = engineered ribonucleic acid scaffold (ERS) sequence
  source 1..89: mol_type = other DNA
tctggcgcttggatctgattaccctgagcgccatcaccagcgactatgtcgtagtgggtaaagctccctcttcggagggagcatcaggg

SEQ ID NO: 2618 - DNA, 89 bp, synthetic construct
  misc_feature 1..89: note = engineered ribonucleic acid scaffold (ERS) sequence
  source 1..89: mol_type = other DNA
tctggcgcttgtatctgattactctgagcgccatcaccagcgactatgtcgtagtgggtaaagctccctcttcggagggagcatcagag

SEQ ID NO: 2619 - DNA, 89 bp, synthetic construct
  misc_feature 1..89: note = engineered ribonucleic acid scaffold (ERS) sequence
  source 1..89: mol_type = other DNA
tctggcgcttttatctgattactttgagcgccatcaccagcgactatgtcgtagtgggtaaagctccctcttcggagggagcatcagag

SEQ ID NO: 2620 - DNA, 89 bp, synthetic construct
  misc_feature 1..89: note = engineered ribonucleic acid scaffold (ERS) sequence
  source 1..89: mol_type = other DNA
tctggcgcttttatctgattactctgagcgccatcaccagcgactatgtcgtagtgggtaaagctccctcttcggagggagcatcagag

SEQ ID NO: 2621 - DNA, 89 bp, synthetic construct
  misc_feature 1..89: note = engineered ribonucleic acid scaffold (ERS) sequence
  source 1..89: mol_type = other DNA
tctggcgcttttatctgattactctgagcgccatcaccagcgactatgtcgtagtgggtaaagctccctcttcggagggagcatcaaag

SEQ ID NO: 2622 - DNA, 89 bp, synthetic construct
  misc_feature 1..89: note = engineered ribonucleic acid scaffold (ERS) sequence
  source 1..89: mol_type = other DNA
tctggcgcttctatctgattactctgagcgccatcaccagcgactatgtcgtagtgggtaaagctccctcttcggagggagcctcagag

SEQ ID NO: 2623 - DNA, 89 bp, synthetic construct
  misc_feature 1..89: note = engineered ribonucleic acid scaffold (ERS) sequence
  source 1..89: mol_type = other DNA
tctggcgcttctatctgattactctgagcgccatcaccagcgactatgtcgtagtgggtaaagctccctcttcggagggagcgtcagag

SEQ ID NO: 2624 - DNA, 89 bp, synthetic construct
  misc_feature 1..89: note = engineered ribonucleic acid scaffold (ERS) sequence
  source 1..89: mol_type = other DNA
tctggcgcttctatctgattactctgagcgccatcaccagcgactatgtcgtagtgggtaaagctccctcttcggagggagcatcaaag

SEQ ID NO: 2625 - DNA, 90 bp, synthetic construct
  misc_feature 1..90: note = engineered ribonucleic acid scaffold (ERS) sequence
  source 1..90: mol_type = other DNA
atctggcgcttctatctgattactctcagcgccatcaccagcgactatgtcgtagtgggtaaagctccctcttcggagggagcatcagac

SEQ ID NO: 2626 - DNA, 90 bp, synthetic construct
  misc_feature 1..90: note = engineered ribonucleic acid scaffold (ERS) sequence
  source 1..90: mol_type = other DNA
atctggcgcttctatctgattactttgagcgccatcaccagcgactatgtcgtagtgggtaaagctccctcttcggagggagcatcagag

SEQ ID NO: 2627 - DNA, 90 bp, synthetic construct
  misc_feature 1..90: note = engineered ribonucleic acid scaffold (ERS) sequence
  source 1..90: mol_type = other DNA
atctggcgcttctatctgattactttgagcgccatcaccagcgactatgtcgtagtgggtaaagctccctcttcggagggagcatcaaag

SEQ ID NO: 2628 - DNA, 90 bp, synthetic construct
  misc_feature 1..90: note = engineered ribonucleic acid scaffold (ERS) sequence
  source 1..90: mol_type = other DNA
atctggcgcttctatctgattagtctcagcgccatcaccagcgactatgtcgtagtgggtaaagctccctcttcggagggagcatgagac

SEQ ID NO: 2629 - DNA, 90 bp, synthetic construct
  misc_feature 1..90: note = engineered ribonucleic acid scaffold (ERS) sequence
  source 1..90: mol_type = other DNA
atctggcgcttctatctgattagtctgagcgccatcaccagcgactatgtcgtagtgggtaaagctccctcttcggagggagcatcagac

SEQ ID NO: 2630 - DNA, 90 bp, synthetic construct
  misc_feature 1..90: note = engineered ribonucleic acid scaffold (ERS) sequence
  source 1..90: mol_type = other DNA
atctggcgcttctatctgattactctcagcgccatcaccagcgactatgtcgtagtgggtaaagctccctcttcggagggagcatgagag

SEQ ID NO: 2631 - DNA, 90 bp, synthetic construct
  misc_feature 1..90: note = engineered ribonucleic acid scaffold (ERS) sequence
  source 1..90: mol_type = other DNA
atctggcgctcccatctgattaccccgagcgccatcaccagcgactatgtcgtagtgggtaaagctccctcttcggagggagcatcgggg

SEQ ID NO: 2632 - DNA, 90 bp, synthetic construct
  misc_feature 1..90: note = engineered ribonucleic acid scaffold (ERS) sequence
  source 1..90: mol_type = other DNA
atctggcgctcctatctgattactccgagcgccatcaccagcgactatgtcgtagtgggtaaagctccctcttcggagggagcatcggag

SEQ ID NO: 2633 - DNA, 90 bp, synthetic construct
  misc_feature 1..90: note = engineered ribonucleic acid scaffold (ERS) sequence
  source 1..90: mol_type = other DNA
atctggcgctgggatctgattaccccgagcgccatcaccagcgactatgtcgtagtgggtaaagctccctcttcggagggagcatcgggg

SEQ ID NO: 2634 - DNA, 90 bp, synthetic construct
  misc_feature 1..90: note = engineered ribonucleic acid scaffold (ERS) sequence
  source 1..90: mol_type = other DNA
atctggcgctggtatctgattactccgagcgccatcaccagcgactatgtcgtagtgggtaaagctccctcttcggagggagcatcggag

SEQ ID NO: 2635 - DNA, 90 bp, synthetic construct
  misc_feature 1..90: note = engineered ribonucleic acid scaffold (ERS) sequence
  source 1..90: mol_type = other DNA
atctggcgcttccatctgattaccctgagcgccatcaccagcgactatgtcgtagtgggtaaagctccctcttcggagggagcatcaggg

SEQ ID NO: 2636 - DNA, 90 bp, synthetic construct
  misc_feature 1..90: note = engineered ribonucleic acid scaffold (ERS) sequence
  source 1..90: mol_type = other DNA
atctggcgcttggatctgattaccctgagcgccatcaccagcgactatgtcgtagtgggtaaagctccctcttcggagggagcatcaggg

SEQ ID NO: 2637 - DNA, 90 bp, synthetic construct
  misc_feature 1..90: note = engineered ribonucleic acid scaffold (ERS) sequence
  source 1..90: mol_type = other DNA
atctggcgcttgtatctgattactctgagcgccatcaccagcgactatgtcgtagtgggtaaagctccctcttcggagggagcatcagag

SEQ ID NO: 2638 - DNA, 90 bp, synthetic construct
  misc_feature 1..90: note = engineered ribonucleic acid scaffold (ERS) sequence
  source 1..90: mol_type = other DNA
atctggcgcttttatctgattactttgagcgccatcaccagcgactatgtcgtagtgggtaaagctccctcttcggagggagcatcagag

SEQ ID NO: 2639 - DNA, 90 bp, synthetic construct
  misc_feature 1..90: note = engineered ribonucleic acid scaffold (ERS) sequence
  source 1..90: mol_type = other DNA
atctggcgcttttatctgattactctgagcgccatcaccagcgactatgtcgtagtgggtaaagctccctcttcggagggagcatcagag

SEQ ID NO: 2640 - DNA, 90 bp, synthetic construct
  misc_feature 1..90: note = engineered ribonucleic acid scaffold (ERS) sequence
  source 1..90: mol_type = other DNA
atctggcgcttttatctgattactctgagcgccatcaccagcgactatgtcgtagtgggtaaagctccctcttcggagggagcatcaaag

SEQ ID NO: 2641 - DNA, 90 bp, synthetic construct
  misc_feature 1..90: note = engineered ribonucleic acid scaffold (ERS) sequence
  source 1..90: mol_type = other DNA
atctggcgcttctatctgattactctgagcgccatcaccagcgactatgtcgtagtgggtaaagctccctcttcggagggagcctcagag

SEQ ID NO: 2642 - DNA, 90 bp, synthetic construct
  misc_feature 1..90: note = engineered ribonucleic acid scaffold (ERS) sequence
  source 1..90: mol_type = other DNA
atctggcgcttctatctgattactctgagcgccatcaccagcgactatgtcgtagtgggtaaagctccctcttcggagggagcgtcagag

SEQ ID NO: 2643 - DNA, 90 bp, synthetic construct
  misc_feature 1..90: note = engineered ribonucleic acid scaffold (ERS) sequence
  source 1..90: mol_type = other DNA
atctggcgcttctatctgattactctgagcgccatcaccagcgactatgtcgtagtgggtaaagctccctcttcggagggagcatcaaag

SEQ ID NO: 2644 - DNA, 87 bp, synthetic construct
  misc_feature 1..87: note = engineered ribonucleic acid scaffold (ERS) sequence
  source 1..87: mol_type = other DNA
aggcgcttctatctgattactctcagcgccatcaccagcgactatgtcgtagtgggtaaagctccctcttcggagggagcatcagac

SEQ ID NO: 2645 - DNA, 87 bp, synthetic construct
  misc_feature 1..87: note = engineered ribonucleic acid scaffold (ERS) sequence
  source 1..87: mol_type = other DNA
aggcgcttctatctgattactttgagcgccatcaccagcgactatgtcgtagtgggtaaagctccctcttcggagggagcatcagag

SEQ ID NO: 2646 - DNA, 87 bp, synthetic construct
  misc_feature 1..87: note = engineered ribonucleic acid scaffold (ERS) sequence
  source 1..87: mol_type = other DNA
aggcgcttctatctgattactttgagcgccatcaccagcgactatgtcgtagtgggtaaagctccctcttcggagggagcatcaaag

SEQ ID NO: 2647 - DNA, 87 bp, synthetic construct
  misc_feature 1..87: note = engineered ribonucleic acid scaffold (ERS) sequence
  source 1..87: mol_type = other DNA
aggcgcttctatctgattagtctcagcgccatcaccagcgactatgtcgtagtgggtaaagctccctcttcggagggagcatgagac

SEQ ID NO: 2648 - DNA, 87 bp, synthetic construct
  misc_feature 1..87: note = engineered ribonucleic acid scaffold (ERS) sequence
  source 1..87: mol_type = other DNA
aggcgcttctatctgattagtctgagcgccatcaccagcgactatgtcgtagtgggtaaagctccctcttcggagggagcatcagac

SEQ ID NO: 2649 - DNA, 87 bp, synthetic construct
  misc_feature 1..87: note = engineered ribonucleic acid scaffold (ERS) sequence
  source 1..87: mol_type = other DNA
aggcgcttctatctgattactctcagcgccatcaccagcgactatgtcgtagtgggtaaagctccctcttcggagggagcatgagag

SEQ ID NO: 2650 - DNA, 87 bp, synthetic construct
  misc_feature 1..87: note = engineered ribonucleic acid scaffold (ERS) sequence
  source 1..87: mol_type = other DNA
aggcgctcccatctgattaccccgagcgccatcaccagcgactatgtcgtagtgggtaaagctccctcttcggagggagcatcgggg

SEQ ID NO: 2651 - DNA, 87 bp, synthetic construct
  misc_feature 1..87: note = engineered ribonucleic acid scaffold (ERS) sequence
  source 1..87: mol_type = other DNA
aggcgctcctatctgattactccgagcgccatcaccagcgactatgtcgtagtgggtaaagctccctcttcggagggagcatcggag

SEQ ID NO: 2652 - DNA, 87 bp, synthetic construct
  misc_feature 1..87: note = engineered ribonucleic acid scaffold (ERS) sequence
  source 1..87: mol_type = other DNA
aggcgctgggatctgattaccccgagcgccatcaccagcgactatgtcgtagtgggtaaagctccctcttcggagggagcatcgggg

SEQ ID NO: 2653 - DNA, 87 bp, synthetic construct
  misc_feature 1..87: note = engineered ribonucleic acid scaffold (ERS) sequence
  source 1..87: mol_type = other DNA
aggcgctggtatctgattactccgagcgccatcaccagcgactatgtcgtagtgggtaaagctccctcttcggagggagcatcggag

SEQ ID NO: 2654 - DNA, 87 bp, synthetic construct
  misc_feature 1..87: note = engineered ribonucleic acid scaffold (ERS) sequence
  source 1..87: mol_type = other DNA
aggcgcttccatctgattaccctgagcgccatcaccagcgactatgtcgtagtgggtaaagctccctcttcggagggagcatcaggg

SEQ ID NO: 2655 - DNA, 87 bp, synthetic construct
  misc_feature 1..87: note = engineered ribonucleic acid scaffold (ERS) sequence
  source 1..87: mol_type = other DNA
aggcgcttggatctgattaccctgagcgccatcaccagcgactatgtcgtagtgggtaaagctccctcttcggagggagcatcaggg

SEQ ID NO: 2656 - DNA, 87 bp, synthetic construct
  misc_feature 1..87: note = engineered ribonucleic acid scaffold (ERS) sequence
  source 1..87: mol_type = other DNA
aggcgcttgtatctgattactctgagcgccatcaccagcgactatgtcgtagtgggtaaagctccctcttcggagggagcatcagag

SEQ ID NO: 2657 - DNA, 87 bp, synthetic construct
  misc_feature 1..87: note = engineered ribonucleic acid scaffold (ERS) sequence
  source 1..87: mol_type = other DNA
aggcgcttttatctgattactttgagcgccatcaccagcgactatgtcgtagtgggtaaagctccctcttcggagggagcatcagag

SEQ ID NO: 2658 - DNA, 87 bp, synthetic construct
  misc_feature 1..87: note = engineered ribonucleic acid scaffold (ERS) sequence
  source 1..87: mol_type = other DNA
aggcgcttttatctgattactctgagcgccatcaccagcgactatgtcgtagtgggtaaagctccctcttcggagggagcatcagag

SEQ ID NO: 2659 - DNA, 87 bp, synthetic construct
  misc_feature 1..87: note = engineered ribonucleic acid scaffold (ERS) sequence
  source 1..87: mol_type = other DNA
aggcgcttttatctgattactctgagcgccatcaccagcgactatgtcgtagtgggtaaagctccctcttcggagggagcatcaaag

SEQ ID NO: 2660 - DNA, 87 bp, synthetic construct
  misc_feature 1..87: note = engineered ribonucleic acid scaffold (ERS) sequence
  source 1..87: mol_type = other DNA
aggcgcttctatctgattactctgagcgccatcaccagcgactatgtcgtagtgggtaaagctccctcttcggagggagcctcagag

SEQ ID NO: 2661 - DNA, 87 bp, synthetic construct
  misc_feature 1..87: note = engineered ribonucleic acid scaffold (ERS) sequence
  source 1..87: mol_type = other DNA
aggcgcttctatctgattactctgagcgccatcaccagcgactatgtcgtagtgggtaaagctccctcttcggagggagcgtcagag

SEQ ID NO: 2662 - DNA, 87 bp, synthetic construct
  misc_feature 1..87: note = engineered ribonucleic acid scaffold (ERS) sequence
  source 1..87: mol_type = other DNA
aggcgcttctatctgattactctgagcgccatcaccagcgactatgtcgtagtgggtaaagctccctcttcggagggagcatcaaag

SEQ ID NO: 2663 - DNA, 88 bp, synthetic construct
  misc_feature 1..88: note = engineered ribonucleic acid scaffold (ERS) sequence
  source 1..88: mol_type = other DNA
atggcgcttctatctgattactctcagcgccatcaccagcgactatgtcgtagtgggtaaagctccctcttcggagggagcatcagac

SEQ ID NO: 2664 - DNA, 88 bp, synthetic construct
  misc_feature 1..88: note = engineered ribonucleic acid scaffold (ERS) sequence
  source 1..88: mol_type = other DNA
atggcgcttctatctgattactttgagcgccatcaccagcgactatgtcgtagtgggtaaagctccctcttcggagggagcatcagag

SEQ ID NO: 2665 - DNA, 88 bp, synthetic construct
  misc_feature 1..88: note = engineered ribonucleic acid scaffold (ERS) sequence
  source 1..88: mol_type = other DNA
atggcgcttctatctgattactttgagcgccatcaccagcgactatgtcgtagtgggtaaagctccctcttcggagggagcatcaaag

SEQ ID NO: 2666 - DNA, 88 bp, synthetic construct
  misc_feature 1..88: note = engineered ribonucleic acid scaffold (ERS) sequence
  source 1..88: mol_type = other DNA
atggcgcttctatctgattagtctcagcgccatcaccagcgactatgtcgtagtgggtaaagctccctcttcggagggagcatgagac

SEQ ID NO: 2667 - DNA, 88 bp, synthetic construct
  misc_feature 1..88: note = engineered ribonucleic acid scaffold (ERS) sequence
  source 1..88: mol_type = other DNA
atggcgcttctatctgattagtctgagcgccatcaccagcgactatgtcgtagtgggtaaagctccctcttcggagggagcatcagac

SEQ ID NO: 2668 - DNA, 88 bp, synthetic construct
  misc_feature 1..88: note = engineered ribonucleic acid scaffold (ERS) sequence
  source 1..88: mol_type = other DNA
atggcgcttctatctgattactctcagcgccatcaccagcgactatgtcgtagtgggtaaagctccctcttcggagggagcatgagag

SEQ ID NO: 2669 - DNA, 88 bp, synthetic construct
  misc_feature 1..88: note = engineered ribonucleic acid scaffold (ERS) sequence
  source 1..88: mol_type = other DNA
atggtgcttctatctgattactctcagcgccatcaccagcgactatgtcgtagtgggtaaagctccctcttcggagggagcatcagac

SEQ ID NO: 2670 - DNA, 88 bp, synthetic construct
  misc_feature 1..88: note = engineered ribonucleic acid scaffold (ERS) sequence
  source 1..88: mol_type = other DNA
atggtgcttctatctgattactttgagcgccatcaccagcgactatgtcgtagtgggtaaagctccctcttcggagggagcatcagag

SEQ ID NO: 2671 - DNA, 88 bp, synthetic construct
  misc_feature 1..88: note = engineered ribonucleic acid scaffold (ERS) sequence
  source 1..88: mol_type = other DNA
atggtgcttctatctgattactttgagcgccatcaccagcgactatgtcgtagtgggtaaagctccctcttcggagggagcatcaaag

SEQ ID NO: 2672 - DNA, 88 bp, synthetic construct
  misc_feature 1..88: note = engineered ribonucleic acid scaffold (ERS) sequence
  source 1..88: mol_type = other DNA
atggtgcttctatctgattagtctcagcgccatcaccagcgactatgtcgtagtgggtaaagctccctcttcggagggagcatgagac

SEQ ID NO: 2673 - DNA, 88 bp, synthetic construct
  misc_feature 1..88: note = engineered ribonucleic acid scaffold (ERS) sequence
  source 1..88: mol_type = other DNA
atggtgcttctatctgattagtctgagcgccatcaccagcgactatgtcgtagtgggtaaagctccctcttcggagggagcatcagac

SEQ ID NO: 2674 - DNA, 88 bp, synthetic construct
  misc_feature 1..88: note = engineered ribonucleic acid scaffold (ERS) sequence
  source 1..88: mol_type = other DNA
atggtgcttctatctgattactctcagcgccatcaccagcgactatgtcgtagtgggtaaagctccctcttcggagggagcatgagag

SEQ ID NO: 2675 - DNA, 88 bp, synthetic construct
  misc_feature 1..88: note = engineered ribonucleic acid scaffold (ERS) sequence
  source 1..88: mol_type = other DNA
atggtgctcccatctgattaccccgagcgccatcaccagcgactatgtcgtagtgggtaaagctccctcttcggagggagcatcgggg

SEQ ID NO: 2676 - DNA, 88 bp, synthetic construct
  misc_feature 1..88: note = engineered ribonucleic acid scaffold (ERS) sequence
  source 1..88: mol_type = other DNA
atggtgctcctatctgattactccgagcgccatcaccagcgactatgtcgtagtgggtaaagctccctcttcggagggagcatcggag

SEQ ID NO: 2677 - DNA, 88 bp, synthetic construct
  misc_feature 1..88: note = engineered ribonucleic acid scaffold (ERS) sequence
  source 1..88: mol_type = other DNA
atggtgctgggatctgattaccccgagcgccatcaccagcgactatgtcgtagtgggtaaagctccctcttcggagggagcatcgggg

SEQ ID NO: 2678 - DNA, 88 bp, synthetic construct
  misc_feature 1..88: note = engineered ribonucleic acid scaffold (ERS) sequence
  source 1..88: mol_type = other DNA
atggtgctggtatctgattactccgagcgccatcaccagcgactatgtcgtagtgggtaaagctccctcttcggagggagcatcggag

SEQ ID NO: 2679 - DNA, 88 bp, synthetic construct
  misc_feature 1..88: note = engineered ribonucleic acid scaffold (ERS) sequence
  source 1..88: mol_type = other DNA
atggtgcttccatctgattaccctgagcgccatcaccagcgactatgtcgtagtgggtaaagctccctcttcggagggagcatcaggg

SEQ ID NO: 2680 - DNA, 88 bp, synthetic construct
  misc_feature 1..88: note = engineered ribonucleic acid scaffold (ERS) sequence
  source 1..88: mol_type = other DNA
atggtgcttggatctgattaccctgagcgccatcaccagcgactatgtcgtagtgggtaaagctccctcttcggagggagcatcaggg

SEQ ID NO: 2681 - DNA, 88 bp, synthetic construct
  misc_feature 1..88: note = engineered ribonucleic acid scaffold (ERS) sequence
  source 1..88: mol_type = other DNA
atggtgcttgtatctgattactctgagcgccatcaccagcgactatgtcgtagtgggtaaagctccctcttcggagggagcatcagag

SEQ ID NO: 2682 - DNA, 88 bp, synthetic construct
  misc_feature 1..88: note = engineered ribonucleic acid scaffold (ERS) sequence
  source 1..88: mol_type = other DNA
atggtgcttttatctgattactttgagcgccatcaccagcgactatgtcgtagtgggtaaagctccctcttcggagggagcatcagag

SEQ ID NO: 2683 - DNA, 88 bp, synthetic construct
  misc_feature 1..88: note = engineered ribonucleic acid scaffold (ERS) sequence
  source 1..88: mol_type = other DNA
atggtgcttttatctgattactctgagcgccatcaccagcgactatgtcgtagtgggtaaagctccctcttcggagggagcatcagag

SEQ ID NO: 2684 - DNA, 88 bp, synthetic construct
  misc_feature 1..88: note = engineered ribonucleic acid scaffold (ERS) sequence
  source 1..88: mol_type = other DNA
atggtgcttttatctgattactctgagcgccatcaccagcgactatgtcgtagtgggtaaagctccctcttcggagggagcatcaaag

SEQ ID NO: 2685 - DNA, 88 bp, synthetic construct
  misc_feature 1..88: note = engineered ribonucleic acid scaffold (ERS) sequence
  source 1..88: mol_type = other DNA
atggtgcttctatctgattactctgagcgccatcaccagcgactatgtcgtagtgggtaaagctccctcttcggagggagcctcagag

SEQ ID NO: 2686 - DNA, 88 bp, synthetic construct
  misc_feature 1..88: note = engineered ribonucleic acid scaffold (ERS) sequence
  source 1..88: mol_type = other DNA
atggtgcttctatctgattactctgagcgccatcaccagcgactatgtcgtagtgggtaaagctccctcttcggagggagcgtcagag

SEQ ID NO: 2687 - DNA, 88 bp, synthetic construct
  misc_feature 1..88: note = engineered ribonucleic acid scaffold (ERS) sequence
  source 1..88: mol_type = other DNA
atggtgcttctatctgattactctgagcgccatcaccagcgactatgtcgtagtgggtaaagctccctcttcggagggagcatcaaag

SEQ ID NO: 2688 - DNA, 88 bp, synthetic construct
  misc_feature 1..88: note = engineered ribonucleic acid scaffold (ERS) sequence
  source 1..88: mol_type = other DNA
atggcgctcccatctgattaccccgagcgccatcaccagcgactatgtcgtagtgggtaaagctccctcttcggagggagcatcgggg

SEQ ID NO: 2689 - DNA, 88 bp, synthetic construct
  misc_feature 1..88: note = engineered ribonucleic acid scaffold (ERS) sequence
  source 1..88: mol_type = other DNA
atggcgctcctatctgattactccgagcgccatcaccagcgactatgtcgtagtgggtaaagctccctcttcggagggagcatcggag

SEQ ID NO: 2690 - DNA, 88 bp, synthetic construct
  misc_feature 1..88: note = engineered ribonucleic acid scaffold (ERS) sequence
  source 1..88: mol_type = other DNA
atggcgctgggatctgattaccccgagcgccatcaccagcgactatgtcgtagtgggtaaagctccctcttcggagggagcatcgggg

SEQ ID NO: 2691 - DNA, 88 bp, synthetic construct
  misc_feature 1..88: note = engineered ribonucleic acid scaffold (ERS) sequence
  source 1..88: mol_type = other DNA
atggcgctggtatctgattactccgagcgccatcaccagcgactatgtcgtagtgggtaaagctccctcttcggagggagcatcggag

SEQ ID NO: 2692 - DNA, 88 bp, synthetic construct
  misc_feature 1..88: note = engineered ribonucleic acid scaffold (ERS) sequence
  source 1..88: mol_type = other DNA
atggcgcttccatctgattaccctgagcgccatcaccagcgactatgtcgtagtgggtaaagctccctcttcggagggagcatcaggg

SEQ ID NO: 2693 - DNA, 88 bp, synthetic construct
  misc_feature 1..88: note = engineered ribonucleic acid scaffold (ERS) sequence
  source 1..88: mol_type = other DNA
atggcgcttggatctgattaccctgagcgccatcaccagcgactatgtcgtagtgggtaaagctccctcttcggagggagcatcaggg

SEQ ID NO: 2694 - DNA, 88 bp, synthetic construct
  misc_feature 1..88: note = engineered ribonucleic acid scaffold (ERS) sequence
  source 1..88: mol_type = other DNA
atggcgcttgtatctgattactctgagcgccatcaccagcgactatgtcgtagtgggtaaagctccctcttcggagggagcatcagag

SEQ ID NO: 2695 - DNA, 88 bp, synthetic construct
  misc_feature 1..88: note = engineered ribonucleic acid scaffold (ERS) sequence
  source 1..88: mol_type = other DNA
atggcgcttttatctgattactttgagcgccatcaccagcgactatgtcgtagtgggtaaagctccctcttcggagggagcatcagag

SEQ ID NO: 2696 - DNA, 88 bp, synthetic construct
  misc_feature 1..88: note = engineered ribonucleic acid scaffold (ERS) sequence
  source 1..88: mol_type = other DNA
atggcgcttttatctgattactctgagcgccatcaccagcgactatgtcgtagtgggtaaagctccctcttcggagggagcatcagag

SEQ ID NO: 2697 - DNA, 88 bp, synthetic construct
  misc_feature 1..88: note = engineered ribonucleic acid scaffold (ERS) sequence
  source 1..88: mol_type = other DNA
atggcgcttttatctgattactctgagcgccatcaccagcgactatgtcgtagtgggtaaagctccctcttcggagggagcatcaaag

SEQ ID NO: 2698 - DNA, 88 bp, synthetic construct
  misc_feature 1..88: note = engineered ribonucleic acid scaffold (ERS) sequence
  source 1..88: mol_type = other DNA
atggcgcttctatctgattactctgagcgccatcaccagcgactatgtcgtagtgggtaaagctccctcttcggagggagcctcagag

SEQ ID NO: 2699 - DNA, 88 bp, synthetic construct
  misc_feature 1..88: note = engineered ribonucleic acid scaffold (ERS) sequence
  source 1..88: mol_type = other DNA
atggcgcttctatctgattactctgagcgccatcaccagcgactatgtcgtagtgggtaaagctccctcttcggagggagcgtcagag

SEQ ID NO: 2700 - DNA, 88 bp, synthetic construct
  misc_feature 1..88: note = engineered ribonucleic acid scaffold (ERS) sequence
  source 1..88: mol_type = other DNA
atggcgcttctatctgattactctgagcgccatcaccagcgactatgtcgtagtgggtaaagctccctcttcggagggagcatcaaag

SEQ ID NO: 2701 - DNA, 89 bp, synthetic construct
  misc_feature 1..89: note = engineered ribonucleic acid scaffold (ERS) sequence
  source 1..89: mol_type = other DNA
aatggcgcttctatctgattactctcagcgccatcaccagcgactatgtcgtagtgggtaaagctccctcttcggagggagcatcagac

SEQ ID NO: 2702 - DNA, 89 bp, synthetic construct
  misc_feature 1..89: note = engineered ribonucleic acid scaffold (ERS) sequence
  source 1..89: mol_type = other DNA
aatggcgcttctatctgattactttgagcgccatcaccagcgactatgtcgtagtgggtaaagctccctcttcggagggagcatcagag

SEQ ID NO: 2703 - DNA, 89 bp, synthetic construct
  misc_feature 1..89: note = engineered ribonucleic acid scaffold (ERS) sequence
  source 1..89: mol_type = other DNA
aatggcgcttctatctgattactttgagcgccatcaccagcgactatgtcgtagtgggtaaagctccctcttcggagggagcatcaaag

SEQ ID NO: 2704 - DNA, 89 bp, synthetic construct
  misc_feature 1..89: note = engineered ribonucleic acid scaffold (ERS) sequence
  source 1..89: mol_type = other DNA
aatggcgcttctatctgattagtctcagcgccatcaccagcgactatgtcgtagtgggtaaagctccctcttcggagggagcatgagac

SEQ ID NO: 2705 - DNA, 89 bp, synthetic construct
  misc_feature 1..89: note = engineered ribonucleic acid scaffold (ERS) sequence
  source 1..89: mol_type = other DNA
aatggcgcttctatctgattagtctgagcgccatcaccagcgactatgtcgtagtgggtaaagctccctcttcggagggagcatcagac

SEQ ID NO: 2706 - DNA, 89 bp, synthetic construct
  misc_feature 1..89: note = engineered ribonucleic acid scaffold (ERS) sequence
  source 1..89: mol_type = other DNA
aatggcgcttctatctgattactctcagcgccatcaccagcgactatgtcgtagtgggtaaagctccctcttcggagggagcatgagag

SEQ ID NO: 2707 - DNA, 89 bp, synthetic construct
  misc_feature 1..89: note = engineered ribonucleic acid scaffold (ERS) sequence
  source 1..89: mol_type = other DNA
aatggcgctcccatctgattaccccgagcgccatcaccagcgactatgtcgtagtgggtaaagctccctcttcggagggagcatcgggg

SEQ ID NO: 2708 - DNA, 89 bp, synthetic construct
  misc_feature 1..89: note = engineered ribonucleic acid scaffold (ERS) sequence
  source 1..89: mol_type = other DNA
aatggcgctcctatctgattactccgagcgccatcaccagcgactatgtcgtagtgggtaaagctccctcttcggagggagcatcggag

SEQ ID NO: 2709 - DNA, 89 bp, synthetic construct
  misc_feature 1..89: note = engineered ribonucleic acid scaffold (ERS) sequence
  source 1..89: mol_type = other DNA
aatggcgctgggatctgattaccccgagcgccatcaccagcgactatgtcgtagtgggtaaagctccctcttcggagggagcatcgggg

SEQ ID NO: 2710 - DNA, 89 bp, synthetic construct
  misc_feature 1..89: note = engineered ribonucleic acid scaffold (ERS) sequence
  source 1..89: mol_type = other DNA
aatggcgctggtatctgattactccgagcgccatcaccagcgactatgtcgtagtgggtaaagctccctcttcggagggagcatcggag

SEQ ID NO: 2711 - DNA, 89 bp, synthetic construct
  misc_feature 1..89: note = engineered ribonucleic acid scaffold (ERS) sequence
  source 1..89: mol_type = other DNA
aatggcgcttccatctgattaccctgagcgccatcaccagcgactatgtcgtagtgggtaaagctccctcttcggagggagcatcaggg

SEQ ID NO: 2712 - DNA, 89 bp, synthetic construct
  misc_feature 1..89: note = engineered ribonucleic acid scaffold (ERS) sequence
  source 1..89: mol_type = other DNA
aatggcgcttggatctgattaccctgagcgccatcaccagcgactatgtcgtagtgggtaaagctccctcttcggagggagcatcaggg

SEQ ID NO: 2713 - DNA, 89 bp, synthetic construct
  misc_feature 1..89: note = engineered ribonucleic acid scaffold (ERS) sequence
  source 1..89: mol_type = other DNA
aatggcgcttgtatctgattactctgagcgccatcaccagcgactatgtcgtagtgggtaaagctccctcttcggagggagcatcagag

SEQ ID NO: 2714 - DNA, 89 bp, synthetic construct
  misc_feature 1..89: note = engineered ribonucleic acid scaffold (ERS) sequence
  source 1..89: mol_type = other DNA
aatggcgcttttatctgattactttgagcgccatcaccagcgactatgtcgtagtgggtaaagctccctcttcggagggagcatcagag

SEQ ID NO: 2715 - DNA, 89 bp, synthetic construct
  misc_feature 1..89: note = engineered ribonucleic acid scaffold (ERS) sequence
  source 1..89: mol_type = other DNA
aatggcgcttttatctgattactctgagcgccatcaccagcgactatgtcgtagtgggtaaagctccctcttcggagggagcatcagag

SEQ ID NO: 2716 - DNA, 89 bp, synthetic construct
  misc_feature 1..89: note = engineered ribonucleic acid scaffold (ERS) sequence
  source 1..89: mol_type = other DNA
aatggcgcttttatctgattactctgagcgccatcaccagcgactatgtcgtagtgggtaaagctccctcttcggagggagcatcaaag

SEQ ID NO: 2717 - DNA, 89 bp, synthetic construct
  misc_feature 1..89: note = engineered ribonucleic acid scaffold (ERS) sequence
  source 1..89: mol_type = other DNA
aatggcgcttctatctgattactctgagcgccatcaccagcgactatgtcgtagtgggtaaagctccctcttcggagggagcctcagag

SEQ ID NO: 2718 - DNA, 89 bp, synthetic construct
  misc_feature 1..89: note = engineered ribonucleic acid scaffold (ERS) sequence
  source 1..89: mol_type = other DNA
aatggcgcttctatctgattactctgagcgccatcaccagcgactatgtcgtagtgggtaaagctccctcttcggagggagcgtcagag

SEQ ID NO: 2719 - DNA, 89 bp, synthetic construct
  misc_feature 1..89: note = engineered ribonucleic acid scaffold (ERS) sequence
  source 1..89: mol_type = other DNA
aatggcgcttctatctgattactctgagcgccatcaccagcgactatgtcgtagtgggtaaagctccctcttcggagggagcatcaaag

SEQ ID NO: 2720 - DNA, 89 bp, synthetic construct
  misc_feature 1..89: note = engineered ribonucleic acid scaffold (ERS) sequence
  source 1..89: mol_type = other DNA
agtggcgcttctatctgattactctcagcgccatcaccagcgactatgtcgtagtgggtaaagctccctcttcggagggagcatcagac

SEQ ID NO: 2721 - DNA, 89 bp, synthetic construct
  misc_feature 1..89: note = engineered ribonucleic acid scaffold (ERS) sequence
  source 1..89: mol_type = other DNA
agtggcgcttctatctgattactttgagcgccatcaccagcgactatgtcgtagtgggtaaagctccctcttcggagggagcatcagag

SEQ ID NO: 2722 - DNA, 89 bp, synthetic construct
  misc_feature 1..89: note = engineered ribonucleic acid scaffold (ERS) sequence
  source 1..89: mol_type = other DNA
agtggcgcttctatctgattactttgagcgccatcaccagcgactatgtcgtagtgggtaaagctccctcttcggagggagcatcaaag

SEQ ID NO: 2723 - DNA, 89 bp, synthetic construct
  misc_feature 1..89: note = engineered ribonucleic acid scaffold (ERS) sequence
  source 1..89: mol_type = other DNA
agtggcgcttctatctgattagtctcagcgccatcaccagcgactatgtcgtagtgggtaaagctccctcttcggagggagcatgagac

SEQ ID NO: 2724 - DNA, 89 bp, synthetic construct
  misc_feature 1..89: note = engineered ribonucleic acid scaffold (ERS) sequence
  source 1..89: mol_type = other DNA
agtggcgcttctatctgattagtctgagcgccatcaccagcgactatgtcgtagtgggtaaagctccctcttcggagggagcatcagac

SEQ ID NO: 2725 - DNA, 89 bp, synthetic construct
  misc_feature 1..89: note = engineered ribonucleic acid scaffold (ERS) sequence
  source 1..89: mol_type = other DNA
agtggcgcttctatctgattactctcagcgccatcaccagcgactatgtcgtagtgggtaaagctccctcttcggagggagcatgagag

SEQ ID NO: 2726 - DNA, 89 bp, synthetic construct
  misc_feature 1..89: note = engineered ribonucleic acid scaffold (ERS) sequence
  source 1..89: mol_type = other DNA
agtggcgctcccatctgattaccccgagcgccatcaccagcgactatgtcgtagtgggtaaagctccctcttcggagggagcatcgggg

SEQ ID NO: 2727 - DNA, 89 bp, synthetic construct
  misc_feature 1..89: note = engineered ribonucleic acid scaffold (ERS) sequence
  source 1..89: mol_type = other DNA
agtggcgctcctatctgattactccgagcgccatcaccagcgactatgtcgtagtgggtaaagctccctcttcggagggagcatcggag

SEQ ID NO: 2728 - DNA, 89 bp, synthetic construct
  misc_feature 1..89: note = engineered ribonucleic acid scaffold (ERS) sequence
  source 1..89: mol_type = other DNA
agtggcgctgggatctgattaccccgagcgccatcaccagcgactatgtcgtagtgggtaaagctccctcttcggagggagcatcgggg

SEQ ID NO: 2729 - DNA, 89 bp, synthetic construct
  misc_feature 1..89: note = engineered ribonucleic acid scaffold (ERS) sequence
  source 1..89: mol_type = other DNA
agtggcgctggtatctgattactccgagcgccatcaccagcgactatgtcgtagtgggtaaagctccctcttcggagggagcatcggag

SEQ ID NO: 2730 - DNA, 89 bp, synthetic construct
  misc_feature 1..89: note = engineered ribonucleic acid scaffold (ERS) sequence
  source 1..89: mol_type = other DNA
agtggcgcttccatctgattaccctgagcgccatcaccagcgactatgtcgtagtgggtaaagctccctcttcggagggagcatcaggg

SEQ ID NO: 2731 - DNA, 89 bp, synthetic construct
  misc_feature 1..89: note = engineered ribonucleic acid scaffold (ERS) sequence
  source 1..89: mol_type = other DNA
agtggcgcttggatctgattaccctgagcgccatcaccagcgactatgtcgtagtgggtaaagctccctcttcggagggagcatcaggg

SEQ ID NO: 2732 - DNA, 89 bp, synthetic construct
  misc_feature 1..89: note = engineered ribonucleic acid scaffold (ERS) sequence
  source 1..89: mol_type = other DNA
agtggcgcttgtatctgattactctgagcgccatcaccagcgactatgtcgtagtgggtaaagctccctcttcggagggagcatcagag

SEQ ID NO: 2733 - DNA, 89 bp, synthetic construct
  misc_feature 1..89: note = engineered ribonucleic acid scaffold (ERS) sequence
  source 1..89: mol_type = other DNA
agtggcgcttttatctgattactttgagcgccatcaccagcgactatgtcgtagtgggtaaagctccctcttcggagggagcatcagag

SEQ ID NO: 2734 - DNA, 89 bp, synthetic construct
  misc_feature 1..89: note = engineered ribonucleic acid scaffold (ERS) sequence
  source 1..89: mol_type = other DNA
agtggcgcttttatctgattactctgagcgccatcaccagcgactatgtcgtagtgggtaaagctccctcttcggagggagcatcagag

SEQ ID NO: 2735 - DNA, 89 bp, synthetic construct
  misc_feature 1..89: note = engineered ribonucleic acid scaffold (ERS) sequence
  source 1..89: mol_type = other DNA
agtggcgcttttatctgattactctgagcgccatcaccagcgactatgtcgtagtgggtaaagctccctcttcggagggagcatcaaag

SEQ ID NO: 2736 - DNA, 89 bp, synthetic construct
  misc_feature 1..89: note = engineered ribonucleic acid scaffold (ERS) sequence
  source 1..89: mol_type = other DNA
agtggcgcttctatctgattactctgagcgccatcaccagcgactatgtcgtagtgggtaaagctccctcttcggagggagcctcagag

SEQ ID NO: 2737 - DNA, 89 bp, synthetic construct
  misc_feature 1..89: note = engineered ribonucleic acid scaffold (ERS) sequence
  source 1..89: mol_type = other DNA
agtggcgcttctatctgattactctgagcgccatcaccagcgactatgtcgtagtgggtaaagctccctcttcggagggagcgtcagag

SEQ ID NO: 2738 - DNA, 89 bp, synthetic construct
  misc_feature 1..89: note = engineered ribonucleic acid scaffold (ERS) sequence
  source 1..89: mol_type = other DNA
agtggcgcttctatctgattactctgagcgccatcaccagcgactatgtcgtagtgggtaaagctccctcttcggagggagcatcaaag

SEQ ID NO: 2739 - DNA, 88 bp, synthetic construct
  misc_feature 1..88: note = engineered ribonucleic acid scaffold (ERS) sequence
  source 1..88: mol_type = other DNA
acggcgcttctatctgattactctcagcgccatcaccagcgactatgtcgtagtgggtaaagctccctcttcggagggagcatcagac

SEQ ID NO: 2740 - DNA, 88 bp, synthetic construct
  misc_feature 1..88: note = engineered ribonucleic acid scaffold (ERS) sequence
  source 1..88: mol_type = other DNA
acggcgcttctatctgattactttgagcgccatcaccagcgactatgtcgtagtgggtaaagctccctcttcggagggagcatcagag

SEQ ID NO: 2741 - DNA, 88 bp, synthetic construct
  misc_feature 1..88: note = engineered ribonucleic acid scaffold (ERS) sequence
  source 1..88: mol_type = other DNA
acggcgcttctatctgattactttgagcgccatcaccagcgactatgtcgtagtgggtaaagctccctcttcggagggagcatcaaag

SEQ ID NO: 2742 - DNA, 88 bp, synthetic construct
  misc_feature 1..88: note = engineered ribonucleic acid scaffold (ERS) sequence
  source 1..88: mol_type = other DNA
acggcgcttctatctgattagtctcagcgccatcaccagcgactatgtcgtagtgggtaaagctccctcttcggagggagcatgagac

SEQ ID NO: 2743 - DNA, 88 bp, synthetic construct
  misc_feature 1..88: note = engineered ribonucleic acid scaffold (ERS) sequence
  source 1..88: mol_type = other DNA
acggcgcttctatctgattagtctgagcgccatcaccagcgactatgtcgtagtgggtaaagctccctcttcggagggagcatcagac

SEQ ID NO: 2744 - DNA, 88 bp, synthetic construct
  misc_feature 1..88: note = engineered ribonucleic acid scaffold (ERS) sequence
  source 1..88: mol_type = other DNA
acggcgcttctatctgattactctcagcgccatcaccagcgactatgtcgtagtgggtaaagctccctcttcggagggagcatgagag

SEQ ID NO: 2745 - DNA, 88 bp, synthetic construct
  misc_feature 1..88: note = engineered ribonucleic acid scaffold (ERS) sequence
  source 1..88: mol_type = other DNA
acggcgctcccatctgattaccccgagcgccatcaccagcgactatgtcgtagtgggtaaagctccctcttcggagggagcatcgggg

SEQ ID NO: 2746 - DNA, 88 bp, synthetic construct
  misc_feature 1..88: note = engineered ribonucleic acid scaffold (ERS) sequence
  source 1..88: mol_type = other DNA
acggcgctcctatctgattactccgagcgccatcaccagcgactatgtcgtagtgggtaaagctccctcttcggagggagcatcggag

SEQ ID NO: 2747 - DNA, 88 bp, synthetic construct
  misc_feature 1..88: note = engineered ribonucleic acid scaffold (ERS) sequence
  source 1..88: mol_type = other DNA
acggcgctgggatctgattaccccgagcgccatcaccagcgactatgtcgtagtgggtaaagctccctcttcggagggagcatcgggg

SEQ ID NO: 2748 - DNA, 88 bp, synthetic construct
  misc_feature 1..88: note = engineered ribonucleic acid scaffold (ERS) sequence
  source 1..88: mol_type = other DNA
acggcgctggtatctgattactccgagcgccatcaccagcgactatgtcgtagtgggtaaagctccctcttcggagggagcatcggag

SEQ ID NO: 2749 - DNA, 88 bp, synthetic construct
  misc_feature 1..88: note = engineered ribonucleic acid scaffold (ERS) sequence
  source 1..88: mol_type = other DNA
acggcgcttccatctgattaccctgagcgccatcaccagcgactatgtcgtagtgggtaaagctccctcttcggagggagcatcaggg

SEQ ID NO: 2750 - DNA, 88 bp, synthetic construct
  misc_feature 1..88: note = engineered ribonucleic acid scaffold (ERS) sequence
  source 1..88: mol_type = other DNA
acggcgcttggatctgattaccctgagcgccatcaccagcgactatgtcgtagtgggtaaagctccctcttcggagggagcatcaggg

SEQ ID NO: 2751 - DNA, 88 bp, synthetic construct
  misc_feature 1..88: note = engineered ribonucleic acid scaffold (ERS) sequence
  source 1..88: mol_type = other DNA
acggcgcttgtatctgattactctgagcgccatcaccagcgactatgtcgtagtgggtaaagctccctcttcggagggagcatcagag

SEQ ID NO: 2752 - DNA, 88 bp, synthetic construct
  misc_feature 1..88: note = engineered ribonucleic acid scaffold (ERS) sequence
  source 1..88: mol_type = other DNA
acggcgcttttatctgattactttgagcgccatcaccagcgactatgtcgtagtgggtaaagctccctcttcggagggagcatcagag

SEQ ID NO: 2753 - DNA, 88 bp, synthetic construct
  misc_feature 1..88: note = engineered ribonucleic acid scaffold (ERS) sequence
  source 1..88: mol_type = other DNA
acggcgcttttatctgattactctgagcgccatcaccagcgactatgtcgtagtgggtaaagctccctcttcggagggagcatcagag

SEQ ID NO: 2754 - DNA, 88 bp, synthetic construct
  misc_feature 1..88: note = engineered ribonucleic acid scaffold (ERS) sequence
  source 1..88: mol_type = other DNA
acggcgcttttatctgattactctgagcgccatcaccagcgactatgtcgtagtgggtaaagctccctcttcggagggagcatcaaag

SEQ ID NO: 2755 - DNA, 88 bp, synthetic construct
  misc_feature 1..88: note = engineered ribonucleic acid scaffold (ERS) sequence
  source 1..88: mol_type = other DNA
acggcgcttctatctgattactctgagcgccatcaccagcgactatgtcgtagtgggtaaagctccctcttcggagggagcctcagag

SEQ ID NO: 2756 - DNA, 88 bp, synthetic construct
  misc_feature 1..88: note = engineered ribonucleic acid scaffold (ERS) sequence
  source 1..88: mol_type = other DNA
acggcgcttctatctgattactctgagcgccatcaccagcgactatgtcgtagtgggtaaagctccctcttcggagggagcgtcagag

SEQ ID NO: 2757 - DNA, 88 bp, synthetic construct
  misc_feature 1..88: note = engineered ribonucleic acid scaffold (ERS) sequence
  source 1..88: mol_type = other DNA
acggcgcttctatctgattactctgagcgccatcaccagcgactatgtcgtagtgggtaaagctccctcttcggagggagcatcaaag

SEQ ID NO: 2758 - DNA, 89 bp, synthetic construct
  misc_feature 1..89: note = engineered ribonucleic acid scaffold (ERS) sequence
  source 1..89: mol_type = other DNA
acaggcgcttctatctgattactctcagcgccatcaccagcgactatgtcgtagtgggtaaagctccctcttcggagggagcatcagac

SEQ ID NO: 2759 - DNA, 89 bp, synthetic construct
  misc_feature 1..89: note = engineered ribonucleic acid scaffold (ERS) sequence
  source 1..89: mol_type = other DNA
acaggcgcttctatctgattactttgagcgccatcaccagcgactatgtcgtagtgggtaaagctccctcttcggagggagcatcagag

SEQ ID NO: 2760 - DNA, 89 bp, synthetic construct
  misc_feature 1..89: note = engineered ribonucleic acid scaffold (ERS) sequence
  source 1..89: mol_type = other DNA
acaggcgcttctatctgattactttgagcgccatcaccagcgactatgtcgtagtgggtaaagctccctcttcggagggagcatcaaag

SEQ ID NO: 2761 - DNA, 89 bp, synthetic construct
  misc_feature 1..89: note = engineered ribonucleic acid scaffold (ERS) sequence
  source 1..89: mol_type = other DNA
acaggcgcttctatctgattagtctcagcgccatcaccagcgactatgtcgtagtgggtaaagctccctcttcggagggagcatgagac

SEQ ID NO: 2762 - DNA, 89 bp, synthetic construct
  misc_feature 1..89: note = engineered ribonucleic acid scaffold (ERS) sequence
  source 1..89: mol_type = other DNA
acaggcgcttctatctgattagtctgagcgccatcaccagcgactatgtcgtagtgggtaaagctccctcttcggagggagcatcagac

SEQ ID NO: 2763 - DNA, 89 bp, synthetic construct
  misc_feature 1..89: note = engineered ribonucleic acid scaffold (ERS) sequence
  source 1..89: mol_type = other DNA
acaggcgcttctatctgattactctcagcgccatcaccagcgactatgtcgtagtgggtaaagctccctcttcggagggagcatgagag

SEQ ID NO: 2764 - DNA, 89 bp, synthetic construct
  misc_feature 1..89: note = engineered ribonucleic acid scaffold (ERS) sequence
  source 1..89: mol_type = other DNA
acaggcgctcccatctgattaccccgagcgccatcaccagcgactatgtcgtagtgggtaaagctccctcttcggagggagcatcgggg

SEQ ID NO: 2765 - DNA, 89 bp, synthetic construct
  misc_feature 1..89: note = engineered ribonucleic acid scaffold (ERS) sequence
  source 1..89: mol_type = other DNA
acaggcgctcctatctgattactccgagcgccatcaccagcgactatgtcgtagtgggtaaagctccctcttcggagggagcatcggag

SEQ ID NO: 2766 - DNA, 89 bp, synthetic construct
  misc_feature 1..89: note = engineered ribonucleic acid scaffold (ERS) sequence
  source 1..89: mol_type = other DNA
acaggcgctgggatctgattaccccgagcgccatcaccagcgactatgtcgtagtgggtaaagctccctcttcggagggagcatcgggg

SEQ ID NO: 2767 - DNA, 89 bp, synthetic construct
  misc_feature 1..89: note = engineered ribonucleic acid scaffold (ERS) sequence
  source 1..89: mol_type = other DNA
acaggcgctggtatctgattactccgagcgccatcaccagcgactatgtcgtagtgggtaaagctccctcttcggagggagcatcggag

SEQ ID NO: 2768 - DNA, 89 bp, synthetic construct
  misc_feature 1..89: note = engineered ribonucleic acid scaffold (ERS) sequence
  source 1..89: mol_type = other DNA
acaggcgcttccatctgattaccctgagcgccatcaccagcgactatgtcgtagtgggtaaagctccctcttcggagggagcatcaggg

SEQ ID NO: 2769 - DNA, 89 bp, synthetic construct
  misc_feature 1..89: note = engineered ribonucleic acid scaffold (ERS) sequence
  source 1..89: mol_type = other DNA
acaggcgcttggatctgattaccctgagcgccatcaccagcgactatgtcgtagtgggtaaagctccctcttcggagggagcatcaggg

SEQ ID NO: 2770 - DNA, 89 bp, synthetic construct
  misc_feature 1..89: note = engineered ribonucleic acid scaffold (ERS) sequence
  source 1..89: mol_type = other DNA
acaggcgcttgtatctgattactctgagcgccatcaccagcgactatgtcgtagtgggtaaagctccctcttcggagggagcatcagag

SEQ ID NO: 2771 - DNA, 89 bp, synthetic construct
  misc_feature 1..89: note = engineered ribonucleic acid scaffold (ERS) sequence
  source 1..89: mol_type = other DNA
acaggcgcttttatctgattactttgagcgccatcaccagcgactatgtcgtagtgggtaaagctccctcttcggagggagcatcagag

SEQ ID NO: 2772 - DNA, 89 bp, synthetic construct
  misc_feature 1..89: note = engineered ribonucleic acid scaffold (ERS) sequence
  source 1..89: mol_type = other DNA
acaggcgcttttatctgattactctgagcgccatcaccagcgactatgtcgtagtgggtaaagctccctcttcggagggagcatcagag

SEQ ID NO: 2773 - DNA, 89 bp, synthetic construct
  misc_feature 1..89: note = engineered ribonucleic acid scaffold (ERS) sequence
  source 1..89: mol_type = other DNA
acaggcgcttttatctgattactctgagcgccatcaccagcgactatgtcgtagtgggtaaagctccctcttcggagggagcatcaaag

SEQ ID NO: 2774 - DNA, 89 bp, synthetic construct
  misc_feature 1..89: note = engineered ribonucleic acid scaffold (ERS) sequence
  source 1..89: mol_type = other DNA
acaggcgcttctatctgattactctgagcgccatcaccagcgactatgtcgtagtgggtaaagctccctcttcggagggagcctcagag

SEQ ID NO: 2775 - DNA, 89 bp, synthetic construct
  misc_feature 1..89: note = engineered ribonucleic acid scaffold (ERS) sequence
  source 1..89: mol_type = other DNA
acaggcgcttctatctgattactctgagcgccatcaccagcgactatgtcgtagtgggtaaagctccctcttcggagggagcgtcagag

SEQ ID NO: 2776 - DNA, 89 bp, synthetic construct
  misc_feature 1..89: note = engineered ribonucleic acid scaffold (ERS) sequence
  source 1..89: mol_type = other DNA
acaggcgcttctatctgattactctgagcgccatcaccagcgactatgtcgtagtgggtaaagctccctcttcggagggagcatcaaag

SEQ ID NO: 2777 - DNA, 89 bp, synthetic construct
  misc_feature 1..89: note = engineered ribonucleic acid scaffold (ERS) sequence
  source 1..89: mol_type = other DNA
acgggcgcttctatctgattactctcagcgccatcaccagcgactatgtcgtagtgggtaaagctccctcttcggagggagcatcagac

SEQ ID NO: 2778 - DNA, 89 bp, synthetic construct
  misc_feature 1..89: note = engineered ribonucleic acid scaffold (ERS) sequence
  source 1..89: mol_type = other DNA
acgggcgcttctatctgattactttgagcgccatcaccagcgactatgtcgtagtgggtaaagctccctcttcggagggagcatcagag

SEQ ID NO: 2779 - DNA, 89 bp, synthetic construct
  misc_feature 1..89: note = engineered ribonucleic acid scaffold (ERS) sequence
  source 1..89: mol_type = other DNA
acgggcgcttctatctgattactttgagcgccatcaccagcgactatgtcgtagtgggtaaagctccctcttcggagggagcatcaaag

SEQ ID NO: 2780 - DNA, 89 bp, synthetic construct
  misc_feature 1..89: note = engineered ribonucleic acid scaffold (ERS) sequence
  source 1..89: mol_type = other DNA
acgggcgcttctatctgattagtctcagcgccatcaccagcgactatgtcgtagtgggtaaagctccctcttcggagggagcatgagac

SEQ ID NO: 2781 - DNA, 89 bp, synthetic construct
  misc_feature 1..89: note = engineered ribonucleic acid scaffold (ERS) sequence
  source 1..89: mol_type = other DNA
acgggcgcttctatctgattagtctgagcgccatcaccagcgactatgtcgtagtgggtaaagctccctcttcggagggagcatcagac

SEQ ID NO: 2782 - DNA, 89 bp, synthetic construct
  misc_feature 1..89: note = engineered ribonucleic acid scaffold (ERS) sequence
  source 1..89: mol_type = other DNA
acgggcgcttctatctgattactctcagcgccatcaccagcgactatgtcgtagtgggtaaagctccctcttcggagggagcatgagag

SEQ ID NO: 2783 - DNA, 89 bp, synthetic construct
  misc_feature 1..89: note = engineered ribonucleic acid scaffold (ERS) sequence
  source 1..89: mol_type = other DNA
acgggcgctcccatctgattaccccgagcgccatcaccagcgactatgtcgtagtgggtaaagctccctcttcggagggagcatcgggg

SEQ ID NO: 2784 - DNA, 89 bp, synthetic construct
  misc_feature 1..89: note = engineered ribonucleic acid scaffold (ERS) sequence
  source 1..89: mol_type = other DNA
acgggcgctcctatctgattactccgagcgccatcaccagcgactatgtcgtagtgggtaaagctccctcttcggagggagcatcggag

SEQ ID NO: 2785 - DNA, 89 bp, synthetic construct
  misc_feature 1..89: note = engineered ribonucleic acid scaffold (ERS) sequence
  source 1..89: mol_type = other DNA
acgggcgctgggatctgattaccccgagcgccatcaccagcgactatgtcgtagtgggtaaagctccctcttcggagggagcatcgggg

SEQ ID NO: 2786 - DNA, 89 bp, synthetic construct
  misc_feature 1..89: note = engineered ribonucleic acid scaffold (ERS) sequence
  source 1..89: mol_type = other DNA
acgggcgctggtatctgattactccgagcgccatcaccagcgactatgtcgtagtgggtaaagctccctcttcggagggagcatcggag

SEQ ID NO: 2787 - DNA, 89 bp, synthetic construct
  misc_feature 1..89: note = engineered ribonucleic acid scaffold (ERS) sequence
  source 1..89: mol_type = other DNA
acgggcgcttccatctgattaccctgagcgccatcaccagcgactatgtcgtagtgggtaaagctccctcttcggagggagcatcaggg

SEQ ID NO: 2788 - DNA, 89 bp, synthetic construct
  misc_feature 1..89: note = engineered ribonucleic acid scaffold (ERS) sequence
  source 1..89: mol_type = other DNA
acgggcgcttggatctgattaccctgagcgccatcaccagcgactatgtcgtagtgggtaaagctccctcttcggagggagcatcaggg

SEQ ID NO: 2789 - DNA, 89 bp, synthetic construct
  misc_feature 1..89: note = engineered ribonucleic acid scaffold (ERS) sequence
  source 1..89: mol_type = other DNA
acgggcgcttgtatctgattactctgagcgccatcaccagcgactatgtcgtagtgggtaaagctccctcttcggagggagcatcagag

SEQ ID NO: 2790 - DNA, 89 bp, synthetic construct
  misc_feature 1..89: note = engineered ribonucleic acid scaffold (ERS) sequence
  source 1..89: mol_type = other DNA
acgggcgcttttatctgattactttgagcgccatcaccagcgactatgtcgtagtgggtaaagctccctcttcggagggagcatcagag

SEQ ID NO: 2791 - DNA, 89 bp, synthetic construct
  misc_feature 1..89: note = engineered ribonucleic acid scaffold (ERS) sequence
  source 1..89: mol_type = other DNA
acgggcgcttttatctgattactctgagcgccatcaccagcgactatgtcgtagtgggtaaagctccctcttcggagggagcatcagag

SEQ ID NO: 2792 - DNA, 89 bp, synthetic construct
  misc_feature 1..89: note = engineered ribonucleic acid scaffold (ERS) sequence
  source 1..89: mol_type = other DNA
acgggcgcttttatctgattactctgagcgccatcaccagcgactatgtcgtagtgggtaaagctccctcttcggagggagcatcaaag

SEQ ID NO: 2793 - DNA, 89 bp, synthetic construct
  misc_feature 1..89: note = engineered ribonucleic acid scaffold (ERS) sequence
  source 1..89: mol_type = other DNA
acgggcgcttctatctgattactctgagcgccatcaccagcgactatgtcgtagtgggtaaagctccctcttcggagggagcctcagag

SEQ ID NO: 2794 - DNA, 89 bp, synthetic construct
  misc_feature 1..89: note = engineered ribonucleic acid scaffold (ERS) sequence
  source 1..89: mol_type = other DNA
acgggcgcttctatctgattactctgagcgccatcaccagcgactatgtcgtagtgggtaaagctccctcttcggagggagcgtcagag

SEQ ID NO: 2795 - DNA, 89 bp, synthetic construct
  misc_feature 1..89: note = engineered ribonucleic acid scaffold (ERS) sequence
  source 1..89: mol_type = other DNA
acgggcgcttctatctgattactctgagcgccatcaccagcgactatgtcgtagtgggtaaagctccctcttcggagggagcatcaaag

SEQ ID NO: 2796 - DNA, 90 bp, synthetic construct
  misc_feature 1..90: note = engineered ribonucleic acid scaffold (ERS) sequence
  source 1..90: mol_type = other DNA
actaggcgcttctatctgattactctcagcgccatcaccagcgactatgtcgtagtgggtaaagctccctcttcggagggagcatcagac

SEQ ID NO: 2797 - DNA, 90 bp, synthetic construct
  misc_feature 1..90: note = engineered ribonucleic acid scaffold (ERS) sequence
  source 1..90: mol_type = other DNA
actaggcgcttctatctgattactttgagcgccatcaccagcgactatgtcgtagtgggtaaagctccctcttcggagggagcatcagag

SEQ ID NO: 2798 - DNA, 90 bp, synthetic construct
  misc_feature 1..90: note = engineered ribonucleic acid scaffold (ERS) sequence
  source 1..90: mol_type = other DNA
actaggcgcttctatctgattactttgagcgccatcaccagcgactatgtcgtagtgggtaaagctccctcttcggagggagcatcaaag

SEQ ID NO: 2799 - DNA, 90 bp, synthetic construct
  misc_feature 1..90: note = engineered ribonucleic acid scaffold (ERS) sequence
  source 1..90: mol_type = other DNA
actaggcgcttctatctgattagtctcagcgccatcaccagcgactatgtcgtagtgggtaaagctccctcttcggagggagcatgagac

SEQ ID NO: 2800 - DNA, 90 bp, synthetic construct
  misc_feature 1..90: note = engineered ribonucleic acid scaffold (ERS) sequence
  source 1..90: mol_type = other DNA
actaggcgcttctatctgattagtctgagcgccatcaccagcgactatgtcgtagtgggtaaagctccctcttcggagggagcatcagac

SEQ ID NO: 2801 - DNA, 90 bp, synthetic construct
  misc_feature 1..90: note = engineered ribonucleic acid scaffold (ERS) sequence
  source 1..90: mol_type = other DNA
actaggcgcttctatctgattactctcagcgccatcaccagcgactatgtcgtagtgggtaaagctccctcttcggagggagcatgagag

SEQ ID NO: 2802 - DNA, 90 bp, synthetic construct
  misc_feature 1..90: note = engineered ribonucleic acid scaffold (ERS) sequence
  source 1..90: mol_type = other DNA
actaggcgctcccatctgattaccccgagcgccatcaccagcgactatgtcgtagtgggtaaagctccctcttcggagggagcatcgggg

SEQ ID NO: 2803 - DNA, 90 bp, synthetic construct
  misc_feature 1..90: note = engineered ribonucleic acid scaffold (ERS) sequence
  source 1..90: mol_type = other DNA
actaggcgctcctatctgattactccgagcgccatcaccagcgactatgtcgtagtgggtaaagctccctcttcggagggagcatcggag

SEQ ID NO: 2804 - DNA, 90 bp, synthetic construct
  misc_feature 1..90: note = engineered ribonucleic acid scaffold (ERS) sequence
  source 1..90: mol_type = other DNA
actaggcgctgggatctgattaccccgagcgccatcaccagcgactatgtcgtagtgggtaaagctccctcttcggagggagcatcgggg

SEQ ID NO: 2805 - DNA, 90 bp, synthetic construct
  misc_feature 1..90: note = engineered ribonucleic acid scaffold (ERS) sequence
  source 1..90: mol_type = other DNA
actaggcgctggtatctgattactccgagcgccatcaccagcgactatgtcgtagtgggtaaagctccctcttcggagggagcatcggag

SEQ ID NO: 2806 - DNA, 90 bp, synthetic construct
  misc_feature 1..90: note = engineered ribonucleic acid scaffold (ERS) sequence
  source 1..90: mol_type = other DNA
actaggcgcttccatctgattaccctgagcgccatcaccagcgactatgtcgtagtgggtaaagctccctcttcggagggagcatcaggg

SEQ ID NO: 2807 - DNA, 90 bp, synthetic construct
  misc_feature 1..90: note = engineered ribonucleic acid scaffold (ERS) sequence
  source 1..90: mol_type = other DNA
actaggcgcttggatctgattaccctgagcgccatcaccagcgactatgtcgtagtgggtaaagctccctcttcggagggagcatcaggg

SEQ ID NO: 2808 - DNA, 90 bp, synthetic construct
  misc_feature 1..90: note = engineered ribonucleic acid scaffold (ERS) sequence
  source 1..90: mol_type = other DNA
actaggcgcttgtatctgattactctgagcgccatcaccagcgactatgtcgtagtgggtaaagctccctcttcggagggagcatcagag

SEQ ID NO: 2809 - DNA, 90 bp, synthetic construct
  misc_feature 1..90: note = engineered ribonucleic acid scaffold (ERS) sequence
  source 1..90: mol_type = other DNA
actaggcgcttttatctgattactttgagcgccatcaccagcgactatgtcgtagtgggtaaagctccctcttcggagggagcatcagag

SEQ ID NO: 2810 - DNA, 90 bp, synthetic construct
  misc_feature 1..90: note = engineered ribonucleic acid scaffold (ERS) sequence
  source 1..90: mol_type = other DNA
actaggcgcttttatctgattactctgagcgccatcaccagcgactatgtcgtagtgggtaaagctccctcttcggagggagcatcagag

SEQ ID NO: 2811 - DNA, 90 bp, synthetic construct
  misc_feature 1..90: note = engineered ribonucleic acid scaffold (ERS) sequence
  source 1..90: mol_type = other DNA
actaggcgcttttatctgattactctgagcgccatcaccagcgactatgtcgtagtgggtaaagctccctcttcggagggagcatcaaag

SEQ ID NO: 2812 - DNA, 90 bp, synthetic construct
  misc_feature 1..90: note = engineered ribonucleic acid scaffold (ERS) sequence
  source 1..90: mol_type = other DNA
actaggcgcttctatctgattactctgagcgccatcaccagcgactatgtcgtagtgggtaaagctccctcttcggagggagcctcagag

SEQ ID NO: 2813 - DNA, 90 bp, synthetic construct
  misc_feature 1..90: note = engineered ribonucleic acid scaffold (ERS) sequence
  source 1..90: mol_type = other DNA
actaggcgcttctatctgattactctgagcgccatcaccagcgactatgtcgtagtgggtaaagctccctcttcggagggagcgtcagag

SEQ ID NO: 2814 - DNA, 90 bp, synthetic construct
  misc_feature 1..90: note = engineered ribonucleic acid scaffold (ERS) sequence
  source 1..90: mol_type = other DNA
actaggcgcttctatctgattactctgagcgccatcaccagcgactatgtcgtagtgggtaaagctccctcttcggagggagcatcaaag

SEQ ID NO: 2815 - DNA, 92 bp, synthetic construct
  misc_feature 1..92: note = engineered ribonucleic acid scaffold (ERS) sequence
  source 1..92: mol_type = other DNA
aactggcgcttctatatctgattactctgagcgccatcaccagcgactatgtcgtagtgggtaaagctccctcttcggagggagcatcagag

SEQ ID NO: 2816 - DNA, 91 bp, synthetic construct
  misc_feature 1..91: note = engineered ribonucleic acid scaffold (ERS) sequence
  source 1..91: mol_type = other DNA
aactggcgcttctaatctgattactctgagcgccatcaccagcgactatgtcgtagtgggtaaagctccctcttcggagggagcatcagag

SEQ ID NO: 2817 - DNA, 89 bp, synthetic construct
  misc_feature 1..89: note = engineered ribonucleic acid scaffold (ERS) sequence
  source 1..89: mol_type = other DNA
aactggcgcttctactgattactctgagcgccatcaccagcgactatgtcgtagtgggtaaagctccctcttcggagggagcatcagag

SEQ ID NO: 2818 - DNA, 90 bp, synthetic construct
  misc_feature 1..90: note = engineered ribonucleic acid scaffold (ERS) sequence
  source 1..90: mol_type = other DNA
aactggcgcttctaactgattactctgagcgccatcaccagcgactatgtcgtagtgggtaaagctccctcttcggagggagcatcagag

SEQ ID NO: 2819 - DNA, 90 bp, synthetic construct
  misc_feature 1..90: note = engineered ribonucleic acid scaffold (ERS) sequence
  source 1..90: mol_type = other DNA
aactggcgcttctacctgattactctgagcgccatcaccagcgactatgtcgtagtgggtaaagctccctcttcggagggagcatcagag

SEQ ID NO: 2820 - DNA, 90 bp, synthetic construct
  misc_feature 1..90: note = engineered ribonucleic acid scaffold (ERS) sequence
  source 1..90: mol_type = other DNA
aactggcgcttctagctgattactctgagcgccatcaccagcgactatgtcgtagtgggtaaagctccctcttcggagggagcatcagag

SEQ ID NO: 2821 - DNA, 92 bp, synthetic construct
  misc_feature 1..92: note = engineered ribonucleic acid scaffold (ERS) sequence
  source 1..92: mol_type = other DNA
aactggcgcttctattactgattactctgagcgccatcaccagcgactatgtcgtagtgggtaaagctccctcttcggagggagcatcagag

SEQ ID NO: 2822 - DNA, 90 bp, synthetic construct
  misc_feature 1..90: note = engineered ribonucleic acid scaffold (ERS) sequence
  source 1..90: mol_type = other DNA
aactggcgcttctatatgattactctgagcgccatcaccagcgactatgtcgtagtgggtaaagctccctcttcggagggagcatcagag

SEQ ID NO: 2823 - DNA, 90 bp, synthetic construct
  misc_feature 1..90: note = engineered ribonucleic acid scaffold (ERS) sequence
  source 1..90: mol_type = other DNA
aactggcgcttctatgtgattactctgagcgccatcaccagcgactatgtcgtagtgggtaaagctccctcttcggagggagcatcagag

SEQ ID NO: 2824 - DNA, 90 bp, synthetic construct
  misc_feature 1..90: note = engineered ribonucleic acid scaffold (ERS) sequence
  source 1..90: mol_type = other DNA
aactggcgcttctatttgattactctgagcgccatcaccagcgactatgtcgtagtgggtaaagctccctcttcggagggagcatcagag

SEQ ID NO: 2825 - DNA, 91 bp, synthetic construct
  misc_feature 1..91: note = engineered ribonucleic acid scaffold (ERS) sequence
  source 1..91: mol_type = other DNA
aactggcgcttctatcttgattactctgagcgccatcaccagcgactatgtcgtagtgggtaaagctccctcttcggagggagcatcagag

SEQ ID NO: 2826 - DNA, 90 bp, synthetic construct
  misc_feature 1..90: note = engineered ribonucleic acid scaffold (ERS) sequence
  source 1..90: mol_type = other DNA
aactggcgcttctatcagattactctgagcgccatcaccagcgactatgtcgtagtgggtaaagctccctcttcggagggagcatcagag

SEQ ID NO: 2827 - DNA, 90 bp, synthetic construct
  misc_feature 1..90: note = engineered ribonucleic acid scaffold (ERS) sequence
  source 1..90: mol_type = other DNA
aactggcgcttctatcggattactctgagcgccatcaccagcgactatgtcgtagtgggtaaagctccctcttcggagggagcatcagag

SEQ ID NO: 2828 - DNA, 91 bp, synthetic construct
  misc_feature 1..91: note = engineered ribonucleic acid scaffold (ERS) sequence
  source 1..91: mol_type = other DNA
aactggcgcttctatctgaattactctgagcgccatcaccagcgactatgtcgtagtgggtaaagctccctcttcggagggagcatcagag

SEQ ID NO: 2829 - DNA, 91 bp, synthetic construct
  misc_feature 1..91: note = engineered ribonucleic acid scaffold (ERS) sequence
  source 1..91: mol_type = other DNA
aactggcgcttctatctgtattactctgagcgccatcaccagcgactatgtcgtagtgggtaaagctccctcttcggagggagcatcagag

SEQ ID NO: 2830 - DNA, 90 bp, synthetic construct
  misc_feature 1..90: note = engineered ribonucleic acid scaffold (ERS) sequence
  source 1..90: mol_type = other DNA
aactggcgcttctatctggttactctgagcgccatcaccagcgactatgtcgtagtgggtaaagctccctcttcggagggagcatcagag

SEQ ID NO: 2831 - DNA, 90 bp, synthetic construct
  misc_feature 1..90: note = engineered ribonucleic acid scaffold (ERS) sequence
  source 1..90: mol_type = other DNA
aactggcgcttctatctgtttactctgagcgccatcaccagcgactatgtcgtagtgggtaaagctccctcttcggagggagcatcagag

SEQ ID NO: 2832 - DNA, 91 bp, synthetic construct
  misc_feature 1..91: note = engineered ribonucleic acid scaffold (ERS) sequence
  source 1..91: mol_type = other DNA
aactggcgcttctatctgatttactctgagcgccatcaccagcgactatgtcgtagtgggtaaagctccctcttcggagggagcatcagag

SEQ ID NO: 2833 - DNA, 90 bp, synthetic construct
  misc_feature 1..90: note = engineered ribonucleic acid scaffold (ERS) sequence
  source 1..90: mol_type = other DNA
aactggcgcttctatctgattgctctgagcgccatcaccagcgactatgtcgtagtgggtaaagctccctcttcggagggagcatcagag

SEQ ID NO: 2834 - DNA, 89 bp, synthetic construct
  misc_feature 1..89: note = engineered ribonucleic acid scaffold (ERS) sequence
  source 1..89: mol_type = other DNA
gggcgcttctatatctgattactctgagcgccctcaccagcgactatgtcgtagtgggtaaagctccctcttcggagggagcatcagag

SEQ ID NO: 2835 - DNA, 88 bp, synthetic construct
  misc_feature 1..88: note = engineered ribonucleic acid scaffold (ERS) sequence
  source 1..88: mol_type = other DNA
gggcgcttctaatctgattactctgagcgccctcaccagcgactatgtcgtagtgggtaaagctccctcttcggagggagcatcagag

SEQ ID NO: 2836 - DNA, 86 bp, synthetic construct
  misc_feature 1..86: note = engineered ribonucleic acid scaffold (ERS) sequence
  source 1..86: mol_type = other DNA
gggcgcttctactgattactctgagcgccctcaccagcgactatgtcgtagtgggtaaagctccctcttcggagggagcatcagag

SEQ ID NO: 2837 - DNA, 87 bp, synthetic construct
  misc_feature 1..87: note = engineered ribonucleic acid scaffold (ERS) sequence
  source 1..87: mol_type = other DNA
gggcgcttctaactgattactctgagcgccctcaccagcgactatgtcgtagtgggtaaagctccctcttcggagggagcatcagag

SEQ ID NO: 2838 - DNA, 87 bp, synthetic construct
  misc_feature 1..87: note = engineered ribonucleic acid scaffold (ERS) sequence
  source 1..87: mol_type = other DNA
gggcgcttctacctgattactctgagcgccctcaccagcgactatgtcgtagtgggtaaagctccctcttcggagggagcatcagag

SEQ ID NO: 2839 - DNA, 87 bp, synthetic construct
  misc_feature 1..87: note = engineered ribonucleic acid scaffold (ERS) sequence
  source 1..87: mol_type = other DNA
gggcgcttctagctgattactctgagcgccctcaccagcgactatgtcgtagtgggtaaagctccctcttcggagggagcatcagag

SEQ ID NO: 2840 - DNA, 89 bp, synthetic construct
  misc_feature 1..89: note = engineered ribonucleic acid scaffold (ERS) sequence
  source 1..89: mol_type = other DNA
gggcgcttctattactgattactctgagcgccctcaccagcgactatgtcgtagtgggtaaagctccctcttcggagggagcatcagag

SEQ ID NO: 2841 - DNA, 87 bp, synthetic construct
  misc_feature 1..87: note = engineered ribonucleic acid scaffold (ERS) sequence
  source 1..87: mol_type = other DNA
gggcgcttctatatgattactctgagcgccctcaccagcgactatgtcgtagtgggtaaagctccctcttcggagggagcatcagag

SEQ ID NO: 2842 - DNA, 87 bp, synthetic construct
  misc_feature 1..87: note = engineered ribonucleic acid scaffold (ERS) sequence
  source 1..87: mol_type = other DNA
gggcgcttctatgtgattactctgagcgccctcaccagcgactatgtcgtagtgggtaaagctccctcttcggagggagcatcagag

SEQ ID NO: 2843 - DNA, 87 bp, synthetic construct
  misc_feature 1..87: note = engineered ribonucleic acid scaffold (ERS) sequence
  source 1..87: mol_type = other DNA
gggcgcttctatttgattactctgagcgccctcaccagcgactatgtcgtagtgggtaaagctccctcttcggagggagcatcagag

SEQ ID NO: 2844 - DNA, 88 bp, synthetic construct
  misc_feature 1..88: note = engineered ribonucleic acid scaffold (ERS) sequence
  source 1..88: mol_type = other DNA
gggcgcttctatcttgattactctgagcgccctcaccagcgactatgtcgtagtgggtaaagctccctcttcggagggagcatcagag

SEQ ID NO: 2845 - DNA, 87 bp, synthetic construct
  misc_feature 1..87: note = engineered ribonucleic acid scaffold (ERS) sequence
  source 1..87: mol_type = other DNA
gggcgcttctatcagattactctgagcgccctcaccagcgactatgtcgtagtgggtaaagctccctcttcggagggagcatcagag

SEQ ID NO: 2846 - DNA, 87 bp, synthetic construct
  misc_feature 1..87: note = engineered ribonucleic acid scaffold (ERS) sequence
  source 1..87: mol_type = other DNA
gggcgcttctatcggattactctgagcgccctcaccagcgactatgtcgtagtgggtaaagctccctcttcggagggagcatcagag

SEQ ID NO: 2847 - DNA, 88 bp, synthetic construct
  misc_feature 1..88: note = engineered ribonucleic acid scaffold (ERS) sequence
  source 1..88: mol_type = other DNA
gggcgcttctatctgaattactctgagcgccctcaccagcgactatgtcgtagtgggtaaagctccctcttcggagggagcatcagag

SEQ ID NO: 2848 - DNA, 88 bp, synthetic construct
  misc_feature 1..88: note = engineered ribonucleic acid scaffold (ERS) sequence
  source 1..88: mol_type = other DNA
gggcgcttctatctgtattactctgagcgccctcaccagcgactatgtcgtagtgggtaaagctccctcttcggagggagcatcagag

SEQ ID NO: 2849 - DNA, 87 bp, synthetic construct
  misc_feature 1..87: note = engineered ribonucleic acid scaffold (ERS) sequence
  source 1..87: mol_type = other DNA
gggcgcttctatctggttactctgagcgccctcaccagcgactatgtcgtagtgggtaaagctccctcttcggagggagcatcagag

SEQ ID NO: 2850 - DNA, 87 bp, synthetic construct
  misc_feature 1..87: note = engineered ribonucleic acid scaffold (ERS) sequence
  source 1..87: mol_type = other DNA
gggcgcttctatctgtttactctgagcgccctcaccagcgactatgtcgtagtgggtaaagctccctcttcggagggagcatcagag

SEQ ID NO: 2851 - DNA, 88 bp, synthetic construct
  misc_feature 1..88: note = engineered ribonucleic acid scaffold (ERS) sequence
  source 1..88: mol_type = other DNA
gggcgcttctatctgatttactctgagcgccctcaccagcgactatgtcgtagtgggtaaagctccctcttcggagggagcatcagag

SEQ ID NO: 2852 - DNA, 87 bp, synthetic construct
  misc_feature 1..87: note = engineered ribonucleic acid scaffold (ERS) sequence
  source 1..87: mol_type = other DNA
gggcgcttctatctgattgctctgagcgccctcaccagcgactatgtcgtagtgggtaaagctccctcttcggagggagcatcagag

SEQ ID NO: 2853 - DNA, 91 bp, synthetic construct
  misc_feature 1..91: note = engineered ribonucleic acid scaffold (ERS) sequence
  source 1..91: mol_type = other DNA
gctggcgcttctatatctgattactctgagcgccatcaccagcgactatgtcgtagtgggtaaagctccctcttcggagggagcatcagag

SEQ ID NO: 2854 - DNA, 90 bp, synthetic construct
  misc_feature 1..90: note = engineered ribonucleic acid scaffold (ERS) sequence
  source 1..90: mol_type = other DNA
gctggcgcttctaatctgattactctgagcgccatcaccagcgactatgtcgtagtgggtaaagctccctcttcggagggagcatcagag

SEQ ID NO: 2855 - DNA, 88 bp, synthetic construct
  misc_feature 1..88: note = engineered ribonucleic acid scaffold (ERS) sequence
  source 1..88: mol_type = other DNA
gctggcgcttctactgattactctgagcgccatcaccagcgactatgtcgtagtgggtaaagctccctcttcggagggagcatcagag

SEQ ID NO: 2856 - DNA, 89 bp, synthetic construct
  misc_feature 1..89: note = engineered ribonucleic acid scaffold (ERS) sequence
  source 1..89: mol_type = other DNA
gctggcgcttctaactgattactctgagcgccatcaccagcgactatgtcgtagtgggtaaagctccctcttcggagggagcatcagag

SEQ ID NO: 2857 - DNA, 89 bp, synthetic construct
  misc_feature 1..89: note = engineered ribonucleic acid scaffold (ERS) sequence
  source 1..89: mol_type = other DNA
gctggcgcttctacctgattactctgagcgccatcaccagcgactatgtcgtagtgggtaaagctccctcttcggagggagcatcagag

SEQ ID NO: 2858 - DNA, 89 bp, synthetic construct
  misc_feature 1..89: note = engineered ribonucleic acid scaffold (ERS) sequence
  source 1..89: mol_type = other DNA
gctggcgcttctagctgattactctgagcgccatcaccagcgactatgtcgtagtgggtaaagctccctcttcggagggagcatcagag

SEQ ID NO: 2859 - DNA, 91 bp, synthetic construct
  misc_feature 1..91: note = engineered ribonucleic acid scaffold (ERS) sequence
  source 1..91: mol_type = other DNA
gctggcgcttctattactgattactctgagcgccatcaccagcgactatgtcgtagtgggtaaagctccctcttcggagggagcatcagag

SEQ ID NO: 2860 - DNA, 89 bp, synthetic construct
  misc_feature 1..89: note = engineered ribonucleic acid scaffold (ERS) sequence
  source 1..89: mol_type = other DNA
gctggcgcttctatatgattactctgagcgccatcaccagcgactatgtcgtagtgggtaaagctccctcttcggagggagcatcagag

SEQ ID NO: 2861 - DNA, 89 bp, synthetic construct
  misc_feature 1..89: note = engineered ribonucleic acid scaffold (ERS) sequence
  source 1..89: mol_type = other DNA
gctggcgcttctatgtgattactctgagcgccatcaccagcgactatgtcgtagtgggtaaagctccctcttcggagggagcatcagag

SEQ ID NO: 2862 - DNA, 89 bp, synthetic construct
  misc_feature 1..89: note = engineered ribonucleic acid scaffold (ERS) sequence
  source 1..89: mol_type = other DNA
gctggcgcttctatttgattactctgagcgccatcaccagcgactatgtcgtagtgggtaaagctccctcttcggagggagcatcagag

SEQ ID NO: 2863 - DNA, 90 bp, synthetic construct
  misc_feature 1..90: note = engineered ribonucleic acid scaffold (ERS) sequence
  source 1..90: mol_type = other DNA
gctggcgcttctatcttgattactctgagcgccatcaccagcgactatgtcgtagtgggtaaagctccctcttcggagggagcatcagag

SEQ ID NO: 2864 - DNA, 89 bp, synthetic construct
  misc_feature 1..89: note = engineered ribonucleic acid scaffold (ERS) sequence
  source 1..89: mol_type = other DNA
gctggcgcttctatcagattactctgagcgccatcaccagcgactatgtcgtagtgggtaaagctccctcttcggagggagcatcagag

SEQ ID NO: 2865 - DNA, 89 bp, synthetic construct
  misc_feature 1..89: note = engineered ribonucleic acid scaffold (ERS) sequence
  source 1..89: mol_type = other DNA
gctggcgcttctatcggattactctgagcgccatcaccagcgactatgtcgtagtgggtaaagctccctcttcggagggagcatcagag

SEQ ID NO: 2866 - DNA, 90 bp, synthetic construct
  misc_feature 1..90: note = engineered ribonucleic acid scaffold (ERS) sequence
  source 1..90: mol_type = other DNA
gctggcgcttctatctgaattactctgagcgccatcaccagcgactatgtcgtagtgggtaaagctccctcttcggagggagcatcagag

SEQ ID NO: 2867 - DNA, 90 bp, synthetic construct
  misc_feature 1..90: note = engineered ribonucleic acid scaffold (ERS) sequence
  source 1..90: mol_type = other DNA
gctggcgcttctatctgtattactctgagcgccatcaccagcgactatgtcgtagtgggtaaagctccctcttcggagggagcatcagag

SEQ ID NO: 2868 - DNA, 89 bp, synthetic construct
  misc_feature 1..89: note = engineered ribonucleic acid scaffold (ERS) sequence
  source 1..89: mol_type = other DNA
gctggcgcttctatctggttactctgagcgccatcaccagcgactatgtcgtagtgggtaaagctccctcttcggagggagcatcagag

SEQ ID NO: 2869 - DNA, 89 bp, synthetic construct
  misc_feature 1..89: note = engineered ribonucleic acid scaffold (ERS) sequence
  source 1..89: mol_type = other DNA
gctggcgcttctatctgtttactctgagcgccatcaccagcgactatgtcgtagtgggtaaagctccctcttcggagggagcatcagag

SEQ ID NO: 2870 - DNA, 90 bp, synthetic construct
  misc_feature 1..90: note = engineered ribonucleic acid scaffold (ERS) sequence
  source 1..90: mol_type = other DNA
gctggcgcttctatctgatttactctgagcgccatcaccagcgactatgtcgtagtgggtaaagctccctcttcggagggagcatcagag

SEQ ID NO: 2871 - DNA, 89 bp, synthetic construct
  misc_feature 1..89: note = engineered ribonucleic acid scaffold (ERS) sequence
  source 1..89: mol_type = other DNA
gctggcgcttctatctgattgctctgagcgccatcaccagcgactatgtcgtagtgggtaaagctccctcttcggagggagcatcagag

SEQ ID NO: 2872 - DNA, 91 bp, synthetic construct
  misc_feature 1..91: note = engineered ribonucleic acid scaffold (ERS) sequence
  source 1..91: mol_type = other DNA
tatggcgcttctatatctgattactctgagcgccatcaccagcgactatgtcgtagtgggtaaagctccctcttcggagggagcatcagag

SEQ ID NO: 2873 - DNA, 90 bp, synthetic construct
  misc_feature 1..90: note = engineered ribonucleic acid scaffold (ERS) sequence
  source 1..90: mol_type = other DNA
tatggcgcttctaatctgattactctgagcgccatcaccagcgactatgtcgtagtgggtaaagctccctcttcggagggagcatcagag

SEQ ID NO: 2874 - DNA, 88 bp, synthetic construct
  misc_feature 1..88: note = engineered ribonucleic acid scaffold (ERS) sequence
  source 1..88: mol_type = other DNA
tatggcgcttctactgattactctgagcgccatcaccagcgactatgtcgtagtgggtaaagctccctcttcggagggagcatcagag

SEQ ID NO: 2875 - DNA, 89 bp, synthetic construct
  misc_feature 1..89: note = engineered ribonucleic acid scaffold (ERS) sequence
  source 1..89: mol_type = other DNA
tatggcgcttctaactgattactctgagcgccatcaccagcgactatgtcgtagtgggtaaagctccctcttcggagggagcatcagag

SEQ ID NO: 2876 - DNA, 89 bp, synthetic construct
  misc_feature 1..89: note = engineered ribonucleic acid scaffold (ERS) sequence
  source 1..89: mol_type = other DNA
tatggcgcttctacctgattactctgagcgccatcaccagcgactatgtcgtagtgggtaaagctccctcttcggagggagcatcagag

SEQ ID NO: 2877 - DNA, 89 bp, synthetic construct
  misc_feature 1..89: note = engineered ribonucleic acid scaffold (ERS) sequence
  source 1..89: mol_type = other DNA
tatggcgcttctagctgattactctgagcgccatcaccagcgactatgtcgtagtgggtaaagctccctcttcggagggagcatcagag

SEQ ID NO: 2878 - DNA, 91 bp, synthetic construct
  misc_feature 1..91: note = engineered ribonucleic acid scaffold (ERS) sequence
  source 1..91: mol_type = other DNA
tatggcgcttctattactgattactctgagcgccatcaccagcgactatgtcgtagtgggtaaagctccctcttcggagggagcatcagag

SEQ ID NO: 2879 - DNA, 89 bp, synthetic construct
  misc_feature 1..89: note = engineered ribonucleic acid scaffold (ERS) sequence
  source 1..89: mol_type = other DNA
tatggcgcttctatatgattactctgagcgccatcaccagcgactatgtcgtagtgggtaaagctccctcttcggagggagcatcagag

SEQ ID NO: 2880 - DNA, 89 bp, synthetic construct
  misc_feature 1..89: note = engineered ribonucleic acid scaffold (ERS) sequence
  source 1..89: mol_type = other DNA
tatggcgcttctatgtgattactctgagcgccatcaccagcgactatgtcgtagtgggtaaagctccctcttcggagggagcatcagag

SEQ ID NO: 2881 - DNA, 89 bp, synthetic construct
  misc_feature 1..89: note = engineered ribonucleic acid scaffold (ERS) sequence
  source 1..89: mol_type = other DNA
tatggcgcttctatttgattactctgagcgccatcaccagcgactatgtcgtagtgggtaaagctccctcttcggagggagcatcagag

SEQ ID NO: 2882 - DNA, 90 bp, synthetic construct
  misc_feature 1..90: note = engineered ribonucleic acid scaffold (ERS) sequence
  source 1..90: mol_type = other DNA
tatggcgcttctatcttgattactctgagcgccatcaccagcgactatgtcgtagtgggtaaagctccctcttcggagggagcatcagag

SEQ ID NO: 2883 - DNA, 89 bp, synthetic construct
  misc_feature 1..89: note = engineered ribonucleic acid scaffold (ERS) sequence
  source 1..89: mol_type = other DNA
tatggcgcttctatcagattactctgagcgccatcaccagcgactatgtcgtagtgggtaaagctccctcttcggagggagcatcagag

SEQ ID NO: 2884 - DNA, 89 bp, synthetic construct
  misc_feature 1..89: note = engineered ribonucleic acid scaffold (ERS) sequence
  source 1..89: mol_type = other DNA
tatggcgcttctatcggattactctgagcgccatcaccagcgactatgtcgtagtgggtaaagctccctcttcggagggagcatcagag

SEQ ID NO: 2885 - DNA, 90 bp, synthetic construct
  misc_feature 1..90: note = engineered ribonucleic acid scaffold (ERS) sequence
  source 1..90: mol_type = other DNA
tatggcgcttctatctgaattactctgagcgccatcaccagcgactatgtcgtagtgggtaaagctccctcttcggagggagcatcagag

SEQ ID NO: 2886 - DNA, 90 bp, synthetic construct
  misc_feature 1..90: note = engineered ribonucleic acid scaffold (ERS) sequence
  source 1..90: mol_type = other DNA
tatggcgcttctatctgtattactctgagcgccatcaccagcgactatgtcgtagtgggtaaagctccctcttcggagggagcatcagag

SEQ ID NO: 2887 - DNA, 89 bp, synthetic construct
  misc_feature 1..89: note = engineered ribonucleic acid scaffold (ERS) sequence
  source 1..89: mol_type = other DNA
tatggcgcttctatctggttactctgagcgccatcaccagcgactatgtcgtagtgggtaaagctccctcttcggagggagcatcagag

SEQ ID NO: 2888 - DNA, 89 bp, synthetic construct
  misc_feature 1..89: note = engineered ribonucleic acid scaffold (ERS) sequence
  source 1..89: mol_type = other DNA
tatggcgcttctatctgtttactctgagcgccatcaccagcgactatgtcgtagtgggtaaagctccctcttcggagggagcatcagag

SEQ ID NO: 2889 - DNA, 90 bp, synthetic construct
  misc_feature 1..90: note = engineered ribonucleic acid scaffold (ERS) sequence
  source 1..90: mol_type = other DNA
tatggcgcttctatctgatttactctgagcgccatcaccagcgactatgtcgtagtgggtaaagctccctcttcggagggagcatcagag

SEQ ID NO: 2890 - DNA, 89 bp, synthetic construct
  misc_feature 1..89: note = engineered ribonucleic acid scaffold (ERS) sequence
  source 1..89: mol_type = other DNA
tatggcgcttctatctgattgctctgagcgccatcaccagcgactatgtcgtagtgggtaaagctccctcttcggagggagcatcagag

SEQ ID NO: 2891 - DNA, 91 bp, synthetic construct
  misc_feature 1..91: note = engineered ribonucleic acid scaffold (ERS) sequence
  source 1..91: mol_type = other DNA
tctggcgcttctatatctgattactctgagcgccatcaccagcgactatgtcgtagtgggtaaagctccctcttcggagggagcatcagag

SEQ ID NO: 2892 - DNA, 90 bp, synthetic construct
  misc_feature 1..90: note = engineered ribonucleic acid scaffold (ERS) sequence
  source 1..90: mol_type = other DNA
tctggcgcttctaatctgattactctgagcgccatcaccagcgactatgtcgtagtgggtaaagctccctcttcggagggagcatcagag

SEQ ID NO: 2893 - DNA, 88 bp, synthetic construct
  misc_feature 1..88: note = engineered ribonucleic acid scaffold (ERS) sequence
  source 1..88: mol_type = other DNA
tctggcgcttctactgattactctgagcgccatcaccagcgactatgtcgtagtgggtaaagctccctcttcggagggagcatcagag

SEQ ID NO: 2894 - DNA, 89 bp, synthetic construct
  misc_feature 1..89: note = engineered ribonucleic acid scaffold (ERS) sequence
  source 1..89: mol_type = other DNA
tctggcgcttctaactgattactctgagcgccatcaccagcgactatgtcgtagtgggtaaagctccctcttcggagggagcatcagag

SEQ ID NO: 2895 - DNA, 89 bp, synthetic construct
  misc_feature 1..89: note = engineered ribonucleic acid scaffold (ERS) sequence
  source 1..89: mol_type = other DNA
tctggcgcttctacctgattactctgagcgccatcaccagcgactatgtcgtagtgggtaaagctccctcttcggagggagcatcagag

SEQ ID NO: 2896 - DNA, 89 bp, synthetic construct
  misc_feature 1..89: note = engineered ribonucleic acid scaffold (ERS) sequence
  source 1..89: mol_type = other DNA
tctggcgcttctagctgattactctgagcgccatcaccagcgactatgtcgtagtgggtaaagctccctcttcggagggagcatcagag

SEQ ID NO: 2897 - DNA, 91 bp, synthetic construct
  misc_feature 1..91: note = engineered ribonucleic acid scaffold (ERS) sequence
  source 1..91: mol_type = other DNA
tctggcgcttctattactgattactctgagcgccatcaccagcgactatgtcgtagtgggtaaagctccctcttcggagggagcatcagag

SEQ ID NO: 2898 - DNA, 89 bp, synthetic construct
  misc_feature 1..89: note = engineered ribonucleic acid scaffold (ERS) sequence
  source 1..89: mol_type = other DNA
tctggcgcttctatatgattactctgagcgccatcaccagcgactatgtcgtagtgggtaaagctccctcttcggagggagcatcagag

SEQ ID NO: 2899 - DNA, 89 bp, synthetic construct
  misc_feature 1..89: note = engineered ribonucleic acid scaffold (ERS) sequence
  source 1..89: mol_type = other DNA
tctggcgcttctatgtgattactctgagcgccatcaccagcgactatgtcgtagtgggtaaagctccctcttcggagggagcatcagag

SEQ ID NO: 2900 - DNA, 89 bp, synthetic construct
  misc_feature 1..89: note = engineered ribonucleic acid scaffold (ERS) sequence
  source 1..89: mol_type = other DNA
tctggcgcttctatttgattactctgagcgccatcaccagcgactatgtcgtagtgggtaaagctccctcttcggagggagcatcagag

SEQ ID NO: 2901 - DNA, 90 bp, synthetic construct
  misc_feature 1..90: note = engineered ribonucleic acid scaffold (ERS) sequence
  source 1..90: mol_type = other DNA
tctggcgcttctatcttgattactctgagcgccatcaccagcgactatgtcgtagtgggtaaagctccctcttcggagggagcatcagag

SEQ ID NO: 2902 - DNA, 89 bp, synthetic construct
  misc_feature 1..89: note = engineered ribonucleic acid scaffold (ERS) sequence
  source 1..89: mol_type = other DNA
tctggcgcttctatcagattactctgagcgccatcaccagcgactatgtcgtagtgggtaaagctccctcttcggagggagcatcagag

SEQ ID NO: 2903 - DNA, 89 bp, synthetic construct
  misc_feature 1..89: note = engineered ribonucleic acid scaffold (ERS) sequence
  source 1..89: mol_type = other DNA
tctggcgcttctatcggattactctgagcgccatcaccagcgactatgtcgtagtgggtaaagctccctcttcggagggagcatcagag

SEQ ID NO: 2904 - DNA, 90 bp, synthetic construct
  misc_feature 1..90: note = engineered ribonucleic acid scaffold (ERS) sequence
  source 1..90: mol_type = other DNA
tctggcgcttctatctgaattactctgagcgccatcaccagcgactatgtcgtagtgggtaaagctccctcttcggagggagcatcagag

SEQ ID NO: 2905 - DNA, 90 bp, synthetic construct
  misc_feature 1..90: note = engineered ribonucleic acid scaffold (ERS) sequence
  source 1..90: mol_type = other DNA
tctggcgcttctatctgtattactctgagcgccatcaccagcgactatgtcgtagtgggtaaagctccctcttcggagggagcatcagag

SEQ ID NO: 2906 - DNA, 89 bp, synthetic construct
  misc_feature 1..89: note = engineered ribonucleic acid scaffold (ERS) sequence
  source 1..89: mol_type = other DNA
tctggcgcttctatctggttactctgagcgccatcaccagcgactatgtcgtagtgggtaaagctccctcttcggagggagcatcagag

SEQ ID NO: 2907 - DNA, 89 bp, synthetic construct
  misc_feature 1..89: note = engineered ribonucleic acid scaffold (ERS) sequence
  source 1..89: mol_type = other DNA
tctggcgcttctatctgtttactctgagcgccatcaccagcgactatgtcgtagtgggtaaagctccctcttcggagggagcatcagag

SEQ ID NO: 2908 - DNA, 90 bp, synthetic construct
  misc_feature 1..90: note = engineered ribonucleic acid scaffold (ERS) sequence
  source 1..90: mol_type = other DNA
tctggcgcttctatctgatttactctgagcgccatcaccagcgactatgtcgtagtgggtaaagctccctcttcggagggagcatcagag

SEQ ID NO: 2909 - DNA, 89 bp, synthetic construct
  misc_feature 1..89: note = engineered ribonucleic acid scaffold (ERS) sequence
  source 1..89: mol_type = other DNA
tctggcgcttctatctgattgctctgagcgccatcaccagcgactatgtcgtagtgggtaaagctccctcttcggagggagcatcagag

SEQ ID NO: 2910 - DNA, 92 bp, synthetic construct
  misc_feature 1..92: note = engineered ribonucleic acid scaffold (ERS) sequence
  source 1..92: mol_type = other DNA
atctggcgcttctatatctgattactctgagcgccatcaccagcgactatgtcgtagtgggtaaagctccctcttcggagggagcatcagag

SEQ ID NO: 2911 - DNA, 91 bp, synthetic construct
  misc_feature 1..91: note = engineered ribonucleic acid scaffold (ERS) sequence
  source 1..91: mol_type = other DNA
atctggcgcttctaatctgattactctgagcgccatcaccagcgactatgtcgtagtgggtaaagctccctcttcggagggagcatcagag

SEQ ID NO: 2912 - DNA, 89 bp, synthetic construct
  misc_feature 1..89: note = engineered ribonucleic acid scaffold (ERS) sequence
  source 1..89: mol_type = other DNA
atctggcgcttctactgattactctgagcgccatcaccagcgactatgtcgtagtgggtaaagctccctcttcggagggagcatcagag

SEQ ID NO: 2913 - DNA, 90 bp, synthetic construct
  misc_feature 1..90: note = engineered ribonucleic acid scaffold (ERS) sequence
  source 1..90: mol_type = other DNA
atctggcgcttctaactgattactctgagcgccatcaccagcgactatgtcgtagtgggtaaagctccctcttcggagggagcatcagag

SEQ ID NO: 2914 - DNA, 90 bp, synthetic construct
  misc_feature 1..90: note = engineered ribonucleic acid scaffold (ERS) sequence
  source 1..90: mol_type = other DNA
atctggcgcttctacctgattactctgagcgccatcaccagcgactatgtcgtagtgggtaaagctccctcttcggagggagcatcagag

SEQ ID NO: 2915 - DNA, 90 bp, synthetic construct
  misc_feature 1..90: note = engineered ribonucleic acid scaffold (ERS) sequence
  source 1..90: mol_type = other DNA
atctggcgcttctagctgattactctgagcgccatcaccagcgactatgtcgtagtgggtaaagctccctcttcggagggagcatcagag

SEQ ID NO: 2916 - DNA, 92 bp, synthetic construct
  misc_feature 1..92: note = engineered ribonucleic acid scaffold (ERS) sequence
  source 1..92: mol_type = other DNA
atctggcgcttctattactgattactctgagcgccatcaccagcgactatgtcgtagtgggtaaagctccctcttcggagggagcatcagag

SEQ ID NO: 2917 - DNA, 90 bp, synthetic construct
  misc_feature 1..90: note = engineered ribonucleic acid scaffold (ERS) sequence
  source 1..90: mol_type = other DNA
atctggcgcttctatatgattactctgagcgccatcaccagcgactatgtcgtagtgggtaaagctccctcttcggagggagcatcagag

SEQ ID NO: 2918 - DNA, 90 bp, synthetic construct
  misc_feature 1..90: note = engineered ribonucleic acid scaffold (ERS) sequence
  source 1..90: mol_type = other DNA
atctggcgcttctatgtgattactctgagcgccatcaccagcgactatgtcgtagtgggtaaagctccctcttcggagggagcatcagag

SEQ ID NO: 2919 - DNA, 90 bp, synthetic construct
  misc_feature 1..90: note = engineered ribonucleic acid scaffold (ERS) sequence
  source 1..90: mol_type = other DNA
atctggcgcttctatttgattactctgagcgccatcaccagcgactatgtcgtagtgggtaaagctccctcttcggagggagcatcagag

SEQ ID NO: 2920 - DNA, 91 bp, synthetic construct
  misc_feature 1..91: note = engineered ribonucleic acid scaffold (ERS) sequence
  source 1..91: mol_type = other DNA
atctggcgcttctatcttgattactctgagcgccatcaccagcgactatgtcgtagtgggtaaagctccctcttcggagggagcatcagag

SEQ ID NO: 2921 - DNA, 90 bp, synthetic construct
  misc_feature 1..90: note = engineered ribonucleic acid scaffold (ERS) sequence
  source 1..90: mol_type = other DNA
atctggcgcttctatcagattactctgagcgccatcaccagcgactatgtcgtagtgggtaaagctccctcttcggagggagcatcagag

SEQ ID NO: 2922 - DNA, 90 bp, synthetic construct
  misc_feature 1..90: note = engineered ribonucleic acid scaffold (ERS) sequence
  source 1..90: mol_type = other DNA
atctggcgcttctatcggattactctgagcgccatcaccagcgactatgtcgtagtgggtaaagctccctcttcggagggagcatcagag

SEQ ID NO: 2923 - DNA, 91 bp, synthetic construct
  misc_feature 1..91: note = engineered ribonucleic acid scaffold (ERS) sequence
  source 1..91: mol_type = other DNA
atctggcgcttctatctgaattactctgagcgccatcaccagcgactatgtcgtagtgggtaaagctccctcttcggagggagcatcagag

SEQ ID NO: 2924 - DNA, 91 bp, synthetic construct
  misc_feature 1..91: note = engineered ribonucleic acid scaffold (ERS) sequence
  source 1..91: mol_type = other DNA
atctggcgcttctatctgtattactctgagcgccatcaccagcgactatgtcgtagtgggtaaagctccctcttcggagggagcatcagag

SEQ ID NO: 2925 - DNA, 90 bp, synthetic construct
  misc_feature 1..90: note = engineered ribonucleic acid scaffold (ERS) sequence
  source 1..90: mol_type = other DNA
atctggcgcttctatctggttactctgagcgccatcaccagcgactatgtcgtagtgggtaaagctccctcttcggagggagcatcagag

SEQ ID NO: 2926 - DNA, 90 bp, synthetic construct
  misc_feature 1..90: note = engineered ribonucleic acid scaffold (ERS) sequence
  source 1..90: mol_type = other DNA
atctggcgcttctatctgtttactctgagcgccatcaccagcgactatgtcgtagtgggtaaagctccctcttcggagggagcatcagag

SEQ ID NO: 2927 - DNA, 91 bp, synthetic construct
  misc_feature 1..91: note = engineered ribonucleic acid scaffold (ERS) sequence
  source 1..91: mol_type = other DNA
atctggcgcttctatctgatttactctgagcgccatcaccagcgactatgtcgtagtgggtaaagctccctcttcggagggagcatcagag

SEQ ID NO: 2928 - DNA, 90 bp, synthetic construct
  misc_feature 1..90: note = engineered ribonucleic acid scaffold (ERS) sequence
  source 1..90: mol_type = other DNA
atctggcgcttctatctgattgctctgagcgccatcaccagcgactatgtcgtagtgggtaaagctccctcttcggagggagcatcagag

SEQ ID NO: 2929 - DNA, 90 bp, synthetic construct
  misc_feature 1..90: note = engineered ribonucleic acid scaffold (ERS) sequence
  source 1..90: mol_type = other DNA
atggcgcttctatatctgattactctgagcgccatcaccagcgactatgtcgtagtgggtaaagctccctcttcggagggagcatcagag

SEQ ID NO: 2930 - DNA, 89 bp, synthetic construct
  misc_feature 1..89: note = engineered ribonucleic acid scaffold (ERS) sequence
  source 1..89: mol_type = other DNA
atggcgcttctaatctgattactctgagcgccatcaccagcgactatgtcgtagtgggtaaagctccctcttcggagggagcatcagag

SEQ ID NO: 2931 - DNA, 87 bp, synthetic construct
  misc_feature 1..87: note = engineered ribonucleic acid scaffold (ERS) sequence
  source 1..87: mol_type = other DNA
atggcgcttctactgattactctgagcgccatcaccagcgactatgtcgtagtgggtaaagctccctcttcggagggagcatcagag

SEQ ID NO: 2932 - DNA, 88 bp, synthetic construct
  misc_feature 1..88: note = engineered ribonucleic acid scaffold (ERS) sequence
  source 1..88: mol_type = other DNA
atggcgcttctaactgattactctgagcgccatcaccagcgactatgtcgtagtgggtaaagctccctcttcggagggagcatcagag

SEQ ID NO: 2933 - DNA, 88 bp, synthetic construct
  misc_feature 1..88: note = engineered ribonucleic acid scaffold (ERS) sequence
  source 1..88: mol_type = other DNA
atggcgcttctacctgattactctgagcgccatcaccagcgactatgtcgtagtgggtaaagctccctcttcggagggagcatcagag

SEQ ID NO: 2934 - DNA, 88 bp, synthetic construct
  misc_feature 1..88: note = engineered ribonucleic acid scaffold (ERS) sequence
  source 1..88: mol_type = other DNA
atggcgcttctagctgattactctgagcgccatcaccagcgactatgtcgtagtgggtaaagctccctcttcggagggagcatcagag

SEQ ID NO: 2935 - DNA, 90 bp, synthetic construct
  misc_feature 1..90: note = engineered ribonucleic acid scaffold (ERS) sequence
  source 1..90: mol_type = other DNA
atggcgcttctattactgattactctgagcgccatcaccagcgactatgtcgtagtgggtaaagctccctcttcggagggagcatcagag

SEQ ID NO: 2936 - DNA, 88 bp, synthetic construct
  misc_feature 1..88: note = engineered ribonucleic acid scaffold (ERS) sequence
  source 1..88: mol_type = other DNA
atggcgcttctatatgattactctgagcgccatcaccagcgactatgtcgtagtgggtaaagctccctcttcggagggagcatcagag

SEQ ID NO: 2937 - DNA, 88 bp, synthetic construct
  misc_feature 1..88: note = engineered ribonucleic acid scaffold (ERS) sequence
  source 1..88: mol_type = other DNA
atggcgcttctatgtgattactctgagcgccatcaccagcgactatgtcgtagtgggtaaagctccctcttcggagggagcatcagag

SEQ ID NO: 2938 - DNA, 88 bp, synthetic construct
  misc_feature 1..88: note = engineered ribonucleic acid scaffold (ERS) sequence
  source 1..88: mol_type = other DNA
atggcgcttctatttgattactctgagcgccatcaccagcgactatgtcgtagtgggtaaagctccctcttcggagggagcatcagag

SEQ ID NO: 2939 - DNA, 89 bp, synthetic construct
  misc_feature 1..89: note = engineered ribonucleic acid scaffold (ERS) sequence
  source 1..89: mol_type = other DNA
atggcgcttctatcttgattactctgagcgccatcaccagcgactatgtcgtagtgggtaaagctccctcttcggagggagcatcagag

SEQ ID NO: 2940 - DNA, 88 bp, synthetic construct
  misc_feature 1..88: note = engineered ribonucleic acid scaffold (ERS) sequence
  source 1..88: mol_type = other DNA
atggcgcttctatcagattactctgagcgccatcaccagcgactatgtcgtagtgggtaaagctccctcttcggagggagcatcagag

SEQ ID NO: 2941 - DNA, 88 bp, synthetic construct
  misc_feature 1..88: note = engineered ribonucleic acid scaffold (ERS) sequence
  source 1..88: mol_type = other DNA
atggcgcttctatcggattactctgagcgccatcaccagcgactatgtcgtagtgggtaaagctccctcttcggagggagcatcagag

SEQ ID NO: 2942 - DNA, 89 bp, synthetic construct
  misc_feature 1..89: note = engineered ribonucleic acid scaffold (ERS) sequence
  source 1..89: mol_type = other DNA
atggcgcttctatctgaattactctgagcgccatcaccagcgactatgtcgtagtgggtaaagctccctcttcggagggagcatcagag

SEQ ID NO: 2943 - DNA, 89 bp, synthetic construct
  misc_feature 1..89: note = engineered ribonucleic acid scaffold (ERS) sequence
  source 1..89: mol_type = other DNA
atggcgcttctatctgtattactctgagcgccatcaccagcgactatgtcgtagtgggtaaagctccctcttcggagggagcatcagag

SEQ ID NO: 2944 - DNA, 88 bp, synthetic construct
  misc_feature 1..88: note = engineered ribonucleic acid scaffold (ERS) sequence
  source 1..88: mol_type = other DNA
atggcgcttctatctggttactctgagcgccatcaccagcgactatgtcgtagtgggtaaagctccctcttcggagggagcatcagag

SEQ ID NO: 2945 - DNA, 88 bp, synthetic construct
  misc_feature 1..88: note = engineered ribonucleic acid scaffold (ERS) sequence
  source 1..88: mol_type = other DNA
atggcgcttctatctgtttactctgagcgccatcaccagcgactatgtcgtagtgggtaaagctccctcttcggagggagcatcagag

SEQ ID NO: 2946 - DNA, 89 bp, synthetic construct
  misc_feature 1..89: note = engineered ribonucleic acid scaffold (ERS) sequence
  source 1..89: mol_type = other DNA
atggcgcttctatctgatttactctgagcgccatcaccagcgactatgtcgtagtgggtaaagctccctcttcggagggagcatcagag

SEQ ID NO: 2947 - DNA, 89 bp, synthetic construct
  misc_feature 1..89: note = engineered ribonucleic acid scaffold (ERS) sequence
  source 1..89: mol_type = other DNA
aggcgcttctatatctgattactctgagcgccatcaccagcgactatgtcgtagtgggtaaagctccctcttcggagggagcatcagag

SEQ ID NO: 2948 - DNA, 88 bp, synthetic construct
  misc_feature 1..88: note = engineered ribonucleic acid scaffold (ERS) sequence
  source 1..88: mol_type = other DNA
aggcgcttctaatctgattactctgagcgccatcaccagcgactatgtcgtagtgggtaaagctccctcttcggagggagcatcagag

SEQ ID NO: 2949 - DNA, 86 bp, synthetic construct
  misc_feature 1..86: note = engineered ribonucleic acid scaffold (ERS) sequence
  source 1..86: mol_type = other DNA
aggcgcttctactgattactctgagcgccatcaccagcgactatgtcgtagtgggtaaagctccctcttcggagggagcatcagag

SEQ ID NO: 2950 - DNA, 87 bp, synthetic construct
  misc_feature 1..87: note = engineered ribonucleic acid scaffold (ERS) sequence
  source 1..87: mol_type = other DNA
aggcgcttctaactgattactctgagcgccatcaccagcgactatgtcgtagtgggtaaagctccctcttcggagggagcatcagag

SEQ ID NO: 2951 - DNA, 87 bp, synthetic construct
  misc_feature 1..87: note = engineered ribonucleic acid scaffold (ERS) sequence
  source 1..87: mol_type = other DNA
aggcgcttctacctgattactctgagcgccatcaccagcgactatgtcgtagtgggtaaagctccctcttcggagggagcatcagag

SEQ ID NO: 2952 - DNA, 87 bp, synthetic construct
  misc_feature 1..87: note = engineered ribonucleic acid scaffold (ERS) sequence
  source 1..87: mol_type = other DNA
aggcgcttctagctgattactctgagcgccatcaccagcgactatgtcgtagtgggtaaagctccctcttcggagggagcatcagag

SEQ ID NO: 2953 - DNA, 89 bp, synthetic construct
  misc_feature 1..89: note = engineered ribonucleic acid scaffold (ERS) sequence
  source 1..89: mol_type = other DNA
aggcgcttctattactgattactctgagcgccatcaccagcgactatgtcgtagtgggtaaagctccctcttcggagggagcatcagag

SEQ ID NO: 2954 - DNA, 87 bp, synthetic construct
  misc_feature 1..87: note = engineered ribonucleic acid scaffold (ERS) sequence
  source 1..87: mol_type = other DNA
aggcgcttctatatgattactctgagcgccatcaccagcgactatgtcgtagtgggtaaagctccctcttcggagggagcatcagag

SEQ ID NO: 2955 - DNA, 87 bp, synthetic construct
  misc_feature 1..87: note = engineered ribonucleic acid scaffold (ERS) sequence
  source 1..87: mol_type = other DNA
aggcgcttctatgtgattactctgagcgccatcaccagcgactatgtcgtagtgggtaaagctccctcttcggagggagcatcagag

SEQ ID NO: 2956 - DNA, 87 bp, synthetic construct
  misc_feature 1..87: note = engineered ribonucleic acid scaffold (ERS) sequence
  source 1..87: mol_type = other DNA
aggcgcttctatttgattactctgagcgccatcaccagcgactatgtcgtagtgggtaaagctccctcttcggagggagcatcagag

SEQ ID NO: 2957 - DNA, 88 bp, synthetic construct
  misc_feature 1..88: note = engineered ribonucleic acid scaffold (ERS) sequence
  source 1..88: mol_type = other DNA
aggcgcttctatcttgattactctgagcgccatcaccagcgactatgtcgtagtgggtaaagctccctcttcggagggagcatcagag

SEQ ID NO: 2958 - DNA, 87 bp, synthetic construct
  misc_feature 1..87: note = engineered ribonucleic acid scaffold (ERS) sequence
  source 1..87: mol_type = other DNA
aggcgcttctatcagattactctgagcgccatcaccagcgactatgtcgtagtgggtaaagctccctcttcggagggagcatcagag

SEQ ID NO: 2959 - DNA, 87 bp, synthetic construct
  misc_feature 1..87: note = engineered ribonucleic acid scaffold (ERS) sequence
  source 1..87: mol_type = other DNA
aggcgcttctatcggattactctgagcgccatcaccagcgactatgtcgtagtgggtaaagctccctcttcggagggagcatcagag

SEQ ID NO: 2960 - DNA, 88 bp, synthetic construct
  misc_feature 1..88: note = engineered ribonucleic acid scaffold (ERS) sequence
  source 1..88: mol_type = other DNA
aggcgcttctatctgaattactctgagcgccatcaccagcgactatgtcgtagtgggtaaagctccctcttcggagggagcatcagag

SEQ ID NO: 2961 - DNA, 88 bp, synthetic construct
  misc_feature 1..88: note = engineered ribonucleic acid scaffold (ERS) sequence
  source 1..88: mol_type = other DNA
aggcgcttctatctgtattactctgagcgccatcaccagcgactatgtcgtagtgggtaaagctccctcttcggagggagcatcagag

SEQ ID NO: 2962 - DNA, 87 bp, synthetic construct
  misc_feature 1..87: note = engineered ribonucleic acid scaffold (ERS) sequence
  source 1..87: mol_type = other DNA
aggcgcttctatctggttactctgagcgccatcaccagcgactatgtcgtagtgggtaaagctccctcttcggagggagcatcagag

SEQ ID NO: 2963 - DNA, 87 bp, synthetic construct
  misc_feature 1..87: note = engineered ribonucleic acid scaffold (ERS) sequence
  source 1..87: mol_type = other DNA
aggcgcttctatctgtttactctgagcgccatcaccagcgactatgtcgtagtgggtaaagctccctcttcggagggagcatcagag

SEQ ID NO: 2964 - DNA, 88 bp, synthetic construct
  misc_feature 1..88: note = engineered ribonucleic acid scaffold (ERS) sequence
  source 1..88: mol_type = other DNA
aggcgcttctatctgatttactctgagcgccatcaccagcgactatgtcgtagtgggtaaagctccctcttcggagggagcatcagag

SEQ ID NO: 2965 - DNA, 87 bp, synthetic construct
  misc_feature 1..87: note = engineered ribonucleic acid scaffold (ERS) sequence
  source 1..87: mol_type = other DNA
aggcgcttctatctgattgctctgagcgccatcaccagcgactatgtcgtagtgggtaaagctccctcttcggagggagcatcagag

SEQ ID NO: 2966 - DNA, 88 bp, synthetic construct
  misc_feature 1..88: note = engineered ribonucleic acid scaffold (ERS) sequence
  source 1..88: mol_type = other DNA
atggcgcttctatctgattgctctgagcgccatcaccagcgactatgtcgtagtgggtaaagctccctcttcggagggagcatcagag

SEQ ID NO: 2967 - DNA, 90 bp, synthetic construct
  misc_feature 1..90: note = engineered ribonucleic acid scaffold (ERS) sequence
  source 1..90: mol_type = other DNA
atggtgcttctatatctgattactctgagcgccatcaccagcgactatgtcgtagtgggtaaagctccctcttcggagggagcatcagag

SEQ ID NO: 2968 - DNA, 89 bp, synthetic construct
  misc_feature 1..89: note = engineered ribonucleic acid scaffold (ERS) sequence
  source 1..89: mol_type = other DNA
atggtgcttctaatctgattactctgagcgccatcaccagcgactatgtcgtagtgggtaaagctccctcttcggagggagcatcagag

SEQ ID NO: 2969 - DNA, 87 bp, synthetic construct
  misc_feature 1..87: note = engineered ribonucleic acid scaffold (ERS) sequence
  source 1..87: mol_type = other DNA
atggtgcttctactgattactctgagcgccatcaccagcgactatgtcgtagtgggtaaagctccctcttcggagggagcatcagag

SEQ ID NO: 2970 - DNA, 88 bp, synthetic construct
  misc_feature 1..88: note = engineered ribonucleic acid scaffold (ERS) sequence
  source 1..88: mol_type = other DNA
atggtgcttctaactgattactctgagcgccatcaccagcgactatgtcgtagtgggtaaagctccctcttcggagggagcatcagag

SEQ ID NO: 2971 - DNA, 88 bp, synthetic construct
  misc_feature 1..88: note = engineered ribonucleic acid scaffold (ERS) sequence
  source 1..88: mol_type = other DNA
atggtgcttctacctgattactctgagcgccatcaccagcgactatgtcgtagtgggtaaagctccctcttcggagggagcatcagag

SEQ ID NO: 2972 - DNA, 88 bp, synthetic construct
  misc_feature 1..88: note = engineered ribonucleic acid scaffold (ERS) sequence
  source 1..88: mol_type = other DNA
atggtgcttctagctgattactctgagcgccatcaccagcgactatgtcgtagtgggtaaagctccctcttcggagggagcatcagag

SEQ ID NO: 2973 - DNA, 90 bp, synthetic construct
  misc_feature 1..90: note = engineered ribonucleic acid scaffold (ERS) sequence
  source 1..90: mol_type = other DNA
atggtgcttctattactgattactctgagcgccatcaccagcgactatgtcgtagtgggtaaagctccctcttcggagggagcatcagag

SEQ ID NO: 2974 - DNA, 88 bp, synthetic construct
  misc_feature 1..88: note = engineered ribonucleic acid scaffold (ERS) sequence
  source 1..88: mol_type = other DNA
atggtgcttctatatgattactctgagcgccatcaccagcgactatgtcgtagtgggtaaagctccctcttcggagggagcatcagag

SEQ ID NO: 2975 - DNA, 88 bp, synthetic construct
  misc_feature 1..88: note = engineered ribonucleic acid scaffold (ERS) sequence
  source 1..88: mol_type = other DNA
atggtgcttctatgtgattactctgagcgccatcaccagcgactatgtcgtagtgggtaaagctccctcttcggagggagcatcagag

SEQ ID NO: 2976 - DNA, 88 bp, synthetic construct
  misc_feature 1..88: note = engineered ribonucleic acid scaffold (ERS) sequence
  source 1..88: mol_type = other DNA
atggtgcttctatttgattactctgagcgccatcaccagcgactatgtcgtagtgggtaaagctccctcttcggagggagcatcagag

SEQ ID NO: 2977 - DNA, 89 bp, synthetic construct
  misc_feature 1..89: note = engineered ribonucleic acid scaffold (ERS) sequence
  source 1..89: mol_type = other DNA
atggtgcttctatcttgattactctgagcgccatcaccagcgactatgtcgtagtgggtaaagctccctcttcggagggagcatcagag

SEQ ID NO: 2978 - DNA, 88 bp, synthetic construct
  misc_feature 1..88: note = engineered ribonucleic acid scaffold (ERS) sequence
  source 1..88: mol_type = other DNA
atggtgcttctatcagattactctgagcgccatcaccagcgactatgtcgtagtgggtaaagctccctcttcggagggagcatcagag

SEQ ID NO: 2979 - DNA, 88 bp, synthetic construct
  misc_feature 1..88: note = engineered ribonucleic acid scaffold (ERS) sequence
  source 1..88: mol_type = other DNA
atggtgcttctatcggattactctgagcgccatcaccagcgactatgtcgtagtgggtaaagctccctcttcggagggagcatcagag

SEQ ID NO: 2980 - DNA, 89 bp, synthetic construct
  misc_feature 1..89: note = engineered ribonucleic acid scaffold (ERS) sequence
  source 1..89: mol_type = other DNA
atggtgcttctatctgaattactctgagcgccatcaccagcgactatgtcgtagtgggtaaagctccctcttcggagggagcatcagag

SEQ ID NO: 2981 - DNA, 89 bp, synthetic construct
  misc_feature 1..89: note = engineered ribonucleic acid scaffold (ERS) sequence
  source 1..89: mol_type = other DNA
atggtgcttctatctgtattactctgagcgccatcaccagcgactatgtcgtagtgggtaaagctccctcttcggagggagcatcagag

SEQ ID NO: 2982 - DNA, 88 bp, synthetic construct
  misc_feature 1..88: note = engineered ribonucleic acid scaffold (ERS) sequence
  source 1..88: mol_type = other DNA
atggtgcttctatctggttactctgagcgccatcaccagcgactatgtcgtagtgggtaaagctccctcttcggagggagcatcagag

SEQ ID NO: 2983 - DNA, 88 bp, synthetic construct
  misc_feature 1..88: note = engineered ribonucleic acid scaffold (ERS) sequence
  source 1..88: mol_type = other DNA
atggtgcttctatctgtttactctgagcgccatcaccagcgactatgtcgtagtgggtaaagctccctcttcggagggagcatcagag

SEQ ID NO: 2984 - DNA, 89 bp, synthetic construct
  misc_feature 1..89: note = engineered ribonucleic acid scaffold (ERS) sequence
  source 1..89: mol_type = other DNA
atggtgcttctatctgatttactctgagcgccatcaccagcgactatgtcgtagtgggtaaagctccctcttcggagggagcatcagag

SEQ ID NO: 2985 - DNA, 88 bp, synthetic construct
  misc_feature 1..88: note = engineered ribonucleic acid scaffold (ERS) sequence
  source 1..88: mol_type = other DNA
atggtgcttctatctgattgctctgagcgccatcaccagcgactatgtcgtagtgggtaaagctccctcttcggagggagcatcagag

SEQ ID NO: 2986 - DNA, 91 bp, synthetic construct
  misc_feature 1..91: note = engineered ribonucleic acid scaffold (ERS) sequence
  source 1..91: mol_type = other DNA
aatggcgcttctatatctgattactctgagcgccatcaccagcgactatgtcgtagtgggtaaagctccctcttcggagggagcatcagag

SEQ ID NO: 2987 - DNA, 90 bp, synthetic construct
  misc_feature 1..90: note = engineered ribonucleic acid scaffold (ERS) sequence
  source 1..90: mol_type = other DNA
aatggcgcttctaatctgattactctgagcgccatcaccagcgactatgtcgtagtgggtaaagctccctcttcggagggagcatcagag

SEQ ID NO: 2988 - DNA, 88 bp, synthetic construct
  misc_feature 1..88: note = engineered ribonucleic acid scaffold (ERS) sequence
  source 1..88: mol_type = other DNA
aatggcgcttctactgattactctgagcgccatcaccagcgactatgtcgtagtgggtaaagctccctcttcggagggagcatcagag

SEQ ID NO: 2989 - DNA, 89 bp, synthetic construct
  misc_feature 1..89: note = engineered ribonucleic acid scaffold (ERS) sequence
  source 1..89: mol_type = other DNA
aatggcgcttctaactgattactctgagcgccatcaccagcgactatgtcgtagtgggtaaagctccctcttcggagggagcatcagag

SEQ ID NO: 2990 - DNA, 89 bp, synthetic construct
  misc_feature 1..89: note = engineered ribonucleic acid scaffold (ERS) sequence
  source 1..89: mol_type = other DNA
aatggcgcttctacctgattactctgagcgccatcaccagcgactatgtcgtagtgggtaaagctccctcttcggagggagcatcagag

SEQ ID NO: 2991 - DNA, 89 bp, synthetic construct
  misc_feature 1..89: note = engineered ribonucleic acid scaffold (ERS) sequence
  source 1..89: mol_type = other DNA
aatggcgcttctagctgattactctgagcgccatcaccagcgactatgtcgtagtgggtaaagctccctcttcggagggagcatcagag

SEQ ID NO: 2992 - DNA, 91 bp, synthetic construct
  misc_feature 1..91: note = engineered ribonucleic acid scaffold (ERS) sequence
  source 1..91: mol_type = other DNA
aatggcgcttctattactgattactctgagcgccatcaccagcgactatgtcgtagtgggtaaagctccctcttcggagggagcatcagag

SEQ ID NO: 2993 - DNA, 89 bp, synthetic construct
  misc_feature 1..89: note = engineered ribonucleic acid scaffold (ERS) sequence
  source 1..89: mol_type = other DNA
aatggcgcttctatatgattactctgagcgccatcaccagcgactatgtcgtagtgggtaaagctccctcttcggagggagcatcagag

SEQ ID NO: 2994 - DNA, 89 bp, synthetic construct
  misc_feature 1..89: note = engineered ribonucleic acid scaffold (ERS) sequence
  source 1..89: mol_type = other DNA
aatggcgcttctatgtgattactctgagcgccatcaccagcgactatgtcgtagtgggtaaagctccctcttcggagggagcatcagag

SEQ ID NO: 2995 - DNA, 89 bp, synthetic construct
  misc_feature 1..89: note = engineered ribonucleic acid scaffold (ERS) sequence
  source 1..89: mol_type = other DNA
aatggcgcttctatttgattactctgagcgccatcaccagcgactatgtcgtagtgggtaaagctccctcttcggagggagcatcagag

SEQ ID NO: 2996 - DNA, 90 bp, synthetic construct
  misc_feature 1..90: note = engineered ribonucleic acid scaffold (ERS) sequence
  source 1..90: mol_type = other DNA
aatggcgcttctatcttgattactctgagcgccatcaccagcgactatgtcgtagtgggtaaagctccctcttcggagggagcatcagag

SEQ ID NO: 2997 - DNA, 89 bp, synthetic construct
  misc_feature 1..89: note = engineered ribonucleic acid scaffold (ERS) sequence
  source 1..89: mol_type = other DNA
aatggcgcttctatcagattactctgagcgccatcaccagcgactatgtcgtagtgggtaaagctccctcttcggagggagcatcagag

SEQ ID NO: 2998 - DNA, 89 bp, synthetic construct
  misc_feature 1..89: note = engineered ribonucleic acid scaffold (ERS) sequence
  source 1..89: mol_type = other DNA
aatggcgcttctatcggattactctgagcgccatcaccagcgactatgtcgtagtgggtaaagctccctcttcggagggagcatcagag

SEQ ID NO: 2999 - DNA, 90 bp, synthetic construct
  misc_feature 1..90: note = engineered ribonucleic acid scaffold (ERS) sequence
  source 1..90: mol_type = other DNA
aatggcgcttctatctgaattactctgagcgccatcaccagcgactatgtcgtagtgggtaaagctccctcttcggagggagcatcagag

SEQ ID NO: 3000 - DNA, 90 bp, synthetic construct
  misc_feature 1..90: note = engineered ribonucleic acid scaffold (ERS) sequence
  source 1..90: mol_type = other DNA
aatggcgcttctatctgtattactctgagcgccatcaccagcgactatgtcgtagtgggtaaagctccctcttcggagggagcatcagag

SEQ ID NO: 3001 - DNA, 89 bp, synthetic construct
  misc_feature 1..89: note = engineered ribonucleic acid scaffold (ERS) sequence
  source 1..89: mol_type = other DNA
aatggcgcttctatctggttactctgagcgccatcaccagcgactatgtcgtagtgggtaaagctccctcttcggagggagcatcagag

SEQ ID NO: 3002 - DNA, 89 bp, synthetic construct
  misc_feature 1..89: note = engineered ribonucleic acid scaffold (ERS) sequence
  source 1..89: mol_type = other DNA
aatggcgcttctatctgtttactctgagcgccatcaccagcgactatgtcgtagtgggtaaagctccctcttcggagggagcatcagag

SEQ ID NO: 3003 - DNA, 90 bp, synthetic construct
  misc_feature 1..90: note = engineered ribonucleic acid scaffold (ERS) sequence
  source 1..90: mol_type = other DNA
aatggcgcttctatctgatttactctgagcgccatcaccagcgactatgtcgtagtgggtaaagctccctcttcggagggagcatcagag

SEQ ID NO: 3004 - DNA, 89 bp, synthetic construct
  misc_feature 1..89: note = engineered ribonucleic acid scaffold (ERS) sequence
  source 1..89: mol_type = other DNA
aatggcgcttctatctgattgctctgagcgccatcaccagcgactatgtcgtagtgggtaaagctccctcttcggagggagcatcagag

SEQ ID NO: 3005 - DNA, 91 bp, synthetic construct
  misc_feature 1..91: note = engineered ribonucleic acid scaffold (ERS) sequence
  source 1..91: mol_type = other DNA
agtggcgcttctatatctgattactctgagcgccatcaccagcgactatgtcgtagtgggtaaagctccctcttcggagggagcatcagag

SEQ ID NO: 3006 - DNA, 90 bp, synthetic construct
  misc_feature 1..90: note = engineered ribonucleic acid scaffold (ERS) sequence
  source 1..90: mol_type = other DNA
agtggcgcttctaatctgattactctgagcgccatcaccagcgactatgtcgtagtgggtaaagctccctcttcggagggagcatcagag

SEQ ID NO: 3007 - DNA, 88 bp, synthetic construct
  misc_feature 1..88: note = engineered ribonucleic acid scaffold (ERS) sequence
  source 1..88: mol_type = other DNA
agtggcgcttctactgattactctgagcgccatcaccagcgactatgtcgtagtgggtaaagctccctcttcggagggagcatcagag

SEQ ID NO: 3008 - DNA, 89 bp, synthetic construct
  misc_feature 1..89: note = engineered ribonucleic acid scaffold (ERS) sequence
  source 1..89: mol_type = other DNA
agtggcgcttctaactgattactctgagcgccatcaccagcgactatgtcgtagtgggtaaagctccctcttcggagggagcatcagag

SEQ ID NO: 3009 - DNA, 89 bp, synthetic construct
  misc_feature 1..89: note = engineered ribonucleic acid scaffold (ERS) sequence
  source 1..89: mol_type = other DNA
agtggcgcttctacctgattactctgagcgccatcaccagcgactatgtcgtagtgggtaaagctccctcttcggagggagcatcagag

SEQ ID NO: 3010 - DNA, 89 bp, synthetic construct
  misc_feature 1..89: note = engineered ribonucleic acid scaffold (ERS) sequence
  source 1..89: mol_type = other DNA
agtggcgcttctagctgattactctgagcgccatcaccagcgactatgtcgtagtgggtaaagctccctcttcggagggagcatcagag

SEQ ID NO: 3011 - DNA, 91 bp, synthetic construct
  misc_feature 1..91: note = engineered ribonucleic acid scaffold (ERS) sequence
  source 1..91: mol_type = other DNA
agtggcgcttctattactgattactctgagcgccatcaccagcgactatgtcgtagtgggtaaagctccctcttcggagggagcatcagag

SEQ ID NO: 3012 - DNA, 89 bp, synthetic construct
  misc_feature 1..89: note = engineered ribonucleic acid scaffold (ERS) sequence
  source 1..89: mol_type = other DNA
agtggcgcttctatatgattactctgagcgccatcaccagcgactatgtcgtagtgggtaaagctccctcttcggagggagcatcagag

SEQ ID NO: 3013 - DNA, 89 bp, synthetic construct
  misc_feature 1..89: note = engineered ribonucleic acid scaffold (ERS) sequence
  source 1..89: mol_type = other DNA
agtggcgcttctatgtgattactctgagcgccatcaccagcgactatgtcgtagtgggtaaagctccctcttcggagggagcatcagag

SEQ ID NO: 3014 - DNA, 89 bp, synthetic construct
  misc_feature 1..89: note = engineered ribonucleic acid scaffold (ERS) sequence
  source 1..89: mol_type = other DNA
agtggcgcttctatttgattactctgagcgccatcaccagcgactatgtcgtagtgggtaaagctccctcttcggagggagcatcagag

SEQ ID NO: 3015 - DNA, 90 bp, synthetic construct
  misc_feature 1..90: note = engineered ribonucleic acid scaffold (ERS) sequence
  source 1..90: mol_type = other DNA
agtggcgcttctatcttgattactctgagcgccatcaccagcgactatgtcgtagtgggtaaagctccctcttcggagggagcatcagag

SEQ ID NO: 3016 - DNA, 89 bp, synthetic construct
  misc_feature 1..89: note = engineered ribonucleic acid scaffold (ERS) sequence
  source 1..89: mol_type = other DNA
agtggcgcttctatcagattactctgagcgccatcaccagcgactatgtcgtagtgggtaaagctccctcttcggagggagcatcagag

SEQ ID NO: 3017 - DNA, 89 bp, synthetic construct
  misc_feature 1..89: note = engineered ribonucleic acid scaffold (ERS) sequence
  source 1..89: mol_type = other DNA
agtggcgcttctatcggattactctgagcgccatcaccagcgactatgtcgtagtgggtaaagctccctcttcggagggagcatcagag

SEQ ID NO: 3018 - DNA, 90 bp, synthetic construct
  misc_feature 1..90: note = engineered ribonucleic acid scaffold (ERS) sequence
  source 1..90: mol_type = other DNA
agtggcgcttctatctgaattactctgagcgccatcaccagcgactatgtcgtagtgggtaaagctccctcttcggagggagcatcagag

SEQ ID NO: 3019 - DNA, 90 bp, synthetic construct
  misc_feature 1..90: note = engineered ribonucleic acid scaffold (ERS) sequence
  source 1..90: mol_type = other DNA
agtggcgcttctatctgtattactctgagcgccatcaccagcgactatgtcgtagtgggtaaagctccctcttcggagggagcatcagag

SEQ ID NO: 3020 - DNA, 89 bp, synthetic construct
  misc_feature 1..89: note = engineered ribonucleic acid scaffold (ERS) sequence
  source 1..89: mol_type = other DNA
agtggcgcttctatctggttactctgagcgccatcaccagcgactatgtcgtagtgggtaaagctccctcttcggagggagcatcagag

SEQ ID NO: 3021 - DNA, 89 bp, synthetic construct
  misc_feature 1..89: note = engineered ribonucleic acid scaffold (ERS) sequence
  source 1..89: mol_type = other DNA
agtggcgcttctatctgtttactctgagcgccatcaccagcgactatgtcgtagtgggtaaagctccctcttcggagggagcatcagag

SEQ ID NO: 3022 - DNA, 90 bp, synthetic construct
  misc_feature 1..90: note = engineered ribonucleic acid scaffold (ERS) sequence
  source 1..90: mol_type = other DNA
agtggcgcttctatctgatttactctgagcgccatcaccagcgactatgtcgtagtgggtaaagctccctcttcggagggagcatcagag

SEQ ID NO: 3023 - DNA, 89 bp, synthetic construct
  misc_feature 1..89: note = engineered ribonucleic acid scaffold (ERS) sequence
  source 1..89: mol_type = other DNA
agtggcgcttctatctgattgctctgagcgccatcaccagcgactatgtcgtagtgggtaaagctccctcttcggagggagcatcagag

SEQ ID NO: 3024 - DNA, 90 bp, synthetic construct
  misc_feature 1..90: note = engineered ribonucleic acid scaffold (ERS) sequence
  source 1..90: mol_type = other DNA
acggcgcttctatatctgattactctgagcgccatcaccagcgactatgtcgtagtgggtaaagctccctcttcggagggagcatcagag

SEQ ID NO: 3025 - DNA, 89 bp, synthetic construct
  misc_feature 1..89: note = engineered ribonucleic acid scaffold (ERS) sequence
  source 1..89: mol_type = other DNA
acggcgcttctaatctgattactctgagcgccatcaccagcgactatgtcgtagtgggtaaagctccctcttcggagggagcatcagag

SEQ ID NO: 3026 - DNA, 87 bp, synthetic construct
  misc_feature 1..87: note = engineered ribonucleic acid scaffold (ERS) sequence
  source 1..87: mol_type = other DNA
acggcgcttctactgattactctgagcgccatcaccagcgactatgtcgtagtgggtaaagctccctcttcggagggagcatcagag

SEQ ID NO: 3027 - DNA, 88 bp, synthetic construct
  misc_feature 1..88: note = engineered ribonucleic acid scaffold (ERS) sequence
  source 1..88: mol_type = other DNA
acggcgcttctaactgattactctgagcgccatcaccagcgactatgtcgtagtgggtaaagctccctcttcggagggagcatcagag

SEQ ID NO: 3028 - DNA, 88 bp, synthetic construct
  misc_feature 1..88: note = engineered ribonucleic acid scaffold (ERS) sequence
  source 1..88: mol_type = other DNA
acggcgcttctacctgattactctgagcgccatcaccagcgactatgtcgtagtgggtaaagctccctcttcggagggagcatcagag

SEQ ID NO: 3029 - DNA, 88 bp, synthetic construct
  misc_feature 1..88: note = engineered ribonucleic acid scaffold (ERS) sequence
  source 1..88: mol_type = other DNA
acggcgcttctagctgattactctgagcgccatcaccagcgactatgtcgtagtgggtaaagctccctcttcggagggagcatcagag

SEQ ID NO: 3030 - DNA, 90 bp, synthetic construct
  misc_feature 1..90: note = engineered ribonucleic acid scaffold (ERS) sequence
  source 1..90: mol_type = other DNA
acggcgcttctattactgattactctgagcgccatcaccagcgactatgtcgtagtgggtaaagctccctcttcggagggagcatcagag

SEQ ID NO: 3031 - DNA, 88 bp, synthetic construct
  misc_feature 1..88: note = engineered ribonucleic acid scaffold (ERS) sequence
  source 1..88: mol_type = other DNA
acggcgcttctatatgattactctgagcgccatcaccagcgactatgtcgtagtgggtaaagctccctcttcggagggagcatcagag

SEQ ID NO: 3032 - DNA, 88 bp, synthetic construct
  misc_feature 1..88: note = engineered ribonucleic acid scaffold (ERS) sequence
  source 1..88: mol_type = other DNA
acggcgcttctatgtgattactctgagcgccatcaccagcgactatgtcgtagtgggtaaagctccctcttcggagggagcatcagag

SEQ ID NO: 3033 - DNA, 88 bp, synthetic construct
  misc_feature 1..88: note = engineered ribonucleic acid scaffold (ERS) sequence
  source 1..88: mol_type = other DNA
acggcgcttctatttgattactctgagcgccatcaccagcgactatgtcgtagtgggtaaagctccctcttcggagggagcatcagag

SEQ ID NO: 3034 - DNA, 89 bp, synthetic construct
  misc_feature 1..89: note = engineered ribonucleic acid scaffold (ERS) sequence
  source 1..89: mol_type = other DNA
acggcgcttctatcttgattactctgagcgccatcaccagcgactatgtcgtagtgggtaaagctccctcttcggagggagcatcagag

SEQ ID NO: 3035 - DNA, 88 bp, synthetic construct
  misc_feature 1..88: note = engineered ribonucleic acid scaffold (ERS) sequence
  source 1..88: mol_type = other DNA
acggcgcttctatcagattactctgagcgccatcaccagcgactatgtcgtagtgggtaaagctccctcttcggagggagcatcagag

SEQ ID NO: 3036 - DNA, 88 bp, synthetic construct
  misc_feature 1..88: note = engineered ribonucleic acid scaffold (ERS) sequence
  source 1..88: mol_type = other DNA
acggcgcttctatcggattactctgagcgccatcaccagcgactatgtcgtagtgggtaaagctccctcttcggagggagcatcagag

SEQ ID NO: 3037 - DNA, 89 bp, synthetic construct
  misc_feature 1..89: note = engineered ribonucleic acid scaffold (ERS) sequence
  source 1..89: mol_type = other DNA
acggcgcttctatctgaattactctgagcgccatcaccagcgactatgtcgtagtgggtaaagctccctcttcggagggagcatcagag

SEQ ID NO: 3038 - DNA, 89 bp, synthetic construct
  misc_feature 1..89: note = engineered ribonucleic acid scaffold (ERS) sequence
  source 1..89: mol_type = other DNA
acggcgcttctatctgtattactctgagcgccatcaccagcgactatgtcgtagtgggtaaagctccctcttcggagggagcatcagag

SEQ ID NO: 3039 - DNA, 88 bp, synthetic construct
  misc_feature 1..88: note = engineered ribonucleic acid scaffold (ERS) sequence
  source 1..88: mol_type = other DNA
acggcgcttctatctggttactctgagcgccatcaccagcgactatgtcgtagtgggtaaagctccctcttcggagggagcatcagag

SEQ ID NO: 3040 - DNA, 88 bp, synthetic construct
  misc_feature 1..88: note = engineered ribonucleic acid scaffold (ERS) sequence
  source 1..88: mol_type = other DNA
acggcgcttctatctgtttactctgagcgccatcaccagcgactatgtcgtagtgggtaaagctccctcttcggagggagcatcagag

SEQ ID NO: 3041 - DNA, 89 bp, synthetic construct
  misc_feature 1..89: note = engineered ribonucleic acid scaffold (ERS) sequence
  source 1..89: mol_type = other DNA
acggcgcttctatctgatttactctgagcgccatcaccagcgactatgtcgtagtgggtaaagctccctcttcggagggagcatcagag

SEQ ID NO: 3042 - DNA, 88 bp, synthetic construct
  misc_feature 1..88: note = engineered ribonucleic acid scaffold (ERS) sequence
  source 1..88: mol_type = other DNA
acggcgcttctatctgattgctctgagcgccatcaccagcgactatgtcgtagtgggtaaagctccctcttcggagggagcatcagag

SEQ ID NO: 3043 - DNA, 91 bp, synthetic construct
  misc_feature 1..91: note = engineered ribonucleic acid scaffold (ERS) sequence
  source 1..91: mol_type = other DNA
acaggcgcttctatatctgattactctgagcgccatcaccagcgactatgtcgtagtgggtaaagctccctcttcggagggagcatcagag

SEQ ID NO: 3044 - DNA, 90 bp, synthetic construct
  misc_feature 1..90: note = engineered ribonucleic acid scaffold (ERS) sequence
  source 1..90: mol_type = other DNA
acaggcgcttctaatctgattactctgagcgccatcaccagcgactatgtcgtagtgggtaaagctccctcttcggagggagcatcagag

SEQ ID NO: 3045 - DNA, 88 bp, synthetic construct
  misc_feature 1..88: note = engineered ribonucleic acid scaffold (ERS) sequence
  source 1..88: mol_type = other DNA
acaggcgcttctactgattactctgagcgccatcaccagcgactatgtcgtagtgggtaaagctccctcttcggagggagcatcagag

SEQ ID NO: 3046 - DNA, 89 bp, synthetic construct
  misc_feature 1..89: note = engineered ribonucleic acid scaffold (ERS) sequence
  source 1..89: mol_type = other DNA
acaggcgcttctaactgattactctgagcgccatcaccagcgactatgtcgtagtgggtaaagctccctcttcggagggagcatcagag

SEQ ID NO: 3047 - DNA, 89 bp, synthetic construct
  misc_feature 1..89: note = engineered ribonucleic acid scaffold (ERS) sequence
  source 1..89: mol_type = other DNA
acaggcgcttctacctgattactctgagcgccatcaccagcgactatgtcgtagtgggtaaagctccctcttcggagggagcatcagag

SEQ ID NO: 3048 - DNA, 89 bp, synthetic construct
  misc_feature 1..89: note = engineered ribonucleic acid scaffold (ERS) sequence
  source 1..89: mol_type = other DNA
acaggcgcttctagctgattactctgagcgccatcaccagcgactatgtcgtagtgggtaaagctccctcttcggagggagcatcagag

SEQ ID NO: 3049 - DNA, 91 bp, synthetic construct
  misc_feature 1..91: note = engineered ribonucleic acid scaffold (ERS) sequence
  source 1..91: mol_type = other DNA
acaggcgcttctattactgattactctgagcgccatcaccagcgactatgtcgtagtgggtaaagctccctcttcggagggagcatcagag

SEQ ID NO: 3050 - DNA, 89 bp, synthetic construct
  misc_feature 1..89: note = engineered ribonucleic acid scaffold (ERS) sequence
  source 1..89: mol_type = other DNA
acaggcgcttctatatgattactctgagcgccatcaccagcgactatgtcgtagtgggtaaagctccctcttcggagggagcatcagag

SEQ ID NO: 3051 - DNA, 89 bp, synthetic construct
  misc_feature 1..89: note = engineered ribonucleic acid scaffold (ERS) sequence
  source 1..89: mol_type = other DNA
acaggcgcttctatgtgattactctgagcgccatcaccagcgactatgtcgtagtgggtaaagctccctcttcggagggagcatcagag

SEQ ID NO: 3052 - DNA, 89 bp, synthetic construct
  misc_feature 1..89: note = engineered ribonucleic acid scaffold (ERS) sequence
  source 1..89: mol_type = other DNA
acaggcgcttctatttgattactctgagcgccatcaccagcgactatgtcgtagtgggtaaagctccctcttcggagggagcatcagag

SEQ ID NO: 3053 - DNA, 90 bp, synthetic construct
  misc_feature 1..90: note = engineered ribonucleic acid scaffold (ERS) sequence
  source 1..90: mol_type = other DNA
acaggcgcttctatcttgattactctgagcgccatcaccagcgactatgtcgtagtgggtaaagctccctcttcggagggagcatcagag

SEQ ID NO: 3054 - DNA, 89 bp, synthetic construct
  misc_feature 1..89: note = engineered ribonucleic acid scaffold (ERS) sequence
  source 1..89: mol_type = other DNA
acaggcgcttctatcagattactctgagcgccatcaccagcgactatgtcgtagtgggtaaagctccctcttcggagggagcatcagag

SEQ ID NO: 3055 - DNA, 89 bp, synthetic construct
  misc_feature 1..89: note = engineered ribonucleic acid scaffold (ERS) sequence
  source 1..89: mol_type = other DNA
acaggcgcttctatcggattactctgagcgccatcaccagcgactatgtcgtagtgggtaaagctccctcttcggagggagcatcagag

SEQ ID NO: 3056 - DNA, 90 bp, synthetic construct
  misc_feature 1..90: note = engineered ribonucleic acid scaffold (ERS) sequence
  source 1..90: mol_type = other DNA
acaggcgcttctatctgaattactctgagcgccatcaccagcgactatgtcgtagtgggtaaagctccctcttcggagggagcatcagag

SEQ ID NO: 3057 - DNA, 90 bp, synthetic construct
  misc_feature 1..90: note = engineered ribonucleic acid scaffold (ERS) sequence
  source 1..90: mol_type = other DNA
acaggcgcttctatctgtattactctgagcgccatcaccagcgactatgtcgtagtgggtaaagctccctcttcggagggagcatcagag

SEQ ID NO: 3058 - DNA, 89 bp, synthetic construct
  misc_feature 1..89: note = engineered ribonucleic acid scaffold (ERS) sequence
  source 1..89: mol_type = other DNA
acaggcgcttctatctggttactctgagcgccatcaccagcgactatgtcgtagtgggtaaagctccctcttcggagggagcatcagag

SEQ ID NO: 3059 - DNA, 89 bp, synthetic construct
  misc_feature 1..89: note = engineered ribonucleic acid scaffold (ERS) sequence
  source 1..89: mol_type = other DNA
acaggcgcttctatctgtttactctgagcgccatcaccagcgactatgtcgtagtgggtaaagctccctcttcggagggagcatcagag

SEQ ID NO: 3060 - DNA, 90 bp, synthetic construct
  misc_feature 1..90: note = engineered ribonucleic acid scaffold (ERS) sequence
  source 1..90: mol_type = other DNA
acaggcgcttctatctgatttactctgagcgccatcaccagcgactatgtcgtagtgggtaaagctccctcttcggagggagcatcagag

SEQ ID NO: 3061 - DNA, 89 bp, synthetic construct
  misc_feature 1..89: note = engineered ribonucleic acid scaffold (ERS) sequence
  source 1..89: mol_type = other DNA
acaggcgcttctatctgattgctctgagcgccatcaccagcgactatgtcgtagtgggtaaagctccctcttcggagggagcatcagag

SEQ ID NO: 3062 - DNA, 91 bp, synthetic construct
  misc_feature 1..91: note = engineered ribonucleic acid scaffold (ERS) sequence
  source 1..91: mol_type = other DNA
acgggcgcttctatatctgattactctgagcgccatcaccagcgactatgtcgtagtgggtaaagctccctcttcggagggagcatcagag

SEQ ID NO: 3063 - DNA, 90 bp, synthetic construct
  misc_feature 1..90: note = engineered ribonucleic acid scaffold (ERS) sequence
  source 1..90: mol_type = other DNA
acgggcgcttctaatctgattactctgagcgccatcaccagcgactatgtcgtagtgggtaaagctccctcttcggagggagcatcagag

SEQ ID NO: 3064 - DNA, 88 bp, synthetic construct
  misc_feature 1..88: note = engineered ribonucleic acid scaffold (ERS) sequence
  source 1..88: mol_type = other DNA
acgggcgcttctactgattactctgagcgccatcaccagcgactatgtcgtagtgggtaaagctccctcttcggagggagcatcagag

SEQ ID NO: 3065 - DNA, 89 bp, synthetic construct
  misc_feature 1..89: note = engineered ribonucleic acid scaffold (ERS) sequence
  source 1..89: mol_type = other DNA
acgggcgcttctaactgattactctgagcgccatcaccagcgactatgtcgtagtgggtaaagctccctcttcggagggagcatcagag

SEQ ID NO: 3066 - DNA, 89 bp, synthetic construct
  misc_feature 1..89: note = engineered ribonucleic acid scaffold (ERS) sequence
  source 1..89: mol_type = other DNA
acgggcgcttctacctgattactctgagcgccatcaccagcgactatgtcgtagtgggtaaagctccctcttcggagggagcatcagag

SEQ ID NO: 3067 - DNA, 89 bp, synthetic construct
  misc_feature 1..89: note = engineered ribonucleic acid scaffold (ERS) sequence
  source 1..89: mol_type = other DNA
acgggcgcttctagctgattactctgagcgccatcaccagcgactatgtcgtagtgggtaaagctccctcttcggagggagcatcagag

SEQ ID NO: 3068 - DNA, 91 bp, synthetic construct
  misc_feature 1..91: note = engineered ribonucleic acid scaffold (ERS) sequence
  source 1..91: mol_type = other DNA
acgggcgcttctattactgattactctgagcgccatcaccagcgactatgtcgtagtgggtaaagctccctcttcggagggagcatcagag

SEQ ID NO: 3069 - DNA, 89 bp, synthetic construct
  misc_feature 1..89: note = engineered ribonucleic acid scaffold (ERS) sequence
  source 1..89: mol_type = other DNA
acgggcgcttctatatgattactctgagcgccatcaccagcgactatgtcgtagtgggtaaagctccctcttcggagggagcatcagag

SEQ ID NO: 3070 - DNA, 89 bp, synthetic construct
  misc_feature 1..89: note = engineered ribonucleic acid scaffold (ERS) sequence
  source 1..89: mol_type = other DNA
acgggcgcttctatgtgattactctgagcgccatcaccagcgactatgtcgtagtgggtaaagctccctcttcggagggagcatcagag

SEQ ID NO: 3071 - DNA, 89 bp, synthetic construct
  misc_feature 1..89: note = engineered ribonucleic acid scaffold (ERS) sequence
  source 1..89: mol_type = other DNA
acgggcgcttctatttgattactctgagcgccatcaccagcgactatgtcgtagtgggtaaagctccctcttcggagggagcatcagag

SEQ ID NO: 3072 - DNA, 90 bp, synthetic construct
  misc_feature 1..90: note = engineered ribonucleic acid scaffold (ERS) sequence
  source 1..90: mol_type = other DNA
acgggcgcttctatcttgattactctgagcgccatcaccagcgactatgtcgtagtgggtaaagctccctcttcggagggagcatcagag

SEQ ID NO: 3073 - DNA, 89 bp, synthetic construct
  misc_feature 1..89: note = engineered ribonucleic acid scaffold (ERS) sequence
  source 1..89: mol_type = other DNA
acgggcgcttctatcagattactctgagcgccatcaccagcgactatgtcgtagtgggtaaagctccctcttcggagggagcatcagag

SEQ ID NO: 3074 - DNA, 89 bp, synthetic construct
  misc_feature 1..89: note = engineered ribonucleic acid scaffold (ERS) sequence
  source 1..89: mol_type = other DNA
acgggcgcttctatcggattactctgagcgccatcaccagcgactatgtcgtagtgggtaaagctccctcttcggagggagcatcagag

SEQ ID NO: 3075 - DNA, 90 bp, synthetic construct
  misc_feature 1..90: note = engineered ribonucleic acid scaffold (ERS) sequence
  source 1..90: mol_type = other DNA
acgggcgcttctatctgaattactctgagcgccatcaccagcgactatgtcgtagtgggtaaagctccctcttcggagggagcatcagag

SEQ ID NO: 3076 - DNA, 90 bp, synthetic construct
  misc_feature 1..90: note = engineered ribonucleic acid scaffold (ERS) sequence
  source 1..90: mol_type = other DNA
acgggcgcttctatctgtattactctgagcgccatcaccagcgactatgtcgtagtgggtaaagctccctcttcggagggagcatcagag

SEQ ID NO: 3077 - DNA, 89 bp, synthetic construct
  misc_feature 1..89: note = engineered ribonucleic acid scaffold (ERS) sequence
  source 1..89: mol_type = other DNA
acgggcgcttctatctggttactctgagcgccatcaccagcgactatgtcgtagtgggtaaagctccctcttcggagggagcatcagag

SEQ ID NO: 3078 - DNA, 89 bp, synthetic construct
  misc_feature 1..89: note = engineered ribonucleic acid scaffold (ERS) sequence
  source 1..89: mol_type = other DNA
acgggcgcttctatctgtttactctgagcgccatcaccagcgactatgtcgtagtgggtaaagctccctcttcggagggagcatcagag

SEQ ID NO: 3079 - DNA, 90 bp, synthetic construct
  misc_feature 1..90: note = engineered ribonucleic acid scaffold (ERS) sequence
  source 1..90: mol_type = other DNA
acgggcgcttctatctgatttactctgagcgccatcaccagcgactatgtcgtagtgggtaaagctccctcttcggagggagcatcagag

SEQ ID NO: 3080 - DNA, 89 bp, synthetic construct
  misc_feature 1..89: note = engineered ribonucleic acid scaffold (ERS) sequence
  source 1..89: mol_type = other DNA
acgggcgcttctatctgattgctctgagcgccatcaccagcgactatgtcgtagtgggtaaagctccctcttcggagggagcatcagag

SEQ ID NO: 3081 - DNA, 92 bp, synthetic construct
  misc_feature 1..92: note = engineered ribonucleic acid scaffold (ERS) sequence
  source 1..92: mol_type = other DNA
actaggcgcttctatatctgattactctgagcgccatcaccagcgactatgtcgtagtgggtaaagctccctcttcggagggagcatcagag

SEQ ID NO: 3082 - DNA, 91 bp, synthetic construct
  misc_feature 1..91: note = engineered ribonucleic acid scaffold (ERS) sequence
  source 1..91: mol_type = other DNA
actaggcgcttctaatctgattactctgagcgccatcaccagcgactatgtcgtagtgggtaaagctccctcttcggagggagcatcagag

SEQ ID NO: 3083 - DNA, 89 bp, synthetic construct
  misc_feature 1..89: note = engineered ribonucleic acid scaffold (ERS) sequence
  source 1..89: mol_type = other DNA
actaggcgcttctactgattactctgagcgccatcaccagcgactatgtcgtagtgggtaaagctccctcttcggagggagcatcagag

SEQ ID NO: 3084 - DNA, 90 bp, synthetic construct
  misc_feature 1..90: note = engineered ribonucleic acid scaffold (ERS) sequence
  source 1..90: mol_type = other DNA
actaggcgcttctaactgattactctgagcgccatcaccagcgactatgtcgtagtgggtaaagctccctcttcggagggagcatcagag

SEQ ID NO: 3085 - DNA, 90 bp, synthetic construct
  misc_feature 1..90: note = engineered ribonucleic acid scaffold (ERS) sequence
  source 1..90: mol_type = other DNA
actaggcgcttctacctgattactctgagcgccatcaccagcgactatgtcgtagtgggtaaagctccctcttcggagggagcatcagag

SEQ ID NO: 3086 - DNA, 90 bp, synthetic construct
  misc_feature 1..90: note = engineered ribonucleic acid scaffold (ERS) sequence
  source 1..90: mol_type = other DNA
actaggcgcttctagctgattactctgagcgccatcaccagcgactatgtcgtagtgggtaaagctccctcttcggagggagcatcagag

SEQ ID NO: 3087 - DNA, 92 bp, synthetic construct
  misc_feature 1..92: note = engineered ribonucleic acid scaffold (ERS) sequence
  source 1..92: mol_type = other DNA
actaggcgcttctattactgattactctgagcgccatcaccagcgactatgtcgtagtgggtaaagctccctcttcggagggagcatcagag

SEQ ID NO: 3088 - DNA, 90 bp, synthetic construct
  misc_feature 1..90: note = engineered ribonucleic acid scaffold (ERS) sequence
  source 1..90: mol_type = other DNA
actaggcgcttctatatgattactctgagcgccatcaccagcgactatgtcgtagtgggtaaagctccctcttcggagggagcatcagag

SEQ ID NO: 3089 - DNA, 90 bp, synthetic construct
  misc_feature 1..90: note = engineered ribonucleic acid scaffold (ERS) sequence
  source 1..90: mol_type = other DNA
actaggcgcttctatgtgattactctgagcgccatcaccagcgactatgtcgtagtgggtaaagctccctcttcggagggagcatcagag

SEQ ID NO: 3090 - DNA, 90 bp, synthetic construct
  misc_feature 1..90: note = engineered ribonucleic acid scaffold (ERS) sequence
  source 1..90: mol_type = other DNA
actaggcgcttctatttgattactctgagcgccatcaccagcgactatgtcgtagtgggtaaagctccctcttcggagggagcatcagag

SEQ ID NO: 3091 - DNA, 91 bp, synthetic construct
  misc_feature 1..91: note = engineered ribonucleic acid scaffold (ERS) sequence
  source 1..91: mol_type = other DNA
actaggcgcttctatcttgattactctgagcgccatcaccagcgactatgtcgtagtgggtaaagctccctcttcggagggagcatcagag

SEQ ID NO: 3092 - DNA, 90 bp, synthetic construct
  misc_feature 1..90: note = engineered ribonucleic acid scaffold (ERS) sequence
  source 1..90: mol_type = other DNA
actaggcgcttctatcagattactctgagcgccatcaccagcgactatgtcgtagtgggtaaagctccctcttcggagggagcatcagag

SEQ ID NO: 3093 - DNA, 90 bp, synthetic construct
  misc_feature 1..90: note = engineered ribonucleic acid scaffold (ERS) sequence
  source 1..90: mol_type = other DNA
actaggcgcttctatcggattactctgagcgccatcaccagcgactatgtcgtagtgggtaaagctccctcttcggagggagcatcagag

SEQ ID NO: 3094 - DNA, 91 bp, synthetic construct
  misc_feature 1..91: note = engineered ribonucleic acid scaffold (ERS) sequence
  source 1..91: mol_type = other DNA
actaggcgcttctatctgaattactctgagcgccatcaccagcgactatgtcgtagtgggtaaagctccctcttcggagggagcatcagag

SEQ ID NO: 3095 - DNA, 91 bp, synthetic construct
  misc_feature 1..91: note = engineered ribonucleic acid scaffold (ERS) sequence
  source 1..91: mol_type = other DNA
actaggcgcttctatctgtattactctgagcgccatcaccagcgactatgtcgtagtgggtaaagctccctcttcggagggagcatcagag

SEQ ID NO: 3096 - DNA, 90 bp, synthetic construct
  misc_feature 1..90: note = engineered ribonucleic acid scaffold (ERS) sequence
  source 1..90: mol_type = other DNA
actaggcgcttctatctggttactctgagcgccatcaccagcgactatgtcgtagtgggtaaagctccctcttcggagggagcatcagag

SEQ ID NO: 3097 - DNA, 90 bp, synthetic construct
  misc_feature 1..90: note = engineered ribonucleic acid scaffold (ERS) sequence
  source 1..90: mol_type = other DNA
actaggcgcttctatctgtttactctgagcgccatcaccagcgactatgtcgtagtgggtaaagctccctcttcggagggagcatcagag

SEQ ID NO: 3098 - DNA, 91 bp, synthetic construct
  misc_feature 1..91: note = engineered ribonucleic acid scaffold (ERS) sequence
  source 1..91: mol_type = other DNA
actaggcgcttctatctgatttactctgagcgccatcaccagcgactatgtcgtagtgggtaaagctccctcttcggagggagcatcagag

SEQ ID NO: 3099 - DNA, 90 bp, synthetic construct
  misc_feature 1..90: note = engineered ribonucleic acid scaffold (ERS) sequence
  source 1..90: mol_type = other DNA
actaggcgcttctatctgattgctctgagcgccatcaccagcgactatgtcgtagtgggtaaagctccctcttcggagggagcatcagag

SEQ ID NO: 3100 - DNA, 86 bp, synthetic construct
  misc_feature 1..86: note = engineered ribonucleic acid scaffold (ERS) sequence
  source 1..86: mol_type = other DNA
acacacggttctatctgattactctgccgtgttcaccagcgactatgtcgtagtgggtaaactccctcttcggagggagatcagag

SEQ ID NO: 3101 - DNA, 86 bp, synthetic construct
  misc_feature 1..86: note = engineered ribonucleic acid scaffold (ERS) sequence
  source 1..86: mol_type = other DNA
acactggtttctatctgattactctgaccagttcaccagcgactatgtcgtagtgggtaaactccctcttcggagggagatcagag

SEQ ID NO: 3102 - DNA, 86 bp, synthetic construct
  misc_feature 1..86: note = engineered ribonucleic acid scaffold (ERS) sequence
  source 1..86: mol_type = other DNA
acaggccgttctatctgattactctgcggccttcaccagcgactatgtcgtagtgggtaaactccctcttcggagggagatcagag

SEQ ID NO: 3103 - DNA, 86 bp, synthetic construct
  misc_feature 1..86: note = engineered ribonucleic acid scaffold (ERS) sequence
  source 1..86: mol_type = other DNA
acaggtccttctatctgattactctgggaccttcaccagcgactatgtcgtagtgggtaaactccctcttcggagggagatcagag

SEQ ID NO: 3104 - DNA, 86 bp, synthetic construct
  misc_feature 1..86: note = engineered ribonucleic acid scaffold (ERS) sequence
  source 1..86: mol_type = other DNA
accagcaattctatctgattactctgttgctgtcaccagcgactatgtcgtagtgggtaaactccctcttcggagggagatcagag

SEQ ID NO: 3105 - DNA, 86 bp, synthetic construct
  misc_feature 1..86: note = engineered ribonucleic acid scaffold (ERS) sequence
  source 1..86: mol_type = other DNA
accgagacttctatctgattactctgggctcgtcaccagcgactatgtcgtagtgggtaaactccctcttcggagggagatcagag

SEQ ID NO: 3106 - DNA, 86 bp, synthetic construct
  misc_feature 1..86: note = engineered ribonucleic acid scaffold (ERS) sequence
  source 1..86: mol_type = other DNA
acctgtagttctatctgattactctgctacagtcaccagcgactatgtcgtagtgggtaaactccctcttcggagggagatcagag

SEQ ID NO: 3107 - DNA, 86 bp, synthetic construct
  misc_feature 1..86: note = engineered ribonucleic acid scaffold (ERS) sequence
  source 1..86: mol_type = other DNA
acgagcacttctatctgattactctggggctctcaccagcgactatgtcgtagtgggtaaactccctcttcggagggagatcagag

SEQ ID NO: 3108 - DNA, 86 bp, synthetic construct
  misc_feature 1..86: note = engineered ribonucleic acid scaffold (ERS) sequence
  source 1..86: mol_type = other DNA
acgaggtgttctatctgattactctgcacctctcaccagcgactatgtcgtagtgggtaaactccctcttcggagggagatcagag

SEQ ID NO: 3109 - DNA, 86 bp, synthetic construct
  misc_feature 1..86: note = engineered ribonucleic acid scaffold (ERS) sequence
  source 1..86: mol_type = other DNA
acgggactttctatctgattactctgagtccctcaccagcgactatgtcgtagtgggtaaactccctcttcggagggagatcagag

SEQ ID NO: 3110 - DNA, 86 bp, synthetic construct
  misc_feature 1..86: note = engineered ribonucleic acid scaffold (ERS) sequence
  source 1..86: mol_type = other DNA
acgggcaattctatctgattactctgttgccctcaccagcgactatgtcgtagtgggtaaactccctcttcggagggagatcagag

SEQ ID NO: 3111 - DNA, 86 bp, synthetic construct
  misc_feature 1..86: note = engineered ribonucleic acid scaffold (ERS) sequence
  source 1..86: mol_type = other DNA
actgtgcgttctatctgattactctgcgcacatcaccagcgactatgtcgtagtgggtaaactccctcttcggagggagatcagag

SEQ ID NO: 3112 - DNA, 87 bp, synthetic construct
  misc_feature 1..87: note = engineered ribonucleic acid scaffold (ERS) sequence
  source 1..87: mol_type = other DNA
actggcgcttctatctgattactctgggcgccatcaccagcgactatgtcgtagtgggtaaactccctcttcggagggagatcagag

SEQ ID NO: 3113 - DNA, 87 bp, synthetic construct
  misc_feature 1..87: note = engineered ribonucleic acid scaffold (ERS) sequence
  source 1..87: mol_type = other DNA
actggcgcttctatctgattactctgggagccatcaccagcgactatgtcgtagtgggtaaactccctcttcggagggagatcagag

SEQ ID NO: 3114 - DNA, 87 bp, synthetic construct
  misc_feature 1..87: note = engineered ribonucleic acid scaffold (ERS) sequence
  source 1..87: mol_type = other DNA
actggcgcttctatctgattactctgtgagccatcaccagcgactatgtcgtagtgggtaaactccctcttcggagggagatcagag

SEQ ID NO: 3115 - DNA, 88 bp, synthetic construct
  misc_feature 1..88: note = engineered ribonucleic acid scaffold (ERS) sequence
  source 1..88: mol_type = other DNA
actggcgcttctatctgattactctgaggagccatcaccagcgactatgtcgtagtgggtaaactccctcttcggagggagatcagag

SEQ ID NO: 3116 - DNA, 87 bp, synthetic construct
  misc_feature 1..87: note = engineered ribonucleic acid scaffold (ERS) sequence
  source 1..87: mol_type = other DNA
actggcgcttctatctgattactctgatagccatcaccagcgactatgtcgtagtgggtaaactccctcttcggagggagatcagag

SEQ ID NO: 3117 - DNA, 88 bp, synthetic construct
  misc_feature 1..88: note = engineered ribonucleic acid scaffold (ERS) sequence
  source 1..88: mol_type = other DNA
actggcgcttctatctgattactctgagctgccatcaccagcgactatgtcgtagtgggtaaactccctcttcggagggagatcagag

SEQ ID NO: 3118 - DNA, 88 bp, synthetic construct
  misc_feature 1..88: note = engineered ribonucleic acid scaffold (ERS) sequence
  source 1..88: mol_type = other DNA
actggcacttctatctgattactctgagtagccatcaccagcgactatgtcgtagtgggtaaactccctcttcggagggagatcagag

SEQ ID NO: 3119 - DNA, 88 bp, synthetic construct
  misc_feature 1..88: note = engineered ribonucleic acid scaffold (ERS) sequence
  source 1..88: mol_type = other DNA
actggcgcttctatctgattactctgagtagccatcaccagcgactatgtcgtagtgggtaaactccctcttcggagggagatcagag

SEQ ID NO: 3120 - DNA, 87 bp, synthetic construct
  misc_feature 1..87: note = engineered ribonucleic acid scaffold (ERS) sequence
  source 1..87: mol_type = other DNA
actggcgcttctatctgattactctgagcaccatcaccagcgactatgtcgtagtgggtaaactccctcttcggagggagatcagag

SEQ ID NO: 3121 - DNA, 87 bp, synthetic construct
  misc_feature 1..87: note = engineered ribonucleic acid scaffold (ERS) sequence
  source 1..87: mol_type = other DNA
actggcacttctatctgattactctgagcgccatcaccagcgactatgtcgtagtgggtaaactccctcttcggagggagatcagag

SEQ ID NO: 3122 - DNA, 87 bp, synthetic construct
  misc_feature 1..87: note = engineered ribonucleic acid scaffold (ERS) sequence
  source 1..87: mol_type = other DNA
actggcgcttctatctgattactctgagggccatcaccagcgactatgtcgtagtgggtaaactccctcttcggagggagatcagag

SEQ ID NO: 3123 - DNA, 87 bp, synthetic construct
  misc_feature 1..87: note = engineered ribonucleic acid scaffold (ERS) sequence
  source 1..87: mol_type = other DNA
actggcgcttctatctgattactctgagtgccgtcaccagcgactatgtcgtagtgggtaaactccctcttcggagggagatcagag

SEQ ID NO: 3124 - DNA, 87 bp, synthetic construct
  misc_feature 1..87: note = engineered ribonucleic acid scaffold (ERS) sequence
  source 1..87: mol_type = other DNA
actggcacttctatctgattactctgagtgccatcaccagcgactatgtcgtagtgggtaaactccctcttcggagggagatcagag

SEQ ID NO: 3125 - DNA, 87 bp, synthetic construct
  misc_feature 1..87: note = engineered ribonucleic acid scaffold (ERS) sequence
  source 1..87: mol_type = other DNA
actggcgcttctatctgattactctgagaaccatcaccagcgactatgtcgtagtgggtaaactccctcttcggagggagatcagag

SEQ ID NO: 3126 - DNA, 87 bp, synthetic construct
  misc_feature 1..87: note = engineered ribonucleic acid scaffold (ERS) sequence
  source 1..87: mol_type = other DNA
actggcgcttctatctgattactctgagagccgtcaccagcgactatgtcgtagtgggtaaactccctcttcggagggagatcagag

SEQ ID NO: 3127 - DNA, 87 bp, synthetic construct
  misc_feature 1..87: note = engineered ribonucleic acid scaffold (ERS) sequence
  source 1..87: mol_type = other DNA
actggcgcttctatctgattactctgagagccttcaccagcgactatgtcgtagtgggtaaactccctcttcggagggagatcagag

SEQ ID NO: 3128 - DNA, 87 bp, synthetic construct
  misc_feature 1..87: note = engineered ribonucleic acid scaffold (ERS) sequence
  source 1..87: mol_type = other DNA
actggggcttctatctgattactctgagacccatcaccagcgactatgtcgtagtgggtaaactccctcttcggagggagatcagag

SEQ ID NO: 3129 - DNA, 87 bp, synthetic construct
  misc_feature 1..87: note = engineered ribonucleic acid scaffold (ERS) sequence
  source 1..87: mol_type = other DNA
actggtgcttctatctgattactctgagagccatcaccagcgactatgtcgtagtgggtaaactccctcttcggagggagatcagag

SEQ ID NO: 3130 - DNA, 87 bp, synthetic construct
  misc_feature 1..87: note = engineered ribonucleic acid scaffold (ERS) sequence
  source 1..87: mol_type = other DNA
actgggccttctatctgattactctgaggcccatcaccagcgactatgtcgtagtgggtaaactccctcttcggagggagatcagag

SEQ ID NO: 3131 - DNA, 88 bp, synthetic construct
  misc_feature 1..88: note = engineered ribonucleic acid scaffold (ERS) sequence
  source 1..88: mol_type = other DNA
actggcccttctatctgattactctgaggagccatcaccagcgactatgtcgtagtgggtaaactccctcttcggagggagatcagag

SEQ ID NO: 3132 - DNA, 87 bp, synthetic construct
  misc_feature 1..87: note = engineered ribonucleic acid scaffold (ERS) sequence
  source 1..87: mol_type = other DNA
actggcccttctatctgattactctgagggccatcaccagcgactatgtcgtagtgggtaaactccctcttcggagggagatcagag

SEQ ID NO: 3133 - DNA, 87 bp, synthetic construct
  misc_feature 1..87: note = engineered ribonucleic acid scaffold (ERS) sequence
  source 1..87: mol_type = other DNA
actggcccttctatctgattactctgagtgccatcaccagcgactatgtcgtagtgggtaaactccctcttcggagggagatcagag

SEQ ID NO: 3134 - DNA, 87 bp, synthetic construct
  misc_feature 1..87: note = engineered ribonucleic acid scaffold (ERS) sequence
  source 1..87: mol_type = other DNA
actggcccttctatctgattactctgagagccatcaccagcgactatgtcgtagtgggtaaactccctcttcggagggagatcagag

SEQ ID NO: 3135 - DNA, 88 bp, synthetic construct
  misc_feature 1..88: note = engineered ribonucleic acid scaffold (ERS) sequence
  source 1..88: mol_type = other DNA
actggcgcttctatctgattactctgagcagccatcaccagcgactatgtcgtagtgggtaaactccctcttcggagggagatcagag

SEQ ID NO: 3136 - DNA, 87 bp, synthetic construct; identical to SEQ ID NO: 731
  misc_feature 1..87: note = engineered ribonucleic acid scaffold (ERS) sequence
  source 1..87: mol_type = other DNA

SEQ ID NO: 3137 - DNA, 87 bp, synthetic construct
  misc_feature 1..87: note = engineered ribonucleic acid scaffold (ERS) sequence
  source 1..87: mol_type = other DNA
actggcgcttctatctgattactctgagtgccatcaccagcgactatgtcgtagtgggtaaactccctcttcggagggagatcagag

SEQ ID NO: 3138 - DNA, 87 bp, synthetic construct
  misc_feature 1..87: note = engineered ribonucleic acid scaffold (ERS) sequence
  source 1..87: mol_type = other DNA
actggcgcttctatctgattactctgagagccatcaccagcgactatgtcgtagtgggtaaactccctcttcggagggagatcagag

SEQ ID NO: 3139 - DNA, 87 bp, synthetic construct
  misc_feature 1..87: note = engineered ribonucleic acid scaffold (ERS) sequence
  source 1..87: mol_type = other DNA
actggctcttctatctgattactctgagcgccatcaccagcgactatgtcgtagtgggtaaactccctcttcggagggagatcagag

SEQ ID NO: 3140 - DNA, 87 bp, synthetic construct
  misc_feature 1..87: note = engineered ribonucleic acid scaffold (ERS) sequence
  source 1..87: mol_type = other DNA
actggctcttctatctgattactctgagggccatcaccagcgactatgtcgtagtgggtaaactccctcttcggagggagatcagag

SEQ ID NO: 3141 - DNA, 87 bp, synthetic construct
  misc_feature 1..87: note = engineered ribonucleic acid scaffold (ERS) sequence
  source 1..87: mol_type = other DNA
actggctcttctatctgattactctgagtgccatcaccagcgactatgtcgtagtgggtaaactccctcttcggagggagatcagag

SEQ ID NO: 3142 - DNA, 87 bp, synthetic construct
  misc_feature 1..87: note = engineered ribonucleic acid scaffold (ERS) sequence
  source 1..87: mol_type = other DNA
actggctcttctatctgattactctgagagccatcaccagcgactatgtcgtagtgggtaaactccctcttcggagggagatcagag

SEQ ID NO: 3143 - DNA, 87 bp, synthetic construct
  misc_feature 1..87: note = engineered ribonucleic acid scaffold (ERS) sequence
  source 1..87: mol_type = other DNA
actggcggttctatctgattactctgagcgccatcaccagcgactatgtcgtagtgggtaaactccctcttcggagggagatcagag

SEQ ID NO: 3144 - DNA, 87 bp, synthetic construct
  misc_feature 1..87: note = engineered ribonucleic acid scaffold (ERS) sequence
  source 1..87: mol_type = other DNA
actggcggttctatctgattactctgagagccatcaccagcgactatgtcgtagtgggtaaactccctcttcggagggagatcagag

SEQ ID NO: 3145 - DNA, 88 bp, synthetic construct
  misc_feature 1..88: note = engineered ribonucleic acid scaffold (ERS) sequence
  source 1..88: mol_type = other DNA
acacacggttctatctgattactctgccgtgttcaccagcgactatgtcgtagtgggtaaagcgccctcttcggagggagcatcagag

SEQ ID NO: 3146 - DNA, 88 bp, synthetic construct
  misc_feature 1..88: note = engineered ribonucleic acid scaffold (ERS) sequence
  source 1..88: mol_type = other DNA
acactggtttctatctgattactctgaccagttcaccagcgactatgtcgtagtgggtaaagcgccctcttcggagggagcatcagag

SEQ ID NO: 3147 - DNA, 88 bp, synthetic construct
  misc_feature 1..88: note = engineered ribonucleic acid scaffold (ERS) sequence
  source 1..88: mol_type = other DNA
acaggccgttctatctgattactctgcggccttcaccagcgactatgtcgtagtgggtaaagcgccctcttcggagggagcatcagag

SEQ ID NO: 3148 - DNA, 88 bp, synthetic construct
  misc_feature 1..88: note = engineered ribonucleic acid scaffold (ERS) sequence
  source 1..88: mol_type = other DNA
acaggtccttctatctgattactctgggaccttcaccagcgactatgtcgtagtgggtaaagcgccctcttcggagggagcatcagag

SEQ ID NO: 3149 - DNA, 88 bp, synthetic construct
  misc_feature 1..88: note = engineered ribonucleic acid scaffold (ERS) sequence
  source 1..88: mol_type = other DNA
accagcaattctatctgattactctgttgctgtcaccagcgactatgtcgtagtgggtaaagcgccctcttcggagggagcatcagag

SEQ ID NO: 3150 - DNA, 88 bp, synthetic construct
  misc_feature 1..88: note = engineered ribonucleic acid scaffold (ERS) sequence
  source 1..88: mol_type = other DNA
accgagacttctatctgattactctgggctcgtcaccagcgactatgtcgtagtgggtaaagcgccctcttcggagggagcatcagag

SEQ ID NO: 3151 - DNA, 88 bp, synthetic construct
  misc_feature 1..88: note = engineered ribonucleic acid scaffold (ERS) sequence
  source 1..88: mol_type = other DNA
acctgtagttctatctgattactctgctacagtcaccagcgactatgtcgtagtgggtaaagcgccctcttcggagggagcatcagag

SEQ ID NO: 3152 - DNA, 88 bp, synthetic construct
  misc_feature 1..88: note = engineered ribonucleic acid scaffold (ERS) sequence
  source 1..88: mol_type = other DNA
acgagcacttctatctgattactctggggctctcaccagcgactatgtcgtagtgggtaaagcgccctcttcggagggagcatcagag

SEQ ID NO: 3153 - DNA, 88 bp, synthetic construct
  misc_feature 1..88: note = engineered ribonucleic acid scaffold (ERS) sequence
  source 1..88: mol_type = other DNA
acgaggtgttctatctgattactctgcacctctcaccagcgactatgtcgtagtgggtaaagcgccctcttcggagggagcatcagag

SEQ ID NO: 3154 - DNA, 88 bp, synthetic construct
  misc_feature 1..88: note = engineered ribonucleic acid scaffold (ERS) sequence
  source 1..88: mol_type = other DNA
acgggactttctatctgattactctgagtccctcaccagcgactatgtcgtagtgggtaaagcgccctcttcggagggagcatcagag

SEQ ID NO: 3155 - DNA, 88 bp, synthetic construct
  misc_feature 1..88: note = engineered ribonucleic acid scaffold (ERS) sequence
  source 1..88: mol_type = other DNA
acgggcaattctatctgattactctgttgccctcaccagcgactatgtcgtagtgggtaaagcgccctcttcggagggagcatcagag

SEQ ID NO: 3156 - DNA, 88 bp, synthetic construct
  misc_feature 1..88: note = engineered ribonucleic acid scaffold (ERS) sequence
  source 1..88: mol_type = other DNA
actgtgcgttctatctgattactctgcgcacatcaccagcgactatgtcgtagtgggtaaagcgccctcttcggagggagcatcagag

SEQ ID NO: 3157 - DNA, 89 bp, synthetic construct
  misc_feature 1..89: note = engineered ribonucleic acid scaffold (ERS) sequence
  source 1..89: mol_type = other DNA
actggcgcttctatctgattactctgggcgccatcaccagcgactatgtcgtagtgggtaaagcgccctcttcggagggagcatcagag

SEQ ID NO: 3158 - DNA, 89 bp, synthetic construct
  misc_feature 1..89: note = engineered ribonucleic acid scaffold (ERS) sequence
  source 1..89: mol_type = other DNA
actggcgcttctatctgattactctgggagccatcaccagcgactatgtcgtagtgggtaaagcgccctcttcggagggagcatcagag

SEQ ID NO: 3159 - DNA, 89 bp, synthetic construct
  misc_feature 1..89: note = engineered ribonucleic acid scaffold (ERS) sequence
  source 1..89: mol_type = other DNA
actggcgcttctatctgattactctgtgagccatcaccagcgactatgtcgtagtgggtaaagcgccctcttcggagggagcatcagag

SEQ ID NO: 3160 - DNA, 90 bp, synthetic construct
  misc_feature 1..90: note = engineered ribonucleic acid scaffold (ERS) sequence
  source 1..90: mol_type = other DNA
actggcgcttctatctgattactctgaggagccatcaccagcgactatgtcgtagtgggtaaagcgccctcttcggagggagcatcagag

SEQ ID NO: 3161 - DNA, 89 bp, synthetic construct
  misc_feature 1..89: note = engineered ribonucleic acid scaffold (ERS) sequence
  source 1..89: mol_type = other DNA
actggcgcttctatctgattactctgatagccatcaccagcgactatgtcgtagtgggtaaagcgccctcttcggagggagcatcagag

SEQ ID NO: 3162 - DNA, 90 bp, synthetic construct
  misc_feature 1..90: note = engineered ribonucleic acid scaffold (ERS) sequence
  source 1..90: mol_type = other DNA
actggcgcttctatctgattactctgagctgccatcaccagcgactatgtcgtagtgggtaaagcgccctcttcggagggagcatcagag

SEQ ID NO: 3163 - DNA, 90 bp, synthetic construct
  misc_feature 1..90: note = engineered ribonucleic acid scaffold (ERS) sequence
  source 1..90: mol_type = other DNA
actggcacttctatctgattactctgagtagccatcaccagcgactatgtcgtagtgggtaaagcgccctcttcggagggagcatcagag

SEQ ID NO: 3164 - DNA, 90 bp, synthetic construct
  misc_feature 1..90: note = engineered ribonucleic acid scaffold (ERS) sequence
  source 1..90: mol_type = other DNA
actggcgcttctatctgattactctgagtagccatcaccagcgactatgtcgtagtgggtaaagcgccctcttcggagggagcatcagag

SEQ ID NO: 3165 - DNA, 89 bp, synthetic construct
  misc_feature 1..89: note = engineered ribonucleic acid scaffold (ERS) sequence
  source 1..89: mol_type = other DNA
actggcgcttctatctgattactctgagcaccatcaccagcgactatgtcgtagtgggtaaagcgccctcttcggagggagcatcagag

SEQ ID NO: 3166 - DNA, 89 bp, synthetic construct
  misc_feature 1..89: note = engineered ribonucleic acid scaffold (ERS) sequence
  source 1..89: mol_type = other DNA
actggcacttctatctgattactctgagcgccatcaccagcgactatgtcgtagtgggtaaagcgccctcttcggagggagcatcagag

SEQ ID NO: 3167 - DNA, 89 bp, synthetic construct
  misc_feature 1..89: note = engineered ribonucleic acid scaffold (ERS) sequence
  source 1..89: mol_type = other DNA
actggcgcttctatctgattactctgagggccatcaccagcgactatgtcgtagtgggtaaagcgccctcttcggagggagcatcagag

SEQ ID NO: 3168 - DNA, 89 bp, synthetic construct
  misc_feature 1..89: note = engineered ribonucleic acid scaffold (ERS) sequence
  source 1..89: mol_type = other DNA
actggcgcttctatctgattactctgagtgccgtcaccagcgactatgtcgtagtgggtaaagcgccctcttcggagggagcatcagag

SEQ ID NO: 3169 - DNA, 89 bp, synthetic construct
  misc_feature 1..89: note = engineered ribonucleic acid scaffold (ERS) sequence
  source 1..89: mol_type = other DNA
actggcacttctatctgattactctgagtgccatcaccagcgactatgtcgtagtgggtaaagcgccctcttcggagggagcatcagag

SEQ ID NO: 3170 - DNA, 89 bp, synthetic construct
  misc_feature 1..89: note = engineered ribonucleic acid scaffold (ERS) sequence
  source 1..89: mol_type = other DNA
actggcgcttctatctgattactctgagaaccatcaccagcgactatgtcgtagtgggtaaagcgccctcttcggagggagcatcagag

SEQ ID NO: 3171 - DNA, 89 bp, synthetic construct
  misc_feature 1..89: note = engineered ribonucleic acid scaffold (ERS) sequence
  source 1..89: mol_type = other DNA
actggcgcttctatctgattactctgagagccgtcaccagcgactatgtcgtagtgggtaaagcgccctcttcggagggagcatcagag

SEQ ID NO: 3172 - DNA, 89 bp, synthetic construct
  misc_feature 1..89: note = engineered ribonucleic acid scaffold (ERS) sequence
  source 1..89: mol_type = other DNA
actggcgcttctatctgattactctgagagccttcaccagcgactatgtcgtagtgggtaaagcgccctcttcggagggagcatcagag

SEQ ID NO: 3173 - DNA, 89 bp, synthetic construct
  misc_feature 1..89: note = engineered ribonucleic acid scaffold (ERS) sequence
  source 1..89: mol_type = other DNA
actggggcttctatctgattactctgagacccatcaccagcgactatgtcgtagtgggtaaagcgccctcttcggagggagcatcagag

SEQ ID NO: 3174 - DNA, 89 bp, synthetic construct
  misc_feature 1..89: note = engineered ribonucleic acid scaffold (ERS) sequence
  source 1..89: mol_type = other DNA
actggtgcttctatctgattactctgagagccatcaccagcgactatgtcgtagtgggtaaagcgccctcttcggagggagcatcagag

SEQ ID NO: 3175 - DNA, 89 bp, synthetic construct
  misc_feature 1..89: note = engineered ribonucleic acid scaffold (ERS) sequence
  source 1..89: mol_type = other DNA
actgggccttctatctgattactctgaggcccatcaccagcgactatgtcgtagtgggtaaagcgccctcttcggagggagcatcagag

SEQ ID NO: 3176 - DNA, 90 bp, synthetic construct
  misc_feature 1..90: note = engineered ribonucleic acid scaffold (ERS) sequence
  source 1..90: mol_type = other DNA
actggcccttctatctgattactctgaggagccatcaccagcgactatgtcgtagtgggtaaagcgccctcttcggagggagcatcagag

SEQ ID NO: 3177 - DNA, 89 bp, synthetic construct
  misc_feature 1..89: note = engineered ribonucleic acid scaffold (ERS) sequence
  source 1..89: mol_type = other DNA
actggcccttctatctgattactctgagggccatcaccagcgactatgtcgtagtgggtaaagcgccctcttcggagggagcatcagag

SEQ ID NO: 3178 - DNA, 89 bp, synthetic construct
  misc_feature 1..89: note = engineered ribonucleic acid scaffold (ERS) sequence
  source 1..89: mol_type = other DNA
actggcccttctatctgattactctgagtgccatcaccagcgactatgtcgtagtgggtaaagcgccctcttcggagggagcatcagag

SEQ ID NO: 3179 - DNA, 89 bp, synthetic construct
  misc_feature 1..89: note = engineered ribonucleic acid scaffold (ERS) sequence
  source 1..89: mol_type = other DNA
actggcccttctatctgattactctgagagccatcaccagcgactatgtcgtagtgggtaaagcgccctcttcggagggagcatcagag

SEQ ID NO: 3180 - DNA, 90 bp, synthetic construct
  misc_feature 1..90: note = engineered ribonucleic acid scaffold (ERS) sequence
  source 1..90: mol_type = other DNA
actggcgcttctatctgattactctgagcagccatcaccagcgactatgtcgtagtgggtaaagcgccctcttcggagggagcatcagag

SEQ ID NO: 3181 - DNA, 89 bp, synthetic construct; identical to SEQ ID NO: 732
  misc_feature 1..89: note = engineered ribonucleic acid scaffold (ERS) sequence
  source 1..89: mol_type = other DNA

SEQ ID NO: 3182 - DNA, 89 bp, synthetic construct
  misc_feature 1..89: note = engineered ribonucleic acid scaffold (ERS) sequence
  source 1..89: mol_type = other DNA
actggcgcttctatctgattactctgagtgccatcaccagcgactatgtcgtagtgggtaaagcgccctcttcggagggagcatcagag

SEQ ID NO: 3183 - DNA, 89 bp, synthetic construct
  misc_feature 1..89: note = engineered ribonucleic acid scaffold (ERS) sequence
  source 1..89: mol_type = other DNA
actggcgcttctatctgattactctgagagccatcaccagcgactatgtcgtagtgggtaaagcgccctcttcggagggagcatcagag

SEQ ID NO: 3184 - DNA, 89 bp, synthetic construct
  misc_feature 1..89: note = engineered ribonucleic acid scaffold (ERS) sequence
  source 1..89: mol_type = other DNA
actggctcttctatctgattactctgagcgccatcaccagcgactatgtcgtagtgggtaaagcgccctcttcggagggagcatcagag

SEQ ID NO: 3185 - DNA, 89 bp, synthetic construct
  misc_feature 1..89: note = engineered ribonucleic acid scaffold (ERS) sequence
  source 1..89: mol_type = other DNA
actggctcttctatctgattactctgagggccatcaccagcgactatgtcgtagtgggtaaagcgccctcttcggagggagcatcagag

SEQ ID NO: 3186 - DNA, 89 bp, synthetic construct
  misc_feature 1..89: note = engineered ribonucleic acid scaffold (ERS) sequence
  source 1..89: mol_type = other DNA
actggctcttctatctgattactctgagtgccatcaccagcgactatgtcgtagtgggtaaagcgccctcttcggagggagcatcagag

SEQ ID NO: 3187 - DNA, 89 bp, synthetic construct
  misc_feature 1..89: note = engineered ribonucleic acid scaffold (ERS) sequence
  source 1..89: mol_type = other DNA
actggctcttctatctgattactctgagagccatcaccagcgactatgtcgtagtgggtaaagcgccctcttcggagggagcatcagag

SEQ ID NO: 3188 - DNA, 89 bp, synthetic construct
  misc_feature 1..89: note = engineered ribonucleic acid scaffold (ERS) sequence
  source 1..89: mol_type = other DNA
actggcggttctatctgattactctgagcgccatcaccagcgactatgtcgtagtgggtaaagcgccctcttcggagggagcatcagag

SEQ ID NO: 3189 - DNA, 89 bp, synthetic construct
  misc_feature 1..89: note = engineered ribonucleic acid scaffold (ERS) sequence
  source 1..89: mol_type = other DNA
actggcggttctatctgattactctgagagccatcaccagcgactatgtcgtagtgggtaaagcgccctcttcggagggagcatcagag

SEQ ID NO: 3190 - DNA, 98 bp, synthetic construct
  misc_feature 1..98: note = engineered ribonucleic acid scaffold (ERS) sequence
  source 1..98: mol_type = other DNA
acacacggttctatctgattactctgccgtgttcaccagcgactatgtcgtagtgggtaaagcgccttacggacttcggtccgtaaggagcatcagag

SEQ ID NO: 3191 - DNA, 98 bp, synthetic construct
  misc_feature 1..98: note = engineered ribonucleic acid scaffold (ERS) sequence
  source 1..98: mol_type = other DNA
acactggtttctatctgattactctgaccagttcaccagcgactatgtcgtagtgggtaaagcgccttacggacttcggtccgtaaggagcatcagag

SEQ ID NO: 3192 - DNA, 98 bp, synthetic construct
  misc_feature 1..98: note = engineered ribonucleic acid scaffold (ERS) sequence
  source 1..98: mol_type = other DNA
acaggccgttctatctgattactctgcggccttcaccagcgactatgtcgtagtgggtaaagcgccttacggacttcggtccgtaaggagcatcagag

SEQ ID NO: 3193 - DNA, 98 bp, synthetic construct
  misc_feature 1..98: note = engineered ribonucleic acid scaffold (ERS) sequence
  source 1..98: mol_type = other DNA
acaggtccttctatctgattactctgggaccttcaccagcgactatgtcgtagtgggtaaagcgccttacggacttcggtccgtaaggagcatcagag

SEQ ID NO: 3194 - DNA, 98 bp, synthetic construct
  misc_feature 1..98: note = engineered ribonucleic acid scaffold (ERS) sequence
  source 1..98: mol_type = other DNA
accagcaattctatctgattactctgttgctgtcaccagcgactatgtcgtagtgggtaaagcgccttacggacttcggtccgtaaggagcatcagag

SEQ ID NO: 3195 - DNA, 98 bp, synthetic construct
  misc_feature 1..98: note = engineered ribonucleic acid scaffold (ERS) sequence
  source 1..98: mol_type = other DNA
accgagacttctatctgattactctgggctcgtcaccagcgactatgtcgtagtgggtaaagcgccttacggacttcggtccgtaaggagcatcagag

SEQ ID NO: 3196 - DNA, 98 bp, synthetic construct
  misc_feature 1..98: note = engineered ribonucleic acid scaffold (ERS) sequence
  source 1..98: mol_type = other DNA
acctgtagttctatctgattactctgctacagtcaccagcgactatgtcgtagtgggtaaagcgccttacggacttcggtccgtaaggagcatcagag

SEQ ID NO: 3197 - DNA, 98 bp, synthetic construct
  misc_feature 1..98: note = engineered ribonucleic acid scaffold (ERS) sequence
  source 1..98: mol_type = other DNA
acgagcacttctatctgattactctggggctctcaccagcgactatgtcgtagtgggtaaagcgccttacggacttcggtccgtaaggagcatcagag

SEQ ID NO: 3198 - DNA, 98 bp, synthetic construct
  misc_feature 1..98: note = engineered ribonucleic acid scaffold (ERS) sequence
  source 1..98: mol_type = other DNA
acgaggtgttctatctgattactctgcacctctcaccagcgactatgtcgtagtgggtaaagcgccttacggacttcggtccgtaaggagcatcagag

SEQ ID NO: 3199 - DNA, 98 bp, synthetic construct
  misc_feature 1..98: note = engineered ribonucleic acid scaffold (ERS) sequence
  source 1..98: mol_type = other DNA
acgggactttctatctgattactctgagtccctcaccagcgactatgtcgtagtgggtaaagcgccttacggacttcggtccgtaaggagcatcagag

SEQ ID NO: 3200 - DNA, 98 bp, synthetic construct
  misc_feature 1..98: note = engineered ribonucleic acid scaffold (ERS) sequence
  source 1..98: mol_type = other DNA
acgggcaattctatctgattactctgttgccctcaccagcgactatgtcgtagtgggtaaagcgccttacggacttcggtccgtaaggagcatcagag

SEQ ID NO: 3201 - DNA, 98 bp, synthetic construct
  misc_feature 1..98: note = engineered ribonucleic acid scaffold (ERS) sequence
  source 1..98: mol_type = other DNA
actgtgcgttctatctgattactctgcgcacatcaccagcgactatgtcgtagtgggtaaagcgccttacggacttcggtccgtaaggagcatcagag

SEQ ID NO: 3202 - DNA, 99 bp, synthetic construct
  misc_feature 1..99: note = engineered ribonucleic acid scaffold (ERS) sequence
  source 1..99: mol_type = other DNA
actggcgcttctatctgattactctgggcgccatcaccagcgactatgtcgtagtgggtaaagcgccttacggacttcggtccgtaaggagcatcagag

SEQ ID NO: 3203 - DNA, 99 bp, synthetic construct
  misc_feature 1..99: note = engineered ribonucleic acid scaffold (ERS) sequence
  source 1..99: mol_type = other DNA
actggcgcttctatctgattactctgggagccatcaccagcgactatgtcgtagtgggtaaagcgccttacggacttcggtccgtaaggagcatcagag

SEQ ID NO: 3204 - DNA, 99 bp, synthetic construct
  misc_feature 1..99: note = engineered ribonucleic acid scaffold (ERS) sequence
  source 1..99: mol_type = other DNA
actggcgcttctatctgattactctgtgagccatcaccagcgactatgtcgtagtgggtaaagcgccttacggacttcggtccgtaaggagcatcagag

SEQ ID NO: 3205 - DNA, 100 bp, synthetic construct
  misc_feature 1..100: note = engineered ribonucleic acid scaffold (ERS) sequence
  source 1..100: mol_type = other DNA
actggcgcttctatctgattactctgaggagccatcaccagcgactatgtcgtagtgggtaaagcgccttacggacttcggtccgtaaggagcatcagag

SEQ ID NO: 3206 - DNA, 99 bp, synthetic construct
  misc_feature 1..99: note = engineered ribonucleic acid scaffold (ERS) sequence
  source 1..99: mol_type = other DNA
actggcgcttctatctgattactctgatagccatcaccagcgactatgtcgtagtgggtaaagcgccttacggacttcggtccgtaaggagcatcagag

SEQ ID NO: 3207 - DNA, 100 bp, synthetic construct
  misc_feature 1..100: note = engineered ribonucleic acid scaffold (ERS) sequence
  source 1..100: mol_type = other DNA
actggcgcttctatctgattactctgagctgccatcaccagcgactatgtcgtagtgggtaaagcgccttacggacttcggtccgtaaggagcatcagag

SEQ ID NO: 3208 - DNA, 100 bp, synthetic construct
  misc_feature 1..100: note = engineered ribonucleic acid scaffold (ERS) sequence
  source 1..100: mol_type = other DNA
actggcacttctatctgattactctgagtagccatcaccagcgactatgtcgtagtgggtaaagcgccttacggacttcggtccgtaaggagcatcagag

SEQ ID NO: 3209 - DNA, 100 bp, synthetic construct
  misc_feature 1..100: note = engineered ribonucleic acid scaffold (ERS) sequence
  source 1..100: mol_type = other DNA
actggcgcttctatctgattactctgagtagccatcaccagcgactatgtcgtagtgggtaaagcgccttacggacttcggtccgtaaggagcatcagag

SEQ ID NO: 3210 - DNA, 99 bp, synthetic construct
  misc_feature 1..99: note = engineered ribonucleic acid scaffold (ERS) sequence
  source 1..99: mol_type = other DNA
actggcgcttctatctgattactctgagcaccatcaccagcgactatgtcgtagtgggtaaagcgccttacggacttcggtccgtaaggagcatcagag

SEQ ID NO: 3211 - DNA, 99 bp, synthetic construct
  misc_feature 1..99: note = engineered ribonucleic acid scaffold (ERS) sequence
  source 1..99: mol_type = other DNA
actggcacttctatctgattactctgagcgccatcaccagcgactatgtcgtagtgggtaaagcgccttacggacttcggtccgtaaggagcatcagag

SEQ ID NO: 3212 - DNA, 99 bp, synthetic construct
  misc_feature 1..99: note = engineered ribonucleic acid scaffold (ERS) sequence
  source 1..99: mol_type = other DNA
actggcgcttctatctgattactctgagggccatcaccagcgactatgtcgtagtgggtaaagcgccttacggacttcggtccgtaaggagcatcagag

SEQ ID NO: 3213 - DNA, 99 bp, synthetic construct
  misc_feature 1..99: note = engineered ribonucleic acid scaffold (ERS) sequence
  source 1..99: mol_type = other DNA
actggcgcttctatctgattactctgagtgccgtcaccagcgactatgtcgtagtgggtaaagcgccttacggacttcggtccgtaaggagcatcagag

SEQ ID NO: 3214 - DNA, 99 bp, synthetic construct
  misc_feature 1..99: note = engineered ribonucleic acid scaffold (ERS) sequence
  source 1..99: mol_type = other DNA
actggcacttctatctgattactctgagtgccatcaccagcgactatgtcgtagtgggtaaagcgccttacggacttcggtccgtaaggagcatcagag

SEQ ID NO: 3215 - DNA, 99 bp, synthetic construct
  misc_feature 1..99: note = engineered ribonucleic acid scaffold (ERS) sequence
  source 1..99: mol_type = other DNA
actggcgcttctatctgattactctgagaaccatcaccagcgactatgtcgtagtgggtaaagcgccttacggacttcggtccgtaaggagcatcagag

SEQ ID NO: 3216 - DNA, 99 bp, synthetic construct
  misc_feature 1..99: note = engineered ribonucleic acid scaffold (ERS) sequence
  source 1..99: mol_type = other DNA
actggcgcttctatctgattactctgagagccgtcaccagcgactatgtcgtagtgggtaaagcgccttacggacttcggtccgtaaggagcatcagag

SEQ ID NO: 3217 - DNA, 99 bp, synthetic construct
  misc_feature 1..99: note = engineered ribonucleic acid scaffold (ERS) sequence
  source 1..99: mol_type = other DNA
actggcgcttctatctgattactctgagagccttcaccagcgactatgtcgtagtgggtaaagcgccttacggacttcggtccgtaaggagcatcagag

SEQ ID NO: 3218 - DNA, 99 bp, synthetic construct
  misc_feature 1..99: note = engineered ribonucleic acid scaffold (ERS) sequence
  source 1..99: mol_type = other DNA
actggggcttctatctgattactctgagacccatcaccagcgactatgtcgtagtgggtaaagcgccttacggacttcggtccgtaaggagcatcagag

SEQ ID NO: 3219 - DNA, 99 bp, synthetic construct
  misc_feature 1..99: note = engineered ribonucleic acid scaffold (ERS) sequence
  source 1..99: mol_type = other DNA
actggtgcttctatctgattactctgagagccatcaccagcgactatgtcgtagtgggtaaagcgccttacggacttcggtccgtaaggagcatcagag

SEQ ID NO: 3220 - DNA, 99 bp, synthetic construct
  misc_feature 1..99: note = engineered ribonucleic acid scaffold (ERS) sequence
  source 1..99: mol_type = other DNA
actgggccttctatctgattactctgaggcccatcaccagcgactatgtcgtagtgggtaaagcgccttacggacttcggtccgtaaggagcatcagag

SEQ ID NO: 3221 - DNA, 100 bp, synthetic construct
  misc_feature 1..100: note = engineered ribonucleic acid scaffold (ERS) sequence
  source 1..100: mol_type = other DNA
actggcccttctatctgattactctgaggagccatcaccagcgactatgtcgtagtgggtaaagcgccttacggacttcggtccgtaaggagcatcagag

SEQ ID NO: 3222 - DNA, 99 bp, synthetic construct
  misc_feature 1..99: note = engineered ribonucleic acid scaffold (ERS) sequence
  source 1..99: mol_type = other DNA
actggcccttctatctgattactctgagggccatcaccagcgactatgtcgtagtgggtaaagcgccttacggacttcggtccgtaaggagcatcagag

SEQ ID NO: 3223 - DNA, 99 bp, synthetic construct
  misc_feature 1..99: note = engineered ribonucleic acid scaffold (ERS) sequence
  source 1..99: mol_type = other DNA
actggcccttctatctgattactctgagtgccatcaccagcgactatgtcgtagtgggtaaagcgccttacggacttcggtccgtaaggagcatcagag

SEQ ID NO: 3224 - DNA, 99 bp, synthetic construct
  misc_feature 1..99: note = engineered ribonucleic acid scaffold (ERS) sequence
  source 1..99: mol_type = other DNA
actggcccttctatctgattactctgagagccatcaccagcgactatgtcgtagtgggtaaagcgccttacggacttcggtccgtaaggagcatcagag

SEQ ID NO: 3225 - DNA, 100 bp, synthetic construct
  misc_feature 1..100: note = engineered ribonucleic acid scaffold (ERS) sequence
  source 1..100: mol_type = other DNA
actggcgcttctatctgattactctgagcagccatcaccagcgactatgtcgtagtgggtaaagcgccttacggacttcggtccgtaaggagcatcagag

SEQ ID NO: 3226 - DNA, 99 bp, synthetic construct; identical to SEQ ID NO: 712
  misc_feature 1..99: note = engineered ribonucleic acid scaffold (ERS) sequence
  source 1..99: mol_type = other DNA

SEQ ID NO: 3227 - DNA, 99 bp, synthetic construct
  misc_feature 1..99: note = engineered ribonucleic acid scaffold (ERS) sequence
  source 1..99: mol_type = other DNA
actggcgcttctatctgattactctgagtgccatcaccagcgactatgtcgtagtgggtaaagcgccttacggacttcggtccgtaaggagcatcagag

SEQ ID NO: 3228 - DNA, 99 bp, synthetic construct
  misc_feature 1..99: note = engineered ribonucleic acid scaffold (ERS) sequence
  source 1..99: mol_type = other DNA
actggcgcttctatctgattactctgagagccatcaccagcgactatgtcgtagtgggtaaagcgccttacggacttcggtccgtaaggagcatcagag

SEQ ID NO: 3229 - DNA, 99 bp, synthetic construct
  misc_feature 1..99: note = engineered ribonucleic acid scaffold (ERS) sequence
  source 1..99: mol_type = other DNA
actggctcttctatctgattactctgagcgccatcaccagcgactatgtcgtagtgggtaaagcgccttacggacttcggtccgtaaggagcatcagag

SEQ ID NO: 3230 - DNA, 99 bp, synthetic construct
  misc_feature 1..99: note = engineered ribonucleic acid scaffold (ERS) sequence
  source 1..99: mol_type = other DNA
actggctcttctatctgattactctgagggccatcaccagcgactatgtcgtagtgggtaaagcgccttacggacttcggtccgtaaggagcatcagag

SEQ ID NO: 3231 - DNA, 99 bp, synthetic construct
  misc_feature 1..99: note = engineered ribonucleic acid scaffold (ERS) sequence
  source 1..99: mol_type = other DNA
actggctcttctatctgattactctgagtgccatcaccagcgactatgtcgtagtgggtaaagcgccttacggacttcggtccgtaaggagcatcagag

SEQ ID NO: 3232 - DNA, 99 bp, synthetic construct
  misc_feature 1..99: note = engineered ribonucleic acid scaffold (ERS) sequence
  source 1..99: mol_type = other DNA
actggctcttctatctgattactctgagagccatcaccagcgactatgtcgtagtgggtaaagcgccttacggacttcggtccgtaaggagcatcagag

SEQ ID NO: 3233 - DNA, 99 bp, synthetic construct
  misc_feature 1..99: note = engineered ribonucleic acid scaffold (ERS) sequence
  source 1..99: mol_type = other DNA
actggcggttctatctgattactctgagcgccatcaccagcgactatgtcgtagtgggtaaagcgccttacggacttcggtccgtaaggagcatcagag

SEQ ID NO: 3234 - DNA, 99 bp, synthetic construct
  misc_feature 1..99: note = engineered ribonucleic acid scaffold (ERS) sequence
  source 1..99: mol_type = other DNA
actggcggttctatctgattactctgagagccatcaccagcgactatgtcgtagtgggtaaagcgccttacggacttcggtccgtaaggagcatcagag

SEQ ID NO: 3235 - DNA, 98 bp, synthetic construct
  misc_feature 1..98: note = engineered ribonucleic acid scaffold (ERS) sequence
  source 1..98: mol_type = other DNA
acacacggttctatctgattactctgccgtgttcaccagcgactatgtcgtagtgggtaaagcgcttacggaattcgtgtccgtaagaagcatcagag

SEQ ID NO: 3236 - DNA, 98 bp, synthetic construct
  misc_feature 1..98: note = engineered ribonucleic acid scaffold (ERS) sequence
  source 1..98: mol_type = other DNA
acactggtttctatctgattactctgaccagttcaccagcgactatgtcgtagtgggtaaagcgcttacggaattcgtgtccgtaagaagcatcagag

SEQ ID NO: 3237 - DNA, 98 bp, synthetic construct
  misc_feature 1..98: note = engineered ribonucleic acid scaffold (ERS) sequence
  source 1..98: mol_type = other DNA
acaggccgttctatctgattactctgcggccttcaccagcgactatgtcgtagtgggtaaagcgcttacggaattcgtgtccgtaagaagcatcagag

SEQ ID NO: 3238 - DNA, 98 bp, synthetic construct
  misc_feature 1..98: note = engineered ribonucleic acid scaffold (ERS) sequence
  source 1..98: mol_type = other DNA
acaggtccttctatctgattactctgggaccttcaccagcgactatgtcgtagtgggtaaagcgcttacggaattcgtgtccgtaagaagcatcagag

SEQ ID NO: 3239 - DNA, 98 bp, synthetic construct
  misc_feature 1..98: note = engineered ribonucleic acid scaffold (ERS) sequence
  source 1..98: mol_type = other DNA
accagcaattctatctgattactctgttgctgtcaccagcgactatgtcgtagtgggtaaagcgcttacggaattcgtgtccgtaagaagcatcagag

SEQ ID NO: 3240 - DNA, 98 bp, synthetic construct
  misc_feature 1..98: note = engineered ribonucleic acid scaffold (ERS) sequence
  source 1..98: mol_type = other DNA
accgagacttctatctgattactctgggctcgtcaccagcgactatgtcgtagtgggtaaagcgcttacggaattcgtgtccgtaagaagcatcagag

SEQ ID NO: 3241 - DNA, 98 bp, synthetic construct
  misc_feature 1..98: note = engineered ribonucleic acid scaffold (ERS) sequence
  source 1..98: mol_type = other DNA
acctgtagttctatctgattactctgctacagtcaccagcgactatgtcgtagtgggtaaagcgcttacggaattcgtgtccgtaagaagcatcagag

SEQ ID NO: 3242 - DNA, 98 bp, synthetic construct
  misc_feature 1..98: note = engineered ribonucleic acid scaffold (ERS) sequence
  source 1..98: mol_type = other DNA
acgagcacttctatctgattactctggggctctcaccagcgactatgtcgtagtgggtaaagcgcttacggaattcgtgtccgtaagaagcatcagag

SEQ ID NO: 3243 - DNA, 98 bp, synthetic construct
  misc_feature 1..98: note = engineered ribonucleic acid scaffold (ERS) sequence
  source 1..98: mol_type = other DNA
acgaggtgttctatctgattactctgcacctctcaccagcgactatgtcgtagtgggtaaagcgcttacggaattcgtgtccgtaagaagcatcagag

SEQ ID NO: 3244 - DNA, 98 bp, synthetic construct
  misc_feature 1..98: note = engineered ribonucleic acid scaffold (ERS) sequence
  source 1..98: mol_type = other DNA
acgggactttctatctgattactctgagtccctcaccagcgactatgtcgtagtgggtaaagcgcttacggaattcgtgtccgtaagaagcatcagag

SEQ ID NO: 3245 - DNA, 98 bp, synthetic construct
  misc_feature 1..98: note = engineered ribonucleic acid scaffold (ERS) sequence
  source 1..98: mol_type = other DNA
acgggcaattctatctgattactctgttgccctcaccagcgactatgtcgtagtgggtaaagcgcttacggaattcgtgtccgtaagaagcatcagag

SEQ ID NO: 3246 - DNA, 98 bp, synthetic construct
  misc_feature 1..98: note = engineered ribonucleic acid scaffold (ERS) sequence
  source 1..98: mol_type = other DNA
actgtgcgttctatctgattactctgcgcacatcaccagcgactatgtcgtagtgggtaaagcgcttacggaattcgtgtccgtaagaagcatcagag

SEQ ID NO: 3247 - DNA, 99 bp, synthetic construct
  misc_feature 1..99: note = engineered ribonucleic acid scaffold (ERS) sequence
  source 1..99: mol_type = other DNA
actggcgcttctatctgattactctgggcgccatcaccagcgactatgtcgtagtgggtaaagcgcttacggaattcgtgtccgtaagaagcatcagag

SEQ ID NO: 3248 - DNA, 99 bp, synthetic construct
  misc_feature 1..99: note = engineered ribonucleic acid scaffold (ERS) sequence
  source 1..99: mol_type = other DNA
actggcgcttctatctgattactctgggagccatcaccagcgactatgtcgtagtgggtaaagcgcttacggaattcgtgtccgtaagaagcatcagag

SEQ ID NO: 3249 - DNA, 99 bp, synthetic construct
  misc_feature 1..99: note = engineered ribonucleic acid scaffold (ERS) sequence
  source 1..99: mol_type = other DNA
actggcgcttctatctgattactctgtgagccatcaccagcgactatgtcgtagtgggtaaagcgcttacggaattcgtgtccgtaagaagcatcagag

SEQ ID NO: 3250 - DNA, 100 bp, synthetic construct
  misc_feature 1..100: note = engineered ribonucleic acid scaffold (ERS) sequence
  source 1..100: mol_type = other DNA
actggcgcttctatctgattactctgaggagccatcaccagcgactatgtcgtagtgggtaaagcgcttacggaattcgtgtccgtaagaagcatcagag

SEQ ID NO: 3251 - DNA, 99 bp, synthetic construct
  misc_feature 1..99: note = engineered ribonucleic acid scaffold (ERS) sequence
  source 1..99: mol_type = other DNA
actggcgcttctatctgattactctgatagccatcaccagcgactatgtcgtagtgggtaaagcgcttacggaattcgtgtccgtaagaagcatcagag

SEQ ID NO: 3252 - DNA, 100 bp, synthetic construct
  misc_feature 1..100: note = engineered ribonucleic acid scaffold (ERS) sequence
  source 1..100: mol_type = other DNA
actggcgcttctatctgattactctgagctgccatcaccagcgactatgtcgtagtgggtaaagcgcttacggaattcgtgtccgtaagaagcatcagag

SEQ ID NO: 3253 - DNA, 100 bp, synthetic construct
  misc_feature 1..100: note = engineered ribonucleic acid scaffold (ERS) sequence
  source 1..100: mol_type = other DNA
actggcacttctatctgattactctgagtagccatcaccagcgactatgtcgtagtgggtaaagcgcttacggaattcgtgtccgtaagaagcatcagag

SEQ ID NO: 3254 - DNA, 100 bp, synthetic construct
  misc_feature 1..100: note = engineered ribonucleic acid scaffold (ERS) sequence
  source 1..100: mol_type = other DNA
actggcgcttctatctgattactctgagtagccatcaccagcgactatgtcgtagtgggtaaagcgcttacggaattcgtgtccgtaagaagcatcagag

SEQ ID NO: 3255 - DNA, 99 bp, synthetic construct
  misc_feature 1..99: note = engineered ribonucleic acid scaffold (ERS) sequence
  source 1..99: mol_type = other DNA
actggcgcttctatctgattactctgagcaccatcaccagcgactatgtcgtagtgggtaaagcgcttacggaattcgtgtccgtaagaagcatcagag

SEQ ID NO: 3256 - DNA, 99 bp, synthetic construct
  misc_feature 1..99: note = engineered ribonucleic acid scaffold (ERS) sequence
  source 1..99: mol_type = other DNA
actggcacttctatctgattactctgagcgccatcaccagcgactatgtcgtagtgggtaaagcgcttacggaattcgtgtccgtaagaagcatcagag

SEQ ID NO: 3257 - DNA, 99 bp, synthetic construct
  misc_feature 1..99: note = engineered ribonucleic acid scaffold (ERS) sequence
  source 1..99: mol_type = other DNA
actggcgcttctatctgattactctgagggccatcaccagcgactatgtcgtagtgggtaaagcgcttacggaattcgtgtccgtaagaagcatcagag

SEQ ID NO: 3258 - DNA, 99 bp, synthetic construct
  misc_feature 1..99: note = engineered ribonucleic acid scaffold (ERS) sequence
  source 1..99: mol_type = other DNA
actggcgcttctatctgattactctgagtgccgtcaccagcgactatgtcgtagtgggtaaagcgcttacggaattcgtgtccgtaagaagcatcagag

SEQ ID NO: 3259 - DNA, 99 bp, synthetic construct
  misc_feature 1..99: note = engineered ribonucleic acid scaffold (ERS) sequence
  source 1..99: mol_type = other DNA
actggcacttctatctgattactctgagtgccatcaccagcgactatgtcgtagtgggtaaagcgcttacggaattcgtgtccgtaagaagcatcagag

SEQ ID NO: 3260 - DNA, 99 bp, synthetic construct
  misc_feature 1..99: note = engineered ribonucleic acid scaffold (ERS) sequence
  source 1..99: mol_type = other DNA
actggcgcttctatctgattactctgagaaccatcaccagcgactatgtcgtagtgggtaaagcgcttacggaattcgtgtccgtaagaagcatcagag

SEQ ID NO: 3261 - DNA, 99 bp, synthetic construct
  misc_feature 1..99: note = engineered ribonucleic acid scaffold (ERS) sequence
  source 1..99: mol_type = other DNA
actggcgcttctatctgattactctgagagccgtcaccagcgactatgtcgtagtgggtaaagcgcttacggaattcgtgtccgtaagaagcatcagag

SEQ ID NO: 3262 - DNA, 99 bp, synthetic construct
  misc_feature 1..99: note = engineered ribonucleic acid scaffold (ERS) sequence
  source 1..99: mol_type = other DNA
actggcgcttctatctgattactctgagagccttcaccagcgactatgtcgtagtgggtaaagcgcttacggaattcgtgtccgtaagaagcatcagag

SEQ ID NO: 3263 - DNA, 99 bp, synthetic construct
  misc_feature 1..99: note = engineered ribonucleic acid scaffold (ERS) sequence
  source 1..99: mol_type = other DNA
actggggcttctatctgattactctgagacccatcaccagcgactatgtcgtagtgggtaaagcgcttacggaattcgtgtccgtaagaagcatcagag

SEQ ID NO: 3264 - DNA, 99 bp, synthetic construct
  misc_feature 1..99: note = engineered ribonucleic acid scaffold (ERS) sequence
  source 1..99: mol_type = other DNA
actggtgcttctatctgattactctgagagccatcaccagcgactatgtcgtagtgggtaaagcgcttacggaattcgtgtccgtaagaagcatcagag

SEQ ID NO: 3265 - DNA, 99 bp, synthetic construct
  misc_feature 1..99: note = engineered ribonucleic acid scaffold (ERS) sequence
  source 1..99: mol_type = other DNA
actgggccttctatctgattactctgaggcccatcaccagcgactatgtcgtagtgggtaaagcgcttacggaattcgtgtccgtaagaagcatcagag

SEQ ID NO: 3266 - DNA, 100 bp, synthetic construct
  misc_feature 1..100: note = engineered ribonucleic acid scaffold (ERS) sequence
  source 1..100: mol_type = other DNA
actggcccttctatctgattactctgaggagccatcaccagcgactatgtcgtagtgggtaaagcgcttacggaattcgtgtccgtaagaagcatcagag

SEQ ID NO: 3267 - DNA, 99 bp, synthetic construct
  misc_feature 1..99: note = engineered ribonucleic acid scaffold (ERS) sequence
  source 1..99: mol_type = other DNA
actggcccttctatctgattactctgagggccatcaccagcgactatgtcgtagtgggtaaagcgcttacggaattcgtgtccgtaagaagcatcagag

SEQ ID NO: 3268 - DNA, 99 bp, synthetic construct
  misc_feature 1..99: note = engineered ribonucleic acid scaffold (ERS) sequence
  source 1..99: mol_type = other DNA
actggcccttctatctgattactctgagtgccatcaccagcgactatgtcgtagtgggtaaagcgcttacggaattcgtgtccgtaagaagcatcagag

SEQ ID NO: 3269 - DNA, 99 bp, synthetic construct
  misc_feature 1..99: note = engineered ribonucleic acid scaffold (ERS) sequence
  source 1..99: mol_type = other DNA
actggcccttctatctgattactctgagagccatcaccagcgactatgtcgtagtgggtaaagcgcttacggaattcgtgtccgtaagaagcatcagag

SEQ ID NO: 3270 - DNA, 100 bp, synthetic construct
  misc_feature 1..100: note = engineered ribonucleic acid scaffold (ERS) sequence
  source 1..100: mol_type = other DNA
actggcgcttctatctgattactctgagcagccatcaccagcgactatgtcgtagtgggtaaagcgcttacggaattcgtgtccgtaagaagcatcagag

SEQ ID NO: 3271 - DNA, 99 bp, synthetic construct; identical to SEQ ID NO: 710
  misc_feature 1..99: note = engineered ribonucleic acid scaffold (ERS) sequence
  source 1..99: mol_type = other DNA

SEQ ID NO: 3272 - DNA, 99 bp, synthetic construct
  misc_feature 1..99: note = engineered ribonucleic acid scaffold (ERS) sequence
  source 1..99: mol_type = other DNA
actggcgcttctatctgattactctgagtgccatcaccagcgactatgtcgtagtgggtaaagcgcttacggaattcgtgtccgtaagaagcatcagag

SEQ ID NO: 3273 - DNA, 99 bp, synthetic construct
  misc_feature 1..99: note = engineered ribonucleic acid scaffold (ERS) sequence
  source 1..99: mol_type = other DNA
actggcgcttctatctgattactctgagagccatcaccagcgactatgtcgtagtgggtaaagcgcttacggaattcgtgtccgtaagaagcatcagag

SEQ ID NO: 3274 - DNA, 99 bp, synthetic construct
  misc_feature 1..99: note = engineered ribonucleic acid scaffold (ERS) sequence
  source 1..99: mol_type = other DNA
actggctcttctatctgattactctgagcgccatcaccagcgactatgtcgtagtgggtaaagcgcttacggaattcgtgtccgtaagaagcatcagag

SEQ ID NO: 3275 - DNA, 99 bp, synthetic construct
  misc_feature 1..99: note = engineered ribonucleic acid scaffold (ERS) sequence
  source 1..99: mol_type = other DNA
actggctcttctatctgattactctgagggccatcaccagcgactatgtcgtagtgggtaaagcgcttacggaattcgtgtccgtaagaagcatcagag

SEQ ID NO: 3276 - DNA, 99 bp, synthetic construct
  misc_feature 1..99: note = engineered ribonucleic acid scaffold (ERS) sequence
  source 1..99: mol_type = other DNA
actggctcttctatctgattactctgagtgccatcaccagcgactatgtcgtagtgggtaaagcgcttacggaattcgtgtccgtaagaagcatcagag

SEQ ID NO: 3277 - DNA, 99 bp, synthetic construct
  misc_feature 1..99: note = engineered ribonucleic acid scaffold (ERS) sequence
  source 1..99: mol_type = other DNA
actggctcttctatctgattactctgagagccatcaccagcgactatgtcgtagtgggtaaagcgcttacggaattcgtgtccgtaagaagcatcagag

SEQ ID NO: 3278 - DNA, 99 bp, synthetic construct
  misc_feature 1..99: note = engineered ribonucleic acid scaffold (ERS) sequence
  source 1..99: mol_type = other DNA
actggcggttctatctgattactctgagcgccatcaccagcgactatgtcgtagtgggtaaagcgcttacggaattcgtgtccgtaagaagcatcagag

SEQ ID NO: 3279 - DNA, 99 bp, synthetic construct
  misc_feature 1..99: note = engineered ribonucleic acid scaffold (ERS) sequence
  source 1..99: mol_type = other DNA
actggcggttctatctgattactctgagagccatcaccagcgactatgtcgtagtgggtaaagcgcttacggaattcgtgtccgtaagaagcatcagag

SEQ ID NO: 3280 - DNA, 99 bp, synthetic construct
  misc_feature 1..99: note = engineered ribonucleic acid scaffold (ERS) sequence
  source 1..99: mol_type = other DNA
acacacggttctatctgattactctgccgtgttcaccagcgactatgtcgtagtgggtaaagcgcttacggacttcgcggtccgtaagaagcatcagag

SEQ ID NO: 3281 - DNA, 99 bp, synthetic construct
  misc_feature 1..99: note = engineered ribonucleic acid scaffold (ERS) sequence
  source 1..99: mol_type = other DNA
acactggtttctatctgattactctgaccagttcaccagcgactatgtcgtagtgggtaaagcgcttacggacttcgcggtccgtaagaagcatcagag

SEQ ID NO: 3282 - DNA, 99 bp, synthetic construct
  misc_feature 1..99: note = engineered ribonucleic acid scaffold (ERS) sequence
  source 1..99: mol_type = other DNA
acaggccgttctatctgattactctgcggccttcaccagcgactatgtcgtagtgggtaaagcgcttacggacttcgcggtccgtaagaagcatcagag

SEQ ID NO: 3283 - DNA, 99 bp, synthetic construct
  misc_feature 1..99: note = engineered ribonucleic acid scaffold (ERS) sequence
  source 1..99: mol_type = other DNA
acaggtccttctatctgattactctgggaccttcaccagcgactatgtcgtagtgggtaaagcgcttacggacttcgcggtccgtaagaagcatcagag

SEQ ID NO: 3284 - DNA, 99 bp, synthetic construct
  misc_feature 1..99: note = engineered ribonucleic acid scaffold (ERS) sequence
  source 1..99: mol_type = other DNA
accagcaattctatctgattactctgttgctgtcaccagcgactatgtcgtagtgggtaaagcgcttacggacttcgcggtccgtaagaagcatcagag

SEQ ID NO: 3285 - DNA, 99 bp, synthetic construct
  misc_feature 1..99: note = engineered ribonucleic acid scaffold (ERS) sequence
  source 1..99: mol_type = other DNA
accgagacttctatctgattactctgggctcgtcaccagcgactatgtcgtagtgggtaaagcgcttacggacttcgcggtccgtaagaagcatcagag

SEQ ID NO: 3286 - DNA, 99 bp, synthetic construct
  misc_feature 1..99: note = engineered ribonucleic acid scaffold (ERS) sequence
  source 1..99: mol_type = other DNA
acctgtagttctatctgattactctgctacagtcaccagcgactatgtcgtagtgggtaaagcgcttacggacttcgcggtccgtaagaagcatcagag

SEQ ID NO: 3287 - DNA, 99 bp, synthetic construct
  misc_feature 1..99: note = engineered ribonucleic acid scaffold (ERS) sequence
  source 1..99: mol_type = other DNA
acgagcacttctatctgattactctggggctctcaccagcgactatgtcgtagtgggtaaagcgcttacggacttcgcggtccgtaagaagcatcagag

SEQ ID NO: 3288 - DNA, 99 bp, synthetic construct
  misc_feature 1..99: note = engineered ribonucleic acid scaffold (ERS) sequence
  source 1..99: mol_type = other DNA
acgaggtgttctatctgattactctgcacctctcaccagcgactatgtcgtagtgggtaaagcgcttacggacttcgcggtccgtaagaagcatcagag

SEQ ID NO: 3289 - DNA, 99 bp, synthetic construct
  misc_feature 1..99: note = engineered ribonucleic acid scaffold (ERS) sequence
  source 1..99: mol_type = other DNA
acgggactttctatctgattactctgagtccctcaccagcgactatgtcgtagtgggtaaagcgcttacggacttcgcggtccgtaagaagcatcagag

SEQ ID NO: 3290 - DNA, 99 bp, synthetic construct
  misc_feature 1..99: note = engineered ribonucleic acid scaffold (ERS) sequence
  source 1..99: mol_type = other DNA
acgggcaattctatctgattactctgttgccctcaccagcgactatgtcgtagtgggtaaagcgcttacggacttcgcggtccgtaagaagcatcagag

SEQ ID NO: 3291 - DNA, 99 bp, synthetic construct
  misc_feature 1..99: note = engineered ribonucleic acid scaffold (ERS) sequence
  source 1..99: mol_type = other DNA
actgtgcgttctatctgattactctgcgcacatcaccagcgactatgtcgtagtgggtaaagcgcttacggacttcgcggtccgtaagaagcatcagag

SEQ ID NO: 3292 - DNA, 100 bp, synthetic construct
  misc_feature 1..100: note = engineered ribonucleic acid scaffold (ERS) sequence
  source 1..100: mol_type = other DNA
actggcgcttctatctgattactctgggcgccatcaccagcgactatgtcgtagtgggtaaagcgcttacggacttcgcggtccgtaagaagcatcagag

SEQ ID NO: 3293 - DNA, 100 bp, synthetic construct
  misc_feature 1..100: note = engineered ribonucleic acid scaffold (ERS) sequence
  source 1..100: mol_type = other DNA
actggcgcttctatctgattactctgggagccatcaccagcgactatgtcgtagtgggtaaagcgcttacggacttcgcggtccgtaagaagcatcagag

SEQ ID NO: 3294 - DNA, 100 bp, synthetic construct
  misc_feature 1..100: note = engineered ribonucleic acid scaffold (ERS) sequence
  source 1..100: mol_type = other DNA
actggcgcttctatctgattactctgtgagccatcaccagcgactatgtcgtagtgggtaaagcgcttacggacttcgcggtccgtaagaagcatcagag

SEQ ID NO: 3295 - DNA, 101 bp, synthetic construct
  misc_feature 1..101: note = engineered ribonucleic acid scaffold (ERS) sequence
  source 1..101: mol_type = other DNA
actggcgcttctatctgattactctgaggagccatcaccagcgactatgtcgtagtgggtaaagcgcttacggacttcgcggtccgtaagaagcatcagag

SEQ ID NO: 3296 - DNA, 100 bp, synthetic construct
  misc_feature 1..100: note = engineered ribonucleic acid scaffold (ERS) sequence
  source 1..100: mol_type = other DNA
actggcgcttctatctgattactctgatagccatcaccagcgactatgtcgtagtgggtaaagcgcttacggacttcgcggtccgtaagaagcatcagag

SEQ ID NO: 3297 - DNA, 101 bp, synthetic construct
  misc_feature 1..101: note = engineered ribonucleic acid scaffold (ERS) sequence
  source 1..101: mol_type = other DNA
actggcgcttctatctgattactctgagctgccatcaccagcgactatgtcgtagtgggtaaagcgcttacggacttcgcggtccgtaagaagcatcagag

SEQ ID NO: 3298 - DNA, 101 bp, synthetic construct
  misc_feature 1..101: note = engineered ribonucleic acid scaffold (ERS) sequence
  source 1..101: mol_type = other DNA
actggcacttctatctgattactctgagtagccatcaccagcgactatgtcgtagtgggtaaagcgcttacggacttcgcggtccgtaagaagcatcagag

SEQ ID NO: 3299 - DNA, 101 bp, synthetic construct
  misc_feature 1..101: note = engineered ribonucleic acid scaffold (ERS) sequence
  source 1..101: mol_type = other DNA
actggcgcttctatctgattactctgagtagccatcaccagcgactatgtcgtagtgggtaaagcgcttacggacttcgcggtccgtaagaagcatcagag

SEQ ID NO: 3300 - DNA, 100 bp, synthetic construct
  misc_feature 1..100: note = engineered ribonucleic acid scaffold (ERS) sequence
  source 1..100: mol_type = other DNA
actggcgcttctatctgattactctgagcaccatcaccagcgactatgtcgtagtgggtaaagcgcttacggacttcgcggtccgtaagaagcatcagag

SEQ ID NO: 3301 - DNA, 100 bp, synthetic construct
  misc_feature 1..100: note = engineered ribonucleic acid scaffold (ERS) sequence
  source 1..100: mol_type = other DNA
actggcacttctatctgattactctgagcgccatcaccagcgactatgtcgtagtgggtaaagcgcttacggacttcgcggtccgtaagaagcatcagag

SEQ ID NO: 3302 - DNA, 100 bp, synthetic construct
  misc_feature 1..100: note = engineered ribonucleic acid scaffold (ERS) sequence
  source 1..100: mol_type = other DNA
actggcgcttctatctgattactctgagggccatcaccagcgactatgtcgtagtgggtaaagcgcttacggacttcgcggtccgtaagaagcatcagag

SEQ ID NO: 3303 - DNA, 100 bp, synthetic construct
  misc_feature 1..100: note = engineered ribonucleic acid scaffold (ERS) sequence
  source 1..100: mol_type = other DNA
actggcgcttctatctgattactctgagtgccgtcaccagcgactatgtcgtagtgggtaaagcgcttacggacttcgcggtccgtaagaagcatcagag

SEQ ID NO: 3304 - DNA, 100 bp, synthetic construct
  misc_feature 1..100: note = engineered ribonucleic acid scaffold (ERS) sequence
  source 1..100: mol_type = other DNA
actggcacttctatctgattactctgagtgccatcaccagcgactatgtcgtagtgggtaaagcgcttacggacttcgcggtccgtaagaagcatcagag

SEQ ID NO: 3305 - DNA, 100 bp, synthetic construct
  misc_feature 1..100: note = engineered ribonucleic acid scaffold (ERS) sequence
  source 1..100: mol_type = other DNA
actggcgcttctatctgattactctgagaaccatcaccagcgactatgtcgtagtgggtaaagcgcttacggacttcgcggtccgtaagaagcatcagag

SEQ ID NO: 3306 - DNA, 100 bp, synthetic construct
  misc_feature 1..100: note = engineered ribonucleic acid scaffold (ERS) sequence
  source 1..100: mol_type = other DNA
actggcgcttctatctgattactctgagagccgtcaccagcgactatgtcgtagtgggtaaagcgcttacggacttcgcggtccgtaagaagcatcagag

SEQ ID NO: 3307 - DNA, 100 bp, synthetic construct
  misc_feature 1..100: note = engineered ribonucleic acid scaffold (ERS) sequence
  source 1..100: mol_type = other DNA
actggcgcttctatctgattactctgagagccttcaccagcgactatgtcgtagtgggtaaagcgcttacggacttcgcggtccgtaagaagcatcagag

SEQ ID NO: 3308 - DNA, 100 bp, synthetic construct
  misc_feature 1..100: note = engineered ribonucleic acid scaffold (ERS) sequence
  source 1..100: mol_type = other DNA
actggggcttctatctgattactctgagacccatcaccagcgactatgtcgtagtgggtaaagcgcttacggacttcgcggtccgtaagaagcatcagag

SEQ ID NO: 3309 - DNA, 100 bp, synthetic construct
  misc_feature 1..100: note = engineered ribonucleic acid scaffold (ERS) sequence
  source 1..100: mol_type = other DNA
actggtgcttctatctgattactctgagagccatcaccagcgactatgtcgtagtgggtaaagcgcttacggacttcgcggtccgtaagaagcatcagag

SEQ ID NO: 3310 - DNA, 100 bp, synthetic construct
  misc_feature 1..100: note = engineered ribonucleic acid scaffold (ERS) sequence
  source 1..100: mol_type = other DNA
actgggccttctatctgattactctgaggcccatcaccagcgactatgtcgtagtgggtaaagcgcttacggacttcgcggtccgtaagaagcatcagag

SEQ ID NO: 3311 - DNA, 101 bp, synthetic construct
  misc_feature 1..101: note = engineered ribonucleic acid scaffold (ERS) sequence
  source 1..101: mol_type = other DNA
actggcccttctatctgattactctgaggagccatcaccagcgactatgtcgtagtgggtaaagcgcttacggacttcgcggtccgtaagaagcatcagag

SEQ ID NO: 3312 - DNA, 100 bp, synthetic construct
  misc_feature 1..100: note = engineered ribonucleic acid scaffold (ERS) sequence
  source 1..100: mol_type = other DNA
actggcccttctatctgattactctgagggccatcaccagcgactatgtcgtagtgggtaaagcgcttacggacttcgcggtccgtaagaagcatcagag

SEQ ID NO: 3313 - DNA, 100 bp, synthetic construct
  misc_feature 1..100: note = engineered ribonucleic acid scaffold (ERS) sequence
  source 1..100: mol_type = other DNA
actggcccttctatctgattactctgagtgccatcaccagcgactatgtcgtagtgggtaaagcgcttacggacttcgcggtccgtaagaagcatcagag

SEQ ID NO: 3314 - DNA, 100 bp, synthetic construct
  misc_feature 1..100: note = engineered ribonucleic acid scaffold (ERS) sequence
  source 1..100: mol_type = other DNA
actggcccttctatctgattactctgagagccatcaccagcgactatgtcgtagtgggtaaagcgcttacggacttcgcggtccgtaagaagcatcagag

SEQ ID NO: 3315 - DNA, 101 bp, synthetic construct
  misc_feature 1..101: note = engineered ribonucleic acid scaffold (ERS) sequence
  source 1..101: mol_type = other DNA
actggcgcttctatctgattactctgagcagccatcaccagcgactatgtcgtagtgggtaaagcgcttacggacttcgcggtccgtaagaagcatcagag

SEQ ID NO: 3316 - DNA, 100 bp, synthetic construct; identical to SEQ ID NO: 713
  misc_feature 1..100: note = engineered ribonucleic acid scaffold (ERS) sequence
  source 1..100: mol_type = other DNA

SEQ ID NO: 3317 - DNA, 100 bp, synthetic construct
  misc_feature 1..100: note = engineered ribonucleic acid scaffold (ERS) sequence
  source 1..100: mol_type = other DNA
actggcgcttctatctgattactctgagtgccatcaccagcgactatgtcgtagtgggtaaagcgcttacggacttcgcggtccgtaagaagcatcagag

SEQ ID NO: 3318 - DNA, 100 bp, synthetic construct
  misc_feature 1..100: note = engineered ribonucleic acid scaffold (ERS) sequence
  source 1..100: mol_type = other DNA
actggcgcttctatctgattactctgagagccatcaccagcgactatgtcgtagtgggtaaagcgcttacggacttcgcggtccgtaagaagcatcagag

SEQ ID NO: 3319 - DNA, 100 bp, synthetic construct
  misc_feature 1..100: note = engineered ribonucleic acid scaffold (ERS) sequence
  source 1..100: mol_type = other DNA
actggctcttctatctgattactctgagcgccatcaccagcgactatgtcgtagtgggtaaagcgcttacggacttcgcggtccgtaagaagcatcagag

SEQ ID NO: 3320 - DNA, 100 bp, synthetic construct
  misc_feature 1..100: note = engineered ribonucleic acid scaffold (ERS) sequence
  source 1..100: mol_type = other DNA
actggctcttctatctgattactctgagggccatcaccagcgactatgtcgtagtgggtaaagcgcttacggacttcgcggtccgtaagaagcatcagag

SEQ ID NO: 3321 - DNA, 100 bp, synthetic construct
  misc_feature 1..100: note = engineered ribonucleic acid scaffold (ERS) sequence
  source 1..100: mol_type = other DNA
actggctcttctatctgattactctgagtgccatcaccagcgactatgtcgtagtgggtaaagcgcttacggacttcgcggtccgtaagaagcatcagag

SEQ ID NO: 3322 - DNA, 100 bp, synthetic construct
  misc_feature 1..100: note = engineered ribonucleic acid scaffold (ERS) sequence
  source 1..100: mol_type = other DNA
actggctcttctatctgattactctgagagccatcaccagcgactatgtcgtagtgggtaaagcgcttacggacttcgcggtccgtaagaagcatcagag

SEQ ID NO: 3323 - DNA, 100 bp, synthetic construct
  misc_feature 1..100: note = engineered ribonucleic acid scaffold (ERS) sequence
  source 1..100: mol_type = other DNA
actggcggttctatctgattactctgagcgccatcaccagcgactatgtcgtagtgggtaaagcgcttacggacttcgcggtccgtaagaagcatcagag

SEQ ID NO: 3324 - DNA, 100 bp, synthetic construct
  misc_feature 1..100: note = engineered ribonucleic acid scaffold (ERS) sequence
  source 1..100: mol_type = other DNA
actggcggttctatctgattactctgagagccatcaccagcgactatgtcgtagtgggtaaagcgcttacggacttcgcggtccgtaagaagcatcagag

SEQ ID NO: 3325 - DNA, 97 bp, synthetic construct
  misc_feature 1..97: note = engineered ribonucleic acid scaffold (ERS) sequence
  source 1..97: mol_type = other DNA
acacacggttctatctgattactctgccgtgttcaccagcgactatgtcgtagtgggtaaagcgcttacggacttcggtccgtaagaagcatcagag

SEQ ID NO: 3326 - DNA, 97 bp, synthetic construct
  misc_feature 1..97: note = engineered ribonucleic acid scaffold (ERS) sequence
  source 1..97: mol_type = other DNA
acactggtttctatctgattactctgaccagttcaccagcgactatgtcgtagtgggtaaagcgcttacggacttcggtccgtaagaagcatcagag

SEQ ID NO: 3327 - DNA, 97 bp, synthetic construct
  misc_feature 1..97: note = engineered ribonucleic acid scaffold (ERS) sequence
  source 1..97: mol_type = other DNA
acaggccgttctatctgattactctgcggccttcaccagcgactatgtcgtagtgggtaaagcgcttacggacttcggtccgtaagaagcatcagag

SEQ ID NO: 3328 - DNA, 97 bp, synthetic construct
  misc_feature 1..97: note = engineered ribonucleic acid scaffold (ERS) sequence
  source 1..97: mol_type = other DNA
acaggtccttctatctgattactctgggaccttcaccagcgactatgtcgtagtgggtaaagcgcttacggacttcggtccgtaagaagcatcagag

SEQ ID NO: 3329 - DNA, 97 bp, synthetic construct
  misc_feature 1..97: note = engineered ribonucleic acid scaffold (ERS) sequence
  source 1..97: mol_type = other DNA
accagcaattctatctgattactctgttgctgtcaccagcgactatgtcgtagtgggtaaagcgcttacggacttcggtccgtaagaagcatcagag

SEQ ID NO: 3330 - DNA, 97 bp, synthetic construct
  misc_feature 1..97: note = engineered ribonucleic acid scaffold (ERS) sequence
  source 1..97: mol_type = other DNA
accgagacttctatctgattactctgggctcgtcaccagcgactatgtcgtagtgggtaaagcgcttacggacttcggtccgtaagaagcatcagag

SEQ ID NO: 3331 - DNA, 97 bp, synthetic construct
  misc_feature 1..97: note = engineered ribonucleic acid scaffold (ERS) sequence
  source 1..97: mol_type = other DNA
acctgtagttctatctgattactctgctacagtcaccagcgactatgtcgtagtgggtaaagcgcttacggacttcggtccgtaagaagcatcagag

SEQ ID NO: 3332 - DNA, 97 bp, synthetic construct
  misc_feature 1..97: note = engineered ribonucleic acid scaffold (ERS) sequence
  source 1..97: mol_type = other DNA
acgagcacttctatctgattactctggggctctcaccagcgactatgtcgtagtgggtaaagcgcttacggacttcggtccgtaagaagcatcagag

SEQ ID NO: 3333 - DNA, 97 bp, synthetic construct
  misc_feature 1..97: note = engineered ribonucleic acid scaffold (ERS) sequence
  source 1..97: mol_type = other DNA
acgaggtgttctatctgattactctgcacctctcaccagcgactatgtcgtagtgggtaaagcgcttacggacttcggtccgtaagaagcatcagag

SEQ ID NO: 3334 - DNA, 97 bp, synthetic construct
  misc_feature 1..97: note = engineered ribonucleic acid scaffold (ERS) sequence
  source 1..97: mol_type = other DNA
acgggactttctatctgattactctgagtccctcaccagcgactatgtcgtagtgggtaaagcgcttacggacttcggtccgtaagaagcatcagag

SEQ ID NO: 3335 - DNA, 97 bp, synthetic construct
  misc_feature 1..97: note = engineered ribonucleic acid scaffold (ERS) sequence
  source 1..97: mol_type = other DNA
acgggcaattctatctgattactctgttgccctcaccagcgactatgtcgtagtgggtaaagcgcttacggacttcggtccgtaagaagcatcagag

SEQ ID NO: 3336 - DNA, 97 bp, synthetic construct
  misc_feature 1..97: note = engineered ribonucleic acid scaffold (ERS) sequence
  source 1..97: mol_type = other DNA
actgtgcgttctatctgattactctgcgcacatcaccagcgactatgtcgtagtgggtaaagcgcttacggacttcggtccgtaagaagcatcagag

SEQ ID NO: 3337 - DNA, 98 bp, synthetic construct
  misc_feature 1..98: note = engineered ribonucleic acid scaffold (ERS) sequence
  source 1..98: mol_type = other DNA
actggcgcttctatctgattactctgggcgccatcaccagcgactatgtcgtagtgggtaaagcgcttacggacttcggtccgtaagaagcatcagag

SEQ ID NO: 3338 - DNA, 98 bp, synthetic construct
  misc_feature 1..98: note = engineered ribonucleic acid scaffold (ERS) sequence
  source 1..98: mol_type = other DNA
actggcgcttctatctgattactctgggagccatcaccagcgactatgtcgtagtgggtaaagcgcttacggacttcggtccgtaagaagcatcagag

SEQ ID NO: 3339 - DNA, 98 bp, synthetic construct
  misc_feature 1..98: note = engineered ribonucleic acid scaffold (ERS) sequence
  source 1..98: mol_type = other DNA
actggcgcttctatctgattactctgtgagccatcaccagcgactatgtcgtagtgggtaaagcgcttacggacttcggtccgtaagaagcatcagag

SEQ ID NO: 3340 - DNA, 99 bp, synthetic construct
  misc_feature 1..99: note = engineered ribonucleic acid scaffold (ERS) sequence
  source 1..99: mol_type = other DNA
actggcgcttctatctgattactctgaggagccatcaccagcgactatgtcgtagtgggtaaagcgcttacggacttcggtccgtaagaagcatcagag

SEQ ID NO: 3341 - DNA, 98 bp, synthetic construct
  misc_feature 1..98: note = engineered ribonucleic acid scaffold (ERS) sequence
  source 1..98: mol_type = other DNA
actggcgcttctatctgattactctgatagccatcaccagcgactatgtcgtagtgggtaaagcgcttacggacttcggtccgtaagaagcatcagag

SEQ ID NO: 3342 - DNA, 99 bp, synthetic construct
  misc_feature 1..99: note = engineered ribonucleic acid scaffold (ERS) sequence
  source 1..99: mol_type = other DNA
actggcgcttctatctgattactctgagctgccatcaccagcgactatgtcgtagtgggtaaagcgcttacggacttcggtccgtaagaagcatcagag

SEQ ID NO: 3343 - DNA, 99 bp, synthetic construct
  misc_feature 1..99: note = engineered ribonucleic acid scaffold (ERS) sequence
  source 1..99: mol_type = other DNA
actggcacttctatctgattactctgagtagccatcaccagcgactatgtcgtagtgggtaaagcgcttacggacttcggtccgtaagaagcatcagag

SEQ ID NO: 3344 - DNA, 99 bp, synthetic construct
  misc_feature 1..99: note = engineered ribonucleic acid scaffold (ERS) sequence
  source 1..99: mol_type = other DNA
actggcgcttctatctgattactctgagtagccatcaccagcgactatgtcgtagtgggtaaagcgcttacggacttcggtccgtaagaagcatcagag

SEQ ID NO: 3345 - DNA, 98 bp, synthetic construct
  misc_feature 1..98: note = engineered ribonucleic acid scaffold (ERS) sequence
  source 1..98: mol_type = other DNA
actggcgcttctatctgattactctgagcaccatcaccagcgactatgtcgtagtgggtaaagcgcttacggacttcggtccgtaagaagcatcagag

SEQ ID NO: 3346 - DNA, 98 bp, synthetic construct
  misc_feature 1..98: note = engineered ribonucleic acid scaffold (ERS) sequence
  source 1..98: mol_type = other DNA
actggcacttctatctgattactctgagcgccatcaccagcgactatgtcgtagtgggtaaagcgcttacggacttcggtccgtaagaagcatcagag

SEQ ID NO: 3347 - DNA, 98 bp, synthetic construct
  misc_feature 1..98: note = engineered ribonucleic acid scaffold (ERS) sequence
  source 1..98: mol_type = other DNA
actggcgcttctatctgattactctgagggccatcaccagcgactatgtcgtagtgggtaaagcgcttacggacttcggtccgtaagaagcatcagag

SEQ ID NO: 3348 - DNA, 98 bp, synthetic construct
  misc_feature 1..98: note = engineered ribonucleic acid scaffold (ERS) sequence
  source 1..98: mol_type = other DNA
actggcgcttctatctgattactctgagtgccgtcaccagcgactatgtcgtagtgggtaaagcgcttacggacttcggtccgtaagaagcatcagag

SEQ ID NO: 3349 - DNA, 98 bp, synthetic construct
  misc_feature 1..98: note = engineered ribonucleic acid scaffold (ERS) sequence
  source 1..98: mol_type = other DNA
actggcacttctatctgattactctgagtgccatcaccagcgactatgtcgtagtgggtaaagcgcttacggacttcggtccgtaagaagcatcagag

SEQ ID NO: 3350 - DNA, 98 bp, synthetic construct
  misc_feature 1..98: note = engineered ribonucleic acid scaffold (ERS) sequence
  source 1..98: mol_type = other DNA
actggcgcttctatctgattactctgagaaccatcaccagcgactatgtcgtagtgggtaaagcgcttacggacttcggtccgtaagaagcatcagag

SEQ ID NO: 3351 - DNA, 98 bp, synthetic construct
  misc_feature 1..98: note = engineered ribonucleic acid scaffold (ERS) sequence
  source 1..98: mol_type = other DNA
actggcgcttctatctgattactctgagagccgtcaccagcgactatgtcgtagtgggtaaagcgcttacggacttcggtccgtaagaagcatcagag

SEQ ID NO: 3352 - DNA, 98 bp, synthetic construct
  misc_feature 1..98: note = engineered ribonucleic acid scaffold (ERS) sequence
  source 1..98: mol_type = other DNA
actggcgcttctatctgattactctgagagccttcaccagcgactatgtcgtagtgggtaaagcgcttacggacttcggtccgtaagaagcatcagag

SEQ ID NO: 3353 - DNA, 98 bp, synthetic construct
  misc_feature 1..98: note = engineered ribonucleic acid scaffold (ERS) sequence
  source 1..98: mol_type = other DNA
actggggcttctatctgattactctgagacccatcaccagcgactatgtcgtagtgggtaaagcgcttacggacttcggtccgtaagaagcatcagag

SEQ ID NO: 3354 - DNA, 98 bp, synthetic construct
  misc_feature 1..98: note = engineered ribonucleic acid scaffold (ERS) sequence
  source 1..98: mol_type = other DNA
actggtgcttctatctgattactctgagagccatcaccagcgactatgtcgtagtgggtaaagcgcttacggacttcggtccgtaagaagcatcagag

SEQ ID NO: 3355 - DNA, 98 bp, synthetic construct
  misc_feature 1..98: note = engineered ribonucleic acid scaffold (ERS) sequence
  source 1..98: mol_type = other DNA
actgggccttctatctgattactctgaggcccatcaccagcgactatgtcgtagtgggtaaagcgcttacggacttcggtccgtaagaagcatcagag

SEQ ID NO: 3356 - DNA, 99 bp, synthetic construct
  misc_feature 1..99: note = engineered ribonucleic acid scaffold (ERS) sequence
  source 1..99: mol_type = other DNA
actggcccttctatctgattactctgaggagccatcaccagcgactatgtcgtagtgggtaaagcgcttacggacttcggtccgtaagaagcatcagag

SEQ ID NO: 3357 - DNA, 98 bp, synthetic construct
  misc_feature 1..98: note = engineered ribonucleic acid scaffold (ERS) sequence
  source 1..98: mol_type = other DNA
actggcccttctatctgattactctgagggccatcaccagcgactatgtcgtagtgggtaaagcgcttacggacttcggtccgtaagaagcatcagag

SEQ ID NO: 3358 - DNA, 98 bp, synthetic construct
  misc_feature 1..98: note = engineered ribonucleic acid scaffold (ERS) sequence
  source 1..98: mol_type = other DNA
actggcccttctatctgattactctgagtgccatcaccagcgactatgtcgtagtgggtaaagcgcttacggacttcggtccgtaagaagcatcagag

SEQ ID NO: 3359 - DNA, 98 bp, synthetic construct
  misc_feature 1..98: note = engineered ribonucleic acid scaffold (ERS) sequence
  source 1..98: mol_type = other DNA
actggcccttctatctgattactctgagagccatcaccagcgactatgtcgtagtgggtaaagcgcttacggacttcggtccgtaagaagcatcagag

SEQ ID NO: 3360 - DNA, 99 bp, synthetic construct
  misc_feature 1..99: note = engineered ribonucleic acid scaffold (ERS) sequence
  source 1..99: mol_type = other DNA
actggcgcttctatctgattactctgagcagccatcaccagcgactatgtcgtagtgggtaaagcgcttacggacttcggtccgtaagaagcatcagag

SEQ ID NO: 3361 - DNA, 98 bp, synthetic construct; identical to SEQ ID NO: 709
  misc_feature 1..98: note = engineered ribonucleic acid scaffold (ERS) sequence
  source 1..98: mol_type = other DNA

SEQ ID NO: 3362 - DNA, 98 bp, synthetic construct
  misc_feature 1..98: note = engineered ribonucleic acid scaffold (ERS) sequence
  source 1..98: mol_type = other DNA
actggcgcttctatctgattactctgagtgccatcaccagcgactatgtcgtagtgggtaaagcgcttacggacttcggtccgtaagaagcatcagag

SEQ ID NO: 3363 - DNA, 98 bp, synthetic construct
  misc_feature 1..98: note = engineered ribonucleic acid scaffold (ERS) sequence
  source 1..98: mol_type = other DNA
actggcgcttctatctgattactctgagagccatcaccagcgactatgtcgtagtgggtaaagcgcttacggacttcggtccgtaagaagcatcagag

SEQ ID NO: 3364 - DNA, 98 bp, synthetic construct
  misc_feature 1..98: note = engineered ribonucleic acid scaffold (ERS) sequence
  source 1..98: mol_type = other DNA
actggctcttctatctgattactctgagcgccatcaccagcgactatgtcgtagtgggtaaagcgcttacggacttcggtccgtaagaagcatcagag

SEQ ID NO: 3365 - DNA, 98 bp, synthetic construct
  misc_feature 1..98: note = engineered ribonucleic acid scaffold (ERS) sequence
  source 1..98: mol_type = other DNA
actggctcttctatctgattactctgagggccatcaccagcgactatgtcgtagtgggtaaagcgcttacggacttcggtccgtaagaagcatcagag

SEQ ID NO: 3366 - DNA, 98 bp, synthetic construct
  misc_feature 1..98: note = engineered ribonucleic acid scaffold (ERS) sequence
  source 1..98: mol_type = other DNA
actggctcttctatctgattactctgagtgccatcaccagcgactatgtcgtagtgggtaaagcgcttacggacttcggtccgtaagaagcatcagag

SEQ ID NO: 3367 - DNA, 98 bp, synthetic construct
  misc_feature 1..98: note = engineered ribonucleic acid scaffold (ERS) sequence
  source 1..98: mol_type = other DNA
actggctcttctatctgattactctgagagccatcaccagcgactatgtcgtagtgggtaaagcgcttacggacttcggtccgtaagaagcatcagag

SEQ ID NO: 3368 - DNA, 98 bp, synthetic construct
  misc_feature 1..98: note = engineered ribonucleic acid scaffold (ERS) sequence
  source 1..98: mol_type = other DNA
actggcggttctatctgattactctgagcgccatcaccagcgactatgtcgtagtgggtaaagcgcttacggacttcggtccgtaagaagcatcagag

SEQ ID NO: 3369 - DNA, 98 bp, synthetic construct
  misc_feature 1..98: note = engineered ribonucleic acid scaffold (ERS) sequence
  source 1..98: mol_type = other DNA
actggcggttctatctgattactctgagagccatcaccagcgactatgtcgtagtgggtaaagcgcttacggacttcggtccgtaagaagcatcagag

SEQ ID NO: 3370 - DNA, 97 bp, synthetic construct
  misc_feature 1..97: note = engineered ribonucleic acid scaffold (ERS) sequence
  source 1..97: mol_type = other DNA
acacacggttctatctgattactctgccgtgttcaccagcgactatgtcgtagtgggtaaagcgcttacggacttcggtccgtaagtcgcatcagag

SEQ ID NO: 3371 - DNA, 97 bp, synthetic construct
  misc_feature 1..97: note = engineered ribonucleic acid scaffold (ERS) sequence
  source 1..97: mol_type = other DNA
acactggtttctatctgattactctgaccagttcaccagcgactatgtcgtagtgggtaaagcgcttacggacttcggtccgtaagtcgcatcagag

SEQ ID NO: 3372 - DNA, 97 bp, synthetic construct
  misc_feature 1..97: note = engineered ribonucleic acid scaffold (ERS) sequence
  source 1..97: mol_type = other DNA
acaggccgttctatctgattactctgcggccttcaccagcgactatgtcgtagtgggtaaagcgcttacggacttcggtccgtaagtcgcatcagag

SEQ ID NO: 3373 - DNA, 97 bp, synthetic construct
  misc_feature 1..97: note = engineered ribonucleic acid scaffold (ERS) sequence
  source 1..97: mol_type = other DNA
acaggtccttctatctgattactctgggaccttcaccagcgactatgtcgtagtgggtaaagcgcttacggacttcggtccgtaagtcgcatcagag

SEQ ID NO: 3374 - DNA, 97 bp, synthetic construct
  misc_feature 1..97: note = engineered ribonucleic acid scaffold (ERS) sequence
  source 1..97: mol_type = other DNA
accagcaattctatctgattactctgttgctgtcaccagcgactatgtcgtagtgggtaaagcgcttacggacttcggtccgtaagtcgcatcagag

SEQ ID NO: 3375 - DNA, 97 bp, synthetic construct
  misc_feature 1..97: note = engineered ribonucleic acid scaffold (ERS) sequence
  source 1..97: mol_type = other DNA
accgagacttctatctgattactctgggctcgtcaccagcgactatgtcgtagtgggtaaagcgcttacggacttcggtccgtaagtcgcatcagag

SEQ ID NO: 3376 - DNA, 97 bp, synthetic construct
  misc_feature 1..97: note = engineered ribonucleic acid scaffold (ERS) sequence
  source 1..97: mol_type = other DNA
acctgtagttctatctgattactctgctacagtcaccagcgactatgtcgtagtgggtaaagcgcttacggacttcggtccgtaagtcgcatcagag

SEQ ID NO: 3377 - DNA, 97 bp, synthetic construct
  misc_feature 1..97: note = engineered ribonucleic acid scaffold (ERS) sequence
  source 1..97: mol_type = other DNA
acgagcacttctatctgattactctggggctctcaccagcgactatgtcgtagtgggtaaagcgcttacggacttcggtccgtaagtcgcatcagag

SEQ ID NO: 3378 - DNA, 97 bp, synthetic construct
  misc_feature 1..97: note = engineered ribonucleic acid scaffold (ERS) sequence
  source 1..97: mol_type = other DNA
acgaggtgttctatctgattactctgcacctctcaccagcgactatgtcgtagtgggtaaagcgcttacggacttcggtccgtaagtcgcatcagag

SEQ ID NO: 3379 - DNA, 97 bp, synthetic construct
  misc_feature 1..97: note = engineered ribonucleic acid scaffold (ERS) sequence
  source 1..97: mol_type = other DNA
acgggactttctatctgattactctgagtccctcaccagcgactatgtcgtagtgggtaaagcgcttacggacttcggtccgtaagtcgcatcagag

SEQ ID NO: 3380 - DNA, 97 bp, synthetic construct
  misc_feature 1..97: note = engineered ribonucleic acid scaffold (ERS) sequence
  source 1..97: mol_type = other DNA
acgggcaattctatctgattactctgttgccctcaccagcgactatgtcgtagtgggtaaagcgcttacggacttcggtccgtaagtcgcatcagag

SEQ ID NO: 3381 - DNA, 97 bp, synthetic construct
  misc_feature 1..97: note = engineered ribonucleic acid scaffold (ERS) sequence
  source 1..97: mol_type = other DNA
actgtgcgttctatctgattactctgcgcacatcaccagcgactatgtcgtagtgggtaaagcgcttacggacttcggtccgtaagtcgcatcagag

SEQ ID NO: 3382 - DNA, 98 bp, synthetic construct
  misc_feature 1..98: note = engineered ribonucleic acid scaffold (ERS) sequence
  source 1..98: mol_type = other DNA
actggcgcttctatctgattactctgggcgccatcaccagcgactatgtcgtagtgggtaaagcgcttacggacttcggtccgtaagtcgcatcagag

SEQ ID NO: 3383 - DNA, 98 bp, synthetic construct
  misc_feature 1..98: note = engineered ribonucleic acid scaffold (ERS) sequence
  source 1..98: mol_type = other DNA
actggcgcttctatctgattactctgggagccatcaccagcgactatgtcgtagtgggtaaagcgcttacggacttcggtccgtaagtcgcatcagag

SEQ ID NO: 3384 - DNA, 98 bp, synthetic construct
  misc_feature 1..98: note = engineered ribonucleic acid scaffold (ERS) sequence
  source 1..98: mol_type = other DNA
actggcgcttctatctgattactctgtgagccatcaccagcgactatgtcgtagtgggtaaagcgcttacggacttcggtccgtaagtcgcatcagag

SEQ ID NO: 3385 - DNA, 99 bp, synthetic construct
  misc_feature 1..99: note = engineered ribonucleic acid scaffold (ERS) sequence
  source 1..99: mol_type = other DNA
actggcgcttctatctgattactctgaggagccatcaccagcgactatgtcgtagtgggtaaagcgcttacggacttcggtccgtaagtcgcatcagag

SEQ ID NO: 3386 - DNA, 98 bp, synthetic construct
  misc_feature 1..98: note = engineered ribonucleic acid scaffold (ERS) sequence
  source 1..98: mol_type = other DNA
actggcgcttctatctgattactctgatagccatcaccagcgactatgtcgtagtgggtaaagcgcttacggacttcggtccgtaagtcgcatcagag

SEQ ID NO: 3387 - DNA, 99 bp, synthetic construct
  misc_feature 1..99: note = engineered ribonucleic acid scaffold (ERS) sequence
  source 1..99: mol_type = other DNA
actggcgcttctatctgattactctgagctgccatcaccagcgactatgtcgtagtgggtaaagcgcttacggacttcggtccgtaagtcgcatcagag

SEQ ID NO: 3388 - DNA, 99 bp, synthetic construct
  misc_feature 1..99: note = engineered ribonucleic acid scaffold (ERS) sequence
  source 1..99: mol_type = other DNA
actggcacttctatctgattactctgagtagccatcaccagcgactatgtcgtagtgggtaaagcgcttacggacttcggtccgtaagtcgcatcagag

SEQ ID NO: 3389 - DNA, 99 bp, synthetic construct
  misc_feature 1..99: note = engineered ribonucleic acid scaffold (ERS) sequence
  source 1..99: mol_type = other DNA
actggcgcttctatctgattactctgagtagccatcaccagcgactatgtcgtagtgggtaaagcgcttacggacttcggtccgtaagtcgcatcagag

SEQ ID NO: 3390 - DNA, 98 bp, synthetic construct
  misc_feature 1..98: note = engineered ribonucleic acid scaffold (ERS) sequence
  source 1..98: mol_type = other DNA
actggcgcttctatctgattactctgagcaccatcaccagcgactatgtcgtagtgggtaaagcgcttacggacttcggtccgtaagtcgcatcagag

SEQ ID NO: 3391 - DNA, 98 bp, synthetic construct
  misc_feature 1..98: note = engineered ribonucleic acid scaffold (ERS) sequence
  source 1..98: mol_type = other DNA
actggcacttctatctgattactctgagcgccatcaccagcgactatgtcgtagtgggtaaagcgcttacggacttcggtccgtaagtcgcatcagag

SEQ ID NO: 3392 - DNA, 98 bp, synthetic construct
  misc_feature 1..98: note = engineered ribonucleic acid scaffold (ERS) sequence
  source 1..98: mol_type = other DNA
actggcgcttctatctgattactctgagggccatcaccagcgactatgtcgtagtgggtaaagcgcttacggacttcggtccgtaagtcgcatcagag

SEQ ID NO: 3393 - DNA, 98 bp, synthetic construct
  misc_feature 1..98: note = engineered ribonucleic acid scaffold (ERS) sequence
  source 1..98: mol_type = other DNA
actggcgcttctatctgattactctgagtgccgtcaccagcgactatgtcgtagtgggtaaagcgcttacggacttcggtccgtaagtcgcatcagag

SEQ ID NO: 3394 - DNA, 98 bp, synthetic construct
  misc_feature 1..98: note = engineered ribonucleic acid scaffold (ERS) sequence
  source 1..98: mol_type = other DNA
actggcacttctatctgattactctgagtgccatcaccagcgactatgtcgtagtgggtaaagcgcttacggacttcggtccgtaagtcgcatcagag

SEQ ID NO: 3395 - DNA, 98 bp, synthetic construct
  misc_feature 1..98: note = engineered ribonucleic acid scaffold (ERS) sequence
  source 1..98: mol_type = other DNA
actggcgcttctatctgattactctgagaaccatcaccagcgactatgtcgtagtgggtaaagcgcttacggacttcggtccgtaagtcgcatcagag

SEQ ID NO: 3396 - DNA, 98 bp, synthetic construct
  misc_feature 1..98: note = engineered ribonucleic acid scaffold (ERS) sequence
  source 1..98: mol_type = other DNA
actggcgcttctatctgattactctgagagccgtcaccagcgactatgtcgtagtgggtaaagcgcttacggacttcggtccgtaagtcgcatcagag

SEQ ID NO: 3397 - DNA, 98 bp, synthetic construct
  misc_feature 1..98: note = engineered ribonucleic acid scaffold (ERS) sequence
  source 1..98: mol_type = other DNA
actggcgcttctatctgattactctgagagccttcaccagcgactatgtcgtagtgggtaaagcgcttacggacttcggtccgtaagtcgcatcagag

SEQ ID NO: 3398 - DNA, 98 bp, synthetic construct
  misc_feature 1..98: note = engineered ribonucleic acid scaffold (ERS) sequence
  source 1..98: mol_type = other DNA
actggggcttctatctgattactctgagacccatcaccagcgactatgtcgtagtgggtaaagcgcttacggacttcggtccgtaagtcgcatcagag

SEQ ID NO: 3399 - DNA, 98 bp, synthetic construct
  misc_feature 1..98: note = engineered ribonucleic acid scaffold (ERS) sequence
  source 1..98: mol_type = other DNA
actggtgcttctatctgattactctgagagccatcaccagcgactatgtcgtagtgggtaaagcgcttacggacttcggtccgtaagtcgcatcagag

SEQ ID NO: 3400 - DNA, 98 bp, synthetic construct
  misc_feature 1..98: note = engineered ribonucleic acid scaffold (ERS) sequence
  source 1..98: mol_type = other DNA
actgggccttctatctgattactctgaggcccatcaccagcgactatgtcgtagtgggtaaagcgcttacggacttcggtccgtaagtcgcatcagag

SEQ ID NO: 3401 - DNA, 99 bp, synthetic construct
  misc_feature 1..99: note = engineered ribonucleic acid scaffold (ERS) sequence
  source 1..99: mol_type = other DNA
actggcccttctatctgattactctgaggagccatcaccagcgactatgtcgtagtgggtaaagcgcttacggacttcggtccgtaagtcgcatcagag

SEQ ID NO: 3402 - DNA, 98 bp, synthetic construct
  misc_feature 1..98: note = engineered ribonucleic acid scaffold (ERS) sequence
  source 1..98: mol_type = other DNA
actggcccttctatctgattactctgagggccatcaccagcgactatgtcgtagtgggtaaagcgcttacggacttcggtccgtaagtcgcatcagag

SEQ ID NO: 3403 - DNA, 98 bp, synthetic construct
  misc_feature 1..98: note = engineered ribonucleic acid scaffold (ERS) sequence
  source 1..98: mol_type = other DNA
actggcccttctatctgattactctgagtgccatcaccagcgactatgtcgtagtgggtaaagcgcttacggacttcggtccgtaagtcgcatcagag

SEQ ID NO: 3404 - DNA, 98 bp, synthetic construct
  misc_feature 1..98: note = engineered ribonucleic acid scaffold (ERS) sequence
  source 1..98: mol_type = other DNA
actggcccttctatctgattactctgagagccatcaccagcgactatgtcgtagtgggtaaagcgcttacggacttcggtccgtaagtcgcatcagag

SEQ ID NO: 3405 - DNA, 99 bp, synthetic construct
  misc_feature 1..99: note = engineered ribonucleic acid scaffold (ERS) sequence
  source 1..99: mol_type = other DNA
actggcgcttctatctgattactctgagcagccatcaccagcgactatgtcgtagtgggtaaagcgcttacggacttcggtccgtaagtcgcatcagag

SEQ ID NO: 3406 - DNA, 98 bp, synthetic construct; identical to SEQ ID NO: 714
  misc_feature 1..98: note = engineered ribonucleic acid scaffold (ERS) sequence
  source 1..98: mol_type = other DNA

SEQ ID NO: 3407 - DNA, 98 bp, synthetic construct
  misc_feature 1..98: note = engineered ribonucleic acid scaffold (ERS) sequence
  source 1..98: mol_type = other DNA
actggcgcttctatctgattactctgagtgccatcaccagcgactatgtcgtagtgggtaaagcgcttacggacttcggtccgtaagtcgcatcagag

SEQ ID NO: 3408 - DNA, 98 bp, synthetic construct
  misc_feature 1..98: note = engineered ribonucleic acid scaffold (ERS) sequence
  source 1..98: mol_type = other DNA
actggcgcttctatctgattactctgagagccatcaccagcgactatgtcgtagtgggtaaagcgcttacggacttcggtccgtaagtcgcatcagag

SEQ ID NO: 3409 - DNA, 98 bp, synthetic construct
  misc_feature 1..98: note = engineered ribonucleic acid scaffold (ERS) sequence
  source 1..98: mol_type = other DNA
actggctcttctatctgattactctgagcgccatcaccagcgactatgtcgtagtgggtaaagcgcttacggacttcggtccgtaagtcgcatcagag

SEQ ID NO: 3410 - DNA, 98 bp, synthetic construct
  misc_feature 1..98: note = engineered ribonucleic acid scaffold (ERS) sequence
  source 1..98: mol_type = other DNA
actggctcttctatctgattactctgagggccatcaccagcgactatgtcgtagtgggtaaagcgcttacggacttcggtccgtaagtcgcatcagag

SEQ ID NO: 3411 - DNA, 98 bp, synthetic construct
  misc_feature 1..98: note = engineered ribonucleic acid scaffold (ERS) sequence
  source 1..98: mol_type = other DNA
actggctcttctatctgattactctgagtgccatcaccagcgactatgtcgtagtgggtaaagcgcttacggacttcggtccgtaagtcgcatcagag

SEQ ID NO: 3412 - DNA, 98 bp, synthetic construct
  misc_feature 1..98: note = engineered ribonucleic acid scaffold (ERS) sequence
  source 1..98: mol_type = other DNA
actggctcttctatctgattactctgagagccatcaccagcgactatgtcgtagtgggtaaagcgcttacggacttcggtccgtaagtcgcatcagag

SEQ ID NO: 3413 - DNA, 98 bp, synthetic construct
  misc_feature 1..98: note = engineered ribonucleic acid scaffold (ERS) sequence
  source 1..98: mol_type = other DNA
actggcggttctatctgattactctgagcgccatcaccagcgactatgtcgtagtgggtaaagcgcttacggacttcggtccgtaagtcgcatcagag

SEQ ID NO: 3414 - DNA, 98 bp, synthetic construct
  misc_feature 1..98: note = engineered ribonucleic acid scaffold (ERS) sequence
  source 1..98: mol_type = other DNA
actggcggttctatctgattactctgagagccatcaccagcgactatgtcgtagtgggtaaagcgcttacggacttcggtccgtaagtcgcatcagag

SEQ ID NO: 3415 - DNA, 97 bp, synthetic construct
  misc_feature 1..97: note = engineered ribonucleic acid scaffold (ERS) sequence
  source 1..97: mol_type = other DNA
acacacggttctatctgattactctgccgtgttcaccagcgactatgtcgtagtgggtaaagcgcttacggagttcgatccgtaagaagcatcagag

SEQ ID NO: 3416 - DNA, 97 bp, synthetic construct
  misc_feature 1..97: note = engineered ribonucleic acid scaffold (ERS) sequence
  source 1..97: mol_type = other DNA
acactggtttctatctgattactctgaccagttcaccagcgactatgtcgtagtgggtaaagcgcttacggagttcgatccgtaagaagcatcagag

SEQ ID NO: 3417 - DNA, 97 bp, synthetic construct
  misc_feature 1..97: note = engineered ribonucleic acid scaffold (ERS) sequence
  source 1..97: mol_type = other DNA
acaggccgttctatctgattactctgcggccttcaccagcgactatgtcgtagtgggtaaagcgcttacggagttcgatccgtaagaagcatcagag

SEQ ID NO: 3418 - DNA, 97 bp, synthetic construct
  misc_feature 1..97: note = engineered ribonucleic acid scaffold (ERS) sequence
  source 1..97: mol_type = other DNA
acaggtccttctatctgattactctgggaccttcaccagcgactatgtcgtagtgggtaaagcgcttacggagttcgatccgtaagaagcatcagag

SEQ ID NO: 3419 - DNA, 97 bp, synthetic construct
  misc_feature 1..97: note = engineered ribonucleic acid scaffold (ERS) sequence
  source 1..97: mol_type = other DNA
accagcaattctatctgattactctgttgctgtcaccagcgactatgtcgtagtgggtaaagcgcttacggagttcgatccgtaagaagcatcagag

SEQ ID NO: 3420 - DNA, 97 bp, synthetic construct
  misc_feature 1..97: note = engineered ribonucleic acid scaffold (ERS) sequence
  source 1..97: mol_type = other DNA
accgagacttctatctgattactctgggctcgtcaccagcgactatgtcgtagtgggtaaagcgcttacggagttcgatccgtaagaagcatcagag

SEQ ID NO: 3421 - DNA, 97 bp, synthetic construct
  misc_feature 1..97: note = engineered ribonucleic acid scaffold (ERS) sequence
  source 1..97: mol_type = other DNA
acctgtagttctatctgattactctgctacagtcaccagcgactatgtcgtagtgggtaaagcgcttacggagttcgatccgtaagaagcatcagag

SEQ ID NO: 3422 - DNA, 97 bp, synthetic construct
  misc_feature 1..97: note = engineered ribonucleic acid scaffold (ERS) sequence
  source 1..97: mol_type = other DNA
acgagcacttctatctgattactctggggctctcaccagcgactatgtcgtagtgggtaaagcgcttacggagttcgatccgtaagaagcatcagag

SEQ ID NO: 3423 - DNA, 97 bp, synthetic construct
  misc_feature 1..97: note = engineered ribonucleic acid scaffold (ERS) sequence
  source 1..97: mol_type = other DNA
acgaggtgttctatctgattactctgcacctctcaccagcgactatgtcgtagtgggtaaagcgcttacggagttcgatccgtaagaagcatcagag

SEQ ID NO: 3424 - DNA, 97 bp, synthetic construct
  misc_feature 1..97: note = engineered ribonucleic acid scaffold (ERS) sequence
  source 1..97: mol_type = other DNA
acgggactttctatctgattactctgagtccctcaccagcgactatgtcgtagtgggtaaagcgcttacggagttcgatccgtaagaagcatcagag

SEQ ID NO: 3425 - DNA, 97 bp, synthetic construct
  misc_feature 1..97: note = engineered ribonucleic acid scaffold (ERS) sequence
  source 1..97: mol_type = other DNA
acgggcaattctatctgattactctgttgccctcaccagcgactatgtcgtagtgggtaaagcgcttacggagttcgatccgtaagaagcatcagag

SEQ ID NO: 3426 - DNA, 97 bp, synthetic construct
  misc_feature 1..97: note = engineered ribonucleic acid scaffold (ERS) sequence
  source 1..97: mol_type = other DNA
actgtgcgttctatctgattactctgcgcacatcaccagcgactatgtcgtagtgggtaaagcgcttacggagttcgatccgtaagaagcatcagag

SEQ ID NO: 3427 - DNA, 98 bp, synthetic construct
  misc_feature 1..98: note = engineered ribonucleic acid scaffold (ERS) sequence
  source 1..98: mol_type = other DNA
actggcgcttctatctgattactctgggcgccatcaccagcgactatgtcgtagtgggtaaagcgcttacggagttcgatccgtaagaagcatcagag

SEQ ID NO: 3428 - DNA, 98 bp, synthetic construct
  misc_feature 1..98: note = engineered ribonucleic acid scaffold (ERS) sequence
  source 1..98: mol_type = other DNA
actggcgcttctatctgattactctgggagccatcaccagcgactatgtcgtagtgggtaaagcgcttacggagttcgatccgtaagaagcatcagag

SEQ ID NO: 3429 - DNA, 98 bp, synthetic construct
  misc_feature 1..98: note = engineered ribonucleic acid scaffold (ERS) sequence
  source 1..98: mol_type = other DNA
actggcgcttctatctgattactctgtgagccatcaccagcgactatgtcgtagtgggtaaagcgcttacggagttcgatccgtaagaagcatcagag

SEQ ID NO: 3430 - DNA, 99 bp, synthetic construct
  misc_feature 1..99: note = engineered ribonucleic acid scaffold (ERS) sequence
  source 1..99: mol_type = other DNA
actggcgcttctatctgattactctgaggagccatcaccagcgactatgtcgtagtgggtaaagcgcttacggagttcgatccgtaagaagcatcagag

SEQ ID NO: 3431 - DNA, 98 bp, synthetic construct
  misc_feature 1..98: note = engineered ribonucleic acid scaffold (ERS) sequence
  source 1..98: mol_type = other DNA
actggcgcttctatctgattactctgatagccatcaccagcgactatgtcgtagtgggtaaagcgcttacggagttcgatccgtaagaagcatcagag

SEQ ID NO: 3432 - DNA, 99 bp, synthetic construct
  misc_feature 1..99: note = engineered ribonucleic acid scaffold (ERS) sequence
  source 1..99: mol_type = other DNA
actggcgcttctatctgattactctgagctgccatcaccagcgactatgtcgtagtgggtaaagcgcttacggagttcgatccgtaagaagcatcagag

SEQ ID NO: 3433 - DNA, 99 bp, synthetic construct
  misc_feature 1..99: note = engineered ribonucleic acid scaffold (ERS) sequence
  source 1..99: mol_type = other DNA
actggcacttctatctgattactctgagtagccatcaccagcgactatgtcgtagtgggtaaagcgcttacggagttcgatccgtaagaagcatcagag

SEQ ID NO: 3434 - DNA, 99 bp, synthetic construct
  misc_feature 1..99: note = engineered ribonucleic acid scaffold (ERS) sequence
  source 1..99: mol_type = other DNA
actggcgcttctatctgattactctgagtagccatcaccagcgactatgtcgtagtgggtaaagcgcttacggagttcgatccgtaagaagcatcagag

SEQ ID NO: 3435 - DNA, 98 bp, synthetic construct
  misc_feature 1..98: note = engineered ribonucleic acid scaffold (ERS) sequence
  source 1..98: mol_type = other DNA
actggcgcttctatctgattactctgagcaccatcaccagcgactatgtcgtagtgggtaaagcgcttacggagttcgatccgtaagaagcatcagag

SEQ ID NO: 3436 - DNA, 98 bp, synthetic construct
  misc_feature 1..98: note = engineered ribonucleic acid scaffold (ERS) sequence
  source 1..98: mol_type = other DNA
actggcacttctatctgattactctgagcgccatcaccagcgactatgtcgtagtgggtaaagcgcttacggagttcgatccgtaagaagcatcagag

SEQ ID NO: 3437 - DNA, 98 bp, synthetic construct
  misc_feature 1..98: note = engineered ribonucleic acid scaffold (ERS) sequence
  source 1..98: mol_type = other DNA
actggcgcttctatctgattactctgagggccatcaccagcgactatgtcgtagtgggtaaagcgcttacggagttcgatccgtaagaagcatcagag

SEQ ID NO: 3438 - DNA, 98 bp, synthetic construct
  misc_feature 1..98: note = engineered ribonucleic acid scaffold (ERS) sequence
  source 1..98: mol_type = other DNA
actggcgcttctatctgattactctgagtgccgtcaccagcgactatgtcgtagtgggtaaagcgcttacggagttcgatccgtaagaagcatcagag

SEQ ID NO: 3439 - DNA, 98 bp, synthetic construct
  misc_feature 1..98: note = engineered ribonucleic acid scaffold (ERS) sequence
  source 1..98: mol_type = other DNA
actggcacttctatctgattactctgagtgccatcaccagcgactatgtcgtagtgggtaaagcgcttacggagttcgatccgtaagaagcatcagag

SEQ ID NO: 3440 - DNA, 98 bp, synthetic construct
  misc_feature 1..98: note = engineered ribonucleic acid scaffold (ERS) sequence
  source 1..98: mol_type = other DNA
actggcgcttctatctgattactctgagaaccatcaccagcgactatgtcgtagtgggtaaagcgcttacggagttcgatccgtaagaagcatcagag

SEQ ID NO: 3441 - DNA, 98 bp, synthetic construct
  misc_feature 1..98: note = engineered ribonucleic acid scaffold (ERS) sequence
  source 1..98: mol_type = other DNA
actggcgcttctatctgattactctgagagccgtcaccagcgactatgtcgtagtgggtaaagcgcttacggagttcgatccgtaagaagcatcagag

SEQ ID NO: 3442 - DNA, 98 bp, synthetic construct
  misc_feature 1..98: note = engineered ribonucleic acid scaffold (ERS) sequence
  source 1..98: mol_type = other DNA
actggcgcttctatctgattactctgagagccttcaccagcgactatgtcgtagtgggtaaagcgcttacggagttcgatccgtaagaagcatcagag

SEQ ID NO: 3443 - DNA, 98 bp, synthetic construct
  misc_feature 1..98: note = engineered ribonucleic acid scaffold (ERS) sequence
  source 1..98: mol_type = other DNA
actggggcttctatctgattactctgagacccatcaccagcgactatgtcgtagtgggtaaagcgcttacggagttcgatccgtaagaagcatcagag

SEQ ID NO: 3444 - DNA, 98 bp, synthetic construct
  misc_feature 1..98: note = engineered ribonucleic acid scaffold (ERS) sequence
  source 1..98: mol_type = other DNA
actggtgcttctatctgattactctgagagccatcaccagcgactatgtcgtagtgggtaaagcgcttacggagttcgatccgtaagaagcatcagag

SEQ ID NO: 3445 - DNA, 98 bp, synthetic construct
  misc_feature 1..98: note = engineered ribonucleic acid scaffold (ERS) sequence
  source 1..98: mol_type = other DNA
actgggccttctatctgattactctgaggcccatcaccagcgactatgtcgtagtgggtaaagcgcttacggagttcgatccgtaagaagcatcagag

SEQ ID NO: 3446 - DNA, 99 bp, synthetic construct
  misc_feature 1..99: note = engineered ribonucleic acid scaffold (ERS) sequence
  source 1..99: mol_type = other DNA
actggcccttctatctgattactctgaggagccatcaccagcgactatgtcgtagtgggtaaagcgcttacggagttcgatccgtaagaagcatcagag

SEQ ID NO: 3447 - DNA, 98 bp, synthetic construct
  misc_feature 1..98: note = engineered ribonucleic acid scaffold (ERS) sequence
  source 1..98: mol_type = other DNA
actggcccttctatctgattactctgagggccatcaccagcgactatgtcgtagtgggtaaagcgcttacggagttcgatccgtaagaagcatcagag

SEQ ID NO: 3448 - DNA, 98 bp, synthetic construct
  misc_feature 1..98: note = engineered ribonucleic acid scaffold (ERS) sequence
  source 1..98: mol_type = other DNA
actggcccttctatctgattactctgagtgccatcaccagcgactatgtcgtagtgggtaaagcgcttacggagttcgatccgtaagaagcatcagag

SEQ ID NO: 3449 - DNA, 98 bp, synthetic construct
  misc_feature 1..98: note = engineered ribonucleic acid scaffold (ERS) sequence
  source 1..98: mol_type = other DNA
actggcccttctatctgattactctgagagccatcaccagcgactatgtcgtagtgggtaaagcgcttacggagttcgatccgtaagaagcatcagag

SEQ ID NO: 3450 - DNA, 99 bp, synthetic construct
  misc_feature 1..99: note = engineered ribonucleic acid scaffold (ERS) sequence
  source 1..99: mol_type = other DNA
actggcgcttctatctgattactctgagcagccatcaccagcgactatgtcgtagtgggtaaagcgcttacggagttcgatccgtaagaagcatcagag

SEQ ID NO: 3451 - DNA, 98 bp, synthetic construct; identical to SEQ ID NO: 715
  misc_feature 1..98: note = engineered ribonucleic acid scaffold (ERS) sequence
  source 1..98: mol_type = other DNA

SEQ ID NO: 3452 - DNA, 98 bp, synthetic construct
  misc_feature 1..98: note = engineered ribonucleic acid scaffold (ERS) sequence
  source 1..98: mol_type = other DNA
actggcgcttctatctgattactctgagtgccatcaccagcgactatgtcgtagtgggtaaagcgcttacggagttcgatccgtaagaagcatcagag

SEQ ID NO: 3453 - DNA, 98 bp, synthetic construct
  misc_feature 1..98: note = engineered ribonucleic acid scaffold (ERS) sequence
  source 1..98: mol_type = other DNA
actggcgcttctatctgattactctgagagccatcaccagcgactatgtcgtagtgggtaaagcgcttacggagttcgatccgtaagaagcatcagag

SEQ ID NO: 3454 - DNA, 98 bp, synthetic construct
  misc_feature 1..98: note = engineered ribonucleic acid scaffold (ERS) sequence
  source 1..98: mol_type = other DNA
actggctcttctatctgattactctgagcgccatcaccagcgactatgtcgtagtgggtaaagcgcttacggagttcgatccgtaagaagcatcagag

SEQ ID NO: 3455 - DNA, 98 bp, synthetic construct
  misc_feature 1..98: note = engineered ribonucleic acid scaffold (ERS) sequence
  source 1..98: mol_type = other DNA
actggctcttctatctgattactctgagggccatcaccagcgactatgtcgtagtgggtaaagcgcttacggagttcgatccgtaagaagcatcagag

SEQ ID NO: 3456 - DNA, 98 bp, synthetic construct
  misc_feature 1..98: note = engineered ribonucleic acid scaffold (ERS) sequence
  source 1..98: mol_type = other DNA
actggctcttctatctgattactctgagtgccatcaccagcgactatgtcgtagtgggtaaagcgcttacggagttcgatccgtaagaagcatcagag

SEQ ID NO: 3457 - DNA, 98 bp, synthetic construct
  misc_feature 1..98: note = engineered ribonucleic acid scaffold (ERS) sequence
  source 1..98: mol_type = other DNA
actggctcttctatctgattactctgagagccatcaccagcgactatgtcgtagtgggtaaagcgcttacggagttcgatccgtaagaagcatcagag

SEQ ID NO: 3458 - DNA, 98 bp, synthetic construct
  misc_feature 1..98: note = engineered ribonucleic acid scaffold (ERS) sequence
  source 1..98: mol_type = other DNA
actggcggttctatctgattactctgagcgccatcaccagcgactatgtcgtagtgggtaaagcgcttacggagttcgatccgtaagaagcatcagag

SEQ ID NO: 3459 - DNA, 98 bp, synthetic construct
  misc_feature 1..98: note = engineered ribonucleic acid scaffold (ERS) sequence
  source 1..98: mol_type = other DNA
actggcggttctatctgattactctgagagccatcaccagcgactatgtcgtagtgggtaaagcgcttacggagttcgatccgtaagaagcatcagag

SEQ ID NO: 3460 - DNA, 97 bp, synthetic construct
  misc_feature 1..97: note = engineered ribonucleic acid scaffold (ERS) sequence
  source 1..97: mol_type = other DNA
acacacggttctatctgattactctgccgtgttcaccagcgactatgtcgtagtgggtaaagcgctttcggacttcggtccggaagaagcatcagag

SEQ ID NO: 3461 - DNA, 97 bp, synthetic construct
  misc_feature 1..97: note = engineered ribonucleic acid scaffold (ERS) sequence
  source 1..97: mol_type = other DNA
acactggtttctatctgattactctgaccagttcaccagcgactatgtcgtagtgggtaaagcgctttcggacttcggtccggaagaagcatcagag

SEQ ID NO: 3462 - DNA, 97 bp, synthetic construct
  misc_feature 1..97: note = engineered ribonucleic acid scaffold (ERS) sequence
  source 1..97: mol_type = other DNA
acaggccgttctatctgattactctgcggccttcaccagcgactatgtcgtagtgggtaaagcgctttcggacttcggtccggaagaagcatcagag

SEQ ID NO: 3463 - DNA, 97 bp, synthetic construct
  misc_feature 1..97: note = engineered ribonucleic acid scaffold (ERS) sequence
  source 1..97: mol_type = other DNA
acaggtccttctatctgattactctgggaccttcaccagcgactatgtcgtagtgggtaaagcgctttcggacttcggtccggaagaagcatcagag

SEQ ID NO: 3464 - DNA, 97 bp, synthetic construct
  misc_feature 1..97: note = engineered ribonucleic acid scaffold (ERS) sequence
  source 1..97: mol_type = other DNA
accagcaattctatctgattactctgttgctgtcaccagcgactatgtcgtagtgggtaaagcgctttcggacttcggtccggaagaagcatcagag

SEQ ID NO: 3465 - DNA, 97 bp, synthetic construct
  misc_feature 1..97: note = engineered ribonucleic acid scaffold (ERS) sequence
  source 1..97: mol_type = other DNA
accgagacttctatctgattactctgggctcgtcaccagcgactatgtcgtagtgggtaaagcgctttcggacttcggtccggaagaagcatcagag

SEQ ID NO: 3466 - DNA, 97 bp, synthetic construct
  misc_feature 1..97: note = engineered ribonucleic acid scaffold (ERS) sequence
  source 1..97: mol_type = other DNA
acctgtagttctatctgattactctgctacagtcaccagcgactatgtcgtagtgggtaaagcgctttcggacttcggtccggaagaagcatcagag

SEQ ID NO: 3467 - DNA, 97 bp, synthetic construct
  misc_feature 1..97: note = engineered ribonucleic acid scaffold (ERS) sequence
  source 1..97: mol_type = other DNA
acgagcacttctatctgattactctggggctctcaccagcgactatgtcgtagtgggtaaagcgctttcggacttcggtccggaagaagcatcagag

SEQ ID NO: 3468 - DNA, 97 bp, synthetic construct
  misc_feature 1..97: note = engineered ribonucleic acid scaffold (ERS) sequence
  source 1..97: mol_type = other DNA
acgaggtgttctatctgattactctgcacctctcaccagcgactatgtcgtagtgggtaaagcgctttcggacttcggtccggaagaagcatcagag

SEQ ID NO: 3469 - DNA, 97 bp, synthetic construct
  misc_feature 1..97: note = engineered ribonucleic acid scaffold (ERS) sequence
  source 1..97: mol_type = other DNA
acgggactttctatctgattactctgagtccctcaccagcgactatgtcgtagtgggtaaagcgctttcggacttcggtccggaagaagcatcagag

SEQ ID NO: 3470 - DNA, 97 bp, synthetic construct
  misc_feature 1..97: note = engineered ribonucleic acid scaffold (ERS) sequence
  source 1..97: mol_type = other DNA
acgggcaattctatctgattactctgttgccctcaccagcgactatgtcgtagtgggtaaagcgctttcggacttcggtccggaagaagcatcagag

SEQ ID NO: 3471 - DNA, 97 bp, synthetic construct
  misc_feature 1..97: note = engineered ribonucleic acid scaffold (ERS) sequence
  source 1..97: mol_type = other DNA
actgtgcgttctatctgattactctgcgcacatcaccagcgactatgtcgtagtgggtaaagcgctttcggacttcggtccggaagaagcatcagag

SEQ ID NO: 3472 - DNA, 98 bp, synthetic construct
  misc_feature 1..98: note = engineered ribonucleic acid scaffold (ERS) sequence
  source 1..98: mol_type = other DNA
actggcgcttctatctgattactctgggcgccatcaccagcgactatgtcgtagtgggtaaagcgctttcggacttcggtccggaagaagcatcagag

SEQ ID NO: 3473 - DNA, 98 bp, synthetic construct
  misc_feature 1..98: note = engineered ribonucleic acid scaffold (ERS) sequence
  source 1..98: mol_type = other DNA
actggcgcttctatctgattactctgggagccatcaccagcgactatgtcgtagtgggtaaagcgctttcggacttcggtccggaagaagcatcagag

SEQ ID NO: 3474 - DNA, 98 bp, synthetic construct
  misc_feature 1..98: note = engineered ribonucleic acid scaffold (ERS) sequence
  source 1..98: mol_type = other DNA
actggcgcttctatctgattactctgtgagccatcaccagcgactatgtcgtagtgggtaaagcgctttcggacttcggtccggaagaagcatcagag

SEQ ID NO: 3475 - DNA, 99 bp, synthetic construct
  misc_feature 1..99: note = engineered ribonucleic acid scaffold (ERS) sequence
  source 1..99: mol_type = other DNA
actggcgcttctatctgattactctgaggagccatcaccagcgactatgtcgtagtgggtaaagcgctttcggacttcggtccggaagaagcatcagag

SEQ ID NO: 3476 - DNA, 98 bp, synthetic construct
  misc_feature 1..98: note = engineered ribonucleic acid scaffold (ERS) sequence
  source 1..98: mol_type = other DNA
actggcgcttctatctgattactctgatagccatcaccagcgactatgtcgtagtgggtaaagcgctttcggacttcggtccggaagaagcatcagag

SEQ ID NO: 3477 - DNA, 99 bp, synthetic construct
  misc_feature 1..99: note = engineered ribonucleic acid scaffold (ERS) sequence
  source 1..99: mol_type = other DNA
actggcgcttctatctgattactctgagctgccatcaccagcgactatgtcgtagtgggtaaagcgctttcggacttcggtccggaagaagcatcagag

SEQ ID NO: 3478 - DNA, 99 bp, synthetic construct
  misc_feature 1..99: note = engineered ribonucleic acid scaffold (ERS) sequence
  source 1..99: mol_type = other DNA
actggcacttctatctgattactctgagtagccatcaccagcgactatgtcgtagtgggtaaagcgctttcggacttcggtccggaagaagcatcagag

SEQ ID NO: 3479 - DNA, 99 bp, synthetic construct
  misc_feature 1..99: note = engineered ribonucleic acid scaffold (ERS) sequence
  source 1..99: mol_type = other DNA
actggcgcttctatctgattactctgagtagccatcaccagcgactatgtcgtagtgggtaaagcgctttcggacttcggtccggaagaagcatcagag

SEQ ID NO: 3480 - DNA, 98 bp, synthetic construct
  misc_feature 1..98: note = engineered ribonucleic acid scaffold (ERS) sequence
  source 1..98: mol_type = other DNA
actggcgcttctatctgattactctgagcaccatcaccagcgactatgtcgtagtgggtaaagcgctttcggacttcggtccggaagaagcatcagag

SEQ ID NO: 3481 - DNA, 98 bp, synthetic construct
  misc_feature 1..98: note = engineered ribonucleic acid scaffold (ERS) sequence
  source 1..98: mol_type = other DNA
actggcacttctatctgattactctgagcgccatcaccagcgactatgtcgtagtgggtaaagcgctttcggacttcggtccggaagaagcatcagag

SEQ ID NO: 3482 - DNA, 98 bp, synthetic construct
  misc_feature 1..98: note = engineered ribonucleic acid scaffold (ERS) sequence
  source 1..98: mol_type = other DNA
actggcgcttctatctgattactctgagggccatcaccagcgactatgtcgtagtgggtaaagcgctttcggacttcggtccggaagaagcatcagag

SEQ ID NO: 3483 - DNA, 98 bp, synthetic construct
  misc_feature 1..98: note = engineered ribonucleic acid scaffold (ERS) sequence
  source 1..98: mol_type = other DNA
actggcgcttctatctgattactctgagtgccgtcaccagcgactatgtcgtagtgggtaaagcgctttcggacttcggtccggaagaagcatcagag

SEQ ID NO: 3484 - DNA, 98 bp, synthetic construct
  misc_feature 1..98: note = engineered ribonucleic acid scaffold (ERS) sequence
  source 1..98: mol_type = other DNA
actggcacttctatctgattactctgagtgccatcaccagcgactatgtcgtagtgggtaaagcgctttcggacttcggtccggaagaagcatcagag

SEQ ID NO: 3485 - DNA, 98 bp, synthetic construct
  misc_feature 1..98: note = engineered ribonucleic acid scaffold (ERS) sequence
  source 1..98: mol_type = other DNA
actggcgcttctatctgattactctgagaaccatcaccagcgactatgtcgtagtgggtaaagcgctttcggacttcggtccggaagaagcatcagag

SEQ ID NO: 3486 - DNA, 98 bp, synthetic construct
  misc_feature 1..98: note = engineered ribonucleic acid scaffold (ERS) sequence
  source 1..98: mol_type = other DNA
actggcgcttctatctgattactctgagagccgtcaccagcgactatgtcgtagtgggtaaagcgctttcggacttcggtccggaagaagcatcagag

SEQ ID NO: 3487 - DNA, 98 bp, synthetic construct
  misc_feature 1..98: note = engineered ribonucleic acid scaffold (ERS) sequence
  source 1..98: mol_type = other DNA
actggcgcttctatctgattactctgagagccttcaccagcgactatgtcgtagtgggtaaagcgctttcggacttcggtccggaagaagcatcagag

SEQ ID NO: 3488 - DNA, 98 bp, synthetic construct
  misc_feature 1..98: note = engineered ribonucleic acid scaffold (ERS) sequence
  source 1..98: mol_type = other DNA
actggggcttctatctgattactctgagacccatcaccagcgactatgtcgtagtgggtaaagcgctttcggacttcggtccggaagaagcatcagag

SEQ ID NO: 3489 - DNA, 98 bp, synthetic construct
  misc_feature 1..98: note = engineered ribonucleic acid scaffold (ERS) sequence
  source 1..98: mol_type = other DNA
actggtgcttctatctgattactctgagagccatcaccagcgactatgtcgtagtgggtaaagcgctttcggacttcggtccggaagaagcatcagag

SEQ ID NO: 3490 - DNA, 98 bp, synthetic construct
  misc_feature 1..98: note = engineered ribonucleic acid scaffold (ERS) sequence
  source 1..98: mol_type = other DNA
actgggccttctatctgattactctgaggcccatcaccagcgactatgtcgtagtgggtaaagcgctttcggacttcggtccggaagaagcatcagag

SEQ ID NO: 3491 - DNA, 99 bp, synthetic construct
  misc_feature 1..99: note = engineered ribonucleic acid scaffold (ERS) sequence
  source 1..99: mol_type = other DNA
actggcccttctatctgattactctgaggagccatcaccagcgactatgtcgtagtgggtaaagcgctttcggacttcggtccggaagaagcatcagag

SEQ ID NO: 3492 - DNA, 98 bp, synthetic construct
  misc_feature 1..98: note = engineered ribonucleic acid scaffold (ERS) sequence
  source 1..98: mol_type = other DNA
actggcccttctatctgattactctgagggccatcaccagcgactatgtcgtagtgggtaaagcgctttcggacttcggtccggaagaagcatcagag

SEQ ID NO: 3493 - DNA, 98 bp, synthetic construct
  misc_feature 1..98: note = engineered ribonucleic acid scaffold (ERS) sequence
  source 1..98: mol_type = other DNA
actggcccttctatctgattactctgagtgccatcaccagcgactatgtcgtagtgggtaaagcgctttcggacttcggtccggaagaagcatcagag

SEQ ID NO: 3494 - DNA, 98 bp, synthetic construct
  misc_feature 1..98: note = engineered ribonucleic acid scaffold (ERS) sequence
  source 1..98: mol_type = other DNA
actggcccttctatctgattactctgagagccatcaccagcgactatgtcgtagtgggtaaagcgctttcggacttcggtccggaagaagcatcagag

SEQ ID NO: 3495 - DNA, 99 bp, synthetic construct
  misc_feature 1..99: note = engineered ribonucleic acid scaffold (ERS) sequence
  source 1..99: mol_type = other DNA
actggcgcttctatctgattactctgagcagccatcaccagcgactatgtcgtagtgggtaaagcgctttcggacttcggtccggaagaagcatcagag

SEQ ID NO: 3496 - DNA, 98 bp, synthetic construct; identical to SEQ ID NO: 711
  misc_feature 1..98: note = engineered ribonucleic acid scaffold (ERS) sequence
  source 1..98: mol_type = other DNA

SEQ ID NO: 3497 - DNA, 98 bp, synthetic construct
  misc_feature 1..98: note = engineered ribonucleic acid scaffold (ERS) sequence
  source 1..98: mol_type = other DNA
actggcgcttctatctgattactctgagtgccatcaccagcgactatgtcgtagtgggtaaagcgctttcggacttcggtccggaagaagcatcagag

SEQ ID NO: 3498 - DNA, 98 bp, synthetic construct
  misc_feature 1..98: note = engineered ribonucleic acid scaffold (ERS) sequence
  source 1..98: mol_type = other DNA
actggcgcttctatctgattactctgagagccatcaccagcgactatgtcgtagtgggtaaagcgctttcggacttcggtccggaagaagcatcagag

SEQ ID NO: 3499 - DNA, 98 bp, synthetic construct
  misc_feature 1..98: note = engineered ribonucleic acid scaffold (ERS) sequence
  source 1..98: mol_type = other DNA
actggctcttctatctgattactctgagcgccatcaccagcgactatgtcgtagtgggtaaagcgctttcggacttcggtccggaagaagcatcagag

SEQ ID NO: 3500 - DNA, 98 bp, synthetic construct
  misc_feature 1..98: note = engineered ribonucleic acid scaffold (ERS) sequence
  source 1..98: mol_type = other DNA
actggctcttctatctgattactctgagggccatcaccagcgactatgtcgtagtgggtaaagcgctttcggacttcggtccggaagaagcatcagag

SEQ ID NO: 3501 - DNA, 98 bp, synthetic construct
  misc_feature 1..98: note = engineered ribonucleic acid scaffold (ERS) sequence
  source 1..98: mol_type = other DNA
actggctcttctatctgattactctgagtgccatcaccagcgactatgtcgtagtgggtaaagcgctttcggacttcggtccggaagaagcatcagag

SEQ ID NO: 3502 - DNA, 98 bp, synthetic construct
  misc_feature 1..98: note = engineered ribonucleic acid scaffold (ERS) sequence
  source 1..98: mol_type = other DNA
actggctcttctatctgattactctgagagccatcaccagcgactatgtcgtagtgggtaaagcgctttcggacttcggtccggaagaagcatcagag

SEQ ID NO: 3503 - DNA, 98 bp, synthetic construct
  misc_feature 1..98: note = engineered ribonucleic acid scaffold (ERS) sequence
  source 1..98: mol_type = other DNA
actggcggttctatctgattactctgagcgccatcaccagcgactatgtcgtagtgggtaaagcgctttcggacttcggtccggaagaagcatcagag

SEQ ID NO: 3504 - DNA, 98 bp, synthetic construct
  misc_feature 1..98: note = engineered ribonucleic acid scaffold (ERS) sequence
  source 1..98: mol_type = other DNA
actggcggttctatctgattactctgagagccatcaccagcgactatgtcgtagtgggtaaagcgctttcggacttcggtccggaagaagcatcagag

SEQ ID NO: 3505 - DNA, 101 bp, synthetic construct
  misc_feature 1..101: note = engineered ribonucleic acid scaffold (ERS) sequence
  source 1..101: mol_type = other DNA
acacacggttctatctgattactctgccgtgttcaccagcgactatgtcgtagtgggtaaagcggcagatctgagcctccgagctctctgccgcatcagag

SEQ ID NO: 3506 - DNA, 101 bp, synthetic construct
  misc_feature 1..101: note = engineered ribonucleic acid scaffold (ERS) sequence
  source 1..101: mol_type = other DNA
acactggtttctatctgattactctgaccagttcaccagcgactatgtcgtagtgggtaaagcggcagatctgagcctccgagctctctgccgcatcagag

SEQ ID NO: 3507 - DNA, 101 bp, synthetic construct
  misc_feature 1..101: note = engineered ribonucleic acid scaffold (ERS) sequence
  source 1..101: mol_type = other DNA
acaggccgttctatctgattactctgcggccttcaccagcgactatgtcgtagtgggtaaagcggcagatctgagcctccgagctctctgccgcatcagag

SEQ ID NO: 3508 - DNA, 101 bp, synthetic construct
  misc_feature 1..101: note = engineered ribonucleic acid scaffold (ERS) sequence
  source 1..101: mol_type = other DNA
acaggtccttctatctgattactctgggaccttcaccagcgactatgtcgtagtgggtaaagcggcagatctgagcctccgagctctctgccgcatcagag

SEQ ID NO: 3509 - DNA, 101 bp, synthetic construct
  misc_feature 1..101: note = engineered ribonucleic acid scaffold (ERS) sequence
  source 1..101: mol_type = other DNA
accagcaattctatctgattactctgttgctgtcaccagcgactatgtcgtagtgggtaaagcggcagatctgagcctccgagctctctgccgcatcagag

SEQ ID NO: 3510 - DNA, 101 bp, synthetic construct
  misc_feature 1..101: note = engineered ribonucleic acid scaffold (ERS) sequence
  source 1..101: mol_type = other DNA
accgagacttctatctgattactctgggctcgtcaccagcgactatgtcgtagtgggtaaagcggcagatctgagcctccgagctctctgccgcatcagag

SEQ ID NO: 3511 - DNA, 101 bp, synthetic construct
  misc_feature 1..101: note = engineered ribonucleic acid scaffold (ERS) sequence
  source 1..101: mol_type = other DNA
acctgtagttctatctgattactctgctacagtcaccagcgactatgtcgtagtgggtaaagcggcagatctgagcctccgagctctctgccgcatcagag

SEQ ID NO: 3512 - DNA, 101 bp, synthetic construct
  misc_feature 1..101: note = engineered ribonucleic acid scaffold (ERS) sequence
  source 1..101: mol_type = other DNA
acgagcacttctatctgattactctggggctctcaccagcgactatgtcgtagtgggtaaagcggcagatctgagcctccgagctctctgccgcatcagag

SEQ ID NO: 3513 - DNA, 101 bp, synthetic construct
  misc_feature 1..101: note = engineered ribonucleic acid scaffold (ERS) sequence
  source 1..101: mol_type = other DNA
acgaggtgttctatctgattactctgcacctctcaccagcgactatgtcgtagtgggtaaagcggcagatctgagcctccgagctctctgccgcatcagag

SEQ ID NO: 3514 - DNA, 101 bp, synthetic construct
  misc_feature 1..101: note = engineered ribonucleic acid scaffold (ERS) sequence
  source 1..101: mol_type = other DNA
acgggactttctatctgattactctgagtccctcaccagcgactatgtcgtagtgggtaaagcggcagatctgagcctccgagctctctgccgcatcagag

SEQ ID NO: 3515 - DNA, 101 bp, synthetic construct
  misc_feature 1..101: note = engineered ribonucleic acid scaffold (ERS) sequence
  source 1..101: mol_type = other DNA
acgggcaattctatctgattactctgttgccctcaccagcgactatgtcgtagtgggtaaagcggcagatctgagcctccgagctctctgccgcatcagag

SEQ ID NO: 3516 - DNA, 101 bp, synthetic construct
  misc_feature 1..101: note = engineered ribonucleic acid scaffold (ERS) sequence
  source 1..101: mol_type = other DNA
actgtgcgttctatctgattactctgcgcacatcaccagcgactatgtcgtagtgggtaaagcggcagatctgagcctccgagctctctgccgcatcagag

SEQ ID NO: 3517 - DNA, 102 bp, synthetic construct
  misc_feature 1..102: note = engineered ribonucleic acid scaffold (ERS) sequence
  source 1..102: mol_type = other DNA
actggcgcttctatctgattactctgggcgccatcaccagcgactatgtcgtagtgggtaaagcggcagatctgagcctccgagctctctgccgcatcagag

SEQ ID NO: 3518 - DNA, 102 bp, synthetic construct
  misc_feature 1..102: note = engineered ribonucleic acid scaffold (ERS) sequence
  source 1..102: mol_type = other DNA
actggcgcttctatctgattactctgggagccatcaccagcgactatgtcgtagtgggtaaagcggcagatctgagcctccgagctctctgccgcatcagag

SEQ ID NO: 3519 - DNA, 102 bp, synthetic construct
  misc_feature 1..102: note = engineered ribonucleic acid scaffold (ERS) sequence
  source 1..102: mol_type = other DNA
actggcgcttctatctgattactctgtgagccatcaccagcgactatgtcgtagtgggtaaagcggcagatctgagcctccgagctctctgccgcatcagag

SEQ ID NO: 3520 - DNA, 103 bp, synthetic construct
  misc_feature 1..103: note = engineered ribonucleic acid scaffold (ERS) sequence
  source 1..103: mol_type = other DNA
actggcgcttctatctgattactctgaggagccatcaccagcgactatgtcgtagtgggtaaagcggcagatctgagcctccgagctctctgccgcatcagag

SEQ ID NO: 3521 - DNA, 102 bp, synthetic construct
  misc_feature 1..102: note = engineered ribonucleic acid scaffold (ERS) sequence
  source 1..102: mol_type = other DNA
actggcgcttctatctgattactctgatagccatcaccagcgactatgtcgtagtgggtaaagcggcagatctgagcctccgagctctctgccgcatcagag

SEQ ID NO: 3522 - DNA, 103 bp, synthetic construct
  misc_feature 1..103: note = engineered ribonucleic acid scaffold (ERS) sequence
  source 1..103: mol_type = other DNA
actggcgcttctatctgattactctgagctgccatcaccagcgactatgtcgtagtgggtaaagcggcagatctgagcctccgagctctctgccgcatcagag

SEQ ID NO: 3523 - DNA, 103 bp, synthetic construct
  misc_feature 1..103: note = engineered ribonucleic acid scaffold (ERS) sequence
  source 1..103: mol_type = other DNA
actggcacttctatctgattactctgagtagccatcaccagcgactatgtcgtagtgggtaaagcggcagatctgagcctccgagctctctgccgcatcagag

SEQ ID NO: 3524 - DNA, 103 bp, synthetic construct
  misc_feature 1..103: note = engineered ribonucleic acid scaffold (ERS) sequence
  source 1..103: mol_type = other DNA
actggcgcttctatctgattactctgagtagccatcaccagcgactatgtcgtagtgggtaaagcggcagatctgagcctccgagctctctgccgcatcagag

SEQ ID NO: 3525 - DNA, 102 bp, synthetic construct
  misc_feature 1..102: note = engineered ribonucleic acid scaffold (ERS) sequence
  source 1..102: mol_type = other DNA
actggcgcttctatctgattactctgagcaccatcaccagcgactatgtcgtagtgggtaaagcggcagatctgagcctccgagctctctgccgcatcagag

SEQ ID NO: 3526 - DNA, 102 bp, synthetic construct
  misc_feature 1..102: note = engineered ribonucleic acid scaffold (ERS) sequence
  source 1..102: mol_type = other DNA
actggcacttctatctgattactctgagcgccatcaccagcgactatgtcgtagtgggtaaagcggcagatctgagcctccgagctctctgccgcatcagag

SEQ ID NO: 3527 - DNA, 102 bp, synthetic construct
  misc_feature 1..102: note = engineered ribonucleic acid scaffold (ERS) sequence
  source 1..102: mol_type = other DNA
actggcgcttctatctgattactctgagggccatcaccagcgactatgtcgtagtgggtaaagcggcagatctgagcctccgagctctctgccgcatcagag

SEQ ID NO: 3528 - DNA, 102 bp, synthetic construct
  misc_feature 1..102: note = engineered ribonucleic acid scaffold (ERS) sequence
  source 1..102: mol_type = other DNA
actggcgcttctatctgattactctgagtgccgtcaccagcgactatgtcgtagtgggtaaagcggcagatctgagcctccgagctctctgccgcatcagag

SEQ ID NO: 3529 - DNA, 102 bp, synthetic construct
  misc_feature 1..102: note = engineered ribonucleic acid scaffold (ERS) sequence
  source 1..102: mol_type = other DNA
actggcacttctatctgattactctgagtgccatcaccagcgactatgtcgtagtgggtaaagcggcagatctgagcctccgagctctctgccgcatcagag

SEQ ID NO: 3530 - DNA, 102 bp, synthetic construct
  misc_feature 1..102: note = engineered ribonucleic acid scaffold (ERS) sequence
  source 1..102: mol_type = other DNA
actggcgcttctatctgattactctgagaaccatcaccagcgactatgtcgtagtgggtaaagcggcagatctgagcctccgagctctctgccgcatcagag

SEQ ID NO: 3531 - DNA, 102 bp, synthetic construct
  misc_feature 1..102: note = engineered ribonucleic acid scaffold (ERS) sequence
  source 1..102: mol_type = other DNA
actggcgcttctatctgattactctgagagccgtcaccagcgactatgtcgtagtgggtaaagcggcagatctgagcctccgagctctctgccgcatcagag

SEQ ID NO: 3532 - DNA, 102 bp, synthetic construct
  misc_feature 1..102: note = engineered ribonucleic acid scaffold (ERS) sequence
  source 1..102: mol_type = other DNA
actggcgcttctatctgattactctgagagccttcaccagcgactatgtcgtagtgggtaaagcggcagatctgagcctccgagctctctgccgcatcagag

SEQ ID NO: 3533 - DNA, 102 bp, synthetic construct
  misc_feature 1..102: note = engineered ribonucleic acid scaffold (ERS) sequence
  source 1..102: mol_type = other DNA
actggggcttctatctgattactctgagacccatcaccagcgactatgtcgtagtgggtaaagcggcagatctgagcctccgagctctctgccgcatcagag

SEQ ID NO: 3534 - DNA, 102 bp, synthetic construct
  misc_feature 1..102: note = engineered ribonucleic acid scaffold (ERS) sequence
  source 1..102: mol_type = other DNA
actggtgcttctatctgattactctgagagccatcaccagcgactatgtcgtagtgggtaaagcggcagatctgagcctccgagctctctgccgcatcagag

SEQ ID NO: 3535 - DNA, 102 bp, synthetic construct
  misc_feature 1..102: note = engineered ribonucleic acid scaffold (ERS) sequence
  source 1..102: mol_type = other DNA
actgggccttctatctgattactctgaggcccatcaccagcgactatgtcgtagtgggtaaagcggcagatctgagcctccgagctctctgccgcatcagag

SEQ ID NO: 3536 - DNA, 103 bp, synthetic construct
  misc_feature 1..103: note = engineered ribonucleic acid scaffold (ERS) sequence
  source 1..103: mol_type = other DNA
actggcccttctatctgattactctgaggagccatcaccagcgactatgtcgtagtgggtaaagcggcagatctgagcctccgagctctctgccgcatcagag

SEQ ID NO: 3537 - DNA, 102 bp, synthetic construct
  misc_feature 1..102: note = engineered ribonucleic acid scaffold (ERS) sequence
  source 1..102: mol_type = other DNA
actggcccttctatctgattactctgagggccatcaccagcgactatgtcgtagtgggtaaagcggcagatctgagcctccgagctctctgccgcatcagag

SEQ ID NO: 3538 - DNA, 102 bp, synthetic construct
  misc_feature 1..102: note = engineered ribonucleic acid scaffold (ERS) sequence
  source 1..102: mol_type = other DNA
actggcccttctatctgattactctgagtgccatcaccagcgactatgtcgtagtgggtaaagcggcagatctgagcctccgagctctctgccgcatcagag

SEQ ID NO: 3539 - DNA, 102 bp, synthetic construct
  misc_feature 1..102: note = engineered ribonucleic acid scaffold (ERS) sequence
  source 1..102: mol_type = other DNA
actggcccttctatctgattactctgagagccatcaccagcgactatgtcgtagtgggtaaagcggcagatctgagcctccgagctctctgccgcatcagag

SEQ ID NO: 3540 - DNA, 103 bp, synthetic construct
  misc_feature 1..103: note = engineered ribonucleic acid scaffold (ERS) sequence
  source 1..103: mol_type = other DNA
actggcgcttctatctgattactctgagcagccatcaccagcgactatgtcgtagtgggtaaagcggcagatctgagcctccgagctctctgccgcatcagag

SEQ ID NO: 3541 - DNA, 102 bp, synthetic construct; identical to SEQ ID NO: 706
  misc_feature 1..102: note = engineered ribonucleic acid scaffold (ERS) sequence
  source 1..102: mol_type = other DNA

SEQ ID NO: 3542 - DNA, 102 bp, synthetic construct
  misc_feature 1..102: note = engineered ribonucleic acid scaffold (ERS) sequence
  source 1..102: mol_type = other DNA
actggcgcttctatctgattactctgagtgccatcaccagcgactatgtcgtagtgggtaaagcggcagatctgagcctccgagctctctgccgcatcagag

SEQ ID NO: 3543 - DNA, 102 bp, synthetic construct
  misc_feature 1..102: note = engineered ribonucleic acid scaffold (ERS) sequence
  source 1..102: mol_type = other DNA
actggcgcttctatctgattactctgagagccatcaccagcgactatgtcgtagtgggtaaagcggcagatctgagcctccgagctctctgccgcatcagag

SEQ ID NO: 3544 - DNA, 102 bp, synthetic construct
  misc_feature 1..102: note = engineered ribonucleic acid scaffold (ERS) sequence
  source 1..102: mol_type = other DNA
actggctcttctatctgattactctgagcgccatcaccagcgactatgtcgtagtgggtaaagcggcagatctgagcctccgagctctctgccgcatcagag

SEQ ID NO: 3545 - DNA, 102 bp, synthetic construct
  misc_feature 1..102: note = engineered ribonucleic acid scaffold (ERS) sequence
  source 1..102: mol_type = other DNA
actggctcttctatctgattactctgagggccatcaccagcgactatgtcgtagtgggtaaagcggcagatctgagcctccgagctctctgccgcatcagag

SEQ ID NO: 3546 - DNA, 102 bp, synthetic construct
  misc_feature 1..102: note = engineered ribonucleic acid scaffold (ERS) sequence
  source 1..102: mol_type = other DNA
actggctcttctatctgattactctgagtgccatcaccagcgactatgtcgtagtgggtaaagcggcagatctgagcctccgagctctctgccgcatcagag

SEQ ID NO: 3547 - DNA, 102 bp, synthetic construct
  misc_feature 1..102: note = engineered ribonucleic acid scaffold (ERS) sequence
  source 1..102: mol_type = other DNA
actggctcttctatctgattactctgagagccatcaccagcgactatgtcgtagtgggtaaagcggcagatctgagcctccgagctctctgccgcatcagag

SEQ ID NO: 3548 - DNA, 102 bp, synthetic construct
  misc_feature 1..102: note = engineered ribonucleic acid scaffold (ERS) sequence
  source 1..102: mol_type = other DNA
actggcggttctatctgattactctgagcgccatcaccagcgactatgtcgtagtgggtaaagcggcagatctgagcctccgagctctctgccgcatcagag

SEQ ID NO: 3549 - DNA, 102 bp, synthetic construct
  misc_feature 1..102: note = engineered ribonucleic acid scaffold (ERS) sequence
  source 1..102: mol_type = other DNA
actggcggttctatctgattactctgagagccatcaccagcgactatgtcgtagtgggtaaagcggcagatctgagcctccgagctctctgccgcatcagag

SEQ ID NO: 3550 - DNA, 97 bp, synthetic construct
  misc_feature 1..97: note = engineered ribonucleic acid scaffold (ERS) sequence
  source 1..97: mol_type = other DNA
acacacggttctatctgattactctgccgtgttcaccagcgactatgtcgtagtgggtaaagcggttacggacttcggtccgtaagacgcatcagag

SEQ ID NO: 3551 - DNA, 97 bp, synthetic construct
  misc_feature 1..97: note = engineered ribonucleic acid scaffold (ERS) sequence
  source 1..97: mol_type = other DNA
acactggtttctatctgattactctgaccagttcaccagcgactatgtcgtagtgggtaaagcggttacggacttcggtccgtaagacgcatcagag

SEQ ID NO: 3552 - DNA, 97 bp, synthetic construct
  misc_feature 1..97: note = engineered ribonucleic acid scaffold (ERS) sequence
  source 1..97: mol_type = other DNA
acaggccgttctatctgattactctgcggccttcaccagcgactatgtcgtagtgggtaaagcggttacggacttcggtccgtaagacgcatcagag

SEQ ID NO: 3553 - DNA, 97 bp, synthetic construct
  misc_feature 1..97: note = engineered ribonucleic acid scaffold (ERS) sequence
  source 1..97: mol_type = other DNA
acaggtccttctatctgattactctgggaccttcaccagcgactatgtcgtagtgggtaaagcggttacggacttcggtccgtaagacgcatcagag

SEQ ID NO: 3554 - DNA, 97 bp, synthetic construct
  misc_feature 1..97: note = engineered ribonucleic acid scaffold (ERS) sequence
  source 1..97: mol_type = other DNA
accagcaattctatctgattactctgttgctgtcaccagcgactatgtcgtagtgggtaaagcggttacggacttcggtccgtaagacgcatcagag

SEQ ID NO: 3555 - DNA, 97 bp, synthetic construct
  misc_feature 1..97: note = engineered ribonucleic acid scaffold (ERS) sequence
  source 1..97: mol_type = other DNA
accgagacttctatctgattactctgggctcgtcaccagcgactatgtcgtagtgggtaaagcggttacggacttcggtccgtaagacgcatcagag

SEQ ID NO: 3556 - DNA, 97 bp, synthetic construct
  misc_feature 1..97: note = engineered ribonucleic acid scaffold (ERS) sequence
  source 1..97: mol_type = other DNA
acctgtagttctatctgattactctgctacagtcaccagcgactatgtcgtagtgggtaaagcggttacggacttcggtccgtaagacgcatcagag

SEQ ID NO: 3557 - DNA, 97 bp, synthetic construct
  misc_feature 1..97: note = engineered ribonucleic acid scaffold (ERS) sequence
  source 1..97: mol_type = other DNA
acgagcacttctatctgattactctggggctctcaccagcgactatgtcgtagtgggtaaagcggttacggacttcggtccgtaagacgcatcagag

SEQ ID NO: 3558 - DNA, 97 bp, synthetic construct
  misc_feature 1..97: note = engineered ribonucleic acid scaffold (ERS) sequence
  source 1..97: mol_type = other DNA
acgaggtgttctatctgattactctgcacctctcaccagcgactatgtcgtagtgggtaaagcggttacggacttcggtccgtaagacgcatcagag

SEQ ID NO: 3559 - DNA, 97 bp, synthetic construct
  misc_feature 1..97: note = engineered ribonucleic acid scaffold (ERS) sequence
  source 1..97: mol_type = other DNA
acgggactttctatctgattactctgagtccctcaccagcgactatgtcgtagtgggtaaagcggttacggacttcggtccgtaagacgcatcagag

SEQ ID NO: 3560 - DNA, 97 bp, synthetic construct
  misc_feature 1..97: note = engineered ribonucleic acid scaffold (ERS) sequence
  source 1..97: mol_type = other DNA
acgggcaattctatctgattactctgttgccctcaccagcgactatgtcgtagtgggtaaagcggttacggacttcggtccgtaagacgcatcagag

SEQ ID NO: 3561 - DNA, 97 bp, synthetic construct
  misc_feature 1..97: note = engineered ribonucleic acid scaffold (ERS) sequence
  source 1..97: mol_type = other DNA
actgtgcgttctatctgattactctgcgcacatcaccagcgactatgtcgtagtgggtaaagcggttacggacttcggtccgtaagacgcatcagag

SEQ ID NO: 3562 - DNA, 98 bp, synthetic construct
  misc_feature 1..98: note = engineered ribonucleic acid scaffold (ERS) sequence
  source 1..98: mol_type = other DNA
actggcgcttctatctgattactctgggcgccatcaccagcgactatgtcgtagtgggtaaagcggttacggacttcggtccgtaagacgcatcagag

SEQ ID NO: 3563 - DNA, 98 bp, synthetic construct
  misc_feature 1..98: note = engineered ribonucleic acid scaffold (ERS) sequence
  source 1..98: mol_type = other DNA
actggcgcttctatctgattactctgggagccatcaccagcgactatgtcgtagtgggtaaagcggttacggacttcggtccgtaagacgcatcagag

SEQ ID NO: 3564 - DNA, 98 bp, synthetic construct
  misc_feature 1..98: note = engineered ribonucleic acid scaffold (ERS) sequence
  source 1..98: mol_type = other DNA
actggcgcttctatctgattactctgtgagccatcaccagcgactatgtcgtagtgggtaaagcggttacggacttcggtccgtaagacgcatcagag

SEQ ID NO: 3565 - DNA, 99 bp, synthetic construct
  misc_feature 1..99: note = engineered ribonucleic acid scaffold (ERS) sequence
  source 1..99: mol_type = other DNA
actggcgcttctatctgattactctgaggagccatcaccagcgactatgtcgtagtgggtaaagcggttacggacttcggtccgtaagacgcatcagag

SEQ ID NO: 3566 - DNA, 98 bp, synthetic construct
  misc_feature 1..98: note = engineered ribonucleic acid scaffold (ERS) sequence
  source 1..98: mol_type = other DNA
actggcgcttctatctgattactctgatagccatcaccagcgactatgtcgtagtgggtaaagcggttacggacttcggtccgtaagacgcatcagag

SEQ ID NO: 3567 - DNA, 99 bp, synthetic construct
  misc_feature 1..99: note = engineered ribonucleic acid scaffold (ERS) sequence
  source 1..99: mol_type = other DNA
actggcgcttctatctgattactctgagctgccatcaccagcgactatgtcgtagtgggtaaagcggttacggacttcggtccgtaagacgcatcagag

SEQ ID NO: 3568 - DNA, 99 bp, synthetic construct
  misc_feature 1..99: note = engineered ribonucleic acid scaffold (ERS) sequence
  source 1..99: mol_type = other DNA
actggcacttctatctgattactctgagtagccatcaccagcgactatgtcgtagtgggtaaagcggttacggacttcggtccgtaagacgcatcagag

SEQ ID NO: 3569 - DNA, 99 bp, synthetic construct
  misc_feature 1..99: note = engineered ribonucleic acid scaffold (ERS) sequence
  source 1..99: mol_type = other DNA
actggcgcttctatctgattactctgagtagccatcaccagcgactatgtcgtagtgggtaaagcggttacggacttcggtccgtaagacgcatcagag

SEQ ID NO: 3570 - DNA, 98 bp, synthetic construct
  misc_feature 1..98: note = engineered ribonucleic acid scaffold (ERS) sequence
  source 1..98: mol_type = other DNA
actggcgcttctatctgattactctgagcaccatcaccagcgactatgtcgtagtgggtaaagcggttacggacttcggtccgtaagacgcatcagag

SEQ ID NO: 3571 - DNA, 98 bp, synthetic construct
  misc_feature 1..98: note = engineered ribonucleic acid scaffold (ERS) sequence
  source 1..98: mol_type = other DNA
actggcacttctatctgattactctgagcgccatcaccagcgactatgtcgtagtgggtaaagcggttacggacttcggtccgtaagacgcatcagag

SEQ ID NO: 3572 - DNA, 98 bp, synthetic construct
  misc_feature 1..98: note = engineered ribonucleic acid scaffold (ERS) sequence
  source 1..98: mol_type = other DNA
actggcgcttctatctgattactctgagggccatcaccagcgactatgtcgtagtgggtaaagcggttacggacttcggtccgtaagacgcatcagag

SEQ ID NO: 3573 - DNA, 98 bp, synthetic construct
  misc_feature 1..98: note = engineered ribonucleic acid scaffold (ERS) sequence
  source 1..98: mol_type = other DNA
actggcgcttctatctgattactctgagtgccgtcaccagcgactatgtcgtagtgggtaaagcggttacggacttcggtccgtaagacgcatcagag

SEQ ID NO: 3574 - DNA, 98 bp, synthetic construct
  misc_feature 1..98: note = engineered ribonucleic acid scaffold (ERS) sequence
  source 1..98: mol_type = other DNA
actggcacttctatctgattactctgagtgccatcaccagcgactatgtcgtagtgggtaaagcggttacggacttcggtccgtaagacgcatcagag

SEQ ID NO: 3575 - DNA, 98 bp, synthetic construct
  misc_feature 1..98: note = engineered ribonucleic acid scaffold (ERS) sequence
  source 1..98: mol_type = other DNA
actggcgcttctatctgattactctgagaaccatcaccagcgactatgtcgtagtgggtaaagcggttacggacttcggtccgtaagacgcatcagag

SEQ ID NO: 3576 - DNA, 98 bp, synthetic construct
  misc_feature 1..98: note = engineered ribonucleic acid scaffold (ERS) sequence
  source 1..98: mol_type = other DNA
actggcgcttctatctgattactctgagagccgtcaccagcgactatgtcgtagtgggtaaagcggttacggacttcggtccgtaagacgcatcagag

SEQ ID NO: 3577 - DNA, 98 bp, synthetic construct
  misc_feature 1..98: note = engineered ribonucleic acid scaffold (ERS) sequence
  source 1..98: mol_type = other DNA
actggcgcttctatctgattactctgagagccttcaccagcgactatgtcgtagtgggtaaagcggttacggacttcggtccgtaagacgcatcagag

SEQ ID NO: 3578 - DNA, 98 bp, synthetic construct
  misc_feature 1..98: note = engineered ribonucleic acid scaffold (ERS) sequence
  source 1..98: mol_type = other DNA
actggggcttctatctgattactctgagacccatcaccagcgactatgtcgtagtgggtaaagcggttacggacttcggtccgtaagacgcatcagag

SEQ ID NO: 3579 - DNA, 98 bp, synthetic construct
  misc_feature 1..98: note = engineered ribonucleic acid scaffold (ERS) sequence
  source 1..98: mol_type = other DNA
actggtgcttctatctgattactctgagagccatcaccagcgactatgtcgtagtgggtaaagcggttacggacttcggtccgtaagacgcatcagag

SEQ ID NO: 3580 - DNA, 98 bp, synthetic construct
  misc_feature 1..98: note = engineered ribonucleic acid scaffold (ERS) sequence
  source 1..98: mol_type = other DNA
actgggccttctatctgattactctgaggcccatcaccagcgactatgtcgtagtgggtaaagcggttacggacttcggtccgtaagacgcatcagag

SEQ ID NO: 3581 - DNA, 99 bp, synthetic construct
  misc_feature 1..99: note = engineered ribonucleic acid scaffold (ERS) sequence
  source 1..99: mol_type = other DNA
actggcccttctatctgattactctgaggagccatcaccagcgactatgtcgtagtgggtaaagcggttacggacttcggtccgtaagacgcatcagag

SEQ ID NO: 3582 - DNA, 98 bp, synthetic construct
  misc_feature 1..98: note = engineered ribonucleic acid scaffold (ERS) sequence
  source 1..98: mol_type = other DNA
actggcccttctatctgattactctgagggccatcaccagcgactatgtcgtagtgggtaaagcggttacggacttcggtccgtaagacgcatcagag

SEQ ID NO: 3583 - DNA, 98 bp, synthetic construct
  misc_feature 1..98: note = engineered ribonucleic acid scaffold (ERS) sequence
  source 1..98: mol_type = other DNA
actggcccttctatctgattactctgagtgccatcaccagcgactatgtcgtagtgggtaaagcggttacggacttcggtccgtaagacgcatcagag

SEQ ID NO: 3584 - DNA, 98 bp, synthetic construct
  misc_feature 1..98: note = engineered ribonucleic acid scaffold (ERS) sequence
  source 1..98: mol_type = other DNA
actggcccttctatctgattactctgagagccatcaccagcgactatgtcgtagtgggtaaagcggttacggacttcggtccgtaagacgcatcagag

SEQ ID NO: 3585 - DNA, 99 bp, synthetic construct
  misc_feature 1..99: note = engineered ribonucleic acid scaffold (ERS) sequence
  source 1..99: mol_type = other DNA
actggcgcttctatctgattactctgagcagccatcaccagcgactatgtcgtagtgggtaaagcggttacggacttcggtccgtaagacgcatcagag

SEQ ID NO: 3586 - DNA, 98 bp, synthetic construct; identical to SEQ ID NO: 716
  misc_feature 1..98: note = engineered ribonucleic acid scaffold (ERS) sequence
  source 1..98: mol_type = other DNA

SEQ ID NO: 3587 - DNA, 98 bp, synthetic construct
  misc_feature 1..98: note = engineered ribonucleic acid scaffold (ERS) sequence
  source 1..98: mol_type = other DNA
actggcgcttctatctgattactctgagtgccatcaccagcgactatgtcgtagtgggtaaagcggttacggacttcggtccgtaagacgcatcagag

SEQ ID NO: 3588 - DNA, 98 bp, synthetic construct
  misc_feature 1..98: note = engineered ribonucleic acid scaffold (ERS) sequence
  source 1..98: mol_type = other DNA
actggcgcttctatctgattactctgagagccatcaccagcgactatgtcgtagtgggtaaagcggttacggacttcggtccgtaagacgcatcagag

SEQ ID NO: 3589 - DNA, 98 bp, synthetic construct
  misc_feature 1..98: note = engineered ribonucleic acid scaffold (ERS) sequence
  source 1..98: mol_type = other DNA
actggctcttctatctgattactctgagcgccatcaccagcgactatgtcgtagtgggtaaagcggttacggacttcggtccgtaagacgcatcagag

SEQ ID NO: 3590 - DNA, 98 bp, synthetic construct
  misc_feature 1..98: note = engineered ribonucleic acid scaffold (ERS) sequence
  source 1..98: mol_type = other DNA
actggctcttctatctgattactctgagggccatcaccagcgactatgtcgtagtgggtaaagcggttacggacttcggtccgtaagacgcatcagag

SEQ ID NO: 3591 - DNA, 98 bp, synthetic construct
  misc_feature 1..98: note = engineered ribonucleic acid scaffold (ERS) sequence
  source 1..98: mol_type = other DNA
actggctcttctatctgattactctgagtgccatcaccagcgactatgtcgtagtgggtaaagcggttacggacttcggtccgtaagacgcatcagag

SEQ ID NO: 3592 - DNA, 98 bp, synthetic construct
  misc_feature 1..98: note = engineered ribonucleic acid scaffold (ERS) sequence
  source 1..98: mol_type = other DNA
actggctcttctatctgattactctgagagccatcaccagcgactatgtcgtagtgggtaaagcggttacggacttcggtccgtaagacgcatcagag

SEQ ID NO: 3593 - DNA, 98 bp, synthetic construct
  misc_feature 1..98: note = engineered ribonucleic acid scaffold (ERS) sequence
  source 1..98: mol_type = other DNA
actggcggttctatctgattactctgagcgccatcaccagcgactatgtcgtagtgggtaaagcggttacggacttcggtccgtaagacgcatcagag

SEQ ID NO: 3594 - DNA, 98 bp, synthetic construct
  misc_feature 1..98: note = engineered ribonucleic acid scaffold (ERS) sequence
  source 1..98: mol_type = other DNA
actggcggttctatctgattactctgagagccatcaccagcgactatgtcgtagtgggtaaagcggttacggacttcggtccgtaagacgcatcagag

SEQ ID NO: 3595 - DNA, 74 bp, synthetic construct
  misc_feature 1..74: note = engineered ribonucleic acid scaffold (ERS) sequence
  source 1..74: mol_type = other DNA
acacacggttctatctgattactctgccgtgttcaccagcgactatgtcgtagtgggtaaagctagcatcagag

SEQ ID NO: 3596 - DNA, 74 bp, synthetic construct
  misc_feature 1..74: note = engineered ribonucleic acid scaffold (ERS) sequence
  source 1..74: mol_type = other DNA
acactggtttctatctgattactctgaccagttcaccagcgactatgtcgtagtgggtaaagctagcatcagag

SEQ ID NO: 3597 - DNA, 74 bp, synthetic construct
  misc_feature 1..74: note = engineered ribonucleic acid scaffold (ERS) sequence
  source 1..74: mol_type = other DNA
acaggccgttctatctgattactctgcggccttcaccagcgactatgtcgtagtgggtaaagctagcatcagag

SEQ ID NO: 3598 - DNA, 74 bp, synthetic construct
  misc_feature 1..74: note = engineered ribonucleic acid scaffold (ERS) sequence
  source 1..74: mol_type = other DNA
acaggtccttctatctgattactctgggaccttcaccagcgactatgtcgtagtgggtaaagctagcatcagag

SEQ ID NO: 3599 - DNA, 74 bp, synthetic construct
  misc_feature 1..74: note = engineered ribonucleic acid scaffold (ERS) sequence
  source 1..74: mol_type = other DNA
accagcaattctatctgattactctgttgctgtcaccagcgactatgtcgtagtgggtaaagctagcatcagag

SEQ ID NO: 3600 - DNA, 74 bp, synthetic construct
  misc_feature 1..74: note = engineered ribonucleic acid scaffold (ERS) sequence
  source 1..74: mol_type = other DNA
accgagacttctatctgattactctgggctcgtcaccagcgactatgtcgtagtgggtaaagctagcatcagag

SEQ ID NO: 3601 - DNA, 74 bp, synthetic construct
  misc_feature 1..74: note = engineered ribonucleic acid scaffold (ERS) sequence
  source 1..74: mol_type = other DNA
acctgtagttctatctgattactctgctacagtcaccagcgactatgtcgtagtgggtaaagctagcatcagag

SEQ ID NO: 3602 - DNA, 74 bp, synthetic construct
  misc_feature 1..74: note = engineered ribonucleic acid scaffold (ERS) sequence
  source 1..74: mol_type = other DNA
acgagcacttctatctgattactctggggctctcaccagcgactatgtcgtagtgggtaaagctagcatcagag

SEQ ID NO: 3603 - DNA, 74 bp, synthetic construct
  misc_feature 1..74: note = engineered ribonucleic acid scaffold (ERS) sequence
  source 1..74: mol_type = other DNA
acgaggtgttctatctgattactctgcacctctcaccagcgactatgtcgtagtgggtaaagctagcatcagag

SEQ ID NO: 3604 - DNA, 74 bp, synthetic construct
  misc_feature 1..74: note = engineered ribonucleic acid scaffold (ERS) sequence
  source 1..74: mol_type = other DNA
acgggactttctatctgattactctgagtccctcaccagcgactatgtcgtagtgggtaaagctagcatcagag

SEQ ID NO: 3605 - DNA, 74 bp, synthetic construct
  misc_feature 1..74: note = engineered ribonucleic acid scaffold (ERS) sequence
  source 1..74: mol_type = other DNA
acgggcaattctatctgattactctgttgccctcaccagcgactatgtcgtagtgggtaaagctagcatcagag

SEQ ID NO: 3606 - DNA, 74 bp, synthetic construct
  misc_feature 1..74: note = engineered ribonucleic acid scaffold (ERS) sequence
  source 1..74: mol_type = other DNA
actgtgcgttctatctgattactctgcgcacatcaccagcgactatgtcgtagtgggtaaagctagcatcagag

SEQ ID NO: 3607 - DNA, 75 bp, synthetic construct
  misc_feature 1..75: note = engineered ribonucleic acid scaffold (ERS) sequence
  source 1..75: mol_type = other DNA
actggcgcttctatctgattactctgggcgccatcaccagcgactatgtcgtagtgggtaaagctagcatcagag

SEQ ID NO: 3608 - DNA, 75 bp, synthetic construct
  misc_feature 1..75: note = engineered ribonucleic acid scaffold (ERS) sequence
  source 1..75: mol_type = other DNA
actggcgcttctatctgattactctgggagccatcaccagcgactatgtcgtagtgggtaaagctagcatcagag

SEQ ID NO: 3609 - DNA, 75 bp, synthetic construct
  misc_feature 1..75: note = engineered ribonucleic acid scaffold (ERS) sequence
  source 1..75: mol_type = other DNA
actggcgcttctatctgattactctgtgagccatcaccagcgactatgtcgtagtgggtaaagctagcatcagag

SEQ ID NO: 3610 - DNA, 76 bp, synthetic construct
  misc_feature 1..76: note = engineered ribonucleic acid scaffold (ERS) sequence
  source 1..76: mol_type = other DNA
actggcgcttctatctgattactctgaggagccatcaccagcgactatgtcgtagtgggtaaagctagcatcagag

SEQ ID NO: 3611 - DNA, 75 bp, synthetic construct
  misc_feature 1..75: note = engineered ribonucleic acid scaffold (ERS) sequence
  source 1..75: mol_type = other DNA
actggcgcttctatctgattactctgatagccatcaccagcgactatgtcgtagtgggtaaagctagcatcagag

SEQ ID NO: 3612 - DNA, 76 bp, synthetic construct
  misc_feature 1..76: note = engineered ribonucleic acid scaffold (ERS) sequence
  source 1..76: mol_type = other DNA
actggcgcttctatctgattactctgagctgccatcaccagcgactatgtcgtagtgggtaaagctagcatcagag

SEQ ID NO: 3613 - DNA, 76 bp, synthetic construct
  misc_feature 1..76: note = engineered ribonucleic acid scaffold (ERS) sequence
  source 1..76: mol_type = other DNA
actggcacttctatctgattactctgagtagccatcaccagcgactatgtcgtagtgggtaaagctagcatcagag

SEQ ID NO: 3614 - DNA, 76 bp, synthetic construct
  misc_feature 1..76: note = engineered ribonucleic acid scaffold (ERS) sequence
  source 1..76: mol_type = other DNA
actggcgcttctatctgattactctgagtagccatcaccagcgactatgtcgtagtgggtaaagctagcatcagag

SEQ ID NO: 3615 - DNA, 75 bp, synthetic construct
  misc_feature 1..75: note = engineered ribonucleic acid scaffold (ERS) sequence
  source 1..75: mol_type = other DNA
actggcgcttctatctgattactctgagcaccatcaccagcgactatgtcgtagtgggtaaagctagcatcagag

SEQ ID NO: 3616 - DNA, 75 bp, synthetic construct
  misc_feature 1..75: note = engineered ribonucleic acid scaffold (ERS) sequence
  source 1..75: mol_type = other DNA
actggcacttctatctgattactctgagcgccatcaccagcgactatgtcgtagtgggtaaagctagcatcagag

SEQ ID NO: 3617 - DNA, 75 bp, synthetic construct
  misc_feature 1..75: note = engineered ribonucleic acid scaffold (ERS) sequence
  source 1..75: mol_type = other DNA
actggcgcttctatctgattactctgagggccatcaccagcgactatgtcgtagtgggtaaagctagcatcagag

SEQ ID NO: 3618 - DNA, 75 bp, synthetic construct
  misc_feature 1..75: note = engineered ribonucleic acid scaffold (ERS) sequence
  source 1..75: mol_type = other DNA
actggcgcttctatctgattactctgagtgccgtcaccagcgactatgtcgtagtgggtaaagctagcatcagag

SEQ ID NO: 3619 - DNA, 75 bp, synthetic construct
  misc_feature 1..75: note = engineered ribonucleic acid scaffold (ERS) sequence
  source 1..75: mol_type = other DNA
actggcacttctatctgattactctgagtgccatcaccagcgactatgtcgtagtgggtaaagctagcatcagag

SEQ ID NO: 3620 - DNA, 75 bp, synthetic construct
  misc_feature 1..75: note = engineered ribonucleic acid scaffold (ERS) sequence
  source 1..75: mol_type = other DNA
actggcgcttctatctgattactctgagaaccatcaccagcgactatgtcgtagtgggtaaagctagcatcagag

SEQ ID NO: 3621 - DNA, 75 bp, synthetic construct
  misc_feature 1..75: note = engineered ribonucleic acid scaffold (ERS) sequence
  source 1..75: mol_type = other DNA
actggcgcttctatctgattactctgagagccgtcaccagcgactatgtcgtagtgggtaaagctagcatcagag

SEQ ID NO: 3622 - DNA, 75 bp, synthetic construct
  misc_feature 1..75: note = engineered ribonucleic acid scaffold (ERS) sequence
  source 1..75: mol_type = other DNA
actggcgcttctatctgattactctgagagccttcaccagcgactatgtcgtagtgggtaaagctagcatcagag

SEQ ID NO: 3623 - DNA, 75 bp, synthetic construct
  misc_feature 1..75: note = engineered ribonucleic acid scaffold (ERS) sequence
  source 1..75: mol_type = other DNA
actggggcttctatctgattactctgagacccatcaccagcgactatgtcgtagtgggtaaagctagcatcagag

SEQ ID NO: 3624 - DNA, 75 bp, synthetic construct
  misc_feature 1..75: note = engineered ribonucleic acid scaffold (ERS) sequence
  source 1..75: mol_type = other DNA
actggtgcttctatctgattactctgagagccatcaccagcgactatgtcgtagtgggtaaagctagcatcagag

SEQ ID NO: 3625 - DNA, 75 bp, synthetic construct
  misc_feature 1..75: note = engineered ribonucleic acid scaffold (ERS) sequence
  source 1..75: mol_type = other DNA
actgggccttctatctgattactctgaggcccatcaccagcgactatgtcgtagtgggtaaagctagcatcagag

SEQ ID NO: 3626 - DNA, 76 bp, synthetic construct
  misc_feature 1..76: note = engineered ribonucleic acid scaffold (ERS) sequence
  source 1..76: mol_type = other DNA
actggcccttctatctgattactctgaggagccatcaccagcgactatgtcgtagtgggtaaagctagcatcagag

SEQ ID NO: 3627 - DNA, 75 bp, synthetic construct
  misc_feature 1..75: note = engineered ribonucleic acid scaffold (ERS) sequence
  source 1..75: mol_type = other DNA
actggcccttctatctgattactctgagggccatcaccagcgactatgtcgtagtgggtaaagctagcatcagag

SEQ ID NO: 3628 - DNA, 75 bp, synthetic construct
  misc_feature 1..75: note = engineered ribonucleic acid scaffold (ERS) sequence
  source 1..75: mol_type = other DNA
actggcccttctatctgattactctgagtgccatcaccagcgactatgtcgtagtgggtaaagctagcatcagag

SEQ ID NO: 3629 - DNA, 75 bp, synthetic construct
  misc_feature 1..75: note = engineered ribonucleic acid scaffold (ERS) sequence
  source 1..75: mol_type = other DNA
actggcccttctatctgattactctgagagccatcaccagcgactatgtcgtagtgggtaaagctagcatcagag

SEQ ID NO: 3630 - DNA, 76 bp, synthetic construct
  misc_feature 1..76: note = engineered ribonucleic acid scaffold (ERS) sequence
  source 1..76: mol_type = other DNA
actggcgcttctatctgattactctgagcagccatcaccagcgactatgtcgtagtgggtaaagctagcatcagag

SEQ ID NO: 3631 - DNA, 75 bp, synthetic construct; identical to SEQ ID NO: 730
  misc_feature 1..75: note = engineered ribonucleic acid scaffold (ERS) sequence
  source 1..75: mol_type = other DNA

SEQ ID NO: 3632 - DNA, 75 bp, synthetic construct
  misc_feature 1..75: note = engineered ribonucleic acid scaffold (ERS) sequence
  source 1..75: mol_type = other DNA
actggcgcttctatctgattactctgagtgccatcaccagcgactatgtcgtagtgggtaaagctagcatcagag

SEQ ID NO: 3633 - DNA, 75 bp, synthetic construct
  misc_feature 1..75: note = engineered ribonucleic acid scaffold (ERS) sequence
  source 1..75: mol_type = other DNA
actggcgcttctatctgattactctgagagccatcaccagcgactatgtcgtagtgggtaaagctagcatcagag

SEQ ID NO: 3634 - DNA, 75 bp, synthetic construct
  misc_feature 1..75: note = engineered ribonucleic acid scaffold (ERS) sequence
  source 1..75: mol_type = other DNA
actggctcttctatctgattactctgagcgccatcaccagcgactatgtcgtagtgggtaaagctagcatcagag

SEQ ID NO: 3635 - DNA, 75 bp, synthetic construct
  misc_feature 1..75: note = engineered ribonucleic acid scaffold (ERS) sequence
  source 1..75: mol_type = other DNA
actggctcttctatctgattactctgagggccatcaccagcgactatgtcgtagtgggtaaagctagcatcagag

SEQ ID NO: 3636 - DNA, 75 bp, synthetic construct
  misc_feature 1..75: note = engineered ribonucleic acid scaffold (ERS) sequence
  source 1..75: mol_type = other DNA
actggctcttctatctgattactctgagtgccatcaccagcgactatgtcgtagtgggtaaagctagcatcagag

SEQ ID NO: 3637 - DNA, 75 bp, synthetic construct
  misc_feature 1..75: note = engineered ribonucleic acid scaffold (ERS) sequence
  source 1..75: mol_type = other DNA
actggctcttctatctgattactctgagagccatcaccagcgactatgtcgtagtgggtaaagctagcatcagag

SEQ ID NO: 3638 - DNA, 75 bp, synthetic construct
  misc_feature 1..75: note = engineered ribonucleic acid scaffold (ERS) sequence
  source 1..75: mol_type = other DNA
actggcggttctatctgattactctgagcgccatcaccagcgactatgtcgtagtgggtaaagctagcatcagag

SEQ ID NO: 3639 - DNA, 75 bp, synthetic construct
  misc_feature 1..75: note = engineered ribonucleic acid scaffold (ERS) sequence
  source 1..75: mol_type = other DNA
actggcggttctatctgattactctgagagccatcaccagcgactatgtcgtagtgggtaaagctagcatcagag

SEQ ID NO: 3640 - DNA, 88 bp, synthetic construct
  misc_feature 1..88: note = engineered ribonucleic acid scaffold (ERS) sequence
  source 1..88: mol_type = other DNA
acacacggttctatctgattactctgccgtgttcaccagcgactatgtcgtagtgggtaaagctccctattcggatggagcatcagag

SEQ ID NO: 3641 - DNA, 88 bp, synthetic construct
  misc_feature 1..88: note = engineered ribonucleic acid scaffold (ERS) sequence
  source 1..88: mol_type = other DNA
acactggtttctatctgattactctgaccagttcaccagcgactatgtcgtagtgggtaaagctccctattcggatggagcatcagag

SEQ ID NO: 3642 - DNA, 88 bp, synthetic construct
  misc_feature 1..88: note = engineered ribonucleic acid scaffold (ERS) sequence
  source 1..88: mol_type = other DNA
acaggccgttctatctgattactctgcggccttcaccagcgactatgtcgtagtgggtaaagctccctattcggatggagcatcagag

SEQ ID NO: 3643 - DNA, 88 bp, synthetic construct
  misc_feature 1..88: note = engineered ribonucleic acid scaffold (ERS) sequence
  source 1..88: mol_type = other DNA
acaggtccttctatctgattactctgggaccttcaccagcgactatgtcgtagtgggtaaagctccctattcggatggagcatcagag

SEQ ID NO: 3644 - DNA, 88 bp, synthetic construct
  misc_feature 1..88: note = engineered ribonucleic acid scaffold (ERS) sequence
  source 1..88: mol_type = other DNA
accagcaattctatctgattactctgttgctgtcaccagcgactatgtcgtagtgggtaaagctccctattcggatggagcatcagag

SEQ ID NO: 3645 - DNA, 88 bp, synthetic construct
  misc_feature 1..88: note = engineered ribonucleic acid scaffold (ERS) sequence
  source 1..88: mol_type = other DNA
accgagacttctatctgattactctgggctcgtcaccagcgactatgtcgtagtgggtaaagctccctattcggatggagcatcagag

SEQ ID NO: 3646 - DNA, 88 bp, synthetic construct
  misc_feature 1..88: note = engineered ribonucleic acid scaffold (ERS) sequence
  source 1..88: mol_type = other DNA
acctgtagttctatctgattactctgctacagtcaccagcgactatgtcgtagtgggtaaagctccctattcggatggagcatcagag

SEQ ID NO: 3647 - DNA, 88 bp, synthetic construct
  misc_feature 1..88: note = engineered ribonucleic acid scaffold (ERS) sequence
  source 1..88: mol_type = other DNA
acgagcacttctatctgattactctggggctctcaccagcgactatgtcgtagtgggtaaagctccctattcggatggagcatcagag

SEQ ID NO: 3648 - DNA, 88 bp, synthetic construct
  misc_feature 1..88: note = engineered ribonucleic acid scaffold (ERS) sequence
  source 1..88: mol_type = other DNA
acgaggtgttctatctgattactctgcacctctcaccagcgactatgtcgtagtgggtaaagctccctattcggatggagcatcagag

SEQ ID NO: 3649 - DNA, 88 bp, synthetic construct
  misc_feature 1..88: note = engineered ribonucleic acid scaffold (ERS) sequence
  source 1..88: mol_type = other DNA
acgggactttctatctgattactctgagtccctcaccagcgactatgtcgtagtgggtaaagctccctattcggatggagcatcagag

SEQ ID NO: 3650 - DNA, 88 bp, synthetic construct
  misc_feature 1..88: note = engineered ribonucleic acid scaffold (ERS) sequence
  source 1..88: mol_type = other DNA
acgggcaattctatctgattactctgttgccctcaccagcgactatgtcgtagtgggtaaagctccctattcggatggagcatcagag

SEQ ID NO: 3651 - DNA, 88 bp, synthetic construct
  misc_feature 1..88: note = engineered ribonucleic acid scaffold (ERS) sequence
  source 1..88: mol_type = other DNA
actgtgcgttctatctgattactctgcgcacatcaccagcgactatgtcgtagtgggtaaagctccctattcggatggagcatcagag

SEQ ID NO: 3652 - DNA, 89 bp, synthetic construct
  misc_feature 1..89: note = engineered ribonucleic acid scaffold (ERS) sequence
  source 1..89: mol_type = other DNA
actggcgcttctatctgattactctgggcgccatcaccagcgactatgtcgtagtgggtaaagctccctattcggatggagcatcagag

SEQ ID NO: 3653 - DNA, 89 bp, synthetic construct
  misc_feature 1..89: note = engineered ribonucleic acid scaffold (ERS) sequence
  source 1..89: mol_type = other DNA
actggcgcttctatctgattactctgggagccatcaccagcgactatgtcgtagtgggtaaagctccctattcggatggagcatcagag

SEQ ID NO: 3654 - DNA, 89 bp, synthetic construct
  misc_feature 1..89: note = engineered ribonucleic acid scaffold (ERS) sequence
  source 1..89: mol_type = other DNA
actggcgcttctatctgattactctgtgagccatcaccagcgactatgtcgtagtgggtaaagctccctattcggatggagcatcagag

SEQ ID NO: 3655 - DNA, 90 bp, synthetic construct
  misc_feature 1..90: note = engineered ribonucleic acid scaffold (ERS) sequence
  source 1..90: mol_type = other DNA
actggcgcttctatctgattactctgaggagccatcaccagcgactatgtcgtagtgggtaaagctccctattcggatggagcatcagag

SEQ ID NO: 3656 - DNA, 89 bp, synthetic construct
  misc_feature 1..89: note = engineered ribonucleic acid scaffold (ERS) sequence
  source 1..89: mol_type = other DNA
actggcgcttctatctgattactctgatagccatcaccagcgactatgtcgtagtgggtaaagctccctattcggatggagcatcagag

SEQ ID NO: 3657 - DNA, 90 bp, synthetic construct
  misc_feature 1..90: note = engineered ribonucleic acid scaffold (ERS) sequence
  source 1..90: mol_type = other DNA
actggcgcttctatctgattactctgagctgccatcaccagcgactatgtcgtagtgggtaaagctccctattcggatggagcatcagag

SEQ ID NO: 3658 - DNA, 90 bp, synthetic construct
  misc_feature 1..90: note = engineered ribonucleic acid scaffold (ERS) sequence
  source 1..90: mol_type = other DNA
actggcacttctatctgattactctgagtagccatcaccagcgactatgtcgtagtgggtaaagctccctattcggatggagcatcagag

SEQ ID NO: 3659 - DNA, 90 bp, synthetic construct
  misc_feature 1..90: note = engineered ribonucleic acid scaffold (ERS) sequence
  source 1..90: mol_type = other DNA
actggcgcttctatctgattactctgagtagccatcaccagcgactatgtcgtagtgggtaaagctccctattcggatggagcatcagag

SEQ ID NO: 3660 - DNA, 89 bp, synthetic construct
  misc_feature 1..89: note = engineered ribonucleic acid scaffold (ERS) sequence
  source 1..89: mol_type = other DNA
actggcgcttctatctgattactctgagcaccatcaccagcgactatgtcgtagtgggtaaagctccctattcggatggagcatcagag

SEQ ID NO: 3661 - DNA, 89 bp, synthetic construct
  misc_feature 1..89: note = engineered ribonucleic acid scaffold (ERS) sequence
  source 1..89: mol_type = other DNA
actggcacttctatctgattactctgagcgccatcaccagcgactatgtcgtagtgggtaaagctccctattcggatggagcatcagag

SEQ ID NO: 3662 - DNA, 89 bp, synthetic construct
  misc_feature 1..89: note = engineered ribonucleic acid scaffold (ERS) sequence
  source 1..89: mol_type = other DNA
actggcgcttctatctgattactctgagggccatcaccagcgactatgtcgtagtgggtaaagctccctattcggatggagcatcagag

SEQ ID NO: 3663 - DNA, 89 bp, synthetic construct
  misc_feature 1..89: note = engineered ribonucleic acid scaffold (ERS) sequence
  source 1..89: mol_type = other DNA
actggcgcttctatctgattactctgagtgccgtcaccagcgactatgtcgtagtgggtaaagctccctattcggatggagcatcagag

SEQ ID NO: 3664 - DNA, 89 bp, synthetic construct
  misc_feature 1..89: note = engineered ribonucleic acid scaffold (ERS) sequence
  source 1..89: mol_type = other DNA
actggcacttctatctgattactctgagtgccatcaccagcgactatgtcgtagtgggtaaagctccctattcggatggagcatcagag

SEQ ID NO: 3665 - DNA, 89 bp, synthetic construct
  misc_feature 1..89: note = engineered ribonucleic acid scaffold (ERS) sequence
  source 1..89: mol_type = other DNA
actggcgcttctatctgattactctgagaaccatcaccagcgactatgtcgtagtgggtaaagctccctattcggatggagcatcagag

SEQ ID NO: 3666 - DNA, 89 bp, synthetic construct
  misc_feature 1..89: note = engineered ribonucleic acid scaffold (ERS) sequence
  source 1..89: mol_type = other DNA
actggcgcttctatctgattactctgagagccgtcaccagcgactatgtcgtagtgggtaaagctccctattcggatggagcatcagag

SEQ ID NO: 3667 - DNA, 89 bp, synthetic construct
  misc_feature 1..89: note = engineered ribonucleic acid scaffold (ERS) sequence
  source 1..89: mol_type = other DNA
actggcgcttctatctgattactctgagagccttcaccagcgactatgtcgtagtgggtaaagctccctattcggatggagcatcagag

SEQ ID NO: 3668 - DNA, 89 bp, synthetic construct
  misc_feature 1..89: note = engineered ribonucleic acid scaffold (ERS) sequence
  source 1..89: mol_type = other DNA
actggggcttctatctgattactctgagacccatcaccagcgactatgtcgtagtgggtaaagctccctattcggatggagcatcagag

SEQ ID NO: 3669 - DNA, 89 bp, synthetic construct
  misc_feature 1..89: note = engineered ribonucleic acid scaffold (ERS) sequence
  source 1..89: mol_type = other DNA
actggtgcttctatctgattactctgagagccatcaccagcgactatgtcgtagtgggtaaagctccctattcggatggagcatcagag

SEQ ID NO: 3670 - DNA, 89 bp, synthetic construct
  misc_feature 1..89: note = engineered ribonucleic acid scaffold (ERS) sequence
  source 1..89: mol_type = other DNA
actgggccttctatctgattactctgaggcccatcaccagcgactatgtcgtagtgggtaaagctccctattcggatggagcatcagag

SEQ ID NO: 3671 - DNA, 90 bp, synthetic construct
  misc_feature 1..90: note = engineered ribonucleic acid scaffold (ERS) sequence
  source 1..90: mol_type = other DNA
actggcccttctatctgattactctgaggagccatcaccagcgactatgtcgtagtgggtaaagctccctattcggatggagcatcagag

SEQ ID NO: 3672 - DNA, 89 bp, synthetic construct
  misc_feature 1..89: note = engineered ribonucleic acid scaffold (ERS) sequence
  source 1..89: mol_type = other DNA
actggcccttctatctgattactctgagggccatcaccagcgactatgtcgtagtgggtaaagctccctattcggatggagcatcagag

SEQ ID NO: 3673 - DNA, 89 bp, synthetic construct
  misc_feature 1..89: note = engineered ribonucleic acid scaffold (ERS) sequence
  source 1..89: mol_type = other DNA
actggcccttctatctgattactctgagtgccatcaccagcgactatgtcgtagtgggtaaagctccctattcggatggagcatcagag

SEQ ID NO: 3674 - DNA, 89 bp, synthetic construct
  misc_feature 1..89: note = engineered ribonucleic acid scaffold (ERS) sequence
  source 1..89: mol_type = other DNA
actggcccttctatctgattactctgagagccatcaccagcgactatgtcgtagtgggtaaagctccctattcggatggagcatcagag

SEQ ID NO: 3675 - DNA, 90 bp, synthetic construct
  misc_feature 1..90: note = engineered ribonucleic acid scaffold (ERS) sequence
  source 1..90: mol_type = other DNA
actggcgcttctatctgattactctgagcagccatcaccagcgactatgtcgtagtgggtaaagctccctattcggatggagcatcagag

SEQ ID NO: 3676 - DNA, 89 bp, synthetic construct; identical to SEQ ID NO: 720
  misc_feature 1..89: note = engineered ribonucleic acid scaffold (ERS) sequence
  source 1..89: mol_type = other DNA

SEQ ID NO: 3677 - DNA, 89 bp, synthetic construct
  misc_feature 1..89: note = engineered ribonucleic acid scaffold (ERS) sequence
  source 1..89: mol_type = other DNA
actggcgcttctatctgattactctgagtgccatcaccagcgactatgtcgtagtgggtaaagctccctattcggatggagcatcagag

SEQ ID NO: 3678 - DNA, 89 bp, synthetic construct
  misc_feature 1..89: note = engineered ribonucleic acid scaffold (ERS) sequence
  source 1..89: mol_type = other DNA
actggcgcttctatctgattactctgagagccatcaccagcgactatgtcgtagtgggtaaagctccctattcggatggagcatcagag

SEQ ID NO: 3679 - DNA, 89 bp, synthetic construct
  misc_feature 1..89: note = engineered ribonucleic acid scaffold (ERS) sequence
  source 1..89: mol_type = other DNA
actggctcttctatctgattactctgagcgccatcaccagcgactatgtcgtagtgggtaaagctccctattcggatggagcatcagag

SEQ ID NO: 3680 - DNA, 89 bp, synthetic construct
  misc_feature 1..89: note = engineered ribonucleic acid scaffold (ERS) sequence
  source 1..89: mol_type = other DNA
actggctcttctatctgattactctgagggccatcaccagcgactatgtcgtagtgggtaaagctccctattcggatggagcatcagag

SEQ ID NO: 3681 - DNA, 89 bp, synthetic construct
  misc_feature 1..89: note = engineered ribonucleic acid scaffold (ERS) sequence
  source 1..89: mol_type = other DNA
actggctcttctatctgattactctgagtgccatcaccagcgactatgtcgtagtgggtaaagctccctattcggatggagcatcagag

SEQ ID NO: 3682 - DNA, 89 bp, synthetic construct
  misc_feature 1..89: note = engineered ribonucleic acid scaffold (ERS) sequence
  source 1..89: mol_type = other DNA
actggctcttctatctgattactctgagagccatcaccagcgactatgtcgtagtgggtaaagctccctattcggatggagcatcagag

SEQ ID NO: 3683 - DNA, 89 bp, synthetic construct
  misc_feature 1..89: note = engineered ribonucleic acid scaffold (ERS) sequence
  source 1..89: mol_type = other DNA
actggcggttctatctgattactctgagcgccatcaccagcgactatgtcgtagtgggtaaagctccctattcggatggagcatcagag

SEQ ID NO: 3684 - DNA, 89 bp, synthetic construct
  misc_feature 1..89: note = engineered ribonucleic acid scaffold (ERS) sequence
  source 1..89: mol_type = other DNA
actggcggttctatctgattactctgagagccatcaccagcgactatgtcgtagtgggtaaagctccctattcggatggagcatcagag

SEQ ID NO: 3685 - DNA, 94 bp, synthetic construct
  misc_feature 1..94: note = engineered ribonucleic acid scaffold (ERS) sequence
  source 1..94: mol_type = other DNA
acacacggttctatctgattactctgccgtgttcaccagcgactatgtcgtagtgggtaaagctccctcacagggatgtgagggagcatcagag

SEQ ID NO: 3686 - DNA, 94 bp, synthetic construct
  misc_feature 1..94: note = engineered ribonucleic acid scaffold (ERS) sequence
  source 1..94: mol_type = other DNA
acactggtttctatctgattactctgaccagttcaccagcgactatgtcgtagtgggtaaagctccctcacagggatgtgagggagcatcagag

SEQ ID NO: 3687 - DNA, 94 bp, synthetic construct
  misc_feature 1..94: note = engineered ribonucleic acid scaffold (ERS) sequence
  source 1..94: mol_type = other DNA
acaggccgttctatctgattactctgcggccttcaccagcgactatgtcgtagtgggtaaagctccctcacagggatgtgagggagcatcagag

SEQ ID NO: 3688 - DNA, 94 bp, synthetic construct
  misc_feature 1..94: note = engineered ribonucleic acid scaffold (ERS) sequence
  source 1..94: mol_type = other DNA
acaggtccttctatctgattactctgggaccttcaccagcgactatgtcgtagtgggtaaagctccctcacagggatgtgagggagcatcagag

SEQ ID NO: 3689 - DNA, 94 bp, synthetic construct
  misc_feature 1..94: note = engineered ribonucleic acid scaffold (ERS) sequence
  source 1..94: mol_type = other DNA
accagcaattctatctgattactctgttgctgtcaccagcgactatgtcgtagtgggtaaagctccctcacagggatgtgagggagcatcagag

SEQ ID NO: 3690 - DNA, 94 bp, synthetic construct
  misc_feature 1..94: note = engineered ribonucleic acid scaffold (ERS) sequence
  source 1..94: mol_type = other DNA
accgagacttctatctgattactctgggctcgtcaccagcgactatgtcgtagtgggtaaagctccctcacagggatgtgagggagcatcagag

SEQ ID NO: 3691 - DNA, 94 bp, synthetic construct
  misc_feature 1..94: note = engineered ribonucleic acid scaffold (ERS) sequence
  source 1..94: mol_type = other DNA
acctgtagttctatctgattactctgctacagtcaccagcgactatgtcgtagtgggtaaagctccctcacagggatgtgagggagcatcagag

SEQ ID NO: 3692 - DNA, 94 bp, synthetic construct
  misc_feature 1..94: note = engineered ribonucleic acid scaffold (ERS) sequence
  source 1..94: mol_type = other DNA
acgagcacttctatctgattactctggggctctcaccagcgactatgtcgtagtgggtaaagctccctcacagggatgtgagggagcatcagag

SEQ ID NO: 3693 - DNA, 94 bp, synthetic construct
  misc_feature 1..94: note = engineered ribonucleic acid scaffold (ERS) sequence
  source 1..94: mol_type = other DNA
acgaggtgttctatctgattactctgcacctctcaccagcgactatgtcgtagtgggtaaagctccctcacagggatgtgagggagcatcagag

SEQ ID NO: 3694 - DNA, 94 bp, synthetic construct
  misc_feature 1..94: note = engineered ribonucleic acid scaffold (ERS) sequence
  source 1..94: mol_type = other DNA
acgggactttctatctgattactctgagtccctcaccagcgactatgtcgtagtgggtaaagctccctcacagggatgtgagggagcatcagag

SEQ ID NO: 3695 - DNA, 94 bp, synthetic construct
  misc_feature 1..94: note = engineered ribonucleic acid scaffold (ERS) sequence
  source 1..94: mol_type = other DNA
acgggcaattctatctgattactctgttgccctcaccagcgactatgtcgtagtgggtaaagctccctcacagggatgtgagggagcatcagag

SEQ ID NO: 3696 - DNA, 94 bp, synthetic construct
  misc_feature 1..94: note = engineered ribonucleic acid scaffold (ERS) sequence
  source 1..94: mol_type = other DNA
actgtgcgttctatctgattactctgcgcacatcaccagcgactatgtcgtagtgggtaaagctccctcacagggatgtgagggagcatcagag

SEQ ID NO: 3697 - DNA, 95 bp, synthetic construct
  misc_feature 1..95: note = engineered ribonucleic acid scaffold (ERS) sequence
  source 1..95: mol_type = other DNA
actggcgcttctatctgattactctgggcgccatcaccagcgactatgtcgtagtgggtaaagctccctcacagggatgtgagggagcatcagag

SEQ ID NO: 3698 - DNA, 95 bp, synthetic construct
  misc_feature 1..95: note = engineered ribonucleic acid scaffold (ERS) sequence
  source 1..95: mol_type = other DNA
actggcgcttctatctgattactctgggagccatcaccagcgactatgtcgtagtgggtaaagctccctcacagggatgtgagggagcatcagag

SEQ ID NO: 3699 - DNA, 95 bp, synthetic construct
  misc_feature 1..95: note = engineered ribonucleic acid scaffold (ERS) sequence
  source 1..95: mol_type = other DNA
actggcgcttctatctgattactctgtgagccatcaccagcgactatgtcgtagtgggtaaagctccctcacagggatgtgagggagcatcagag

SEQ ID NO: 3700 - DNA, 96 bp, synthetic construct
  misc_feature 1..96: note = engineered ribonucleic acid scaffold (ERS) sequence
  source 1..96: mol_type = other DNA
actggcgcttctatctgattactctgaggagccatcaccagcgactatgtcgtagtgggtaaagctccctcacagggatgtgagggagcatcagag

SEQ ID NO: 3701 - DNA, 95 bp, synthetic construct
  misc_feature 1..95: note = engineered ribonucleic acid scaffold (ERS) sequence
  source 1..95: mol_type = other DNA
actggcgcttctatctgattactctgatagccatcaccagcgactatgtcgtagtgggtaaagctccctcacagggatgtgagggagcatcagag

SEQ ID NO: 3702 - DNA, 96 bp, synthetic construct
  misc_feature 1..96: note = engineered ribonucleic acid scaffold (ERS) sequence
  source 1..96: mol_type = other DNA
actggcgcttctatctgattactctgagctgccatcaccagcgactatgtcgtagtgggtaaagctccctcacagggatgtgagggagcatcagag

SEQ ID NO: 3703 - DNA, 96 bp, synthetic construct
  misc_feature 1..96: note = engineered ribonucleic acid scaffold (ERS) sequence
  source 1..96: mol_type = other DNA
actggcacttctatctgattactctgagtagccatcaccagcgactatgtcgtagtgggtaaagctccctcacagggatgtgagggagcatcagag

SEQ ID NO: 3704 - DNA, 96 bp, synthetic construct
  misc_feature 1..96: note = engineered ribonucleic acid scaffold (ERS) sequence
  source 1..96: mol_type = other DNA
actggcgcttctatctgattactctgagtagccatcaccagcgactatgtcgtagtgggtaaagctccctcacagggatgtgagggagcatcagag

SEQ ID NO: 3705 - DNA, 95 bp, synthetic construct
  misc_feature 1..95: note = engineered ribonucleic acid scaffold (ERS) sequence
  source 1..95: mol_type = other DNA
actggcgcttctatctgattactctgagcaccatcaccagcgactatgtcgtagtgggtaaagctccctcacagggatgtgagggagcatcagag

SEQ ID NO: 3706 - DNA, 95 bp, synthetic construct
  misc_feature 1..95: note = engineered ribonucleic acid scaffold (ERS) sequence
  source 1..95: mol_type = other DNA
actggcacttctatctgattactctgagcgccatcaccagcgactatgtcgtagtgggtaaagctccctcacagggatgtgagggagcatcagag

SEQ ID NO: 3707 - DNA, 95 bp, synthetic construct
  misc_feature 1..95: note = engineered ribonucleic acid scaffold (ERS) sequence
  source 1..95: mol_type = other DNA
actggcgcttctatctgattactctgagggccatcaccagcgactatgtcgtagtgggtaaagctccctcacagggatgtgagggagcatcagag

SEQ ID NO: 3708 - DNA, 95 bp, synthetic construct
  misc_feature 1..95: note = engineered ribonucleic acid scaffold (ERS) sequence
  source 1..95: mol_type = other DNA
actggcgcttctatctgattactctgagtgccgtcaccagcgactatgtcgtagtgggtaaagctccctcacagggatgtgagggagcatcagag

SEQ ID NO: 3709 - DNA, 95 bp, synthetic construct
  misc_feature 1..95: note = engineered ribonucleic acid scaffold (ERS) sequence
  source 1..95: mol_type = other DNA
actggcacttctatctgattactctgagtgccatcaccagcgactatgtcgtagtgggtaaagctccctcacagggatgtgagggagcatcagag

SEQ ID NO: 3710 - DNA, 95 bp, synthetic construct
  misc_feature 1..95: note = engineered ribonucleic acid scaffold (ERS) sequence
  source 1..95: mol_type = other DNA
actggcgcttctatctgattactctgagaaccatcaccagcgactatgtcgtagtgggtaaagctccctcacagggatgtgagggagcatcagag

SEQ ID NO: 3711 - DNA, 95 bp, synthetic construct
  misc_feature 1..95: note = engineered ribonucleic acid scaffold (ERS) sequence
  source 1..95: mol_type = other DNA
actggcgcttctatctgattactctgagagccgtcaccagcgactatgtcgtagtgggtaaagctccctcacagggatgtgagggagcatcagag

SEQ ID NO: 3712 - DNA, 95 bp, synthetic construct
  misc_feature 1..95: note = engineered ribonucleic acid scaffold (ERS) sequence
  source 1..95: mol_type = other DNA
actggcgcttctatctgattactctgagagccttcaccagcgactatgtcgtagtgggtaaagctccctcacagggatgtgagggagcatcagag

SEQ ID NO: 3713 - DNA, 95 bp, synthetic construct
  misc_feature 1..95: note = engineered ribonucleic acid scaffold (ERS) sequence
  source 1..95: mol_type = other DNA
actggggcttctatctgattactctgagacccatcaccagcgactatgtcgtagtgggtaaagctccctcacagggatgtgagggagcatcagag

SEQ ID NO: 3714 - DNA, 95 bp, synthetic construct
  misc_feature 1..95: note = engineered ribonucleic acid scaffold (ERS) sequence
  source 1..95: mol_type = other DNA
actggtgcttctatctgattactctgagagccatcaccagcgactatgtcgtagtgggtaaagctccctcacagggatgtgagggagcatcagag

SEQ ID NO: 3715 - DNA, 95 bp, synthetic construct
  misc_feature 1..95: note = engineered ribonucleic acid scaffold (ERS) sequence
  source 1..95: mol_type = other DNA
actgggccttctatctgattactctgaggcccatcaccagcgactatgtcgtagtgggtaaagctccctcacagggatgtgagggagcatcagag

SEQ ID NO: 3716 - DNA, 96 bp, synthetic construct
  misc_feature 1..96: note = engineered ribonucleic acid scaffold (ERS) sequence
  source 1..96: mol_type = other DNA
actggcccttctatctgattactctgaggagccatcaccagcgactatgtcgtagtgggtaaagctccctcacagggatgtgagggagcatcagag

SEQ ID NO: 3717 - DNA, 95 bp, synthetic construct
  misc_feature 1..95: note = engineered ribonucleic acid scaffold (ERS) sequence
  source 1..95: mol_type = other DNA
actggcccttctatctgattactctgagggccatcaccagcgactatgtcgtagtgggtaaagctccctcacagggatgtgagggagcatcagag

SEQ ID NO: 3718 - DNA, 95 bp, synthetic construct
  misc_feature 1..95: note = engineered ribonucleic acid scaffold (ERS) sequence
  source 1..95: mol_type = other DNA
actggcccttctatctgattactctgagtgccatcaccagcgactatgtcgtagtgggtaaagctccctcacagggatgtgagggagcatcagag

SEQ ID NO: 3719 - DNA, 95 bp, synthetic construct
  misc_feature 1..95: note = engineered ribonucleic acid scaffold (ERS) sequence
  source 1..95: mol_type = other DNA
actggcccttctatctgattactctgagagccatcaccagcgactatgtcgtagtgggtaaagctccctcacagggatgtgagggagcatcagag

SEQ ID NO: 3720 - DNA, 96 bp, synthetic construct
  misc_feature 1..96: note = engineered ribonucleic acid scaffold (ERS) sequence
  source 1..96: mol_type = other DNA
actggcgcttctatctgattactctgagcagccatcaccagcgactatgtcgtagtgggtaaagctccctcacagggatgtgagggagcatcagag

SEQ ID NO: 3721 - DNA, 95 bp, synthetic construct; identical to SEQ ID NO: 707
  misc_feature 1..95: note = engineered ribonucleic acid scaffold (ERS) sequence
  source 1..95: mol_type = other DNA

SEQ ID NO: 3722 - DNA, 95 bp, synthetic construct
  misc_feature 1..95: note = engineered ribonucleic acid scaffold (ERS) sequence
  source 1..95: mol_type = other DNA
actggcgcttctatctgattactctgagtgccatcaccagcgactatgtcgtagtgggtaaagctccctcacagggatgtgagggagcatcagag

SEQ ID NO: 3723 - DNA, 95 bp, synthetic construct
  misc_feature 1..95: note = engineered ribonucleic acid scaffold (ERS) sequence
  source 1..95: mol_type = other DNA
actggcgcttctatctgattactctgagagccatcaccagcgactatgtcgtagtgggtaaagctccctcacagggatgtgagggagcatcagag

SEQ ID NO: 3724 - DNA, 95 bp, synthetic construct
  misc_feature 1..95: note = engineered ribonucleic acid scaffold (ERS) sequence
  source 1..95: mol_type = other DNA
actggctcttctatctgattactctgagcgccatcaccagcgactatgtcgtagtgggtaaagctccctcacagggatgtgagggagcatcagag

SEQ ID NO: 3725 - DNA, 95 bp, synthetic construct
  misc_feature 1..95: note = engineered ribonucleic acid scaffold (ERS) sequence
  source 1..95: mol_type = other DNA
actggctcttctatctgattactctgagggccatcaccagcgactatgtcgtagtgggtaaagctccctcacagggatgtgagggagcatcagag

SEQ ID NO: 3726 - DNA, 95 bp, synthetic construct
  misc_feature 1..95: note = engineered ribonucleic acid scaffold (ERS) sequence
  source 1..95: mol_type = other DNA
actggctcttctatctgattactctgagtgccatcaccagcgactatgtcgtagtgggtaaagctccctcacagggatgtgagggagcatcagag

SEQ ID NO: 3727 - DNA, 95 bp, synthetic construct
  misc_feature 1..95: note = engineered ribonucleic acid scaffold (ERS) sequence
  source 1..95: mol_type = other DNA
actggctcttctatctgattactctgagagccatcaccagcgactatgtcgtagtgggtaaagctccctcacagggatgtgagggagcatcagag

SEQ ID NO: 3728 - DNA, 95 bp, synthetic construct
  misc_feature 1..95: note = engineered ribonucleic acid scaffold (ERS) sequence
  source 1..95: mol_type = other DNA
actggcggttctatctgattactctgagcgccatcaccagcgactatgtcgtagtgggtaaagctccctcacagggatgtgagggagcatcagag

SEQ ID NO: 3729 - DNA, 95 bp, synthetic construct
  misc_feature 1..95: note = engineered ribonucleic acid scaffold (ERS) sequence
  source 1..95: mol_type = other DNA
actggcggttctatctgattactctgagagccatcaccagcgactatgtcgtagtgggtaaagctccctcacagggatgtgagggagcatcagag

SEQ ID NO: 3730 - DNA, 93 bp, synthetic construct
  misc_feature 1..93: note = engineered ribonucleic acid scaffold (ERS) sequence
  source 1..93: mol_type = other DNA
acacacggttctatctgattactctgccgtgttcaccagcgactatgtcgtagtgggtaaagctccctcagctgcagtgagggagcatcagag

SEQ ID NO: 3731 - DNA, 93 bp, synthetic construct
  misc_feature 1..93: note = engineered ribonucleic acid scaffold (ERS) sequence
  source 1..93: mol_type = other DNA
acactggtttctatctgattactctgaccagttcaccagcgactatgtcgtagtgggtaaagctccctcagctgcagtgagggagcatcagag

SEQ ID NO: 3732 - DNA, 93 bp, synthetic construct
  misc_feature 1..93: note = engineered ribonucleic acid scaffold (ERS) sequence
  source 1..93: mol_type = other DNA
acaggccgttctatctgattactctgcggccttcaccagcgactatgtcgtagtgggtaaagctccctcagctgcagtgagggagcatcagag

SEQ ID NO: 3733 - DNA, 93 bp, synthetic construct
  misc_feature 1..93: note = engineered ribonucleic acid scaffold (ERS) sequence
  source 1..93: mol_type = other DNA
acaggtccttctatctgattactctgggaccttcaccagcgactatgtcgtagtgggtaaagctccctcagctgcagtgagggagcatcagag

SEQ ID NO: 3734 - DNA, 93 bp, synthetic construct
  misc_feature 1..93: note = engineered ribonucleic acid scaffold (ERS) sequence
  source 1..93: mol_type = other DNA
accagcaattctatctgattactctgttgctgtcaccagcgactatgtcgtagtgggtaaagctccctcagctgcagtgagggagcatcagag

SEQ ID NO: 3735 - DNA, 93 bp, synthetic construct
  misc_feature 1..93: note = engineered ribonucleic acid scaffold (ERS) sequence
  source 1..93: mol_type = other DNA
accgagacttctatctgattactctgggctcgtcaccagcgactatgtcgtagtgggtaaagctccctcagctgcagtgagggagcatcagag

SEQ ID NO: 3736 - DNA, 93 bp, synthetic construct
  misc_feature 1..93: note = engineered ribonucleic acid scaffold (ERS) sequence
  source 1..93: mol_type = other DNA
acctgtagttctatctgattactctgctacagtcaccagcgactatgtcgtagtgggtaaagctccctcagctgcagtgagggagcatcagag

SEQ ID NO: 3737 - DNA, 93 bp, synthetic construct
  misc_feature 1..93: note = engineered ribonucleic acid scaffold (ERS) sequence
  source 1..93: mol_type = other DNA
acgagcacttctatctgattactctggggctctcaccagcgactatgtcgtagtgggtaaagctccctcagctgcagtgagggagcatcagag

SEQ ID NO: 3738 - DNA, 93 bp, synthetic construct
  misc_feature 1..93: note = engineered ribonucleic acid scaffold (ERS) sequence
  source 1..93: mol_type = other DNA
acgaggtgttctatctgattactctgcacctctcaccagcgactatgtcgtagtgggtaaagctccctcagctgcagtgagggagcatcagag

SEQ ID NO: 3739 - DNA, 93 bp, synthetic construct
  misc_feature 1..93: note = engineered ribonucleic acid scaffold (ERS) sequence
  source 1..93: mol_type = other DNA
acgggactttctatctgattactctgagtccctcaccagcgactatgtcgtagtgggtaaagctccctcagctgcagtgagggagcatcagag

SEQ ID NO: 3740 - DNA, 93 bp, synthetic construct
  misc_feature 1..93: note = engineered ribonucleic acid scaffold (ERS) sequence
  source 1..93: mol_type = other DNA
acgggcaattctatctgattactctgttgccctcaccagcgactatgtcgtagtgggtaaagctccctcagctgcagtgagggagcatcagag

SEQ ID NO: 3741 - DNA, 93 bp, synthetic construct
  misc_feature 1..93: note = engineered ribonucleic acid scaffold (ERS) sequence
  source 1..93: mol_type = other DNA
actgtgcgttctatctgattactctgcgcacatcaccagcgactatgtcgtagtgggtaaagctccctcagctgcagtgagggagcatcagag

SEQ ID NO: 3742 - DNA, 94 bp, synthetic construct
  misc_feature 1..94: note = engineered ribonucleic acid scaffold (ERS) sequence
  source 1..94: mol_type = other DNA
actggcgcttctatctgattactctgggcgccatcaccagcgactatgtcgtagtgggtaaagctccctcagctgcagtgagggagcatcagag

SEQ ID NO: 3743 - DNA, 94 bp, synthetic construct
  misc_feature 1..94: note = engineered ribonucleic acid scaffold (ERS) sequence
  source 1..94: mol_type = other DNA
actggcgcttctatctgattactctgggagccatcaccagcgactatgtcgtagtgggtaaagctccctcagctgcagtgagggagcatcagag

SEQ ID NO: 3744 - DNA, 94 bp, synthetic construct
  misc_feature 1..94: note = engineered ribonucleic acid scaffold (ERS) sequence
  source 1..94: mol_type = other DNA
actggcgcttctatctgattactctgtgagccatcaccagcgactatgtcgtagtgggtaaagctccctcagctgcagtgagggagcatcagag

SEQ ID NO: 3745 - DNA, 95 bp, synthetic construct
  misc_feature 1..95: note = engineered ribonucleic acid scaffold (ERS) sequence
  source 1..95: mol_type = other DNA
actggcgcttctatctgattactctgaggagccatcaccagcgactatgtcgtagtgggtaaagctccctcagctgcagtgagggagcatcagag

SEQ ID NO: 3746 - DNA, 94 bp, synthetic construct
  misc_feature 1..94: note = engineered ribonucleic acid scaffold (ERS) sequence
  source 1..94: mol_type = other DNA
actggcgcttctatctgattactctgatagccatcaccagcgactatgtcgtagtgggtaaagctccctcagctgcagtgagggagcatcagag

SEQ ID NO: 3747 - DNA, 95 bp, synthetic construct
  misc_feature 1..95: note = engineered ribonucleic acid scaffold (ERS) sequence
  source 1..95: mol_type = other DNA
actggcgcttctatctgattactctgagctgccatcaccagcgactatgtcgtagtgggtaaagctccctcagctgcagtgagggagcatcagag

SEQ ID NO: 3748 - DNA, 95 bp, synthetic construct
  misc_feature 1..95: note = engineered ribonucleic acid scaffold (ERS) sequence
  source 1..95: mol_type = other DNA
actggcacttctatctgattactctgagtagccatcaccagcgactatgtcgtagtgggtaaagctccctcagctgcagtgagggagcatcagag

SEQ ID NO: 3749 - DNA, 95 bp, synthetic construct
  misc_feature 1..95: note = engineered ribonucleic acid scaffold (ERS) sequence
  source 1..95: mol_type = other DNA
actggcgcttctatctgattactctgagtagccatcaccagcgactatgtcgtagtgggtaaagctccctcagctgcagtgagggagcatcagag

SEQ ID NO: 3750 - DNA, 94 bp, synthetic construct
  misc_feature 1..94: note = engineered ribonucleic acid scaffold (ERS) sequence
  source 1..94: mol_type = other DNA
actggcgcttctatctgattactctgagcaccatcaccagcgactatgtcgtagtgggtaaagctccctcagctgcagtgagggagcatcagag

SEQ ID NO: 3751 - DNA, 94 bp, synthetic construct
  misc_feature 1..94: note = engineered ribonucleic acid scaffold (ERS) sequence
  source 1..94: mol_type = other DNA
actggcacttctatctgattactctgagcgccatcaccagcgactatgtcgtagtgggtaaagctccctcagctgcagtgagggagcatcagag

SEQ ID NO: 3752 - DNA, 94 bp, synthetic construct
  misc_feature 1..94: note = engineered ribonucleic acid scaffold (ERS) sequence
  source 1..94: mol_type = other DNA
actggcgcttctatctgattactctgagggccatcaccagcgactatgtcgtagtgggtaaagctccctcagctgcagtgagggagcatcagag

SEQ ID NO: 3753 - DNA, 94 bp, synthetic construct
  misc_feature 1..94: note = engineered ribonucleic acid scaffold (ERS) sequence
  source 1..94: mol_type = other DNA
actggcgcttctatctgattactctgagtgccgtcaccagcgactatgtcgtagtgggtaaagctccctcagctgcagtgagggagcatcagag

SEQ ID NO: 3754 - DNA, 94 bp, synthetic construct
  misc_feature 1..94: note = engineered ribonucleic acid scaffold (ERS) sequence
  source 1..94: mol_type = other DNA
actggcacttctatctgattactctgagtgccatcaccagcgactatgtcgtagtgggtaaagctccctcagctgcagtgagggagcatcagag

SEQ ID NO: 3755 - DNA, 94 bp, synthetic construct
  misc_feature 1..94: note = engineered ribonucleic acid scaffold (ERS) sequence
  source 1..94: mol_type = other DNA
actggcgcttctatctgattactctgagaaccatcaccagcgactatgtcgtagtgggtaaagctccctcagctgcagtgagggagcatcagag

SEQ ID NO: 3756 - DNA, 94 bp, synthetic construct
  misc_feature 1..94: note = engineered ribonucleic acid scaffold (ERS) sequence
  source 1..94: mol_type = other DNA
actggcgcttctatctgattactctgagagccgtcaccagcgactatgtcgtagtgggtaaagctccctcagctgcagtgagggagcatcagag

SEQ ID NO: 3757 - DNA, 94 bp, synthetic construct
  misc_feature 1..94: note = engineered ribonucleic acid scaffold (ERS) sequence
  source 1..94: mol_type = other DNA
actggcgcttctatctgattactctgagagccttcaccagcgactatgtcgtagtgggtaaagctccctcagctgcagtgagggagcatcagag

SEQ ID NO: 3758 - DNA, 94 bp, synthetic construct
  misc_feature 1..94: note = engineered ribonucleic acid scaffold (ERS) sequence
  source 1..94: mol_type = other DNA
actggggcttctatctgattactctgagacccatcaccagcgactatgtcgtagtgggtaaagctccctcagctgcagtgagggagcatcagag

SEQ ID NO: 3759 - DNA, 94 bp, synthetic construct
  misc_feature 1..94: note = engineered ribonucleic acid scaffold (ERS) sequence
  source 1..94: mol_type = other DNA
actggtgcttctatctgattactctgagagccatcaccagcgactatgtcgtagtgggtaaagctccctcagctgcagtgagggagcatcagag

SEQ ID NO: 3760 - DNA, 94 bp, synthetic construct
  misc_feature 1..94: note = engineered ribonucleic acid scaffold (ERS) sequence
  source 1..94: mol_type = other DNA
actgggccttctatctgattactctgaggcccatcaccagcgactatgtcgtagtgggtaaagctccctcagctgcagtgagggagcatcagag

SEQ ID NO: 3761 - DNA, 95 bp, synthetic construct
  misc_feature 1..95: note = engineered ribonucleic acid scaffold (ERS) sequence
  source 1..95: mol_type = other DNA
actggcccttctatctgattactctgaggagccatcaccagcgactatgtcgtagtgggtaaagctccctcagctgcagtgagggagcatcagag

SEQ ID NO: 3762 - DNA, 94 bp, synthetic construct
  misc_feature 1..94: note = engineered ribonucleic acid scaffold (ERS) sequence
  source 1..94: mol_type = other DNA
actggcccttctatctgattactctgagggccatcaccagcgactatgtcgtagtgggtaaagctccctcagctgcagtgagggagcatcagag

SEQ ID NO: 3763 - DNA, 94 bp, synthetic construct
  misc_feature 1..94: note = engineered ribonucleic acid scaffold (ERS) sequence
  source 1..94: mol_type = other DNA
actggcccttctatctgattactctgagtgccatcaccagcgactatgtcgtagtgggtaaagctccctcagctgcagtgagggagcatcagag

SEQ ID NO: 3764 - DNA, 94 bp, synthetic construct
  misc_feature 1..94: note = engineered ribonucleic acid scaffold (ERS) sequence
  source 1..94: mol_type = other DNA
actggcccttctatctgattactctgagagccatcaccagcgactatgtcgtagtgggtaaagctccctcagctgcagtgagggagcatcagag

SEQ ID NO: 3765 - DNA, 95 bp, synthetic construct
  misc_feature 1..95: note = engineered ribonucleic acid scaffold (ERS) sequence
  source 1..95: mol_type = other DNA
actggcgcttctatctgattactctgagcagccatcaccagcgactatgtcgtagtgggtaaagctccctcagctgcagtgagggagcatcagag

SEQ ID NO: 3766 - DNA, 94 bp, synthetic construct; identical to SEQ ID NO: 708
  misc_feature 1..94: note = engineered ribonucleic acid scaffold (ERS) sequence
  source 1..94: mol_type = other DNA

SEQ ID NO: 3767 - DNA, 94 bp, synthetic construct
  misc_feature 1..94: note = engineered ribonucleic acid scaffold (ERS) sequence
  source 1..94: mol_type = other DNA
actggcgcttctatctgattactctgagtgccatcaccagcgactatgtcgtagtgggtaaagctccctcagctgcagtgagggagcatcagag

SEQ ID NO: 3768 - DNA, 94 bp, synthetic construct
  misc_feature 1..94: note = engineered ribonucleic acid scaffold (ERS) sequence
  source 1..94: mol_type = other DNA
actggcgcttctatctgattactctgagagccatcaccagcgactatgtcgtagtgggtaaagctccctcagctgcagtgagggagcatcagag

SEQ ID NO: 3769 - DNA, 94 bp, synthetic construct
  misc_feature 1..94: note = engineered ribonucleic acid scaffold (ERS) sequence
  source 1..94: mol_type = other DNA
actggctcttctatctgattactctgagcgccatcaccagcgactatgtcgtagtgggtaaagctccctcagctgcagtgagggagcatcagag

SEQ ID NO: 3770 - DNA, 94 bp, synthetic construct
  misc_feature 1..94: note = engineered ribonucleic acid scaffold (ERS) sequence
  source 1..94: mol_type = other DNA
actggctcttctatctgattactctgagggccatcaccagcgactatgtcgtagtgggtaaagctccctcagctgcagtgagggagcatcagag

SEQ ID NO: 3771 - DNA, 94 bp, synthetic construct
  misc_feature 1..94: note = engineered ribonucleic acid scaffold (ERS) sequence
  source 1..94: mol_type = other DNA
actggctcttctatctgattactctgagtgccatcaccagcgactatgtcgtagtgggtaaagctccctcagctgcagtgagggagcatcagag

SEQ ID NO: 3772 - DNA, 94 bp, synthetic construct
  misc_feature 1..94: note = engineered ribonucleic acid scaffold (ERS) sequence
  source 1..94: mol_type = other DNA
actggctcttctatctgattactctgagagccatcaccagcgactatgtcgtagtgggtaaagctccctcagctgcagtgagggagcatcagag

SEQ ID NO: 3773 - DNA, 94 bp, synthetic construct
  misc_feature 1..94: note = engineered ribonucleic acid scaffold (ERS) sequence
  source 1..94: mol_type = other DNA
actggcggttctatctgattactctgagcgccatcaccagcgactatgtcgtagtgggtaaagctccctcagctgcagtgagggagcatcagag

SEQ ID NO: 3774 - DNA, 94 bp, synthetic construct
  misc_feature 1..94: note = engineered ribonucleic acid scaffold (ERS) sequence
  source 1..94: mol_type = other DNA
actggcggttctatctgattactctgagagccatcaccagcgactatgtcgtagtgggtaaagctccctcagctgcagtgagggagcatcagag

SEQ ID NO: 3775 - DNA, 88 bp, synthetic construct
  misc_feature 1..88: note = engineered ribonucleic acid scaffold (ERS) sequence
  source 1..88: mol_type = other DNA
acacacggttctatctgattactctgccgtgttcaccagcgactatgtcgtagtgggtaaagctccctcataggagggagcatcagag

SEQ ID NO: 3776 - DNA, 88 bp, synthetic construct
  misc_feature 1..88: note = engineered ribonucleic acid scaffold (ERS) sequence
  source 1..88: mol_type = other DNA
acactggtttctatctgattactctgaccagttcaccagcgactatgtcgtagtgggtaaagctccctcataggagggagcatcagag

SEQ ID NO: 3777 - DNA, 88 bp, synthetic construct
  misc_feature 1..88: note = engineered ribonucleic acid scaffold (ERS) sequence
  source 1..88: mol_type = other DNA
acaggccgttctatctgattactctgcggccttcaccagcgactatgtcgtagtgggtaaagctccctcataggagggagcatcagag

SEQ ID NO: 3778 - DNA, 88 bp, synthetic construct
  misc_feature 1..88: note = engineered ribonucleic acid scaffold (ERS) sequence
  source 1..88: mol_type = other DNA
acaggtccttctatctgattactctgggaccttcaccagcgactatgtcgtagtgggtaaagctccctcataggagggagcatcagag

SEQ ID NO: 3779 - DNA, 88 bp, synthetic construct
  misc_feature 1..88: note = engineered ribonucleic acid scaffold (ERS) sequence
  source 1..88: mol_type = other DNA
accagcaattctatctgattactctgttgctgtcaccagcgactatgtcgtagtgggtaaagctccctcataggagggagcatcagag

SEQ ID NO: 3780 - DNA, 88 bp, synthetic construct
  misc_feature 1..88: note = engineered ribonucleic acid scaffold (ERS) sequence
  source 1..88: mol_type = other DNA
accgagacttctatctgattactctgggctcgtcaccagcgactatgtcgtagtgggtaaagctccctcataggagggagcatcagag

SEQ ID NO: 3781 - DNA, 88 bp, synthetic construct
  misc_feature 1..88: note = engineered ribonucleic acid scaffold (ERS) sequence
  source 1..88: mol_type = other DNA
acctgtagttctatctgattactctgctacagtcaccagcgactatgtcgtagtgggtaaagctccctcataggagggagcatcagag

SEQ ID NO: 3782 - DNA, 88 bp, synthetic construct
  misc_feature 1..88: note = engineered ribonucleic acid scaffold (ERS) sequence
  source 1..88: mol_type = other DNA
acgagcacttctatctgattactctggggctctcaccagcgactatgtcgtagtgggtaaagctccctcataggagggagcatcagag

SEQ ID NO: 3783 - DNA, 88 bp, synthetic construct
  misc_feature 1..88: note = engineered ribonucleic acid scaffold (ERS) sequence
  source 1..88: mol_type = other DNA
acgaggtgttctatctgattactctgcacctctcaccagcgactatgtcgtagtgggtaaagctccctcataggagggagcatcagag

SEQ ID NO: 3784 - DNA, 88 bp, synthetic construct
  misc_feature 1..88: note = engineered ribonucleic acid scaffold (ERS) sequence
  source 1..88: mol_type = other DNA
acgggactttctatctgattactctgagtccctcaccagcgactatgtcgtagtgggtaaagctccctcataggagggagcatcagag

SEQ ID NO: 3785 - DNA, 88 bp, synthetic construct
  misc_feature 1..88: note = engineered ribonucleic acid scaffold (ERS) sequence
  source 1..88: mol_type = other DNA
acgggcaattctatctgattactctgttgccctcaccagcgactatgtcgtagtgggtaaagctccctcataggagggagcatcagag

SEQ ID NO: 3786 - DNA, 88 bp, synthetic construct
  misc_feature 1..88: note = engineered ribonucleic acid scaffold (ERS) sequence
  source 1..88: mol_type = other DNA
actgtgcgttctatctgattactctgcgcacatcaccagcgactatgtcgtagtgggtaaagctccctcataggagggagcatcagag

SEQ ID NO: 3787 - DNA, 89 bp, synthetic construct
  misc_feature 1..89: note = engineered ribonucleic acid scaffold (ERS) sequence
  source 1..89: mol_type = other DNA
actggcgcttctatctgattactctgggcgccatcaccagcgactatgtcgtagtgggtaaagctccctcataggagggagcatcagag

SEQ ID NO: 3788 - DNA, 89 bp, synthetic construct
  misc_feature 1..89: note = engineered ribonucleic acid scaffold (ERS) sequence
  source 1..89: mol_type = other DNA
actggcgcttctatctgattactctgggagccatcaccagcgactatgtcgtagtgggtaaagctccctcataggagggagcatcagag

SEQ ID NO: 3789 - DNA, 89 bp, synthetic construct
  misc_feature 1..89: note = engineered ribonucleic acid scaffold (ERS) sequence
  source 1..89: mol_type = other DNA
actggcgcttctatctgattactctgtgagccatcaccagcgactatgtcgtagtgggtaaagctccctcataggagggagcatcagag

SEQ ID NO: 3790 - DNA, 90 bp, synthetic construct
  misc_feature 1..90: note = engineered ribonucleic acid scaffold (ERS) sequence
  source 1..90: mol_type = other DNA
actggcgcttctatctgattactctgaggagccatcaccagcgactatgtcgtagtgggtaaagctccctcataggagggagcatcagag

SEQ ID NO: 3791 - DNA, 89 bp, synthetic construct
  misc_feature 1..89: note = engineered ribonucleic acid scaffold (ERS) sequence
  source 1..89: mol_type = other DNA
actggcgcttctatctgattactctgatagccatcaccagcgactatgtcgtagtgggtaaagctccctcataggagggagcatcagag

SEQ ID NO: 3792 - DNA, 90 bp, synthetic construct
  misc_feature 1..90: note = engineered ribonucleic acid scaffold (ERS) sequence
  source 1..90: mol_type = other DNA
actggcgcttctatctgattactctgagctgccatcaccagcgactatgtcgtagtgggtaaagctccctcataggagggagcatcagag

SEQ ID NO: 3793 - DNA, 90 bp, synthetic construct
  misc_feature 1..90: note = engineered ribonucleic acid scaffold (ERS) sequence
  source 1..90: mol_type = other DNA
actggcacttctatctgattactctgagtagccatcaccagcgactatgtcgtagtgggtaaagctccctcataggagggagcatcagag

SEQ ID NO: 3794 - DNA, 90 bp, synthetic construct
  misc_feature 1..90: note = engineered ribonucleic acid scaffold (ERS) sequence
  source 1..90: mol_type = other DNA
actggcgcttctatctgattactctgagtagccatcaccagcgactatgtcgtagtgggtaaagctccctcataggagggagcatcagag

SEQ ID NO: 3795 - DNA, 89 bp, synthetic construct
  misc_feature 1..89: note = engineered ribonucleic acid scaffold (ERS) sequence
  source 1..89: mol_type = other DNA
actggcgcttctatctgattactctgagcaccatcaccagcgactatgtcgtagtgggtaaagctccctcataggagggagcatcagag

SEQ ID NO: 3796 - DNA, 89 bp, synthetic construct
  misc_feature 1..89: note = engineered ribonucleic acid scaffold (ERS) sequence
  source 1..89: mol_type = other DNA
actggcacttctatctgattactctgagcgccatcaccagcgactatgtcgtagtgggtaaagctccctcataggagggagcatcagag

SEQ ID NO: 3797 - DNA, 89 bp, synthetic construct
  misc_feature 1..89: note = engineered ribonucleic acid scaffold (ERS) sequence
  source 1..89: mol_type = other DNA
actggcgcttctatctgattactctgagggccatcaccagcgactatgtcgtagtgggtaaagctccctcataggagggagcatcagag

SEQ ID NO: 3798 - DNA, 89 bp, synthetic construct
  misc_feature 1..89: note = engineered ribonucleic acid scaffold (ERS) sequence
  source 1..89: mol_type = other DNA
actggcgcttctatctgattactctgagtgccgtcaccagcgactatgtcgtagtgggtaaagctccctcataggagggagcatcagag

SEQ ID NO: 3799 - DNA, 89 bp, synthetic construct
  misc_feature 1..89: note = engineered ribonucleic acid scaffold (ERS) sequence
  source 1..89: mol_type = other DNA
actggcacttctatctgattactctgagtgccatcaccagcgactatgtcgtagtgggtaaagctccctcataggagggagcatcagag

SEQ ID NO: 3800 - DNA, 89 bp, synthetic construct
  misc_feature 1..89: note = engineered ribonucleic acid scaffold (ERS) sequence
  source 1..89: mol_type = other DNA
actggcgcttctatctgattactctgagaaccatcaccagcgactatgtcgtagtgggtaaagctccctcataggagggagcatcagag

SEQ ID NO: 3801 - DNA, 89 bp, synthetic construct
  misc_feature 1..89: note = engineered ribonucleic acid scaffold (ERS) sequence
  source 1..89: mol_type = other DNA
actggcgcttctatctgattactctgagagccgtcaccagcgactatgtcgtagtgggtaaagctccctcataggagggagcatcagag

SEQ ID NO: 3802 - DNA, 89 bp, synthetic construct
  misc_feature 1..89: note = engineered ribonucleic acid scaffold (ERS) sequence
  source 1..89: mol_type = other DNA
actggcgcttctatctgattactctgagagccttcaccagcgactatgtcgtagtgggtaaagctccctcataggagggagcatcagag

SEQ ID NO: 3803 - DNA, 89 bp, synthetic construct
  misc_feature 1..89: note = engineered ribonucleic acid scaffold (ERS) sequence
  source 1..89: mol_type = other DNA
actggggcttctatctgattactctgagacccatcaccagcgactatgtcgtagtgggtaaagctccctcataggagggagcatcagag

SEQ ID NO: 3804 - DNA, 89 bp, synthetic construct
  misc_feature 1..89: note = engineered ribonucleic acid scaffold (ERS) sequence
  source 1..89: mol_type = other DNA
actggtgcttctatctgattactctgagagccatcaccagcgactatgtcgtagtgggtaaagctccctcataggagggagcatcagag

SEQ ID NO: 3805 - DNA, 89 bp, synthetic construct
  misc_feature 1..89: note = engineered ribonucleic acid scaffold (ERS) sequence
  source 1..89: mol_type = other DNA
actgggccttctatctgattactctgaggcccatcaccagcgactatgtcgtagtgggtaaagctccctcataggagggagcatcagag

SEQ ID NO: 3806 - DNA, 90 bp, synthetic construct
  misc_feature 1..90: note = engineered ribonucleic acid scaffold (ERS) sequence
  source 1..90: mol_type = other DNA
actggcccttctatctgattactctgaggagccatcaccagcgactatgtcgtagtgggtaaagctccctcataggagggagcatcagag

SEQ ID NO: 3807 - DNA, 89 bp, synthetic construct
  misc_feature 1..89: note = engineered ribonucleic acid scaffold (ERS) sequence
  source 1..89: mol_type = other DNA
actggcccttctatctgattactctgagggccatcaccagcgactatgtcgtagtgggtaaagctccctcataggagggagcatcagag

SEQ ID NO: 3808 - DNA, 89 bp, synthetic construct
  misc_feature 1..89: note = engineered ribonucleic acid scaffold (ERS) sequence
  source 1..89: mol_type = other DNA
actggcccttctatctgattactctgagtgccatcaccagcgactatgtcgtagtgggtaaagctccctcataggagggagcatcagag

SEQ ID NO: 3809 - DNA, 89 bp, synthetic construct
  misc_feature 1..89: note = engineered ribonucleic acid scaffold (ERS) sequence
  source 1..89: mol_type = other DNA
actggcccttctatctgattactctgagagccatcaccagcgactatgtcgtagtgggtaaagctccctcataggagggagcatcagag

SEQ ID NO: 3810 - DNA, 90 bp, synthetic construct
  misc_feature 1..90: note = engineered ribonucleic acid scaffold (ERS) sequence
  source 1..90: mol_type = other DNA
actggcgcttctatctgattactctgagcagccatcaccagcgactatgtcgtagtgggtaaagctccctcataggagggagcatcagag

SEQ ID NO: 3811 - DNA, 89 bp, synthetic construct; identical to SEQ ID NO: 722
  misc_feature 1..89: note = engineered ribonucleic acid scaffold (ERS) sequence
  source 1..89: mol_type = other DNA

SEQ ID NO: 3812 - DNA, 89 bp, synthetic construct
  misc_feature 1..89: note = engineered ribonucleic acid scaffold (ERS) sequence
  source 1..89: mol_type = other DNA
actggcgcttctatctgattactctgagtgccatcaccagcgactatgtcgtagtgggtaaagctccctcataggagggagcatcagag

SEQ ID NO: 3813 - DNA, 89 bp, synthetic construct
  misc_feature 1..89: note = engineered ribonucleic acid scaffold (ERS) sequence
  source 1..89: mol_type = other DNA
actggcgcttctatctgattactctgagagccatcaccagcgactatgtcgtagtgggtaaagctccctcataggagggagcatcagag

SEQ ID NO: 3814 - DNA, 89 bp, synthetic construct
  misc_feature 1..89: note = engineered ribonucleic acid scaffold (ERS) sequence
  source 1..89: mol_type = other DNA
actggctcttctatctgattactctgagcgccatcaccagcgactatgtcgtagtgggtaaagctccctcataggagggagcatcagag

SEQ ID NO: 3815 - DNA, 89 bp, synthetic construct
  misc_feature 1..89: note = engineered ribonucleic acid scaffold (ERS) sequence
  source 1..89: mol_type = other DNA
actggctcttctatctgattactctgagggccatcaccagcgactatgtcgtagtgggtaaagctccctcataggagggagcatcagag

SEQ ID NO: 3816 - DNA, 89 bp, synthetic construct
  misc_feature 1..89: note = engineered ribonucleic acid scaffold (ERS) sequence
  source 1..89: mol_type = other DNA
actggctcttctatctgattactctgagtgccatcaccagcgactatgtcgtagtgggtaaagctccctcataggagggagcatcagag

SEQ ID NO: 3817 - DNA, 89 bp, synthetic construct
  misc_feature 1..89: note = engineered ribonucleic acid scaffold (ERS) sequence
  source 1..89: mol_type = other DNA
actggctcttctatctgattactctgagagccatcaccagcgactatgtcgtagtgggtaaagctccctcataggagggagcatcagag

SEQ ID NO: 3818 - DNA, 89 bp, synthetic construct
  misc_feature 1..89: note = engineered ribonucleic acid scaffold (ERS) sequence
  source 1..89: mol_type = other DNA
actggcggttctatctgattactctgagcgccatcaccagcgactatgtcgtagtgggtaaagctccctcataggagggagcatcagag

SEQ ID NO: 3819 - DNA, 89 bp, synthetic construct
  misc_feature 1..89: note = engineered ribonucleic acid scaffold (ERS) sequence
  source 1..89: mol_type = other DNA
actggcggttctatctgattactctgagagccatcaccagcgactatgtcgtagtgggtaaagctccctcataggagggagcatcagag

SEQ ID NO: 3820 - DNA, 89 bp, synthetic construct
  misc_feature 1..89: note = engineered ribonucleic acid scaffold (ERS) sequence
  source 1..89: mol_type = other DNA
acacacggttctatctgattactctgccgtgttcaccagcgactatgtcgtagtgggtaaagctccctcttcaggagggagcatcagag

SEQ ID NO: 3821 - DNA, 89 bp, synthetic construct
  misc_feature 1..89: note = engineered ribonucleic acid scaffold (ERS) sequence
  source 1..89: mol_type = other DNA
acactggtttctatctgattactctgaccagttcaccagcgactatgtcgtagtgggtaaagctccctcttcaggagggagcatcagag

SEQ ID NO: 3822 - DNA, 89 bp, synthetic construct
  misc_feature 1..89: note = engineered ribonucleic acid scaffold (ERS) sequence
  source 1..89: mol_type = other DNA
acaggccgttctatctgattactctgcggccttcaccagcgactatgtcgtagtgggtaaagctccctcttcaggagggagcatcagag

SEQ ID NO: 3823 - DNA, 89 bp, synthetic construct
  misc_feature 1..89: note = engineered ribonucleic acid scaffold (ERS) sequence
  source 1..89: mol_type = other DNA
acaggtccttctatctgattactctgggaccttcaccagcgactatgtcgtagtgggtaaagctccctcttcaggagggagcatcagag

SEQ ID NO: 3824 - DNA, 89 bp, synthetic construct
  misc_feature 1..89: note = engineered ribonucleic acid scaffold (ERS) sequence
  source 1..89: mol_type = other DNA
accagcaattctatctgattactctgttgctgtcaccagcgactatgtcgtagtgggtaaagctccctcttcaggagggagcatcagag

SEQ ID NO: 3825 - DNA, 89 bp, synthetic construct
  misc_feature 1..89: note = engineered ribonucleic acid scaffold (ERS) sequence
  source 1..89: mol_type = other DNA
accgagacttctatctgattactctgggctcgtcaccagcgactatgtcgtagtgggtaaagctccctcttcaggagggagcatcagag

SEQ ID NO: 3826 - DNA, 89 bp, synthetic construct
  misc_feature 1..89: note = engineered ribonucleic acid scaffold (ERS) sequence
  source 1..89: mol_type = other DNA
acctgtagttctatctgattactctgctacagtcaccagcgactatgtcgtagtgggtaaagctccctcttcaggagggagcatcagag

SEQ ID NO: 3827 - DNA, 89 bp, synthetic construct
  misc_feature 1..89: note = engineered ribonucleic acid scaffold (ERS) sequence
  source 1..89: mol_type = other DNA
acgagcacttctatctgattactctggggctctcaccagcgactatgtcgtagtgggtaaagctccctcttcaggagggagcatcagag

SEQ ID NO: 3828 - DNA, 89 bp, synthetic construct
  misc_feature 1..89: note = engineered ribonucleic acid scaffold (ERS) sequence
  source 1..89: mol_type = other DNA
acgaggtgttctatctgattactctgcacctctcaccagcgactatgtcgtagtgggtaaagctccctcttcaggagggagcatcagag

SEQ ID NO: 3829 - DNA, 89 bp, synthetic construct
  misc_feature 1..89: note = engineered ribonucleic acid scaffold (ERS) sequence
  source 1..89: mol_type = other DNA
acgggactttctatctgattactctgagtccctcaccagcgactatgtcgtagtgggtaaagctccctcttcaggagggagcatcagag

SEQ ID NO: 3830 - DNA, 89 bp, synthetic construct
  misc_feature 1..89: note = engineered ribonucleic acid scaffold (ERS) sequence
  source 1..89: mol_type = other DNA
acgggcaattctatctgattactctgttgccctcaccagcgactatgtcgtagtgggtaaagctccctcttcaggagggagcatcagag

SEQ ID NO: 3831 - DNA, 89 bp, synthetic construct
  misc_feature 1..89: note = engineered ribonucleic acid scaffold (ERS) sequence
  source 1..89: mol_type = other DNA
actgtgcgttctatctgattactctgcgcacatcaccagcgactatgtcgtagtgggtaaagctccctcttcaggagggagcatcagag

SEQ ID NO: 3832 - DNA, 90 bp, synthetic construct
  misc_feature 1..90: note = engineered ribonucleic acid scaffold (ERS) sequence
  source 1..90: mol_type = other DNA
actggcgcttctatctgattactctgggcgccatcaccagcgactatgtcgtagtgggtaaagctccctcttcaggagggagcatcagag

SEQ ID NO: 3833 - DNA, 90 bp, synthetic construct
  misc_feature 1..90: note = engineered ribonucleic acid scaffold (ERS) sequence
  source 1..90: mol_type = other DNA
actggcgcttctatctgattactctgggagccatcaccagcgactatgtcgtagtgggtaaagctccctcttcaggagggagcatcagag

SEQ ID NO: 3834 - DNA, 90 bp, synthetic construct
  misc_feature 1..90: note = engineered ribonucleic acid scaffold (ERS) sequence
  source 1..90: mol_type = other DNA
actggcgcttctatctgattactctgtgagccatcaccagcgactatgtcgtagtgggtaaagctccctcttcaggagggagcatcagag

SEQ ID NO: 3835 - DNA, 91 bp, synthetic construct
  misc_feature 1..91: note = engineered ribonucleic acid scaffold (ERS) sequence
  source 1..91: mol_type = other DNA
actggcgcttctatctgattactctgaggagccatcaccagcgactatgtcgtagtgggtaaagctccctcttcaggagggagcatcagag

SEQ ID NO: 3836 - DNA, 90 bp, synthetic construct
  misc_feature 1..90: note = engineered ribonucleic acid scaffold (ERS) sequence
  source 1..90: mol_type = other DNA
actggcgcttctatctgattactctgatagccatcaccagcgactatgtcgtagtgggtaaagctccctcttcaggagggagcatcagag

SEQ ID NO: 3837 - DNA, 91 bp, synthetic construct
  misc_feature 1..91: note = engineered ribonucleic acid scaffold (ERS) sequence
  source 1..91: mol_type = other DNA
actggcgcttctatctgattactctgagctgccatcaccagcgactatgtcgtagtgggtaaagctccctcttcaggagggagcatcagag

SEQ ID NO: 3838 - DNA, 91 bp, synthetic construct
  misc_feature 1..91: note = engineered ribonucleic acid scaffold (ERS) sequence
  source 1..91: mol_type = other DNA
actggcacttctatctgattactctgagtagccatcaccagcgactatgtcgtagtgggtaaagctccctcttcaggagggagcatcagag

SEQ ID NO: 3839 - DNA, 91 bp, synthetic construct
  misc_feature 1..91: note = engineered ribonucleic acid scaffold (ERS) sequence
  source 1..91: mol_type = other DNA
actggcgcttctatctgattactctgagtagccatcaccagcgactatgtcgtagtgggtaaagctccctcttcaggagggagcatcagag

SEQ ID NO: 3840 - DNA, 90 bp, synthetic construct
  misc_feature 1..90: note = engineered ribonucleic acid scaffold (ERS) sequence
  source 1..90: mol_type = other DNA
actggcgcttctatctgattactctgagcaccatcaccagcgactatgtcgtagtgggtaaagctccctcttcaggagggagcatcagag

SEQ ID NO: 3841 - DNA, 90 bp, synthetic construct
  misc_feature 1..90: note = engineered ribonucleic acid scaffold (ERS) sequence
  source 1..90: mol_type = other DNA
actggcacttctatctgattactctgagcgccatcaccagcgactatgtcgtagtgggtaaagctccctcttcaggagggagcatcagag

SEQ ID NO: 3842 - DNA, 90 bp, synthetic construct
  misc_feature 1..90: note = engineered ribonucleic acid scaffold (ERS) sequence
  source 1..90: mol_type = other DNA
actggcgcttctatctgattactctgagggccatcaccagcgactatgtcgtagtgggtaaagctccctcttcaggagggagcatcagag

SEQ ID NO: 3843 - DNA, 90 bp, synthetic construct
  misc_feature 1..90: note = engineered ribonucleic acid scaffold (ERS) sequence
  source 1..90: mol_type = other DNA
actggcgcttctatctgattactctgagtgccgtcaccagcgactatgtcgtagtgggtaaagctccctcttcaggagggagcatcagag

SEQ ID NO: 3844 - DNA, 90 bp, synthetic construct
  misc_feature 1..90: note = engineered ribonucleic acid scaffold (ERS) sequence
  source 1..90: mol_type = other DNA
actggcacttctatctgattactctgagtgccatcaccagcgactatgtcgtagtgggtaaagctccctcttcaggagggagcatcagag

SEQ ID NO: 3845 - DNA, 90 bp, synthetic construct
  misc_feature 1..90: note = engineered ribonucleic acid scaffold (ERS) sequence
  source 1..90: mol_type = other DNA
actggcgcttctatctgattactctgagaaccatcaccagcgactatgtcgtagtgggtaaagctccctcttcaggagggagcatcagag

SEQ ID NO: 3846 - DNA, 90 bp, synthetic construct
  misc_feature 1..90: note = engineered ribonucleic acid scaffold (ERS) sequence
  source 1..90: mol_type = other DNA
actggcgcttctatctgattactctgagagccgtcaccagcgactatgtcgtagtgggtaaagctccctcttcaggagggagcatcagag

SEQ ID NO: 3847 - DNA, 90 bp, synthetic construct
  misc_feature 1..90: note = engineered ribonucleic acid scaffold (ERS) sequence
  source 1..90: mol_type = other DNA
actggcgcttctatctgattactctgagagccttcaccagcgactatgtcgtagtgggtaaagctccctcttcaggagggagcatcagag

SEQ ID NO: 3848 - DNA, 90 bp, synthetic construct
  misc_feature 1..90: note = engineered ribonucleic acid scaffold (ERS) sequence
  source 1..90: mol_type = other DNA
actggggcttctatctgattactctgagacccatcaccagcgactatgtcgtagtgggtaaagctccctcttcaggagggagcatcagag

SEQ ID NO: 3849 - DNA, 90 bp, synthetic construct
  misc_feature 1..90: note = engineered ribonucleic acid scaffold (ERS) sequence
  source 1..90: mol_type = other DNA
actggtgcttctatctgattactctgagagccatcaccagcgactatgtcgtagtgggtaaagctccctcttcaggagggagcatcagag

SEQ ID NO: 3850 - DNA, 90 bp, synthetic construct; identical to SEQ ID NO: 547
  misc_feature 1..90: note = engineered ribonucleic acid scaffold (ERS) sequence
  source 1..90: mol_type = other DNA

SEQ ID NO: 3851 - DNA, 91 bp, synthetic construct
  misc_feature 1..91: note = engineered ribonucleic acid scaffold (ERS) sequence
  source 1..91: mol_type = other DNA
actggcccttctatctgattactctgaggagccatcaccagcgactatgtcgtagtgggtaaagctccctcttcaggagggagcatcagag

SEQ ID NO: 3852 - DNA, 90 bp, synthetic construct
  misc_feature 1..90: note = engineered ribonucleic acid scaffold (ERS) sequence
  source 1..90: mol_type = other DNA
actggcccttctatctgattactctgagggccatcaccagcgactatgtcgtagtgggtaaagctccctcttcaggagggagcatcagag

SEQ ID NO: 3853 - DNA, 90 bp, synthetic construct
  misc_feature 1..90: note = engineered ribonucleic acid scaffold (ERS) sequence
  source 1..90: mol_type = other DNA
actggcccttctatctgattactctgagtgccatcaccagcgactatgtcgtagtgggtaaagctccctcttcaggagggagcatcagag

SEQ ID NO: 3854 - DNA, 90 bp, synthetic construct
  misc_feature 1..90: note = engineered ribonucleic acid scaffold (ERS) sequence
  source 1..90: mol_type = other DNA
actggcccttctatctgattactctgagagccatcaccagcgactatgtcgtagtgggtaaagctccctcttcaggagggagcatcagag

SEQ ID NO: 3855 - DNA, 91 bp, synthetic construct
  misc_feature 1..91: note = engineered ribonucleic acid scaffold (ERS) sequence
  source 1..91: mol_type = other DNA
actggcgcttctatctgattactctgagcagccatcaccagcgactatgtcgtagtgggtaaagctccctcttcaggagggagcatcagag

SEQ ID NO: 3856 - DNA, 90 bp, synthetic construct; identical to SEQ ID NO: 737
  misc_feature 1..90: note = engineered ribonucleic acid scaffold (ERS) sequence
  source 1..90: mol_type = other DNA

SEQ ID NO: 3857 - DNA, 90 bp, synthetic construct
  misc_feature 1..90: note = engineered ribonucleic acid scaffold (ERS) sequence
  source 1..90: mol_type = other DNA
actggcgcttctatctgattactctgagtgccatcaccagcgactatgtcgtagtgggtaaagctccctcttcaggagggagcatcagag

SEQ ID NO: 3858 - DNA, 90 bp, synthetic construct
  misc_feature 1..90: note = engineered ribonucleic acid scaffold (ERS) sequence
  source 1..90: mol_type = other DNA
actggcgcttctatctgattactctgagagccatcaccagcgactatgtcgtagtgggtaaagctccctcttcaggagggagcatcagag

SEQ ID NO: 3859 - DNA, 90 bp, synthetic construct
  misc_feature 1..90: note = engineered ribonucleic acid scaffold (ERS) sequence
  source 1..90: mol_type = other DNA
actggctcttctatctgattactctgagcgccatcaccagcgactatgtcgtagtgggtaaagctccctcttcaggagggagcatcagag

SEQ ID NO: 3860 - DNA, 90 bp, synthetic construct
  misc_feature 1..90: note = engineered ribonucleic acid scaffold (ERS) sequence
  source 1..90: mol_type = other DNA
actggctcttctatctgattactctgagggccatcaccagcgactatgtcgtagtgggtaaagctccctcttcaggagggagcatcagag

SEQ ID NO: 3861 - DNA, 90 bp, synthetic construct
  misc_feature 1..90: note = engineered ribonucleic acid scaffold (ERS) sequence
  source 1..90: mol_type = other DNA
actggctcttctatctgattactctgagtgccatcaccagcgactatgtcgtagtgggtaaagctccctcttcaggagggagcatcagag

SEQ ID NO: 3862 - DNA, 90 bp, synthetic construct
  misc_feature 1..90: note = engineered ribonucleic acid scaffold (ERS) sequence
  source 1..90: mol_type = other DNA
actggctcttctatctgattactctgagagccatcaccagcgactatgtcgtagtgggtaaagctccctcttcaggagggagcatcagag

SEQ ID NO: 3863 - DNA, 90 bp, synthetic construct
  misc_feature 1..90: note = engineered ribonucleic acid scaffold (ERS) sequence
  source 1..90: mol_type = other DNA
actggcggttctatctgattactctgagcgccatcaccagcgactatgtcgtagtgggtaaagctccctcttcaggagggagcatcagag

SEQ ID NO: 3864 - DNA, 90 bp, synthetic construct
  misc_feature 1..90: note = engineered ribonucleic acid scaffold (ERS) sequence
  source 1..90: mol_type = other DNA
actggcggttctatctgattactctgagagccatcaccagcgactatgtcgtagtgggtaaagctccctcttcaggagggagcatcagag

SEQ ID NO: 3865 - DNA, 88 bp, synthetic construct
  misc_feature 1..88: note = engineered ribonucleic acid scaffold (ERS) sequence
  source 1..88: mol_type = other DNA
acacacggttctatctgattactctgccgtgttcaccagcgactatgtcgtagtgggtaaagctccctcttcggagagtgcatcagag

SEQ ID NO: 3866 - DNA, 88 bp, synthetic construct
  misc_feature 1..88: note = engineered ribonucleic acid scaffold (ERS) sequence
  source 1..88: mol_type = other DNA
acactggtttctatctgattactctgaccagttcaccagcgactatgtcgtagtgggtaaagctccctcttcggagagtgcatcagag

SEQ ID NO: 3867 - DNA, 88 bp, synthetic construct
  misc_feature 1..88: note = engineered ribonucleic acid scaffold (ERS) sequence
  source 1..88: mol_type = other DNA
acaggccgttctatctgattactctgcggccttcaccagcgactatgtcgtagtgggtaaagctccctcttcggagagtgcatcagag

SEQ ID NO: 3868 - DNA, 88 bp, synthetic construct
  misc_feature 1..88: note = engineered ribonucleic acid scaffold (ERS) sequence
  source 1..88: mol_type = other DNA
acaggtccttctatctgattactctgggaccttcaccagcgactatgtcgtagtgggtaaagctccctcttcggagagtgcatcagag

SEQ ID NO: 3869 - DNA, 88 bp, synthetic construct
  misc_feature 1..88: note = engineered ribonucleic acid scaffold (ERS) sequence
  source 1..88: mol_type = other DNA
accagcaattctatctgattactctgttgctgtcaccagcgactatgtcgtagtgggtaaagctccctcttcggagagtgcatcagag

SEQ ID NO: 3870 - DNA, 88 bp, synthetic construct
  misc_feature 1..88: note = engineered ribonucleic acid scaffold (ERS) sequence
  source 1..88: mol_type = other DNA
accgagacttctatctgattactctgggctcgtcaccagcgactatgtcgtagtgggtaaagctccctcttcggagagtgcatcagag

SEQ ID NO: 3871 - DNA, 88 bp, synthetic construct
  misc_feature 1..88: note = engineered ribonucleic acid scaffold (ERS) sequence
  source 1..88: mol_type = other DNA
acctgtagttctatctgattactctgctacagtcaccagcgactatgtcgtagtgggtaaagctccctcttcggagagtgcatcagag

SEQ ID NO: 3872 - DNA, 88 bp, synthetic construct
  misc_feature 1..88: note = engineered ribonucleic acid scaffold (ERS) sequence
  source 1..88: mol_type = other DNA
acgagcacttctatctgattactctggggctctcaccagcgactatgtcgtagtgggtaaagctccctcttcggagagtgcatcagag

SEQ ID NO: 3873 - DNA, 88 bp, synthetic construct
  misc_feature 1..88: note = engineered ribonucleic acid scaffold (ERS) sequence
  source 1..88: mol_type = other DNA
acgaggtgttctatctgattactctgcacctctcaccagcgactatgtcgtagtgggtaaagctccctcttcggagagtgcatcagag

SEQ ID NO: 3874 - DNA, 88 bp, synthetic construct
  misc_feature 1..88: note = engineered ribonucleic acid scaffold (ERS) sequence
  source 1..88: mol_type = other DNA
acgggactttctatctgattactctgagtccctcaccagcgactatgtcgtagtgggtaaagctccctcttcggagagtgcatcagag

SEQ ID NO: 3875 - DNA, 88 bp, synthetic construct
  misc_feature 1..88: note = engineered ribonucleic acid scaffold (ERS) sequence
  source 1..88: mol_type = other DNA
acgggcaattctatctgattactctgttgccctcaccagcgactatgtcgtagtgggtaaagctccctcttcggagagtgcatcagag

SEQ ID NO: 3876 - DNA, 88 bp, synthetic construct
  misc_feature 1..88: note = engineered ribonucleic acid scaffold (ERS) sequence
  source 1..88: mol_type = other DNA
actgtgcgttctatctgattactctgcgcacatcaccagcgactatgtcgtagtgggtaaagctccctcttcggagagtgcatcagag

SEQ ID NO: 3877 - DNA, 89 bp, synthetic construct
  misc_feature 1..89: note = engineered ribonucleic acid scaffold (ERS) sequence
  source 1..89: mol_type = other DNA
actggcgcttctatctgattactctgggcgccatcaccagcgactatgtcgtagtgggtaaagctccctcttcggagagtgcatcagag

SEQ ID NO: 3878 - DNA, 89 bp, synthetic construct
  misc_feature 1..89: note = engineered ribonucleic acid scaffold (ERS) sequence
  source 1..89: mol_type = other DNA
actggcgcttctatctgattactctgggagccatcaccagcgactatgtcgtagtgggtaaagctccctcttcggagagtgcatcagag

SEQ ID NO: 3879 - DNA, 89 bp, synthetic construct
  misc_feature 1..89: note = engineered ribonucleic acid scaffold (ERS) sequence
  source 1..89: mol_type = other DNA
actggcgcttctatctgattactctgtgagccatcaccagcgactatgtcgtagtgggtaaagctccctcttcggagagtgcatcagag

SEQ ID NO: 3880 - DNA, 90 bp, synthetic construct
  misc_feature 1..90: note = engineered ribonucleic acid scaffold (ERS) sequence
  source 1..90: mol_type = other DNA
actggcgcttctatctgattactctgaggagccatcaccagcgactatgtcgtagtgggtaaagctccctcttcggagagtgcatcagag

SEQ ID NO: 3881 - DNA, 89 bp, synthetic construct
  misc_feature 1..89: note = engineered ribonucleic acid scaffold (ERS) sequence
  source 1..89: mol_type = other DNA
actggcgcttctatctgattactctgatagccatcaccagcgactatgtcgtagtgggtaaagctccctcttcggagagtgcatcagag

SEQ ID NO: 3882 - DNA, 90 bp, synthetic construct
  misc_feature 1..90: note = engineered ribonucleic acid scaffold (ERS) sequence
  source 1..90: mol_type = other DNA
actggcgcttctatctgattactctgagctgccatcaccagcgactatgtcgtagtgggtaaagctccctcttcggagagtgcatcagag

SEQ ID NO: 3883 - DNA, 90 bp, synthetic construct
  misc_feature 1..90: note = engineered ribonucleic acid scaffold (ERS) sequence
  source 1..90: mol_type = other DNA
actggcacttctatctgattactctgagtagccatcaccagcgactatgtcgtagtgggtaaagctccctcttcggagagtgcatcagag

SEQ ID NO: 3884 - DNA, 90 bp, synthetic construct
  misc_feature 1..90: note = engineered ribonucleic acid scaffold (ERS) sequence
  source 1..90: mol_type = other DNA
actggcgcttctatctgattactctgagtagccatcaccagcgactatgtcgtagtgggtaaagctccctcttcggagagtgcatcagag

SEQ ID NO: 3885 - DNA, 89 bp, synthetic construct
  misc_feature 1..89: note = engineered ribonucleic acid scaffold (ERS) sequence
  source 1..89: mol_type = other DNA
actggcgcttctatctgattactctgagcaccatcaccagcgactatgtcgtagtgggtaaagctccctcttcggagagtgcatcagag

SEQ ID NO: 3886 - DNA, 89 bp, synthetic construct
  misc_feature 1..89: note = engineered ribonucleic acid scaffold (ERS) sequence
  source 1..89: mol_type = other DNA
actggcacttctatctgattactctgagcgccatcaccagcgactatgtcgtagtgggtaaagctccctcttcggagagtgcatcagag

SEQ ID NO: 3887 - DNA, 89 bp, synthetic construct
  misc_feature 1..89: note = engineered ribonucleic acid scaffold (ERS) sequence
  source 1..89: mol_type = other DNA
actggcgcttctatctgattactctgagggccatcaccagcgactatgtcgtagtgggtaaagctccctcttcggagagtgcatcagag

SEQ ID NO: 3888 - DNA, 89 bp, synthetic construct
  misc_feature 1..89: note = engineered ribonucleic acid scaffold (ERS) sequence
  source 1..89: mol_type = other DNA
actggcgcttctatctgattactctgagtgccgtcaccagcgactatgtcgtagtgggtaaagctccctcttcggagagtgcatcagag

SEQ ID NO: 3889 - DNA, 89 bp, synthetic construct
  misc_feature 1..89: note = engineered ribonucleic acid scaffold (ERS) sequence
  source 1..89: mol_type = other DNA
actggcacttctatctgattactctgagtgccatcaccagcgactatgtcgtagtgggtaaagctccctcttcggagagtgcatcagag

SEQ ID NO: 3890 - DNA, 89 bp, synthetic construct
  misc_feature 1..89: note = engineered ribonucleic acid scaffold (ERS) sequence
  source 1..89: mol_type = other DNA
actggcgcttctatctgattactctgagaaccatcaccagcgactatgtcgtagtgggtaaagctccctcttcggagagtgcatcagag

SEQ ID NO: 3891 - DNA, 89 bp, synthetic construct
  misc_feature 1..89: note = engineered ribonucleic acid scaffold (ERS) sequence
  source 1..89: mol_type = other DNA
actggcgcttctatctgattactctgagagccgtcaccagcgactatgtcgtagtgggtaaagctccctcttcggagagtgcatcagag

SEQ ID NO: 3892 - DNA, 89 bp, synthetic construct
  misc_feature 1..89: note = engineered ribonucleic acid scaffold (ERS) sequence
  source 1..89: mol_type = other DNA
actggcgcttctatctgattactctgagagccttcaccagcgactatgtcgtagtgggtaaagctccctcttcggagagtgcatcagag

SEQ ID NO: 3893 - DNA, 89 bp, synthetic construct
  misc_feature 1..89: note = engineered ribonucleic acid scaffold (ERS) sequence
  source 1..89: mol_type = other DNA
actggggcttctatctgattactctgagacccatcaccagcgactatgtcgtagtgggtaaagctccctcttcggagagtgcatcagag

SEQ ID NO: 3894 - DNA, 89 bp, synthetic construct
  misc_feature 1..89: note = engineered ribonucleic acid scaffold (ERS) sequence
  source 1..89: mol_type = other DNA
actggtgcttctatctgattactctgagagccatcaccagcgactatgtcgtagtgggtaaagctccctcttcggagagtgcatcagag

SEQ ID NO: 3895 - DNA, 89 bp, synthetic construct
  misc_feature 1..89: note = engineered ribonucleic acid scaffold (ERS) sequence
  source 1..89: mol_type = other DNA
actgggccttctatctgattactctgaggcccatcaccagcgactatgtcgtagtgggtaaagctccctcttcggagagtgcatcagag

SEQ ID NO: 3896 - DNA, 90 bp, synthetic construct
  misc_feature 1..90: note = engineered ribonucleic acid scaffold (ERS) sequence
  source 1..90: mol_type = other DNA
actggcccttctatctgattactctgaggagccatcaccagcgactatgtcgtagtgggtaaagctccctcttcggagagtgcatcagag

SEQ ID NO: 3897 - DNA, 89 bp, synthetic construct
  misc_feature 1..89: note = engineered ribonucleic acid scaffold (ERS) sequence
  source 1..89: mol_type = other DNA
actggcccttctatctgattactctgagggccatcaccagcgactatgtcgtagtgggtaaagctccctcttcggagagtgcatcagag

SEQ ID NO: 3898 - DNA, 89 bp, synthetic construct
  misc_feature 1..89: note = engineered ribonucleic acid scaffold (ERS) sequence
  source 1..89: mol_type = other DNA
actggcccttctatctgattactctgagtgccatcaccagcgactatgtcgtagtgggtaaagctccctcttcggagagtgcatcagag

SEQ ID NO: 3899 - DNA, 89 bp, synthetic construct
  misc_feature 1..89: note = engineered ribonucleic acid scaffold (ERS) sequence
  source 1..89: mol_type = other DNA
actggcccttctatctgattactctgagagccatcaccagcgactatgtcgtagtgggtaaagctccctcttcggagagtgcatcagag

SEQ ID NO: 3900 - DNA, 90 bp, synthetic construct
  misc_feature 1..90: note = engineered ribonucleic acid scaffold (ERS) sequence
  source 1..90: mol_type = other DNA
actggcgcttctatctgattactctgagcagccatcaccagcgactatgtcgtagtgggtaaagctccctcttcggagagtgcatcagag

SEQ ID NO: 3901 - DNA, 89 bp, synthetic construct; identical to SEQ ID NO: 719
  misc_feature 1..89: note = engineered ribonucleic acid scaffold (ERS) sequence
  source 1..89: mol_type = other DNA

SEQ ID NO: 3902 - DNA, 89 bp, synthetic construct
  misc_feature 1..89: note = engineered ribonucleic acid scaffold (ERS) sequence
  source 1..89: mol_type = other DNA
actggcgcttctatctgattactctgagtgccatcaccagcgactatgtcgtagtgggtaaagctccctcttcggagagtgcatcagag

SEQ ID NO: 3903 - DNA, 89 bp, synthetic construct
  misc_feature 1..89: note = engineered ribonucleic acid scaffold (ERS) sequence
  source 1..89: mol_type = other DNA
actggcgcttctatctgattactctgagagccatcaccagcgactatgtcgtagtgggtaaagctccctcttcggagagtgcatcagag

SEQ ID NO: 3904 - DNA, 89 bp, synthetic construct
  misc_feature 1..89: note = engineered ribonucleic acid scaffold (ERS) sequence
  source 1..89: mol_type = other DNA
actggctcttctatctgattactctgagcgccatcaccagcgactatgtcgtagtgggtaaagctccctcttcggagagtgcatcagag

SEQ ID NO: 3905 - DNA, 89 bp, synthetic construct
  misc_feature 1..89: note = engineered ribonucleic acid scaffold (ERS) sequence
  source 1..89: mol_type = other DNA
actggctcttctatctgattactctgagggccatcaccagcgactatgtcgtagtgggtaaagctccctcttcggagagtgcatcagag

SEQ ID NO: 3906 - DNA, 89 bp, synthetic construct
  misc_feature 1..89: note = engineered ribonucleic acid scaffold (ERS) sequence
  source 1..89: mol_type = other DNA
actggctcttctatctgattactctgagtgccatcaccagcgactatgtcgtagtgggtaaagctccctcttcggagagtgcatcagag

SEQ ID NO: 3907 - DNA, 89 bp, synthetic construct
  misc_feature 1..89: note = engineered ribonucleic acid scaffold (ERS) sequence
  source 1..89: mol_type = other DNA
actggctcttctatctgattactctgagagccatcaccagcgactatgtcgtagtgggtaaagctccctcttcggagagtgcatcagag

SEQ ID NO: 3908 - DNA, 89 bp, synthetic construct
  misc_feature 1..89: note = engineered ribonucleic acid scaffold (ERS) sequence
  source 1..89: mol_type = other DNA
actggcggttctatctgattactctgagcgccatcaccagcgactatgtcgtagtgggtaaagctccctcttcggagagtgcatcagag

SEQ ID NO: 3909 - DNA, 89 bp, synthetic construct
  misc_feature 1..89: note = engineered ribonucleic acid scaffold (ERS) sequence
  source 1..89: mol_type = other DNA
actggcggttctatctgattactctgagagccatcaccagcgactatgtcgtagtgggtaaagctccctcttcggagagtgcatcagag

SEQ ID NO: 3910 - DNA, 88 bp, synthetic construct
  misc_feature 1..88: note = engineered ribonucleic acid scaffold (ERS) sequence
  source 1..88: mol_type = other DNA
acacacggttctatctgattactctgccgtgttcaccagcgactatgtcgtagtgggtaaagctccctcttcggaggaggcatcagag

SEQ ID NO: 3911 - DNA, 88 bp, synthetic construct
  misc_feature 1..88: note = engineered ribonucleic acid scaffold (ERS) sequence
  source 1..88: mol_type = other DNA
acactggtttctatctgattactctgaccagttcaccagcgactatgtcgtagtgggtaaagctccctcttcggaggaggcatcagag

SEQ ID NO: 3912 - DNA, 88 bp, synthetic construct
  misc_feature 1..88: note = engineered ribonucleic acid scaffold (ERS) sequence
  source 1..88: mol_type = other DNA
acaggccgttctatctgattactctgcggccttcaccagcgactatgtcgtagtgggtaaagctccctcttcggaggaggcatcagag

SEQ ID NO: 3913 - DNA, 88 bp, synthetic construct
  misc_feature 1..88: note = engineered ribonucleic acid scaffold (ERS) sequence
  source 1..88: mol_type = other DNA
acaggtccttctatctgattactctgggaccttcaccagcgactatgtcgtagtgggtaaagctccctcttcggaggaggcatcagag

SEQ ID NO: 3914 - DNA, 88 bp, synthetic construct
  misc_feature 1..88: note = engineered ribonucleic acid scaffold (ERS) sequence
  source 1..88: mol_type = other DNA
accagcaattctatctgattactctgttgctgtcaccagcgactatgtcgtagtgggtaaagctccctcttcggaggaggcatcagag

SEQ ID NO: 3915 - DNA, 88 bp, synthetic construct
  misc_feature 1..88: note = engineered ribonucleic acid scaffold (ERS) sequence
  source 1..88: mol_type = other DNA
accgagacttctatctgattactctgggctcgtcaccagcgactatgtcgtagtgggtaaagctccctcttcggaggaggcatcagag

SEQ ID NO: 3916 - DNA, 88 bp, synthetic construct
  misc_feature 1..88: note = engineered ribonucleic acid scaffold (ERS) sequence
  source 1..88: mol_type = other DNA
acctgtagttctatctgattactctgctacagtcaccagcgactatgtcgtagtgggtaaagctccctcttcggaggaggcatcagag

SEQ ID NO: 3917 - DNA, 88 bp, synthetic construct
  misc_feature 1..88: note = engineered ribonucleic acid scaffold (ERS) sequence
  source 1..88: mol_type = other DNA
acgagcacttctatctgattactctggggctctcaccagcgactatgtcgtagtgggtaaagctccctcttcggaggaggcatcagag

SEQ ID NO: 3918 - DNA, 88 bp, synthetic construct
  misc_feature 1..88: note = engineered ribonucleic acid scaffold (ERS) sequence
  source 1..88: mol_type = other DNA
acgaggtgttctatctgattactctgcacctctcaccagcgactatgtcgtagtgggtaaagctccctcttcggaggaggcatcagag

SEQ ID NO: 3919 - DNA, 88 bp, synthetic construct
  misc_feature 1..88: note = engineered ribonucleic acid scaffold (ERS) sequence
  source 1..88: mol_type = other DNA
acgggactttctatctgattactctgagtccctcaccagcgactatgtcgtagtgggtaaagctccctcttcggaggaggcatcagag

SEQ ID NO: 3920 - DNA, 88 bp, synthetic construct
  misc_feature 1..88: note = engineered ribonucleic acid scaffold (ERS) sequence
  source 1..88: mol_type = other DNA
acgggcaattctatctgattactctgttgccctcaccagcgactatgtcgtagtgggtaaagctccctcttcggaggaggcatcagag

SEQ ID NO: 3921 - DNA, 88 bp, synthetic construct
  misc_feature 1..88: note = engineered ribonucleic acid scaffold (ERS) sequence
  source 1..88: mol_type = other DNA
actgtgcgttctatctgattactctgcgcacatcaccagcgactatgtcgtagtgggtaaagctccctcttcggaggaggcatcagag

SEQ ID NO: 3922 - DNA, 89 bp, synthetic construct
  misc_feature 1..89: note = engineered ribonucleic acid scaffold (ERS) sequence
  source 1..89: mol_type = other DNA
actggcgcttctatctgattactctgggcgccatcaccagcgactatgtcgtagtgggtaaagctccctcttcggaggaggcatcagag

SEQ ID NO: 3923 - DNA, 89 bp, synthetic construct
  misc_feature 1..89: note = engineered ribonucleic acid scaffold (ERS) sequence
  source 1..89: mol_type = other DNA
actggcgcttctatctgattactctgggagccatcaccagcgactatgtcgtagtgggtaaagctccctcttcggaggaggcatcagag

SEQ ID NO: 3924 - DNA, 89 bp, synthetic construct
  misc_feature 1..89: note = engineered ribonucleic acid scaffold (ERS) sequence
  source 1..89: mol_type = other DNA
actggcgcttctatctgattactctgtgagccatcaccagcgactatgtcgtagtgggtaaagctccctcttcggaggaggcatcagag

SEQ ID NO: 3925 - DNA, 90 bp, synthetic construct
  misc_feature 1..90: note = engineered ribonucleic acid scaffold (ERS) sequence
  source 1..90: mol_type = other DNA
actggcgcttctatctgattactctgaggagccatcaccagcgactatgtcgtagtgggtaaagctccctcttcggaggaggcatcagag

SEQ ID NO: 3926 - DNA, 89 bp, synthetic construct
  misc_feature 1..89: note = engineered ribonucleic acid scaffold (ERS) sequence
  source 1..89: mol_type = other DNA
actggcgcttctatctgattactctgatagccatcaccagcgactatgtcgtagtgggtaaagctccctcttcggaggaggcatcagag

SEQ ID NO: 3927 - DNA, 90 bp, synthetic construct
  misc_feature 1..90: note = engineered ribonucleic acid scaffold (ERS) sequence
  source 1..90: mol_type = other DNA
actggcgcttctatctgattactctgagctgccatcaccagcgactatgtcgtagtgggtaaagctccctcttcggaggaggcatcagag

SEQ ID NO: 3928 - DNA, 90 bp, synthetic construct
  misc_feature 1..90: note = engineered ribonucleic acid scaffold (ERS) sequence
  source 1..90: mol_type = other DNA
actggcacttctatctgattactctgagtagccatcaccagcgactatgtcgtagtgggtaaagctccctcttcggaggaggcatcagag

SEQ ID NO: 3929 - DNA, 90 bp, synthetic construct
  misc_feature 1..90: note = engineered ribonucleic acid scaffold (ERS) sequence
  source 1..90: mol_type = other DNA
actggcgcttctatctgattactctgagtagccatcaccagcgactatgtcgtagtgggtaaagctccctcttcggaggaggcatcagag

SEQ ID NO: 3930 - DNA, 89 bp, synthetic construct
  misc_feature 1..89: note = engineered ribonucleic acid scaffold (ERS) sequence
  source 1..89: mol_type = other DNA
actggcgcttctatctgattactctgagcaccatcaccagcgactatgtcgtagtgggtaaagctccctcttcggaggaggcatcagag

SEQ ID NO: 3931 - DNA, 89 bp, synthetic construct
  misc_feature 1..89: note = engineered ribonucleic acid scaffold (ERS) sequence
  source 1..89: mol_type = other DNA
actggcacttctatctgattactctgagcgccatcaccagcgactatgtcgtagtgggtaaagctccctcttcggaggaggcatcagag

SEQ ID NO: 3932 - DNA, 89 bp, synthetic construct
  misc_feature 1..89: note = engineered ribonucleic acid scaffold (ERS) sequence
  source 1..89: mol_type = other DNA
actggcgcttctatctgattactctgagggccatcaccagcgactatgtcgtagtgggtaaagctccctcttcggaggaggcatcagag

SEQ ID NO: 3933 - DNA, 89 bp, synthetic construct
  misc_feature 1..89: note = engineered ribonucleic acid scaffold (ERS) sequence
  source 1..89: mol_type = other DNA
actggcgcttctatctgattactctgagtgccgtcaccagcgactatgtcgtagtgggtaaagctccctcttcggaggaggcatcagag

SEQ ID NO: 3934 - DNA, 89 bp, synthetic construct
  misc_feature 1..89: note = engineered ribonucleic acid scaffold (ERS) sequence
  source 1..89: mol_type = other DNA
actggcacttctatctgattactctgagtgccatcaccagcgactatgtcgtagtgggtaaagctccctcttcggaggaggcatcagag

SEQ ID NO: 3935 - DNA, 89 bp, synthetic construct
  misc_feature 1..89: note = engineered ribonucleic acid scaffold (ERS) sequence
  source 1..89: mol_type = other DNA
actggcgcttctatctgattactctgagaaccatcaccagcgactatgtcgtagtgggtaaagctccctcttcggaggaggcatcagag

SEQ ID NO: 3936 - DNA, 89 bp, synthetic construct
  misc_feature 1..89: note = engineered ribonucleic acid scaffold (ERS) sequence
  source 1..89: mol_type = other DNA
actggcgcttctatctgattactctgagagccgtcaccagcgactatgtcgtagtgggtaaagctccctcttcggaggaggcatcagag

SEQ ID NO: 3937 - DNA, 89 bp, synthetic construct
  misc_feature 1..89: note = engineered ribonucleic acid scaffold (ERS) sequence
  source 1..89: mol_type = other DNA
actggcgcttctatctgattactctgagagccttcaccagcgactatgtcgtagtgggtaaagctccctcttcggaggaggcatcagag

SEQ ID NO: 3938 - DNA, 89 bp, synthetic construct
  misc_feature 1..89: note = engineered ribonucleic acid scaffold (ERS) sequence
  source 1..89: mol_type = other DNA
actggggcttctatctgattactctgagacccatcaccagcgactatgtcgtagtgggtaaagctccctcttcggaggaggcatcagag

SEQ ID NO: 3939 - DNA, 89 bp, synthetic construct
  misc_feature 1..89: note = engineered ribonucleic acid scaffold (ERS) sequence
  source 1..89: mol_type = other DNA
actggtgcttctatctgattactctgagagccatcaccagcgactatgtcgtagtgggtaaagctccctcttcggaggaggcatcagag

SEQ ID NO: 3940 - DNA, 89 bp, synthetic construct
  misc_feature 1..89: note = engineered ribonucleic acid scaffold (ERS) sequence
  source 1..89: mol_type = other DNA
actgggccttctatctgattactctgaggcccatcaccagcgactatgtcgtagtgggtaaagctccctcttcggaggaggcatcagag

SEQ ID NO: 3941 - DNA, 90 bp, synthetic construct
  misc_feature 1..90: note = engineered ribonucleic acid scaffold (ERS) sequence
  source 1..90: mol_type = other DNA
actggcccttctatctgattactctgaggagccatcaccagcgactatgtcgtagtgggtaaagctccctcttcggaggaggcatcagag

SEQ ID NO: 3942 - DNA, 89 bp, synthetic construct
  misc_feature 1..89: note = engineered ribonucleic acid scaffold (ERS) sequence
  source 1..89: mol_type = other DNA
actggcccttctatctgattactctgagggccatcaccagcgactatgtcgtagtgggtaaagctccctcttcggaggaggcatcagag

SEQ ID NO: 3943 - DNA, 89 bp, synthetic construct
  misc_feature 1..89: note = engineered ribonucleic acid scaffold (ERS) sequence
  source 1..89: mol_type = other DNA
actggcccttctatctgattactctgagtgccatcaccagcgactatgtcgtagtgggtaaagctccctcttcggaggaggcatcagag

SEQ ID NO: 3944 - DNA, 89 bp, synthetic construct
  misc_feature 1..89: note = engineered ribonucleic acid scaffold (ERS) sequence
  source 1..89: mol_type = other DNA
actggcccttctatctgattactctgagagccatcaccagcgactatgtcgtagtgggtaaagctccctcttcggaggaggcatcagag

SEQ ID NO: 3945 - DNA, 90 bp, synthetic construct
  misc_feature 1..90: note = engineered ribonucleic acid scaffold (ERS) sequence
  source 1..90: mol_type = other DNA
actggcgcttctatctgattactctgagcagccatcaccagcgactatgtcgtagtgggtaaagctccctcttcggaggaggcatcagag

SEQ ID NO: 3946 - DNA, 89 bp, synthetic construct; identical to SEQ ID NO: 718
  misc_feature 1..89: note = engineered ribonucleic acid scaffold (ERS) sequence
  source 1..89: mol_type = other DNA

SEQ ID NO: 3947 - DNA, 89 bp, synthetic construct
  misc_feature 1..89: note = engineered ribonucleic acid scaffold (ERS) sequence
  source 1..89: mol_type = other DNA
actggcgcttctatctgattactctgagtgccatcaccagcgactatgtcgtagtgggtaaagctccctcttcggaggaggcatcagag

SEQ ID NO: 3948 - DNA, 89 bp, synthetic construct
  misc_feature 1..89: note = engineered ribonucleic acid scaffold (ERS) sequence
  source 1..89: mol_type = other DNA
actggcgcttctatctgattactctgagagccatcaccagcgactatgtcgtagtgggtaaagctccctcttcggaggaggcatcagag

SEQ ID NO: 3949 - DNA, 89 bp, synthetic construct
  misc_feature 1..89: note = engineered ribonucleic acid scaffold (ERS) sequence
  source 1..89: mol_type = other DNA
actggctcttctatctgattactctgagcgccatcaccagcgactatgtcgtagtgggtaaagctccctcttcggaggaggcatcagag

SEQ ID NO: 3950 - DNA, 89 bp, synthetic construct
  misc_feature 1..89: note = engineered ribonucleic acid scaffold (ERS) sequence
  source 1..89: mol_type = other DNA
actggctcttctatctgattactctgagggccatcaccagcgactatgtcgtagtgggtaaagctccctcttcggaggaggcatcagag

SEQ ID NO: 3951 - DNA, 89 bp, synthetic construct
  misc_feature 1..89: note = engineered ribonucleic acid scaffold (ERS) sequence
  source 1..89: mol_type = other DNA
actggctcttctatctgattactctgagtgccatcaccagcgactatgtcgtagtgggtaaagctccctcttcggaggaggcatcagag

SEQ ID NO: 3952 - DNA, 89 bp, synthetic construct
  misc_feature 1..89: note = engineered ribonucleic acid scaffold (ERS) sequence
  source 1..89: mol_type = other DNA
actggctcttctatctgattactctgagagccatcaccagcgactatgtcgtagtgggtaaagctccctcttcggaggaggcatcagag

SEQ ID NO: 3953 - DNA, 89 bp, synthetic construct
  misc_feature 1..89: note = engineered ribonucleic acid scaffold (ERS) sequence
  source 1..89: mol_type = other DNA
actggcggttctatctgattactctgagcgccatcaccagcgactatgtcgtagtgggtaaagctccctcttcggaggaggcatcagag

SEQ ID NO: 3954 - DNA, 89 bp, synthetic construct
  misc_feature 1..89: note = engineered ribonucleic acid scaffold (ERS) sequence
  source 1..89: mol_type = other DNA
actggcggttctatctgattactctgagagccatcaccagcgactatgtcgtagtgggtaaagctccctcttcggaggaggcatcagag

SEQ ID NO: 3955 - DNA, 90 bp, synthetic construct
  misc_feature 1..90: note = engineered ribonucleic acid scaffold (ERS) sequence
  source 1..90: mol_type = other DNA
acacacggttctatctgattactctgccgtgttcaccagcgactatgtcgtagtgggtaaagctccctcttcggagggaacgcatcagag

SEQ ID NO: 3956 - DNA, 90 bp, synthetic construct
  misc_feature 1..90: note = engineered ribonucleic acid scaffold (ERS) sequence
  source 1..90: mol_type = other DNA
acactggtttctatctgattactctgaccagttcaccagcgactatgtcgtagtgggtaaagctccctcttcggagggaacgcatcagag

SEQ ID NO: 3957 - DNA, 90 bp, synthetic construct
  misc_feature 1..90: note = engineered ribonucleic acid scaffold (ERS) sequence
  source 1..90: mol_type = other DNA
acaggccgttctatctgattactctgcggccttcaccagcgactatgtcgtagtgggtaaagctccctcttcggagggaacgcatcagag

SEQ ID NO: 3958 - DNA, 90 bp, synthetic construct
  misc_feature 1..90: note = engineered ribonucleic acid scaffold (ERS) sequence
  source 1..90: mol_type = other DNA
acaggtccttctatctgattactctgggaccttcaccagcgactatgtcgtagtgggtaaagctccctcttcggagggaacgcatcagag

SEQ ID NO: 3959 - DNA, 90 bp, synthetic construct
  misc_feature 1..90: note = engineered ribonucleic acid scaffold (ERS) sequence
  source 1..90: mol_type = other DNA
accagcaattctatctgattactctgttgctgtcaccagcgactatgtcgtagtgggtaaagctccctcttcggagggaacgcatcagag

SEQ ID NO: 3960 - DNA, 90 bp, synthetic construct
  misc_feature 1..90: note = engineered ribonucleic acid scaffold (ERS) sequence
  source 1..90: mol_type = other DNA
accgagacttctatctgattactctgggctcgtcaccagcgactatgtcgtagtgggtaaagctccctcttcggagggaacgcatcagag

SEQ ID NO: 3961 - DNA, 90 bp, synthetic construct
  misc_feature 1..90: note = engineered ribonucleic acid scaffold (ERS) sequence
  source 1..90: mol_type = other DNA
acctgtagttctatctgattactctgctacagtcaccagcgactatgtcgtagtgggtaaagctccctcttcggagggaacgcatcagag

SEQ ID NO: 3962 - DNA, 90 bp, synthetic construct
  misc_feature 1..90: note = engineered ribonucleic acid scaffold (ERS) sequence
  source 1..90: mol_type = other DNA
acgagcacttctatctgattactctggggctctcaccagcgactatgtcgtagtgggtaaagctccctcttcggagggaacgcatcagag

SEQ ID NO: 3963 - DNA, 90 bp, synthetic construct
  misc_feature 1..90: note = engineered ribonucleic acid scaffold (ERS) sequence
  source 1..90: mol_type = other DNA
acgaggtgttctatctgattactctgcacctctcaccagcgactatgtcgtagtgggtaaagctccctcttcggagggaacgcatcagag

SEQ ID NO: 3964 - DNA, 90 bp, synthetic construct
  misc_feature 1..90: note = engineered ribonucleic acid scaffold (ERS) sequence
  source 1..90: mol_type = other DNA
acgggactttctatctgattactctgagtccctcaccagcgactatgtcgtagtgggtaaagctccctcttcggagggaacgcatcagag

SEQ ID NO: 3965 - DNA, 90 bp, synthetic construct
  misc_feature 1..90: note = engineered ribonucleic acid scaffold (ERS) sequence
  source 1..90: mol_type = other DNA
acgggcaattctatctgattactctgttgccctcaccagcgactatgtcgtagtgggtaaagctccctcttcggagggaacgcatcagag

SEQ ID NO: 3966 - DNA, 90 bp, synthetic construct
  misc_feature 1..90: note = engineered ribonucleic acid scaffold (ERS) sequence
  source 1..90: mol_type = other DNA
actgtgcgttctatctgattactctgcgcacatcaccagcgactatgtcgtagtgggtaaagctccctcttcggagggaacgcatcagag

SEQ ID NO: 3967 - DNA, 91 bp, synthetic construct
  misc_feature 1..91: note = engineered ribonucleic acid scaffold (ERS) sequence
  source 1..91: mol_type = other DNA
actggcgcttctatctgattactctgggcgccatcaccagcgactatgtcgtagtgggtaaagctccctcttcggagggaacgcatcagag

SEQ ID NO: 3968 - DNA, 91 bp, synthetic construct
  misc_feature 1..91: note = engineered ribonucleic acid scaffold (ERS) sequence
  source 1..91: mol_type = other DNA
actggcgcttctatctgattactctgggagccatcaccagcgactatgtcgtagtgggtaaagctccctcttcggagggaacgcatcagag

SEQ ID NO: 3969 - DNA, 91 bp, synthetic construct
  misc_feature 1..91: note = engineered ribonucleic acid scaffold (ERS) sequence
  source 1..91: mol_type = other DNA
actggcgcttctatctgattactctgtgagccatcaccagcgactatgtcgtagtgggtaaagctccctcttcggagggaacgcatcagag

SEQ ID NO: 3970 - DNA, 92 bp, synthetic construct
  misc_feature 1..92: note = engineered ribonucleic acid scaffold (ERS) sequence
  source 1..92: mol_type = other DNA
actggcgcttctatctgattactctgaggagccatcaccagcgactatgtcgtagtgggtaaagctccctcttcggagggaacgcatcagag

SEQ ID NO: 3971 - DNA, 91 bp, synthetic construct
  misc_feature 1..91: note = engineered ribonucleic acid scaffold (ERS) sequence
  source 1..91: mol_type = other DNA
actggcgcttctatctgattactctgatagccatcaccagcgactatgtcgtagtgggtaaagctccctcttcggagggaacgcatcagag

SEQ ID NO: 3972 - DNA, 92 bp, synthetic construct
  misc_feature 1..92: note = engineered ribonucleic acid scaffold (ERS) sequence
  source 1..92: mol_type = other DNA
actggcgcttctatctgattactctgagctgccatcaccagcgactatgtcgtagtgggtaaagctccctcttcggagggaacgcatcagag

SEQ ID NO: 3973 - DNA, 92 bp, synthetic construct
  misc_feature 1..92: note = engineered ribonucleic acid scaffold (ERS) sequence
  source 1..92: mol_type = other DNA
actggcacttctatctgattactctgagtagccatcaccagcgactatgtcgtagtgggtaaagctccctcttcggagggaacgcatcagag

SEQ ID NO: 3974 - DNA, 92 bp, synthetic construct
  misc_feature 1..92: note = engineered ribonucleic acid scaffold (ERS) sequence
  source 1..92: mol_type = other DNA
actggcgcttctatctgattactctgagtagccatcaccagcgactatgtcgtagtgggtaaagctccctcttcggagggaacgcatcagag

SEQ ID NO: 3975 - DNA, 91 bp, synthetic construct
  misc_feature 1..91: note = engineered ribonucleic acid scaffold (ERS) sequence
  source 1..91: mol_type = other DNA
actggcgcttctatctgattactctgagcaccatcaccagcgactatgtcgtagtgggtaaagctccctcttcggagggaacgcatcagag

SEQ ID NO: 3976 - DNA, 91 bp, synthetic construct
  misc_feature 1..91: note = engineered ribonucleic acid scaffold (ERS) sequence
  source 1..91: mol_type = other DNA
actggcacttctatctgattactctgagcgccatcaccagcgactatgtcgtagtgggtaaagctccctcttcggagggaacgcatcagag

SEQ ID NO: 3977 - DNA, 91 bp, synthetic construct
  misc_feature 1..91: note = engineered ribonucleic acid scaffold (ERS) sequence
  source 1..91: mol_type = other DNA
actggcgcttctatctgattactctgagggccatcaccagcgactatgtcgtagtgggtaaagctccctcttcggagggaacgcatcagag

SEQ ID NO: 3978 - DNA, 91 bp, synthetic construct
  misc_feature 1..91: note = engineered ribonucleic acid scaffold (ERS) sequence
  source 1..91: mol_type = other DNA
actggcgcttctatctgattactctgagtgccgtcaccagcgactatgtcgtagtgggtaaagctccctcttcggagggaacgcatcagag

SEQ ID NO: 3979 - DNA, 91 bp, synthetic construct
  misc_feature 1..91: note = engineered ribonucleic acid scaffold (ERS) sequence
  source 1..91: mol_type = other DNA
actggcacttctatctgattactctgagtgccatcaccagcgactatgtcgtagtgggtaaagctccctcttcggagggaacgcatcagag

SEQ ID NO: 3980 - DNA, 91 bp, synthetic construct
  misc_feature 1..91: note = engineered ribonucleic acid scaffold (ERS) sequence
  source 1..91: mol_type = other DNA
actggcgcttctatctgattactctgagaaccatcaccagcgactatgtcgtagtgggtaaagctccctcttcggagggaacgcatcagag

SEQ ID NO: 3981 - DNA, 91 bp, synthetic construct
  misc_feature 1..91: note = engineered ribonucleic acid scaffold (ERS) sequence
  source 1..91: mol_type = other DNA
actggcgcttctatctgattactctgagagccgtcaccagcgactatgtcgtagtgggtaaagctccctcttcggagggaacgcatcagag

SEQ ID NO: 3982 - DNA, 91 bp, synthetic construct
  misc_feature 1..91: note = engineered ribonucleic acid scaffold (ERS) sequence
  source 1..91: mol_type = other DNA
actggcgcttctatctgattactctgagagccttcaccagcgactatgtcgtagtgggtaaagctccctcttcggagggaacgcatcagag

SEQ ID NO: 3983 - DNA, 91 bp, synthetic construct
  misc_feature 1..91: note = engineered ribonucleic acid scaffold (ERS) sequence
  source 1..91: mol_type = other DNA
actggggcttctatctgattactctgagacccatcaccagcgactatgtcgtagtgggtaaagctccctcttcggagggaacgcatcagag

SEQ ID NO: 3984 - DNA, 91 bp, synthetic construct
  misc_feature 1..91: note = engineered ribonucleic acid scaffold (ERS) sequence
  source 1..91: mol_type = other DNA
actggtgcttctatctgattactctgagagccatcaccagcgactatgtcgtagtgggtaaagctccctcttcggagggaacgcatcagag

SEQ ID NO: 3985 - DNA, 91 bp, synthetic construct
  misc_feature 1..91: note = engineered ribonucleic acid scaffold (ERS) sequence
  source 1..91: mol_type = other DNA
actgggccttctatctgattactctgaggcccatcaccagcgactatgtcgtagtgggtaaagctccctcttcggagggaacgcatcagag

SEQ ID NO: 3986 - DNA, 92 bp, synthetic construct
  misc_feature 1..92: note = engineered ribonucleic acid scaffold (ERS) sequence
  source 1..92: mol_type = other DNA
actggcccttctatctgattactctgaggagccatcaccagcgactatgtcgtagtgggtaaagctccctcttcggagggaacgcatcagag

SEQ ID NO: 3987 - DNA, 91 bp, synthetic construct
  misc_feature 1..91: note = engineered ribonucleic acid scaffold (ERS) sequence
  source 1..91: mol_type = other DNA
actggcccttctatctgattactctgagggccatcaccagcgactatgtcgtagtgggtaaagctccctcttcggagggaacgcatcagag

SEQ ID NO: 3988 - DNA, 91 bp, synthetic construct
  misc_feature 1..91: note = engineered ribonucleic acid scaffold (ERS) sequence
  source 1..91: mol_type = other DNA
actggcccttctatctgattactctgagtgccatcaccagcgactatgtcgtagtgggtaaagctccctcttcggagggaacgcatcagag

SEQ ID NO: 3989 - DNA, 91 bp, synthetic construct
  misc_feature 1..91: note = engineered ribonucleic acid scaffold (ERS) sequence
  source 1..91: mol_type = other DNA
actggcccttctatctgattactctgagagccatcaccagcgactatgtcgtagtgggtaaagctccctcttcggagggaacgcatcagag

SEQ ID NO: 3990 - DNA, 92 bp, synthetic construct
  misc_feature 1..92: note = engineered ribonucleic acid scaffold (ERS) sequence
  source 1..92: mol_type = other DNA
actggcgcttctatctgattactctgagcagccatcaccagcgactatgtcgtagtgggtaaagctccctcttcggagggaacgcatcagag

SEQ ID NO: 3991 - DNA, 91 bp, synthetic construct; identical to SEQ ID NO: 721
  misc_feature 1..91: note = engineered ribonucleic acid scaffold (ERS) sequence
  source 1..91: mol_type = other DNA

SEQ ID NO: 3992 - DNA, 91 bp, synthetic construct
  misc_feature 1..91: note = engineered ribonucleic acid scaffold (ERS) sequence
  source 1..91: mol_type = other DNA
actggcgcttctatctgattactctgagtgccatcaccagcgactatgtcgtagtgggtaaagctccctcttcggagggaacgcatcagag

SEQ ID NO: 3993 - DNA, 91 bp, synthetic construct
  misc_feature 1..91: note = engineered ribonucleic acid scaffold (ERS) sequence
  source 1..91: mol_type = other DNA
actggcgcttctatctgattactctgagagccatcaccagcgactatgtcgtagtgggtaaagctccctcttcggagggaacgcatcagag

SEQ ID NO: 3994 - DNA, 91 bp, synthetic construct
  misc_feature 1..91: note = engineered ribonucleic acid scaffold (ERS) sequence
  source 1..91: mol_type = other DNA
actggctcttctatctgattactctgagcgccatcaccagcgactatgtcgtagtgggtaaagctccctcttcggagggaacgcatcagag

SEQ ID NO: 3995 - DNA, 91 bp, synthetic construct
  misc_feature 1..91: note = engineered ribonucleic acid scaffold (ERS) sequence
  source 1..91: mol_type = other DNA
actggctcttctatctgattactctgagggccatcaccagcgactatgtcgtagtgggtaaagctccctcttcggagggaacgcatcagag

SEQ ID NO: 3996 - DNA, 91 bp, synthetic construct
  misc_feature 1..91: note = engineered ribonucleic acid scaffold (ERS) sequence
  source 1..91: mol_type = other DNA
actggctcttctatctgattactctgagtgccatcaccagcgactatgtcgtagtgggtaaagctccctcttcggagggaacgcatcagag

SEQ ID NO: 3997 - DNA, 91 bp, synthetic construct
  misc_feature 1..91: note = engineered ribonucleic acid scaffold (ERS) sequence
  source 1..91: mol_type = other DNA
actggctcttctatctgattactctgagagccatcaccagcgactatgtcgtagtgggtaaagctccctcttcggagggaacgcatcagag

SEQ ID NO: 3998 - DNA, 91 bp, synthetic construct
  misc_feature 1..91: note = engineered ribonucleic acid scaffold (ERS) sequence
  source 1..91: mol_type = other DNA
actggcggttctatctgattactctgagcgccatcaccagcgactatgtcgtagtgggtaaagctccctcttcggagggaacgcatcagag

SEQ ID NO: 3999 - DNA, 91 bp, synthetic construct
  misc_feature 1..91: note = engineered ribonucleic acid scaffold (ERS) sequence
  source 1..91: mol_type = other DNA
actggcggttctatctgattactctgagagccatcaccagcgactatgtcgtagtgggtaaagctccctcttcggagggaacgcatcagag

SEQ ID NO: 4000 - DNA, 89 bp, synthetic construct; identical to SEQ ID NO: 658
  misc_feature 1..89: note = engineered ribonucleic acid scaffold (ERS) sequence
  source 1..89: mol_type = other DNA

SEQ ID NO: 4001 - DNA, 89 bp, synthetic construct; identical to SEQ ID NO: 651
  misc_feature 1..89: note = engineered ribonucleic acid scaffold (ERS) sequence
  source 1..89: mol_type = other DNA

SEQ ID NO: 4002 - DNA, 89 bp, synthetic construct; identical to SEQ ID NO: 629
  misc_feature 1..89: note = engineered ribonucleic acid scaffold (ERS) sequence
  source 1..89: mol_type = other DNA

SEQ ID NO: 4003 - DNA, 90 bp, synthetic construct; identical to SEQ ID NO: 652
  misc_feature 1..90: note = engineered ribonucleic acid scaffold (ERS) sequence
  source 1..90: mol_type = other DNA

SEQ ID NO: 4004 - DNA, 89 bp, synthetic construct; identical to SEQ ID NO: 653
  misc_feature 1..89: note = engineered ribonucleic acid scaffold (ERS) sequence
  source 1..89: mol_type = other DNA

SEQ ID NO: 4005 - DNA, 90 bp, synthetic construct; identical to SEQ ID NO: 637
  misc_feature 1..90: note = engineered ribonucleic acid scaffold (ERS) sequence
  source 1..90: mol_type = other DNA

SEQ ID NO: 4006 - DNA, 90 bp, synthetic construct; identical to SEQ ID NO: 641
  misc_feature 1..90: note = engineered ribonucleic acid scaffold (ERS) sequence
  source 1..90: mol_type = other DNA

SEQ ID NO: 4007 - DNA, 90 bp, synthetic construct; identical to SEQ ID NO: 628
  misc_feature 1..90: note = engineered ribonucleic acid scaffold (ERS) sequence
  source 1..90: mol_type = other DNA

SEQ ID NO: 4008 - DNA, 89 bp, synthetic construct; identical to SEQ ID NO: 638
  misc_feature 1..89: note = engineered ribonucleic acid scaffold (ERS) sequence
  source 1..89: mol_type = other DNA

SEQ ID NO: 4009 - DNA, 89 bp, synthetic construct; identical to SEQ ID NO: 640
  misc_feature 1..89: note = engineered ribonucleic acid scaffold (ERS) sequence
  source 1..89: mol_type = other DNA

SEQ ID NO: 4010 - DNA, 89 bp, synthetic construct; identical to SEQ ID NO: 630
  misc_feature 1..89: note = engineered ribonucleic acid scaffold (ERS) sequence
  source 1..89: mol_type = other DNA

SEQ ID NO: 4011 - DNA, 89 bp, synthetic construct; identical to SEQ ID NO: 639
  misc_feature 1..89: note = engineered ribonucleic acid scaffold (ERS) sequence
  source 1..89: mol_type = other DNA

SEQ ID NO: 4012 - DNA, 89 bp, synthetic construct; identical to SEQ ID NO: 642
  misc_feature 1..89: note = engineered ribonucleic acid scaffold (ERS) sequence
  source 1..89: mol_type = other DNA

SEQ ID NO: 4013 - DNA, 89 bp, synthetic construct; identical to SEQ ID NO: 656
  misc_feature 1..89: note = engineered ribonucleic acid scaffold (ERS) sequence
  source 1..89: mol_type = other DNA

SEQ ID NO: 4014 - DNA, 89 bp, synthetic construct; identical to SEQ ID NO: 657
  misc_feature 1..89: note = engineered ribonucleic acid scaffold (ERS) sequence
  source 1..89: mol_type = other DNA

SEQ ID NO: 4015 - DNA, 89 bp, synthetic construct; identical to SEQ ID NO: 631
  misc_feature 1..89: note = engineered ribonucleic acid scaffold (ERS) sequence
  source 1..89: mol_type = other DNA

SEQ ID NO: 4016 - DNA, 89 bp, synthetic construct; identical to SEQ ID NO: 632
  misc_feature 1..89: note = engineered ribonucleic acid scaffold (ERS) sequence
  source 1..89: mol_type = other DNA

SEQ ID NO: 4017 - DNA, 89 bp, synthetic construct; identical to SEQ ID NO: 649
  misc_feature 1..89: note = engineered ribonucleic acid scaffold (ERS) sequence
  source 1..89: mol_type = other DNA

SEQ ID NO: 4018 - DNA, 89 bp, synthetic construct; identical to SEQ ID NO: 538
  misc_feature 1..89: note = engineered ribonucleic acid scaffold (ERS) sequence
  source 1..89: mol_type = other DNA

SEQ ID NO: 4019 - DNA, 90 bp, synthetic construct; identical to SEQ ID NO: 643
  misc_feature 1..90: note = engineered ribonucleic acid scaffold (ERS) sequence
  source 1..90: mol_type = other DNA

SEQ ID NO: 4020 - DNA, 89 bp, synthetic construct; identical to SEQ ID NO: 634
  misc_feature 1..89: note = engineered ribonucleic acid scaffold (ERS) sequence
  source 1..89: mol_type = other DNA

SEQ ID NO: 4021 - DNA, 89 bp, synthetic construct; identical to SEQ ID NO: 635
  misc_feature 1..89: note = engineered ribonucleic acid scaffold (ERS) sequence
  source 1..89: mol_type = other DNA

SEQ ID NO: 4022 - DNA, 89 bp, synthetic construct; identical to SEQ ID NO: 648
  misc_feature 1..89: note = engineered ribonucleic acid scaffold (ERS) sequence
  source 1..89: mol_type = other DNA

SEQ ID NO: 4023 - DNA, 90 bp, synthetic construct; identical to SEQ ID NO: 627
  misc_feature 1..90: note = engineered ribonucleic acid scaffold (ERS) sequence
  source 1..90: mol_type = other DNA

SEQ ID NO: 4024 - DNA, 89 bp, synthetic construct; identical to SEQ ID NO: 625
  misc_feature 1..89: note = engineered ribonucleic acid scaffold (ERS) sequence
  source 1..89: mol_type = other DNA

SEQ ID NO: 4025 - DNA, 89 bp, synthetic construct; identical to SEQ ID NO: 626
  misc_feature 1..89: note = engineered ribonucleic acid scaffold (ERS) sequence
  source 1..89: mol_type = other DNA

SEQ ID NO: 4026 - DNA, 89 bp, synthetic construct; identical to SEQ ID NO: 624
  misc_feature 1..89: note = engineered ribonucleic acid scaffold (ERS) sequence
  source 1..89: mol_type = other DNA

SEQ ID NO: 4027 - DNA, 89 bp, synthetic construct; identical to SEQ ID NO: 633
  misc_feature 1..89: note = engineered ribonucleic acid scaffold (ERS) sequence
  source 1..89: mol_type = other DNA

SEQ ID NO: 4028 - DNA, 89 bp, synthetic construct; identical to SEQ ID NO: 636
  misc_feature 1..89: note = engineered ribonucleic acid scaffold (ERS) sequence
  source 1..89: mol_type = other DNA

SEQ ID NO: 4029 - DNA, 89 bp, synthetic construct; identical to SEQ ID NO: 644
  misc_feature 1..89: note = engineered ribonucleic acid scaffold (ERS) sequence
  source 1..89: mol_type = other DNA

SEQ ID NO: 4030 - DNA, 89 bp, synthetic construct; identical to SEQ ID NO: 623
  misc_feature 1..89: note = engineered ribonucleic acid scaffold (ERS) sequence
  source 1..89: mol_type = other DNA

SEQ ID NO: 4031 - DNA, 89 bp, synthetic construct; identical to SEQ ID NO: 646
  misc_feature 1..89: note = engineered ribonucleic acid scaffold (ERS) sequence
  source 1..89: mol_type = other DNA

SEQ ID NO: 4032 - DNA, 89 bp, synthetic construct; identical to SEQ ID NO: 650
  misc_feature 1..89: note = engineered ribonucleic acid scaffold (ERS) sequence
  source 1..89: mol_type = other DNA

SEQ ID NO: 4033 - DNA, 88 bp, synthetic construct
  misc_feature 1..88: note = engineered ribonucleic acid scaffold (ERS) sequence
  source 1..88: mol_type = other DNA
acacacggttctatctgattactctgccgtgttcaccagcgactatgtcgtagtgggtaaagctccctggaaacagggagcatcagag

SEQ ID NO: 4034 - DNA, 88 bp, synthetic construct
  misc_feature 1..88: note = engineered ribonucleic acid scaffold (ERS) sequence
  source 1..88: mol_type = other DNA
acactggtttctatctgattactctgaccagttcaccagcgactatgtcgtagtgggtaaagctccctggaaacagggagcatcagag

SEQ ID NO: 4035 - DNA, 88 bp, synthetic construct
  misc_feature 1..88: note = engineered ribonucleic acid scaffold (ERS) sequence
  source 1..88: mol_type = other DNA
acaggccgttctatctgattactctgcggccttcaccagcgactatgtcgtagtgggtaaagctccctggaaacagggagcatcagag

SEQ ID NO: 4036 - DNA, 88 bp, synthetic construct
  misc_feature 1..88: note = engineered ribonucleic acid scaffold (ERS) sequence
  source 1..88: mol_type = other DNA
acaggtccttctatctgattactctgggaccttcaccagcgactatgtcgtagtgggtaaagctccctggaaacagggagcatcagag

SEQ ID NO: 4037 - DNA, 88 bp, synthetic construct
  misc_feature 1..88: note = engineered ribonucleic acid scaffold (ERS) sequence
  source 1..88: mol_type = other DNA
accagcaattctatctgattactctgttgctgtcaccagcgactatgtcgtagtgggtaaagctccctggaaacagggagcatcagag

SEQ ID NO: 4038 - DNA, 88 bp, synthetic construct
  misc_feature 1..88: note = engineered ribonucleic acid scaffold (ERS) sequence
  source 1..88: mol_type = other DNA
accgagacttctatctgattactctgggctcgtcaccagcgactatgtcgtagtgggtaaagctccctggaaacagggagcatcagag

SEQ ID NO: 4039 - DNA, 88 bp, synthetic construct
  misc_feature 1..88: note = engineered ribonucleic acid scaffold (ERS) sequence
  source 1..88: mol_type = other DNA
acctgtagttctatctgattactctgctacagtcaccagcgactatgtcgtagtgggtaaagctccctggaaacagggagcatcagag

SEQ ID NO: 4040 - DNA, 88 bp, synthetic construct
  misc_feature 1..88: note = engineered ribonucleic acid scaffold (ERS) sequence
  source 1..88: mol_type = other DNA
acgagcacttctatctgattactctggggctctcaccagcgactatgtcgtagtgggtaaagctccctggaaacagggagcatcagag

SEQ ID NO: 4041 - DNA, 88 bp, synthetic construct
  misc_feature 1..88: note = engineered ribonucleic acid scaffold (ERS) sequence
  source 1..88: mol_type = other DNA
acgaggtgttctatctgattactctgcacctctcaccagcgactatgtcgtagtgggtaaagctccctggaaacagggagcatcagag

SEQ ID NO: 4042 - DNA, 88 bp, synthetic construct
  misc_feature 1..88: note = engineered ribonucleic acid scaffold (ERS) sequence
  source 1..88: mol_type = other DNA
acgggactttctatctgattactctgagtccctcaccagcgactatgtcgtagtgggtaaagctccctggaaacagggagcatcagag

SEQ ID NO: 4043 - DNA, 88 bp, synthetic construct
  misc_feature 1..88: note = engineered ribonucleic acid scaffold (ERS) sequence
  source 1..88: mol_type = other DNA
acgggcaattctatctgattactctgttgccctcaccagcgactatgtcgtagtgggtaaagctccctggaaacagggagcatcagag

SEQ ID NO: 4044 - DNA, 88 bp, synthetic construct
  misc_feature 1..88: note = engineered ribonucleic acid scaffold (ERS) sequence
  source 1..88: mol_type = other DNA
actgtgcgttctatctgattactctgcgcacatcaccagcgactatgtcgtagtgggtaaagctccctggaaacagggagcatcagag

SEQ ID NO: 4045 - DNA, 89 bp, synthetic construct
  misc_feature 1..89: note = engineered ribonucleic acid scaffold (ERS) sequence
  source 1..89: mol_type = other DNA
actggcgcttctatctgattactctgggcgccatcaccagcgactatgtcgtagtgggtaaagctccctggaaacagggagcatcagag

SEQ ID NO: 4046 - DNA, 89 bp, synthetic construct
  misc_feature 1..89: note = engineered ribonucleic acid scaffold (ERS) sequence
  source 1..89: mol_type = other DNA
actggcgcttctatctgattactctgggagccatcaccagcgactatgtcgtagtgggtaaagctccctggaaacagggagcatcagag

SEQ ID NO: 4047 - DNA, 89 bp, synthetic construct
  misc_feature 1..89: note = engineered ribonucleic acid scaffold (ERS) sequence
  source 1..89: mol_type = other DNA
actggcgcttctatctgattactctgtgagccatcaccagcgactatgtcgtagtgggtaaagctccctggaaacagggagcatcagag

SEQ ID NO: 4048 - DNA, 90 bp, synthetic construct
  misc_feature 1..90: note = engineered ribonucleic acid scaffold (ERS) sequence
  source 1..90: mol_type = other DNA
actggcgcttctatctgattactctgaggagccatcaccagcgactatgtcgtagtgggtaaagctccctggaaacagggagcatcagag

SEQ ID NO: 4049 - DNA, 89 bp, synthetic construct
  misc_feature 1..89: note = engineered ribonucleic acid scaffold (ERS) sequence
  source 1..89: mol_type = other DNA
actggcgcttctatctgattactctgatagccatcaccagcgactatgtcgtagtgggtaaagctccctggaaacagggagcatcagag

SEQ ID NO: 4050 - DNA, 90 bp, synthetic construct
  misc_feature 1..90: note = engineered ribonucleic acid scaffold (ERS) sequence
  source 1..90: mol_type = other DNA
actggcgcttctatctgattactctgagctgccatcaccagcgactatgtcgtagtgggtaaagctccctggaaacagggagcatcagag

SEQ ID NO: 4051 - DNA, 90 bp, synthetic construct
  misc_feature 1..90: note = engineered ribonucleic acid scaffold (ERS) sequence
  source 1..90: mol_type = other DNA
actggcacttctatctgattactctgagtagccatcaccagcgactatgtcgtagtgggtaaagctccctggaaacagggagcatcagag

SEQ ID NO: 4052 - DNA, 90 bp, synthetic construct
  misc_feature 1..90: note = engineered ribonucleic acid scaffold (ERS) sequence
  source 1..90: mol_type = other DNA
actggcgcttctatctgattactctgagtagccatcaccagcgactatgtcgtagtgggtaaagctccctggaaacagggagcatcagag

SEQ ID NO: 4053 - DNA, 89 bp, synthetic construct
  misc_feature 1..89: note = engineered ribonucleic acid scaffold (ERS) sequence
  source 1..89: mol_type = other DNA
actggcgcttctatctgattactctgagcaccatcaccagcgactatgtcgtagtgggtaaagctccctggaaacagggagcatcagag

SEQ ID NO: 4054 - DNA, 89 bp, synthetic construct
  misc_feature 1..89: note = engineered ribonucleic acid scaffold (ERS) sequence
  source 1..89: mol_type = other DNA
actggcacttctatctgattactctgagcgccatcaccagcgactatgtcgtagtgggtaaagctccctggaaacagggagcatcagag

SEQ ID NO: 4055 - DNA, 89 bp, synthetic construct
  misc_feature 1..89: note = engineered ribonucleic acid scaffold (ERS) sequence
  source 1..89: mol_type = other DNA
actggcgcttctatctgattactctgagggccatcaccagcgactatgtcgtagtgggtaaagctccctggaaacagggagcatcagag

SEQ ID NO: 4056 - DNA, 89 bp, synthetic construct
  misc_feature 1..89: note = engineered ribonucleic acid scaffold (ERS) sequence
  source 1..89: mol_type = other DNA
actggcgcttctatctgattactctgagtgccgtcaccagcgactatgtcgtagtgggtaaagctccctggaaacagggagcatcagag

SEQ ID NO: 4057 - DNA, 89 bp, synthetic construct
  misc_feature 1..89: note = engineered ribonucleic acid scaffold (ERS) sequence
  source 1..89: mol_type = other DNA
actggcacttctatctgattactctgagtgccatcaccagcgactatgtcgtagtgggtaaagctccctggaaacagggagcatcagag

SEQ ID NO: 4058 - DNA, 89 bp, synthetic construct
  misc_feature 1..89: note = engineered ribonucleic acid scaffold (ERS) sequence
  source 1..89: mol_type = other DNA
actggcgcttctatctgattactctgagaaccatcaccagcgactatgtcgtagtgggtaaagctccctggaaacagggagcatcagag

SEQ ID NO: 4059 - DNA, 89 bp, synthetic construct
  misc_feature 1..89: note = engineered ribonucleic acid scaffold (ERS) sequence
  source 1..89: mol_type = other DNA
actggcgcttctatctgattactctgagagccgtcaccagcgactatgtcgtagtgggtaaagctccctggaaacagggagcatcagag

SEQ ID NO: 4060 - DNA, 89 bp, synthetic construct
  misc_feature 1..89: note = engineered ribonucleic acid scaffold (ERS) sequence
  source 1..89: mol_type = other DNA
actggcgcttctatctgattactctgagagccttcaccagcgactatgtcgtagtgggtaaagctccctggaaacagggagcatcagag

SEQ ID NO: 4061 - DNA, 89 bp, synthetic construct
  misc_feature 1..89: note = engineered ribonucleic acid scaffold (ERS) sequence
  source 1..89: mol_type = other DNA
actggggcttctatctgattactctgagacccatcaccagcgactatgtcgtagtgggtaaagctccctggaaacagggagcatcagag

SEQ ID NO: 4062 - DNA, 89 bp, synthetic construct
  misc_feature 1..89: note = engineered ribonucleic acid scaffold (ERS) sequence
  source 1..89: mol_type = other DNA
actggtgcttctatctgattactctgagagccatcaccagcgactatgtcgtagtgggtaaagctccctggaaacagggagcatcagag

SEQ ID NO: 4063 - DNA, 89 bp, synthetic construct; identical to SEQ ID NO: 544
  misc_feature 1..89: note = engineered ribonucleic acid scaffold (ERS) sequence
  source 1..89: mol_type = other DNA

SEQ ID NO: 4064 - DNA, 90 bp, synthetic construct
  misc_feature 1..90: note = engineered ribonucleic acid scaffold (ERS) sequence
  source 1..90: mol_type = other DNA
actggcccttctatctgattactctgaggagccatcaccagcgactatgtcgtagtgggtaaagctccctggaaacagggagcatcagag

SEQ ID NO: 4065 - DNA, 89 bp, synthetic construct
  misc_feature 1..89: note = engineered ribonucleic acid scaffold (ERS) sequence
  source 1..89: mol_type = other DNA
actggcccttctatctgattactctgagggccatcaccagcgactatgtcgtagtgggtaaagctccctggaaacagggagcatcagag

SEQ ID NO: 4066 - DNA, 89 bp, synthetic construct
  misc_feature 1..89: note = engineered ribonucleic acid scaffold (ERS) sequence
  source 1..89: mol_type = other DNA
actggcccttctatctgattactctgagtgccatcaccagcgactatgtcgtagtgggtaaagctccctggaaacagggagcatcagag

SEQ ID NO: 4067 - DNA, 89 bp, synthetic construct
  misc_feature 1..89: note = engineered ribonucleic acid scaffold (ERS) sequence
  source 1..89: mol_type = other DNA
actggcccttctatctgattactctgagagccatcaccagcgactatgtcgtagtgggtaaagctccctggaaacagggagcatcagag

SEQ ID NO: 4068 - DNA, 90 bp, synthetic construct
  misc_feature 1..90: note = engineered ribonucleic acid scaffold (ERS) sequence
  source 1..90: mol_type = other DNA
actggcgcttctatctgattactctgagcagccatcaccagcgactatgtcgtagtgggtaaagctccctggaaacagggagcatcagag

SEQ ID NO: 4069 - DNA, 89 bp, synthetic construct; identical to SEQ ID NO: 738
  misc_feature 1..89: note = engineered ribonucleic acid scaffold (ERS) sequence
  source 1..89: mol_type = other DNA

SEQ ID NO: 4070 - DNA, 89 bp, synthetic construct
  misc_feature 1..89: note = engineered ribonucleic acid scaffold (ERS) sequence
  source 1..89: mol_type = other DNA
actggcgcttctatctgattactctgagtgccatcaccagcgactatgtcgtagtgggtaaagctccctggaaacagggagcatcagag

SEQ ID NO: 4071 - DNA, 89 bp, synthetic construct
  misc_feature 1..89: note = engineered ribonucleic acid scaffold (ERS) sequence
  source 1..89: mol_type = other DNA
actggcgcttctatctgattactctgagagccatcaccagcgactatgtcgtagtgggtaaagctccctggaaacagggagcatcagag

SEQ ID NO: 4072 - DNA, 89 bp, synthetic construct
  misc_feature 1..89: note = engineered ribonucleic acid scaffold (ERS) sequence
  source 1..89: mol_type = other DNA
actggctcttctatctgattactctgagcgccatcaccagcgactatgtcgtagtgggtaaagctccctggaaacagggagcatcagag

SEQ ID NO: 4073 - DNA, 89 bp, synthetic construct
  misc_feature 1..89: note = engineered ribonucleic acid scaffold (ERS) sequence
  source 1..89: mol_type = other DNA
actggctcttctatctgattactctgagggccatcaccagcgactatgtcgtagtgggtaaagctccctggaaacagggagcatcagag

SEQ ID NO: 4074 - DNA, 89 bp, synthetic construct
  misc_feature 1..89: note = engineered ribonucleic acid scaffold (ERS) sequence
  source 1..89: mol_type = other DNA
actggctcttctatctgattactctgagtgccatcaccagcgactatgtcgtagtgggtaaagctccctggaaacagggagcatcagag

SEQ ID NO: 4075 - DNA, 89 bp, synthetic construct
  misc_feature 1..89: note = engineered ribonucleic acid scaffold (ERS) sequence
  source 1..89: mol_type = other DNA
actggctcttctatctgattactctgagagccatcaccagcgactatgtcgtagtgggtaaagctccctggaaacagggagcatcagag

SEQ ID NO: 4076 - DNA, 89 bp, synthetic construct
  misc_feature 1..89: note = engineered ribonucleic acid scaffold (ERS) sequence
  source 1..89: mol_type = other DNA
actggcggttctatctgattactctgagcgccatcaccagcgactatgtcgtagtgggtaaagctccctggaaacagggagcatcagag

SEQ ID NO: 4077 - DNA, 89 bp, synthetic construct
  misc_feature 1..89: note = engineered ribonucleic acid scaffold (ERS) sequence
  source 1..89: mol_type = other DNA
actggcggttctatctgattactctgagagccatcaccagcgactatgtcgtagtgggtaaagctccctggaaacagggagcatcagag

SEQ ID NO: 4078 - DNA, 84 bp, synthetic construct
  misc_feature 1..84: note = engineered ribonucleic acid scaffold (ERS) sequence
  source 1..84: mol_type = other DNA
acacacggttctatctgattactctgccgtgttcaccagcgactatgtcgtagtgggtaaagctcccttcggggagcatcagag

SEQ ID NO: 4079 - DNA, 84 bp, synthetic construct
  misc_feature 1..84: note = engineered ribonucleic acid scaffold (ERS) sequence
  source 1..84: mol_type = other DNA
acactggtttctatctgattactctgaccagttcaccagcgactatgtcgtagtgggtaaagctcccttcggggagcatcagag

SEQ ID NO: 4080 - DNA, 84 bp, synthetic construct
  misc_feature 1..84: note = engineered ribonucleic acid scaffold (ERS) sequence
  source 1..84: mol_type = other DNA
acaggccgttctatctgattactctgcggccttcaccagcgactatgtcgtagtgggtaaagctcccttcggggagcatcagag

SEQ ID NO: 4081 - DNA, 84 bp, synthetic construct
  misc_feature 1..84: note = engineered ribonucleic acid scaffold (ERS) sequence
  source 1..84: mol_type = other DNA
acaggtccttctatctgattactctgggaccttcaccagcgactatgtcgtagtgggtaaagctcccttcggggagcatcagag

SEQ ID NO: 4082 - DNA, 84 bp, synthetic construct
  misc_feature 1..84: note = engineered ribonucleic acid scaffold (ERS) sequence
  source 1..84: mol_type = other DNA
accagcaattctatctgattactctgttgctgtcaccagcgactatgtcgtagtgggtaaagctcccttcggggagcatcagag

SEQ ID NO: 4083 - DNA, 84 bp, synthetic construct
  misc_feature 1..84: note = engineered ribonucleic acid scaffold (ERS) sequence
  source 1..84: mol_type = other DNA
accgagacttctatctgattactctgggctcgtcaccagcgactatgtcgtagtgggtaaagctcccttcggggagcatcagag

SEQ ID NO: 4084 - DNA, 84 bp, synthetic construct
  misc_feature 1..84: note = engineered ribonucleic acid scaffold (ERS) sequence
  source 1..84: mol_type = other DNA
acctgtagttctatctgattactctgctacagtcaccagcgactatgtcgtagtgggtaaagctcccttcggggagcatcagag

SEQ ID NO: 4085 - DNA, 84 bp, synthetic construct
  misc_feature 1..84: note = engineered ribonucleic acid scaffold (ERS) sequence
  source 1..84: mol_type = other DNA
acgagcacttctatctgattactctggggctctcaccagcgactatgtcgtagtgggtaaagctcccttcggggagcatcagag

SEQ ID NO: 4086 - DNA, 84 bp, synthetic construct
  misc_feature 1..84: note = engineered ribonucleic acid scaffold (ERS) sequence
  source 1..84: mol_type = other DNA
acgaggtgttctatctgattactctgcacctctcaccagcgactatgtcgtagtgggtaaagctcccttcggggagcatcagag

SEQ ID NO: 4087 - DNA, 84 bp, synthetic construct
  misc_feature 1..84: note = engineered ribonucleic acid scaffold (ERS) sequence
  source 1..84: mol_type = other DNA
acgggactttctatctgattactctgagtccctcaccagcgactatgtcgtagtgggtaaagctcccttcggggagcatcagag

SEQ ID NO: 4088 - DNA, 84 bp, synthetic construct
  misc_feature 1..84: note = engineered ribonucleic acid scaffold (ERS) sequence
  source 1..84: mol_type = other DNA
acgggcaattctatctgattactctgttgccctcaccagcgactatgtcgtagtgggtaaagctcccttcggggagcatcagag

SEQ ID NO: 4089 - DNA, 84 bp, synthetic construct
  misc_feature 1..84: note = engineered ribonucleic acid scaffold (ERS) sequence
  source 1..84: mol_type = other DNA
actgtgcgttctatctgattactctgcgcacatcaccagcgactatgtcgtagtgggtaaagctcccttcggggagcatcagag

SEQ ID NO: 4090 - DNA, 85 bp, synthetic construct
  misc_feature 1..85: note = engineered ribonucleic acid scaffold (ERS) sequence
  source 1..85: mol_type = other DNA
actggcgcttctatctgattactctgggcgccatcaccagcgactatgtcgtagtgggtaaagctcccttcggggagcatcagag

SEQ ID NO: 4091 - DNA, 85 bp, synthetic construct
  misc_feature 1..85: note = engineered ribonucleic acid scaffold (ERS) sequence
  source 1..85: mol_type = other DNA
actggcgcttctatctgattactctgggagccatcaccagcgactatgtcgtagtgggtaaagctcccttcggggagcatcagag

SEQ ID NO: 4092 - DNA, 85 bp, synthetic construct
  misc_feature 1..85: note = engineered ribonucleic acid scaffold (ERS) sequence
  source 1..85: mol_type = other DNA
actggcgcttctatctgattactctgtgagccatcaccagcgactatgtcgtagtgggtaaagctcccttcggggagcatcagag

SEQ ID NO: 4093 - DNA, 86 bp, synthetic construct
  misc_feature 1..86: note = engineered ribonucleic acid scaffold (ERS) sequence
  source 1..86: mol_type = other DNA
actggcgcttctatctgattactctgaggagccatcaccagcgactatgtcgtagtgggtaaagctcccttcggggagcatcagag

SEQ ID NO: 4094 - DNA, 85 bp, synthetic construct
  misc_feature 1..85: note = engineered ribonucleic acid scaffold (ERS) sequence
  source 1..85: mol_type = other DNA
actggcgcttctatctgattactctgatagccatcaccagcgactatgtcgtagtgggtaaagctcccttcggggagcatcagag

SEQ ID NO: 4095 - DNA, 86 bp, synthetic construct
  misc_feature 1..86: note = engineered ribonucleic acid scaffold (ERS) sequence
  source 1..86: mol_type = other DNA
actggcgcttctatctgattactctgagctgccatcaccagcgactatgtcgtagtgggtaaagctcccttcggggagcatcagag

SEQ ID NO: 4096 - DNA, 86 bp, synthetic construct
  misc_feature 1..86: note = engineered ribonucleic acid scaffold (ERS) sequence
  source 1..86: mol_type = other DNA
actggcacttctatctgattactctgagtagccatcaccagcgactatgtcgtagtgggtaaagctcccttcggggagcatcagag

SEQ ID NO: 4097 - DNA, 86 bp, synthetic construct
  misc_feature 1..86: note = engineered ribonucleic acid scaffold (ERS) sequence
  source 1..86: mol_type = other DNA
actggcgcttctatctgattactctgagtagccatcaccagcgactatgtcgtagtgggtaaagctcccttcggggagcatcagag

SEQ ID NO: 4098 - DNA, 85 bp, synthetic construct
  misc_feature 1..85: note = engineered ribonucleic acid scaffold (ERS) sequence
  source 1..85: mol_type = other DNA
actggcgcttctatctgattactctgagcaccatcaccagcgactatgtcgtagtgggtaaagctcccttcggggagcatcagag

SEQ ID NO: 4099 - DNA, 85 bp, synthetic construct
  misc_feature 1..85: note = engineered ribonucleic acid scaffold (ERS) sequence
  source 1..85: mol_type = other DNA
actggcacttctatctgattactctgagcgccatcaccagcgactatgtcgtagtgggtaaagctcccttcggggagcatcagag

SEQ ID NO: 4100 - DNA, 85 bp, synthetic construct
  misc_feature 1..85: note = engineered ribonucleic acid scaffold (ERS) sequence
  source 1..85: mol_type = other DNA
actggcgcttctatctgattactctgagggccatcaccagcgactatgtcgtagtgggtaaagctcccttcggggagcatcagag

SEQ ID NO: 4101 - DNA, 85 bp, synthetic construct
  misc_feature 1..85: note = engineered ribonucleic acid scaffold (ERS) sequence
  source 1..85: mol_type = other DNA
actggcgcttctatctgattactctgagtgccgtcaccagcgactatgtcgtagtgggtaaagctcccttcggggagcatcagag

SEQ ID NO: 4102 - DNA, 85 bp, synthetic construct
  misc_feature 1..85: note = engineered ribonucleic acid scaffold (ERS) sequence
  source 1..85: mol_type = other DNA
actggcacttctatctgattactctgagtgccatcaccagcgactatgtcgtagtgggtaaagctcccttcggggagcatcagag

SEQ ID NO: 4103 - DNA, 85 bp, synthetic construct
  misc_feature 1..85: note = engineered ribonucleic acid scaffold (ERS) sequence
  source 1..85: mol_type = other DNA
actggcgcttctatctgattactctgagaaccatcaccagcgactatgtcgtagtgggtaaagctcccttcggggagcatcagag

SEQ ID NO: 4104 - DNA, 85 bp, synthetic construct
  misc_feature 1..85: note = engineered ribonucleic acid scaffold (ERS) sequence
  source 1..85: mol_type = other DNA
actggcgcttctatctgattactctgagagccgtcaccagcgactatgtcgtagtgggtaaagctcccttcggggagcatcagag

SEQ ID NO: 4105 - DNA, 85 bp, synthetic construct
  misc_feature 1..85: note = engineered ribonucleic acid scaffold (ERS) sequence
  source 1..85: mol_type = other DNA
actggcgcttctatctgattactctgagagccttcaccagcgactatgtcgtagtgggtaaagctcccttcggggagcatcagag

SEQ ID NO: 4106 - DNA, 85 bp, synthetic construct
  misc_feature 1..85: note = engineered ribonucleic acid scaffold (ERS) sequence
  source 1..85: mol_type = other DNA
actggggcttctatctgattactctgagacccatcaccagcgactatgtcgtagtgggtaaagctcccttcggggagcatcagag

SEQ ID NO: 4107 - DNA, 85 bp, synthetic construct
  misc_feature 1..85: note = engineered ribonucleic acid scaffold (ERS) sequence
  source 1..85: mol_type = other DNA
actggtgcttctatctgattactctgagagccatcaccagcgactatgtcgtagtgggtaaagctcccttcggggagcatcagag

SEQ ID NO: 4108 - DNA, 85 bp, synthetic construct
  misc_feature 1..85: note = engineered ribonucleic acid scaffold (ERS) sequence
  source 1..85: mol_type = other DNA
actgggccttctatctgattactctgaggcccatcaccagcgactatgtcgtagtgggtaaagctcccttcggggagcatcagag

SEQ ID NO: 4109 - DNA, 86 bp, synthetic construct
  misc_feature 1..86: note = engineered ribonucleic acid scaffold (ERS) sequence
  source 1..86: mol_type = other DNA
actggcccttctatctgattactctgaggagccatcaccagcgactatgtcgtagtgggtaaagctcccttcggggagcatcagag

SEQ ID NO: 4110 - DNA, 85 bp, synthetic construct
  misc_feature 1..85: note = engineered ribonucleic acid scaffold (ERS) sequence
  source 1..85: mol_type = other DNA
actggcccttctatctgattactctgagggccatcaccagcgactatgtcgtagtgggtaaagctcccttcggggagcatcagag

SEQ ID NO: 4111 - DNA, 85 bp, synthetic construct
  misc_feature 1..85: note = engineered ribonucleic acid scaffold (ERS) sequence
  source 1..85: mol_type = other DNA
actggcccttctatctgattactctgagtgccatcaccagcgactatgtcgtagtgggtaaagctcccttcggggagcatcagag

SEQ ID NO: 4112 - DNA, 85 bp, synthetic construct
  misc_feature 1..85: note = engineered ribonucleic acid scaffold (ERS) sequence
  source 1..85: mol_type = other DNA
actggcccttctatctgattactctgagagccatcaccagcgactatgtcgtagtgggtaaagctcccttcggggagcatcagag

SEQ ID NO: 4113 - DNA, 86 bp, synthetic construct
  misc_feature 1..86: note = engineered ribonucleic acid scaffold (ERS) sequence
  source 1..86: mol_type = other DNA
actggcgcttctatctgattactctgagcagccatcaccagcgactatgtcgtagtgggtaaagctcccttcggggagcatcagag

SEQ ID NO: 4114 - DNA, 85 bp, synthetic construct; identical to SEQ ID NO: 726
  misc_feature 1..85: note = engineered ribonucleic acid scaffold (ERS) sequence
  source 1..85: mol_type = other DNA

SEQ ID NO: 4115 - DNA, 85 bp, synthetic construct
  misc_feature 1..85: note = engineered ribonucleic acid scaffold (ERS) sequence
  source 1..85: mol_type = other DNA
actggcgcttctatctgattactctgagtgccatcaccagcgactatgtcgtagtgggtaaagctcccttcggggagcatcagag

SEQ ID NO: 4116 - DNA, 85 bp, synthetic construct
  misc_feature 1..85: note = engineered ribonucleic acid scaffold (ERS) sequence
  source 1..85: mol_type = other DNA
actggcgcttctatctgattactctgagagccatcaccagcgactatgtcgtagtgggtaaagctcccttcggggagcatcagag

SEQ ID NO: 4117 - DNA, 85 bp, synthetic construct
  misc_feature 1..85: note = engineered ribonucleic acid scaffold (ERS) sequence
  source 1..85: mol_type = other DNA
actggctcttctatctgattactctgagcgccatcaccagcgactatgtcgtagtgggtaaagctcccttcggggagcatcagag

SEQ ID NO: 4118 - DNA, 85 bp, synthetic construct
  misc_feature 1..85: note = engineered ribonucleic acid scaffold (ERS) sequence
  source 1..85: mol_type = other DNA
actggctcttctatctgattactctgagggccatcaccagcgactatgtcgtagtgggtaaagctcccttcggggagcatcagag

SEQ ID NO: 4119 - DNA, 85 bp, synthetic construct
  misc_feature 1..85: note = engineered ribonucleic acid scaffold (ERS) sequence
  source 1..85: mol_type = other DNA
actggctcttctatctgattactctgagtgccatcaccagcgactatgtcgtagtgggtaaagctcccttcggggagcatcagag

SEQ ID NO: 4120 - DNA, 85 bp, synthetic construct
  misc_feature 1..85: note = engineered ribonucleic acid scaffold (ERS) sequence
  source 1..85: mol_type = other DNA
actggctcttctatctgattactctgagagccatcaccagcgactatgtcgtagtgggtaaagctcccttcggggagcatcagag

SEQ ID NO: 4121 - DNA, 85 bp, synthetic construct
  misc_feature 1..85: note = engineered ribonucleic acid scaffold (ERS) sequence
  source 1..85: mol_type = other DNA
actggcggttctatctgattactctgagcgccatcaccagcgactatgtcgtagtgggtaaagctcccttcggggagcatcagag

SEQ ID NO: 4122 - DNA, 85 bp, synthetic construct
  misc_feature 1..85: note = engineered ribonucleic acid scaffold (ERS) sequence
  source 1..85: mol_type = other DNA
actggcggttctatctgattactctgagagccatcaccagcgactatgtcgtagtgggtaaagctcccttcggggagcatcagag

SEQ ID NO: 4123 - DNA, 84 bp, synthetic construct
  misc_feature 1..84: note = engineered ribonucleic acid scaffold (ERS) sequence
  source 1..84: mol_type = other DNA
acacacggttctatctgattactctgccgtgttcaccagcgactatgtcgtagtgggtaaagctccgttcgcggagcatcagag

SEQ ID NO: 4124 - DNA, 84 bp, synthetic construct
  misc_feature 1..84: note = engineered ribonucleic acid scaffold (ERS) sequence
  source 1..84: mol_type = other DNA
acactggtttctatctgattactctgaccagttcaccagcgactatgtcgtagtgggtaaagctccgttcgcggagcatcagag

SEQ ID NO: 4125 - DNA, 84 bp, synthetic construct
  misc_feature 1..84: note = engineered ribonucleic acid scaffold (ERS) sequence
  source 1..84: mol_type = other DNA
acaggccgttctatctgattactctgcggccttcaccagcgactatgtcgtagtgggtaaagctccgttcgcggagcatcagag

SEQ ID NO: 4126 - DNA, 84 bp, synthetic construct
  misc_feature 1..84: note = engineered ribonucleic acid scaffold (ERS) sequence
  source 1..84: mol_type = other DNA
acaggtccttctatctgattactctgggaccttcaccagcgactatgtcgtagtgggtaaagctccgttcgcggagcatcagag

SEQ ID NO: 4127 - DNA, 84 bp, synthetic construct
  misc_feature 1..84: note = engineered ribonucleic acid scaffold (ERS) sequence
  source 1..84: mol_type = other DNA
accagcaattctatctgattactctgttgctgtcaccagcgactatgtcgtagtgggtaaagctccgttcgcggagcatcagag

SEQ ID NO: 4128 - DNA, 84 bp, synthetic construct
  misc_feature 1..84: note = engineered ribonucleic acid scaffold (ERS) sequence
  source 1..84: mol_type = other DNA
accgagacttctatctgattactctgggctcgtcaccagcgactatgtcgtagtgggtaaagctccgttcgcggagcatcagag

SEQ ID NO: 4129 - DNA, 84 bp, synthetic construct
  misc_feature 1..84: note = engineered ribonucleic acid scaffold (ERS) sequence
  source 1..84: mol_type = other DNA
acctgtagttctatctgattactctgctacagtcaccagcgactatgtcgtagtgggtaaagctccgttcgcggagcatcagag

SEQ ID NO: 4130 - DNA, 84 bp, synthetic construct
  misc_feature 1..84: note = engineered ribonucleic acid scaffold (ERS) sequence
  source 1..84: mol_type = other DNA
acgagcacttctatctgattactctggggctctcaccagcgactatgtcgtagtgggtaaagctccgttcgcggagcatcagag

SEQ ID NO: 4131 - DNA, 84 bp, synthetic construct
  misc_feature 1..84: note = engineered ribonucleic acid scaffold (ERS) sequence
  source 1..84: mol_type = other DNA
acgaggtgttctatctgattactctgcacctctcaccagcgactatgtcgtagtgggtaaagctccgttcgcggagcatcagag

SEQ ID NO: 4132 - DNA, 84 bp, synthetic construct
  misc_feature 1..84: note = engineered ribonucleic acid scaffold (ERS) sequence
  source 1..84: mol_type = other DNA
acgggactttctatctgattactctgagtccctcaccagcgactatgtcgtagtgggtaaagctccgttcgcggagcatcagag

SEQ ID NO: 4133 - DNA, 84 bp, synthetic construct
  misc_feature 1..84: note = engineered ribonucleic acid scaffold (ERS) sequence
  source 1..84: mol_type = other DNA
acgggcaattctatctgattactctgttgccctcaccagcgactatgtcgtagtgggtaaagctccgttcgcggagcatcagag

SEQ ID NO: 4134 - DNA, 84 bp, synthetic construct
  misc_feature 1..84: note = engineered ribonucleic acid scaffold (ERS) sequence
  source 1..84: mol_type = other DNA
actgtgcgttctatctgattactctgcgcacatcaccagcgactatgtcgtagtgggtaaagctccgttcgcggagcatcagag

SEQ ID NO: 4135 - DNA, 85 bp, synthetic construct
  misc_feature 1..85: note = engineered ribonucleic acid scaffold (ERS) sequence
  source 1..85: mol_type = other DNA
actggcgcttctatctgattactctgggcgccatcaccagcgactatgtcgtagtgggtaaagctccgttcgcggagcatcagag

SEQ ID NO: 4136 - DNA, 85 bp, synthetic construct
  misc_feature 1..85: note = engineered ribonucleic acid scaffold (ERS) sequence
  source 1..85: mol_type = other DNA
actggcgcttctatctgattactctgggagccatcaccagcgactatgtcgtagtgggtaaagctccgttcgcggagcatcagag

SEQ ID NO: 4137 - DNA, 85 bp, synthetic construct
  misc_feature 1..85: note = engineered ribonucleic acid scaffold (ERS) sequence
  source 1..85: mol_type = other DNA
actggcgcttctatctgattactctgtgagccatcaccagcgactatgtcgtagtgggtaaagctccgttcgcggagcatcagag

SEQ ID NO: 4138 - DNA, 86 bp, synthetic construct
  misc_feature 1..86: note = engineered ribonucleic acid scaffold (ERS) sequence
  source 1..86: mol_type = other DNA
actggcgcttctatctgattactctgaggagccatcaccagcgactatgtcgtagtgggtaaagctccgttcgcggagcatcagag

SEQ ID NO: 4139 - DNA, 85 bp, synthetic construct
  misc_feature 1..85: note = engineered ribonucleic acid scaffold (ERS) sequence
  source 1..85: mol_type = other DNA
actggcgcttctatctgattactctgatagccatcaccagcgactatgtcgtagtgggtaaagctccgttcgcggagcatcagag

SEQ ID NO: 4140 - DNA, 86 bp, synthetic construct
  misc_feature 1..86: note = engineered ribonucleic acid scaffold (ERS) sequence
  source 1..86: mol_type = other DNA
actggcgcttctatctgattactctgagctgccatcaccagcgactatgtcgtagtgggtaaagctccgttcgcggagcatcagag

SEQ ID NO: 4141 - DNA, 86 bp, synthetic construct
  misc_feature 1..86: note = engineered ribonucleic acid scaffold (ERS) sequence
  source 1..86: mol_type = other DNA
actggcacttctatctgattactctgagtagccatcaccagcgactatgtcgtagtgggtaaagctccgttcgcggagcatcagag

SEQ ID NO: 4142 - DNA, 86 bp, synthetic construct
  misc_feature 1..86: note = engineered ribonucleic acid scaffold (ERS) sequence
  source 1..86: mol_type = other DNA
actggcgcttctatctgattactctgagtagccatcaccagcgactatgtcgtagtgggtaaagctccgttcgcggagcatcagag

SEQ ID NO: 4143 - DNA, 85 bp, synthetic construct
  misc_feature 1..85: note = engineered ribonucleic acid scaffold (ERS) sequence
  source 1..85: mol_type = other DNA
actggcgcttctatctgattactctgagcaccatcaccagcgactatgtcgtagtgggtaaagctccgttcgcggagcatcagag

SEQ ID NO: 4144 - DNA, 85 bp, synthetic construct
  misc_feature 1..85: note = engineered ribonucleic acid scaffold (ERS) sequence
  source 1..85: mol_type = other DNA
actggcacttctatctgattactctgagcgccatcaccagcgactatgtcgtagtgggtaaagctccgttcgcggagcatcagag

SEQ ID NO: 4145 - DNA, 85 bp, synthetic construct
  misc_feature 1..85: note = engineered ribonucleic acid scaffold (ERS) sequence
  source 1..85: mol_type = other DNA
actggcgcttctatctgattactctgagggccatcaccagcgactatgtcgtagtgggtaaagctccgttcgcggagcatcagag

SEQ ID NO: 4146 - DNA, 85 bp, synthetic construct
  misc_feature 1..85: note = engineered ribonucleic acid scaffold (ERS) sequence
  source 1..85: mol_type = other DNA
actggcgcttctatctgattactctgagtgccgtcaccagcgactatgtcgtagtgggtaaagctccgttcgcggagcatcagag

SEQ ID NO: 4147 - DNA, 85 bp, synthetic construct
  misc_feature 1..85: note = engineered ribonucleic acid scaffold (ERS) sequence
  source 1..85: mol_type = other DNA
actggcacttctatctgattactctgagtgccatcaccagcgactatgtcgtagtgggtaaagctccgttcgcggagcatcagag

SEQ ID NO: 4148 - DNA, 85 bp, synthetic construct
  misc_feature 1..85: note = engineered ribonucleic acid scaffold (ERS) sequence
  source 1..85: mol_type = other DNA
actggcgcttctatctgattactctgagaaccatcaccagcgactatgtcgtagtgggtaaagctccgttcgcggagcatcagag

SEQ ID NO: 4149 - DNA, 85 bp, synthetic construct
  misc_feature 1..85: note = engineered ribonucleic acid scaffold (ERS) sequence
  source 1..85: mol_type = other DNA
actggcgcttctatctgattactctgagagccgtcaccagcgactatgtcgtagtgggtaaagctccgttcgcggagcatcagag

SEQ ID NO: 4150 - DNA, 85 bp, synthetic construct
  misc_feature 1..85: note = engineered ribonucleic acid scaffold (ERS) sequence
  source 1..85: mol_type = other DNA
actggcgcttctatctgattactctgagagccttcaccagcgactatgtcgtagtgggtaaagctccgttcgcggagcatcagag

SEQ ID NO: 4151 - DNA, 85 bp, synthetic construct
  misc_feature 1..85: note = engineered ribonucleic acid scaffold (ERS) sequence
  source 1..85: mol_type = other DNA
actggggcttctatctgattactctgagacccatcaccagcgactatgtcgtagtgggtaaagctccgttcgcggagcatcagag

SEQ ID NO: 4152 - DNA, 85 bp, synthetic construct
  misc_feature 1..85: note = engineered ribonucleic acid scaffold (ERS) sequence
  source 1..85: mol_type = other DNA
actggtgcttctatctgattactctgagagccatcaccagcgactatgtcgtagtgggtaaagctccgttcgcggagcatcagag

SEQ ID NO: 4153 - DNA, 85 bp, synthetic construct
  misc_feature 1..85: note = engineered ribonucleic acid scaffold (ERS) sequence
  source 1..85: mol_type = other DNA
actgggccttctatctgattactctgaggcccatcaccagcgactatgtcgtagtgggtaaagctccgttcgcggagcatcagag

SEQ ID NO: 4154 - DNA, 86 bp, synthetic construct
  misc_feature 1..86: note = engineered ribonucleic acid scaffold (ERS) sequence
  source 1..86: mol_type = other DNA
actggcccttctatctgattactctgaggagccatcaccagcgactatgtcgtagtgggtaaagctccgttcgcggagcatcagag

SEQ ID NO: 4155 - DNA, 85 bp, synthetic construct
  misc_feature 1..85: note = engineered ribonucleic acid scaffold (ERS) sequence
  source 1..85: mol_type = other DNA
actggcccttctatctgattactctgagggccatcaccagcgactatgtcgtagtgggtaaagctccgttcgcggagcatcagag

SEQ ID NO: 4156 - DNA, 85 bp, synthetic construct
  misc_feature 1..85: note = engineered ribonucleic acid scaffold (ERS) sequence
  source 1..85: mol_type = other DNA
actggcccttctatctgattactctgagtgccatcaccagcgactatgtcgtagtgggtaaagctccgttcgcggagcatcagag

SEQ ID NO: 4157 - DNA, 85 bp, synthetic construct
  misc_feature 1..85: note = engineered ribonucleic acid scaffold (ERS) sequence
  source 1..85: mol_type = other DNA
actggcccttctatctgattactctgagagccatcaccagcgactatgtcgtagtgggtaaagctccgttcgcggagcatcagag

SEQ ID NO: 4158 - DNA, 86 bp, synthetic construct
  misc_feature 1..86: note = engineered ribonucleic acid scaffold (ERS) sequence
  source 1..86: mol_type = other DNA
actggcgcttctatctgattactctgagcagccatcaccagcgactatgtcgtagtgggtaaagctccgttcgcggagcatcagag

SEQ ID NO: 4159 - DNA, 85 bp, synthetic construct; identical to SEQ ID NO: 727
  misc_feature 1..85: note = engineered ribonucleic acid scaffold (ERS) sequence
  source 1..85: mol_type = other DNA

SEQ ID NO: 4160 - DNA, 85 bp, synthetic construct
  misc_feature 1..85: note = engineered ribonucleic acid scaffold (ERS) sequence
  source 1..85: mol_type = other DNA
actggcgcttctatctgattactctgagtgccatcaccagcgactatgtcgtagtgggtaaagctccgttcgcggagcatcagag

SEQ ID NO: 4161 - DNA, 85 bp, synthetic construct
  misc_feature 1..85: note = engineered ribonucleic acid scaffold (ERS) sequence
  source 1..85: mol_type = other DNA
actggcgcttctatctgattactctgagagccatcaccagcgactatgtcgtagtgggtaaagctccgttcgcggagcatcagag

SEQ ID NO: 4162 - DNA, 85 bp, synthetic construct
  misc_feature 1..85: note = engineered ribonucleic acid scaffold (ERS) sequence
  source 1..85: mol_type = other DNA
actggctcttctatctgattactctgagcgccatcaccagcgactatgtcgtagtgggtaaagctccgttcgcggagcatcagag

SEQ ID NO: 4163 - DNA, 85 bp, synthetic construct
  misc_feature 1..85: note = engineered ribonucleic acid scaffold (ERS) sequence
  source 1..85: mol_type = other DNA
actggctcttctatctgattactctgagggccatcaccagcgactatgtcgtagtgggtaaagctccgttcgcggagcatcagag

SEQ ID NO: 4164 - DNA, 85 bp, synthetic construct
  misc_feature 1..85: note = engineered ribonucleic acid scaffold (ERS) sequence
  source 1..85: mol_type = other DNA
actggctcttctatctgattactctgagtgccatcaccagcgactatgtcgtagtgggtaaagctccgttcgcggagcatcagag

SEQ ID NO: 4165 - DNA, 85 bp, synthetic construct
  misc_feature 1..85: note = engineered ribonucleic acid scaffold (ERS) sequence
  source 1..85: mol_type = other DNA
actggctcttctatctgattactctgagagccatcaccagcgactatgtcgtagtgggtaaagctccgttcgcggagcatcagag

SEQ ID NO: 4166 - DNA, 85 bp, synthetic construct
  misc_feature 1..85: note = engineered ribonucleic acid scaffold (ERS) sequence
  source 1..85: mol_type = other DNA
actggcggttctatctgattactctgagcgccatcaccagcgactatgtcgtagtgggtaaagctccgttcgcggagcatcagag

SEQ ID NO: 4167 - DNA, 85 bp, synthetic construct
  misc_feature 1..85: note = engineered ribonucleic acid scaffold (ERS) sequence
  source 1..85: mol_type = other DNA
actggcggttctatctgattactctgagagccatcaccagcgactatgtcgtagtgggtaaagctccgttcgcggagcatcagag

SEQ ID NO: 4168 - DNA, 86 bp, synthetic construct
  misc_feature 1..86: note = engineered ribonucleic acid scaffold (ERS) sequence
  source 1..86: mol_type = other DNA
acacacggttctatctgattactctgccgtgttcaccagcgactatgtcgtagtgggtaaagctcctcttcggaggagcatcagag

SEQ ID NO: 4169 - DNA, 86 bp, synthetic construct
  misc_feature 1..86: note = engineered ribonucleic acid scaffold (ERS) sequence
  source 1..86: mol_type = other DNA
acactggtttctatctgattactctgaccagttcaccagcgactatgtcgtagtgggtaaagctcctcttcggaggagcatcagag

SEQ ID NO: 4170 - DNA, 86 bp, synthetic construct
  misc_feature 1..86: note = engineered ribonucleic acid scaffold (ERS) sequence
  source 1..86: mol_type = other DNA
acaggccgttctatctgattactctgcggccttcaccagcgactatgtcgtagtgggtaaagctcctcttcggaggagcatcagag

SEQ ID NO: 4171 - DNA, 86 bp, synthetic construct
  misc_feature 1..86: note = engineered ribonucleic acid scaffold (ERS) sequence
  source 1..86: mol_type = other DNA
acaggtccttctatctgattactctgggaccttcaccagcgactatgtcgtagtgggtaaagctcctcttcggaggagcatcagag

SEQ ID NO: 4172 - DNA, 86 bp, synthetic construct
  misc_feature 1..86: note = engineered ribonucleic acid scaffold (ERS) sequence
  source 1..86: mol_type = other DNA
accagcaattctatctgattactctgttgctgtcaccagcgactatgtcgtagtgggtaaagctcctcttcggaggagcatcagag

SEQ ID NO: 4173 - DNA, 86 bp, synthetic construct
  misc_feature 1..86: note = engineered ribonucleic acid scaffold (ERS) sequence
  source 1..86: mol_type = other DNA
accgagacttctatctgattactctgggctcgtcaccagcgactatgtcgtagtgggtaaagctcctcttcggaggagcatcagag

SEQ ID NO: 4174 - DNA, 86 bp, synthetic construct
  misc_feature 1..86: note = engineered ribonucleic acid scaffold (ERS) sequence
  source 1..86: mol_type = other DNA
acctgtagttctatctgattactctgctacagtcaccagcgactatgtcgtagtgggtaaagctcctcttcggaggagcatcagag

SEQ ID NO: 4175 - DNA, 86 bp, synthetic construct
  misc_feature 1..86: note = engineered ribonucleic acid scaffold (ERS) sequence
  source 1..86: mol_type = other DNA
acgagcacttctatctgattactctggggctctcaccagcgactatgtcgtagtgggtaaagctcctcttcggaggagcatcagag

SEQ ID NO: 4176 - DNA, 86 bp, synthetic construct
  misc_feature 1..86: note = engineered ribonucleic acid scaffold (ERS) sequence
  source 1..86: mol_type = other DNA
acgaggtgttctatctgattactctgcacctctcaccagcgactatgtcgtagtgggtaaagctcctcttcggaggagcatcagag

SEQ ID NO: 4177 - DNA, 86 bp, synthetic construct
  misc_feature 1..86: note = engineered ribonucleic acid scaffold (ERS) sequence
  source 1..86: mol_type = other DNA
acgggactttctatctgattactctgagtccctcaccagcgactatgtcgtagtgggtaaagctcctcttcggaggagcatcagag

SEQ ID NO: 4178 - DNA, 86 bp, synthetic construct
  misc_feature 1..86: note = engineered ribonucleic acid scaffold (ERS) sequence
  source 1..86: mol_type = other DNA
acgggcaattctatctgattactctgttgccctcaccagcgactatgtcgtagtgggtaaagctcctcttcggaggagcatcagag

SEQ ID NO: 4179 - DNA, 86 bp, synthetic construct
  misc_feature 1..86: note = engineered ribonucleic acid scaffold (ERS) sequence
  source 1..86: mol_type = other DNA
actgtgcgttctatctgattactctgcgcacatcaccagcgactatgtcgtagtgggtaaagctcctcttcggaggagcatcagag

SEQ ID NO: 4180 - DNA, 87 bp, synthetic construct
  misc_feature 1..87: note = engineered ribonucleic acid scaffold (ERS) sequence
  source 1..87: mol_type = other DNA
actggcgcttctatctgattactctgggcgccatcaccagcgactatgtcgtagtgggtaaagctcctcttcggaggagcatcagag

SEQ ID NO: 4181 - DNA, 87 bp, synthetic construct
  misc_feature 1..87: note = engineered ribonucleic acid scaffold (ERS) sequence
  source 1..87: mol_type = other DNA
actggcgcttctatctgattactctgggagccatcaccagcgactatgtcgtagtgggtaaagctcctcttcggaggagcatcagag

SEQ ID NO: 4182 - DNA, 87 bp, synthetic construct
  misc_feature 1..87: note = engineered ribonucleic acid scaffold (ERS) sequence
  source 1..87: mol_type = other DNA
actggcgcttctatctgattactctgtgagccatcaccagcgactatgtcgtagtgggtaaagctcctcttcggaggagcatcagag

SEQ ID NO: 4183 - DNA, 88 bp, synthetic construct
  misc_feature 1..88: note = engineered ribonucleic acid scaffold (ERS) sequence
  source 1..88: mol_type = other DNA
actggcgcttctatctgattactctgaggagccatcaccagcgactatgtcgtagtgggtaaagctcctcttcggaggagcatcagag

SEQ ID NO: 4184 - DNA, 87 bp, synthetic construct
  misc_feature 1..87: note = engineered ribonucleic acid scaffold (ERS) sequence
  source 1..87: mol_type = other DNA
actggcgcttctatctgattactctgatagccatcaccagcgactatgtcgtagtgggtaaagctcctcttcggaggagcatcagag

SEQ ID NO: 4185 - DNA, 88 bp, synthetic construct
  misc_feature 1..88: note = engineered ribonucleic acid scaffold (ERS) sequence
  source 1..88: mol_type = other DNA
actggcgcttctatctgattactctgagctgccatcaccagcgactatgtcgtagtgggtaaagctcctcttcggaggagcatcagag

SEQ ID NO: 4186 - DNA, 88 bp, synthetic construct
  misc_feature 1..88: note = engineered ribonucleic acid scaffold (ERS) sequence
  source 1..88: mol_type = other DNA
actggcacttctatctgattactctgagtagccatcaccagcgactatgtcgtagtgggtaaagctcctcttcggaggagcatcagag

SEQ ID NO: 4187 - DNA, 88 bp, synthetic construct
  misc_feature 1..88: note = engineered ribonucleic acid scaffold (ERS) sequence
  source 1..88: mol_type = other DNA
actggcgcttctatctgattactctgagtagccatcaccagcgactatgtcgtagtgggtaaagctcctcttcggaggagcatcagag

SEQ ID NO: 4188 - DNA, 87 bp, synthetic construct
  misc_feature 1..87: note = engineered ribonucleic acid scaffold (ERS) sequence
  source 1..87: mol_type = other DNA
actggcgcttctatctgattactctgagcaccatcaccagcgactatgtcgtagtgggtaaagctcctcttcggaggagcatcagag

SEQ ID NO: 4189 - DNA, 87 bp, synthetic construct
  misc_feature 1..87: note = engineered ribonucleic acid scaffold (ERS) sequence
  source 1..87: mol_type = other DNA
actggcacttctatctgattactctgagcgccatcaccagcgactatgtcgtagtgggtaaagctcctcttcggaggagcatcagag

SEQ ID NO: 4190 - DNA, 87 bp, synthetic construct
  misc_feature 1..87: note = engineered ribonucleic acid scaffold (ERS) sequence
  source 1..87: mol_type = other DNA
actggcgcttctatctgattactctgagggccatcaccagcgactatgtcgtagtgggtaaagctcctcttcggaggagcatcagag

SEQ ID NO: 4191 - DNA, 87 bp, synthetic construct
  misc_feature 1..87: note = engineered ribonucleic acid scaffold (ERS) sequence
  source 1..87: mol_type = other DNA
actggcgcttctatctgattactctgagtgccgtcaccagcgactatgtcgtagtgggtaaagctcctcttcggaggagcatcagag

SEQ ID NO: 4192 - DNA, 87 bp, synthetic construct
  misc_feature 1..87: note = engineered ribonucleic acid scaffold (ERS) sequence
  source 1..87: mol_type = other DNA
actggcacttctatctgattactctgagtgccatcaccagcgactatgtcgtagtgggtaaagctcctcttcggaggagcatcagag

SEQ ID NO: 4193 - DNA, 87 bp, synthetic construct
  misc_feature 1..87: note = engineered ribonucleic acid scaffold (ERS) sequence
  source 1..87: mol_type = other DNA
actggcgcttctatctgattactctgagaaccatcaccagcgactatgtcgtagtgggtaaagctcctcttcggaggagcatcagag

SEQ ID NO: 4194 - DNA, 87 bp, synthetic construct
  misc_feature 1..87: note = engineered ribonucleic acid scaffold (ERS) sequence
  source 1..87: mol_type = other DNA
actggcgcttctatctgattactctgagagccgtcaccagcgactatgtcgtagtgggtaaagctcctcttcggaggagcatcagag

SEQ ID NO: 4195 - DNA, 87 bp, synthetic construct
  misc_feature 1..87: note = engineered ribonucleic acid scaffold (ERS) sequence
  source 1..87: mol_type = other DNA
actggcgcttctatctgattactctgagagccttcaccagcgactatgtcgtagtgggtaaagctcctcttcggaggagcatcagag

SEQ ID NO: 4196 - DNA, 87 bp, synthetic construct
  misc_feature 1..87: note = engineered ribonucleic acid scaffold (ERS) sequence
  source 1..87: mol_type = other DNA
actggggcttctatctgattactctgagacccatcaccagcgactatgtcgtagtgggtaaagctcctcttcggaggagcatcagag

SEQ ID NO: 4197 - DNA, 87 bp, synthetic construct
  misc_feature 1..87: note = engineered ribonucleic acid scaffold (ERS) sequence
  source 1..87: mol_type = other DNA
actggtgcttctatctgattactctgagagccatcaccagcgactatgtcgtagtgggtaaagctcctcttcggaggagcatcagag

SEQ ID NO: 4198 - DNA, 87 bp, synthetic construct
  misc_feature 1..87: note = engineered ribonucleic acid scaffold (ERS) sequence
  source 1..87: mol_type = other DNA
actgggccttctatctgattactctgaggcccatcaccagcgactatgtcgtagtgggtaaagctcctcttcggaggagcatcagag

SEQ ID NO: 4199 - DNA, 88 bp, synthetic construct
  misc_feature 1..88: note = engineered ribonucleic acid scaffold (ERS) sequence
  source 1..88: mol_type = other DNA
actggcccttctatctgattactctgaggagccatcaccagcgactatgtcgtagtgggtaaagctcctcttcggaggagcatcagag

SEQ ID NO: 4200 - DNA, 87 bp, synthetic construct
  misc_feature 1..87: note = engineered ribonucleic acid scaffold (ERS) sequence
  source 1..87: mol_type = other DNA
actggcccttctatctgattactctgagggccatcaccagcgactatgtcgtagtgggtaaagctcctcttcggaggagcatcagag

SEQ ID NO: 4201 - DNA, 87 bp, synthetic construct
  misc_feature 1..87: note = engineered ribonucleic acid scaffold (ERS) sequence
  source 1..87: mol_type = other DNA
actggcccttctatctgattactctgagtgccatcaccagcgactatgtcgtagtgggtaaagctcctcttcggaggagcatcagag

SEQ ID NO: 4202 - DNA, 87 bp, synthetic construct
  misc_feature 1..87: note = engineered ribonucleic acid scaffold (ERS) sequence
  source 1..87: mol_type = other DNA
actggcccttctatctgattactctgagagccatcaccagcgactatgtcgtagtgggtaaagctcctcttcggaggagcatcagag

SEQ ID NO: 4203 - DNA, 88 bp, synthetic construct
  misc_feature 1..88: note = engineered ribonucleic acid scaffold (ERS) sequence
  source 1..88: mol_type = other DNA
actggcgcttctatctgattactctgagcagccatcaccagcgactatgtcgtagtgggtaaagctcctcttcggaggagcatcagag

SEQ ID NO: 4204 - DNA, 87 bp, synthetic construct; identical to SEQ ID NO: 724
  misc_feature 1..87: note = engineered ribonucleic acid scaffold (ERS) sequence
  source 1..87: mol_type = other DNA

SEQ ID NO: 4205 - DNA, 87 bp, synthetic construct
  misc_feature 1..87: note = engineered ribonucleic acid scaffold (ERS) sequence
  source 1..87: mol_type = other DNA
actggcgcttctatctgattactctgagtgccatcaccagcgactatgtcgtagtgggtaaagctcctcttcggaggagcatcagag

SEQ ID NO: 4206 - DNA, 87 bp, synthetic construct
  misc_feature 1..87: note = engineered ribonucleic acid scaffold (ERS) sequence
  source 1..87: mol_type = other DNA
actggcgcttctatctgattactctgagagccatcaccagcgactatgtcgtagtgggtaaagctcctcttcggaggagcatcagag

SEQ ID NO: 4207 - DNA, 87 bp, synthetic construct
  misc_feature 1..87: note = engineered ribonucleic acid scaffold (ERS) sequence
  source 1..87: mol_type = other DNA
actggctcttctatctgattactctgagcgccatcaccagcgactatgtcgtagtgggtaaagctcctcttcggaggagcatcagag

SEQ ID NO: 4208 - DNA, 87 bp, synthetic construct
  misc_feature 1..87: note = engineered ribonucleic acid scaffold (ERS) sequence
  source 1..87: mol_type = other DNA
actggctcttctatctgattactctgagggccatcaccagcgactatgtcgtagtgggtaaagctcctcttcggaggagcatcagag

SEQ ID NO: 4209 - DNA, 87 bp, synthetic construct
  misc_feature 1..87: note = engineered ribonucleic acid scaffold (ERS) sequence
  source 1..87: mol_type = other DNA
actggctcttctatctgattactctgagtgccatcaccagcgactatgtcgtagtgggtaaagctcctcttcggaggagcatcagag

SEQ ID NO: 4210 - DNA, 87 bp, synthetic construct
  misc_feature 1..87: note = engineered ribonucleic acid scaffold (ERS) sequence
  source 1..87: mol_type = other DNA
actggctcttctatctgattactctgagagccatcaccagcgactatgtcgtagtgggtaaagctcctcttcggaggagcatcagag

SEQ ID NO: 4211 - DNA, 87 bp, synthetic construct
  misc_feature 1..87: note = engineered ribonucleic acid scaffold (ERS) sequence
  source 1..87: mol_type = other DNA
actggcggttctatctgattactctgagcgccatcaccagcgactatgtcgtagtgggtaaagctcctcttcggaggagcatcagag

SEQ ID NO: 4212 - DNA, 87 bp, synthetic construct
  misc_feature 1..87: note = engineered ribonucleic acid scaffold (ERS) sequence
  source 1..87: mol_type = other DNA
actggcggttctatctgattactctgagagccatcaccagcgactatgtcgtagtgggtaaagctcctcttcggaggagcatcagag

SEQ ID NO: 4213 - DNA, 84 bp, synthetic construct
  misc_feature 1..84: note = engineered ribonucleic acid scaffold (ERS) sequence
  source 1..84: mol_type = other DNA
acacacggttctatctgattactctgccgtgttcaccagcgactatgtcgtagtgggtaaagctctcttcggagagcatcagag

SEQ ID NO: 4214 - DNA, 84 bp, synthetic construct
  misc_feature 1..84: note = engineered ribonucleic acid scaffold (ERS) sequence
  source 1..84: mol_type = other DNA
acactggtttctatctgattactctgaccagttcaccagcgactatgtcgtagtgggtaaagctctcttcggagagcatcagag

SEQ ID NO: 4215 - DNA, 84 bp, synthetic construct
  misc_feature 1..84: note = engineered ribonucleic acid scaffold (ERS) sequence
  source 1..84: mol_type = other DNA
acaggccgttctatctgattactctgcggccttcaccagcgactatgtcgtagtgggtaaagctctcttcggagagcatcagag

SEQ ID NO: 4216 - DNA, 84 bp, synthetic construct
  misc_feature 1..84: note = engineered ribonucleic acid scaffold (ERS) sequence
  source 1..84: mol_type = other DNA
acaggtccttctatctgattactctgggaccttcaccagcgactatgtcgtagtgggtaaagctctcttcggagagcatcagag

SEQ ID NO: 4217 - DNA, 84 bp, synthetic construct
  misc_feature 1..84: note = engineered ribonucleic acid scaffold (ERS) sequence
  source 1..84: mol_type = other DNA
accagcaattctatctgattactctgttgctgtcaccagcgactatgtcgtagtgggtaaagctctcttcggagagcatcagag

SEQ ID NO: 4218 - DNA, 84 bp, synthetic construct
  misc_feature 1..84: note = engineered ribonucleic acid scaffold (ERS) sequence
  source 1..84: mol_type = other DNA
accgagacttctatctgattactctgggctcgtcaccagcgactatgtcgtagtgggtaaagctctcttcggagagcatcagag

SEQ ID NO: 4219 - DNA, 84 bp, synthetic construct
  misc_feature 1..84: note = engineered ribonucleic acid scaffold (ERS) sequence
  source 1..84: mol_type = other DNA
acctgtagttctatctgattactctgctacagtcaccagcgactatgtcgtagtgggtaaagctctcttcggagagcatcagag

SEQ ID NO: 4220 - DNA, 84 bp, synthetic construct
  misc_feature 1..84: note = engineered ribonucleic acid scaffold (ERS) sequence
  source 1..84: mol_type = other DNA
acgagcacttctatctgattactctggggctctcaccagcgactatgtcgtagtgggtaaagctctcttcggagagcatcagag

SEQ ID NO: 4221 - DNA, 84 bp, synthetic construct
  misc_feature 1..84: note = engineered ribonucleic acid scaffold (ERS) sequence
  source 1..84: mol_type = other DNA
acgaggtgttctatctgattactctgcacctctcaccagcgactatgtcgtagtgggtaaagctctcttcggagagcatcagag

SEQ ID NO: 4222 - DNA, 84 bp, synthetic construct
  misc_feature 1..84: note = engineered ribonucleic acid scaffold (ERS) sequence
  source 1..84: mol_type = other DNA
acgggactttctatctgattactctgagtccctcaccagcgactatgtcgtagtgggtaaagctctcttcggagagcatcagag

SEQ ID NO: 4223 - DNA, 84 bp, synthetic construct
  misc_feature 1..84: note = engineered ribonucleic acid scaffold (ERS) sequence
  source 1..84: mol_type = other DNA
acgggcaattctatctgattactctgttgccctcaccagcgactatgtcgtagtgggtaaagctctcttcggagagcatcagag

SEQ ID NO: 4224 - DNA, 84 bp, synthetic construct
  misc_feature 1..84: note = engineered ribonucleic acid scaffold (ERS) sequence
  source 1..84: mol_type = other DNA
actgtgcgttctatctgattactctgcgcacatcaccagcgactatgtcgtagtgggtaaagctctcttcggagagcatcagag

SEQ ID NO: 4225 - DNA, 85 bp, synthetic construct
  misc_feature 1..85: note = engineered ribonucleic acid scaffold (ERS) sequence
  source 1..85: mol_type = other DNA
actggcgcttctatctgattactctgggcgccatcaccagcgactatgtcgtagtgggtaaagctctcttcggagagcatcagag

SEQ ID NO: 4226 - DNA, 85 bp, synthetic construct
  misc_feature 1..85: note = engineered ribonucleic acid scaffold (ERS) sequence
  source 1..85: mol_type = other DNA
actggcgcttctatctgattactctgggagccatcaccagcgactatgtcgtagtgggtaaagctctcttcggagagcatcagag

SEQ ID NO: 4227 - DNA, 85 bp, synthetic construct
  misc_feature 1..85: note = engineered ribonucleic acid scaffold (ERS) sequence
  source 1..85: mol_type = other DNA
actggcgcttctatctgattactctgtgagccatcaccagcgactatgtcgtagtgggtaaagctctcttcggagagcatcagag

SEQ ID NO: 4228 - DNA, 86 bp, synthetic construct
  misc_feature 1..86: note = engineered ribonucleic acid scaffold (ERS) sequence
  source 1..86: mol_type = other DNA
actggcgcttctatctgattactctgaggagccatcaccagcgactatgtcgtagtgggtaaagctctcttcggagagcatcagag

SEQ ID NO: 4229 - DNA, 85 bp, synthetic construct
  misc_feature 1..85: note = engineered ribonucleic acid scaffold (ERS) sequence
  source 1..85: mol_type = other DNA
actggcgcttctatctgattactctgatagccatcaccagcgactatgtcgtagtgggtaaagctctcttcggagagcatcagag

SEQ ID NO: 4230 - DNA, 86 bp, synthetic construct
  misc_feature 1..86: note = engineered ribonucleic acid scaffold (ERS) sequence
  source 1..86: mol_type = other DNA
actggcgcttctatctgattactctgagctgccatcaccagcgactatgtcgtagtgggtaaagctctcttcggagagcatcagag

SEQ ID NO: 4231 - DNA, 86 bp, synthetic construct
  misc_feature 1..86: note = engineered ribonucleic acid scaffold (ERS) sequence
  source 1..86: mol_type = other DNA
actggcacttctatctgattactctgagtagccatcaccagcgactatgtcgtagtgggtaaagctctcttcggagagcatcagag

SEQ ID NO: 4232 - DNA, 86 bp, synthetic construct
  misc_feature 1..86: note = engineered ribonucleic acid scaffold (ERS) sequence
  source 1..86: mol_type = other DNA
actggcgcttctatctgattactctgagtagccatcaccagcgactatgtcgtagtgggtaaagctctcttcggagagcatcagag

SEQ ID NO: 4233 - DNA, 85 bp, synthetic construct
  misc_feature 1..85: note = engineered ribonucleic acid scaffold (ERS) sequence
  source 1..85: mol_type = other DNA
actggcgcttctatctgattactctgagcaccatcaccagcgactatgtcgtagtgggtaaagctctcttcggagagcatcagag

SEQ ID NO: 4234 - DNA, 85 bp, synthetic construct
  misc_feature 1..85: note = engineered ribonucleic acid scaffold (ERS) sequence
  source 1..85: mol_type = other DNA
actggcacttctatctgattactctgagcgccatcaccagcgactatgtcgtagtgggtaaagctctcttcggagagcatcagag

SEQ ID NO: 4235 - DNA, 85 bp, synthetic construct
  misc_feature 1..85: note = engineered ribonucleic acid scaffold (ERS) sequence
  source 1..85: mol_type = other DNA
actggcgcttctatctgattactctgagggccatcaccagcgactatgtcgtagtgggtaaagctctcttcggagagcatcagag

SEQ ID NO: 4236 - DNA, 85 bp, synthetic construct
  misc_feature 1..85: note = engineered ribonucleic acid scaffold (ERS) sequence
  source 1..85: mol_type = other DNA
actggcgcttctatctgattactctgagtgccgtcaccagcgactatgtcgtagtgggtaaagctctcttcggagagcatcagag

SEQ ID NO: 4237 - DNA, 85 bp, synthetic construct
  misc_feature 1..85: note = engineered ribonucleic acid scaffold (ERS) sequence
  source 1..85: mol_type = other DNA
actggcacttctatctgattactctgagtgccatcaccagcgactatgtcgtagtgggtaaagctctcttcggagagcatcagag

SEQ ID NO: 4238 - DNA, 85 bp, synthetic construct
  misc_feature 1..85: note = engineered ribonucleic acid scaffold (ERS) sequence
  source 1..85: mol_type = other DNA
actggcgcttctatctgattactctgagaaccatcaccagcgactatgtcgtagtgggtaaagctctcttcggagagcatcagag

SEQ ID NO: 4239 - DNA, 85 bp, synthetic construct
  misc_feature 1..85: note = engineered ribonucleic acid scaffold (ERS) sequence
  source 1..85: mol_type = other DNA
actggcgcttctatctgattactctgagagccgtcaccagcgactatgtcgtagtgggtaaagctctcttcggagagcatcagag

SEQ ID NO: 4240 - DNA, 85 bp, synthetic construct
  misc_feature 1..85: note = engineered ribonucleic acid scaffold (ERS) sequence
  source 1..85: mol_type = other DNA
actggcgcttctatctgattactctgagagccttcaccagcgactatgtcgtagtgggtaaagctctcttcggagagcatcagag

SEQ ID NO: 4241 - DNA, 85 bp, synthetic construct
  misc_feature 1..85: note = engineered ribonucleic acid scaffold (ERS) sequence
  source 1..85: mol_type = other DNA
actggggcttctatctgattactctgagacccatcaccagcgactatgtcgtagtgggtaaagctctcttcggagagcatcagag

SEQ ID NO: 4242 - DNA, 85 bp, synthetic construct
  misc_feature 1..85: note = engineered ribonucleic acid scaffold (ERS) sequence
  source 1..85: mol_type = other DNA
actggtgcttctatctgattactctgagagccatcaccagcgactatgtcgtagtgggtaaagctctcttcggagagcatcagag

SEQ ID NO: 4243 - DNA, 85 bp, synthetic construct
  misc_feature 1..85: note = engineered ribonucleic acid scaffold (ERS) sequence
  source 1..85: mol_type = other DNA
actgggccttctatctgattactctgaggcccatcaccagcgactatgtcgtagtgggtaaagctctcttcggagagcatcagag

SEQ ID NO: 4244 - DNA, 86 bp, synthetic construct
  misc_feature 1..86: note = engineered ribonucleic acid scaffold (ERS) sequence
  source 1..86: mol_type = other DNA
actggcccttctatctgattactctgaggagccatcaccagcgactatgtcgtagtgggtaaagctctcttcggagagcatcagag

SEQ ID NO: 4245 - DNA, 85 bp, synthetic construct
  misc_feature 1..85: note = engineered ribonucleic acid scaffold (ERS) sequence
  source 1..85: mol_type = other DNA
actggcccttctatctgattactctgagggccatcaccagcgactatgtcgtagtgggtaaagctctcttcggagagcatcagag

SEQ ID NO: 4246 - DNA, 85 bp, synthetic construct
  misc_feature 1..85: note = engineered ribonucleic acid scaffold (ERS) sequence
  source 1..85: mol_type = other DNA
actggcccttctatctgattactctgagtgccatcaccagcgactatgtcgtagtgggtaaagctctcttcggagagcatcagag

SEQ ID NO: 4247 - DNA, 85 bp, synthetic construct
  misc_feature 1..85: note = engineered ribonucleic acid scaffold (ERS) sequence
  source 1..85: mol_type = other DNA
actggcccttctatctgattactctgagagccatcaccagcgactatgtcgtagtgggtaaagctctcttcggagagcatcagag

SEQ ID NO: 4248 - DNA, 86 bp, synthetic construct
  misc_feature 1..86: note = engineered ribonucleic acid scaffold (ERS) sequence
  source 1..86: mol_type = other DNA
actggcgcttctatctgattactctgagcagccatcaccagcgactatgtcgtagtgggtaaagctctcttcggagagcatcagag

SEQ ID NO: 4249 - DNA, 85 bp, synthetic construct; identical to SEQ ID NO: 725
  misc_feature 1..85: note = engineered ribonucleic acid scaffold (ERS) sequence
  source 1..85: mol_type = other DNA

SEQ ID NO: 4250 - DNA, 85 bp, synthetic construct
  misc_feature 1..85: note = engineered ribonucleic acid scaffold (ERS) sequence
  source 1..85: mol_type = other DNA
actggcgcttctatctgattactctgagtgccatcaccagcgactatgtcgtagtgggtaaagctctcttcggagagcatcagag

SEQ ID NO: 4251 - DNA, 85 bp, synthetic construct
  misc_feature 1..85: note = engineered ribonucleic acid scaffold (ERS) sequence
  source 1..85: mol_type = other DNA
actggcgcttctatctgattactctgagagccatcaccagcgactatgtcgtagtgggtaaagctctcttcggagagcatcagag

SEQ ID NO: 4252 - DNA, 85 bp, synthetic construct
  misc_feature 1..85: note = engineered ribonucleic acid scaffold (ERS) sequence
  source 1..85: mol_type = other DNA
actggctcttctatctgattactctgagcgccatcaccagcgactatgtcgtagtgggtaaagctctcttcggagagcatcagag

SEQ ID NO: 4253 - DNA, 85 bp, synthetic construct
  misc_feature 1..85: note = engineered ribonucleic acid scaffold (ERS) sequence
  source 1..85: mol_type = other DNA
actggctcttctatctgattactctgagggccatcaccagcgactatgtcgtagtgggtaaagctctcttcggagagcatcagag

SEQ ID NO: 4254 - DNA, 85 bp, synthetic construct
  misc_feature 1..85: note = engineered ribonucleic acid scaffold (ERS) sequence
  source 1..85: mol_type = other DNA
actggctcttctatctgattactctgagtgccatcaccagcgactatgtcgtagtgggtaaagctctcttcggagagcatcagag

SEQ ID NO: 4255 - DNA, 85 bp, synthetic construct
  misc_feature 1..85: note = engineered ribonucleic acid scaffold (ERS) sequence
  source 1..85: mol_type = other DNA
actggctcttctatctgattactctgagagccatcaccagcgactatgtcgtagtgggtaaagctctcttcggagagcatcagag

SEQ ID NO: 4256 - DNA, 85 bp, synthetic construct
  misc_feature 1..85: note = engineered ribonucleic acid scaffold (ERS) sequence
  source 1..85: mol_type = other DNA
actggcggttctatctgattactctgagcgccatcaccagcgactatgtcgtagtgggtaaagctctcttcggagagcatcagag

SEQ ID NO: 4257 - DNA, 85 bp, synthetic construct
  misc_feature 1..85: note = engineered ribonucleic acid scaffold (ERS) sequence
  source 1..85: mol_type = other DNA
actggcggttctatctgattactctgagagccatcaccagcgactatgtcgtagtgggtaaagctctcttcggagagcatcagag

SEQ ID NO: 4258 - DNA, 76 bp, synthetic construct
  misc_feature 1..76: note = engineered ribonucleic acid scaffold (ERS) sequence
  source 1..76: mol_type = other DNA
acacacggttctatctgattactctgccgtgttcaccagcgactatgtcgtagtgggtaaagctgcagcatcagag

SEQ ID NO: 4259 - DNA, 76 bp, synthetic construct
  misc_feature 1..76: note = engineered ribonucleic acid scaffold (ERS) sequence
  source 1..76: mol_type = other DNA
acactggtttctatctgattactctgaccagttcaccagcgactatgtcgtagtgggtaaagctgcagcatcagag

SEQ ID NO: 4260 - DNA, 76 bp, synthetic construct
  misc_feature 1..76: note = engineered ribonucleic acid scaffold (ERS) sequence
  source 1..76: mol_type = other DNA
acaggccgttctatctgattactctgcggccttcaccagcgactatgtcgtagtgggtaaagctgcagcatcagag

SEQ ID NO: 4261 - DNA, 76 bp, synthetic construct
  misc_feature 1..76: note = engineered ribonucleic acid scaffold (ERS) sequence
  source 1..76: mol_type = other DNA
acaggtccttctatctgattactctgggaccttcaccagcgactatgtcgtagtgggtaaagctgcagcatcagag

SEQ ID NO: 4262 - DNA, 76 bp, synthetic construct
  misc_feature 1..76: note = engineered ribonucleic acid scaffold (ERS) sequence
  source 1..76: mol_type = other DNA
accagcaattctatctgattactctgttgctgtcaccagcgactatgtcgtagtgggtaaagctgcagcatcagag

SEQ ID NO: 4263 - DNA, 76 bp, synthetic construct
  misc_feature 1..76: note = engineered ribonucleic acid scaffold (ERS) sequence
  source 1..76: mol_type = other DNA
accgagacttctatctgattactctgggctcgtcaccagcgactatgtcgtagtgggtaaagctgcagcatcagag

SEQ ID NO: 4264 - DNA, 76 bp, synthetic construct
  misc_feature 1..76: note = engineered ribonucleic acid scaffold (ERS) sequence
  source 1..76: mol_type = other DNA
acctgtagttctatctgattactctgctacagtcaccagcgactatgtcgtagtgggtaaagctgcagcatcagag

SEQ ID NO: 4265 - DNA, 76 bp, synthetic construct
  misc_feature 1..76: note = engineered ribonucleic acid scaffold (ERS) sequence
  source 1..76: mol_type = other DNA
acgagcacttctatctgattactctggggctctcaccagcgactatgtcgtagtgggtaaagctgcagcatcagag

SEQ ID NO: 4266 - DNA, 76 bp, synthetic construct
  misc_feature 1..76: note = engineered ribonucleic acid scaffold (ERS) sequence
  source 1..76: mol_type = other DNA
acgaggtgttctatctgattactctgcacctctcaccagcgactatgtcgtagtgggtaaagctgcagcatcagag

SEQ ID NO: 4267 - DNA, 76 bp, synthetic construct
  misc_feature 1..76: note = engineered ribonucleic acid scaffold (ERS) sequence
  source 1..76: mol_type = other DNA
acgggactttctatctgattactctgagtccctcaccagcgactatgtcgtagtgggtaaagctgcagcatcagag

SEQ ID NO: 4268 - DNA, 76 bp, synthetic construct
  misc_feature 1..76: note = engineered ribonucleic acid scaffold (ERS) sequence
  source 1..76: mol_type = other DNA
acgggcaattctatctgattactctgttgccctcaccagcgactatgtcgtagtgggtaaagctgcagcatcagag

SEQ ID NO: 4269 - DNA, 76 bp, synthetic construct
  misc_feature 1..76: note = engineered ribonucleic acid scaffold (ERS) sequence
  source 1..76: mol_type = other DNA
actgtgcgttctatctgattactctgcgcacatcaccagcgactatgtcgtagtgggtaaagctgcagcatcagag

SEQ ID NO: 4270 - DNA, 77 bp, synthetic construct
  misc_feature 1..77: note = engineered ribonucleic acid scaffold (ERS) sequence
  source 1..77: mol_type = other DNA
actggcgcttctatctgattactctgggcgccatcaccagcgactatgtcgtagtgggtaaagctgcagcatcagag

SEQ ID NO: 4271 - DNA, 77 bp, synthetic construct
  misc_feature 1..77: note = engineered ribonucleic acid scaffold (ERS) sequence
  source 1..77: mol_type = other DNA
actggcgcttctatctgattactctgggagccatcaccagcgactatgtcgtagtgggtaaagctgcagcatcagag

SEQ ID NO: 4272 - DNA, 77 bp, synthetic construct
  misc_feature 1..77: note = engineered ribonucleic acid scaffold (ERS) sequence
  source 1..77: mol_type = other DNA
actggcgcttctatctgattactctgtgagccatcaccagcgactatgtcgtagtgggtaaagctgcagcatcagag

SEQ ID NO: 4273 - DNA, 78 bp, synthetic construct
  misc_feature 1..78: note = engineered ribonucleic acid scaffold (ERS) sequence
  source 1..78: mol_type = other DNA
actggcgcttctatctgattactctgaggagccatcaccagcgactatgtcgtagtgggtaaagctgcagcatcagag

SEQ ID NO: 4274 - DNA, 77 bp, synthetic construct
  misc_feature 1..77: note = engineered ribonucleic acid scaffold (ERS) sequence
  source 1..77: mol_type = other DNA
actggcgcttctatctgattactctgatagccatcaccagcgactatgtcgtagtgggtaaagctgcagcatcagag

SEQ ID NO: 4275 - DNA, 78 bp, synthetic construct
  misc_feature 1..78: note = engineered ribonucleic acid scaffold (ERS) sequence
  source 1..78: mol_type = other DNA
actggcgcttctatctgattactctgagctgccatcaccagcgactatgtcgtagtgggtaaagctgcagcatcagag

SEQ ID NO: 4276 - DNA, 78 bp, synthetic construct
  misc_feature 1..78: note = engineered ribonucleic acid scaffold (ERS) sequence
  source 1..78: mol_type = other DNA
actggcacttctatctgattactctgagtagccatcaccagcgactatgtcgtagtgggtaaagctgcagcatcagag

SEQ ID NO: 4277 - DNA, 78 bp, synthetic construct
  misc_feature 1..78: note = engineered ribonucleic acid scaffold (ERS) sequence
  source 1..78: mol_type = other DNA
actggcgcttctatctgattactctgagtagccatcaccagcgactatgtcgtagtgggtaaagctgcagcatcagag

SEQ ID NO: 4278 - DNA, 77 bp, synthetic construct
  misc_feature 1..77: note = engineered ribonucleic acid scaffold (ERS) sequence
  source 1..77: mol_type = other DNA
actggcgcttctatctgattactctgagcaccatcaccagcgactatgtcgtagtgggtaaagctgcagcatcagag

SEQ ID NO: 4279 - DNA, 77 bp, synthetic construct
  misc_feature 1..77: note = engineered ribonucleic acid scaffold (ERS) sequence
  source 1..77: mol_type = other DNA
actggcacttctatctgattactctgagcgccatcaccagcgactatgtcgtagtgggtaaagctgcagcatcagag

SEQ ID NO: 4280 - DNA, 77 bp, synthetic construct
  misc_feature 1..77: note = engineered ribonucleic acid scaffold (ERS) sequence
  source 1..77: mol_type = other DNA
actggcgcttctatctgattactctgagggccatcaccagcgactatgtcgtagtgggtaaagctgcagcatcagag

SEQ ID NO: 4281 - DNA, 77 bp, synthetic construct
  misc_feature 1..77: note = engineered ribonucleic acid scaffold (ERS) sequence
  source 1..77: mol_type = other DNA
actggcgcttctatctgattactctgagtgccgtcaccagcgactatgtcgtagtgggtaaagctgcagcatcagag

SEQ ID NO: 4282 - DNA, 77 bp, synthetic construct
  misc_feature 1..77: note = engineered ribonucleic acid scaffold (ERS) sequence
  source 1..77: mol_type = other DNA
actggcacttctatctgattactctgagtgccatcaccagcgactatgtcgtagtgggtaaagctgcagcatcagag

SEQ ID NO: 4283 - DNA, 77 bp, synthetic construct
  misc_feature 1..77: note = engineered ribonucleic acid scaffold (ERS) sequence
  source 1..77: mol_type = other DNA
actggcgcttctatctgattactctgagaaccatcaccagcgactatgtcgtagtgggtaaagctgcagcatcagag

SEQ ID NO: 4284 - DNA, 77 bp, synthetic construct
  misc_feature 1..77: note = engineered ribonucleic acid scaffold (ERS) sequence
  source 1..77: mol_type = other DNA
actggcgcttctatctgattactctgagagccgtcaccagcgactatgtcgtagtgggtaaagctgcagcatcagag

SEQ ID NO: 4285 - DNA, 77 bp, synthetic construct
  misc_feature 1..77: note = engineered ribonucleic acid scaffold (ERS) sequence
  source 1..77: mol_type = other DNA
actggcgcttctatctgattactctgagagccttcaccagcgactatgtcgtagtgggtaaagctgcagcatcagag

SEQ ID NO: 4286 - DNA, 77 bp, synthetic construct
  misc_feature 1..77: note = engineered ribonucleic acid scaffold (ERS) sequence
  source 1..77: mol_type = other DNA
actggggcttctatctgattactctgagacccatcaccagcgactatgtcgtagtgggtaaagctgcagcatcagag

SEQ ID NO: 4287 - DNA, 77 bp, synthetic construct
  misc_feature 1..77: note = engineered ribonucleic acid scaffold (ERS) sequence
  source 1..77: mol_type = other DNA
actggtgcttctatctgattactctgagagccatcaccagcgactatgtcgtagtgggtaaagctgcagcatcagag

SEQ ID NO: 4288 - DNA, 77 bp, synthetic construct
  misc_feature 1..77: note = engineered ribonucleic acid scaffold (ERS) sequence
  source 1..77: mol_type = other DNA
actgggccttctatctgattactctgaggcccatcaccagcgactatgtcgtagtgggtaaagctgcagcatcagag

SEQ ID NO: 4289 - DNA, 78 bp, synthetic construct
  misc_feature 1..78: note = engineered ribonucleic acid scaffold (ERS) sequence
  source 1..78: mol_type = other DNA
actggcccttctatctgattactctgaggagccatcaccagcgactatgtcgtagtgggtaaagctgcagcatcagag

SEQ ID NO: 4290 - DNA, 77 bp, synthetic construct
  misc_feature 1..77: note = engineered ribonucleic acid scaffold (ERS) sequence
  source 1..77: mol_type = other DNA
actggcccttctatctgattactctgagggccatcaccagcgactatgtcgtagtgggtaaagctgcagcatcagag

SEQ ID NO: 4291 - DNA, 77 bp, synthetic construct
  misc_feature 1..77: note = engineered ribonucleic acid scaffold (ERS) sequence
  source 1..77: mol_type = other DNA
actggcccttctatctgattactctgagtgccatcaccagcgactatgtcgtagtgggtaaagctgcagcatcagag

SEQ ID NO: 4292 - DNA, 77 bp, synthetic construct
  misc_feature 1..77: note = engineered ribonucleic acid scaffold (ERS) sequence
  source 1..77: mol_type = other DNA
actggcccttctatctgattactctgagagccatcaccagcgactatgtcgtagtgggtaaagctgcagcatcagag

SEQ ID NO: 4293 - DNA, 78 bp, synthetic construct
  misc_feature 1..78: note = engineered ribonucleic acid scaffold (ERS) sequence
  source 1..78: mol_type = other DNA
actggcgcttctatctgattactctgagcagccatcaccagcgactatgtcgtagtgggtaaagctgcagcatcagag

SEQ ID NO: 4294 - DNA, 77 bp, synthetic construct; identical to SEQ ID NO: 729
  misc_feature 1..77: note = engineered ribonucleic acid scaffold (ERS) sequence
  source 1..77: mol_type = other DNA

SEQ ID NO: 4295 - DNA, 77 bp, synthetic construct
  misc_feature 1..77: note = engineered ribonucleic acid scaffold (ERS) sequence
  source 1..77: mol_type = other DNA
actggcgcttctatctgattactctgagtgccatcaccagcgactatgtcgtagtgggtaaagctgcagcatcagag

SEQ ID NO: 4296 - DNA, 77 bp, synthetic construct
  misc_feature 1..77: note = engineered ribonucleic acid scaffold (ERS) sequence
  source 1..77: mol_type = other DNA
actggcgcttctatctgattactctgagagccatcaccagcgactatgtcgtagtgggtaaagctgcagcatcagag

SEQ ID NO: 4297 - DNA, 77 bp, synthetic construct
  misc_feature 1..77: note = engineered ribonucleic acid scaffold (ERS) sequence
  source 1..77: mol_type = other DNA
actggctcttctatctgattactctgagcgccatcaccagcgactatgtcgtagtgggtaaagctgcagcatcagag

SEQ ID NO: 4298 - DNA, 77 bp, synthetic construct
  misc_feature 1..77: note = engineered ribonucleic acid scaffold (ERS) sequence
  source 1..77: mol_type = other DNA
actggctcttctatctgattactctgagggccatcaccagcgactatgtcgtagtgggtaaagctgcagcatcagag

SEQ ID NO: 4299 - DNA, 77 bp, synthetic construct
  misc_feature 1..77: note = engineered ribonucleic acid scaffold (ERS) sequence
  source 1..77: mol_type = other DNA
actggctcttctatctgattactctgagtgccatcaccagcgactatgtcgtagtgggtaaagctgcagcatcagag

SEQ ID NO: 4300 - DNA, 77 bp, synthetic construct
  misc_feature 1..77: note = engineered ribonucleic acid scaffold (ERS) sequence
  source 1..77: mol_type = other DNA
actggctcttctatctgattactctgagagccatcaccagcgactatgtcgtagtgggtaaagctgcagcatcagag

SEQ ID NO: 4301 - DNA, 77 bp, synthetic construct
  misc_feature 1..77: note = engineered ribonucleic acid scaffold (ERS) sequence
  source 1..77: mol_type = other DNA
actggcggttctatctgattactctgagcgccatcaccagcgactatgtcgtagtgggtaaagctgcagcatcagag

SEQ ID NO: 4302 - DNA, 77 bp, synthetic construct
  misc_feature 1..77: note = engineered ribonucleic acid scaffold (ERS) sequence
  source 1..77: mol_type = other DNA
actggcggttctatctgattactctgagagccatcaccagcgactatgtcgtagtgggtaaagctgcagcatcagag

SEQ ID NO: 4303 - DNA, 82 bp, synthetic construct
  misc_feature 1..82: note = engineered ribonucleic acid scaffold (ERS) sequence
  source 1..82: mol_type = other DNA
acacacggttctatctgattactctgccgtgttcaccagcgactatgtcgtagtgggtaaagctgcttcggcagcatcagag

SEQ ID NO: 4304 - DNA, 82 bp, synthetic construct
  misc_feature 1..82: note = engineered ribonucleic acid scaffold (ERS) sequence
  source 1..82: mol_type = other DNA
acactggtttctatctgattactctgaccagttcaccagcgactatgtcgtagtgggtaaagctgcttcggcagcatcagag

SEQ ID NO: 4305 - DNA, 82 bp, synthetic construct
  misc_feature 1..82: note = engineered ribonucleic acid scaffold (ERS) sequence
  source 1..82: mol_type = other DNA
acaggccgttctatctgattactctgcggccttcaccagcgactatgtcgtagtgggtaaagctgcttcggcagcatcagag

SEQ ID NO: 4306 - DNA, 82 bp, synthetic construct
  misc_feature 1..82: note = engineered ribonucleic acid scaffold (ERS) sequence
  source 1..82: mol_type = other DNA
acaggtccttctatctgattactctgggaccttcaccagcgactatgtcgtagtgggtaaagctgcttcggcagcatcagag

SEQ ID NO: 4307 - DNA, 82 bp, synthetic construct
  misc_feature 1..82: note = engineered ribonucleic acid scaffold (ERS) sequence
  source 1..82: mol_type = other DNA
accagcaattctatctgattactctgttgctgtcaccagcgactatgtcgtagtgggtaaagctgcttcggcagcatcagag

SEQ ID NO: 4308 - DNA, 82 bp, synthetic construct
  misc_feature 1..82: note = engineered ribonucleic acid scaffold (ERS) sequence
  source 1..82: mol_type = other DNA
accgagacttctatctgattactctgggctcgtcaccagcgactatgtcgtagtgggtaaagctgcttcggcagcatcagag

SEQ ID NO: 4309 - DNA, 82 bp, synthetic construct
  misc_feature 1..82: note = engineered ribonucleic acid scaffold (ERS) sequence
  source 1..82: mol_type = other DNA
acctgtagttctatctgattactctgctacagtcaccagcgactatgtcgtagtgggtaaagctgcttcggcagcatcagag

SEQ ID NO: 4310 - DNA, 82 bp, synthetic construct
  misc_feature 1..82: note = engineered ribonucleic acid scaffold (ERS) sequence
  source 1..82: mol_type = other DNA
acgagcacttctatctgattactctggggctctcaccagcgactatgtcgtagtgggtaaagctgcttcggcagcatcagag

SEQ ID NO: 4311 - DNA, 82 bp, synthetic construct
  misc_feature 1..82: note = engineered ribonucleic acid scaffold (ERS) sequence
  source 1..82: mol_type = other DNA
acgaggtgttctatctgattactctgcacctctcaccagcgactatgtcgtagtgggtaaagctgcttcggcagcatcagag

SEQ ID NO: 4312 - DNA, 82 bp, synthetic construct
  misc_feature 1..82: note = engineered ribonucleic acid scaffold (ERS) sequence
  source 1..82: mol_type = other DNA
acgggactttctatctgattactctgagtccctcaccagcgactatgtcgtagtgggtaaagctgcttcggcagcatcagag

SEQ ID NO: 4313 - DNA, 82 bp, synthetic construct
  misc_feature 1..82: note = engineered ribonucleic acid scaffold (ERS) sequence
  source 1..82: mol_type = other DNA
acgggcaattctatctgattactctgttgccctcaccagcgactatgtcgtagtgggtaaagctgcttcggcagcatcagag

SEQ ID NO: 4314 - DNA, 82 bp, synthetic construct
  misc_feature 1..82: note = engineered ribonucleic acid scaffold (ERS) sequence
  source 1..82: mol_type = other DNA
actgtgcgttctatctgattactctgcgcacatcaccagcgactatgtcgtagtgggtaaagctgcttcggcagcatcagag

SEQ ID NO: 4315 - DNA, 83 bp, synthetic construct
  misc_feature 1..83: note = engineered ribonucleic acid scaffold (ERS) sequence
  source 1..83: mol_type = other DNA
actggcgcttctatctgattactctgggcgccatcaccagcgactatgtcgtagtgggtaaagctgcttcggcagcatcagag

SEQ ID NO: 4316 - DNA, 83 bp, synthetic construct
  misc_feature 1..83: note = engineered ribonucleic acid scaffold (ERS) sequence
  source 1..83: mol_type = other DNA
actggcgcttctatctgattactctgggagccatcaccagcgactatgtcgtagtgggtaaagctgcttcggcagcatcagag

SEQ ID NO: 4317 - DNA, 83 bp, synthetic construct
  misc_feature 1..83: note = engineered ribonucleic acid scaffold (ERS) sequence
  source 1..83: mol_type = other DNA
actggcgcttctatctgattactctgtgagccatcaccagcgactatgtcgtagtgggtaaagctgcttcggcagcatcagag

SEQ ID NO: 4318 - DNA, 84 bp, synthetic construct
  misc_feature 1..84: note = engineered ribonucleic acid scaffold (ERS) sequence
  source 1..84: mol_type = other DNA
actggcgcttctatctgattactctgaggagccatcaccagcgactatgtcgtagtgggtaaagctgcttcggcagcatcagag

SEQ ID NO: 4319 - DNA, 83 bp, synthetic construct
  misc_feature 1..83: note = engineered ribonucleic acid scaffold (ERS) sequence
  source 1..83: mol_type = other DNA
actggcgcttctatctgattactctgatagccatcaccagcgactatgtcgtagtgggtaaagctgcttcggcagcatcagag

SEQ ID NO: 4320 - DNA, 84 bp, synthetic construct
  misc_feature 1..84: note = engineered ribonucleic acid scaffold (ERS) sequence
  source 1..84: mol_type = other DNA
actggcgcttctatctgattactctgagctgccatcaccagcgactatgtcgtagtgggtaaagctgcttcggcagcatcagag

SEQ ID NO: 4321 - DNA, 84 bp, synthetic construct
  misc_feature 1..84: note = engineered ribonucleic acid scaffold (ERS) sequence
  source 1..84: mol_type = other DNA
actggcacttctatctgattactctgagtagccatcaccagcgactatgtcgtagtgggtaaagctgcttcggcagcatcagag

SEQ ID NO: 4322 - DNA, 84 bp, synthetic construct
  misc_feature 1..84: note = engineered ribonucleic acid scaffold (ERS) sequence
  source 1..84: mol_type = other DNA
actggcgcttctatctgattactctgagtagccatcaccagcgactatgtcgtagtgggtaaagctgcttcggcagcatcagag

SEQ ID NO: 4323 - DNA, 83 bp, synthetic construct
  misc_feature 1..83: note = engineered ribonucleic acid scaffold (ERS) sequence
  source 1..83: mol_type = other DNA
actggcgcttctatctgattactctgagcaccatcaccagcgactatgtcgtagtgggtaaagctgcttcggcagcatcagag

SEQ ID NO: 4324 - DNA, 83 bp, synthetic construct
  misc_feature 1..83: note = engineered ribonucleic acid scaffold (ERS) sequence
  source 1..83: mol_type = other DNA
actggcacttctatctgattactctgagcgccatcaccagcgactatgtcgtagtgggtaaagctgcttcggcagcatcagag

SEQ ID NO: 4325 - DNA, 83 bp, synthetic construct
  misc_feature 1..83: note = engineered ribonucleic acid scaffold (ERS) sequence
  source 1..83: mol_type = other DNA
actggcgcttctatctgattactctgagggccatcaccagcgactatgtcgtagtgggtaaagctgcttcggcagcatcagag

SEQ ID NO: 4326 - DNA, 83 bp, synthetic construct
  misc_feature 1..83: note = engineered ribonucleic acid scaffold (ERS) sequence
  source 1..83: mol_type = other DNA
actggcgcttctatctgattactctgagtgccgtcaccagcgactatgtcgtagtgggtaaagctgcttcggcagcatcagag

SEQ ID NO: 4327 - DNA, 83 bp, synthetic construct
  misc_feature 1..83: note = engineered ribonucleic acid scaffold (ERS) sequence
  source 1..83: mol_type = other DNA
actggcacttctatctgattactctgagtgccatcaccagcgactatgtcgtagtgggtaaagctgcttcggcagcatcagag

SEQ ID NO: 4328 - DNA, 83 bp, synthetic construct
  misc_feature 1..83: note = engineered ribonucleic acid scaffold (ERS) sequence
  source 1..83: mol_type = other DNA
actggcgcttctatctgattactctgagaaccatcaccagcgactatgtcgtagtgggtaaagctgcttcggcagcatcagag

SEQ ID NO: 4329 - DNA, 83 bp, synthetic construct
  misc_feature 1..83: note = engineered ribonucleic acid scaffold (ERS) sequence
  source 1..83: mol_type = other DNA
actggcgcttctatctgattactctgagagccgtcaccagcgactatgtcgtagtgggtaaagctgcttcggcagcatcagag

SEQ ID NO: 4330 - DNA, 83 bp, synthetic construct
  misc_feature 1..83: note = engineered ribonucleic acid scaffold (ERS) sequence
  source 1..83: mol_type = other DNA
actggcgcttctatctgattactctgagagccttcaccagcgactatgtcgtagtgggtaaagctgcttcggcagcatcagag

SEQ ID NO: 4331 - DNA, 83 bp, synthetic construct
  misc_feature 1..83: note = engineered ribonucleic acid scaffold (ERS) sequence
  source 1..83: mol_type = other DNA
actggggcttctatctgattactctgagacccatcaccagcgactatgtcgtagtgggtaaagctgcttcggcagcatcagag

SEQ ID NO: 4332 - DNA, 83 bp, synthetic construct
  misc_feature 1..83: note = engineered ribonucleic acid scaffold (ERS) sequence
  source 1..83: mol_type = other DNA
actggtgcttctatctgattactctgagagccatcaccagcgactatgtcgtagtgggtaaagctgcttcggcagcatcagag

SEQ ID NO: 4333 - DNA, 83 bp, synthetic construct
  misc_feature 1..83: note = engineered ribonucleic acid scaffold (ERS) sequence
  source 1..83: mol_type = other DNA
actgggccttctatctgattactctgaggcccatcaccagcgactatgtcgtagtgggtaaagctgcttcggcagcatcagag

SEQ ID NO: 4334 - DNA, 84 bp, synthetic construct
  misc_feature 1..84: note = engineered ribonucleic acid scaffold (ERS) sequence
  source 1..84: mol_type = other DNA
actggcccttctatctgattactctgaggagccatcaccagcgactatgtcgtagtgggtaaagctgcttcggcagcatcagag

SEQ ID NO: 4335 - DNA, 83 bp, synthetic construct
  misc_feature 1..83: note = engineered ribonucleic acid scaffold (ERS) sequence
  source 1..83: mol_type = other DNA
actggcccttctatctgattactctgagggccatcaccagcgactatgtcgtagtgggtaaagctgcttcggcagcatcagag

SEQ ID NO: 4336 - DNA, 83 bp, synthetic construct
  misc_feature 1..83: note = engineered ribonucleic acid scaffold (ERS) sequence
  source 1..83: mol_type = other DNA
actggcccttctatctgattactctgagtgccatcaccagcgactatgtcgtagtgggtaaagctgcttcggcagcatcagag

SEQ ID NO: 4337 - DNA, 83 bp, synthetic construct
  misc_feature 1..83: note = engineered ribonucleic acid scaffold (ERS) sequence
  source 1..83: mol_type = other DNA
actggcccttctatctgattactctgagagccatcaccagcgactatgtcgtagtgggtaaagctgcttcggcagcatcagag

SEQ ID NO: 4338 - DNA, 84 bp, synthetic construct
  misc_feature 1..84: note = engineered ribonucleic acid scaffold (ERS) sequence
  source 1..84: mol_type = other DNA
actggcgcttctatctgattactctgagcagccatcaccagcgactatgtcgtagtgggtaaagctgcttcggcagcatcagag

SEQ ID NO: 4339 - DNA, 83 bp, synthetic construct; identical to SEQ ID NO: 728
  misc_feature 1..83: note = engineered ribonucleic acid scaffold (ERS) sequence
  source 1..83: mol_type = other DNA

SEQ ID NO: 4340 - DNA, 83 bp, synthetic construct
  misc_feature 1..83: note = engineered ribonucleic acid scaffold (ERS) sequence
  source 1..83: mol_type = other DNA
actggcgcttctatctgattactctgagtgccatcaccagcgactatgtcgtagtgggtaaagctgcttcggcagcatcagag

SEQ ID NO: 4341 - DNA, 83 bp, synthetic construct
  misc_feature 1..83: note = engineered ribonucleic acid scaffold (ERS) sequence
  source 1..83: mol_type = other DNA
actggcgcttctatctgattactctgagagccatcaccagcgactatgtcgtagtgggtaaagctgcttcggcagcatcagag

SEQ ID NO: 4342 - DNA, 83 bp, synthetic construct
  misc_feature 1..83: note = engineered ribonucleic acid scaffold (ERS) sequence
  source 1..83: mol_type = other DNA
actggctcttctatctgattactctgagcgccatcaccagcgactatgtcgtagtgggtaaagctgcttcggcagcatcagag

SEQ ID NO: 4343 - DNA, 83 bp, synthetic construct
  misc_feature 1..83: note = engineered ribonucleic acid scaffold (ERS) sequence
  source 1..83: mol_type = other DNA
actggctcttctatctgattactctgagggccatcaccagcgactatgtcgtagtgggtaaagctgcttcggcagcatcagag

SEQ ID NO: 4344 - DNA, 83 bp, synthetic construct
  misc_feature 1..83: note = engineered ribonucleic acid scaffold (ERS) sequence
  source 1..83: mol_type = other DNA
actggctcttctatctgattactctgagtgccatcaccagcgactatgtcgtagtgggtaaagctgcttcggcagcatcagag

SEQ ID NO: 4345 - DNA, 83 bp, synthetic construct
  misc_feature 1..83: note = engineered ribonucleic acid scaffold (ERS) sequence
  source 1..83: mol_type = other DNA
actggctcttctatctgattactctgagagccatcaccagcgactatgtcgtagtgggtaaagctgcttcggcagcatcagag

SEQ ID NO: 4346 - DNA, 83 bp, synthetic construct
  misc_feature 1..83: note = engineered ribonucleic acid scaffold (ERS) sequence
  source 1..83: mol_type = other DNA
actggcggttctatctgattactctgagcgccatcaccagcgactatgtcgtagtgggtaaagctgcttcggcagcatcagag

SEQ ID NO: 4347 - DNA, 83 bp, synthetic construct
  misc_feature 1..83: note = engineered ribonucleic acid scaffold (ERS) sequence
  source 1..83: mol_type = other DNA
actggcggttctatctgattactctgagagccatcaccagcgactatgtcgtagtgggtaaagctgcttcggcagcatcagag

SEQ ID NO: 4348 - DNA, 88 bp, synthetic construct
  misc_feature 1..88: note = engineered ribonucleic acid scaffold (ERS) sequence
  source 1..88: mol_type = other DNA
acacacggttctatctgattactctgccgtgttcaccagcgactatgtcgtagtgggtaaaggtccctcttcggagggaacatcagag

SEQ ID NO: 4349 - DNA, 88 bp, synthetic construct
  misc_feature 1..88: note = engineered ribonucleic acid scaffold (ERS) sequence
  source 1..88: mol_type = other DNA
acactggtttctatctgattactctgaccagttcaccagcgactatgtcgtagtgggtaaaggtccctcttcggagggaacatcagag

SEQ ID NO: 4350 - DNA, 88 bp, synthetic construct
  misc_feature 1..88: note = engineered ribonucleic acid scaffold (ERS) sequence
  source 1..88: mol_type = other DNA
acaggccgttctatctgattactctgcggccttcaccagcgactatgtcgtagtgggtaaaggtccctcttcggagggaacatcagag

SEQ ID NO: 4351 - DNA, 88 bp, synthetic construct
  misc_feature 1..88: note = engineered ribonucleic acid scaffold (ERS) sequence
  source 1..88: mol_type = other DNA
acaggtccttctatctgattactctgggaccttcaccagcgactatgtcgtagtgggtaaaggtccctcttcggagggaacatcagag

SEQ ID NO: 4352 - DNA, 88 bp, synthetic construct
  misc_feature 1..88: note = engineered ribonucleic acid scaffold (ERS) sequence
  source 1..88: mol_type = other DNA
accagcaattctatctgattactctgttgctgtcaccagcgactatgtcgtagtgggtaaaggtccctcttcggagggaacatcagag

SEQ ID NO: 4353 - DNA, 88 bp, synthetic construct
  misc_feature 1..88: note = engineered ribonucleic acid scaffold (ERS) sequence
  source 1..88: mol_type = other DNA
accgagacttctatctgattactctgggctcgtcaccagcgactatgtcgtagtgggtaaaggtccctcttcggagggaacatcagag

SEQ ID NO: 4354 - DNA, 88 bp, synthetic construct
  misc_feature 1..88: note = engineered ribonucleic acid scaffold (ERS) sequence
  source 1..88: mol_type = other DNA
acctgtagttctatctgattactctgctacagtcaccagcgactatgtcgtagtgggtaaaggtccctcttcggagggaacatcagag

SEQ ID NO: 4355 - DNA, 88 bp, synthetic construct
  misc_feature 1..88: note = engineered ribonucleic acid scaffold (ERS) sequence
  source 1..88: mol_type = other DNA
acgagcacttctatctgattactctggggctctcaccagcgactatgtcgtagtgggtaaaggtccctcttcggagggaacatcagag

SEQ ID NO: 4356 - DNA, 88 bp, synthetic construct
  misc_feature 1..88: note = engineered ribonucleic acid scaffold (ERS) sequence
  source 1..88: mol_type = other DNA
acgaggtgttctatctgattactctgcacctctcaccagcgactatgtcgtagtgggtaaaggtccctcttcggagggaacatcagag

SEQ ID NO: 4357 - DNA, 88 bp, synthetic construct
  misc_feature 1..88: note = engineered ribonucleic acid scaffold (ERS) sequence
  source 1..88: mol_type = other DNA
acgggactttctatctgattactctgagtccctcaccagcgactatgtcgtagtgggtaaaggtccctcttcggagggaacatcagag

SEQ ID NO: 4358 - DNA, 88 bp, synthetic construct
  misc_feature 1..88: note = engineered ribonucleic acid scaffold (ERS) sequence
  source 1..88: mol_type = other DNA
acgggcaattctatctgattactctgttgccctcaccagcgactatgtcgtagtgggtaaaggtccctcttcggagggaacatcagag

SEQ ID NO: 4359 - DNA, 88 bp, synthetic construct
  misc_feature 1..88: note = engineered ribonucleic acid scaffold (ERS) sequence
  source 1..88: mol_type = other DNA
actgtgcgttctatctgattactctgcgcacatcaccagcgactatgtcgtagtgggtaaaggtccctcttcggagggaacatcagag

SEQ ID NO: 4360 - DNA, 89 bp, synthetic construct
  misc_feature 1..89: note = engineered ribonucleic acid scaffold (ERS) sequence
  source 1..89: mol_type = other DNA
actggcgcttctatctgattactctgggcgccatcaccagcgactatgtcgtagtgggtaaaggtccctcttcggagggaacatcagag

SEQ ID NO: 4361 - DNA, 89 bp, synthetic construct
  misc_feature 1..89: note = engineered ribonucleic acid scaffold (ERS) sequence
  source 1..89: mol_type = other DNA
actggcgcttctatctgattactctgggagccatcaccagcgactatgtcgtagtgggtaaaggtccctcttcggagggaacatcagag

SEQ ID NO: 4362 - DNA, 89 bp, synthetic construct
  misc_feature 1..89: note = engineered ribonucleic acid scaffold (ERS) sequence
  source 1..89: mol_type = other DNA
actggcgcttctatctgattactctgtgagccatcaccagcgactatgtcgtagtgggtaaaggtccctcttcggagggaacatcagag

SEQ ID NO: 4363 - DNA, 90 bp, synthetic construct
  misc_feature 1..90: note = engineered ribonucleic acid scaffold (ERS) sequence
  source 1..90: mol_type = other DNA
actggcgcttctatctgattactctgaggagccatcaccagcgactatgtcgtagtgggtaaaggtccctcttcggagggaacatcagag

SEQ ID NO: 4364 - DNA, 89 bp, synthetic construct
  misc_feature 1..89: note = engineered ribonucleic acid scaffold (ERS) sequence
  source 1..89: mol_type = other DNA
actggcgcttctatctgattactctgatagccatcaccagcgactatgtcgtagtgggtaaaggtccctcttcggagggaacatcagag

SEQ ID NO: 4365 - DNA, 90 bp, synthetic construct
  misc_feature 1..90: note = engineered ribonucleic acid scaffold (ERS) sequence
  source 1..90: mol_type = other DNA
actggcgcttctatctgattactctgagctgccatcaccagcgactatgtcgtagtgggtaaaggtccctcttcggagggaacatcagag

SEQ ID NO: 4366 - DNA, 90 bp, synthetic construct
  misc_feature 1..90: note = engineered ribonucleic acid scaffold (ERS) sequence
  source 1..90: mol_type = other DNA
actggcacttctatctgattactctgagtagccatcaccagcgactatgtcgtagtgggtaaaggtccctcttcggagggaacatcagag

SEQ ID NO: 4367 - DNA, 90 bp, synthetic construct
  misc_feature 1..90: note = engineered ribonucleic acid scaffold (ERS) sequence
  source 1..90: mol_type = other DNA
actggcgcttctatctgattactctgagtagccatcaccagcgactatgtcgtagtgggtaaaggtccctcttcggagggaacatcagag

SEQ ID NO: 4368 - DNA, 89 bp, synthetic construct
  misc_feature 1..89: note = engineered ribonucleic acid scaffold (ERS) sequence
  source 1..89: mol_type = other DNA
actggcgcttctatctgattactctgagcaccatcaccagcgactatgtcgtagtgggtaaaggtccctcttcggagggaacatcagag

SEQ ID NO: 4369 - DNA, 89 bp, synthetic construct
  misc_feature 1..89: note = engineered ribonucleic acid scaffold (ERS) sequence
  source 1..89: mol_type = other DNA
actggcacttctatctgattactctgagcgccatcaccagcgactatgtcgtagtgggtaaaggtccctcttcggagggaacatcagag

SEQ ID NO: 4370 - DNA, 89 bp, synthetic construct
  misc_feature 1..89: note = engineered ribonucleic acid scaffold (ERS) sequence
  source 1..89: mol_type = other DNA
actggcgcttctatctgattactctgagggccatcaccagcgactatgtcgtagtgggtaaaggtccctcttcggagggaacatcagag

SEQ ID NO: 4371 - DNA, 89 bp, synthetic construct
  misc_feature 1..89: note = engineered ribonucleic acid scaffold (ERS) sequence
  source 1..89: mol_type = other DNA
actggcgcttctatctgattactctgagtgccgtcaccagcgactatgtcgtagtgggtaaaggtccctcttcggagggaacatcagag

SEQ ID NO: 4372 - DNA, 89 bp, synthetic construct
  misc_feature 1..89: note = engineered ribonucleic acid scaffold (ERS) sequence
  source 1..89: mol_type = other DNA
actggcacttctatctgattactctgagtgccatcaccagcgactatgtcgtagtgggtaaaggtccctcttcggagggaacatcagag

SEQ ID NO: 4373 - DNA, 89 bp, synthetic construct
  misc_feature 1..89: note = engineered ribonucleic acid scaffold (ERS) sequence
  source 1..89: mol_type = other DNA
actggcgcttctatctgattactctgagaaccatcaccagcgactatgtcgtagtgggtaaaggtccctcttcggagggaacatcagag

SEQ ID NO: 4374 - DNA, 89 bp, synthetic construct
  misc_feature 1..89: note = engineered ribonucleic acid scaffold (ERS) sequence
  source 1..89: mol_type = other DNA
actggcgcttctatctgattactctgagagccgtcaccagcgactatgtcgtagtgggtaaaggtccctcttcggagggaacatcagag

SEQ ID NO: 4375 - DNA, 89 bp, synthetic construct
  misc_feature 1..89: note = engineered ribonucleic acid scaffold (ERS) sequence
  source 1..89: mol_type = other DNA
actggcgcttctatctgattactctgagagccttcaccagcgactatgtcgtagtgggtaaaggtccctcttcggagggaacatcagag

SEQ ID NO: 4376 - DNA, 89 bp, synthetic construct
  misc_feature 1..89: note = engineered ribonucleic acid scaffold (ERS) sequence
  source 1..89: mol_type = other DNA
actggggcttctatctgattactctgagacccatcaccagcgactatgtcgtagtgggtaaaggtccctcttcggagggaacatcagag

SEQ ID NO: 4377 - DNA, 89 bp, synthetic construct
  misc_feature 1..89: note = engineered ribonucleic acid scaffold (ERS) sequence
  source 1..89: mol_type = other DNA
actggtgcttctatctgattactctgagagccatcaccagcgactatgtcgtagtgggtaaaggtccctcttcggagggaacatcagag

SEQ ID NO: 4378 - DNA, 89 bp, synthetic construct
  misc_feature 1..89: note = engineered ribonucleic acid scaffold (ERS) sequence
  source 1..89: mol_type = other DNA
actgggccttctatctgattactctgaggcccatcaccagcgactatgtcgtagtgggtaaaggtccctcttcggagggaacatcagag

SEQ ID NO: 4379 - DNA, 90 bp, synthetic construct
  misc_feature 1..90: note = engineered ribonucleic acid scaffold (ERS) sequence
  source 1..90: mol_type = other DNA
actggcccttctatctgattactctgaggagccatcaccagcgactatgtcgtagtgggtaaaggtccctcttcggagggaacatcagag

SEQ ID NO: 4380 - DNA, 89 bp, synthetic construct
  misc_feature 1..89: note = engineered ribonucleic acid scaffold (ERS) sequence
  source 1..89: mol_type = other DNA
actggcccttctatctgattactctgagggccatcaccagcgactatgtcgtagtgggtaaaggtccctcttcggagggaacatcagag

SEQ ID NO: 4381 - DNA, 89 bp, synthetic construct
  misc_feature 1..89: note = engineered ribonucleic acid scaffold (ERS) sequence
  source 1..89: mol_type = other DNA
actggcccttctatctgattactctgagtgccatcaccagcgactatgtcgtagtgggtaaaggtccctcttcggagggaacatcagag

SEQ ID NO: 4382 - DNA, 89 bp, synthetic construct
  misc_feature 1..89: note = engineered ribonucleic acid scaffold (ERS) sequence
  source 1..89: mol_type = other DNA
actggcccttctatctgattactctgagagccatcaccagcgactatgtcgtagtgggtaaaggtccctcttcggagggaacatcagag

SEQ ID NO: 4383 - DNA, 90 bp, synthetic construct
  misc_feature 1..90: note = engineered ribonucleic acid scaffold (ERS) sequence
  source 1..90: mol_type = other DNA
actggcgcttctatctgattactctgagcagccatcaccagcgactatgtcgtagtgggtaaaggtccctcttcggagggaacatcagag

SEQ ID NO: 4384 - DNA, 89 bp, synthetic construct; identical to SEQ ID NO: 733
  misc_feature 1..89: note = engineered ribonucleic acid scaffold (ERS) sequence
  source 1..89: mol_type = other DNA

SEQ ID NO: 4385 - DNA, 89 bp, synthetic construct
  misc_feature 1..89: note = engineered ribonucleic acid scaffold (ERS) sequence
  source 1..89: mol_type = other DNA
actggcgcttctatctgattactctgagtgccatcaccagcgactatgtcgtagtgggtaaaggtccctcttcggagggaacatcagag

SEQ ID NO: 4386 - DNA, 89 bp, synthetic construct
  misc_feature 1..89: note = engineered ribonucleic acid scaffold (ERS) sequence
  source 1..89: mol_type = other DNA
actggcgcttctatctgattactctgagagccatcaccagcgactatgtcgtagtgggtaaaggtccctcttcggagggaacatcagag

SEQ ID NO: 4387 - DNA, 89 bp, synthetic construct
  misc_feature 1..89: note = engineered ribonucleic acid scaffold (ERS) sequence
  source 1..89: mol_type = other DNA
actggctcttctatctgattactctgagcgccatcaccagcgactatgtcgtagtgggtaaaggtccctcttcggagggaacatcagag

SEQ ID NO: 4388 - DNA, 89 bp, synthetic construct
  misc_feature 1..89: note = engineered ribonucleic acid scaffold (ERS) sequence
  source 1..89: mol_type = other DNA
actggctcttctatctgattactctgagggccatcaccagcgactatgtcgtagtgggtaaaggtccctcttcggagggaacatcagag

SEQ ID NO: 4389 - DNA, 89 bp, synthetic construct
  misc_feature 1..89: note = engineered ribonucleic acid scaffold (ERS) sequence
  source 1..89: mol_type = other DNA
actggctcttctatctgattactctgagtgccatcaccagcgactatgtcgtagtgggtaaaggtccctcttcggagggaacatcagag

SEQ ID NO: 4390 - DNA, 89 bp, synthetic construct
  misc_feature 1..89: note = engineered ribonucleic acid scaffold (ERS) sequence
  source 1..89: mol_type = other DNA
actggctcttctatctgattactctgagagccatcaccagcgactatgtcgtagtgggtaaaggtccctcttcggagggaacatcagag

SEQ ID NO: 4391 - DNA, 89 bp, synthetic construct
  misc_feature 1..89: note = engineered ribonucleic acid scaffold (ERS) sequence
  source 1..89: mol_type = other DNA
actggcggttctatctgattactctgagcgccatcaccagcgactatgtcgtagtgggtaaaggtccctcttcggagggaacatcagag

SEQ ID NO: 4392 - DNA, 89 bp, synthetic construct
  misc_feature 1..89: note = engineered ribonucleic acid scaffold (ERS) sequence
  source 1..89: mol_type = other DNA
actggcggttctatctgattactctgagagccatcaccagcgactatgtcgtagtgggtaaaggtccctcttcggagggaacatcagag

SEQ ID NO: 4393 - DNA, 92 bp, synthetic construct
  misc_feature 1..92: note = engineered ribonucleic acid scaffold (ERS) sequence
  source 1..92: mol_type = other DNA
acacacggttctatctgattactctgccgtgttcaccagcgactatgtcgtagtgggtaaaggtgacggtcttcggaccgtcaccatcagag

SEQ ID NO: 4394 - DNA, 92 bp, synthetic construct
  misc_feature 1..92: note = engineered ribonucleic acid scaffold (ERS) sequence
  source 1..92: mol_type = other DNA
acactggtttctatctgattactctgaccagttcaccagcgactatgtcgtagtgggtaaaggtgacggtcttcggaccgtcaccatcagag

SEQ ID NO: 4395 - DNA, 92 bp, synthetic construct
  misc_feature 1..92: note = engineered ribonucleic acid scaffold (ERS) sequence
  source 1..92: mol_type = other DNA
acaggccgttctatctgattactctgcggccttcaccagcgactatgtcgtagtgggtaaaggtgacggtcttcggaccgtcaccatcagag

SEQ ID NO: 4396 - DNA, 92 bp, synthetic construct
  misc_feature 1..92: note = engineered ribonucleic acid scaffold (ERS) sequence
  source 1..92: mol_type = other DNA
acaggtccttctatctgattactctgggaccttcaccagcgactatgtcgtagtgggtaaaggtgacggtcttcggaccgtcaccatcagag

SEQ ID NO: 4397 - DNA, 92 bp, synthetic construct
  misc_feature 1..92: note = engineered ribonucleic acid scaffold (ERS) sequence
  source 1..92: mol_type = other DNA
accagcaattctatctgattactctgttgctgtcaccagcgactatgtcgtagtgggtaaaggtgacggtcttcggaccgtcaccatcagag

SEQ ID NO: 4398 - DNA, 92 bp, synthetic construct
  misc_feature 1..92: note = engineered ribonucleic acid scaffold (ERS) sequence
  source 1..92: mol_type = other DNA
accgagacttctatctgattactctgggctcgtcaccagcgactatgtcgtagtgggtaaaggtgacggtcttcggaccgtcaccatcagag

SEQ ID NO: 4399 - DNA, 92 bp, synthetic construct
  misc_feature 1..92: note = engineered ribonucleic acid scaffold (ERS) sequence
  source 1..92: mol_type = other DNA
acctgtagttctatctgattactctgctacagtcaccagcgactatgtcgtagtgggtaaaggtgacggtcttcggaccgtcaccatcagag

SEQ ID NO: 4400 - DNA, 92 bp, synthetic construct
  misc_feature 1..92: note = engineered ribonucleic acid scaffold (ERS) sequence
  source 1..92: mol_type = other DNA
acgagcacttctatctgattactctggggctctcaccagcgactatgtcgtagtgggtaaaggtgacggtcttcggaccgtcaccatcagag

SEQ ID NO: 4401 - DNA, 92 bp, synthetic construct
  misc_feature 1..92: note = engineered ribonucleic acid scaffold (ERS) sequence
  source 1..92: mol_type = other DNA
acgaggtgttctatctgattactctgcacctctcaccagcgactatgtcgtagtgggtaaaggtgacggtcttcggaccgtcaccatcagag

SEQ ID NO: 4402 - DNA, 92 bp, synthetic construct
  misc_feature 1..92: note = engineered ribonucleic acid scaffold (ERS) sequence
  source 1..92: mol_type = other DNA
acgggactttctatctgattactctgagtccctcaccagcgactatgtcgtagtgggtaaaggtgacggtcttcggaccgtcaccatcagag

SEQ ID NO: 4403 - DNA, 92 bp, synthetic construct
  misc_feature 1..92: note = engineered ribonucleic acid scaffold (ERS) sequence
  source 1..92: mol_type = other DNA
acgggcaattctatctgattactctgttgccctcaccagcgactatgtcgtagtgggtaaaggtgacggtcttcggaccgtcaccatcagag

SEQ ID NO: 4404 - DNA, 92 bp, synthetic construct
  misc_feature 1..92: note = engineered ribonucleic acid scaffold (ERS) sequence
  source 1..92: mol_type = other DNA
actgtgcgttctatctgattactctgcgcacatcaccagcgactatgtcgtagtgggtaaaggtgacggtcttcggaccgtcaccatcagag

SEQ ID NO: 4405 - DNA, 93 bp, synthetic construct
  misc_feature 1..93: note = engineered ribonucleic acid scaffold (ERS) sequence
  source 1..93: mol_type = other DNA
actggcgcttctatctgattactctgggcgccatcaccagcgactatgtcgtagtgggtaaaggtgacggtcttcggaccgtcaccatcagag

SEQ ID NO: 4406 - DNA, 93 bp, synthetic construct
  misc_feature 1..93: note = engineered ribonucleic acid scaffold (ERS) sequence
  source 1..93: mol_type = other DNA
actggcgcttctatctgattactctgggagccatcaccagcgactatgtcgtagtgggtaaaggtgacggtcttcggaccgtcaccatcagag

SEQ ID NO: 4407 - DNA, 93 bp, synthetic construct
  misc_feature 1..93: note = engineered ribonucleic acid scaffold (ERS) sequence
  source 1..93: mol_type = other DNA
actggcgcttctatctgattactctgtgagccatcaccagcgactatgtcgtagtgggtaaaggtgacggtcttcggaccgtcaccatcagag

SEQ ID NO: 4408 - DNA, 94 bp, synthetic construct
  misc_feature 1..94: note = engineered ribonucleic acid scaffold (ERS) sequence
  source 1..94: mol_type = other DNA
actggcgcttctatctgattactctgaggagccatcaccagcgactatgtcgtagtgggtaaaggtgacggtcttcggaccgtcaccatcagag

SEQ ID NO: 4409 - DNA, 93 bp, synthetic construct
  misc_feature 1..93: note = engineered ribonucleic acid scaffold (ERS) sequence
  source 1..93: mol_type = other DNA
actggcgcttctatctgattactctgatagccatcaccagcgactatgtcgtagtgggtaaaggtgacggtcttcggaccgtcaccatcagag

SEQ ID NO: 4410 - DNA, 94 bp, synthetic construct
  misc_feature 1..94: note = engineered ribonucleic acid scaffold (ERS) sequence
  source 1..94: mol_type = other DNA
actggcgcttctatctgattactctgagctgccatcaccagcgactatgtcgtagtgggtaaaggtgacggtcttcggaccgtcaccatcagag

SEQ ID NO: 4411 - DNA, 94 bp, synthetic construct
  misc_feature 1..94: note = engineered ribonucleic acid scaffold (ERS) sequence
  source 1..94: mol_type = other DNA
actggcacttctatctgattactctgagtagccatcaccagcgactatgtcgtagtgggtaaaggtgacggtcttcggaccgtcaccatcagag

SEQ ID NO: 4412 - DNA, 94 bp, synthetic construct
  misc_feature 1..94: note = engineered ribonucleic acid scaffold (ERS) sequence
  source 1..94: mol_type = other DNA
actggcgcttctatctgattactctgagtagccatcaccagcgactatgtcgtagtgggtaaaggtgacggtcttcggaccgtcaccatcagag

SEQ ID NO: 4413 - DNA, 93 bp, synthetic construct
  misc_feature 1..93: note = engineered ribonucleic acid scaffold (ERS) sequence
  source 1..93: mol_type = other DNA
actggcgcttctatctgattactctgagcaccatcaccagcgactatgtcgtagtgggtaaaggtgacggtcttcggaccgtcaccatcagag

SEQ ID NO: 4414 - DNA, 93 bp, synthetic construct
  misc_feature 1..93: note = engineered ribonucleic acid scaffold (ERS) sequence
  source 1..93: mol_type = other DNA
actggcacttctatctgattactctgagcgccatcaccagcgactatgtcgtagtgggtaaaggtgacggtcttcggaccgtcaccatcagag

SEQ ID NO: 4415 - DNA, 93 bp, synthetic construct
  misc_feature 1..93: note = engineered ribonucleic acid scaffold (ERS) sequence
  source 1..93: mol_type = other DNA
actggcgcttctatctgattactctgagggccatcaccagcgactatgtcgtagtgggtaaaggtgacggtcttcggaccgtcaccatcagag

SEQ ID NO: 4416 - DNA, 93 bp, synthetic construct
  misc_feature 1..93: note = engineered ribonucleic acid scaffold (ERS) sequence
  source 1..93: mol_type = other DNA
actggcgcttctatctgattactctgagtgccgtcaccagcgactatgtcgtagtgggtaaaggtgacggtcttcggaccgtcaccatcagag

SEQ ID NO: 4417 - DNA, 93 bp, synthetic construct
  misc_feature 1..93: note = engineered ribonucleic acid scaffold (ERS) sequence
  source 1..93: mol_type = other DNA
actggcacttctatctgattactctgagtgccatcaccagcgactatgtcgtagtgggtaaaggtgacggtcttcggaccgtcaccatcagag

SEQ ID NO: 4418 - DNA, 93 bp, synthetic construct
  misc_feature 1..93: note = engineered ribonucleic acid scaffold (ERS) sequence
  source 1..93: mol_type = other DNA
actggcgcttctatctgattactctgagaaccatcaccagcgactatgtcgtagtgggtaaaggtgacggtcttcggaccgtcaccatcagag

SEQ ID NO: 4419 - DNA, 93 bp, synthetic construct
  misc_feature 1..93: note = engineered ribonucleic acid scaffold (ERS) sequence
  source 1..93: mol_type = other DNA
actggcgcttctatctgattactctgagagccgtcaccagcgactatgtcgtagtgggtaaaggtgacggtcttcggaccgtcaccatcagag

SEQ ID NO: 4420 - DNA, 93 bp, synthetic construct
  misc_feature 1..93: note = engineered ribonucleic acid scaffold (ERS) sequence
  source 1..93: mol_type = other DNA
actggcgcttctatctgattactctgagagccttcaccagcgactatgtcgtagtgggtaaaggtgacggtcttcggaccgtcaccatcagag

SEQ ID NO: 4421 - DNA, 93 bp, synthetic construct
  misc_feature 1..93: note = engineered ribonucleic acid scaffold (ERS) sequence
  source 1..93: mol_type = other DNA
actggggcttctatctgattactctgagacccatcaccagcgactatgtcgtagtgggtaaaggtgacggtcttcggaccgtcaccatcagag

SEQ ID NO: 4422 - DNA, 93 bp, synthetic construct
  misc_feature 1..93: note = engineered ribonucleic acid scaffold (ERS) sequence
  source 1..93: mol_type = other DNA
actggtgcttctatctgattactctgagagccatcaccagcgactatgtcgtagtgggtaaaggtgacggtcttcggaccgtcaccatcagag

SEQ ID NO: 4423 - DNA, 93 bp, synthetic construct
  misc_feature 1..93: note = engineered ribonucleic acid scaffold (ERS) sequence
  source 1..93: mol_type = other DNA
actgggccttctatctgattactctgaggcccatcaccagcgactatgtcgtagtgggtaaaggtgacggtcttcggaccgtcaccatcagag

SEQ ID NO: 4424 - DNA, 94 bp, synthetic construct
  misc_feature 1..94: note = engineered ribonucleic acid scaffold (ERS) sequence
  source 1..94: mol_type = other DNA
actggcccttctatctgattactctgaggagccatcaccagcgactatgtcgtagtgggtaaaggtgacggtcttcggaccgtcaccatcagag

SEQ ID NO: 4425 - DNA, 93 bp, synthetic construct
  misc_feature 1..93: note = engineered ribonucleic acid scaffold (ERS) sequence
  source 1..93: mol_type = other DNA
actggcccttctatctgattactctgagggccatcaccagcgactatgtcgtagtgggtaaaggtgacggtcttcggaccgtcaccatcagag

SEQ ID NO: 4426 - DNA, 93 bp, synthetic construct
  misc_feature 1..93: note = engineered ribonucleic acid scaffold (ERS) sequence
  source 1..93: mol_type = other DNA
actggcccttctatctgattactctgagtgccatcaccagcgactatgtcgtagtgggtaaaggtgacggtcttcggaccgtcaccatcagag

SEQ ID NO: 4427 - DNA, 93 bp, synthetic construct
  misc_feature 1..93: note = engineered ribonucleic acid scaffold (ERS) sequence
  source 1..93: mol_type = other DNA
actggcccttctatctgattactctgagagccatcaccagcgactatgtcgtagtgggtaaaggtgacggtcttcggaccgtcaccatcagag

SEQ ID NO: 4428 - DNA, 94 bp, synthetic construct
  misc_feature 1..94: note = engineered ribonucleic acid scaffold (ERS) sequence
  source 1..94: mol_type = other DNA
actggcgcttctatctgattactctgagcagccatcaccagcgactatgtcgtagtgggtaaaggtgacggtcttcggaccgtcaccatcagag

SEQ ID NO: 4429 - DNA, 93 bp, synthetic construct; identical to SEQ ID NO: 701
  misc_feature 1..93: note = engineered ribonucleic acid scaffold (ERS) sequence
  source 1..93: mol_type = other DNA

SEQ ID NO: 4430 - DNA, 93 bp, synthetic construct
  misc_feature 1..93: note = engineered ribonucleic acid scaffold (ERS) sequence
  source 1..93: mol_type = other DNA
actggcgcttctatctgattactctgagtgccatcaccagcgactatgtcgtagtgggtaaaggtgacggtcttcggaccgtcaccatcagag

SEQ ID NO: 4431 - DNA, 93 bp, synthetic construct
  misc_feature 1..93: note = engineered ribonucleic acid scaffold (ERS) sequence
  source 1..93: mol_type = other DNA
actggcgcttctatctgattactctgagagccatcaccagcgactatgtcgtagtgggtaaaggtgacggtcttcggaccgtcaccatcagag

SEQ ID NO: 4432 - DNA, 93 bp, synthetic construct
  misc_feature 1..93: note = engineered ribonucleic acid scaffold (ERS) sequence
  source 1..93: mol_type = other DNA
actggctcttctatctgattactctgagcgccatcaccagcgactatgtcgtagtgggtaaaggtgacggtcttcggaccgtcaccatcagag

SEQ ID NO: 4433 - DNA, 93 bp, synthetic construct
  misc_feature 1..93: note = engineered ribonucleic acid scaffold (ERS) sequence
  source 1..93: mol_type = other DNA
actggctcttctatctgattactctgagggccatcaccagcgactatgtcgtagtgggtaaaggtgacggtcttcggaccgtcaccatcagag

SEQ ID NO: 4434 - DNA, 93 bp, synthetic construct
  misc_feature 1..93: note = engineered ribonucleic acid scaffold (ERS) sequence
  source 1..93: mol_type = other DNA
actggctcttctatctgattactctgagtgccatcaccagcgactatgtcgtagtgggtaaaggtgacggtcttcggaccgtcaccatcagag

SEQ ID NO: 4435 - DNA, 93 bp, synthetic construct
  misc_feature 1..93: note = engineered ribonucleic acid scaffold (ERS) sequence
  source 1..93: mol_type = other DNA
actggctcttctatctgattactctgagagccatcaccagcgactatgtcgtagtgggtaaaggtgacggtcttcggaccgtcaccatcagag

SEQ ID NO: 4436 - DNA, 93 bp, synthetic construct
  misc_feature 1..93: note = engineered ribonucleic acid scaffold (ERS) sequence
  source 1..93: mol_type = other DNA
actggcggttctatctgattactctgagcgccatcaccagcgactatgtcgtagtgggtaaaggtgacggtcttcggaccgtcaccatcagag

SEQ ID NO: 4437 - DNA, 93 bp, synthetic construct
  misc_feature 1..93: note = engineered ribonucleic acid scaffold (ERS) sequence
  source 1..93: mol_type = other DNA
actggcggttctatctgattactctgagagccatcaccagcgactatgtcgtagtgggtaaaggtgacggtcttcggaccgtcaccatcagag

SEQ ID NO: 4438 - DNA, 90 bp, synthetic construct
  misc_feature 1..90: note = engineered ribonucleic acid scaffold (ERS) sequence
  source 1..90: mol_type = other DNA
acacacggttctatctgattactctgccgtgttcaccagcgactatgtcgtagtgggtaaagtctccctcttcggagggaggcatcagag

SEQ ID NO: 4439 - DNA, 90 bp, synthetic construct
  misc_feature 1..90: note = engineered ribonucleic acid scaffold (ERS) sequence
  source 1..90: mol_type = other DNA
acactggtttctatctgattactctgaccagttcaccagcgactatgtcgtagtgggtaaagtctccctcttcggagggaggcatcagag

SEQ ID NO: 4440 - DNA, 90 bp, synthetic construct
  misc_feature 1..90: note = engineered ribonucleic acid scaffold (ERS) sequence
  source 1..90: mol_type = other DNA
acaggccgttctatctgattactctgcggccttcaccagcgactatgtcgtagtgggtaaagtctccctcttcggagggaggcatcagag

SEQ ID NO: 4441 - DNA, 90 bp, synthetic construct
  misc_feature 1..90: note = engineered ribonucleic acid scaffold (ERS) sequence
  source 1..90: mol_type = other DNA
acaggtccttctatctgattactctgggaccttcaccagcgactatgtcgtagtgggtaaagtctccctcttcggagggaggcatcagag

SEQ ID NO: 4442 - DNA, 90 bp, synthetic construct
  misc_feature 1..90: note = engineered ribonucleic acid scaffold (ERS) sequence
  source 1..90: mol_type = other DNA
accagcaattctatctgattactctgttgctgtcaccagcgactatgtcgtagtgggtaaagtctccctcttcggagggaggcatcagag

SEQ ID NO: 4443 - DNA, 90 bp, synthetic construct
  misc_feature 1..90: note = engineered ribonucleic acid scaffold (ERS) sequence
  source 1..90: mol_type = other DNA
accgagacttctatctgattactctgggctcgtcaccagcgactatgtcgtagtgggtaaagtctccctcttcggagggaggcatcagag

SEQ ID NO: 4444 - DNA, 90 bp, synthetic construct
  misc_feature 1..90: note = engineered ribonucleic acid scaffold (ERS) sequence
  source 1..90: mol_type = other DNA
acctgtagttctatctgattactctgctacagtcaccagcgactatgtcgtagtgggtaaagtctccctcttcggagggaggcatcagag

SEQ ID NO: 4445 - DNA, 90 bp, synthetic construct
  misc_feature 1..90: note = engineered ribonucleic acid scaffold (ERS) sequence
  source 1..90: mol_type = other DNA
acgagcacttctatctgattactctggggctctcaccagcgactatgtcgtagtgggtaaagtctccctcttcggagggaggcatcagag

SEQ ID NO: 4446 - DNA, 90 bp, synthetic construct
  misc_feature 1..90: note = engineered ribonucleic acid scaffold (ERS) sequence
  source 1..90: mol_type = other DNA
acgaggtgttctatctgattactctgcacctctcaccagcgactatgtcgtagtgggtaaagtctccctcttcggagggaggcatcagag

SEQ ID NO: 4447 - DNA, 90 bp, synthetic construct
  misc_feature 1..90: note = engineered ribonucleic acid scaffold (ERS) sequence
  source 1..90: mol_type = other DNA
acgggactttctatctgattactctgagtccctcaccagcgactatgtcgtagtgggtaaagtctccctcttcggagggaggcatcagag

SEQ ID NO: 4448 - DNA, 90 bp, synthetic construct
  misc_feature 1..90: note = engineered ribonucleic acid scaffold (ERS) sequence
  source 1..90: mol_type = other DNA
acgggcaattctatctgattactctgttgccctcaccagcgactatgtcgtagtgggtaaagtctccctcttcggagggaggcatcagag

SEQ ID NO: 4449 - DNA, 90 bp, synthetic construct
  misc_feature 1..90: note = engineered ribonucleic acid scaffold (ERS) sequence
  source 1..90: mol_type = other DNA
actgtgcgttctatctgattactctgcgcacatcaccagcgactatgtcgtagtgggtaaagtctccctcttcggagggaggcatcagag

SEQ ID NO: 4450 - DNA, 91 bp, synthetic construct
  misc_feature 1..91: note = engineered ribonucleic acid scaffold (ERS) sequence
  source 1..91: mol_type = other DNA
actggcgcttctatctgattactctgggcgccatcaccagcgactatgtcgtagtgggtaaagtctccctcttcggagggaggcatcagag

SEQ ID NO: 4451 - DNA, 91 bp, synthetic construct
  misc_feature 1..91: note = engineered ribonucleic acid scaffold (ERS) sequence
  source 1..91: mol_type = other DNA
actggcgcttctatctgattactctgggagccatcaccagcgactatgtcgtagtgggtaaagtctccctcttcggagggaggcatcagag

SEQ ID NO: 4452 - DNA, 91 bp, synthetic construct
  misc_feature 1..91: note = engineered ribonucleic acid scaffold (ERS) sequence
  source 1..91: mol_type = other DNA
actggcgcttctatctgattactctgtgagccatcaccagcgactatgtcgtagtgggtaaagtctccctcttcggagggaggcatcagag

SEQ ID NO: 4453 - DNA, 92 bp, synthetic construct
  misc_feature 1..92: note = engineered ribonucleic acid scaffold (ERS) sequence
  source 1..92: mol_type = other DNA
actggcgcttctatctgattactctgaggagccatcaccagcgactatgtcgtagtgggtaaagtctccctcttcggagggaggcatcagag

SEQ ID NO: 4454 - DNA, 91 bp, synthetic construct
  misc_feature 1..91: note = engineered ribonucleic acid scaffold (ERS) sequence
  source 1..91: mol_type = other DNA
actggcgcttctatctgattactctgatagccatcaccagcgactatgtcgtagtgggtaaagtctccctcttcggagggaggcatcagag

SEQ ID NO: 4455 - DNA, 92 bp, synthetic construct
  misc_feature 1..92: note = engineered ribonucleic acid scaffold (ERS) sequence
  source 1..92: mol_type = other DNA
actggcgcttctatctgattactctgagctgccatcaccagcgactatgtcgtagtgggtaaagtctccctcttcggagggaggcatcagag

SEQ ID NO: 4456 - DNA, 92 bp, synthetic construct
  misc_feature 1..92: note = engineered ribonucleic acid scaffold (ERS) sequence
  source 1..92: mol_type = other DNA
actggcacttctatctgattactctgagtagccatcaccagcgactatgtcgtagtgggtaaagtctccctcttcggagggaggcatcagag

SEQ ID NO: 4457 - DNA, 92 bp, synthetic construct
  misc_feature 1..92: note = engineered ribonucleic acid scaffold (ERS) sequence
  source 1..92: mol_type = other DNA
actggcgcttctatctgattactctgagtagccatcaccagcgactatgtcgtagtgggtaaagtctccctcttcggagggaggcatcagag

SEQ ID NO: 4458 - DNA, 91 bp, synthetic construct
  misc_feature 1..91: note = engineered ribonucleic acid scaffold (ERS) sequence
  source 1..91: mol_type = other DNA
actggcgcttctatctgattactctgagcaccatcaccagcgactatgtcgtagtgggtaaagtctccctcttcggagggaggcatcagag

SEQ ID NO: 4459 - DNA, 91 bp, synthetic construct
  misc_feature 1..91: note = engineered ribonucleic acid scaffold (ERS) sequence
  source 1..91: mol_type = other DNA
actggcacttctatctgattactctgagcgccatcaccagcgactatgtcgtagtgggtaaagtctccctcttcggagggaggcatcagag

SEQ ID NO: 4460 - DNA, 91 bp, synthetic construct
  misc_feature 1..91: note = engineered ribonucleic acid scaffold (ERS) sequence
  source 1..91: mol_type = other DNA
actggcgcttctatctgattactctgagggccatcaccagcgactatgtcgtagtgggtaaagtctccctcttcggagggaggcatcagag

SEQ ID NO: 4461 - DNA, 91 bp, synthetic construct
  misc_feature 1..91: note = engineered ribonucleic acid scaffold (ERS) sequence
  source 1..91: mol_type = other DNA
actggcgcttctatctgattactctgagtgccgtcaccagcgactatgtcgtagtgggtaaagtctccctcttcggagggaggcatcagag

SEQ ID NO: 4462 - DNA, 91 bp, synthetic construct
  misc_feature 1..91: note = engineered ribonucleic acid scaffold (ERS) sequence
  source 1..91: mol_type = other DNA
actggcacttctatctgattactctgagtgccatcaccagcgactatgtcgtagtgggtaaagtctccctcttcggagggaggcatcagag

SEQ ID NO: 4463 - DNA, 91 bp, synthetic construct
  misc_feature 1..91: note = engineered ribonucleic acid scaffold (ERS) sequence
  source 1..91: mol_type = other DNA
actggcgcttctatctgattactctgagaaccatcaccagcgactatgtcgtagtgggtaaagtctccctcttcggagggaggcatcagag

SEQ ID NO: 4464 - DNA, 91 bp, synthetic construct
  misc_feature 1..91: note = engineered ribonucleic acid scaffold (ERS) sequence
  source 1..91: mol_type = other DNA
actggcgcttctatctgattactctgagagccgtcaccagcgactatgtcgtagtgggtaaagtctccctcttcggagggaggcatcagag

SEQ ID NO: 4465 - DNA, 91 bp, synthetic construct
  misc_feature 1..91: note = engineered ribonucleic acid scaffold (ERS) sequence
  source 1..91: mol_type = other DNA
actggcgcttctatctgattactctgagagccttcaccagcgactatgtcgtagtgggtaaagtctccctcttcggagggaggcatcagag

SEQ ID NO: 4466 - DNA, 91 bp, synthetic construct
  misc_feature 1..91: note = engineered ribonucleic acid scaffold (ERS) sequence
  source 1..91: mol_type = other DNA
actggggcttctatctgattactctgagacccatcaccagcgactatgtcgtagtgggtaaagtctccctcttcggagggaggcatcagag

SEQ ID NO: 4467 - DNA, 91 bp, synthetic construct
  misc_feature 1..91: note = engineered ribonucleic acid scaffold (ERS) sequence
  source 1..91: mol_type = other DNA
actggtgcttctatctgattactctgagagccatcaccagcgactatgtcgtagtgggtaaagtctccctcttcggagggaggcatcagag

SEQ ID NO: 4468 - DNA, 91 bp, synthetic construct
  misc_feature 1..91: note = engineered ribonucleic acid scaffold (ERS) sequence
  source 1..91: mol_type = other DNA
actgggccttctatctgattactctgaggcccatcaccagcgactatgtcgtagtgggtaaagtctccctcttcggagggaggcatcagag

SEQ ID NO: 4469 - DNA, 92 bp, synthetic construct
  misc_feature 1..92: note = engineered ribonucleic acid scaffold (ERS) sequence
  source 1..92: mol_type = other DNA
actggcccttctatctgattactctgaggagccatcaccagcgactatgtcgtagtgggtaaagtctccctcttcggagggaggcatcagag

SEQ ID NO: 4470 - DNA, 91 bp, synthetic construct
  misc_feature 1..91: note = engineered ribonucleic acid scaffold (ERS) sequence
  source 1..91: mol_type = other DNA
actggcccttctatctgattactctgagggccatcaccagcgactatgtcgtagtgggtaaagtctccctcttcggagggaggcatcagag

SEQ ID NO: 4471 - DNA, 91 bp, synthetic construct
  misc_feature 1..91: note = engineered ribonucleic acid scaffold (ERS) sequence
  source 1..91: mol_type = other DNA
actggcccttctatctgattactctgagtgccatcaccagcgactatgtcgtagtgggtaaagtctccctcttcggagggaggcatcagag

SEQ ID NO: 4472 - DNA, 91 bp, synthetic construct
  misc_feature 1..91: note = engineered ribonucleic acid scaffold (ERS) sequence
  source 1..91: mol_type = other DNA
actggcccttctatctgattactctgagagccatcaccagcgactatgtcgtagtgggtaaagtctccctcttcggagggaggcatcagag

SEQ ID NO: 4473 - DNA, 92 bp, synthetic construct
  misc_feature 1..92: note = engineered ribonucleic acid scaffold (ERS) sequence
  source 1..92: mol_type = other DNA
actggcgcttctatctgattactctgagcagccatcaccagcgactatgtcgtagtgggtaaagtctccctcttcggagggaggcatcagag

SEQ ID NO: 4474 - DNA, 91 bp, synthetic construct; identical to SEQ ID NO: 723
  misc_feature 1..91: note = engineered ribonucleic acid scaffold (ERS) sequence
  source 1..91: mol_type = other DNA

SEQ ID NO: 4475 - DNA, 91 bp, synthetic construct
  misc_feature 1..91: note = engineered ribonucleic acid scaffold (ERS) sequence
  source 1..91: mol_type = other DNA
actggcgcttctatctgattactctgagtgccatcaccagcgactatgtcgtagtgggtaaagtctccctcttcggagggaggcatcagag

SEQ ID NO: 4476 - DNA, 91 bp, synthetic construct
  misc_feature 1..91: note = engineered ribonucleic acid scaffold (ERS) sequence
  source 1..91: mol_type = other DNA
actggcgcttctatctgattactctgagagccatcaccagcgactatgtcgtagtgggtaaagtctccctcttcggagggaggcatcagag

SEQ ID NO: 4477 - DNA, 91 bp, synthetic construct
  misc_feature 1..91: note = engineered ribonucleic acid scaffold (ERS) sequence
  source 1..91: mol_type = other DNA
actggctcttctatctgattactctgagcgccatcaccagcgactatgtcgtagtgggtaaagtctccctcttcggagggaggcatcagag

SEQ ID NO: 4478 - DNA, 91 bp, synthetic construct
  misc_feature 1..91: note = engineered ribonucleic acid scaffold (ERS) sequence
  source 1..91: mol_type = other DNA
actggctcttctatctgattactctgagggccatcaccagcgactatgtcgtagtgggtaaagtctccctcttcggagggaggcatcagag

SEQ ID NO: 4479 - DNA, 91 bp, synthetic construct
  misc_feature 1..91: note = engineered ribonucleic acid scaffold (ERS) sequence
  source 1..91: mol_type = other DNA
actggctcttctatctgattactctgagtgccatcaccagcgactatgtcgtagtgggtaaagtctccctcttcggagggaggcatcagag

SEQ ID NO: 4480 - DNA, 91 bp, synthetic construct
  misc_feature 1..91: note = engineered ribonucleic acid scaffold (ERS) sequence
  source 1..91: mol_type = other DNA
actggctcttctatctgattactctgagagccatcaccagcgactatgtcgtagtgggtaaagtctccctcttcggagggaggcatcagag

SEQ ID NO: 4481 - DNA, 91 bp, synthetic construct
  misc_feature 1..91: note = engineered ribonucleic acid scaffold (ERS) sequence
  source 1..91: mol_type = other DNA
actggcggttctatctgattactctgagcgccatcaccagcgactatgtcgtagtgggtaaagtctccctcttcggagggaggcatcagag

SEQ ID NO: 4482 - DNA, 91 bp, synthetic construct
  misc_feature 1..91: note = engineered ribonucleic acid scaffold (ERS) sequence
  source 1..91: mol_type = other DNA
actggcggttctatctgattactctgagagccatcaccagcgactatgtcgtagtgggtaaagtctccctcttcggagggaggcatcagag

SEQ ID NO: 4483 - DNA, 92 bp, synthetic construct
  misc_feature 1..92: note = engineered ribonucleic acid scaffold (ERS) sequence
  source 1..92: mol_type = other DNA
acacacggttctatctgattactctgccgtgttcaccagcgactatgtcgtagtgggtaaagtgcgcccgcttcggcgggcgcacatcagag

SEQ ID NO: 4484 - DNA, 92 bp, synthetic construct
  misc_feature 1..92: note = engineered ribonucleic acid scaffold (ERS) sequence
  source 1..92: mol_type = other DNA
acactggtttctatctgattactctgaccagttcaccagcgactatgtcgtagtgggtaaagtgcgcccgcttcggcgggcgcacatcagag

SEQ ID NO: 4485 - DNA, 92 bp, synthetic construct
  misc_feature 1..92: note = engineered ribonucleic acid scaffold (ERS) sequence
  source 1..92: mol_type = other DNA
acaggccgttctatctgattactctgcggccttcaccagcgactatgtcgtagtgggtaaagtgcgcccgcttcggcgggcgcacatcagag

SEQ ID NO: 4486 - DNA, 92 bp, synthetic construct
  misc_feature 1..92: note = engineered ribonucleic acid scaffold (ERS) sequence
  source 1..92: mol_type = other DNA
acaggtccttctatctgattactctgggaccttcaccagcgactatgtcgtagtgggtaaagtgcgcccgcttcggcgggcgcacatcagag

SEQ ID NO: 4487 - DNA, 92 bp, synthetic construct
  misc_feature 1..92: note = engineered ribonucleic acid scaffold (ERS) sequence
  source 1..92: mol_type = other DNA
accagcaattctatctgattactctgttgctgtcaccagcgactatgtcgtagtgggtaaagtgcgcccgcttcggcgggcgcacatcagag

SEQ ID NO: 4488 - DNA, 92 bp, synthetic construct
  misc_feature 1..92: note = engineered ribonucleic acid scaffold (ERS) sequence
  source 1..92: mol_type = other DNA
accgagacttctatctgattactctgggctcgtcaccagcgactatgtcgtagtgggtaaagtgcgcccgcttcggcgggcgcacatcagag

SEQ ID NO: 4489 - DNA, 92 bp, synthetic construct
  misc_feature 1..92: note = engineered ribonucleic acid scaffold (ERS) sequence
  source 1..92: mol_type = other DNA
acctgtagttctatctgattactctgctacagtcaccagcgactatgtcgtagtgggtaaagtgcgcccgcttcggcgggcgcacatcagag

SEQ ID NO: 4490 - DNA, 92 bp, synthetic construct
  misc_feature 1..92: note = engineered ribonucleic acid scaffold (ERS) sequence
  source 1..92: mol_type = other DNA
acgagcacttctatctgattactctggggctctcaccagcgactatgtcgtagtgggtaaagtgcgcccgcttcggcgggcgcacatcagag

SEQ ID NO: 4491 - DNA, 92 bp, synthetic construct
  misc_feature 1..92: note = engineered ribonucleic acid scaffold (ERS) sequence
  source 1..92: mol_type = other DNA
acgaggtgttctatctgattactctgcacctctcaccagcgactatgtcgtagtgggtaaagtgcgcccgcttcggcgggcgcacatcagag

SEQ ID NO: 4492 - DNA, 92 bp, synthetic construct
  misc_feature 1..92: note = engineered ribonucleic acid scaffold (ERS) sequence
  source 1..92: mol_type = other DNA
acgggactttctatctgattactctgagtccctcaccagcgactatgtcgtagtgggtaaagtgcgcccgcttcggcgggcgcacatcagag

SEQ ID NO: 4493 - DNA, 92 bp, synthetic construct
  misc_feature 1..92: note = engineered ribonucleic acid scaffold (ERS) sequence
  source 1..92: mol_type = other DNA
acgggcaattctatctgattactctgttgccctcaccagcgactatgtcgtagtgggtaaagtgcgcccgcttcggcgggcgcacatcagag

SEQ ID NO: 4494 - DNA, 92 bp, synthetic construct
  misc_feature 1..92: note = engineered ribonucleic acid scaffold (ERS) sequence
  source 1..92: mol_type = other DNA
actgtgcgttctatctgattactctgcgcacatcaccagcgactatgtcgtagtgggtaaagtgcgcccgcttcggcgggcgcacatcagag

SEQ ID NO: 4495 - DNA, 93 bp, synthetic construct
  misc_feature 1..93: note = engineered ribonucleic acid scaffold (ERS) sequence
  source 1..93: mol_type = other DNA
actggcgcttctatctgattactctgggcgccatcaccagcgactatgtcgtagtgggtaaagtgcgcccgcttcggcgggcgcacatcagag

SEQ ID NO: 4496 - DNA, 93 bp, synthetic construct
  misc_feature 1..93: note = engineered ribonucleic acid scaffold (ERS) sequence
  source 1..93: mol_type = other DNA
actggcgcttctatctgattactctgggagccatcaccagcgactatgtcgtagtgggtaaagtgcgcccgcttcggcgggcgcacatcagag

SEQ ID NO: 4497 - DNA, 93 bp, synthetic construct
  misc_feature 1..93: note = engineered ribonucleic acid scaffold (ERS) sequence
  source 1..93: mol_type = other DNA
actggcgcttctatctgattactctgtgagccatcaccagcgactatgtcgtagtgggtaaagtgcgcccgcttcggcgggcgcacatcagag

SEQ ID NO: 4498 - DNA, 94 bp, synthetic construct
  misc_feature 1..94: note = engineered ribonucleic acid scaffold (ERS) sequence
  source 1..94: mol_type = other DNA
actggcgcttctatctgattactctgaggagccatcaccagcgactatgtcgtagtgggtaaagtgcgcccgcttcggcgggcgcacatcagag

SEQ ID NO: 4499 - DNA, 93 bp, synthetic construct
  misc_feature 1..93: note = engineered ribonucleic acid scaffold (ERS) sequence
  source 1..93: mol_type = other DNA
actggcgcttctatctgattactctgatagccatcaccagcgactatgtcgtagtgggtaaagtgcgcccgcttcggcgggcgcacatcagag

SEQ ID NO: 4500 - DNA, 94 bp, synthetic construct
  misc_feature 1..94: note = engineered ribonucleic acid scaffold (ERS) sequence
  source 1..94: mol_type = other DNA
actggcgcttctatctgattactctgagctgccatcaccagcgactatgtcgtagtgggtaaagtgcgcccgcttcggcgggcgcacatcagag

SEQ ID NO: 4501 - DNA, 94 bp, synthetic construct
  misc_feature 1..94: note = engineered ribonucleic acid scaffold (ERS) sequence
  source 1..94: mol_type = other DNA
actggcacttctatctgattactctgagtagccatcaccagcgactatgtcgtagtgggtaaagtgcgcccgcttcggcgggcgcacatcagag

SEQ ID NO: 4502 - DNA, 94 bp, synthetic construct
  misc_feature 1..94: note = engineered ribonucleic acid scaffold (ERS) sequence
  source 1..94: mol_type = other DNA
actggcgcttctatctgattactctgagtagccatcaccagcgactatgtcgtagtgggtaaagtgcgcccgcttcggcgggcgcacatcagag

SEQ ID NO: 4503 - DNA, 93 bp, synthetic construct
  misc_feature 1..93: note = engineered ribonucleic acid scaffold (ERS) sequence
  source 1..93: mol_type = other DNA
actggcgcttctatctgattactctgagcaccatcaccagcgactatgtcgtagtgggtaaagtgcgcccgcttcggcgggcgcacatcagag

SEQ ID NO: 4504 - DNA, 93 bp, synthetic construct
  misc_feature 1..93: note = engineered ribonucleic acid scaffold (ERS) sequence
  source 1..93: mol_type = other DNA
actggcacttctatctgattactctgagcgccatcaccagcgactatgtcgtagtgggtaaagtgcgcccgcttcggcgggcgcacatcagag

SEQ ID NO: 4505 - DNA, 93 bp, synthetic construct
  misc_feature 1..93: note = engineered ribonucleic acid scaffold (ERS) sequence
  source 1..93: mol_type = other DNA
actggcgcttctatctgattactctgagggccatcaccagcgactatgtcgtagtgggtaaagtgcgcccgcttcggcgggcgcacatcagag

SEQ ID NO: 4506 - DNA, 93 bp, synthetic construct
  misc_feature 1..93: note = engineered ribonucleic acid scaffold (ERS) sequence
  source 1..93: mol_type = other DNA
actggcgcttctatctgattactctgagtgccgtcaccagcgactatgtcgtagtgggtaaagtgcgcccgcttcggcgggcgcacatcagag

SEQ ID NO: 4507 - DNA, 93 bp, synthetic construct
  misc_feature 1..93: note = engineered ribonucleic acid scaffold (ERS) sequence
  source 1..93: mol_type = other DNA
actggcacttctatctgattactctgagtgccatcaccagcgactatgtcgtagtgggtaaagtgcgcccgcttcggcgggcgcacatcagag

SEQ ID NO: 4508 - DNA, 93 bp, synthetic construct
  misc_feature 1..93: note = engineered ribonucleic acid scaffold (ERS) sequence
  source 1..93: mol_type = other DNA
actggcgcttctatctgattactctgagaaccatcaccagcgactatgtcgtagtgggtaaagtgcgcccgcttcggcgggcgcacatcagag

SEQ ID NO: 4509 - DNA, 93 bp, synthetic construct
  misc_feature 1..93: note = engineered ribonucleic acid scaffold (ERS) sequence
  source 1..93: mol_type = other DNA
actggcgcttctatctgattactctgagagccgtcaccagcgactatgtcgtagtgggtaaagtgcgcccgcttcggcgggcgcacatcagag

SEQ ID NO: 4510 - DNA, 93 bp, synthetic construct
  misc_feature 1..93: note = engineered ribonucleic acid scaffold (ERS) sequence
  source 1..93: mol_type = other DNA
actggcgcttctatctgattactctgagagccttcaccagcgactatgtcgtagtgggtaaagtgcgcccgcttcggcgggcgcacatcagag

SEQ ID NO: 4511 - DNA, 93 bp, synthetic construct
  misc_feature 1..93: note = engineered ribonucleic acid scaffold (ERS) sequence
  source 1..93: mol_type = other DNA
actggggcttctatctgattactctgagacccatcaccagcgactatgtcgtagtgggtaaagtgcgcccgcttcggcgggcgcacatcagag

SEQ ID NO: 4512 - DNA, 93 bp, synthetic construct
  misc_feature 1..93: note = engineered ribonucleic acid scaffold (ERS) sequence
  source 1..93: mol_type = other DNA
actggtgcttctatctgattactctgagagccatcaccagcgactatgtcgtagtgggtaaagtgcgcccgcttcggcgggcgcacatcagag

SEQ ID NO: 4513 - DNA, 93 bp, synthetic construct
  misc_feature 1..93: note = engineered ribonucleic acid scaffold (ERS) sequence
  source 1..93: mol_type = other DNA
actgggccttctatctgattactctgaggcccatcaccagcgactatgtcgtagtgggtaaagtgcgcccgcttcggcgggcgcacatcagag

SEQ ID NO: 4514 - DNA, 94 bp, synthetic construct
  misc_feature 1..94: note = engineered ribonucleic acid scaffold (ERS) sequence
  source 1..94: mol_type = other DNA
actggcccttctatctgattactctgaggagccatcaccagcgactatgtcgtagtgggtaaagtgcgcccgcttcggcgggcgcacatcagag

SEQ ID NO: 4515 - DNA, 93 bp, synthetic construct
  misc_feature 1..93: note = engineered ribonucleic acid scaffold (ERS) sequence
  source 1..93: mol_type = other DNA
actggcccttctatctgattactctgagggccatcaccagcgactatgtcgtagtgggtaaagtgcgcccgcttcggcgggcgcacatcagag

SEQ ID NO: 4516 - DNA, 93 bp, synthetic construct
  misc_feature 1..93: note = engineered ribonucleic acid scaffold (ERS) sequence
  source 1..93: mol_type = other DNA
actggcccttctatctgattactctgagtgccatcaccagcgactatgtcgtagtgggtaaagtgcgcccgcttcggcgggcgcacatcagag

SEQ ID NO: 4517 - DNA, 93 bp, synthetic construct
  misc_feature 1..93: note = engineered ribonucleic acid scaffold (ERS) sequence
  source 1..93: mol_type = other DNA
actggcccttctatctgattactctgagagccatcaccagcgactatgtcgtagtgggtaaagtgcgcccgcttcggcgggcgcacatcagag

SEQ ID NO: 4518 - DNA, 94 bp, synthetic construct
  misc_feature 1..94: note = engineered ribonucleic acid scaffold (ERS) sequence
  source 1..94: mol_type = other DNA
actggcgcttctatctgattactctgagcagccatcaccagcgactatgtcgtagtgggtaaagtgcgcccgcttcggcgggcgcacatcagag

SEQ ID NO: 4519 - DNA, 93 bp, synthetic construct; identical to SEQ ID NO: 703
  misc_feature 1..93: note = engineered ribonucleic acid scaffold (ERS) sequence
  source 1..93: mol_type = other DNA

SEQ ID NO: 4520 - DNA, 93 bp, synthetic construct
  misc_feature 1..93: note = engineered ribonucleic acid scaffold (ERS) sequence
  source 1..93: mol_type = other DNA
actggcgcttctatctgattactctgagtgccatcaccagcgactatgtcgtagtgggtaaagtgcgcccgcttcggcgggcgcacatcagag

SEQ ID NO: 4521 - DNA, 93 bp, synthetic construct
  misc_feature 1..93: note = engineered ribonucleic acid scaffold (ERS) sequence
  source 1..93: mol_type = other DNA
actggcgcttctatctgattactctgagagccatcaccagcgactatgtcgtagtgggtaaagtgcgcccgcttcggcgggcgcacatcagag

SEQ ID NO: 4522 - DNA, 93 bp, synthetic construct
  misc_feature 1..93: note = engineered ribonucleic acid scaffold (ERS) sequence
  source 1..93: mol_type = other DNA
actggctcttctatctgattactctgagcgccatcaccagcgactatgtcgtagtgggtaaagtgcgcccgcttcggcgggcgcacatcagag

SEQ ID NO: 4523 - DNA, 93 bp, synthetic construct
  misc_feature 1..93: note = engineered ribonucleic acid scaffold (ERS) sequence
  source 1..93: mol_type = other DNA
actggctcttctatctgattactctgagggccatcaccagcgactatgtcgtagtgggtaaagtgcgcccgcttcggcgggcgcacatcagag

SEQ ID NO: 4524 - DNA, 93 bp, synthetic construct
  misc_feature 1..93: note = engineered ribonucleic acid scaffold (ERS) sequence
  source 1..93: mol_type = other DNA
actggctcttctatctgattactctgagtgccatcaccagcgactatgtcgtagtgggtaaagtgcgcccgcttcggcgggcgcacatcagag

SEQ ID NO: 4525 - DNA, 93 bp, synthetic construct
  misc_feature 1..93: note = engineered ribonucleic acid scaffold (ERS) sequence
  source 1..93: mol_type = other DNA
actggctcttctatctgattactctgagagccatcaccagcgactatgtcgtagtgggtaaagtgcgcccgcttcggcgggcgcacatcagag

SEQ ID NO: 4526 - DNA, 93 bp, synthetic construct
  misc_feature 1..93: note = engineered ribonucleic acid scaffold (ERS) sequence
  source 1..93: mol_type = other DNA
actggcggttctatctgattactctgagcgccatcaccagcgactatgtcgtagtgggtaaagtgcgcccgcttcggcgggcgcacatcagag

SEQ ID NO: 4527 - DNA, 93 bp, synthetic construct
  misc_feature 1..93: note = engineered ribonucleic acid scaffold (ERS) sequence
  source 1..93: mol_type = other DNA
actggcggttctatctgattactctgagagccatcaccagcgactatgtcgtagtgggtaaagtgcgcccgcttcggcgggcgcacatcagag

SEQ ID NO: 4528 - DNA, 92 bp, synthetic construct
  misc_feature 1..92: note = engineered ribonucleic acid scaffold (ERS) sequence
  source 1..92: mol_type = other DNA
acacacggttctatctgattactctgccgtgttcaccagcgactatgtcgtagtgggtaaataatgaaaacttcggttttcattaatcagag

SEQ ID NO: 4529 - DNA, 92 bp, synthetic construct
  misc_feature 1..92: note = engineered ribonucleic acid scaffold (ERS) sequence
  source 1..92: mol_type = other DNA
acactggtttctatctgattactctgaccagttcaccagcgactatgtcgtagtgggtaaataatgaaaacttcggttttcattaatcagag

SEQ ID NO: 4530 - DNA, 92 bp, synthetic construct
  misc_feature 1..92: note = engineered ribonucleic acid scaffold (ERS) sequence
  source 1..92: mol_type = other DNA
acaggccgttctatctgattactctgcggccttcaccagcgactatgtcgtagtgggtaaataatgaaaacttcggttttcattaatcagag

SEQ ID NO: 4531 - DNA, 92 bp, synthetic construct
  misc_feature 1..92: note = engineered ribonucleic acid scaffold (ERS) sequence
  source 1..92: mol_type = other DNA
acaggtccttctatctgattactctgggaccttcaccagcgactatgtcgtagtgggtaaataatgaaaacttcggttttcattaatcagag

SEQ ID NO: 4532 - DNA, 92 bp, synthetic construct
  misc_feature 1..92: note = engineered ribonucleic acid scaffold (ERS) sequence
  source 1..92: mol_type = other DNA
accagcaattctatctgattactctgttgctgtcaccagcgactatgtcgtagtgggtaaataatgaaaacttcggttttcattaatcagag

SEQ ID NO: 4533 - DNA, 92 bp, synthetic construct
  misc_feature 1..92: note = engineered ribonucleic acid scaffold (ERS) sequence
  source 1..92: mol_type = other DNA
accgagacttctatctgattactctgggctcgtcaccagcgactatgtcgtagtgggtaaataatgaaaacttcggttttcattaatcagag

SEQ ID NO: 4534 - DNA, 92 bp, synthetic construct
  misc_feature 1..92: note = engineered ribonucleic acid scaffold (ERS) sequence
  source 1..92: mol_type = other DNA
acctgtagttctatctgattactctgctacagtcaccagcgactatgtcgtagtgggtaaataatgaaaacttcggttttcattaatcagag

SEQ ID NO: 4535 - DNA, 92 bp, synthetic construct
  misc_feature 1..92: note = engineered ribonucleic acid scaffold (ERS) sequence
  source 1..92: mol_type = other DNA
acgagcacttctatctgattactctggggctctcaccagcgactatgtcgtagtgggtaaataatgaaaacttcggttttcattaatcagag

SEQ ID NO: 4536 - DNA, 92 bp, synthetic construct
  misc_feature 1..92: note = engineered ribonucleic acid scaffold (ERS) sequence
  source 1..92: mol_type = other DNA
acgaggtgttctatctgattactctgcacctctcaccagcgactatgtcgtagtgggtaaataatgaaaacttcggttttcattaatcagag

SEQ ID NO: 4537 - DNA, 92 bp, synthetic construct
  misc_feature 1..92: note = engineered ribonucleic acid scaffold (ERS) sequence
  source 1..92: mol_type = other DNA
acgggactttctatctgattactctgagtccctcaccagcgactatgtcgtagtgggtaaataatgaaaacttcggttttcattaatcagag

SEQ ID NO: 4538 - DNA, 92 bp, synthetic construct
  misc_feature 1..92: note = engineered ribonucleic acid scaffold (ERS) sequence
  source 1..92: mol_type = other DNA
acgggcaattctatctgattactctgttgccctcaccagcgactatgtcgtagtgggtaaataatgaaaacttcggttttcattaatcagag

SEQ ID NO: 4539 - DNA, 92 bp, synthetic construct
  misc_feature 1..92: note = engineered ribonucleic acid scaffold (ERS) sequence
  source 1..92: mol_type = other DNA
actgtgcgttctatctgattactctgcgcacatcaccagcgactatgtcgtagtgggtaaataatgaaaacttcggttttcattaatcagag

SEQ ID NO: 4540 - DNA, 93 bp, synthetic construct
  misc_feature 1..93: note = engineered ribonucleic acid scaffold (ERS) sequence
  source 1..93: mol_type = other DNA
actggcgcttctatctgattactctgggcgccatcaccagcgactatgtcgtagtgggtaaataatgaaaacttcggttttcattaatcagag

SEQ ID NO: 4541 - DNA, 93 bp, synthetic construct
  misc_feature 1..93: note = engineered ribonucleic acid scaffold (ERS) sequence
  source 1..93: mol_type = other DNA
actggcgcttctatctgattactctgggagccatcaccagcgactatgtcgtagtgggtaaataatgaaaacttcggttttcattaatcagag

SEQ ID NO: 4542 - DNA, 93 bp, synthetic construct
  misc_feature 1..93: note = engineered ribonucleic acid scaffold (ERS) sequence
  source 1..93: mol_type = other DNA
actggcgcttctatctgattactctgtgagccatcaccagcgactatgtcgtagtgggtaaataatgaaaacttcggttttcattaatcagag

SEQ ID NO: 4543 - DNA, 94 bp, synthetic construct
  misc_feature 1..94: note = engineered ribonucleic acid scaffold (ERS) sequence
  source 1..94: mol_type = other DNA
actggcgcttctatctgattactctgaggagccatcaccagcgactatgtcgtagtgggtaaataatgaaaacttcggttttcattaatcagag

SEQ ID NO: 4544 - DNA, 93 bp, synthetic construct
  misc_feature 1..93: note = engineered ribonucleic acid scaffold (ERS) sequence
  source 1..93: mol_type = other DNA
actggcgcttctatctgattactctgatagccatcaccagcgactatgtcgtagtgggtaaataatgaaaacttcggttttcattaatcagag

SEQ ID NO: 4545 - DNA, 94 bp, synthetic construct
  misc_feature 1..94: note = engineered ribonucleic acid scaffold (ERS) sequence
  source 1..94: mol_type = other DNA
actggcgcttctatctgattactctgagctgccatcaccagcgactatgtcgtagtgggtaaataatgaaaacttcggttttcattaatcagag

SEQ ID NO: 4546 - DNA, 94 bp, synthetic construct
  misc_feature 1..94: note = engineered ribonucleic acid scaffold (ERS) sequence
  source 1..94: mol_type = other DNA
actggcacttctatctgattactctgagtagccatcaccagcgactatgtcgtagtgggtaaataatgaaaacttcggttttcattaatcagag

SEQ ID NO: 4547 - DNA, 94 bp, synthetic construct
  misc_feature 1..94: note = engineered ribonucleic acid scaffold (ERS) sequence
  source 1..94: mol_type = other DNA
actggcgcttctatctgattactctgagtagccatcaccagcgactatgtcgtagtgggtaaataatgaaaacttcggttttcattaatcagag

SEQ ID NO: 4548 - DNA, 93 bp, synthetic construct
  misc_feature 1..93: note = engineered ribonucleic acid scaffold (ERS) sequence
  source 1..93: mol_type = other DNA
actggcgcttctatctgattactctgagcaccatcaccagcgactatgtcgtagtgggtaaataatgaaaacttcggttttcattaatcagag

SEQ ID NO: 4549 - DNA, 93 bp, synthetic construct
  misc_feature 1..93: note = engineered ribonucleic acid scaffold (ERS) sequence
  source 1..93: mol_type = other DNA
actggcacttctatctgattactctgagcgccatcaccagcgactatgtcgtagtgggtaaataatgaaaacttcggttttcattaatcagag

SEQ ID NO: 4550 - DNA, 93 bp, synthetic construct
  misc_feature 1..93: note = engineered ribonucleic acid scaffold (ERS) sequence
  source 1..93: mol_type = other DNA
actggcgcttctatctgattactctgagggccatcaccagcgactatgtcgtagtgggtaaataatgaaaacttcggttttcattaatcagag

SEQ ID NO: 4551 - DNA, 93 bp, synthetic construct
  misc_feature 1..93: note = engineered ribonucleic acid scaffold (ERS) sequence
  source 1..93: mol_type = other DNA
actggcgcttctatctgattactctgagtgccgtcaccagcgactatgtcgtagtgggtaaataatgaaaacttcggttttcattaatcagag

SEQ ID NO: 4552 - DNA, 93 bp, synthetic construct
  misc_feature 1..93: note = engineered ribonucleic acid scaffold (ERS) sequence
  source 1..93: mol_type = other DNA
actggcacttctatctgattactctgagtgccatcaccagcgactatgtcgtagtgggtaaataatgaaaacttcggttttcattaatcagag

SEQ ID NO: 4553 - DNA, 93 bp, synthetic construct
  misc_feature 1..93: note = engineered ribonucleic acid scaffold (ERS) sequence
  source 1..93: mol_type = other DNA
actggcgcttctatctgattactctgagaaccatcaccagcgactatgtcgtagtgggtaaataatgaaaacttcggttttcattaatcagag

SEQ ID NO: 4554 - DNA, 93 bp, synthetic construct
  misc_feature 1..93: note = engineered ribonucleic acid scaffold (ERS) sequence
  source 1..93: mol_type = other DNA
actggcgcttctatctgattactctgagagccgtcaccagcgactatgtcgtagtgggtaaataatgaaaacttcggttttcattaatcagag

SEQ ID NO: 4555 - DNA, 93 bp, synthetic construct
  misc_feature 1..93: note = engineered ribonucleic acid scaffold (ERS) sequence
  source 1..93: mol_type = other DNA
actggcgcttctatctgattactctgagagccttcaccagcgactatgtcgtagtgggtaaataatgaaaacttcggttttcattaatcagag

SEQ ID NO: 4556 - DNA, 93 bp, synthetic construct
  misc_feature 1..93: note = engineered ribonucleic acid scaffold (ERS) sequence
  source 1..93: mol_type = other DNA
actggggcttctatctgattactctgagacccatcaccagcgactatgtcgtagtgggtaaataatgaaaacttcggttttcattaatcagag

SEQ ID NO: 4557 - DNA, 93 bp, synthetic construct
  misc_feature 1..93: note = engineered ribonucleic acid scaffold (ERS) sequence
  source 1..93: mol_type = other DNA
actggtgcttctatctgattactctgagagccatcaccagcgactatgtcgtagtgggtaaataatgaaaacttcggttttcattaatcagag

SEQ ID NO: 4558 - DNA, 93 bp, synthetic construct
  misc_feature 1..93: note = engineered ribonucleic acid scaffold (ERS) sequence
  source 1..93: mol_type = other DNA
actgggccttctatctgattactctgaggcccatcaccagcgactatgtcgtagtgggtaaataatgaaaacttcggttttcattaatcagag

SEQ ID NO: 4559 - DNA, 94 bp, synthetic construct
  misc_feature 1..94: note = engineered ribonucleic acid scaffold (ERS) sequence
  source 1..94: mol_type = other DNA
actggcccttctatctgattactctgaggagccatcaccagcgactatgtcgtagtgggtaaataatgaaaacttcggttttcattaatcagag

SEQ ID NO: 4560 - DNA, 93 bp, synthetic construct
  misc_feature 1..93: note = engineered ribonucleic acid scaffold (ERS) sequence
  source 1..93: mol_type = other DNA
actggcccttctatctgattactctgagggccatcaccagcgactatgtcgtagtgggtaaataatgaaaacttcggttttcattaatcagag

SEQ ID NO: 4561 - DNA, 93 bp, synthetic construct
  misc_feature 1..93: note = engineered ribonucleic acid scaffold (ERS) sequence
  source 1..93: mol_type = other DNA
actggcccttctatctgattactctgagtgccatcaccagcgactatgtcgtagtgggtaaataatgaaaacttcggttttcattaatcagag

SEQ ID NO: 4562 - DNA, 93 bp, synthetic construct
  misc_feature 1..93: note = engineered ribonucleic acid scaffold (ERS) sequence
  source 1..93: mol_type = other DNA
actggcccttctatctgattactctgagagccatcaccagcgactatgtcgtagtgggtaaataatgaaaacttcggttttcattaatcagag

SEQ ID NO: 4563 - DNA, 94 bp, synthetic construct
  misc_feature 1..94: note = engineered ribonucleic acid scaffold (ERS) sequence
  source 1..94: mol_type = other DNA
actggcgcttctatctgattactctgagcagccatcaccagcgactatgtcgtagtgggtaaataatgaaaacttcggttttcattaatcagag

SEQ ID NO: 4564 - DNA, 93 bp, synthetic construct; identical to SEQ ID NO: 704
  misc_feature 1..93: note = engineered ribonucleic acid scaffold (ERS) sequence
  source 1..93: mol_type = other DNA

SEQ ID NO: 4565 - DNA, 93 bp, synthetic construct
  misc_feature 1..93: note = engineered ribonucleic acid scaffold (ERS) sequence
  source 1..93: mol_type = other DNA
actggcgcttctatctgattactctgagtgccatcaccagcgactatgtcgtagtgggtaaataatgaaaacttcggttttcattaatcagag

SEQ ID NO: 4566 - DNA, 93 bp, synthetic construct
  misc_feature 1..93: note = engineered ribonucleic acid scaffold (ERS) sequence
  source 1..93: mol_type = other DNA
actggcgcttctatctgattactctgagagccatcaccagcgactatgtcgtagtgggtaaataatgaaaacttcggttttcattaatcagag

SEQ ID NO: 4567 - DNA, 93 bp, synthetic construct
  misc_feature 1..93: note = engineered ribonucleic acid scaffold (ERS) sequence
  source 1..93: mol_type = other DNA
actggctcttctatctgattactctgagcgccatcaccagcgactatgtcgtagtgggtaaataatgaaaacttcggttttcattaatcagag

SEQ ID NO: 4568 - DNA, 93 bp, synthetic construct
  misc_feature 1..93: note = engineered ribonucleic acid scaffold (ERS) sequence
  source 1..93: mol_type = other DNA
actggctcttctatctgattactctgagggccatcaccagcgactatgtcgtagtgggtaaataatgaaaacttcggttttcattaatcagag

SEQ ID NO: 4569 - DNA, 93 bp, synthetic construct
  misc_feature 1..93: note = engineered ribonucleic acid scaffold (ERS) sequence
  source 1..93: mol_type = other DNA
actggctcttctatctgattactctgagtgccatcaccagcgactatgtcgtagtgggtaaataatgaaaacttcggttttcattaatcagag

SEQ ID NO: 4570 - DNA, 93 bp, synthetic construct
  misc_feature 1..93: note = engineered ribonucleic acid scaffold (ERS) sequence
  source 1..93: mol_type = other DNA
actggctcttctatctgattactctgagagccatcaccagcgactatgtcgtagtgggtaaataatgaaaacttcggttttcattaatcagag

SEQ ID NO: 4571 - DNA, 93 bp, synthetic construct
  misc_feature 1..93: note = engineered ribonucleic acid scaffold (ERS) sequence
  source 1..93: mol_type = other DNA
actggcggttctatctgattactctgagcgccatcaccagcgactatgtcgtagtgggtaaataatgaaaacttcggttttcattaatcagag

SEQ ID NO: 4572 - DNA, 93 bp, synthetic construct
  misc_feature 1..93: note = engineered ribonucleic acid scaffold (ERS) sequence
  source 1..93: mol_type = other DNA
actggcggttctatctgattactctgagagccatcaccagcgactatgtcgtagtgggtaaataatgaaaacttcggttttcattaatcagag

SEQ ID NO: 4573 - DNA, 92 bp, synthetic construct
  misc_feature 1..92: note = engineered ribonucleic acid scaffold (ERS) sequence
  source 1..92: mol_type = other DNA
acacacggttctatctgattactctgccgtgttcaccagcgactatgtcgtagtgggtaaatcgtaagaacttcggttcttacgaatcagag

SEQ ID NO: 4574 - DNA, 92 bp, synthetic construct
  misc_feature 1..92: note = engineered ribonucleic acid scaffold (ERS) sequence
  source 1..92: mol_type = other DNA
acactggtttctatctgattactctgaccagttcaccagcgactatgtcgtagtgggtaaatcgtaagaacttcggttcttacgaatcagag

SEQ ID NO: 4575 - DNA, 92 bp, synthetic construct
  misc_feature 1..92: note = engineered ribonucleic acid scaffold (ERS) sequence
  source 1..92: mol_type = other DNA
acaggccgttctatctgattactctgcggccttcaccagcgactatgtcgtagtgggtaaatcgtaagaacttcggttcttacgaatcagag

SEQ ID NO: 4576 - DNA, 92 bp, synthetic construct
  misc_feature 1..92: note = engineered ribonucleic acid scaffold (ERS) sequence
  source 1..92: mol_type = other DNA
acaggtccttctatctgattactctgggaccttcaccagcgactatgtcgtagtgggtaaatcgtaagaacttcggttcttacgaatcagag

SEQ ID NO: 4577 - DNA, 92 bp, synthetic construct
  misc_feature 1..92: note = engineered ribonucleic acid scaffold (ERS) sequence
  source 1..92: mol_type = other DNA
accagcaattctatctgattactctgttgctgtcaccagcgactatgtcgtagtgggtaaatcgtaagaacttcggttcttacgaatcagag

SEQ ID NO: 4578 - DNA, 92 bp, synthetic construct
  misc_feature 1..92: note = engineered ribonucleic acid scaffold (ERS) sequence
  source 1..92: mol_type = other DNA
accgagacttctatctgattactctgggctcgtcaccagcgactatgtcgtagtgggtaaatcgtaagaacttcggttcttacgaatcagag

SEQ ID NO: 4579 - DNA, 92 bp, synthetic construct
  misc_feature 1..92: note = engineered ribonucleic acid scaffold (ERS) sequence
  source 1..92: mol_type = other DNA
acctgtagttctatctgattactctgctacagtcaccagcgactatgtcgtagtgggtaaatcgtaagaacttcggttcttacgaatcagag

SEQ ID NO: 4580 - DNA, 92 bp, synthetic construct
  misc_feature 1..92: note = engineered ribonucleic acid scaffold (ERS) sequence
  source 1..92: mol_type = other DNA
acgagcacttctatctgattactctggggctctcaccagcgactatgtcgtagtgggtaaatcgtaagaacttcggttcttacgaatcagag

SEQ ID NO: 4581 - DNA, 92 bp, synthetic construct
  misc_feature 1..92: note = engineered ribonucleic acid scaffold (ERS) sequence
  source 1..92: mol_type = other DNA
acgaggtgttctatctgattactctgcacctctcaccagcgactatgtcgtagtgggtaaatcgtaagaacttcggttcttacgaatcagag

SEQ ID NO: 4582 - DNA, 92 bp, synthetic construct
  misc_feature 1..92: note = engineered ribonucleic acid scaffold (ERS) sequence
  source 1..92: mol_type = other DNA
acgggactttctatctgattactctgagtccctcaccagcgactatgtcgtagtgggtaaatcgtaagaacttcggttcttacgaatcagag

SEQ ID NO: 4583 - DNA, 92 bp, synthetic construct
  misc_feature 1..92: note = engineered ribonucleic acid scaffold (ERS) sequence
  source 1..92: mol_type = other DNA
acgggcaattctatctgattactctgttgccctcaccagcgactatgtcgtagtgggtaaatcgtaagaacttcggttcttacgaatcagag

SEQ ID NO: 4584 - DNA, 92 bp, synthetic construct
  misc_feature 1..92: note = engineered ribonucleic acid scaffold (ERS) sequence
  source 1..92: mol_type = other DNA
actgtgcgttctatctgattactctgcgcacatcaccagcgactatgtcgtagtgggtaaatcgtaagaacttcggttcttacgaatcagag

SEQ ID NO: 4585 - DNA, 93 bp, synthetic construct
  misc_feature 1..93: note = engineered ribonucleic acid scaffold (ERS) sequence
  source 1..93: mol_type = other DNA
actggcgcttctatctgattactctgggcgccatcaccagcgactatgtcgtagtgggtaaatcgtaagaacttcggttcttacgaatcagag

SEQ ID NO: 4586 - DNA, 93 bp, synthetic construct
  misc_feature 1..93: note = engineered ribonucleic acid scaffold (ERS) sequence
  source 1..93: mol_type = other DNA
actggcgcttctatctgattactctgggagccatcaccagcgactatgtcgtagtgggtaaatcgtaagaacttcggttcttacgaatcagag

SEQ ID NO: 4587 - DNA, 93 bp, synthetic construct
  misc_feature 1..93: note = engineered ribonucleic acid scaffold (ERS) sequence
  source 1..93: mol_type = other DNA
actggcgcttctatctgattactctgtgagccatcaccagcgactatgtcgtagtgggtaaatcgtaagaacttcggttcttacgaatcagag

SEQ ID NO: 4588 - DNA, 94 bp, synthetic construct
  misc_feature 1..94: note = engineered ribonucleic acid scaffold (ERS) sequence
  source 1..94: mol_type = other DNA
actggcgcttctatctgattactctgaggagccatcaccagcgactatgtcgtagtgggtaaatcgtaagaacttcggttcttacgaatcagag

SEQ ID NO: 4589 - DNA, 93 bp, synthetic construct
  misc_feature 1..93: note = engineered ribonucleic acid scaffold (ERS) sequence
  source 1..93: mol_type = other DNA
actggcgcttctatctgattactctgatagccatcaccagcgactatgtcgtagtgggtaaatcgtaagaacttcggttcttacgaatcagag

SEQ ID NO: 4590 - DNA, 94 bp, synthetic construct
  misc_feature 1..94: note = engineered ribonucleic acid scaffold (ERS) sequence
  source 1..94: mol_type = other DNA
actggcgcttctatctgattactctgagctgccatcaccagcgactatgtcgtagtgggtaaatcgtaagaacttcggttcttacgaatcagag

SEQ ID NO: 4591 - DNA, 94 bp, synthetic construct
  misc_feature 1..94: note = engineered ribonucleic acid scaffold (ERS) sequence
  source 1..94: mol_type = other DNA
actggcacttctatctgattactctgagtagccatcaccagcgactatgtcgtagtgggtaaatcgtaagaacttcggttcttacgaatcagag

SEQ ID NO: 4592 - DNA, 94 bp, synthetic construct
  misc_feature 1..94: note = engineered ribonucleic acid scaffold (ERS) sequence
  source 1..94: mol_type = other DNA
actggcgcttctatctgattactctgagtagccatcaccagcgactatgtcgtagtgggtaaatcgtaagaacttcggttcttacgaatcagag

SEQ ID NO: 4593 - DNA, 93 bp, synthetic construct
  misc_feature 1..93: note = engineered ribonucleic acid scaffold (ERS) sequence
  source 1..93: mol_type = other DNA
actggcgcttctatctgattactctgagcaccatcaccagcgactatgtcgtagtgggtaaatcgtaagaacttcggttcttacgaatcagag

SEQ ID NO: 4594 - DNA, 93 bp, synthetic construct
  misc_feature 1..93: note = engineered ribonucleic acid scaffold (ERS) sequence
  source 1..93: mol_type = other DNA
actggcacttctatctgattactctgagcgccatcaccagcgactatgtcgtagtgggtaaatcgtaagaacttcggttcttacgaatcagag

SEQ ID NO: 4595 - DNA, 93 bp, synthetic construct
  misc_feature 1..93: note = engineered ribonucleic acid scaffold (ERS) sequence
  source 1..93: mol_type = other DNA
actggcgcttctatctgattactctgagggccatcaccagcgactatgtcgtagtgggtaaatcgtaagaacttcggttcttacgaatcagag

SEQ ID NO: 4596 - DNA, 93 bp, synthetic construct
  misc_feature 1..93: note = engineered ribonucleic acid scaffold (ERS) sequence
  source 1..93: mol_type = other DNA
actggcgcttctatctgattactctgagtgccgtcaccagcgactatgtcgtagtgggtaaatcgtaagaacttcggttcttacgaatcagag

SEQ ID NO: 4597 - DNA, 93 bp, synthetic construct
  misc_feature 1..93: note = engineered ribonucleic acid scaffold (ERS) sequence
  source 1..93: mol_type = other DNA
actggcacttctatctgattactctgagtgccatcaccagcgactatgtcgtagtgggtaaatcgtaagaacttcggttcttacgaatcagag

SEQ ID NO: 4598 - DNA, 93 bp, synthetic construct
  misc_feature 1..93: note = engineered ribonucleic acid scaffold (ERS) sequence
  source 1..93: mol_type = other DNA
actggcgcttctatctgattactctgagaaccatcaccagcgactatgtcgtagtgggtaaatcgtaagaacttcggttcttacgaatcagag

SEQ ID NO: 4599 - DNA, 93 bp, synthetic construct
  misc_feature 1..93: note = engineered ribonucleic acid scaffold (ERS) sequence
  source 1..93: mol_type = other DNA
actggcgcttctatctgattactctgagagccgtcaccagcgactatgtcgtagtgggtaaatcgtaagaacttcggttcttacgaatcagag

SEQ ID NO: 4600 - DNA, 93 bp, synthetic construct
  misc_feature 1..93: note = engineered ribonucleic acid scaffold (ERS) sequence
  source 1..93: mol_type = other DNA
actggcgcttctatctgattactctgagagccttcaccagcgactatgtcgtagtgggtaaatcgtaagaacttcggttcttacgaatcagag

SEQ ID NO: 4601 - DNA, 93 bp, synthetic construct
  misc_feature 1..93: note = engineered ribonucleic acid scaffold (ERS) sequence
  source 1..93: mol_type = other DNA
actggggcttctatctgattactctgagacccatcaccagcgactatgtcgtagtgggtaaatcgtaagaacttcggttcttacgaatcagag

SEQ ID NO: 4602 - DNA, 93 bp, synthetic construct
  misc_feature 1..93: note = engineered ribonucleic acid scaffold (ERS) sequence
  source 1..93: mol_type = other DNA
actggtgcttctatctgattactctgagagccatcaccagcgactatgtcgtagtgggtaaatcgtaagaacttcggttcttacgaatcagag

SEQ ID NO: 4603 - DNA, 93 bp, synthetic construct
  misc_feature 1..93: note = engineered ribonucleic acid scaffold (ERS) sequence
  source 1..93: mol_type = other DNA
actgggccttctatctgattactctgaggcccatcaccagcgactatgtcgtagtgggtaaatcgtaagaacttcggttcttacgaatcagag

SEQ ID NO: 4604 - DNA, 94 bp, synthetic construct
  misc_feature 1..94: note = engineered ribonucleic acid scaffold (ERS) sequence
  source 1..94: mol_type = other DNA
actggcccttctatctgattactctgaggagccatcaccagcgactatgtcgtagtgggtaaatcgtaagaacttcggttcttacgaatcagag

SEQ ID NO: 4605 - DNA, 93 bp, synthetic construct
  misc_feature 1..93: note = engineered ribonucleic acid scaffold (ERS) sequence
  source 1..93: mol_type = other DNA
actggcccttctatctgattactctgagggccatcaccagcgactatgtcgtagtgggtaaatcgtaagaacttcggttcttacgaatcagag

SEQ ID NO: 4606 - DNA, 93 bp, synthetic construct
  misc_feature 1..93: note = engineered ribonucleic acid scaffold (ERS) sequence
  source 1..93: mol_type = other DNA
actggcccttctatctgattactctgagtgccatcaccagcgactatgtcgtagtgggtaaatcgtaagaacttcggttcttacgaatcagag

SEQ ID NO: 4607 - DNA, 93 bp, synthetic construct
  misc_feature 1..93: note = engineered ribonucleic acid scaffold (ERS) sequence
  source 1..93: mol_type = other DNA
actggcccttctatctgattactctgagagccatcaccagcgactatgtcgtagtgggtaaatcgtaagaacttcggttcttacgaatcagag

SEQ ID NO: 4608 - DNA, 94 bp, synthetic construct
  misc_feature 1..94: note = engineered ribonucleic acid scaffold (ERS) sequence
  source 1..94: mol_type = other DNA
actggcgcttctatctgattactctgagcagccatcaccagcgactatgtcgtagtgggtaaatcgtaagaacttcggttcttacgaatcagag

SEQ ID NO: 4609 - DNA, 93 bp, synthetic construct; identical to SEQ ID NO: 702
  misc_feature 1..93: note = engineered ribonucleic acid scaffold (ERS) sequence
  source 1..93: mol_type = other DNA

SEQ ID NO: 4610 - DNA, 93 bp, synthetic construct
  misc_feature 1..93: note = engineered ribonucleic acid scaffold (ERS) sequence
  source 1..93: mol_type = other DNA
actggcgcttctatctgattactctgagtgccatcaccagcgactatgtcgtagtgggtaaatcgtaagaacttcggttcttacgaatcagag

SEQ ID NO: 4611 - DNA, 93 bp, synthetic construct
  misc_feature 1..93: note = engineered ribonucleic acid scaffold (ERS) sequence
  source 1..93: mol_type = other DNA
actggcgcttctatctgattactctgagagccatcaccagcgactatgtcgtagtgggtaaatcgtaagaacttcggttcttacgaatcagag

SEQ ID NO: 4612 - DNA, 93 bp, synthetic construct
  misc_feature 1..93: note = engineered ribonucleic acid scaffold (ERS) sequence
  source 1..93: mol_type = other DNA
actggctcttctatctgattactctgagcgccatcaccagcgactatgtcgtagtgggtaaatcgtaagaacttcggttcttacgaatcagag

SEQ ID NO: 4613 - DNA, 93 bp, synthetic construct
  misc_feature 1..93: note = engineered ribonucleic acid scaffold (ERS) sequence
  source 1..93: mol_type = other DNA
actggctcttctatctgattactctgagggccatcaccagcgactatgtcgtagtgggtaaatcgtaagaacttcggttcttacgaatcagag

SEQ ID NO: 4614 - DNA, 93 bp, synthetic construct
  misc_feature 1..93: note = engineered ribonucleic acid scaffold (ERS) sequence
  source 1..93: mol_type = other DNA
actggctcttctatctgattactctgagtgccatcaccagcgactatgtcgtagtgggtaaatcgtaagaacttcggttcttacgaatcagag

SEQ ID NO: 4615 - DNA, 93 bp, synthetic construct
  misc_feature 1..93: note = engineered ribonucleic acid scaffold (ERS) sequence
  source 1..93: mol_type = other DNA
actggctcttctatctgattactctgagagccatcaccagcgactatgtcgtagtgggtaaatcgtaagaacttcggttcttacgaatcagag

SEQ ID NO: 4616 - DNA, 93 bp, synthetic construct
  misc_feature 1..93: note = engineered ribonucleic acid scaffold (ERS) sequence
  source 1..93: mol_type = other DNA
actggcggttctatctgattactctgagcgccatcaccagcgactatgtcgtagtgggtaaatcgtaagaacttcggttcttacgaatcagag

SEQ ID NO: 4617 - DNA, 93 bp, synthetic construct
  misc_feature 1..93: note = engineered ribonucleic acid scaffold (ERS) sequence
  source 1..93: mol_type = other DNA
actggcggttctatctgattactctgagagccatcaccagcgactatgtcgtagtgggtaaatcgtaagaacttcggttcttacgaatcagag

SEQ ID NO: 4618 - DNA, 92 bp, synthetic construct
  misc_feature 1..92: note = engineered ribonucleic acid scaffold (ERS) sequence
  source 1..92: mol_type = other DNA
acacacggttctatctgattactctgccgtgttcaccagcgactatgtcgtagtgggtaaatggaagatgcttcggcatcttccaatcagag

SEQ ID NO: 4619 - DNA, 92 bp, synthetic construct
  misc_feature 1..92: note = engineered ribonucleic acid scaffold (ERS) sequence
  source 1..92: mol_type = other DNA
acactggtttctatctgattactctgaccagttcaccagcgactatgtcgtagtgggtaaatggaagatgcttcggcatcttccaatcagag

SEQ ID NO: 4620 - DNA, 92 bp, synthetic construct
  misc_feature 1..92: note = engineered ribonucleic acid scaffold (ERS) sequence
  source 1..92: mol_type = other DNA
acaggccgttctatctgattactctgcggccttcaccagcgactatgtcgtagtgggtaaatggaagatgcttcggcatcttccaatcagag

SEQ ID NO: 4621 - DNA, 92 bp, synthetic construct
  misc_feature 1..92: note = engineered ribonucleic acid scaffold (ERS) sequence
  source 1..92: mol_type = other DNA
acaggtccttctatctgattactctgggaccttcaccagcgactatgtcgtagtgggtaaatggaagatgcttcggcatcttccaatcagag

SEQ ID NO: 4622 - DNA, 92 bp, synthetic construct
  misc_feature 1..92: note = engineered ribonucleic acid scaffold (ERS) sequence
  source 1..92: mol_type = other DNA
accagcaattctatctgattactctgttgctgtcaccagcgactatgtcgtagtgggtaaatggaagatgcttcggcatcttccaatcagag

SEQ ID NO: 4623 - DNA, 92 bp, synthetic construct
  misc_feature 1..92: note = engineered ribonucleic acid scaffold (ERS) sequence
  source 1..92: mol_type = other DNA
accgagacttctatctgattactctgggctcgtcaccagcgactatgtcgtagtgggtaaatggaagatgcttcggcatcttccaatcagag

SEQ ID NO: 4624 - DNA, 92 bp, synthetic construct
  misc_feature 1..92: note = engineered ribonucleic acid scaffold (ERS) sequence
  source 1..92: mol_type = other DNA
acctgtagttctatctgattactctgctacagtcaccagcgactatgtcgtagtgggtaaatggaagatgcttcggcatcttccaatcagag

SEQ ID NO: 4625 - DNA, 92 bp, synthetic construct
  misc_feature 1..92: note = engineered ribonucleic acid scaffold (ERS) sequence
  source 1..92: mol_type = other DNA
acgagcacttctatctgattactctggggctctcaccagcgactatgtcgtagtgggtaaatggaagatgcttcggcatcttccaatcagag

SEQ ID NO: 4626 - DNA, 92 bp, synthetic construct
  misc_feature 1..92: note = engineered ribonucleic acid scaffold (ERS) sequence
  source 1..92: mol_type = other DNA
acgaggtgttctatctgattactctgcacctctcaccagcgactatgtcgtagtgggtaaatggaagatgcttcggcatcttccaatcagag

SEQ ID NO: 4627 - DNA, 92 bp, synthetic construct
  misc_feature 1..92: note = engineered ribonucleic acid scaffold (ERS) sequence
  source 1..92: mol_type = other DNA
acgggactttctatctgattactctgagtccctcaccagcgactatgtcgtagtgggtaaatggaagatgcttcggcatcttccaatcagag

SEQ ID NO: 4628 - DNA, 92 bp, synthetic construct
  misc_feature 1..92: note = engineered ribonucleic acid scaffold (ERS) sequence
  source 1..92: mol_type = other DNA
acgggcaattctatctgattactctgttgccctcaccagcgactatgtcgtagtgggtaaatggaagatgcttcggcatcttccaatcagag

SEQ ID NO: 4629 - DNA, 92 bp, synthetic construct
  misc_feature 1..92: note = engineered ribonucleic acid scaffold (ERS) sequence
  source 1..92: mol_type = other DNA
actgtgcgttctatctgattactctgcgcacatcaccagcgactatgtcgtagtgggtaaatggaagatgcttcggcatcttccaatcagag

SEQ ID NO: 4630 - DNA, 93 bp, synthetic construct
  misc_feature 1..93: note = engineered ribonucleic acid scaffold (ERS) sequence
  source 1..93: mol_type = other DNA
actggcgcttctatctgattactctgggcgccatcaccagcgactatgtcgtagtgggtaaatggaagatgcttcggcatcttccaatcagag

SEQ ID NO: 4631 - DNA, 93 bp, synthetic construct
  misc_feature 1..93: note = engineered ribonucleic acid scaffold (ERS) sequence
  source 1..93: mol_type = other DNA
actggcgcttctatctgattactctgggagccatcaccagcgactatgtcgtagtgggtaaatggaagatgcttcggcatcttccaatcagag

SEQ ID NO: 4632 - DNA, 93 bp, synthetic construct
  misc_feature 1..93: note = engineered ribonucleic acid scaffold (ERS) sequence
  source 1..93: mol_type = other DNA
actggcgcttctatctgattactctgtgagccatcaccagcgactatgtcgtagtgggtaaatggaagatgcttcggcatcttccaatcagag

SEQ ID NO: 4633 - DNA, 94 bp, synthetic construct
  misc_feature 1..94: note = engineered ribonucleic acid scaffold (ERS) sequence
  source 1..94: mol_type = other DNA
actggcgcttctatctgattactctgaggagccatcaccagcgactatgtcgtagtgggtaaatggaagatgcttcggcatcttccaatcagag

SEQ ID NO: 4634 - DNA, 93 bp, synthetic construct
  misc_feature 1..93: note = engineered ribonucleic acid scaffold (ERS) sequence
  source 1..93: mol_type = other DNA
actggcgcttctatctgattactctgatagccatcaccagcgactatgtcgtagtgggtaaatggaagatgcttcggcatcttccaatcagag

SEQ ID NO: 4635 - DNA, 94 bp, synthetic construct
  misc_feature 1..94: note = engineered ribonucleic acid scaffold (ERS) sequence
  source 1..94: mol_type = other DNA
actggcgcttctatctgattactctgagctgccatcaccagcgactatgtcgtagtgggtaaatggaagatgcttcggcatcttccaatcagag

SEQ ID NO: 4636 - DNA, 94 bp, synthetic construct
  misc_feature 1..94: note = engineered ribonucleic acid scaffold (ERS) sequence
  source 1..94: mol_type = other DNA
actggcacttctatctgattactctgagtagccatcaccagcgactatgtcgtagtgggtaaatggaagatgcttcggcatcttccaatcagag

SEQ ID NO: 4637 - DNA, 94 bp, synthetic construct
  misc_feature 1..94: note = engineered ribonucleic acid scaffold (ERS) sequence
  source 1..94: mol_type = other DNA
actggcgcttctatctgattactctgagtagccatcaccagcgactatgtcgtagtgggtaaatggaagatgcttcggcatcttccaatcagag

SEQ ID NO: 4638 - DNA, 93 bp, synthetic construct
  misc_feature 1..93: note = engineered ribonucleic acid scaffold (ERS) sequence
  source 1..93: mol_type = other DNA
actggcgcttctatctgattactctgagcaccatcaccagcgactatgtcgtagtgggtaaatggaagatgcttcggcatcttccaatcagag

SEQ ID NO: 4639 - DNA, 93 bp, synthetic construct
  misc_feature 1..93: note = engineered ribonucleic acid scaffold (ERS) sequence
  source 1..93: mol_type = other DNA
actggcacttctatctgattactctgagcgccatcaccagcgactatgtcgtagtgggtaaatggaagatgcttcggcatcttccaatcagag

SEQ ID NO: 4640 - DNA, 93 bp, synthetic construct
  misc_feature 1..93: note = engineered ribonucleic acid scaffold (ERS) sequence
  source 1..93: mol_type = other DNA
actggcgcttctatctgattactctgagggccatcaccagcgactatgtcgtagtgggtaaatggaagatgcttcggcatcttccaatcagag

SEQ ID NO: 4641 - DNA, 93 bp, synthetic construct
  misc_feature 1..93: note = engineered ribonucleic acid scaffold (ERS) sequence
  source 1..93: mol_type = other DNA
actggcgcttctatctgattactctgagtgccgtcaccagcgactatgtcgtagtgggtaaatggaagatgcttcggcatcttccaatcagag

SEQ ID NO: 4642 - DNA, 93 bp, synthetic construct
  misc_feature 1..93: note = engineered ribonucleic acid scaffold (ERS) sequence
  source 1..93: mol_type = other DNA
actggcacttctatctgattactctgagtgccatcaccagcgactatgtcgtagtgggtaaatggaagatgcttcggcatcttccaatcagag

SEQ ID NO: 4643 - DNA, 93 bp, synthetic construct
  misc_feature 1..93: note = engineered ribonucleic acid scaffold (ERS) sequence
  source 1..93: mol_type = other DNA
actggcgcttctatctgattactctgagaaccatcaccagcgactatgtcgtagtgggtaaatggaagatgcttcggcatcttccaatcagag

SEQ ID NO: 4644 - DNA, 93 bp, synthetic construct
  misc_feature 1..93: note = engineered ribonucleic acid scaffold (ERS) sequence
  source 1..93: mol_type = other DNA
actggcgcttctatctgattactctgagagccgtcaccagcgactatgtcgtagtgggtaaatggaagatgcttcggcatcttccaatcagag

SEQ ID NO: 4645 - DNA, 93 bp, synthetic construct
  misc_feature 1..93: note = engineered ribonucleic acid scaffold (ERS) sequence
  source 1..93: mol_type = other DNA
actggcgcttctatctgattactctgagagccttcaccagcgactatgtcgtagtgggtaaatggaagatgcttcggcatcttccaatcagag

SEQ ID NO: 4646 - DNA, 93 bp, synthetic construct
  misc_feature 1..93: note = engineered ribonucleic acid scaffold (ERS) sequence
  source 1..93: mol_type = other DNA
actggggcttctatctgattactctgagacccatcaccagcgactatgtcgtagtgggtaaatggaagatgcttcggcatcttccaatcagag

SEQ ID NO: 4647 - DNA, 93 bp, synthetic construct
  misc_feature 1..93: note = engineered ribonucleic acid scaffold (ERS) sequence
  source 1..93: mol_type = other DNA
actggtgcttctatctgattactctgagagccatcaccagcgactatgtcgtagtgggtaaatggaagatgcttcggcatcttccaatcagag

SEQ ID NO: 4648 - DNA, 93 bp, synthetic construct
  misc_feature 1..93: note = engineered ribonucleic acid scaffold (ERS) sequence
  source 1..93: mol_type = other DNA
actgggccttctatctgattactctgaggcccatcaccagcgactatgtcgtagtgggtaaatggaagatgcttcggcatcttccaatcagag

SEQ ID NO: 4649 - DNA, 94 bp, synthetic construct
  misc_feature 1..94: note = engineered ribonucleic acid scaffold (ERS) sequence
  source 1..94: mol_type = other DNA
actggcccttctatctgattactctgaggagccatcaccagcgactatgtcgtagtgggtaaatggaagatgcttcggcatcttccaatcagag

SEQ ID NO: 4650 - DNA, 93 bp, synthetic construct
  misc_feature 1..93: note = engineered ribonucleic acid scaffold (ERS) sequence
  source 1..93: mol_type = other DNA
actggcccttctatctgattactctgagggccatcaccagcgactatgtcgtagtgggtaaatggaagatgcttcggcatcttccaatcagag

SEQ ID NO: 4651 - DNA, 93 bp, synthetic construct
  misc_feature 1..93: note = engineered ribonucleic acid scaffold (ERS) sequence
  source 1..93: mol_type = other DNA
actggcccttctatctgattactctgagtgccatcaccagcgactatgtcgtagtgggtaaatggaagatgcttcggcatcttccaatcagag

SEQ ID NO: 4652 - DNA, 93 bp, synthetic construct
  misc_feature 1..93: note = engineered ribonucleic acid scaffold (ERS) sequence
  source 1..93: mol_type = other DNA
actggcccttctatctgattactctgagagccatcaccagcgactatgtcgtagtgggtaaatggaagatgcttcggcatcttccaatcagag

SEQ ID NO: 4653 - DNA, 94 bp, synthetic construct
  misc_feature 1..94: note = engineered ribonucleic acid scaffold (ERS) sequence
  source 1..94: mol_type = other DNA
actggcgcttctatctgattactctgagcagccatcaccagcgactatgtcgtagtgggtaaatggaagatgcttcggcatcttccaatcagag

SEQ ID NO: 4654 - DNA, 93 bp, synthetic construct; identical to SEQ ID NO: 705
  misc_feature 1..93: note = engineered ribonucleic acid scaffold (ERS) sequence
  source 1..93: mol_type = other DNA

SEQ ID NO: 4655 - DNA, 93 bp, synthetic construct
  misc_feature 1..93: note = engineered ribonucleic acid scaffold (ERS) sequence
  source 1..93: mol_type = other DNA
actggcgcttctatctgattactctgagtgccatcaccagcgactatgtcgtagtgggtaaatggaagatgcttcggcatcttccaatcagag

SEQ ID NO: 4656 - DNA, 93 bp, synthetic construct
  misc_feature 1..93: note = engineered ribonucleic acid scaffold (ERS) sequence
  source 1..93: mol_type = other DNA
actggcgcttctatctgattactctgagagccatcaccagcgactatgtcgtagtgggtaaatggaagatgcttcggcatcttccaatcagag

SEQ ID NO: 4657 - DNA, 93 bp, synthetic construct
  misc_feature 1..93: note = engineered ribonucleic acid scaffold (ERS) sequence
  source 1..93: mol_type = other DNA
actggctcttctatctgattactctgagcgccatcaccagcgactatgtcgtagtgggtaaatggaagatgcttcggcatcttccaatcagag

SEQ ID NO: 4658 - DNA, 93 bp, synthetic construct
  misc_feature 1..93: note = engineered ribonucleic acid scaffold (ERS) sequence
  source 1..93: mol_type = other DNA
actggctcttctatctgattactctgagggccatcaccagcgactatgtcgtagtgggtaaatggaagatgcttcggcatcttccaatcagag

SEQ ID NO: 4659 - DNA, 93 bp, synthetic construct
  misc_feature 1..93: note = engineered ribonucleic acid scaffold (ERS) sequence
  source 1..93: mol_type = other DNA
actggctcttctatctgattactctgagtgccatcaccagcgactatgtcgtagtgggtaaatggaagatgcttcggcatcttccaatcagag

SEQ ID NO: 4660 - DNA, 93 bp, synthetic construct
  misc_feature 1..93: note = engineered ribonucleic acid scaffold (ERS) sequence
  source 1..93: mol_type = other DNA
actggctcttctatctgattactctgagagccatcaccagcgactatgtcgtagtgggtaaatggaagatgcttcggcatcttccaatcagag

SEQ ID NO: 4661 - DNA, 93 bp, synthetic construct
  misc_feature 1..93: note = engineered ribonucleic acid scaffold (ERS) sequence
  source 1..93: mol_type = other DNA
actggcggttctatctgattactctgagcgccatcaccagcgactatgtcgtagtgggtaaatggaagatgcttcggcatcttccaatcagag

SEQ ID NO: 4662 - DNA, 93 bp, synthetic construct
  misc_feature 1..93: note = engineered ribonucleic acid scaffold (ERS) sequence
  source 1..93: mol_type = other DNA
actggcggttctatctgattactctgagagccatcaccagcgactatgtcgtagtgggtaaatggaagatgcttcggcatcttccaatcagag

SEQ ID NO: 4663 - DNA, 96 bp, synthetic construct
  misc_feature 1..96: note = engineered ribonucleic acid scaffold (ERS) sequence
  source 1..96: mol_type = other DNA
acacacggttctatctgattactctgccgtgttcaccagcgactatgtcgtagtgggtaaagcccttacggacttcggtccgtaagggcatcagag

SEQ ID NO: 4664 - DNA, 96 bp, synthetic construct
  misc_feature 1..96: note = engineered ribonucleic acid scaffold (ERS) sequence
  source 1..96: mol_type = other DNA
acactggtttctatctgattactctgaccagttcaccagcgactatgtcgtagtgggtaaagcccttacggacttcggtccgtaagggcatcagag

SEQ ID NO: 4665 - DNA, 96 bp, synthetic construct
  misc_feature 1..96: note = engineered ribonucleic acid scaffold (ERS) sequence
  source 1..96: mol_type = other DNA
acaggccgttctatctgattactctgcggccttcaccagcgactatgtcgtagtgggtaaagcccttacggacttcggtccgtaagggcatcagag

SEQ ID NO: 4666 - DNA, 96 bp, synthetic construct
  misc_feature 1..96: note = engineered ribonucleic acid scaffold (ERS) sequence
  source 1..96: mol_type = other DNA
acaggtccttctatctgattactctgggaccttcaccagcgactatgtcgtagtgggtaaagcccttacggacttcggtccgtaagggcatcagag

SEQ ID NO: 4667 - DNA, 96 bp, synthetic construct
  misc_feature 1..96: note = engineered ribonucleic acid scaffold (ERS) sequence
  source 1..96: mol_type = other DNA
accagcaattctatctgattactctgttgctgtcaccagcgactatgtcgtagtgggtaaagcccttacggacttcggtccgtaagggcatcagag

SEQ ID NO: 4668 - DNA, 96 bp, synthetic construct
  misc_feature 1..96: note = engineered ribonucleic acid scaffold (ERS) sequence
  source 1..96: mol_type = other DNA
accgagacttctatctgattactctgggctcgtcaccagcgactatgtcgtagtgggtaaagcccttacggacttcggtccgtaagggcatcagag

SEQ ID NO: 4669 - DNA, 96 bp, synthetic construct
  misc_feature 1..96: note = engineered ribonucleic acid scaffold (ERS) sequence
  source 1..96: mol_type = other DNA
acctgtagttctatctgattactctgctacagtcaccagcgactatgtcgtagtgggtaaagcccttacggacttcggtccgtaagggcatcagag

SEQ ID NO: 4670 - DNA, 96 bp, synthetic construct
  misc_feature 1..96: note = engineered ribonucleic acid scaffold (ERS) sequence
  source 1..96: mol_type = other DNA
acgagcacttctatctgattactctggggctctcaccagcgactatgtcgtagtgggtaaagcccttacggacttcggtccgtaagggcatcagag

SEQ ID NO: 4671 - DNA, 96 bp, synthetic construct
  misc_feature 1..96: note = engineered ribonucleic acid scaffold (ERS) sequence
  source 1..96: mol_type = other DNA
acgaggtgttctatctgattactctgcacctctcaccagcgactatgtcgtagtgggtaaagcccttacggacttcggtccgtaagggcatcagag

SEQ ID NO: 4672 - DNA, 96 bp, synthetic construct
  misc_feature 1..96: note = engineered ribonucleic acid scaffold (ERS) sequence
  source 1..96: mol_type = other DNA
acgggactttctatctgattactctgagtccctcaccagcgactatgtcgtagtgggtaaagcccttacggacttcggtccgtaagggcatcagag

SEQ ID NO: 4673 - DNA, 96 bp, synthetic construct
  misc_feature 1..96: note = engineered ribonucleic acid scaffold (ERS) sequence
  source 1..96: mol_type = other DNA
acgggcaattctatctgattactctgttgccctcaccagcgactatgtcgtagtgggtaaagcccttacggacttcggtccgtaagggcatcagag

SEQ ID NO: 4674 - DNA, 96 bp, synthetic construct
  misc_feature 1..96: note = engineered ribonucleic acid scaffold (ERS) sequence
  source 1..96: mol_type = other DNA
actgtgcgttctatctgattactctgcgcacatcaccagcgactatgtcgtagtgggtaaagcccttacggacttcggtccgtaagggcatcagag

SEQ ID NO: 4675 - DNA, 97 bp, synthetic construct
  misc_feature 1..97: note = engineered ribonucleic acid scaffold (ERS) sequence
  source 1..97: mol_type = other DNA
actggcgcttctatctgattactctgggcgccatcaccagcgactatgtcgtagtgggtaaagcccttacggacttcggtccgtaagggcatcagag

SEQ ID NO: 4676 - DNA, 97 bp, synthetic construct
  misc_feature 1..97: note = engineered ribonucleic acid scaffold (ERS) sequence
  source 1..97: mol_type = other DNA
actggcgcttctatctgattactctgggagccatcaccagcgactatgtcgtagtgggtaaagcccttacggacttcggtccgtaagggcatcagag

SEQ ID NO: 4677 - DNA, 97 bp, synthetic construct
  misc_feature 1..97: note = engineered ribonucleic acid scaffold (ERS) sequence
  source 1..97: mol_type = other DNA
actggcgcttctatctgattactctgtgagccatcaccagcgactatgtcgtagtgggtaaagcccttacggacttcggtccgtaagggcatcagag

SEQ ID NO: 4678 - DNA, 98 bp, synthetic construct
  misc_feature 1..98: note = engineered ribonucleic acid scaffold (ERS) sequence
  source 1..98: mol_type = other DNA
actggcgcttctatctgattactctgaggagccatcaccagcgactatgtcgtagtgggtaaagcccttacggacttcggtccgtaagggcatcagag

SEQ ID NO: 4679 - DNA, 97 bp, synthetic construct
  misc_feature 1..97: note = engineered ribonucleic acid scaffold (ERS) sequence
  source 1..97: mol_type = other DNA
actggcgcttctatctgattactctgatagccatcaccagcgactatgtcgtagtgggtaaagcccttacggacttcggtccgtaagggcatcagag

SEQ ID NO: 4680 - DNA, 98 bp, synthetic construct
  misc_feature 1..98: note = engineered ribonucleic acid scaffold (ERS) sequence
  source 1..98: mol_type = other DNA
actggcgcttctatctgattactctgagctgccatcaccagcgactatgtcgtagtgggtaaagcccttacggacttcggtccgtaagggcatcagag

SEQ ID NO: 4681 - DNA, 98 bp, synthetic construct
  misc_feature 1..98: note = engineered ribonucleic acid scaffold (ERS) sequence
  source 1..98: mol_type = other DNA
actggcacttctatctgattactctgagtagccatcaccagcgactatgtcgtagtgggtaaagcccttacggacttcggtccgtaagggcatcagag

SEQ ID NO: 4682 - DNA, 98 bp, synthetic construct
  misc_feature 1..98: note = engineered ribonucleic acid scaffold (ERS) sequence
  source 1..98: mol_type = other DNA
actggcgcttctatctgattactctgagtagccatcaccagcgactatgtcgtagtgggtaaagcccttacggacttcggtccgtaagggcatcagag

SEQ ID NO: 4683 - DNA, 97 bp, synthetic construct
  misc_feature 1..97: note = engineered ribonucleic acid scaffold (ERS) sequence
  source 1..97: mol_type = other DNA
actggcgcttctatctgattactctgagcaccatcaccagcgactatgtcgtagtgggtaaagcccttacggacttcggtccgtaagggcatcagag

SEQ ID NO: 4684 - DNA, 97 bp, synthetic construct
  misc_feature 1..97: note = engineered ribonucleic acid scaffold (ERS) sequence
  source 1..97: mol_type = other DNA
actggcacttctatctgattactctgagcgccatcaccagcgactatgtcgtagtgggtaaagcccttacggacttcggtccgtaagggcatcagag

SEQ ID NO: 4685 - DNA, 97 bp, synthetic construct
  misc_feature 1..97: note = engineered ribonucleic acid scaffold (ERS) sequence
  source 1..97: mol_type = other DNA
actggcgcttctatctgattactctgagggccatcaccagcgactatgtcgtagtgggtaaagcccttacggacttcggtccgtaagggcatcagag

SEQ ID NO: 4686 - DNA, 97 bp, synthetic construct
  misc_feature 1..97: note = engineered ribonucleic acid scaffold (ERS) sequence
  source 1..97: mol_type = other DNA
actggcgcttctatctgattactctgagtgccgtcaccagcgactatgtcgtagtgggtaaagcccttacggacttcggtccgtaagggcatcagag

SEQ ID NO: 4687 - DNA, 97 bp, synthetic construct
  misc_feature 1..97: note = engineered ribonucleic acid scaffold (ERS) sequence
  source 1..97: mol_type = other DNA
actggcacttctatctgattactctgagtgccatcaccagcgactatgtcgtagtgggtaaagcccttacggacttcggtccgtaagggcatcagag

SEQ ID NO: 4688 - DNA, 97 bp, synthetic construct
  misc_feature 1..97: note = engineered ribonucleic acid scaffold (ERS) sequence
  source 1..97: mol_type = other DNA
actggcgcttctatctgattactctgagaaccatcaccagcgactatgtcgtagtgggtaaagcccttacggacttcggtccgtaagggcatcagag

SEQ ID NO: 4689 - DNA, 97 bp, synthetic construct
  misc_feature 1..97: note = engineered ribonucleic acid scaffold (ERS) sequence
  source 1..97: mol_type = other DNA
actggcgcttctatctgattactctgagagccgtcaccagcgactatgtcgtagtgggtaaagcccttacggacttcggtccgtaagggcatcagag

SEQ ID NO: 4690 - DNA, 97 bp, synthetic construct
  misc_feature 1..97: note = engineered ribonucleic acid scaffold (ERS) sequence
  source 1..97: mol_type = other DNA
actggcgcttctatctgattactctgagagccttcaccagcgactatgtcgtagtgggtaaagcccttacggacttcggtccgtaagggcatcagag

SEQ ID NO: 4691 - DNA, 97 bp, synthetic construct
  misc_feature 1..97: note = engineered ribonucleic acid scaffold (ERS) sequence
  source 1..97: mol_type = other DNA
actggggcttctatctgattactctgagacccatcaccagcgactatgtcgtagtgggtaaagcccttacggacttcggtccgtaagggcatcagag

SEQ ID NO: 4692 - DNA, 97 bp, synthetic construct
  misc_feature 1..97: note = engineered ribonucleic acid scaffold (ERS) sequence
  source 1..97: mol_type = other DNA
actggtgcttctatctgattactctgagagccatcaccagcgactatgtcgtagtgggtaaagcccttacggacttcggtccgtaagggcatcagag

SEQ ID NO: 4693 - DNA, 97 bp, synthetic construct
  misc_feature 1..97: note = engineered ribonucleic acid scaffold (ERS) sequence
  source 1..97: mol_type = other DNA
actgggccttctatctgattactctgaggcccatcaccagcgactatgtcgtagtgggtaaagcccttacggacttcggtccgtaagggcatcagag

SEQ ID NO: 4694 - DNA, 98 bp, synthetic construct
  misc_feature 1..98: note = engineered ribonucleic acid scaffold (ERS) sequence
  source 1..98: mol_type = other DNA
actggcccttctatctgattactctgaggagccatcaccagcgactatgtcgtagtgggtaaagcccttacggacttcggtccgtaagggcatcagag

SEQ ID NO: 4695 - DNA, 97 bp, synthetic construct
  misc_feature 1..97: note = engineered ribonucleic acid scaffold (ERS) sequence
  source 1..97: mol_type = other DNA
actggcccttctatctgattactctgagggccatcaccagcgactatgtcgtagtgggtaaagcccttacggacttcggtccgtaagggcatcagag

SEQ ID NO: 4696 - DNA, 97 bp, synthetic construct
  misc_feature 1..97: note = engineered ribonucleic acid scaffold (ERS) sequence
  source 1..97: mol_type = other DNA
actggcccttctatctgattactctgagtgccatcaccagcgactatgtcgtagtgggtaaagcccttacggacttcggtccgtaagggcatcagag

SEQ ID NO: 4697 - DNA, 97 bp, synthetic construct
  misc_feature 1..97: note = engineered ribonucleic acid scaffold (ERS) sequence
  source 1..97: mol_type = other DNA
actggcccttctatctgattactctgagagccatcaccagcgactatgtcgtagtgggtaaagcccttacggacttcggtccgtaagggcatcagag

SEQ ID NO: 4698 - DNA, 98 bp, synthetic construct
  misc_feature 1..98: note = engineered ribonucleic acid scaffold (ERS) sequence
  source 1..98: mol_type = other DNA
actggcgcttctatctgattactctgagcagccatcaccagcgactatgtcgtagtgggtaaagcccttacggacttcggtccgtaagggcatcagag

SEQ ID NO: 4699 - DNA, 97 bp, synthetic construct; identical to SEQ ID NO: 734
  misc_feature 1..97: note = engineered ribonucleic acid scaffold (ERS) sequence
  source 1..97: mol_type = other DNA

SEQ ID NO: 4700 - DNA, 97 bp, synthetic construct
  misc_feature 1..97: note = engineered ribonucleic acid scaffold (ERS) sequence
  source 1..97: mol_type = other DNA
actggcgcttctatctgattactctgagtgccatcaccagcgactatgtcgtagtgggtaaagcccttacggacttcggtccgtaagggcatcagag

SEQ ID NO: 4701 - DNA, 97 bp, synthetic construct
  misc_feature 1..97: note = engineered ribonucleic acid scaffold (ERS) sequence
  source 1..97: mol_type = other DNA
actggcgcttctatctgattactctgagagccatcaccagcgactatgtcgtagtgggtaaagcccttacggacttcggtccgtaagggcatcagag

SEQ ID NO: 4702 - DNA, 97 bp, synthetic construct
  misc_feature 1..97: note = engineered ribonucleic acid scaffold (ERS) sequence
  source 1..97: mol_type = other DNA
actggctcttctatctgattactctgagcgccatcaccagcgactatgtcgtagtgggtaaagcccttacggacttcggtccgtaagggcatcagag

SEQ ID NO: 4703 - DNA, 97 bp, synthetic construct
  misc_feature 1..97: note = engineered ribonucleic acid scaffold (ERS) sequence
  source 1..97: mol_type = other DNA
actggctcttctatctgattactctgagggccatcaccagcgactatgtcgtagtgggtaaagcccttacggacttcggtccgtaagggcatcagag

SEQ ID NO: 4704 - DNA, 97 bp, synthetic construct
  misc_feature 1..97: note = engineered ribonucleic acid scaffold (ERS) sequence
  source 1..97: mol_type = other DNA
actggctcttctatctgattactctgagtgccatcaccagcgactatgtcgtagtgggtaaagcccttacggacttcggtccgtaagggcatcagag

SEQ ID NO: 4705 - DNA, 97 bp, synthetic construct
  misc_feature 1..97: note = engineered ribonucleic acid scaffold (ERS) sequence
  source 1..97: mol_type = other DNA
actggctcttctatctgattactctgagagccatcaccagcgactatgtcgtagtgggtaaagcccttacggacttcggtccgtaagggcatcagag

SEQ ID NO: 4706 - DNA, 97 bp, synthetic construct
  misc_feature 1..97: note = engineered ribonucleic acid scaffold (ERS) sequence
  source 1..97: mol_type = other DNA
actggcggttctatctgattactctgagcgccatcaccagcgactatgtcgtagtgggtaaagcccttacggacttcggtccgtaagggcatcagag

SEQ ID NO: 4707 - DNA, 97 bp, synthetic construct
  misc_feature 1..97: note = engineered ribonucleic acid scaffold (ERS) sequence
  source 1..97: mol_type = other DNA
actggcggttctatctgattactctgagagccatcaccagcgactatgtcgtagtgggtaaagcccttacggacttcggtccgtaagggcatcagag

SEQ ID NO: 4708 - DNA, 98 bp, synthetic construct
  misc_feature 1..98: note = engineered ribonucleic acid scaffold (ERS) sequence
  source 1..98: mol_type = other DNA
acacacggttctatctgattactctgccgtgttcaccagcgactatgtcgtagtgggtaaagcctcttacggacttcggtccgtaagaggcatcagag

SEQ ID NO: 4709 - DNA, 98 bp, synthetic construct
  misc_feature 1..98: note = engineered ribonucleic acid scaffold (ERS) sequence
  source 1..98: mol_type = other DNA
acactggtttctatctgattactctgaccagttcaccagcgactatgtcgtagtgggtaaagcctcttacggacttcggtccgtaagaggcatcagag

SEQ ID NO: 4710 - DNA, 98 bp, synthetic construct
  misc_feature 1..98: note = engineered ribonucleic acid scaffold (ERS) sequence
  source 1..98: mol_type = other DNA
acaggccgttctatctgattactctgcggccttcaccagcgactatgtcgtagtgggtaaagcctcttacggacttcggtccgtaagaggcatcagag

SEQ ID NO: 4711 - DNA, 98 bp, synthetic construct
  misc_feature 1..98: note = engineered ribonucleic acid scaffold (ERS) sequence
  source 1..98: mol_type = other DNA
acaggtccttctatctgattactctgggaccttcaccagcgactatgtcgtagtgggtaaagcctcttacggacttcggtccgtaagaggcatcagag

SEQ ID NO: 4712 - DNA, 98 bp, synthetic construct
  misc_feature 1..98: note = engineered ribonucleic acid scaffold (ERS) sequence
  source 1..98: mol_type = other DNA
accagcaattctatctgattactctgttgctgtcaccagcgactatgtcgtagtgggtaaagcctcttacggacttcggtccgtaagaggcatcagag

SEQ ID NO: 4713 - DNA, 98 bp, synthetic construct
  misc_feature 1..98: note = engineered ribonucleic acid scaffold (ERS) sequence
  source 1..98: mol_type = other DNA
accgagacttctatctgattactctgggctcgtcaccagcgactatgtcgtagtgggtaaagcctcttacggacttcggtccgtaagaggcatcagag

SEQ ID NO: 4714 - DNA, 98 bp, synthetic construct
  misc_feature 1..98: note = engineered ribonucleic acid scaffold (ERS) sequence
  source 1..98: mol_type = other DNA
acctgtagttctatctgattactctgctacagtcaccagcgactatgtcgtagtgggtaaagcctcttacggacttcggtccgtaagaggcatcagag

SEQ ID NO: 4715 - DNA, 98 bp, synthetic construct
  misc_feature 1..98: note = engineered ribonucleic acid scaffold (ERS) sequence
  source 1..98: mol_type = other DNA
acgagcacttctatctgattactctggggctctcaccagcgactatgtcgtagtgggtaaagcctcttacggacttcggtccgtaagaggcatcagag

SEQ ID NO: 4716 - DNA, 98 bp, synthetic construct
  misc_feature 1..98: note = engineered ribonucleic acid scaffold (ERS) sequence
  source 1..98: mol_type = other DNA
acgaggtgttctatctgattactctgcacctctcaccagcgactatgtcgtagtgggtaaagcctcttacggacttcggtccgtaagaggcatcagag

SEQ ID NO: 4717 - DNA, 98 bp, synthetic construct
  misc_feature 1..98: note = engineered ribonucleic acid scaffold (ERS) sequence
  source 1..98: mol_type = other DNA
acgggactttctatctgattactctgagtccctcaccagcgactatgtcgtagtgggtaaagcctcttacggacttcggtccgtaagaggcatcagag

SEQ ID NO: 4718 - DNA, 98 bp, synthetic construct
  misc_feature 1..98: note = engineered ribonucleic acid scaffold (ERS) sequence
  source 1..98: mol_type = other DNA
acgggcaattctatctgattactctgttgccctcaccagcgactatgtcgtagtgggtaaagcctcttacggacttcggtccgtaagaggcatcagag

SEQ ID NO: 4719 - DNA, 98 bp, synthetic construct
  misc_feature 1..98: note = engineered ribonucleic acid scaffold (ERS) sequence
  source 1..98: mol_type = other DNA
actgtgcgttctatctgattactctgcgcacatcaccagcgactatgtcgtagtgggtaaagcctcttacggacttcggtccgtaagaggcatcagag

SEQ ID NO: 4720 - DNA, 99 bp, synthetic construct
  misc_feature 1..99: note = engineered ribonucleic acid scaffold (ERS) sequence
  source 1..99: mol_type = other DNA
actggcgcttctatctgattactctgggcgccatcaccagcgactatgtcgtagtgggtaaagcctcttacggacttcggtccgtaagaggcatcagag

SEQ ID NO: 4721 - DNA, 99 bp, synthetic construct
  misc_feature 1..99: note = engineered ribonucleic acid scaffold (ERS) sequence
  source 1..99: mol_type = other DNA
actggcgcttctatctgattactctgggagccatcaccagcgactatgtcgtagtgggtaaagcctcttacggacttcggtccgtaagaggcatcagag

SEQ ID NO: 4722 - DNA, 99 bp, synthetic construct
  misc_feature 1..99: note = engineered ribonucleic acid scaffold (ERS) sequence
  source 1..99: mol_type = other DNA
actggcgcttctatctgattactctgtgagccatcaccagcgactatgtcgtagtgggtaaagcctcttacggacttcggtccgtaagaggcatcagag

SEQ ID NO: 4723 - DNA, 100 bp, synthetic construct
  misc_feature 1..100: note = engineered ribonucleic acid scaffold (ERS) sequence
  source 1..100: mol_type = other DNA
actggcgcttctatctgattactctgaggagccatcaccagcgactatgtcgtagtgggtaaagcctcttacggacttcggtccgtaagaggcatcagag

SEQ ID NO: 4724 - DNA, 99 bp, synthetic construct
  misc_feature 1..99: note = engineered ribonucleic acid scaffold (ERS) sequence
  source 1..99: mol_type = other DNA
actggcgcttctatctgattactctgatagccatcaccagcgactatgtcgtagtgggtaaagcctcttacggacttcggtccgtaagaggcatcagag

SEQ ID NO: 4725 - DNA, 100 bp, synthetic construct
  misc_feature 1..100: note = engineered ribonucleic acid scaffold (ERS) sequence
  source 1..100: mol_type = other DNA
actggcgcttctatctgattactctgagctgccatcaccagcgactatgtcgtagtgggtaaagcctcttacggacttcggtccgtaagaggcatcagag

SEQ ID NO: 4726 - DNA, 100 bp, synthetic construct
  misc_feature 1..100: note = engineered ribonucleic acid scaffold (ERS) sequence
  source 1..100: mol_type = other DNA
actggcacttctatctgattactctgagtagccatcaccagcgactatgtcgtagtgggtaaagcctcttacggacttcggtccgtaagaggcatcagag

SEQ ID NO: 4727 - DNA, 100 bp, synthetic construct
  misc_feature 1..100: note = engineered ribonucleic acid scaffold (ERS) sequence
  source 1..100: mol_type = other DNA
actggcgcttctatctgattactctgagtagccatcaccagcgactatgtcgtagtgggtaaagcctcttacggacttcggtccgtaagaggcatcagag

SEQ ID NO: 4728 - DNA, 99 bp, synthetic construct
  misc_feature 1..99: note = engineered ribonucleic acid scaffold (ERS) sequence
  source 1..99: mol_type = other DNA
actggcgcttctatctgattactctgagcaccatcaccagcgactatgtcgtagtgggtaaagcctcttacggacttcggtccgtaagaggcatcagag

SEQ ID NO: 4729 - DNA, 99 bp, synthetic construct
  misc_feature 1..99: note = engineered ribonucleic acid scaffold (ERS) sequence
  source 1..99: mol_type = other DNA
actggcacttctatctgattactctgagcgccatcaccagcgactatgtcgtagtgggtaaagcctcttacggacttcggtccgtaagaggcatcagag

SEQ ID NO: 4730 - DNA, 99 bp, synthetic construct
  misc_feature 1..99: note = engineered ribonucleic acid scaffold (ERS) sequence
  source 1..99: mol_type = other DNA
actggcgcttctatctgattactctgagggccatcaccagcgactatgtcgtagtgggtaaagcctcttacggacttcggtccgtaagaggcatcagag

SEQ ID NO: 4731 - DNA, 99 bp, synthetic construct
  misc_feature 1..99: note = engineered ribonucleic acid scaffold (ERS) sequence
  source 1..99: mol_type = other DNA
actggcgcttctatctgattactctgagtgccgtcaccagcgactatgtcgtagtgggtaaagcctcttacggacttcggtccgtaagaggcatcagag

SEQ ID NO: 4732 - DNA, 99 bp, synthetic construct
  misc_feature 1..99: note = engineered ribonucleic acid scaffold (ERS) sequence
  source 1..99: mol_type = other DNA
actggcacttctatctgattactctgagtgccatcaccagcgactatgtcgtagtgggtaaagcctcttacggacttcggtccgtaagaggcatcagag

SEQ ID NO: 4733 - DNA, 99 bp, synthetic construct
  misc_feature 1..99: note = engineered ribonucleic acid scaffold (ERS) sequence
  source 1..99: mol_type = other DNA
actggcgcttctatctgattactctgagaaccatcaccagcgactatgtcgtagtgggtaaagcctcttacggacttcggtccgtaagaggcatcagag

SEQ ID NO: 4734 - DNA, 99 bp, synthetic construct
  misc_feature 1..99: note = engineered ribonucleic acid scaffold (ERS) sequence
  source 1..99: mol_type = other DNA
actggcgcttctatctgattactctgagagccgtcaccagcgactatgtcgtagtgggtaaagcctcttacggacttcggtccgtaagaggcatcagag

SEQ ID NO: 4735 - DNA, 99 bp, synthetic construct
  misc_feature 1..99: note = engineered ribonucleic acid scaffold (ERS) sequence
  source 1..99: mol_type = other DNA
actggcgcttctatctgattactctgagagccttcaccagcgactatgtcgtagtgggtaaagcctcttacggacttcggtccgtaagaggcatcagag

SEQ ID NO: 4736 - DNA, 99 bp, synthetic construct
  misc_feature 1..99: note = engineered ribonucleic acid scaffold (ERS) sequence
  source 1..99: mol_type = other DNA
actggggcttctatctgattactctgagacccatcaccagcgactatgtcgtagtgggtaaagcctcttacggacttcggtccgtaagaggcatcagag

SEQ ID NO: 4737 - DNA, 99 bp, synthetic construct
  misc_feature 1..99: note = engineered ribonucleic acid scaffold (ERS) sequence
  source 1..99: mol_type = other DNA
actggtgcttctatctgattactctgagagccatcaccagcgactatgtcgtagtgggtaaagcctcttacggacttcggtccgtaagaggcatcagag

SEQ ID NO: 4738 - DNA, 99 bp, synthetic construct
  misc_feature 1..99: note = engineered ribonucleic acid scaffold (ERS) sequence
  source 1..99: mol_type = other DNA
actgggccttctatctgattactctgaggcccatcaccagcgactatgtcgtagtgggtaaagcctcttacggacttcggtccgtaagaggcatcagag

SEQ ID NO: 4739 - DNA, 100 bp, synthetic construct
  misc_feature 1..100: note = engineered ribonucleic acid scaffold (ERS) sequence
  source 1..100: mol_type = other DNA
actggcccttctatctgattactctgaggagccatcaccagcgactatgtcgtagtgggtaaagcctcttacggacttcggtccgtaagaggcatcagag

SEQ ID NO: 4740 - DNA, 99 bp, synthetic construct
  misc_feature 1..99: note = engineered ribonucleic acid scaffold (ERS) sequence
  source 1..99: mol_type = other DNA
actggcccttctatctgattactctgagggccatcaccagcgactatgtcgtagtgggtaaagcctcttacggacttcggtccgtaagaggcatcagag

SEQ ID NO: 4741 - DNA, 99 bp, synthetic construct
  misc_feature 1..99: note = engineered ribonucleic acid scaffold (ERS) sequence
  source 1..99: mol_type = other DNA
actggcccttctatctgattactctgagtgccatcaccagcgactatgtcgtagtgggtaaagcctcttacggacttcggtccgtaagaggcatcagag

SEQ ID NO: 4742 - DNA, 99 bp, synthetic construct
  misc_feature 1..99: note = engineered ribonucleic acid scaffold (ERS) sequence
  source 1..99: mol_type = other DNA
actggcccttctatctgattactctgagagccatcaccagcgactatgtcgtagtgggtaaagcctcttacggacttcggtccgtaagaggcatcagag

SEQ ID NO: 4743 - DNA, 100 bp, synthetic construct
  misc_feature 1..100: note = engineered ribonucleic acid scaffold (ERS) sequence
  source 1..100: mol_type = other DNA
actggcgcttctatctgattactctgagcagccatcaccagcgactatgtcgtagtgggtaaagcctcttacggacttcggtccgtaagaggcatcagag

SEQ ID NO: 4744 - DNA, 99 bp, synthetic construct; identical to SEQ ID NO: 735
  misc_feature 1..99: note = engineered ribonucleic acid scaffold (ERS) sequence
  source 1..99: mol_type = other DNA

SEQ ID NO: 4745 - DNA, 99 bp, synthetic construct
  misc_feature 1..99: note = engineered ribonucleic acid scaffold (ERS) sequence
  source 1..99: mol_type = other DNA
actggcgcttctatctgattactctgagtgccatcaccagcgactatgtcgtagtgggtaaagcctcttacggacttcggtccgtaagaggcatcagag

SEQ ID NO: 4746 - DNA, 99 bp, synthetic construct
  misc_feature 1..99: note = engineered ribonucleic acid scaffold (ERS) sequence
  source 1..99: mol_type = other DNA
actggcgcttctatctgattactctgagagccatcaccagcgactatgtcgtagtgggtaaagcctcttacggacttcggtccgtaagaggcatcagag

SEQ ID NO: 4747 - DNA, 99 bp, synthetic construct
  misc_feature 1..99: note = engineered ribonucleic acid scaffold (ERS) sequence
  source 1..99: mol_type = other DNA
actggctcttctatctgattactctgagcgccatcaccagcgactatgtcgtagtgggtaaagcctcttacggacttcggtccgtaagaggcatcagag

SEQ ID NO: 4748 - DNA, 99 bp, synthetic construct
  misc_feature 1..99: note = engineered ribonucleic acid scaffold (ERS) sequence
  source 1..99: mol_type = other DNA
actggctcttctatctgattactctgagggccatcaccagcgactatgtcgtagtgggtaaagcctcttacggacttcggtccgtaagaggcatcagag

SEQ ID NO: 4749 - DNA, 99 bp, synthetic construct
  misc_feature 1..99: note = engineered ribonucleic acid scaffold (ERS) sequence
  source 1..99: mol_type = other DNA
actggctcttctatctgattactctgagtgccatcaccagcgactatgtcgtagtgggtaaagcctcttacggacttcggtccgtaagaggcatcagag

SEQ ID NO: 4750 - DNA, 99 bp, synthetic construct
  misc_feature 1..99: note = engineered ribonucleic acid scaffold (ERS) sequence
  source 1..99: mol_type = other DNA
actggctcttctatctgattactctgagagccatcaccagcgactatgtcgtagtgggtaaagcctcttacggacttcggtccgtaagaggcatcagag

SEQ ID NO: 4751 - DNA, 99 bp, synthetic construct
  misc_feature 1..99: note = engineered ribonucleic acid scaffold (ERS) sequence
  source 1..99: mol_type = other DNA
actggcggttctatctgattactctgagcgccatcaccagcgactatgtcgtagtgggtaaagcctcttacggacttcggtccgtaagaggcatcagag

SEQ ID NO: 4752 - DNA, 99 bp, synthetic construct
  misc_feature 1..99: note = engineered ribonucleic acid scaffold (ERS) sequence
  source 1..99: mol_type = other DNA
actggcggttctatctgattactctgagagccatcaccagcgactatgtcgtagtgggtaaagcctcttacggacttcggtccgtaagaggcatcagag

SEQ ID NO: 4753 - DNA, 98 bp, synthetic construct
  misc_feature 1..98: note = engineered ribonucleic acid scaffold (ERS) sequence
  source 1..98: mol_type = other DNA
acacacggttctatctgattactctgccgtgttcaccagcgactatgtcgtagtgggtaaagccgcttagggacttcggtccctaagaggcatcagag

SEQ ID NO: 4754 - DNA, 98 bp, synthetic construct
  misc_feature 1..98: note = engineered ribonucleic acid scaffold (ERS) sequence
  source 1..98: mol_type = other DNA
acactggtttctatctgattactctgaccagttcaccagcgactatgtcgtagtgggtaaagccgcttagggacttcggtccctaagaggcatcagag

SEQ ID NO: 4755 - DNA, 98 bp, synthetic construct
  misc_feature 1..98: note = engineered ribonucleic acid scaffold (ERS) sequence
  source 1..98: mol_type = other DNA
acaggccgttctatctgattactctgcggccttcaccagcgactatgtcgtagtgggtaaagccgcttagggacttcggtccctaagaggcatcagag

SEQ ID NO: 4756 - DNA, 98 bp, synthetic construct
  misc_feature 1..98: note = engineered ribonucleic acid scaffold (ERS) sequence
  source 1..98: mol_type = other DNA
acaggtccttctatctgattactctgggaccttcaccagcgactatgtcgtagtgggtaaagccgcttagggacttcggtccctaagaggcatcagag

SEQ ID NO: 4757 - DNA, 98 bp, synthetic construct
  misc_feature 1..98: note = engineered ribonucleic acid scaffold (ERS) sequence
  source 1..98: mol_type = other DNA
accagcaattctatctgattactctgttgctgtcaccagcgactatgtcgtagtgggtaaagccgcttagggacttcggtccctaagaggcatcagag

SEQ ID NO: 4758 - DNA, 98 bp, synthetic construct
  misc_feature 1..98: note = engineered ribonucleic acid scaffold (ERS) sequence
  source 1..98: mol_type = other DNA
accgagacttctatctgattactctgggctcgtcaccagcgactatgtcgtagtgggtaaagccgcttagggacttcggtccctaagaggcatcagag

SEQ ID NO: 4759 - DNA, 98 bp, synthetic construct
  misc_feature 1..98: note = engineered ribonucleic acid scaffold (ERS) sequence
  source 1..98: mol_type = other DNA
acctgtagttctatctgattactctgctacagtcaccagcgactatgtcgtagtgggtaaagccgcttagggacttcggtccctaagaggcatcagag

SEQ ID NO: 4760 - DNA, 98 bp, synthetic construct
  misc_feature 1..98: note = engineered ribonucleic acid scaffold (ERS) sequence
  source 1..98: mol_type = other DNA
acgagcacttctatctgattactctggggctctcaccagcgactatgtcgtagtgggtaaagccgcttagggacttcggtccctaagaggcatcagag

SEQ ID NO: 4761 - DNA, 98 bp, synthetic construct
  misc_feature 1..98: note = engineered ribonucleic acid scaffold (ERS) sequence
  source 1..98: mol_type = other DNA
acgaggtgttctatctgattactctgcacctctcaccagcgactatgtcgtagtgggtaaagccgcttagggacttcggtccctaagaggcatcagag

SEQ ID NO: 4762 - DNA, 98 bp, synthetic construct
  misc_feature 1..98: note = engineered ribonucleic acid scaffold (ERS) sequence
  source 1..98: mol_type = other DNA
acgggactttctatctgattactctgagtccctcaccagcgactatgtcgtagtgggtaaagccgcttagggacttcggtccctaagaggcatcagag

SEQ ID NO: 4763 - DNA, 98 bp, synthetic construct
  misc_feature 1..98: note = engineered ribonucleic acid scaffold (ERS) sequence
  source 1..98: mol_type = other DNA
acgggcaattctatctgattactctgttgccctcaccagcgactatgtcgtagtgggtaaagccgcttagggacttcggtccctaagaggcatcagag

SEQ ID NO: 4764 - DNA, 98 bp, synthetic construct
  misc_feature 1..98: note = engineered ribonucleic acid scaffold (ERS) sequence
  source 1..98: mol_type = other DNA
actgtgcgttctatctgattactctgcgcacatcaccagcgactatgtcgtagtgggtaaagccgcttagggacttcggtccctaagaggcatcagag

SEQ ID NO: 4765 - DNA, 99 bp, synthetic construct
  misc_feature 1..99: note = engineered ribonucleic acid scaffold (ERS) sequence
  source 1..99: mol_type = other DNA
actggcgcttctatctgattactctgggcgccatcaccagcgactatgtcgtagtgggtaaagccgcttagggacttcggtccctaagaggcatcagag

SEQ ID NO: 4766 - DNA, 99 bp, synthetic construct
  misc_feature 1..99: note = engineered ribonucleic acid scaffold (ERS) sequence
  source 1..99: mol_type = other DNA
actggcgcttctatctgattactctgggagccatcaccagcgactatgtcgtagtgggtaaagccgcttagggacttcggtccctaagaggcatcagag

SEQ ID NO: 4767 - DNA, 99 bp, synthetic construct
  misc_feature 1..99: note = engineered ribonucleic acid scaffold (ERS) sequence
  source 1..99: mol_type = other DNA
actggcgcttctatctgattactctgtgagccatcaccagcgactatgtcgtagtgggtaaagccgcttagggacttcggtccctaagaggcatcagag

SEQ ID NO: 4768 - DNA, 100 bp, synthetic construct
  misc_feature 1..100: note = engineered ribonucleic acid scaffold (ERS) sequence
  source 1..100: mol_type = other DNA
actggcgcttctatctgattactctgaggagccatcaccagcgactatgtcgtagtgggtaaagccgcttagggacttcggtccctaagaggcatcagag

SEQ ID NO: 4769 - DNA, 99 bp, synthetic construct
  misc_feature 1..99: note = engineered ribonucleic acid scaffold (ERS) sequence
  source 1..99: mol_type = other DNA
actggcgcttctatctgattactctgatagccatcaccagcgactatgtcgtagtgggtaaagccgcttagggacttcggtccctaagaggcatcagag

SEQ ID NO: 4770 - DNA, 100 bp, synthetic construct
  misc_feature 1..100: note = engineered ribonucleic acid scaffold (ERS) sequence
  source 1..100: mol_type = other DNA
actggcgcttctatctgattactctgagctgccatcaccagcgactatgtcgtagtgggtaaagccgcttagggacttcggtccctaagaggcatcagag

SEQ ID NO: 4771 - DNA, 100 bp, synthetic construct
  misc_feature 1..100: note = engineered ribonucleic acid scaffold (ERS) sequence
  source 1..100: mol_type = other DNA
actggcacttctatctgattactctgagtagccatcaccagcgactatgtcgtagtgggtaaagccgcttagggacttcggtccctaagaggcatcagag

SEQ ID NO: 4772 - DNA, 100 bp, synthetic construct
  misc_feature 1..100: note = engineered ribonucleic acid scaffold (ERS) sequence
  source 1..100: mol_type = other DNA
actggcgcttctatctgattactctgagtagccatcaccagcgactatgtcgtagtgggtaaagccgcttagggacttcggtccctaagaggcatcagag

SEQ ID NO: 4773 - DNA, 99 bp, synthetic construct
  misc_feature 1..99: note = engineered ribonucleic acid scaffold (ERS) sequence
  source 1..99: mol_type = other DNA
actggcgcttctatctgattactctgagcaccatcaccagcgactatgtcgtagtgggtaaagccgcttagggacttcggtccctaagaggcatcagag

SEQ ID NO: 4774 - DNA, 99 bp, synthetic construct
  misc_feature 1..99: note = engineered ribonucleic acid scaffold (ERS) sequence
  source 1..99: mol_type = other DNA
actggcacttctatctgattactctgagcgccatcaccagcgactatgtcgtagtgggtaaagccgcttagggacttcggtccctaagaggcatcagag

SEQ ID NO: 4775 - DNA, 99 bp, synthetic construct
  misc_feature 1..99: note = engineered ribonucleic acid scaffold (ERS) sequence
  source 1..99: mol_type = other DNA
actggcgcttctatctgattactctgagggccatcaccagcgactatgtcgtagtgggtaaagccgcttagggacttcggtccctaagaggcatcagag

SEQ ID NO: 4776 - DNA, 99 bp, synthetic construct
  misc_feature 1..99: note = engineered ribonucleic acid scaffold (ERS) sequence
  source 1..99: mol_type = other DNA
actggcgcttctatctgattactctgagtgccgtcaccagcgactatgtcgtagtgggtaaagccgcttagggacttcggtccctaagaggcatcagag

SEQ ID NO: 4777 - DNA, 99 bp, synthetic construct
  misc_feature 1..99: note = engineered ribonucleic acid scaffold (ERS) sequence
  source 1..99: mol_type = other DNA
actggcacttctatctgattactctgagtgccatcaccagcgactatgtcgtagtgggtaaagccgcttagggacttcggtccctaagaggcatcagag

SEQ ID NO: 4778 - DNA, 99 bp, synthetic construct
  misc_feature 1..99: note = engineered ribonucleic acid scaffold (ERS) sequence
  source 1..99: mol_type = other DNA
actggcgcttctatctgattactctgagaaccatcaccagcgactatgtcgtagtgggtaaagccgcttagggacttcggtccctaagaggcatcagag

SEQ ID NO: 4779 - DNA, 99 bp, synthetic construct
  misc_feature 1..99: note = engineered ribonucleic acid scaffold (ERS) sequence
  source 1..99: mol_type = other DNA
actggcgcttctatctgattactctgagagccgtcaccagcgactatgtcgtagtgggtaaagccgcttagggacttcggtccctaagaggcatcagag

SEQ ID NO: 4780 - DNA, 99 bp, synthetic construct
  misc_feature 1..99: note = engineered ribonucleic acid scaffold (ERS) sequence
  source 1..99: mol_type = other DNA
actggcgcttctatctgattactctgagagccttcaccagcgactatgtcgtagtgggtaaagccgcttagggacttcggtccctaagaggcatcagag

SEQ ID NO: 4781 - DNA, 99 bp, synthetic construct
  misc_feature 1..99: note = engineered ribonucleic acid scaffold (ERS) sequence
  source 1..99: mol_type = other DNA
actggggcttctatctgattactctgagacccatcaccagcgactatgtcgtagtgggtaaagccgcttagggacttcggtccctaagaggcatcagag

SEQ ID NO: 4782 - DNA, 99 bp, synthetic construct
  misc_feature 1..99: note = engineered ribonucleic acid scaffold (ERS) sequence
  source 1..99: mol_type = other DNA
actggtgcttctatctgattactctgagagccatcaccagcgactatgtcgtagtgggtaaagccgcttagggacttcggtccctaagaggcatcagag

SEQ ID NO: 4783 - DNA, 99 bp, synthetic construct; identical to SEQ ID NO: 535
  misc_feature 1..99: note = engineered ribonucleic acid scaffold (ERS) sequence
  source 1..99: mol_type = other DNA

SEQ ID NO: 4784 - DNA, 100 bp, synthetic construct
  misc_feature 1..100: note = engineered ribonucleic acid scaffold (ERS) sequence
  source 1..100: mol_type = other DNA
actggcccttctatctgattactctgaggagccatcaccagcgactatgtcgtagtgggtaaagccgcttagggacttcggtccctaagaggcatcagag

SEQ ID NO: 4785 - DNA, 99 bp, synthetic construct
  misc_feature 1..99: note = engineered ribonucleic acid scaffold (ERS) sequence
  source 1..99: mol_type = other DNA
actggcccttctatctgattactctgagggccatcaccagcgactatgtcgtagtgggtaaagccgcttagggacttcggtccctaagaggcatcagag

SEQ ID NO: 4786 - DNA, 99 bp, synthetic construct
  misc_feature 1..99: note = engineered ribonucleic acid scaffold (ERS) sequence
  source 1..99: mol_type = other DNA
actggcccttctatctgattactctgagtgccatcaccagcgactatgtcgtagtgggtaaagccgcttagggacttcggtccctaagaggcatcagag

SEQ ID NO: 4787 - DNA, 99 bp, synthetic construct
  misc_feature 1..99: note = engineered ribonucleic acid scaffold (ERS) sequence
  source 1..99: mol_type = other DNA
actggcccttctatctgattactctgagagccatcaccagcgactatgtcgtagtgggtaaagccgcttagggacttcggtccctaagaggcatcagag

SEQ ID NO: 4788 - DNA, 100 bp, synthetic construct
  misc_feature 1..100: note = engineered ribonucleic acid scaffold (ERS) sequence
  source 1..100: mol_type = other DNA
actggcgcttctatctgattactctgagcagccatcaccagcgactatgtcgtagtgggtaaagccgcttagggacttcggtccctaagaggcatcagag

SEQ ID NO: 4789 - DNA, 99 bp, synthetic construct; identical to SEQ ID NO: 736
  misc_feature 1..99: note = engineered ribonucleic acid scaffold (ERS) sequence
  source 1..99: mol_type = other DNA

SEQ ID NO: 4790 - DNA, 99 bp, synthetic construct
  misc_feature 1..99: note = engineered ribonucleic acid scaffold (ERS) sequence
  source 1..99: mol_type = other DNA
actggcgcttctatctgattactctgagtgccatcaccagcgactatgtcgtagtgggtaaagccgcttagggacttcggtccctaagaggcatcagag

SEQ ID NO: 4791 - DNA, 99 bp, synthetic construct
  misc_feature 1..99: note = engineered ribonucleic acid scaffold (ERS) sequence
  source 1..99: mol_type = other DNA
actggcgcttctatctgattactctgagagccatcaccagcgactatgtcgtagtgggtaaagccgcttagggacttcggtccctaagaggcatcagag

SEQ ID NO: 4792 - DNA, 99 bp, synthetic construct
  misc_feature 1..99: note = engineered ribonucleic acid scaffold (ERS) sequence
  source 1..99: mol_type = other DNA
actggctcttctatctgattactctgagcgccatcaccagcgactatgtcgtagtgggtaaagccgcttagggacttcggtccctaagaggcatcagag

SEQ ID NO: 4793 - DNA, 99 bp, synthetic construct
  misc_feature 1..99: note = engineered ribonucleic acid scaffold (ERS) sequence
  source 1..99: mol_type = other DNA
actggctcttctatctgattactctgagggccatcaccagcgactatgtcgtagtgggtaaagccgcttagggacttcggtccctaagaggcatcagag

SEQ ID NO: 4794 - DNA, 99 bp, synthetic construct
  misc_feature 1..99: note = engineered ribonucleic acid scaffold (ERS) sequence
  source 1..99: mol_type = other DNA
actggctcttctatctgattactctgagtgccatcaccagcgactatgtcgtagtgggtaaagccgcttagggacttcggtccctaagaggcatcagag

SEQ ID NO: 4795 - DNA, 99 bp, synthetic construct
  misc_feature 1..99: note = engineered ribonucleic acid scaffold (ERS) sequence
  source 1..99: mol_type = other DNA
actggctcttctatctgattactctgagagccatcaccagcgactatgtcgtagtgggtaaagccgcttagggacttcggtccctaagaggcatcagag

SEQ ID NO: 4796 - DNA, 99 bp, synthetic construct
  misc_feature 1..99: note = engineered ribonucleic acid scaffold (ERS) sequence
  source 1..99: mol_type = other DNA
actggcggttctatctgattactctgagcgccatcaccagcgactatgtcgtagtgggtaaagccgcttagggacttcggtccctaagaggcatcagag

SEQ ID NO: 4797 - DNA, 99 bp, synthetic construct
  misc_feature 1..99: note = engineered ribonucleic acid scaffold (ERS) sequence
  source 1..99: mol_type = other DNA
actggcggttctatctgattactctgagagccatcaccagcgactatgtcgtagtgggtaaagccgcttagggacttcggtccctaagaggcatcagag

SEQ ID NO: 4798 - DNA, 86 bp, synthetic construct
  misc_feature 1..86: note = engineered ribonucleic acid scaffold (ERS) sequence
  source 1..86: mol_type = other DNA
actggcgcttctatctgattactctgagcgccaacaccagcgactatgtcgtatgggtaaactccctcttcggagggagatcagag

SEQ ID NO: 4799 - DNA, 86 bp, synthetic construct
  misc_feature 1..86: note = engineered ribonucleic acid scaffold (ERS) sequence
  source 1..86: mol_type = other DNA
actggcgcttctatctgattactctgagcgccagcaccagcgactatgtcgtatgggtaaactccctcttcggagggagatcagag

SEQ ID NO: 4800 - DNA, 86 bp, synthetic construct
  misc_feature 1..86: note = engineered ribonucleic acid scaffold (ERS) sequence
  source 1..86: mol_type = other DNA
actggcgcttctatctgattactctgagcgccatgaccagcgactatgtcgtatggctaaactccctcttcggagggagatcagag

SEQ ID NO: 4801 - DNA, 87 bp, synthetic construct
  misc_feature 1..87: note = engineered ribonucleic acid scaffold (ERS) sequence
  source 1..87: mol_type = other DNA
actggcgcttctatctgattactctgagcgccatgaccagcgactatgtcgtatgggctaaactccctcttcggagggagatcagag

SEQ ID NO: 4802 - DNA, 86 bp, synthetic construct
  misc_feature 1..86: note = engineered ribonucleic acid scaffold (ERS) sequence
  source 1..86: mol_type = other DNA
actggcgcttctatctgattactctgagcgccatgaccagcgactatgtcgtatgggtaaactccctcttcggagggagatcagag

SEQ ID NO: 4803 - DNA, 86 bp, synthetic construct
  misc_feature 1..86: note = engineered ribonucleic acid scaffold (ERS) sequence
  source 1..86: mol_type = other DNA
actggcgcttctatctgattactctgagcgccatccccagcgactatgtcgtatgggtaaactccctcttcggagggagatcagag

SEQ ID NO: 4804 - DNA, 87 bp, synthetic construct
  misc_feature 1..87: note = engineered ribonucleic acid scaffold (ERS) sequence
  source 1..87: mol_type = other DNA
actggcgcttctatctgattactctgagcgccatcgccagcgactatgtcgtatggcgtaaactccctcttcggagggagatcagag

SEQ ID NO: 4805 - DNA, 86 bp, synthetic construct
  misc_feature 1..86: note = engineered ribonucleic acid scaffold (ERS) sequence
  source 1..86: mol_type = other DNA
actggcgcttctatctgattactctgagcgccatcgccagcgactatgtcgtatgggtaaactccctcttcggagggagatcagag

SEQ ID NO: 4806 - DNA, 86 bp, synthetic construct
  misc_feature 1..86: note = engineered ribonucleic acid scaffold (ERS) sequence
  source 1..86: mol_type = other DNA
actggcgcttctatctgattactctgagcgccatctccagcgactatgtcgtatgggtaaactccctcttcggagggagatcagag

SEQ ID NO: 4807 - DNA, 86 bp, synthetic construct
  misc_feature 1..86: note = engineered ribonucleic acid scaffold (ERS) sequence
  source 1..86: mol_type = other DNA
actggcgcttctatctgattactctgagcgccatcacctgcgactatgtcgtaagggtaaactccctcttcggagggagatcagag

SEQ ID NO: 4808 - DNA, 86 bp, synthetic construct
  misc_feature 1..86: note = engineered ribonucleic acid scaffold (ERS) sequence
  source 1..86: mol_type = other DNA
actggcgcttctatctgattactctgagcgccatcaccagagactatgtcttatgggtaaactccctcttcggagggagatcagag

SEQ ID NO: 4809 - DNA, 86 bp, synthetic construct
  misc_feature 1..86: note = engineered ribonucleic acid scaffold (ERS) sequence
  source 1..86: mol_type = other DNA
actggcgcttctatctgattactctgagcgccatcaccagggactatgtcctatgggtaaactccctcttcggagggagatcagag

SEQ ID NO: 4810 - DNA, 87 bp, synthetic construct
  misc_feature 1..87: note = engineered ribonucleic acid scaffold (ERS) sequence
  source 1..87: mol_type = other DNA
actggcgcttctatctgattactctgagcgccatcaccaggcactatgtgctattgggtaaactccctcttcggagggagatcagag

SEQ ID NO: 4811 - DNA, 86 bp, synthetic construct
  misc_feature 1..86: note = engineered ribonucleic acid scaffold (ERS) sequence
  source 1..86: mol_type = other DNA
actggcgcttctatctgattactctgagcgccatcaccagccactatgtggtatgggtaaactccctcttcggagggagatcagag

SEQ ID NO: 4812 - DNA, 86 bp, synthetic construct
  misc_feature 1..86: note = engineered ribonucleic acid scaffold (ERS) sequence
  source 1..86: mol_type = other DNA
actggcgcttctatctgattactctgagcgccatcaccagctactatgtagtatgggtaaactccctcttcggagggagatcagag

SEQ ID NO: 4813 - DNA, 86 bp, synthetic construct
  misc_feature 1..86: note = engineered ribonucleic acid scaffold (ERS) sequence
  source 1..86: mol_type = other DNA
actggcgcttctatctgattactctgagcgccatcaccagcgattatgtcgtatgggtaaactccctcttcggagggagatcagag

SEQ ID NO: 4814 - DNA, 86 bp, synthetic construct
  misc_feature 1..86: note = engineered ribonucleic acid scaffold (ERS) sequence
  source 1..86: mol_type = other DNA
actggcgcttctatctgattactctgagcgccatcaccagcgacgatgtcgtatgggtaaactccctcttcggagggagatcagag

SEQ ID NO: 4815 - DNA, 86 bp, synthetic construct
  misc_feature 1..86: note = engineered ribonucleic acid scaffold (ERS) sequence
  source 1..86: mol_type = other DNA
actggcgcttctatctgattactctgagcgccatcaccagcgactctgtcgtatgggtaaactccctcttcggagggagatcagag

SEQ ID NO: 4816 - DNA, 86 bp, synthetic construct
  misc_feature 1..86: note = engineered ribonucleic acid scaffold (ERS) sequence
  source 1..86: mol_type = other DNA
actggcgcttctatctgattactctgagcgccatcaccagcgactatgtcgtgtgggtaaactccctcttcggagggagatcagag

SEQ ID NO: 4817 - DNA, 87 bp, synthetic construct
  misc_feature 1..87: note = engineered ribonucleic acid scaffold (ERS) sequence
  source 1..87: mol_type = other DNA
actggcgcttctatctgattactctgagcgccatcaccagcgactatgtcgtattgggtaaactccctcttcggagggagatcagag

SEQ ID NO: 4818 - DNA, 87 bp, synthetic construct
  misc_feature 1..87: note = engineered ribonucleic acid scaffold (ERS) sequence
  source 1..87: mol_type = other DNA
actggcgcttctatctgattactctgagcgccatcaccagcgactatgtcgtatggagtaaactccctcttcggagggagatcagag

SEQ ID NO: 4819 - DNA, 87 bp, synthetic construct
  misc_feature 1..87: note = engineered ribonucleic acid scaffold (ERS) sequence
  source 1..87: mol_type = other DNA
actggcgcttctatctgattactctgagcgccatcaccagcgactatgtcgtatggcgtaaactccctcttcggagggagatcagag

SEQ ID NO: 4820 - DNA, 87 bp, synthetic construct
  misc_feature 1..87: note = engineered ribonucleic acid scaffold (ERS) sequence
  source 1..87: mol_type = other DNA
actggcgcttctatctgattactctgagcgccatcaccagcgactatgtcgtatggtgtaaactccctcttcggagggagatcagag

SEQ ID NO: 4821 - DNA, 87 bp, synthetic construct
  misc_feature 1..87: note = engineered ribonucleic acid scaffold (ERS) sequence
  source 1..87: mol_type = other DNA
actggcgcttctatctgattactctgagcgccatcaccagcgactatgtcgtatgggctaaactccctcttcggagggagatcagag

SEQ ID NO: 4822 - DNA, 84 bp, synthetic construct
  misc_feature 1..84: note = engineered ribonucleic acid scaffold (ERS) sequence
  source 1..84: mol_type = other DNA
actggcgcttctatctgattactctgagcgccatcaccagcgactatgtcgtatgggtactccctcttcggagggagatcagag

SEQ ID NO: 4823 - DNA, 86 bp, synthetic construct
  misc_feature 1..86: note = engineered ribonucleic acid scaffold (ERS) sequence
  source 1..86: mol_type = other DNA
actggcgcttctatctgattactctgagcgccatcaccagcgactatgtcgtatgggtgaactccctcttcggagggagatcagag

SEQ ID NO: 4824 - DNA, 86 bp, synthetic construct
  misc_feature 1..86: note = engineered ribonucleic acid scaffold (ERS) sequence
  source 1..86: mol_type = other DNA
actggcgcttctatctgattactctgagcgccatcaccagcgactatgtcgtatgggtagactccctcttcggagggagatcagag

SEQ ID NO: 4825 - DNA, 88 bp, synthetic construct
  misc_feature 1..88: note = engineered ribonucleic acid scaffold (ERS) sequence
  source 1..88: mol_type = other DNA
actggcgcttctatctgattactctgagcgccaacaccagcgactatgtcgtatgggtaaagcgccctcttcggagggagcatcagag

SEQ ID NO: 4826 - DNA, 88 bp, synthetic construct
  misc_feature 1..88: note = engineered ribonucleic acid scaffold (ERS) sequence
  source 1..88: mol_type = other DNA
actggcgcttctatctgattactctgagcgccagcaccagcgactatgtcgtatgggtaaagcgccctcttcggagggagcatcagag

SEQ ID NO: 4827 - DNA, 88 bp, synthetic construct
  misc_feature 1..88: note = engineered ribonucleic acid scaffold (ERS) sequence
  source 1..88: mol_type = other DNA
actggcgcttctatctgattactctgagcgccatgaccagcgactatgtcgtatggctaaagcgccctcttcggagggagcatcagag

SEQ ID NO: 4828 - DNA, 89 bp, synthetic construct
  misc_feature 1..89: note = engineered ribonucleic acid scaffold (ERS) sequence
  source 1..89: mol_type = other DNA
actggcgcttctatctgattactctgagcgccatgaccagcgactatgtcgtatgggctaaagcgccctcttcggagggagcatcagag

SEQ ID NO: 4829 - DNA, 88 bp, synthetic construct
  misc_feature 1..88: note = engineered ribonucleic acid scaffold (ERS) sequence
  source 1..88: mol_type = other DNA
actggcgcttctatctgattactctgagcgccatgaccagcgactatgtcgtatgggtaaagcgccctcttcggagggagcatcagag

SEQ ID NO: 4830 - DNA, 88 bp, synthetic construct
  misc_feature 1..88: note = engineered ribonucleic acid scaffold (ERS) sequence
  source 1..88: mol_type = other DNA
actggcgcttctatctgattactctgagcgccatccccagcgactatgtcgtatgggtaaagcgccctcttcggagggagcatcagag

SEQ ID NO: 4831 - DNA, 89 bp, synthetic construct
  misc_feature 1..89: note = engineered ribonucleic acid scaffold (ERS) sequence
  source 1..89: mol_type = other DNA
actggcgcttctatctgattactctgagcgccatcgccagcgactatgtcgtatggcgtaaagcgccctcttcggagggagcatcagag

SEQ ID NO: 4832 - DNA, 88 bp, synthetic construct
  misc_feature 1..88: note = engineered ribonucleic acid scaffold (ERS) sequence
  source 1..88: mol_type = other DNA
actggcgcttctatctgattactctgagcgccatcgccagcgactatgtcgtatgggtaaagcgccctcttcggagggagcatcagag

SEQ ID NO: 4833 - DNA, 88 bp, synthetic construct
  misc_feature 1..88: note = engineered ribonucleic acid scaffold (ERS) sequence
  source 1..88: mol_type = other DNA
actggcgcttctatctgattactctgagcgccatctccagcgactatgtcgtatgggtaaagcgccctcttcggagggagcatcagag

SEQ ID NO: 4834 - DNA, 88 bp, synthetic construct
  misc_feature 1..88: note = engineered ribonucleic acid scaffold (ERS) sequence
  source 1..88: mol_type = other DNA
actggcgcttctatctgattactctgagcgccatcacctgcgactatgtcgtaagggtaaagcgccctcttcggagggagcatcagag

SEQ ID NO: 4835 - DNA, 88 bp, synthetic construct
  misc_feature 1..88: note = engineered ribonucleic acid scaffold (ERS) sequence
  source 1..88: mol_type = other DNA
actggcgcttctatctgattactctgagcgccatcaccagagactatgtcttatgggtaaagcgccctcttcggagggagcatcagag

SEQ ID NO: 4836 - DNA, 88 bp, synthetic construct
  misc_feature 1..88: note = engineered ribonucleic acid scaffold (ERS) sequence
  source 1..88: mol_type = other DNA
actggcgcttctatctgattactctgagcgccatcaccagggactatgtcctatgggtaaagcgccctcttcggagggagcatcagag

SEQ ID NO: 4837 - DNA, 89 bp, synthetic construct
  misc_feature 1..89: note = engineered ribonucleic acid scaffold (ERS) sequence
  source 1..89: mol_type = other DNA
actggcgcttctatctgattactctgagcgccatcaccaggcactatgtgctattgggtaaagcgccctcttcggagggagcatcagag

SEQ ID NO: 4838 - DNA, 88 bp, synthetic construct
  misc_feature 1..88: note = engineered ribonucleic acid scaffold (ERS) sequence
  source 1..88: mol_type = other DNA
actggcgcttctatctgattactctgagcgccatcaccagccactatgtggtatgggtaaagcgccctcttcggagggagcatcagag

SEQ ID NO: 4839 - DNA, 88 bp, synthetic construct
  misc_feature 1..88: note = engineered ribonucleic acid scaffold (ERS) sequence
  source 1..88: mol_type = other DNA
actggcgcttctatctgattactctgagcgccatcaccagctactatgtagtatgggtaaagcgccctcttcggagggagcatcagag

SEQ ID NO: 4840 - DNA, 88 bp, synthetic construct
  misc_feature 1..88: note = engineered ribonucleic acid scaffold (ERS) sequence
  source 1..88: mol_type = other DNA
actggcgcttctatctgattactctgagcgccatcaccagcgattatgtcgtatgggtaaagcgccctcttcggagggagcatcagag

SEQ ID NO: 4841 - DNA, 88 bp, synthetic construct
  misc_feature 1..88: note = engineered ribonucleic acid scaffold (ERS) sequence
  source 1..88: mol_type = other DNA
actggcgcttctatctgattactctgagcgccatcaccagcgacgatgtcgtatgggtaaagcgccctcttcggagggagcatcagag

SEQ ID NO: 4842 - DNA, 88 bp, synthetic construct
  misc_feature 1..88: note = engineered ribonucleic acid scaffold (ERS) sequence
  source 1..88: mol_type = other DNA
actggcgcttctatctgattactctgagcgccatcaccagcgactctgtcgtatgggtaaagcgccctcttcggagggagcatcagag

SEQ ID NO: 4843 - DNA, 88 bp, synthetic construct
  misc_feature 1..88: note = engineered ribonucleic acid scaffold (ERS) sequence
  source 1..88: mol_type = other DNA
actggcgcttctatctgattactctgagcgccatcaccagcgactatgtcgtgtgggtaaagcgccctcttcggagggagcatcagag

SEQ ID NO: 4844 - DNA, 89 bp, synthetic construct
  misc_feature 1..89: note = engineered ribonucleic acid scaffold (ERS) sequence
  source 1..89: mol_type = other DNA
actggcgcttctatctgattactctgagcgccatcaccagcgactatgtcgtattgggtaaagcgccctcttcggagggagcatcagag

SEQ ID NO: 4845 - DNA, 89 bp, synthetic construct
  misc_feature 1..89: note = engineered ribonucleic acid scaffold (ERS) sequence
  source 1..89: mol_type = other DNA
actggcgcttctatctgattactctgagcgccatcaccagcgactatgtcgtatggagtaaagcgccctcttcggagggagcatcagag

SEQ ID NO: 4846 - DNA, 89 bp, synthetic construct
  misc_feature 1..89: note = engineered ribonucleic acid scaffold (ERS) sequence
  source 1..89: mol_type = other DNA
actggcgcttctatctgattactctgagcgccatcaccagcgactatgtcgtatggcgtaaagcgccctcttcggagggagcatcagag

SEQ ID NO: 4847 - DNA, 89 bp, synthetic construct
  misc_feature 1..89: note = engineered ribonucleic acid scaffold (ERS) sequence
  source 1..89: mol_type = other DNA
actggcgcttctatctgattactctgagcgccatcaccagcgactatgtcgtatggtgtaaagcgccctcttcggagggagcatcagag

SEQ ID NO: 4848 - DNA, 89 bp, synthetic construct
  misc_feature 1..89: note = engineered ribonucleic acid scaffold (ERS) sequence
  source 1..89: mol_type = other DNA
actggcgcttctatctgattactctgagcgccatcaccagcgactatgtcgtatgggctaaagcgccctcttcggagggagcatcagag

SEQ ID NO: 4849 - DNA, 86 bp, synthetic construct
  misc_feature 1..86: note = engineered ribonucleic acid scaffold (ERS) sequence
  source 1..86: mol_type = other DNA
actggcgcttctatctgattactctgagcgccatcaccagcgactatgtcgtatgggtagcgccctcttcggagggagcatcagag

SEQ ID NO: 4850 - DNA, 88 bp, synthetic construct
  misc_feature 1..88: note = engineered ribonucleic acid scaffold (ERS) sequence
  source 1..88: mol_type = other DNA
actggcgcttctatctgattactctgagcgccatcaccagcgactatgtcgtatgggtgaagcgccctcttcggagggagcatcagag

SEQ ID NO: 4851 - DNA, 88 bp, synthetic construct
  misc_feature 1..88: note = engineered ribonucleic acid scaffold (ERS) sequence
  source 1..88: mol_type = other DNA
actggcgcttctatctgattactctgagcgccatcaccagcgactatgtcgtatgggtagagcgccctcttcggagggagcatcagag

SEQ ID NO: 4852 - DNA, 98 bp, synthetic construct
  misc_feature 1..98: note = engineered ribonucleic acid scaffold (ERS) sequence
  source 1..98: mol_type = other DNA
actggcgcttctatctgattactctgagcgccaacaccagcgactatgtcgtatgggtaaagcgccttacggacttcggtccgtaaggagcatcagag

SEQ ID NO: 4853 - DNA, 98 bp, synthetic construct
  misc_feature 1..98: note = engineered ribonucleic acid scaffold (ERS) sequence
  source 1..98: mol_type = other DNA
actggcgcttctatctgattactctgagcgccagcaccagcgactatgtcgtatgggtaaagcgccttacggacttcggtccgtaaggagcatcagag

SEQ ID NO: 4854 - DNA, 98 bp, synthetic construct
  misc_feature 1..98: note = engineered ribonucleic acid scaffold (ERS) sequence
  source 1..98: mol_type = other DNA
actggcgcttctatctgattactctgagcgccatgaccagcgactatgtcgtatggctaaagcgccttacggacttcggtccgtaaggagcatcagag

SEQ ID NO: 4855 - DNA, 99 bp, synthetic construct
  misc_feature 1..99: note = engineered ribonucleic acid scaffold (ERS) sequence
  source 1..99: mol_type = other DNA
actggcgcttctatctgattactctgagcgccatgaccagcgactatgtcgtatgggctaaagcgccttacggacttcggtccgtaaggagcatcagag

SEQ ID NO: 4856 - DNA, 98 bp, synthetic construct
  misc_feature 1..98: note = engineered ribonucleic acid scaffold (ERS) sequence
  source 1..98: mol_type = other DNA
actggcgcttctatctgattactctgagcgccatgaccagcgactatgtcgtatgggtaaagcgccttacggacttcggtccgtaaggagcatcagag

SEQ ID NO: 4857 - DNA, 98 bp, synthetic construct
  misc_feature 1..98: note = engineered ribonucleic acid scaffold (ERS) sequence
  source 1..98: mol_type = other DNA
actggcgcttctatctgattactctgagcgccatccccagcgactatgtcgtatgggtaaagcgccttacggacttcggtccgtaaggagcatcagag

SEQ ID NO: 4858 - DNA, 99 bp, synthetic construct
  misc_feature 1..99: note = engineered ribonucleic acid scaffold (ERS) sequence
  source 1..99: mol_type = other DNA
actggcgcttctatctgattactctgagcgccatcgccagcgactatgtcgtatggcgtaaagcgccttacggacttcggtccgtaaggagcatcagag

SEQ ID NO: 4859 - DNA, 98 bp, synthetic construct
  misc_feature 1..98: note = engineered ribonucleic acid scaffold (ERS) sequence
  source 1..98: mol_type = other DNA
actggcgcttctatctgattactctgagcgccatcgccagcgactatgtcgtatgggtaaagcgccttacggacttcggtccgtaaggagcatcagag

SEQ ID NO: 4860 - DNA, 98 bp, synthetic construct
  misc_feature 1..98: note = engineered ribonucleic acid scaffold (ERS) sequence
  source 1..98: mol_type = other DNA
actggcgcttctatctgattactctgagcgccatctccagcgactatgtcgtatgggtaaagcgccttacggacttcggtccgtaaggagcatcagag

SEQ ID NO: 4861 - DNA, 98 bp, synthetic construct
  misc_feature 1..98: note = engineered ribonucleic acid scaffold (ERS) sequence
  source 1..98: mol_type = other DNA
actggcgcttctatctgattactctgagcgccatcacctgcgactatgtcgtaagggtaaagcgccttacggacttcggtccgtaaggagcatcagag

SEQ ID NO: 4862 - DNA, 98 bp, synthetic construct
  misc_feature 1..98: note = engineered ribonucleic acid scaffold (ERS) sequence
  source 1..98: mol_type = other DNA
actggcgcttctatctgattactctgagcgccatcaccagagactatgtcttatgggtaaagcgccttacggacttcggtccgtaaggagcatcagag

SEQ ID NO: 4863 - DNA, 98 bp, synthetic construct
  misc_feature 1..98: note = engineered ribonucleic acid scaffold (ERS) sequence
  source 1..98: mol_type = other DNA
actggcgcttctatctgattactctgagcgccatcaccagggactatgtcctatgggtaaagcgccttacggacttcggtccgtaaggagcatcagag

SEQ ID NO: 4864 - DNA, 99 bp, synthetic construct
  misc_feature 1..99: note = engineered ribonucleic acid scaffold (ERS) sequence
  source 1..99: mol_type = other DNA
actggcgcttctatctgattactctgagcgccatcaccaggcactatgtgctattgggtaaagcgccttacggacttcggtccgtaaggagcatcagag

SEQ ID NO: 4865 - DNA, 98 bp, synthetic construct
  misc_feature 1..98: note = engineered ribonucleic acid scaffold (ERS) sequence
  source 1..98: mol_type = other DNA
actggcgcttctatctgattactctgagcgccatcaccagccactatgtggtatgggtaaagcgccttacggacttcggtccgtaaggagcatcagag

SEQ ID NO: 4866 - DNA, 98 bp, synthetic construct
  misc_feature 1..98: note = engineered ribonucleic acid scaffold (ERS) sequence
  source 1..98: mol_type = other DNA
actggcgcttctatctgattactctgagcgccatcaccagctactatgtagtatgggtaaagcgccttacggacttcggtccgtaaggagcatcagag

SEQ ID NO: 4867 - DNA, 98 bp, synthetic construct
  misc_feature 1..98: note = engineered ribonucleic acid scaffold (ERS) sequence
  source 1..98: mol_type = other DNA
actggcgcttctatctgattactctgagcgccatcaccagcgattatgtcgtatgggtaaagcgccttacggacttcggtccgtaaggagcatcagag

SEQ ID NO: 4868 - DNA, 98 bp, synthetic construct
  misc_feature 1..98: note = engineered ribonucleic acid scaffold (ERS) sequence
  source 1..98: mol_type = other DNA
actggcgcttctatctgattactctgagcgccatcaccagcgacgatgtcgtatgggtaaagcgccttacggacttcggtccgtaaggagcatcagag

SEQ ID NO: 4869 - DNA, 98 bp, synthetic construct
  misc_feature 1..98: note = engineered ribonucleic acid scaffold (ERS) sequence
  source 1..98: mol_type = other DNA
actggcgcttctatctgattactctgagcgccatcaccagcgactctgtcgtatgggtaaagcgccttacggacttcggtccgtaaggagcatcagag

SEQ ID NO: 4870 - DNA, 98 bp, synthetic construct
  misc_feature 1..98: note = engineered ribonucleic acid scaffold (ERS) sequence
  source 1..98: mol_type = other DNA
actggcgcttctatctgattactctgagcgccatcaccagcgactatgtcgtgtgggtaaagcgccttacggacttcggtccgtaaggagcatcagag

SEQ ID NO: 4871 - DNA, 99 bp, synthetic construct
  misc_feature 1..99: note = engineered ribonucleic acid scaffold (ERS) sequence
  source 1..99: mol_type = other DNA
actggcgcttctatctgattactctgagcgccatcaccagcgactatgtcgtattgggtaaagcgccttacggacttcggtccgtaaggagcatcagag

SEQ ID NO: 4872 - DNA, 99 bp, synthetic construct
  misc_feature 1..99: note = engineered ribonucleic acid scaffold (ERS) sequence
  source 1..99: mol_type = other DNA
actggcgcttctatctgattactctgagcgccatcaccagcgactatgtcgtatggagtaaagcgccttacggacttcggtccgtaaggagcatcagag

SEQ ID NO: 4873 - DNA, 99 bp, synthetic construct
  misc_feature 1..99: note = engineered ribonucleic acid scaffold (ERS) sequence
  source 1..99: mol_type = other DNA
actggcgcttctatctgattactctgagcgccatcaccagcgactatgtcgtatggcgtaaagcgccttacggacttcggtccgtaaggagcatcagag

SEQ ID NO: 4874 - DNA, 99 bp, synthetic construct
  misc_feature 1..99: note = engineered ribonucleic acid scaffold (ERS) sequence
  source 1..99: mol_type = other DNA
actggcgcttctatctgattactctgagcgccatcaccagcgactatgtcgtatggtgtaaagcgccttacggacttcggtccgtaaggagcatcagag

SEQ ID NO: 4875 - DNA, 99 bp, synthetic construct
  misc_feature 1..99: note = engineered ribonucleic acid scaffold (ERS) sequence
  source 1..99: mol_type = other DNA
actggcgcttctatctgattactctgagcgccatcaccagcgactatgtcgtatgggctaaagcgccttacggacttcggtccgtaaggagcatcagag

SEQ ID NO: 4876 - DNA, 96 bp, synthetic construct
  misc_feature 1..96: note = engineered ribonucleic acid scaffold (ERS) sequence
  source 1..96: mol_type = other DNA
actggcgcttctatctgattactctgagcgccatcaccagcgactatgtcgtatgggtagcgccttacggacttcggtccgtaaggagcatcagag

SEQ ID NO: 4877 - DNA, 98 bp, synthetic construct
  misc_feature 1..98: note = engineered ribonucleic acid scaffold (ERS) sequence
  source 1..98: mol_type = other DNA
actggcgcttctatctgattactctgagcgccatcaccagcgactatgtcgtatgggtgaagcgccttacggacttcggtccgtaaggagcatcagag

SEQ ID NO: 4878 - DNA, 98 bp, synthetic construct
  misc_feature 1..98: note = engineered ribonucleic acid scaffold (ERS) sequence
  source 1..98: mol_type = other DNA
actggcgcttctatctgattactctgagcgccatcaccagcgactatgtcgtatgggtagagcgccttacggacttcggtccgtaaggagcatcagag

SEQ ID NO: 4879 - DNA, 98 bp, synthetic construct
  misc_feature 1..98: note = engineered ribonucleic acid scaffold (ERS) sequence
  source 1..98: mol_type = other DNA
actggcgcttctatctgattactctgagcgccaacaccagcgactatgtcgtatgggtaaagcgcttacggaattcgtgtccgtaagaagcatcagag

SEQ ID NO: 4880 - DNA, 98 bp, synthetic construct
  misc_feature 1..98: note = engineered ribonucleic acid scaffold (ERS) sequence
  source 1..98: mol_type = other DNA
actggcgcttctatctgattactctgagcgccagcaccagcgactatgtcgtatgggtaaagcgcttacggaattcgtgtccgtaagaagcatcagag

SEQ ID NO: 4881 - DNA, 98 bp, synthetic construct
  misc_feature 1..98: note = engineered ribonucleic acid scaffold (ERS) sequence
  source 1..98: mol_type = other DNA
actggcgcttctatctgattactctgagcgccatgaccagcgactatgtcgtatggctaaagcgcttacggaattcgtgtccgtaagaagcatcagag

SEQ ID NO: 4882 - DNA, 99 bp, synthetic construct
  misc_feature 1..99: note = engineered ribonucleic acid scaffold (ERS) sequence
  source 1..99: mol_type = other DNA
actggcgcttctatctgattactctgagcgccatgaccagcgactatgtcgtatgggctaaagcgcttacggaattcgtgtccgtaagaagcatcagag

SEQ ID NO: 4883 - DNA, 98 bp, synthetic construct
  misc_feature 1..98: note = engineered ribonucleic acid scaffold (ERS) sequence
  source 1..98: mol_type = other DNA
actggcgcttctatctgattactctgagcgccatgaccagcgactatgtcgtatgggtaaagcgcttacggaattcgtgtccgtaagaagcatcagag

SEQ ID NO: 4884 - DNA, 98 bp, synthetic construct
  misc_feature 1..98: note = engineered ribonucleic acid scaffold (ERS) sequence
  source 1..98: mol_type = other DNA
actggcgcttctatctgattactctgagcgccatccccagcgactatgtcgtatgggtaaagcgcttacggaattcgtgtccgtaagaagcatcagag

SEQ ID NO: 4885 - DNA, 99 bp, synthetic construct
  misc_feature 1..99: note = engineered ribonucleic acid scaffold (ERS) sequence
  source 1..99: mol_type = other DNA
actggcgcttctatctgattactctgagcgccatcgccagcgactatgtcgtatggcgtaaagcgcttacggaattcgtgtccgtaagaagcatcagag

SEQ ID NO: 4886 - DNA, 98 bp, synthetic construct
  misc_feature 1..98: note = engineered ribonucleic acid scaffold (ERS) sequence
  source 1..98: mol_type = other DNA
actggcgcttctatctgattactctgagcgccatcgccagcgactatgtcgtatgggtaaagcgcttacggaattcgtgtccgtaagaagcatcagag

SEQ ID NO: 4887 - DNA, 98 bp, synthetic construct
  misc_feature 1..98: note = engineered ribonucleic acid scaffold (ERS) sequence
  source 1..98: mol_type = other DNA
actggcgcttctatctgattactctgagcgccatctccagcgactatgtcgtatgggtaaagcgcttacggaattcgtgtccgtaagaagcatcagag

SEQ ID NO: 4888 - DNA, 98 bp, synthetic construct
  misc_feature 1..98: note = engineered ribonucleic acid scaffold (ERS) sequence
  source 1..98: mol_type = other DNA
actggcgcttctatctgattactctgagcgccatcacctgcgactatgtcgtaagggtaaagcgcttacggaattcgtgtccgtaagaagcatcagag

SEQ ID NO: 4889 - DNA, 98 bp, synthetic construct
  misc_feature 1..98: note = engineered ribonucleic acid scaffold (ERS) sequence
  source 1..98: mol_type = other DNA
actggcgcttctatctgattactctgagcgccatcaccagagactatgtcttatgggtaaagcgcttacggaattcgtgtccgtaagaagcatcagag

SEQ ID NO: 4890 - DNA, 98 bp, synthetic construct
  misc_feature 1..98: note = engineered ribonucleic acid scaffold (ERS) sequence
  source 1..98: mol_type = other DNA
actggcgcttctatctgattactctgagcgccatcaccagggactatgtcctatgggtaaagcgcttacggaattcgtgtccgtaagaagcatcagag

SEQ ID NO: 4891 - DNA, 99 bp, synthetic construct
  misc_feature 1..99: note = engineered ribonucleic acid scaffold (ERS) sequence
  source 1..99: mol_type = other DNA
actggcgcttctatctgattactctgagcgccatcaccaggcactatgtgctattgggtaaagcgcttacggaattcgtgtccgtaagaagcatcagag

SEQ ID NO: 4892 - DNA, 98 bp, synthetic construct
  misc_feature 1..98: note = engineered ribonucleic acid scaffold (ERS) sequence
  source 1..98: mol_type = other DNA
actggcgcttctatctgattactctgagcgccatcaccagccactatgtggtatgggtaaagcgcttacggaattcgtgtccgtaagaagcatcagag

SEQ ID NO: 4893 - DNA, 98 bp, synthetic construct
  misc_feature 1..98: note = engineered ribonucleic acid scaffold (ERS) sequence
  source 1..98: mol_type = other DNA
actggcgcttctatctgattactctgagcgccatcaccagctactatgtagtatgggtaaagcgcttacggaattcgtgtccgtaagaagcatcagag

SEQ ID NO: 4894 - DNA, 98 bp, synthetic construct
  misc_feature 1..98: note = engineered ribonucleic acid scaffold (ERS) sequence
  source 1..98: mol_type = other DNA
actggcgcttctatctgattactctgagcgccatcaccagcgattatgtcgtatgggtaaagcgcttacggaattcgtgtccgtaagaagcatcagag

SEQ ID NO: 4895 - DNA, 98 bp, synthetic construct
  misc_feature 1..98: note = engineered ribonucleic acid scaffold (ERS) sequence
  source 1..98: mol_type = other DNA
actggcgcttctatctgattactctgagcgccatcaccagcgacgatgtcgtatgggtaaagcgcttacggaattcgtgtccgtaagaagcatcagag

SEQ ID NO: 4896 - DNA, 98 bp, synthetic construct
  misc_feature 1..98: note = engineered ribonucleic acid scaffold (ERS) sequence
  source 1..98: mol_type = other DNA
actggcgcttctatctgattactctgagcgccatcaccagcgactctgtcgtatgggtaaagcgcttacggaattcgtgtccgtaagaagcatcagag

SEQ ID NO: 4897 - DNA, 98 bp, synthetic construct
  misc_feature 1..98: note = engineered ribonucleic acid scaffold (ERS) sequence
  source 1..98: mol_type = other DNA
actggcgcttctatctgattactctgagcgccatcaccagcgactatgtcgtgtgggtaaagcgcttacggaattcgtgtccgtaagaagcatcagag

SEQ ID NO: 4898 - DNA, 99 bp, synthetic construct
  misc_feature 1..99: note = engineered ribonucleic acid scaffold (ERS) sequence
  source 1..99: mol_type = other DNA
actggcgcttctatctgattactctgagcgccatcaccagcgactatgtcgtattgggtaaagcgcttacggaattcgtgtccgtaagaagcatcagag

SEQ ID NO: 4899 - DNA, 99 bp, synthetic construct
  misc_feature 1..99: note = engineered ribonucleic acid scaffold (ERS) sequence
  source 1..99: mol_type = other DNA
actggcgcttctatctgattactctgagcgccatcaccagcgactatgtcgtatggagtaaagcgcttacggaattcgtgtccgtaagaagcatcagag

SEQ ID NO: 4900 - DNA, 99 bp, synthetic construct
  misc_feature 1..99: note = engineered ribonucleic acid scaffold (ERS) sequence
  source 1..99: mol_type = other DNA
actggcgcttctatctgattactctgagcgccatcaccagcgactatgtcgtatggcgtaaagcgcttacggaattcgtgtccgtaagaagcatcagag

SEQ ID NO: 4901 - DNA, 99 bp, synthetic construct
  misc_feature 1..99: note = engineered ribonucleic acid scaffold (ERS) sequence
  source 1..99: mol_type = other DNA
actggcgcttctatctgattactctgagcgccatcaccagcgactatgtcgtatggtgtaaagcgcttacggaattcgtgtccgtaagaagcatcagag

SEQ ID NO: 4902 - DNA, 99 bp, synthetic construct
  misc_feature 1..99: note = engineered ribonucleic acid scaffold (ERS) sequence
  source 1..99: mol_type = other DNA
actggcgcttctatctgattactctgagcgccatcaccagcgactatgtcgtatgggctaaagcgcttacggaattcgtgtccgtaagaagcatcagag

SEQ ID NO: 4903 - DNA, 96 bp, synthetic construct
  misc_feature 1..96: note = engineered ribonucleic acid scaffold (ERS) sequence
  source 1..96: mol_type = other DNA
actggcgcttctatctgattactctgagcgccatcaccagcgactatgtcgtatgggtagcgcttacggaattcgtgtccgtaagaagcatcagag

SEQ ID NO: 4904 - DNA, 98 bp, synthetic construct
  misc_feature 1..98: note = engineered ribonucleic acid scaffold (ERS) sequence
  source 1..98: mol_type = other DNA
actggcgcttctatctgattactctgagcgccatcaccagcgactatgtcgtatgggtgaagcgcttacggaattcgtgtccgtaagaagcatcagag

SEQ ID NO: 4905 - DNA, 98 bp, synthetic construct
  misc_feature 1..98: note = engineered ribonucleic acid scaffold (ERS) sequence
  source 1..98: mol_type = other DNA
actggcgcttctatctgattactctgagcgccatcaccagcgactatgtcgtatgggtagagcgcttacggaattcgtgtccgtaagaagcatcagag

SEQ ID NO: 4906 - DNA, 99 bp, synthetic construct
  misc_feature 1..99: note = engineered ribonucleic acid scaffold (ERS) sequence
  source 1..99: mol_type = other DNA
actggcgcttctatctgattactctgagcgccaacaccagcgactatgtcgtatgggtaaagcgcttacggacttcgcggtccgtaagaagcatcagag

SEQ ID NO: 4907 - DNA, 99 bp, synthetic construct
  misc_feature 1..99: note = engineered ribonucleic acid scaffold (ERS) sequence
  source 1..99: mol_type = other DNA
actggcgcttctatctgattactctgagcgccagcaccagcgactatgtcgtatgggtaaagcgcttacggacttcgcggtccgtaagaagcatcagag

SEQ ID NO: 4908 - DNA, 99 bp, synthetic construct
  misc_feature 1..99: note = engineered ribonucleic acid scaffold (ERS) sequence
  source 1..99: mol_type = other DNA
actggcgcttctatctgattactctgagcgccatgaccagcgactatgtcgtatggctaaagcgcttacggacttcgcggtccgtaagaagcatcagag

SEQ ID NO: 4909 - DNA, 100 bp, synthetic construct
  misc_feature 1..100: note = engineered ribonucleic acid scaffold (ERS) sequence
  source 1..100: mol_type = other DNA
actggcgcttctatctgattactctgagcgccatgaccagcgactatgtcgtatgggctaaagcgcttacggacttcgcggtccgtaagaagcatcagag

SEQ ID NO: 4910 - DNA, 99 bp, synthetic construct
  misc_feature 1..99: note = engineered ribonucleic acid scaffold (ERS) sequence
  source 1..99: mol_type = other DNA
actggcgcttctatctgattactctgagcgccatgaccagcgactatgtcgtatgggtaaagcgcttacggacttcgcggtccgtaagaagcatcagag

SEQ ID NO: 4911 - DNA, 99 bp, synthetic construct
  misc_feature 1..99: note = engineered ribonucleic acid scaffold (ERS) sequence
  source 1..99: mol_type = other DNA
actggcgcttctatctgattactctgagcgccatccccagcgactatgtcgtatgggtaaagcgcttacggacttcgcggtccgtaagaagcatcagag

SEQ ID NO: 4912 - DNA, 100 bp, synthetic construct
  misc_feature 1..100: note = engineered ribonucleic acid scaffold (ERS) sequence
  source 1..100: mol_type = other DNA
actggcgcttctatctgattactctgagcgccatcgccagcgactatgtcgtatggcgtaaagcgcttacggacttcgcggtccgtaagaagcatcagag

SEQ ID NO: 4913 - DNA, 99 bp, synthetic construct
  misc_feature 1..99: note = engineered ribonucleic acid scaffold (ERS) sequence
  source 1..99: mol_type = other DNA
actggcgcttctatctgattactctgagcgccatcgccagcgactatgtcgtatgggtaaagcgcttacggacttcgcggtccgtaagaagcatcagag

SEQ ID NO: 4914 - DNA, 99 bp, synthetic construct
  misc_feature 1..99: note = engineered ribonucleic acid scaffold (ERS) sequence
  source 1..99: mol_type = other DNA
actggcgcttctatctgattactctgagcgccatctccagcgactatgtcgtatgggtaaagcgcttacggacttcgcggtccgtaagaagcatcagag

SEQ ID NO: 4915 - DNA, 99 bp, synthetic construct
  misc_feature 1..99: note = engineered ribonucleic acid scaffold (ERS) sequence
  source 1..99: mol_type = other DNA
actggcgcttctatctgattactctgagcgccatcacctgcgactatgtcgtaagggtaaagcgcttacggacttcgcggtccgtaagaagcatcagag

SEQ ID NO: 4916 - DNA, 99 bp, synthetic construct
  misc_feature 1..99: note = engineered ribonucleic acid scaffold (ERS) sequence
  source 1..99: mol_type = other DNA
actggcgcttctatctgattactctgagcgccatcaccagagactatgtcttatgggtaaagcgcttacggacttcgcggtccgtaagaagcatcagag

SEQ ID NO: 4917 - DNA, 99 bp, synthetic construct
  misc_feature 1..99: note = engineered ribonucleic acid scaffold (ERS) sequence
  source 1..99: mol_type = other DNA
actggcgcttctatctgattactctgagcgccatcaccagggactatgtcctatgggtaaagcgcttacggacttcgcggtccgtaagaagcatcagag

SEQ ID NO: 4918 - DNA, 100 bp, synthetic construct
  misc_feature 1..100: note = engineered ribonucleic acid scaffold (ERS) sequence
  source 1..100: mol_type = other DNA
actggcgcttctatctgattactctgagcgccatcaccaggcactatgtgctattgggtaaagcgcttacggacttcgcggtccgtaagaagcatcagag

SEQ ID NO: 4919 - DNA, 99 bp, synthetic construct
  misc_feature 1..99: note = engineered ribonucleic acid scaffold (ERS) sequence
  source 1..99: mol_type = other DNA
actggcgcttctatctgattactctgagcgccatcaccagccactatgtggtatgggtaaagcgcttacggacttcgcggtccgtaagaagcatcagag

SEQ ID NO: 4920 - DNA, 99 bp, synthetic construct
  misc_feature 1..99: note = engineered ribonucleic acid scaffold (ERS) sequence
  source 1..99: mol_type = other DNA
actggcgcttctatctgattactctgagcgccatcaccagctactatgtagtatgggtaaagcgcttacggacttcgcggtccgtaagaagcatcagag

SEQ ID NO: 4921 - DNA, 99 bp, synthetic construct
  misc_feature 1..99: note = engineered ribonucleic acid scaffold (ERS) sequence
  source 1..99: mol_type = other DNA
actggcgcttctatctgattactctgagcgccatcaccagcgattatgtcgtatgggtaaagcgcttacggacttcgcggtccgtaagaagcatcagag

SEQ ID NO: 4922 - DNA, 99 bp, synthetic construct
  misc_feature 1..99: note = engineered ribonucleic acid scaffold (ERS) sequence
  source 1..99: mol_type = other DNA
actggcgcttctatctgattactctgagcgccatcaccagcgacgatgtcgtatgggtaaagcgcttacggacttcgcggtccgtaagaagcatcagag

SEQ ID NO: 4923 - DNA, 99 bp, synthetic construct
  misc_feature 1..99: note = engineered ribonucleic acid scaffold (ERS) sequence
  source 1..99: mol_type = other DNA
actggcgcttctatctgattactctgagcgccatcaccagcgactctgtcgtatgggtaaagcgcttacggacttcgcggtccgtaagaagcatcagag

SEQ ID NO: 4924 - DNA, 99 bp, synthetic construct
  misc_feature 1..99: note = engineered ribonucleic acid scaffold (ERS) sequence
  source 1..99: mol_type = other DNA
actggcgcttctatctgattactctgagcgccatcaccagcgactatgtcgtgtgggtaaagcgcttacggacttcgcggtccgtaagaagcatcagag

SEQ ID NO: 4925 - DNA, 100 bp, synthetic construct
  misc_feature 1..100: note = engineered ribonucleic acid scaffold (ERS) sequence
  source 1..100: mol_type = other DNA
actggcgcttctatctgattactctgagcgccatcaccagcgactatgtcgtattgggtaaagcgcttacggacttcgcggtccgtaagaagcatcagag

SEQ ID NO: 4926 - DNA, 100 bp, synthetic construct
  misc_feature 1..100: note = engineered ribonucleic acid scaffold (ERS) sequence
  source 1..100: mol_type = other DNA
actggcgcttctatctgattactctgagcgccatcaccagcgactatgtcgtatggagtaaagcgcttacggacttcgcggtccgtaagaagcatcagag

SEQ ID NO: 4927 - DNA, 100 bp, synthetic construct
  misc_feature 1..100: note = engineered ribonucleic acid scaffold (ERS) sequence
  source 1..100: mol_type = other DNA
actggcgcttctatctgattactctgagcgccatcaccagcgactatgtcgtatggcgtaaagcgcttacggacttcgcggtccgtaagaagcatcagag

SEQ ID NO: 4928 - DNA, 100 bp, synthetic construct
  misc_feature 1..100: note = engineered ribonucleic acid scaffold (ERS) sequence
  source 1..100: mol_type = other DNA
actggcgcttctatctgattactctgagcgccatcaccagcgactatgtcgtatggtgtaaagcgcttacggacttcgcggtccgtaagaagcatcagag

SEQ ID NO: 4929 - DNA, 100 bp, synthetic construct
  misc_feature 1..100: note = engineered ribonucleic acid scaffold (ERS) sequence
  source 1..100: mol_type = other DNA
actggcgcttctatctgattactctgagcgccatcaccagcgactatgtcgtatgggctaaagcgcttacggacttcgcggtccgtaagaagcatcagag

SEQ ID NO: 4930 - DNA, 97 bp, synthetic construct
  misc_feature 1..97: note = engineered ribonucleic acid scaffold (ERS) sequence
  source 1..97: mol_type = other DNA
actggcgcttctatctgattactctgagcgccatcaccagcgactatgtcgtatgggtagcgcttacggacttcgcggtccgtaagaagcatcagag

SEQ ID NO: 4931 - DNA, 99 bp, synthetic construct
  misc_feature 1..99: note = engineered ribonucleic acid scaffold (ERS) sequence
  source 1..99: mol_type = other DNA
actggcgcttctatctgattactctgagcgccatcaccagcgactatgtcgtatgggtgaagcgcttacggacttcgcggtccgtaagaagcatcagag

SEQ ID NO: 4932 - DNA, 99 bp, synthetic construct
  misc_feature 1..99: note = engineered ribonucleic acid scaffold (ERS) sequence
  source 1..99: mol_type = other DNA
actggcgcttctatctgattactctgagcgccatcaccagcgactatgtcgtatgggtagagcgcttacggacttcgcggtccgtaagaagcatcagag

SEQ ID NO: 4933 - DNA, 97 bp, synthetic construct
  misc_feature 1..97: note = engineered ribonucleic acid scaffold (ERS) sequence
  source 1..97: mol_type = other DNA
actggcgcttctatctgattactctgagcgccaacaccagcgactatgtcgtatgggtaaagcgcttacggacttcggtccgtaagaagcatcagag

SEQ ID NO: 4934 - DNA, 97 bp, synthetic construct
  misc_feature 1..97: note = engineered ribonucleic acid scaffold (ERS) sequence
  source 1..97: mol_type = other DNA
actggcgcttctatctgattactctgagcgccagcaccagcgactatgtcgtatgggtaaagcgcttacggacttcggtccgtaagaagcatcagag

SEQ ID NO: 4935 - DNA, 97 bp, synthetic construct
  misc_feature 1..97: note = engineered ribonucleic acid scaffold (ERS) sequence
  source 1..97: mol_type = other DNA
actggcgcttctatctgattactctgagcgccatgaccagcgactatgtcgtatggctaaagcgcttacggacttcggtccgtaagaagcatcagag

SEQ ID NO: 4936 - DNA, 98 bp, synthetic construct
  misc_feature 1..98: note = engineered ribonucleic acid scaffold (ERS) sequence
  source 1..98: mol_type = other DNA
actggcgcttctatctgattactctgagcgccatgaccagcgactatgtcgtatgggctaaagcgcttacggacttcggtccgtaagaagcatcagag

SEQ ID NO: 4937 - DNA, 97 bp, synthetic construct
  misc_feature 1..97: note = engineered ribonucleic acid scaffold (ERS) sequence
  source 1..97: mol_type = other DNA
actggcgcttctatctgattactctgagcgccatgaccagcgactatgtcgtatgggtaaagcgcttacggacttcggtccgtaagaagcatcagag

SEQ ID NO: 4938 - DNA, 97 bp, synthetic construct
  misc_feature 1..97: note = engineered ribonucleic acid scaffold (ERS) sequence
  source 1..97: mol_type = other DNA
actggcgcttctatctgattactctgagcgccatccccagcgactatgtcgtatgggtaaagcgcttacggacttcggtccgtaagaagcatcagag

SEQ ID NO: 4939 - DNA, 98 bp, synthetic construct
  misc_feature 1..98: note = engineered ribonucleic acid scaffold (ERS) sequence
  source 1..98: mol_type = other DNA
actggcgcttctatctgattactctgagcgccatcgccagcgactatgtcgtatggcgtaaagcgcttacggacttcggtccgtaagaagcatcagag

SEQ ID NO: 4940 - DNA, 97 bp, synthetic construct
  misc_feature 1..97: note = engineered ribonucleic acid scaffold (ERS) sequence
  source 1..97: mol_type = other DNA
actggcgcttctatctgattactctgagcgccatcgccagcgactatgtcgtatgggtaaagcgcttacggacttcggtccgtaagaagcatcagag

SEQ ID NO: 4941 - DNA, 97 bp, synthetic construct
  misc_feature 1..97: note = engineered ribonucleic acid scaffold (ERS) sequence
  source 1..97: mol_type = other DNA
actggcgcttctatctgattactctgagcgccatctccagcgactatgtcgtatgggtaaagcgcttacggacttcggtccgtaagaagcatcagag

SEQ ID NO: 4942 - DNA, 97 bp, synthetic construct
  misc_feature 1..97: note = engineered ribonucleic acid scaffold (ERS) sequence
  source 1..97: mol_type = other DNA
actggcgcttctatctgattactctgagcgccatcacctgcgactatgtcgtaagggtaaagcgcttacggacttcggtccgtaagaagcatcagag

SEQ ID NO: 4943 - DNA, 97 bp, synthetic construct
  misc_feature 1..97: note = engineered ribonucleic acid scaffold (ERS) sequence
  source 1..97: mol_type = other DNA
actggcgcttctatctgattactctgagcgccatcaccagagactatgtcttatgggtaaagcgcttacggacttcggtccgtaagaagcatcagag

SEQ ID NO: 4944 - DNA, 97 bp, synthetic construct
  misc_feature 1..97: note = engineered ribonucleic acid scaffold (ERS) sequence
  source 1..97: mol_type = other DNA
actggcgcttctatctgattactctgagcgccatcaccagggactatgtcctatgggtaaagcgcttacggacttcggtccgtaagaagcatcagag

SEQ ID NO: 4945 - DNA, 98 bp, synthetic construct
  misc_feature 1..98: note = engineered ribonucleic acid scaffold (ERS) sequence
  source 1..98: mol_type = other DNA
actggcgcttctatctgattactctgagcgccatcaccaggcactatgtgctattgggtaaagcgcttacggacttcggtccgtaagaagcatcagag

SEQ ID NO: 4946 - DNA, 97 bp, synthetic construct
  misc_feature 1..97: note = engineered ribonucleic acid scaffold (ERS) sequence
  source 1..97: mol_type = other DNA
actggcgcttctatctgattactctgagcgccatcaccagccactatgtggtatgggtaaagcgcttacggacttcggtccgtaagaagcatcagag

SEQ ID NO: 4947 - DNA, 97 bp, synthetic construct
  misc_feature 1..97: note = engineered ribonucleic acid scaffold (ERS) sequence
  source 1..97: mol_type = other DNA
actggcgcttctatctgattactctgagcgccatcaccagctactatgtagtatgggtaaagcgcttacggacttcggtccgtaagaagcatcagag

SEQ ID NO: 4948 - DNA, 97 bp, synthetic construct
  misc_feature 1..97: note = engineered ribonucleic acid scaffold (ERS) sequence
  source 1..97: mol_type = other DNA
actggcgcttctatctgattactctgagcgccatcaccagcgattatgtcgtatgggtaaagcgcttacggacttcggtccgtaagaagcatcagag

SEQ ID NO: 4949 - DNA, 97 bp, synthetic construct
  misc_feature 1..97: note = engineered ribonucleic acid scaffold (ERS) sequence
  source 1..97: mol_type = other DNA
actggcgcttctatctgattactctgagcgccatcaccagcgacgatgtcgtatgggtaaagcgcttacggacttcggtccgtaagaagcatcagag

SEQ ID NO: 4950 - DNA, 97 bp, synthetic construct
  misc_feature 1..97: note = engineered ribonucleic acid scaffold (ERS) sequence
  source 1..97: mol_type = other DNA
actggcgcttctatctgattactctgagcgccatcaccagcgactctgtcgtatgggtaaagcgcttacggacttcggtccgtaagaagcatcagag

SEQ ID NO: 4951 - DNA, 97 bp, synthetic construct
  misc_feature 1..97: note = engineered ribonucleic acid scaffold (ERS) sequence
  source 1..97: mol_type = other DNA
actggcgcttctatctgattactctgagcgccatcaccagcgactatgtcgtgtgggtaaagcgcttacggacttcggtccgtaagaagcatcagag

SEQ ID NO: 4952 - DNA, 98 bp, synthetic construct
  misc_feature 1..98: note = engineered ribonucleic acid scaffold (ERS) sequence
  source 1..98: mol_type = other DNA
actggcgcttctatctgattactctgagcgccatcaccagcgactatgtcgtattgggtaaagcgcttacggacttcggtccgtaagaagcatcagag

SEQ ID NO: 4953 - DNA, 98 bp, synthetic construct
  misc_feature 1..98: note = engineered ribonucleic acid scaffold (ERS) sequence
  source 1..98: mol_type = other DNA
actggcgcttctatctgattactctgagcgccatcaccagcgactatgtcgtatggagtaaagcgcttacggacttcggtccgtaagaagcatcagag

SEQ ID NO: 4954 - DNA, 98 bp, synthetic construct
  misc_feature 1..98: note = engineered ribonucleic acid scaffold (ERS) sequence
  source 1..98: mol_type = other DNA
actggcgcttctatctgattactctgagcgccatcaccagcgactatgtcgtatggcgtaaagcgcttacggacttcggtccgtaagaagcatcagag

SEQ ID NO: 4955 - DNA, 98 bp, synthetic construct
  misc_feature 1..98: note = engineered ribonucleic acid scaffold (ERS) sequence
  source 1..98: mol_type = other DNA
actggcgcttctatctgattactctgagcgccatcaccagcgactatgtcgtatggtgtaaagcgcttacggacttcggtccgtaagaagcatcagag

SEQ ID NO: 4956 - DNA, 98 bp, synthetic construct
  misc_feature 1..98: note = engineered ribonucleic acid scaffold (ERS) sequence
  source 1..98: mol_type = other DNA
actggcgcttctatctgattactctgagcgccatcaccagcgactatgtcgtatgggctaaagcgcttacggacttcggtccgtaagaagcatcagag

SEQ ID NO: 4957 - DNA, 95 bp, synthetic construct
  misc_feature 1..95: note = engineered ribonucleic acid scaffold (ERS) sequence
  source 1..95: mol_type = other DNA
actggcgcttctatctgattactctgagcgccatcaccagcgactatgtcgtatgggtagcgcttacggacttcggtccgtaagaagcatcagag

SEQ ID NO: 4958 - DNA, 97 bp, synthetic construct
  misc_feature 1..97: note = engineered ribonucleic acid scaffold (ERS) sequence
  source 1..97: mol_type = other DNA
actggcgcttctatctgattactctgagcgccatcaccagcgactatgtcgtatgggtgaagcgcttacggacttcggtccgtaagaagcatcagag

SEQ ID NO: 4959 - DNA, 97 bp, synthetic construct
  misc_feature 1..97: note = engineered ribonucleic acid scaffold (ERS) sequence
  source 1..97: mol_type = other DNA
actggcgcttctatctgattactctgagcgccatcaccagcgactatgtcgtatgggtagagcgcttacggacttcggtccgtaagaagcatcagag

SEQ ID NO: 4960 - DNA, 97 bp, synthetic construct
  misc_feature 1..97: note = engineered ribonucleic acid scaffold (ERS) sequence
  source 1..97: mol_type = other DNA
actggcgcttctatctgattactctgagcgccaacaccagcgactatgtcgtatgggtaaagcgcttacggacttcggtccgtaagtcgcatcagag

SEQ ID NO: 4961 - DNA, 97 bp, synthetic construct
  misc_feature 1..97: note = engineered ribonucleic acid scaffold (ERS) sequence
  source 1..97: mol_type = other DNA
actggcgcttctatctgattactctgagcgccagcaccagcgactatgtcgtatgggtaaagcgcttacggacttcggtccgtaagtcgcatcagag

SEQ ID NO: 4962 - DNA, 97 bp, synthetic construct
  misc_feature 1..97: note = engineered ribonucleic acid scaffold (ERS) sequence
  source 1..97: mol_type = other DNA
actggcgcttctatctgattactctgagcgccatgaccagcgactatgtcgtatggctaaagcgcttacggacttcggtccgtaagtcgcatcagag

SEQ ID NO: 4963 - DNA, 98 bp, synthetic construct
  misc_feature 1..98: note = engineered ribonucleic acid scaffold (ERS) sequence
  source 1..98: mol_type = other DNA
actggcgcttctatctgattactctgagcgccatgaccagcgactatgtcgtatgggctaaagcgcttacggacttcggtccgtaagtcgcatcagag

SEQ ID NO: 4964 - DNA, 97 bp, synthetic construct
  misc_feature 1..97: note = engineered ribonucleic acid scaffold (ERS) sequence
  source 1..97: mol_type = other DNA
actggcgcttctatctgattactctgagcgccatgaccagcgactatgtcgtatgggtaaagcgcttacggacttcggtccgtaagtcgcatcagag

SEQ ID NO: 4965 - DNA, 97 bp, synthetic construct
  misc_feature 1..97: note = engineered ribonucleic acid scaffold (ERS) sequence
  source 1..97: mol_type = other DNA
actggcgcttctatctgattactctgagcgccatccccagcgactatgtcgtatgggtaaagcgcttacggacttcggtccgtaagtcgcatcagag

SEQ ID NO: 4966 - DNA, 98 bp, synthetic construct
  misc_feature 1..98: note = engineered ribonucleic acid scaffold (ERS) sequence
  source 1..98: mol_type = other DNA
actggcgcttctatctgattactctgagcgccatcgccagcgactatgtcgtatggcgtaaagcgcttacggacttcggtccgtaagtcgcatcagag

SEQ ID NO: 4967 - DNA, 97 bp, synthetic construct
  misc_feature 1..97: note = engineered ribonucleic acid scaffold (ERS) sequence
  source 1..97: mol_type = other DNA
actggcgcttctatctgattactctgagcgccatcgccagcgactatgtcgtatgggtaaagcgcttacggacttcggtccgtaagtcgcatcagag

SEQ ID NO: 4968 - DNA, 97 bp, synthetic construct
  misc_feature 1..97: note = engineered ribonucleic acid scaffold (ERS) sequence
  source 1..97: mol_type = other DNA
actggcgcttctatctgattactctgagcgccatctccagcgactatgtcgtatgggtaaagcgcttacggacttcggtccgtaagtcgcatcagag

SEQ ID NO: 4969 - DNA, 97 bp, synthetic construct
  misc_feature 1..97: note = engineered ribonucleic acid scaffold (ERS) sequence
  source 1..97: mol_type = other DNA
actggcgcttctatctgattactctgagcgccatcacctgcgactatgtcgtaagggtaaagcgcttacggacttcggtccgtaagtcgcatcagag

SEQ ID NO: 4970 - DNA, 97 bp, synthetic construct
  misc_feature 1..97: note = engineered ribonucleic acid scaffold (ERS) sequence
  source 1..97: mol_type = other DNA
actggcgcttctatctgattactctgagcgccatcaccagagactatgtcttatgggtaaagcgcttacggacttcggtccgtaagtcgcatcagag

SEQ ID NO: 4971 - DNA, 97 bp, synthetic construct
  misc_feature 1..97: note = engineered ribonucleic acid scaffold (ERS) sequence
  source 1..97: mol_type = other DNA
actggcgcttctatctgattactctgagcgccatcaccagggactatgtcctatgggtaaagcgcttacggacttcggtccgtaagtcgcatcagag

SEQ ID NO: 4972 - DNA, 98 bp, synthetic construct
  misc_feature 1..98: note = engineered ribonucleic acid scaffold (ERS) sequence
  source 1..98: mol_type = other DNA
actggcgcttctatctgattactctgagcgccatcaccaggcactatgtgctattgggtaaagcgcttacggacttcggtccgtaagtcgcatcagag

SEQ ID NO: 4973 - DNA, 97 bp, synthetic construct
  misc_feature 1..97: note = engineered ribonucleic acid scaffold (ERS) sequence
  source 1..97: mol_type = other DNA
actggcgcttctatctgattactctgagcgccatcaccagccactatgtggtatgggtaaagcgcttacggacttcggtccgtaagtcgcatcagag

SEQ ID NO: 4974 - DNA, 97 bp, synthetic construct
  misc_feature 1..97: note = engineered ribonucleic acid scaffold (ERS) sequence
  source 1..97: mol_type = other DNA
actggcgcttctatctgattactctgagcgccatcaccagctactatgtagtatgggtaaagcgcttacggacttcggtccgtaagtcgcatcagag

SEQ ID NO: 4975 - DNA, 97 bp, synthetic construct
  misc_feature 1..97: note = engineered ribonucleic acid scaffold (ERS) sequence
  source 1..97: mol_type = other DNA
actggcgcttctatctgattactctgagcgccatcaccagcgattatgtcgtatgggtaaagcgcttacggacttcggtccgtaagtcgcatcagag

SEQ ID NO: 4976 - DNA, 97 bp, synthetic construct
  misc_feature 1..97: note = engineered ribonucleic acid scaffold (ERS) sequence
  source 1..97: mol_type = other DNA
actggcgcttctatctgattactctgagcgccatcaccagcgacgatgtcgtatgggtaaagcgcttacggacttcggtccgtaagtcgcatcagag

SEQ ID NO: 4977 - DNA, 97 bp, synthetic construct
  misc_feature 1..97: note = engineered ribonucleic acid scaffold (ERS) sequence
  source 1..97: mol_type = other DNA
actggcgcttctatctgattactctgagcgccatcaccagcgactctgtcgtatgggtaaagcgcttacggacttcggtccgtaagtcgcatcagag

SEQ ID NO: 4978 - DNA, 97 bp, synthetic construct
  misc_feature 1..97: note = engineered ribonucleic acid scaffold (ERS) sequence
  source 1..97: mol_type = other DNA
actggcgcttctatctgattactctgagcgccatcaccagcgactatgtcgtgtgggtaaagcgcttacggacttcggtccgtaagtcgcatcagag

SEQ ID NO: 4979 - DNA, 98 bp, synthetic construct
  misc_feature 1..98: note = engineered ribonucleic acid scaffold (ERS) sequence
  source 1..98: mol_type = other DNA
actggcgcttctatctgattactctgagcgccatcaccagcgactatgtcgtattgggtaaagcgcttacggacttcggtccgtaagtcgcatcagag

SEQ ID NO: 4980 - DNA, 98 bp, synthetic construct
  misc_feature 1..98: note = engineered ribonucleic acid scaffold (ERS) sequence
  source 1..98: mol_type = other DNA
actggcgcttctatctgattactctgagcgccatcaccagcgactatgtcgtatggagtaaagcgcttacggacttcggtccgtaagtcgcatcagag

SEQ ID NO: 4981 - DNA, 98 bp, synthetic construct
  misc_feature 1..98: note = engineered ribonucleic acid scaffold (ERS) sequence
  source 1..98: mol_type = other DNA
actggcgcttctatctgattactctgagcgccatcaccagcgactatgtcgtatggcgtaaagcgcttacggacttcggtccgtaagtcgcatcagag

SEQ ID NO: 4982 - DNA, 98 bp, synthetic construct
  misc_feature 1..98: note = engineered ribonucleic acid scaffold (ERS) sequence
  source 1..98: mol_type = other DNA
actggcgcttctatctgattactctgagcgccatcaccagcgactatgtcgtatggtgtaaagcgcttacggacttcggtccgtaagtcgcatcagag

SEQ ID NO: 4983 - DNA, 98 bp, synthetic construct
  misc_feature 1..98: note = engineered ribonucleic acid scaffold (ERS) sequence
  source 1..98: mol_type = other DNA
actggcgcttctatctgattactctgagcgccatcaccagcgactatgtcgtatgggctaaagcgcttacggacttcggtccgtaagtcgcatcagag

SEQ ID NO: 4984 - DNA, 95 bp, synthetic construct
  misc_feature 1..95: note = engineered ribonucleic acid scaffold (ERS) sequence
  source 1..95: mol_type = other DNA
actggcgcttctatctgattactctgagcgccatcaccagcgactatgtcgtatgggtagcgcttacggacttcggtccgtaagtcgcatcagag

SEQ ID NO: 4985 - DNA, 97 bp, synthetic construct
  misc_feature 1..97: note = engineered ribonucleic acid scaffold (ERS) sequence
  source 1..97: mol_type = other DNA
actggcgcttctatctgattactctgagcgccatcaccagcgactatgtcgtatgggtgaagcgcttacggacttcggtccgtaagtcgcatcagag

SEQ ID NO: 4986 - DNA, 97 bp, synthetic construct
  misc_feature 1..97: note = engineered ribonucleic acid scaffold (ERS) sequence
  source 1..97: mol_type = other DNA
actggcgcttctatctgattactctgagcgccatcaccagcgactatgtcgtatgggtagagcgcttacggacttcggtccgtaagtcgcatcagag

SEQ ID NO: 4987 - DNA, 97 bp, synthetic construct
  misc_feature 1..97: note = engineered ribonucleic acid scaffold (ERS) sequence
  source 1..97: mol_type = other DNA
actggcgcttctatctgattactctgagcgccaacaccagcgactatgtcgtatgggtaaagcgcttacggagttcgatccgtaagaagcatcagag

SEQ ID NO: 4988 - DNA, 97 bp, synthetic construct
  misc_feature 1..97: note = engineered ribonucleic acid scaffold (ERS) sequence
  source 1..97: mol_type = other DNA
actggcgcttctatctgattactctgagcgccagcaccagcgactatgtcgtatgggtaaagcgcttacggagttcgatccgtaagaagcatcagag

SEQ ID NO: 4989 - DNA, 97 bp, synthetic construct
  misc_feature 1..97: note = engineered ribonucleic acid scaffold (ERS) sequence
  source 1..97: mol_type = other DNA
actggcgcttctatctgattactctgagcgccatgaccagcgactatgtcgtatggctaaagcgcttacggagttcgatccgtaagaagcatcagag

SEQ ID NO: 4990 - DNA, 98 bp, synthetic construct
  misc_feature 1..98: note = engineered ribonucleic acid scaffold (ERS) sequence
  source 1..98: mol_type = other DNA
actggcgcttctatctgattactctgagcgccatgaccagcgactatgtcgtatgggctaaagcgcttacggagttcgatccgtaagaagcatcagag

SEQ ID NO: 4991 - DNA, 97 bp, synthetic construct
  misc_feature 1..97: note = engineered ribonucleic acid scaffold (ERS) sequence
  source 1..97: mol_type = other DNA
actggcgcttctatctgattactctgagcgccatgaccagcgactatgtcgtatgggtaaagcgcttacggagttcgatccgtaagaagcatcagag

SEQ ID NO: 4992 - DNA, 97 bp, synthetic construct
  misc_feature 1..97: note = engineered ribonucleic acid scaffold (ERS) sequence
  source 1..97: mol_type = other DNA
actggcgcttctatctgattactctgagcgccatccccagcgactatgtcgtatgggtaaagcgcttacggagttcgatccgtaagaagcatcagag

SEQ ID NO: 4993 - DNA, 98 bp, synthetic construct
  misc_feature 1..98: note = engineered ribonucleic acid scaffold (ERS) sequence
  source 1..98: mol_type = other DNA
actggcgcttctatctgattactctgagcgccatcgccagcgactatgtcgtatggcgtaaagcgcttacggagttcgatccgtaagaagcatcagag

SEQ ID NO: 4994 - DNA, 97 bp, synthetic construct
  misc_feature 1..97: note = engineered ribonucleic acid scaffold (ERS) sequence
  source 1..97: mol_type = other DNA
actggcgcttctatctgattactctgagcgccatcgccagcgactatgtcgtatgggtaaagcgcttacggagttcgatccgtaagaagcatcagag

SEQ ID NO: 4995 - DNA, 97 bp, synthetic construct
  misc_feature 1..97: note = engineered ribonucleic acid scaffold (ERS) sequence
  source 1..97: mol_type = other DNA
actggcgcttctatctgattactctgagcgccatctccagcgactatgtcgtatgggtaaagcgcttacggagttcgatccgtaagaagcatcagag

SEQ ID NO: 4996 - DNA, 97 bp, synthetic construct
  misc_feature 1..97: note = engineered ribonucleic acid scaffold (ERS) sequence
  source 1..97: mol_type = other DNA
actggcgcttctatctgattactctgagcgccatcacctgcgactatgtcgtaagggtaaagcgcttacggagttcgatccgtaagaagcatcagag

SEQ ID NO: 4997 - DNA, 97 bp, synthetic construct
  misc_feature 1..97: note = engineered ribonucleic acid scaffold (ERS) sequence
  source 1..97: mol_type = other DNA
actggcgcttctatctgattactctgagcgccatcaccagagactatgtcttatgggtaaagcgcttacggagttcgatccgtaagaagcatcagag

SEQ ID NO: 4998 - DNA, 97 bp, synthetic construct
  misc_feature 1..97: note = engineered ribonucleic acid scaffold (ERS) sequence
  source 1..97: mol_type = other DNA
actggcgcttctatctgattactctgagcgccatcaccagggactatgtcctatgggtaaagcgcttacggagttcgatccgtaagaagcatcagag

SEQ ID NO: 4999 - DNA, 98 bp, synthetic construct
  misc_feature 1..98: note = engineered ribonucleic acid scaffold (ERS) sequence
  source 1..98: mol_type = other DNA
actggcgcttctatctgattactctgagcgccatcaccaggcactatgtgctattgggtaaagcgcttacggagttcgatccgtaagaagcatcagag

SEQ ID NO: 5000 - DNA, 97 bp, synthetic construct
  misc_feature 1..97: note = engineered ribonucleic acid scaffold (ERS) sequence
  source 1..97: mol_type = other DNA
actggcgcttctatctgattactctgagcgccatcaccagccactatgtggtatgggtaaagcgcttacggagttcgatccgtaagaagcatcagag

SEQ ID NO: 5001 - DNA, 97 bp, synthetic construct
  misc_feature 1..97: note = engineered ribonucleic acid scaffold (ERS) sequence
  source 1..97: mol_type = other DNA
actggcgcttctatctgattactctgagcgccatcaccagctactatgtagtatgggtaaagcgcttacggagttcgatccgtaagaagcatcagag

SEQ ID NO: 5002 - DNA, 97 bp, synthetic construct
  misc_feature 1..97: note = engineered ribonucleic acid scaffold (ERS) sequence
  source 1..97: mol_type = other DNA
actggcgcttctatctgattactctgagcgccatcaccagcgattatgtcgtatgggtaaagcgcttacggagttcgatccgtaagaagcatcagag

SEQ ID NO: 5003 - DNA, 97 bp, synthetic construct
  misc_feature 1..97: note = engineered ribonucleic acid scaffold (ERS) sequence
  source 1..97: mol_type = other DNA
actggcgcttctatctgattactctgagcgccatcaccagcgacgatgtcgtatgggtaaagcgcttacggagttcgatccgtaagaagcatcagag

SEQ ID NO: 5004 - DNA, 97 bp, synthetic construct
  misc_feature 1..97: note = engineered ribonucleic acid scaffold (ERS) sequence
  source 1..97: mol_type = other DNA
actggcgcttctatctgattactctgagcgccatcaccagcgactctgtcgtatgggtaaagcgcttacggagttcgatccgtaagaagcatcagag

SEQ ID NO: 5005 - DNA, 97 bp, synthetic construct
  misc_feature 1..97: note = engineered ribonucleic acid scaffold (ERS) sequence
  source 1..97: mol_type = other DNA
actggcgcttctatctgattactctgagcgccatcaccagcgactatgtcgtgtgggtaaagcgcttacggagttcgatccgtaagaagcatcagag

SEQ ID NO: 5006 - DNA, 98 bp, synthetic construct
  misc_feature 1..98: note = engineered ribonucleic acid scaffold (ERS) sequence
  source 1..98: mol_type = other DNA
actggcgcttctatctgattactctgagcgccatcaccagcgactatgtcgtattgggtaaagcgcttacggagttcgatccgtaagaagcatcagag

SEQ ID NO: 5007 - DNA, 98 bp, synthetic construct
  misc_feature 1..98: note = engineered ribonucleic acid scaffold (ERS) sequence
  source 1..98: mol_type = other DNA
actggcgcttctatctgattactctgagcgccatcaccagcgactatgtcgtatggagtaaagcgcttacggagttcgatccgtaagaagcatcagag

SEQ ID NO: 5008 - DNA, 98 bp, synthetic construct
  misc_feature 1..98: note = engineered ribonucleic acid scaffold (ERS) sequence
  source 1..98: mol_type = other DNA
actggcgcttctatctgattactctgagcgccatcaccagcgactatgtcgtatggcgtaaagcgcttacggagttcgatccgtaagaagcatcagag

SEQ ID NO: 5009 - DNA, 98 bp, synthetic construct
  misc_feature 1..98: note = engineered ribonucleic acid scaffold (ERS) sequence
  source 1..98: mol_type = other DNA
actggcgcttctatctgattactctgagcgccatcaccagcgactatgtcgtatggtgtaaagcgcttacggagttcgatccgtaagaagcatcagag

SEQ ID NO: 5010 - DNA, 98 bp, synthetic construct
  misc_feature 1..98: note = engineered ribonucleic acid scaffold (ERS) sequence
  source 1..98: mol_type = other DNA
actggcgcttctatctgattactctgagcgccatcaccagcgactatgtcgtatgggctaaagcgcttacggagttcgatccgtaagaagcatcagag

SEQ ID NO: 5011 - DNA, 95 bp, synthetic construct
  misc_feature 1..95: note = engineered ribonucleic acid scaffold (ERS) sequence
  source 1..95: mol_type = other DNA
actggcgcttctatctgattactctgagcgccatcaccagcgactatgtcgtatgggtagcgcttacggagttcgatccgtaagaagcatcagag

SEQ ID NO: 5012 - DNA, 97 bp, synthetic construct
  misc_feature 1..97: note = engineered ribonucleic acid scaffold (ERS) sequence
  source 1..97: mol_type = other DNA
actggcgcttctatctgattactctgagcgccatcaccagcgactatgtcgtatgggtgaagcgcttacggagttcgatccgtaagaagcatcagag

SEQ ID NO: 5013 - DNA, 97 bp, synthetic construct
  misc_feature 1..97: note = engineered ribonucleic acid scaffold (ERS) sequence
  source 1..97: mol_type = other DNA
actggcgcttctatctgattactctgagcgccatcaccagcgactatgtcgtatgggtagagcgcttacggagttcgatccgtaagaagcatcagag

SEQ ID NO: 5014 - DNA, 97 bp, synthetic construct
  misc_feature 1..97: note = engineered ribonucleic acid scaffold (ERS) sequence
  source 1..97: mol_type = other DNA
actggcgcttctatctgattactctgagcgccaacaccagcgactatgtcgtatgggtaaagcgctttcggacttcggtccggaagaagcatcagag

SEQ ID NO: 5015 - DNA, 97 bp, synthetic construct
  misc_feature 1..97: note = engineered ribonucleic acid scaffold (ERS) sequence
  source 1..97: mol_type = other DNA
actggcgcttctatctgattactctgagcgccagcaccagcgactatgtcgtatgggtaaagcgctttcggacttcggtccggaagaagcatcagag

SEQ ID NO: 5016 - DNA, 97 bp, synthetic construct
  misc_feature 1..97: note = engineered ribonucleic acid scaffold (ERS) sequence
  source 1..97: mol_type = other DNA
actggcgcttctatctgattactctgagcgccatgaccagcgactatgtcgtatggctaaagcgctttcggacttcggtccggaagaagcatcagag

SEQ ID NO: 5017 - DNA, 98 bp, synthetic construct
  misc_feature 1..98: note = engineered ribonucleic acid scaffold (ERS) sequence
  source 1..98: mol_type = other DNA
actggcgcttctatctgattactctgagcgccatgaccagcgactatgtcgtatgggctaaagcgctttcggacttcggtccggaagaagcatcagag

SEQ ID NO: 5018 - DNA, 97 bp, synthetic construct
  misc_feature 1..97: note = engineered ribonucleic acid scaffold (ERS) sequence
  source 1..97: mol_type = other DNA
actggcgcttctatctgattactctgagcgccatgaccagcgactatgtcgtatgggtaaagcgctttcggacttcggtccggaagaagcatcagag

SEQ ID NO: 5019 - DNA, 97 bp, synthetic construct
  misc_feature 1..97: note = engineered ribonucleic acid scaffold (ERS) sequence
  source 1..97: mol_type = other DNA
actggcgcttctatctgattactctgagcgccatccccagcgactatgtcgtatgggtaaagcgctttcggacttcggtccggaagaagcatcagag

SEQ ID NO: 5020 - DNA, 98 bp, synthetic construct
  misc_feature 1..98: note = engineered ribonucleic acid scaffold (ERS) sequence
  source 1..98: mol_type = other DNA
actggcgcttctatctgattactctgagcgccatcgccagcgactatgtcgtatggcgtaaagcgctttcggacttcggtccggaagaagcatcagag

SEQ ID NO: 5021 - DNA, 97 bp, synthetic construct
  misc_feature 1..97: note = engineered ribonucleic acid scaffold (ERS) sequence
  source 1..97: mol_type = other DNA
actggcgcttctatctgattactctgagcgccatcgccagcgactatgtcgtatgggtaaagcgctttcggacttcggtccggaagaagcatcagag

SEQ ID NO: 5022 - DNA, 97 bp, synthetic construct
  misc_feature 1..97: note = engineered ribonucleic acid scaffold (ERS) sequence
  source 1..97: mol_type = other DNA
actggcgcttctatctgattactctgagcgccatctccagcgactatgtcgtatgggtaaagcgctttcggacttcggtccggaagaagcatcagag

SEQ ID NO: 5023 - DNA, 97 bp, synthetic construct
  misc_feature 1..97: note = engineered ribonucleic acid scaffold (ERS) sequence
  source 1..97: mol_type = other DNA
actggcgcttctatctgattactctgagcgccatcacctgcgactatgtcgtaagggtaaagcgctttcggacttcggtccggaagaagcatcagag

SEQ ID NO: 5024 - DNA, 97 bp, synthetic construct
  misc_feature 1..97: note = engineered ribonucleic acid scaffold (ERS) sequence
  source 1..97: mol_type = other DNA
actggcgcttctatctgattactctgagcgccatcaccagagactatgtcttatgggtaaagcgctttcggacttcggtccggaagaagcatcagag

SEQ ID NO: 5025 - DNA, 97 bp, synthetic construct
  misc_feature 1..97: note = engineered ribonucleic acid scaffold (ERS) sequence
  source 1..97: mol_type = other DNA
actggcgcttctatctgattactctgagcgccatcaccagggactatgtcctatgggtaaagcgctttcggacttcggtccggaagaagcatcagag

SEQ ID NO: 5026 - DNA, 98 bp, synthetic construct
  misc_feature 1..98: note = engineered ribonucleic acid scaffold (ERS) sequence
  source 1..98: mol_type = other DNA
actggcgcttctatctgattactctgagcgccatcaccaggcactatgtgctattgggtaaagcgctttcggacttcggtccggaagaagcatcagag

SEQ ID NO: 5027 - DNA, 97 bp, synthetic construct
  misc_feature 1..97: note = engineered ribonucleic acid scaffold (ERS) sequence
  source 1..97: mol_type = other DNA
actggcgcttctatctgattactctgagcgccatcaccagccactatgtggtatgggtaaagcgctttcggacttcggtccggaagaagcatcagag

SEQ ID NO: 5028 - DNA, 97 bp, synthetic construct
  misc_feature 1..97: note = engineered ribonucleic acid scaffold (ERS) sequence
  source 1..97: mol_type = other DNA
actggcgcttctatctgattactctgagcgccatcaccagctactatgtagtatgggtaaagcgctttcggacttcggtccggaagaagcatcagag

SEQ ID NO: 5029 - DNA, 97 bp, synthetic construct
  misc_feature 1..97: note = engineered ribonucleic acid scaffold (ERS) sequence
  source 1..97: mol_type = other DNA
actggcgcttctatctgattactctgagcgccatcaccagcgattatgtcgtatgggtaaagcgctttcggacttcggtccggaagaagcatcagag

SEQ ID NO: 5030 - DNA, 97 bp, synthetic construct
  misc_feature 1..97: note = engineered ribonucleic acid scaffold (ERS) sequence
  source 1..97: mol_type = other DNA
actggcgcttctatctgattactctgagcgccatcaccagcgacgatgtcgtatgggtaaagcgctttcggacttcggtccggaagaagcatcagag

SEQ ID NO: 5031 - DNA, 97 bp, synthetic construct
  misc_feature 1..97: note = engineered ribonucleic acid scaffold (ERS) sequence
  source 1..97: mol_type = other DNA
actggcgcttctatctgattactctgagcgccatcaccagcgactctgtcgtatgggtaaagcgctttcggacttcggtccggaagaagcatcagag

SEQ ID NO: 5032 - DNA, 97 bp, synthetic construct
  misc_feature 1..97: note = engineered ribonucleic acid scaffold (ERS) sequence
  source 1..97: mol_type = other DNA
actggcgcttctatctgattactctgagcgccatcaccagcgactatgtcgtgtgggtaaagcgctttcggacttcggtccggaagaagcatcagag

SEQ ID NO: 5033 - DNA, 98 bp, synthetic construct
  misc_feature 1..98: note = engineered ribonucleic acid scaffold (ERS) sequence
  source 1..98: mol_type = other DNA
actggcgcttctatctgattactctgagcgccatcaccagcgactatgtcgtattgggtaaagcgctttcggacttcggtccggaagaagcatcagag

SEQ ID NO: 5034 - DNA, 98 bp, synthetic construct
  misc_feature 1..98: note = engineered ribonucleic acid scaffold (ERS) sequence
  source 1..98: mol_type = other DNA
actggcgcttctatctgattactctgagcgccatcaccagcgactatgtcgtatggagtaaagcgctttcggacttcggtccggaagaagcatcagag

SEQ ID NO: 5035 - DNA, 98 bp, synthetic construct
  misc_feature 1..98: note = engineered ribonucleic acid scaffold (ERS) sequence
  source 1..98: mol_type = other DNA
actggcgcttctatctgattactctgagcgccatcaccagcgactatgtcgtatggcgtaaagcgctttcggacttcggtccggaagaagcatcagag

SEQ ID NO: 5036 - DNA, 98 bp, synthetic construct
  misc_feature 1..98: note = engineered ribonucleic acid scaffold (ERS) sequence
  source 1..98: mol_type = other DNA
actggcgcttctatctgattactctgagcgccatcaccagcgactatgtcgtatggtgtaaagcgctttcggacttcggtccggaagaagcatcagag

SEQ ID NO: 5037 - DNA, 98 bp, synthetic construct
  misc_feature 1..98: note = engineered ribonucleic acid scaffold (ERS) sequence
  source 1..98: mol_type = other DNA
actggcgcttctatctgattactctgagcgccatcaccagcgactatgtcgtatgggctaaagcgctttcggacttcggtccggaagaagcatcagag

SEQ ID NO: 5038 - DNA, 95 bp, synthetic construct
  misc_feature 1..95: note = engineered ribonucleic acid scaffold (ERS) sequence
  source 1..95: mol_type = other DNA
actggcgcttctatctgattactctgagcgccatcaccagcgactatgtcgtatgggtagcgctttcggacttcggtccggaagaagcatcagag

SEQ ID NO: 5039 - DNA, 97 bp, synthetic construct
  misc_feature 1..97: note = engineered ribonucleic acid scaffold (ERS) sequence
  source 1..97: mol_type = other DNA
actggcgcttctatctgattactctgagcgccatcaccagcgactatgtcgtatgggtgaagcgctttcggacttcggtccggaagaagcatcagag

SEQ ID NO: 5040 - DNA, 97 bp, synthetic construct
  misc_feature 1..97: note = engineered ribonucleic acid scaffold (ERS) sequence
  source 1..97: mol_type = other DNA
actggcgcttctatctgattactctgagcgccatcaccagcgactatgtcgtatgggtagagcgctttcggacttcggtccggaagaagcatcagag

SEQ ID NO: 5041 - DNA, 101 bp, synthetic construct
  misc_feature 1..101: note = engineered ribonucleic acid scaffold (ERS) sequence
  source 1..101: mol_type = other DNA
actggcgcttctatctgattactctgagcgccaacaccagcgactatgtcgtatgggtaaagcggcagatctgagcctccgagctctctgccgcatcagag

SEQ ID NO: 5042 - DNA, 101 bp, synthetic construct
  misc_feature 1..101: note = engineered ribonucleic acid scaffold (ERS) sequence
  source 1..101: mol_type = other DNA
actggcgcttctatctgattactctgagcgccagcaccagcgactatgtcgtatgggtaaagcggcagatctgagcctccgagctctctgccgcatcagag

SEQ ID NO: 5043 - DNA, 101 bp, synthetic construct
  misc_feature 1..101: note = engineered ribonucleic acid scaffold (ERS) sequence
  source 1..101: mol_type = other DNA
actggcgcttctatctgattactctgagcgccatgaccagcgactatgtcgtatggctaaagcggcagatctgagcctccgagctctctgccgcatcagag

SEQ ID NO: 5044 - DNA, 102 bp, synthetic construct
  misc_feature 1..102: note = engineered ribonucleic acid scaffold (ERS) sequence
  source 1..102: mol_type = other DNA
actggcgcttctatctgattactctgagcgccatgaccagcgactatgtcgtatgggctaaagcggcagatctgagcctccgagctctctgccgcatcagag

SEQ ID NO: 5045 - DNA, 101 bp, synthetic construct
  misc_feature 1..101: note = engineered ribonucleic acid scaffold (ERS) sequence
  source 1..101: mol_type = other DNA
actggcgcttctatctgattactctgagcgccatgaccagcgactatgtcgtatgggtaaagcggcagatctgagcctccgagctctctgccgcatcagag

SEQ ID NO: 5046 - DNA, 101 bp, synthetic construct
  misc_feature 1..101: note = engineered ribonucleic acid scaffold (ERS) sequence
  source 1..101: mol_type = other DNA
actggcgcttctatctgattactctgagcgccatccccagcgactatgtcgtatgggtaaagcggcagatctgagcctccgagctctctgccgcatcagag

SEQ ID NO: 5047 - DNA, 102 bp, synthetic construct
  misc_feature 1..102: note = engineered ribonucleic acid scaffold (ERS) sequence
  source 1..102: mol_type = other DNA
actggcgcttctatctgattactctgagcgccatcgccagcgactatgtcgtatggcgtaaagcggcagatctgagcctccgagctctctgccgcatcagag

SEQ ID NO: 5048 - DNA, 101 bp, synthetic construct
  misc_feature 1..101: note = engineered ribonucleic acid scaffold (ERS) sequence
  source 1..101: mol_type = other DNA
actggcgcttctatctgattactctgagcgccatcgccagcgactatgtcgtatgggtaaagcggcagatctgagcctccgagctctctgccgcatcagag

SEQ ID NO: 5049 - DNA, 101 bp, synthetic construct
  misc_feature 1..101: note = engineered ribonucleic acid scaffold (ERS) sequence
  source 1..101: mol_type = other DNA
actggcgcttctatctgattactctgagcgccatctccagcgactatgtcgtatgggtaaagcggcagatctgagcctccgagctctctgccgcatcagag

SEQ ID NO: 5050 - DNA, 101 bp, synthetic construct
  misc_feature 1..101: note = engineered ribonucleic acid scaffold (ERS) sequence
  source 1..101: mol_type = other DNA
actggcgcttctatctgattactctgagcgccatcacctgcgactatgtcgtaagggtaaagcggcagatctgagcctccgagctctctgccgcatcagag

SEQ ID NO: 5051 - DNA, 101 bp, synthetic construct
  misc_feature 1..101: note = engineered ribonucleic acid scaffold (ERS) sequence
  source 1..101: mol_type = other DNA
actggcgcttctatctgattactctgagcgccatcaccagagactatgtcttatgggtaaagcggcagatctgagcctccgagctctctgccgcatcagag

SEQ ID NO: 5052 - DNA, 101 bp, synthetic construct
  misc_feature 1..101: note = engineered ribonucleic acid scaffold (ERS) sequence
  source 1..101: mol_type = other DNA
actggcgcttctatctgattactctgagcgccatcaccagggactatgtcctatgggtaaagcggcagatctgagcctccgagctctctgccgcatcagag

SEQ ID NO: 5053 - DNA, 102 bp, synthetic construct
  misc_feature 1..102: note = engineered ribonucleic acid scaffold (ERS) sequence
  source 1..102: mol_type = other DNA
actggcgcttctatctgattactctgagcgccatcaccaggcactatgtgctattgggtaaagcggcagatctgagcctccgagctctctgccgcatcagag

SEQ ID NO: 5054 - DNA, 101 bp, synthetic construct
  misc_feature 1..101: note = engineered ribonucleic acid scaffold (ERS) sequence
  source 1..101: mol_type = other DNA
actggcgcttctatctgattactctgagcgccatcaccagccactatgtggtatgggtaaagcggcagatctgagcctccgagctctctgccgcatcagag

SEQ ID NO: 5055 - DNA, 101 bp, synthetic construct
  misc_feature 1..101: note = engineered ribonucleic acid scaffold (ERS) sequence
  source 1..101: mol_type = other DNA
actggcgcttctatctgattactctgagcgccatcaccagctactatgtagtatgggtaaagcggcagatctgagcctccgagctctctgccgcatcagag

SEQ ID NO: 5056 - DNA, 101 bp, synthetic construct
  misc_feature 1..101: note = engineered ribonucleic acid scaffold (ERS) sequence
  source 1..101: mol_type = other DNA
actggcgcttctatctgattactctgagcgccatcaccagcgattatgtcgtatgggtaaagcggcagatctgagcctccgagctctctgccgcatcagag

SEQ ID NO: 5057 - DNA, 101 bp, synthetic construct
  misc_feature 1..101: note = engineered ribonucleic acid scaffold (ERS) sequence
  source 1..101: mol_type = other DNA
actggcgcttctatctgattactctgagcgccatcaccagcgacgatgtcgtatgggtaaagcggcagatctgagcctccgagctctctgccgcatcagag

SEQ ID NO: 5058 - DNA, 101 bp, synthetic construct
  misc_feature 1..101: note = engineered ribonucleic acid scaffold (ERS) sequence
  source 1..101: mol_type = other DNA
actggcgcttctatctgattactctgagcgccatcaccagcgactctgtcgtatgggtaaagcggcagatctgagcctccgagctctctgccgcatcagag

SEQ ID NO: 5059 - DNA, 101 bp, synthetic construct
  misc_feature 1..101: note = engineered ribonucleic acid scaffold (ERS) sequence
  source 1..101: mol_type = other DNA
actggcgcttctatctgattactctgagcgccatcaccagcgactatgtcgtgtgggtaaagcggcagatctgagcctccgagctctctgccgcatcagag

SEQ ID NO: 5060 - DNA, 102 bp, synthetic construct
  misc_feature 1..102: note = engineered ribonucleic acid scaffold (ERS) sequence
  source 1..102: mol_type = other DNA
actggcgcttctatctgattactctgagcgccatcaccagcgactatgtcgtattgggtaaagcggcagatctgagcctccgagctctctgccgcatcagag

SEQ ID NO: 5061 - DNA, 102 bp, synthetic construct
  misc_feature 1..102: note = engineered ribonucleic acid scaffold (ERS) sequence
  source 1..102: mol_type = other DNA
actggcgcttctatctgattactctgagcgccatcaccagcgactatgtcgtatggagtaaagcggcagatctgagcctccgagctctctgccgcatcagag

SEQ ID NO: 5062 - DNA, 102 bp, synthetic construct
  misc_feature 1..102: note = engineered ribonucleic acid scaffold (ERS) sequence
  source 1..102: mol_type = other DNA
actggcgcttctatctgattactctgagcgccatcaccagcgactatgtcgtatggcgtaaagcggcagatctgagcctccgagctctctgccgcatcagag

SEQ ID NO: 5063 - DNA, 102 bp, synthetic construct
  misc_feature 1..102: note = engineered ribonucleic acid scaffold (ERS) sequence
  source 1..102: mol_type = other DNA
actggcgcttctatctgattactctgagcgccatcaccagcgactatgtcgtatggtgtaaagcggcagatctgagcctccgagctctctgccgcatcagag

SEQ ID NO: 5064 - DNA, 102 bp, synthetic construct
  misc_feature 1..102: note = engineered ribonucleic acid scaffold (ERS) sequence
  source 1..102: mol_type = other DNA
actggcgcttctatctgattactctgagcgccatcaccagcgactatgtcgtatgggctaaagcggcagatctgagcctccgagctctctgccgcatcagag

SEQ ID NO: 5065 - DNA, 99 bp, synthetic construct
  misc_feature 1..99: note = engineered ribonucleic acid scaffold (ERS) sequence
  source 1..99: mol_type = other DNA
actggcgcttctatctgattactctgagcgccatcaccagcgactatgtcgtatgggtagcggcagatctgagcctccgagctctctgccgcatcagag

SEQ ID NO: 5066 - DNA, 101 bp, synthetic construct
  misc_feature 1..101: note = engineered ribonucleic acid scaffold (ERS) sequence
  source 1..101: mol_type = other DNA
actggcgcttctatctgattactctgagcgccatcaccagcgactatgtcgtatgggtgaagcggcagatctgagcctccgagctctctgccgcatcagag

SEQ ID NO: 5067 - DNA, 101 bp, synthetic construct
  misc_feature 1..101: note = engineered ribonucleic acid scaffold (ERS) sequence
  source 1..101: mol_type = other DNA
actggcgcttctatctgattactctgagcgccatcaccagcgactatgtcgtatgggtagagcggcagatctgagcctccgagctctctgccgcatcagag

SEQ ID NO: 5068 - DNA, 97 bp, synthetic construct
  misc_feature 1..97: note = engineered ribonucleic acid scaffold (ERS) sequence
  source 1..97: mol_type = other DNA
actggcgcttctatctgattactctgagcgccaacaccagcgactatgtcgtatgggtaaagcggttacggacttcggtccgtaagacgcatcagag

SEQ ID NO: 5069 - DNA, 97 bp, synthetic construct
  misc_feature 1..97: note = engineered ribonucleic acid scaffold (ERS) sequence
  source 1..97: mol_type = other DNA
actggcgcttctatctgattactctgagcgccagcaccagcgactatgtcgtatgggtaaagcggttacggacttcggtccgtaagacgcatcagag

SEQ ID NO: 5070 - DNA, 97 bp, synthetic construct
  misc_feature 1..97: note = engineered ribonucleic acid scaffold (ERS) sequence
  source 1..97: mol_type = other DNA
actggcgcttctatctgattactctgagcgccatgaccagcgactatgtcgtatggctaaagcggttacggacttcggtccgtaagacgcatcagag

SEQ ID NO: 5071 - DNA, 98 bp, synthetic construct
  misc_feature 1..98: note = engineered ribonucleic acid scaffold (ERS) sequence
  source 1..98: mol_type = other DNA
actggcgcttctatctgattactctgagcgccatgaccagcgactatgtcgtatgggctaaagcggttacggacttcggtccgtaagacgcatcagag

SEQ ID NO: 5072 - DNA, 97 bp, synthetic construct
  misc_feature 1..97: note = engineered ribonucleic acid scaffold (ERS) sequence
  source 1..97: mol_type = other DNA
actggcgcttctatctgattactctgagcgccatgaccagcgactatgtcgtatgggtaaagcggttacggacttcggtccgtaagacgcatcagag

SEQ ID NO: 5073 - DNA, 97 bp, synthetic construct
  misc_feature 1..97: note = engineered ribonucleic acid scaffold (ERS) sequence
  source 1..97: mol_type = other DNA
actggcgcttctatctgattactctgagcgccatccccagcgactatgtcgtatgggtaaagcggttacggacttcggtccgtaagacgcatcagag

SEQ ID NO: 5074 - DNA, 98 bp, synthetic construct
  misc_feature 1..98: note = engineered ribonucleic acid scaffold (ERS) sequence
  source 1..98: mol_type = other DNA
actggcgcttctatctgattactctgagcgccatcgccagcgactatgtcgtatggcgtaaagcggttacggacttcggtccgtaagacgcatcagag

SEQ ID NO: 5075 - DNA, 97 bp, synthetic construct
  misc_feature 1..97: note = engineered ribonucleic acid scaffold (ERS) sequence
  source 1..97: mol_type = other DNA
actggcgcttctatctgattactctgagcgccatcgccagcgactatgtcgtatgggtaaagcggttacggacttcggtccgtaagacgcatcagag

SEQ ID NO: 5076 - DNA, 97 bp, synthetic construct
  misc_feature 1..97: note = engineered ribonucleic acid scaffold (ERS) sequence
  source 1..97: mol_type = other DNA
actggcgcttctatctgattactctgagcgccatctccagcgactatgtcgtatgggtaaagcggttacggacttcggtccgtaagacgcatcagag

SEQ ID NO: 5077 - DNA, 97 bp, synthetic construct
  misc_feature 1..97: note = engineered ribonucleic acid scaffold (ERS) sequence
  source 1..97: mol_type = other DNA
actggcgcttctatctgattactctgagcgccatcacctgcgactatgtcgtaagggtaaagcggttacggacttcggtccgtaagacgcatcagag

SEQ ID NO: 5078 - DNA, 97 bp, synthetic construct
  misc_feature 1..97: note = engineered ribonucleic acid scaffold (ERS) sequence
  source 1..97: mol_type = other DNA
actggcgcttctatctgattactctgagcgccatcaccagagactatgtcttatgggtaaagcggttacggacttcggtccgtaagacgcatcagag

SEQ ID NO: 5079 - DNA, 97 bp, synthetic construct
  misc_feature 1..97: note = engineered ribonucleic acid scaffold (ERS) sequence
  source 1..97: mol_type = other DNA
actggcgcttctatctgattactctgagcgccatcaccagggactatgtcctatgggtaaagcggttacggacttcggtccgtaagacgcatcagag

SEQ ID NO: 5080 - DNA, 98 bp, synthetic construct
  misc_feature 1..98: note = engineered ribonucleic acid scaffold (ERS) sequence
  source 1..98: mol_type = other DNA
actggcgcttctatctgattactctgagcgccatcaccaggcactatgtgctattgggtaaagcggttacggacttcggtccgtaagacgcatcagag

SEQ ID NO: 5081 - DNA, 97 bp, synthetic construct
  misc_feature 1..97: note = engineered ribonucleic acid scaffold (ERS) sequence
  source 1..97: mol_type = other DNA
actggcgcttctatctgattactctgagcgccatcaccagccactatgtggtatgggtaaagcggttacggacttcggtccgtaagacgcatcagag

SEQ ID NO: 5082 - DNA, 97 bp, synthetic construct
  misc_feature 1..97: note = engineered ribonucleic acid scaffold (ERS) sequence
  source 1..97: mol_type = other DNA
actggcgcttctatctgattactctgagcgccatcaccagctactatgtagtatgggtaaagcggttacggacttcggtccgtaagacgcatcagag

SEQ ID NO: 5083 - DNA, 97 bp, synthetic construct
  misc_feature 1..97: note = engineered ribonucleic acid scaffold (ERS) sequence
  source 1..97: mol_type = other DNA
actggcgcttctatctgattactctgagcgccatcaccagcgattatgtcgtatgggtaaagcggttacggacttcggtccgtaagacgcatcagag

SEQ ID NO: 5084 - DNA, 97 bp, synthetic construct
  misc_feature 1..97: note = engineered ribonucleic acid scaffold (ERS) sequence
  source 1..97: mol_type = other DNA
actggcgcttctatctgattactctgagcgccatcaccagcgacgatgtcgtatgggtaaagcggttacggacttcggtccgtaagacgcatcagag

SEQ ID NO: 5085 - DNA, 97 bp, synthetic construct
  misc_feature 1..97: note = engineered ribonucleic acid scaffold (ERS) sequence
  source 1..97: mol_type = other DNA
actggcgcttctatctgattactctgagcgccatcaccagcgactctgtcgtatgggtaaagcggttacggacttcggtccgtaagacgcatcagag

SEQ ID NO: 5086 - DNA, 97 bp, synthetic construct
  misc_feature 1..97: note = engineered ribonucleic acid scaffold (ERS) sequence
  source 1..97: mol_type = other DNA
actggcgcttctatctgattactctgagcgccatcaccagcgactatgtcgtgtgggtaaagcggttacggacttcggtccgtaagacgcatcagag

SEQ ID NO: 5087 - DNA, 98 bp, synthetic construct
  misc_feature 1..98: note = engineered ribonucleic acid scaffold (ERS) sequence
  source 1..98: mol_type = other DNA
actggcgcttctatctgattactctgagcgccatcaccagcgactatgtcgtattgggtaaagcggttacggacttcggtccgtaagacgcatcagag

SEQ ID NO: 5088 - DNA, 98 bp, synthetic construct
  misc_feature 1..98: note = engineered ribonucleic acid scaffold (ERS) sequence
  source 1..98: mol_type = other DNA
actggcgcttctatctgattactctgagcgccatcaccagcgactatgtcgtatggagtaaagcggttacggacttcggtccgtaagacgcatcagag

SEQ ID NO: 5089 - DNA, 98 bp, synthetic construct
  misc_feature 1..98: note = engineered ribonucleic acid scaffold (ERS) sequence
  source 1..98: mol_type = other DNA
actggcgcttctatctgattactctgagcgccatcaccagcgactatgtcgtatggcgtaaagcggttacggacttcggtccgtaagacgcatcagag

SEQ ID NO: 5090 - DNA, 98 bp, synthetic construct
  misc_feature 1..98: note = engineered ribonucleic acid scaffold (ERS) sequence
  source 1..98: mol_type = other DNA
actggcgcttctatctgattactctgagcgccatcaccagcgactatgtcgtatggtgtaaagcggttacggacttcggtccgtaagacgcatcagag

SEQ ID NO: 5091 - DNA, 98 bp, synthetic construct
  misc_feature 1..98: note = engineered ribonucleic acid scaffold (ERS) sequence
  source 1..98: mol_type = other DNA
actggcgcttctatctgattactctgagcgccatcaccagcgactatgtcgtatgggctaaagcggttacggacttcggtccgtaagacgcatcagag

SEQ ID NO: 5092 - DNA, 95 bp, synthetic construct
  misc_feature 1..95: note = engineered ribonucleic acid scaffold (ERS) sequence
  source 1..95: mol_type = other DNA
actggcgcttctatctgattactctgagcgccatcaccagcgactatgtcgtatgggtagcggttacggacttcggtccgtaagacgcatcagag

SEQ ID NO: 5093 - DNA, 97 bp, synthetic construct
  misc_feature 1..97: note = engineered ribonucleic acid scaffold (ERS) sequence
  source 1..97: mol_type = other DNA
actggcgcttctatctgattactctgagcgccatcaccagcgactatgtcgtatgggtgaagcggttacggacttcggtccgtaagacgcatcagag

SEQ ID NO: 5094 - DNA, 97 bp, synthetic construct
  misc_feature 1..97: note = engineered ribonucleic acid scaffold (ERS) sequence
  source 1..97: mol_type = other DNA
actggcgcttctatctgattactctgagcgccatcaccagcgactatgtcgtatgggtagagcggttacggacttcggtccgtaagacgcatcagag

SEQ ID NO: 5095 - DNA, 74 bp, synthetic construct
  misc_feature 1..74: note = engineered ribonucleic acid scaffold (ERS) sequence
  source 1..74: mol_type = other DNA
actggcgcttctatctgattactctgagcgccaacaccagcgactatgtcgtatgggtaaagctagcatcagag

SEQ ID NO: 5096 - DNA, 74 bp, synthetic construct
  misc_feature 1..74: note = engineered ribonucleic acid scaffold (ERS) sequence
  source 1..74: mol_type = other DNA
actggcgcttctatctgattactctgagcgccagcaccagcgactatgtcgtatgggtaaagctagcatcagag

SEQ ID NO: 5097 - DNA, 74 bp, synthetic construct
  misc_feature 1..74: note = engineered ribonucleic acid scaffold (ERS) sequence
  source 1..74: mol_type = other DNA
actggcgcttctatctgattactctgagcgccatgaccagcgactatgtcgtatggctaaagctagcatcagag

SEQ ID NO: 5098 - DNA, 75 bp, synthetic construct
  misc_feature 1..75: note = engineered ribonucleic acid scaffold (ERS) sequence
  source 1..75: mol_type = other DNA
actggcgcttctatctgattactctgagcgccatgaccagcgactatgtcgtatgggctaaagctagcatcagag

SEQ ID NO: 5099 - DNA, 74 bp, synthetic construct
  misc_feature 1..74: note = engineered ribonucleic acid scaffold (ERS) sequence
  source 1..74: mol_type = other DNA
actggcgcttctatctgattactctgagcgccatgaccagcgactatgtcgtatgggtaaagctagcatcagag

SEQ ID NO: 5100 - DNA, 74 bp, synthetic construct
  misc_feature 1..74: note = engineered ribonucleic acid scaffold (ERS) sequence
  source 1..74: mol_type = other DNA
actggcgcttctatctgattactctgagcgccatccccagcgactatgtcgtatgggtaaagctagcatcagag

SEQ ID NO: 5101 - DNA, 75 bp, synthetic construct
  misc_feature 1..75: note = engineered ribonucleic acid scaffold (ERS) sequence
  source 1..75: mol_type = other DNA
actggcgcttctatctgattactctgagcgccatcgccagcgactatgtcgtatggcgtaaagctagcatcagag

SEQ ID NO: 5102 - DNA, 74 bp, synthetic construct
  misc_feature 1..74: note = engineered ribonucleic acid scaffold (ERS) sequence
  source 1..74: mol_type = other DNA
actggcgcttctatctgattactctgagcgccatcgccagcgactatgtcgtatgggtaaagctagcatcagag

SEQ ID NO: 5103 - DNA, 74 bp, synthetic construct
  misc_feature 1..74: note = engineered ribonucleic acid scaffold (ERS) sequence
  source 1..74: mol_type = other DNA
actggcgcttctatctgattactctgagcgccatctccagcgactatgtcgtatgggtaaagctagcatcagag

SEQ ID NO: 5104 - DNA, 74 bp, synthetic construct
  misc_feature 1..74: note = engineered ribonucleic acid scaffold (ERS) sequence
  source 1..74: mol_type = other DNA
actggcgcttctatctgattactctgagcgccatcacctgcgactatgtcgtaagggtaaagctagcatcagag

SEQ ID NO: 5105 - DNA, 74 bp, synthetic construct
  misc_feature 1..74: note = engineered ribonucleic acid scaffold (ERS) sequence
  source 1..74: mol_type = other DNA
actggcgcttctatctgattactctgagcgccatcaccagagactatgtcttatgggtaaagctagcatcagag

SEQ ID NO: 5106 - DNA, 74 bp, synthetic construct
  misc_feature 1..74: note = engineered ribonucleic acid scaffold (ERS) sequence
  source 1..74: mol_type = other DNA
actggcgcttctatctgattactctgagcgccatcaccagggactatgtcctatgggtaaagctagcatcagag

SEQ ID NO: 5107 - DNA, 75 bp, synthetic construct
  misc_feature 1..75: note = engineered ribonucleic acid scaffold (ERS) sequence
  source 1..75: mol_type = other DNA
actggcgcttctatctgattactctgagcgccatcaccaggcactatgtgctattgggtaaagctagcatcagag

SEQ ID NO: 5108 - DNA, 74 bp, synthetic construct
  misc_feature 1..74: note = engineered ribonucleic acid scaffold (ERS) sequence
  source 1..74: mol_type = other DNA
actggcgcttctatctgattactctgagcgccatcaccagccactatgtggtatgggtaaagctagcatcagag

SEQ ID NO: 5109 - DNA, 74 bp, synthetic construct
  misc_feature 1..74: note = engineered ribonucleic acid scaffold (ERS) sequence
  source 1..74: mol_type = other DNA
actggcgcttctatctgattactctgagcgccatcaccagctactatgtagtatgggtaaagctagcatcagag

SEQ ID NO: 5110 - DNA, 74 bp, synthetic construct
  misc_feature 1..74: note = engineered ribonucleic acid scaffold (ERS) sequence
  source 1..74: mol_type = other DNA
actggcgcttctatctgattactctgagcgccatcaccagcgattatgtcgtatgggtaaagctagcatcagag

SEQ ID NO: 5111 - DNA, 74 bp, synthetic construct
  misc_feature 1..74: note = engineered ribonucleic acid scaffold (ERS) sequence
  source 1..74: mol_type = other DNA
actggcgcttctatctgattactctgagcgccatcaccagcgacgatgtcgtatgggtaaagctagcatcagag

SEQ ID NO: 5112 - DNA, 74 bp, synthetic construct
  misc_feature 1..74: note = engineered ribonucleic acid scaffold (ERS) sequence
  source 1..74: mol_type = other DNA
actggcgcttctatctgattactctgagcgccatcaccagcgactctgtcgtatgggtaaagctagcatcagag

SEQ ID NO: 5113 - DNA, 74 bp, synthetic construct
  misc_feature 1..74: note = engineered ribonucleic acid scaffold (ERS) sequence
  source 1..74: mol_type = other DNA
actggcgcttctatctgattactctgagcgccatcaccagcgactatgtcgtgtgggtaaagctagcatcagag

SEQ ID NO: 5114 - DNA, 75 bp, synthetic construct
  misc_feature 1..75: note = engineered ribonucleic acid scaffold (ERS) sequence
  source 1..75: mol_type = other DNA
actggcgcttctatctgattactctgagcgccatcaccagcgactatgtcgtattgggtaaagctagcatcagag

SEQ ID NO: 5115 - DNA, 75 bp, synthetic construct
  misc_feature 1..75: note = engineered ribonucleic acid scaffold (ERS) sequence
  source 1..75: mol_type = other DNA
actggcgcttctatctgattactctgagcgccatcaccagcgactatgtcgtatggagtaaagctagcatcagag

SEQ ID NO: 5116 - DNA, 75 bp, synthetic construct
  misc_feature 1..75: note = engineered ribonucleic acid scaffold (ERS) sequence
  source 1..75: mol_type = other DNA
actggcgcttctatctgattactctgagcgccatcaccagcgactatgtcgtatggcgtaaagctagcatcagag

SEQ ID NO: 5117 - DNA, 75 bp, synthetic construct
  misc_feature 1..75: note = engineered ribonucleic acid scaffold (ERS) sequence
  source 1..75: mol_type = other DNA
actggcgcttctatctgattactctgagcgccatcaccagcgactatgtcgtatggtgtaaagctagcatcagag

SEQ ID NO: 5118 - DNA, 75 bp, synthetic construct
  misc_feature 1..75: note = engineered ribonucleic acid scaffold (ERS) sequence
  source 1..75: mol_type = other DNA
actggcgcttctatctgattactctgagcgccatcaccagcgactatgtcgtatgggctaaagctagcatcagag

SEQ ID NO: 5119 - DNA, 72 bp, synthetic construct
  misc_feature 1..72: note = engineered ribonucleic acid scaffold (ERS) sequence
  source 1..72: mol_type = other DNA
actggcgcttctatctgattactctgagcgccatcaccagcgactatgtcgtatgggtagctagcatcagag

SEQ ID NO: 5120 - DNA, 74 bp, synthetic construct
  misc_feature 1..74: note = engineered ribonucleic acid scaffold (ERS) sequence
  source 1..74: mol_type = other DNA
actggcgcttctatctgattactctgagcgccatcaccagcgactatgtcgtatgggtgaagctagcatcagag

SEQ ID NO: 5121 - DNA, 74 bp, synthetic construct
  misc_feature 1..74: note = engineered ribonucleic acid scaffold (ERS) sequence
  source 1..74: mol_type = other DNA
actggcgcttctatctgattactctgagcgccatcaccagcgactatgtcgtatgggtagagctagcatcagag

SEQ ID NO: 5122 - DNA, 88 bp, synthetic construct
  misc_feature 1..88: note = engineered ribonucleic acid scaffold (ERS) sequence
  source 1..88: mol_type = other DNA
actggcgcttctatctgattactctgagcgccaacaccagcgactatgtcgtatgggtaaagctccctattcggatggagcatcagag

SEQ ID NO: 5123 - DNA, 88 bp, synthetic construct
  misc_feature 1..88: note = engineered ribonucleic acid scaffold (ERS) sequence
  source 1..88: mol_type = other DNA
actggcgcttctatctgattactctgagcgccagcaccagcgactatgtcgtatgggtaaagctccctattcggatggagcatcagag

SEQ ID NO: 5124 - DNA, 88 bp, synthetic construct
  misc_feature 1..88: note = engineered ribonucleic acid scaffold (ERS) sequence
  source 1..88: mol_type = other DNA
actggcgcttctatctgattactctgagcgccatgaccagcgactatgtcgtatggctaaagctccctattcggatggagcatcagag

SEQ ID NO: 5125 - DNA, 89 bp, synthetic construct
  misc_feature 1..89: note = engineered ribonucleic acid scaffold (ERS) sequence
  source 1..89: mol_type = other DNA
actggcgcttctatctgattactctgagcgccatgaccagcgactatgtcgtatgggctaaagctccctattcggatggagcatcagag

SEQ ID NO: 5126 - DNA, 88 bp, synthetic construct
  misc_feature 1..88: note = engineered ribonucleic acid scaffold (ERS) sequence
  source 1..88: mol_type = other DNA
actggcgcttctatctgattactctgagcgccatgaccagcgactatgtcgtatgggtaaagctccctattcggatggagcatcagag

SEQ ID NO: 5127 - DNA, 88 bp, synthetic construct
  misc_feature 1..88: note = engineered ribonucleic acid scaffold (ERS) sequence
  source 1..88: mol_type = other DNA
actggcgcttctatctgattactctgagcgccatccccagcgactatgtcgtatgggtaaagctccctattcggatggagcatcagag

SEQ ID NO: 5128 - DNA, 89 bp, synthetic construct
  misc_feature 1..89: note = engineered ribonucleic acid scaffold (ERS) sequence
  source 1..89: mol_type = other DNA
actggcgcttctatctgattactctgagcgccatcgccagcgactatgtcgtatggcgtaaagctccctattcggatggagcatcagag

SEQ ID NO: 5129 - DNA, 88 bp, synthetic construct
  misc_feature 1..88: note = engineered ribonucleic acid scaffold (ERS) sequence
  source 1..88: mol_type = other DNA
actggcgcttctatctgattactctgagcgccatcgccagcgactatgtcgtatgggtaaagctccctattcggatggagcatcagag

SEQ ID NO: 5130 - DNA, 88 bp, synthetic construct
  misc_feature 1..88: note = engineered ribonucleic acid scaffold (ERS) sequence
  source 1..88: mol_type = other DNA
actggcgcttctatctgattactctgagcgccatctccagcgactatgtcgtatgggtaaagctccctattcggatggagcatcagag

SEQ ID NO: 5131 - DNA, 88 bp, synthetic construct
  misc_feature 1..88: note = engineered ribonucleic acid scaffold (ERS) sequence
  source 1..88: mol_type = other DNA
actggcgcttctatctgattactctgagcgccatcacctgcgactatgtcgtaagggtaaagctccctattcggatggagcatcagag

SEQ ID NO: 5132 - DNA, 88 bp, synthetic construct
  misc_feature 1..88: note = engineered ribonucleic acid scaffold (ERS) sequence
  source 1..88: mol_type = other DNA
actggcgcttctatctgattactctgagcgccatcaccagagactatgtcttatgggtaaagctccctattcggatggagcatcagag

SEQ ID NO: 5133 - DNA, 88 bp, synthetic construct
  misc_feature 1..88: note = engineered ribonucleic acid scaffold (ERS) sequence
  source 1..88: mol_type = other DNA
actggcgcttctatctgattactctgagcgccatcaccagggactatgtcctatgggtaaagctccctattcggatggagcatcagag

SEQ ID NO: 5134 - DNA, 89 bp, synthetic construct
  misc_feature 1..89: note = engineered ribonucleic acid scaffold (ERS) sequence
  source 1..89: mol_type = other DNA
actggcgcttctatctgattactctgagcgccatcaccaggcactatgtgctattgggtaaagctccctattcggatggagcatcagag

SEQ ID NO: 5135 - DNA, 88 bp, synthetic construct
  misc_feature 1..88: note = engineered ribonucleic acid scaffold (ERS) sequence
  source 1..88: mol_type = other DNA
actggcgcttctatctgattactctgagcgccatcaccagccactatgtggtatgggtaaagctccctattcggatggagcatcagag

SEQ ID NO: 5136 - DNA, 88 bp, synthetic construct
  misc_feature 1..88: note = engineered ribonucleic acid scaffold (ERS) sequence
  source 1..88: mol_type = other DNA
actggcgcttctatctgattactctgagcgccatcaccagctactatgtagtatgggtaaagctccctattcggatggagcatcagag

SEQ ID NO: 5137 - DNA, 88 bp, synthetic construct
  misc_feature 1..88: note = engineered ribonucleic acid scaffold (ERS) sequence
  source 1..88: mol_type = other DNA
actggcgcttctatctgattactctgagcgccatcaccagcgattatgtcgtatgggtaaagctccctattcggatggagcatcagag

SEQ ID NO: 5138 - DNA, 88 bp, synthetic construct
  misc_feature 1..88: note = engineered ribonucleic acid scaffold (ERS) sequence
  source 1..88: mol_type = other DNA
actggcgcttctatctgattactctgagcgccatcaccagcgacgatgtcgtatgggtaaagctccctattcggatggagcatcagag

SEQ ID NO: 5139 - DNA, 88 bp, synthetic construct
  misc_feature 1..88: note = engineered ribonucleic acid scaffold (ERS) sequence
  source 1..88: mol_type = other DNA
actggcgcttctatctgattactctgagcgccatcaccagcgactctgtcgtatgggtaaagctccctattcggatggagcatcagag

SEQ ID NO: 5140 - DNA, 88 bp, synthetic construct
  misc_feature 1..88: note = engineered ribonucleic acid scaffold (ERS) sequence
  source 1..88: mol_type = other DNA
actggcgcttctatctgattactctgagcgccatcaccagcgactatgtcgtgtgggtaaagctccctattcggatggagcatcagag

SEQ ID NO: 5141 - DNA, 89 bp, synthetic construct
  misc_feature 1..89: note = engineered ribonucleic acid scaffold (ERS) sequence
  source 1..89: mol_type = other DNA
actggcgcttctatctgattactctgagcgccatcaccagcgactatgtcgtattgggtaaagctccctattcggatggagcatcagag

SEQ ID NO: 5142 - DNA, 89 bp, synthetic construct
  misc_feature 1..89: note = engineered ribonucleic acid scaffold (ERS) sequence
  source 1..89: mol_type = other DNA
actggcgcttctatctgattactctgagcgccatcaccagcgactatgtcgtatggagtaaagctccctattcggatggagcatcagag

SEQ ID NO: 5143 - DNA, 89 bp, synthetic construct
  misc_feature 1..89: note = engineered ribonucleic acid scaffold (ERS) sequence
  source 1..89: mol_type = other DNA
actggcgcttctatctgattactctgagcgccatcaccagcgactatgtcgtatggcgtaaagctccctattcggatggagcatcagag

SEQ ID NO: 5144 - DNA, 89 bp, synthetic construct
  misc_feature 1..89: note = engineered ribonucleic acid scaffold (ERS) sequence
  source 1..89: mol_type = other DNA
actggcgcttctatctgattactctgagcgccatcaccagcgactatgtcgtatggtgtaaagctccctattcggatggagcatcagag

SEQ ID NO: 5145 - DNA, 89 bp, synthetic construct
  misc_feature 1..89: note = engineered ribonucleic acid scaffold (ERS) sequence
  source 1..89: mol_type = other DNA
actggcgcttctatctgattactctgagcgccatcaccagcgactatgtcgtatgggctaaagctccctattcggatggagcatcagag

SEQ ID NO: 5146 - DNA, 86 bp, synthetic construct
  misc_feature 1..86: note = engineered ribonucleic acid scaffold (ERS) sequence
  source 1..86: mol_type = other DNA
actggcgcttctatctgattactctgagcgccatcaccagcgactatgtcgtatgggtagctccctattcggatggagcatcagag

SEQ ID NO: 5147 - DNA, 88 bp, synthetic construct
  misc_feature 1..88: note = engineered ribonucleic acid scaffold (ERS) sequence
  source 1..88: mol_type = other DNA
actggcgcttctatctgattactctgagcgccatcaccagcgactatgtcgtatgggtgaagctccctattcggatggagcatcagag

SEQ ID NO: 5148 - DNA, 88 bp, synthetic construct
  misc_feature 1..88: note = engineered ribonucleic acid scaffold (ERS) sequence
  source 1..88: mol_type = other DNA
actggcgcttctatctgattactctgagcgccatcaccagcgactatgtcgtatgggtagagctccctattcggatggagcatcagag

SEQ ID NO: 5149 - DNA, 94 bp, synthetic construct
  misc_feature 1..94: note = engineered ribonucleic acid scaffold (ERS) sequence
  source 1..94: mol_type = other DNA
actggcgcttctatctgattactctgagcgccaacaccagcgactatgtcgtatgggtaaagctccctcacagggatgtgagggagcatcagag

SEQ ID NO: 5150 - DNA, 94 bp, synthetic construct
  misc_feature 1..94: note = engineered ribonucleic acid scaffold (ERS) sequence
  source 1..94: mol_type = other DNA
actggcgcttctatctgattactctgagcgccagcaccagcgactatgtcgtatgggtaaagctccctcacagggatgtgagggagcatcagag

SEQ ID NO: 5151 - DNA, 94 bp, synthetic construct
  misc_feature 1..94: note = engineered ribonucleic acid scaffold (ERS) sequence
  source 1..94: mol_type = other DNA
actggcgcttctatctgattactctgagcgccatgaccagcgactatgtcgtatggctaaagctccctcacagggatgtgagggagcatcagag

SEQ ID NO: 5152 - DNA, 95 bp, synthetic construct
  misc_feature 1..95: note = engineered ribonucleic acid scaffold (ERS) sequence
  source 1..95: mol_type = other DNA
actggcgcttctatctgattactctgagcgccatgaccagcgactatgtcgtatgggctaaagctccctcacagggatgtgagggagcatcagag

SEQ ID NO: 5153 - DNA, 94 bp, synthetic construct
  misc_feature 1..94: note = engineered ribonucleic acid scaffold (ERS) sequence
  source 1..94: mol_type = other DNA
actggcgcttctatctgattactctgagcgccatgaccagcgactatgtcgtatgggtaaagctccctcacagggatgtgagggagcatcagag

SEQ ID NO: 5154 - DNA, 94 bp, synthetic construct
  misc_feature 1..94: note = engineered ribonucleic acid scaffold (ERS) sequence
  source 1..94: mol_type = other DNA
actggcgcttctatctgattactctgagcgccatccccagcgactatgtcgtatgggtaaagctccctcacagggatgtgagggagcatcagag

SEQ ID NO: 5155 - DNA, 95 bp, synthetic construct
  misc_feature 1..95: note = engineered ribonucleic acid scaffold (ERS) sequence
  source 1..95: mol_type = other DNA
actggcgcttctatctgattactctgagcgccatcgccagcgactatgtcgtatggcgtaaagctccctcacagggatgtgagggagcatcagag

SEQ ID NO: 5156 - DNA, 94 bp, synthetic construct
  misc_feature 1..94: note = engineered ribonucleic acid scaffold (ERS) sequence
  source 1..94: mol_type = other DNA
actggcgcttctatctgattactctgagcgccatcgccagcgactatgtcgtatgggtaaagctccctcacagggatgtgagggagcatcagag

SEQ ID NO: 5157 - DNA, 94 bp, synthetic construct
  misc_feature 1..94: note = engineered ribonucleic acid scaffold (ERS) sequence
  source 1..94: mol_type = other DNA
actggcgcttctatctgattactctgagcgccatctccagcgactatgtcgtatgggtaaagctccctcacagggatgtgagggagcatcagag

SEQ ID NO: 5158 - DNA, 94 bp, synthetic construct
  misc_feature 1..94: note = engineered ribonucleic acid scaffold (ERS) sequence
  source 1..94: mol_type = other DNA
actggcgcttctatctgattactctgagcgccatcacctgcgactatgtcgtaagggtaaagctccctcacagggatgtgagggagcatcagag

SEQ ID NO: 5159 - DNA, 94 bp, synthetic construct
  misc_feature 1..94: note = engineered ribonucleic acid scaffold (ERS) sequence
  source 1..94: mol_type = other DNA
actggcgcttctatctgattactctgagcgccatcaccagagactatgtcttatgggtaaagctccctcacagggatgtgagggagcatcagag

SEQ ID NO: 5160 - DNA, 94 bp, synthetic construct
  misc_feature 1..94: note = engineered ribonucleic acid scaffold (ERS) sequence
  source 1..94: mol_type = other DNA
actggcgcttctatctgattactctgagcgccatcaccagggactatgtcctatgggtaaagctccctcacagggatgtgagggagcatcagag

SEQ ID NO: 5161 - DNA, 95 bp, synthetic construct
  misc_feature 1..95: note = engineered ribonucleic acid scaffold (ERS) sequence
  source 1..95: mol_type = other DNA
actggcgcttctatctgattactctgagcgccatcaccaggcactatgtgctattgggtaaagctccctcacagggatgtgagggagcatcagag

SEQ ID NO: 5162 - DNA, 94 bp, synthetic construct
  misc_feature 1..94: note = engineered ribonucleic acid scaffold (ERS) sequence
  source 1..94: mol_type = other DNA
actggcgcttctatctgattactctgagcgccatcaccagccactatgtggtatgggtaaagctccctcacagggatgtgagggagcatcagag

SEQ ID NO: 5163 - DNA, 94 bp, synthetic construct
  misc_feature 1..94: note = engineered ribonucleic acid scaffold (ERS) sequence
  source 1..94: mol_type = other DNA
actggcgcttctatctgattactctgagcgccatcaccagctactatgtagtatgggtaaagctccctcacagggatgtgagggagcatcagag

SEQ ID NO: 5164 - DNA, 94 bp, synthetic construct
  misc_feature 1..94: note = engineered ribonucleic acid scaffold (ERS) sequence
  source 1..94: mol_type = other DNA
actggcgcttctatctgattactctgagcgccatcaccagcgattatgtcgtatgggtaaagctccctcacagggatgtgagggagcatcagag

SEQ ID NO: 5165 - DNA, 94 bp, synthetic construct
  misc_feature 1..94: note = engineered ribonucleic acid scaffold (ERS) sequence
  source 1..94: mol_type = other DNA
actggcgcttctatctgattactctgagcgccatcaccagcgacgatgtcgtatgggtaaagctccctcacagggatgtgagggagcatcagag

SEQ ID NO: 5166 - DNA, 94 bp, synthetic construct
  misc_feature 1..94: note = engineered ribonucleic acid scaffold (ERS) sequence
  source 1..94: mol_type = other DNA
actggcgcttctatctgattactctgagcgccatcaccagcgactctgtcgtatgggtaaagctccctcacagggatgtgagggagcatcagag

SEQ ID NO: 5167 - DNA, 94 bp, synthetic construct
  misc_feature 1..94: note = engineered ribonucleic acid scaffold (ERS) sequence
  source 1..94: mol_type = other DNA
actggcgcttctatctgattactctgagcgccatcaccagcgactatgtcgtgtgggtaaagctccctcacagggatgtgagggagcatcagag

SEQ ID NO: 5168 - DNA, 95 bp, synthetic construct
  misc_feature 1..95: note = engineered ribonucleic acid scaffold (ERS) sequence
  source 1..95: mol_type = other DNA
actggcgcttctatctgattactctgagcgccatcaccagcgactatgtcgtattgggtaaagctccctcacagggatgtgagggagcatcagag

SEQ ID NO: 5169 - DNA, 95 bp, synthetic construct
  misc_feature 1..95: note = engineered ribonucleic acid scaffold (ERS) sequence
  source 1..95: mol_type = other DNA
actggcgcttctatctgattactctgagcgccatcaccagcgactatgtcgtatggagtaaagctccctcacagggatgtgagggagcatcagag

SEQ ID NO: 5170 - DNA, 95 bp, synthetic construct
  misc_feature 1..95: note = engineered ribonucleic acid scaffold (ERS) sequence
  source 1..95: mol_type = other DNA
actggcgcttctatctgattactctgagcgccatcaccagcgactatgtcgtatggcgtaaagctccctcacagggatgtgagggagcatcagag

SEQ ID NO: 5171 - DNA, 95 bp, synthetic construct
  misc_feature 1..95: note = engineered ribonucleic acid scaffold (ERS) sequence
  source 1..95: mol_type = other DNA
actggcgcttctatctgattactctgagcgccatcaccagcgactatgtcgtatggtgtaaagctccctcacagggatgtgagggagcatcagag

SEQ ID NO: 5172 - DNA, 95 bp, synthetic construct
  misc_feature 1..95: note = engineered ribonucleic acid scaffold (ERS) sequence
  source 1..95: mol_type = other DNA
actggcgcttctatctgattactctgagcgccatcaccagcgactatgtcgtatgggctaaagctccctcacagggatgtgagggagcatcagag

SEQ ID NO: 5173 - DNA, 92 bp, synthetic construct
  misc_feature 1..92: note = engineered ribonucleic acid scaffold (ERS) sequence
  source 1..92: mol_type = other DNA
actggcgcttctatctgattactctgagcgccatcaccagcgactatgtcgtatgggtagctccctcacagggatgtgagggagcatcagag

SEQ ID NO: 5174 - DNA, 94 bp, synthetic construct
  misc_feature 1..94: note = engineered ribonucleic acid scaffold (ERS) sequence
  source 1..94: mol_type = other DNA
actggcgcttctatctgattactctgagcgccatcaccagcgactatgtcgtatgggtgaagctccctcacagggatgtgagggagcatcagag

SEQ ID NO: 5175 - DNA, 94 bp, synthetic construct
  misc_feature 1..94: note = engineered ribonucleic acid scaffold (ERS) sequence
  source 1..94: mol_type = other DNA
actggcgcttctatctgattactctgagcgccatcaccagcgactatgtcgtatgggtagagctccctcacagggatgtgagggagcatcagag

SEQ ID NO: 5176 - DNA, 93 bp, synthetic construct
  misc_feature 1..93: note = engineered ribonucleic acid scaffold (ERS) sequence
  source 1..93: mol_type = other DNA
actggcgcttctatctgattactctgagcgccaacaccagcgactatgtcgtatgggtaaagctccctcagctgcagtgagggagcatcagag

SEQ ID NO: 5177 - DNA, 93 bp, synthetic construct
  misc_feature 1..93: note = engineered ribonucleic acid scaffold (ERS) sequence
  source 1..93: mol_type = other DNA
actggcgcttctatctgattactctgagcgccagcaccagcgactatgtcgtatgggtaaagctccctcagctgcagtgagggagcatcagag

SEQ ID NO: 5178 - DNA, 93 bp, synthetic construct
  misc_feature 1..93: note = engineered ribonucleic acid scaffold (ERS) sequence
  source 1..93: mol_type = other DNA
actggcgcttctatctgattactctgagcgccatgaccagcgactatgtcgtatggctaaagctccctcagctgcagtgagggagcatcagag

SEQ ID NO: 5179 - DNA, 94 bp, synthetic construct
  misc_feature 1..94: note = engineered ribonucleic acid scaffold (ERS) sequence
  source 1..94: mol_type = other DNA
actggcgcttctatctgattactctgagcgccatgaccagcgactatgtcgtatgggctaaagctccctcagctgcagtgagggagcatcagag

SEQ ID NO: 5180 - DNA, 93 bp, synthetic construct
  misc_feature 1..93: note = engineered ribonucleic acid scaffold (ERS) sequence
  source 1..93: mol_type = other DNA
actggcgcttctatctgattactctgagcgccatgaccagcgactatgtcgtatgggtaaagctccctcagctgcagtgagggagcatcagag

SEQ ID NO: 5181 - DNA, 93 bp, synthetic construct
  misc_feature 1..93: note = engineered ribonucleic acid scaffold (ERS) sequence
  source 1..93: mol_type = other DNA
actggcgcttctatctgattactctgagcgccatccccagcgactatgtcgtatgggtaaagctccctcagctgcagtgagggagcatcagag

SEQ ID NO: 5182 - DNA, 94 bp, synthetic construct
  misc_feature 1..94: note = engineered ribonucleic acid scaffold (ERS) sequence
  source 1..94: mol_type = other DNA
actggcgcttctatctgattactctgagcgccatcgccagcgactatgtcgtatggcgtaaagctccctcagctgcagtgagggagcatcagag

SEQ ID NO: 5183 - DNA, 93 bp, synthetic construct
  misc_feature 1..93: note = engineered ribonucleic acid scaffold (ERS) sequence
  source 1..93: mol_type = other DNA
actggcgcttctatctgattactctgagcgccatcgccagcgactatgtcgtatgggtaaagctccctcagctgcagtgagggagcatcagag

SEQ ID NO: 5184 - DNA, 93 bp, synthetic construct
  misc_feature 1..93: note = engineered ribonucleic acid scaffold (ERS) sequence
  source 1..93: mol_type = other DNA
actggcgcttctatctgattactctgagcgccatctccagcgactatgtcgtatgggtaaagctccctcagctgcagtgagggagcatcagag

SEQ ID NO: 5185 - DNA, 93 bp, synthetic construct
  misc_feature 1..93: note = engineered ribonucleic acid scaffold (ERS) sequence
  source 1..93: mol_type = other DNA
actggcgcttctatctgattactctgagcgccatcacctgcgactatgtcgtaagggtaaagctccctcagctgcagtgagggagcatcagag

SEQ ID NO: 5186 - DNA, 93 bp, synthetic construct
  misc_feature 1..93: note = engineered ribonucleic acid scaffold (ERS) sequence
  source 1..93: mol_type = other DNA
actggcgcttctatctgattactctgagcgccatcaccagagactatgtcttatgggtaaagctccctcagctgcagtgagggagcatcagag

SEQ ID NO: 5187 - DNA, 93 bp, synthetic construct
  misc_feature 1..93: note = engineered ribonucleic acid scaffold (ERS) sequence
  source 1..93: mol_type = other DNA
actggcgcttctatctgattactctgagcgccatcaccagggactatgtcctatgggtaaagctccctcagctgcagtgagggagcatcagag

SEQ ID NO: 5188 - DNA, 94 bp, synthetic construct
  misc_feature 1..94: note = engineered ribonucleic acid scaffold (ERS) sequence
  source 1..94: mol_type = other DNA
actggcgcttctatctgattactctgagcgccatcaccaggcactatgtgctattgggtaaagctccctcagctgcagtgagggagcatcagag

SEQ ID NO: 5189 - DNA, 93 bp, synthetic construct
  misc_feature 1..93: note = engineered ribonucleic acid scaffold (ERS) sequence
  source 1..93: mol_type = other DNA
actggcgcttctatctgattactctgagcgccatcaccagccactatgtggtatgggtaaagctccctcagctgcagtgagggagcatcagag

SEQ ID NO: 5190 - DNA, 93 bp, synthetic construct
  misc_feature 1..93: note = engineered ribonucleic acid scaffold (ERS) sequence
  source 1..93: mol_type = other DNA
actggcgcttctatctgattactctgagcgccatcaccagctactatgtagtatgggtaaagctccctcagctgcagtgagggagcatcagag

SEQ ID NO: 5191 - DNA, 93 bp, synthetic construct
  misc_feature 1..93: note = engineered ribonucleic acid scaffold (ERS) sequence
  source 1..93: mol_type = other DNA
actggcgcttctatctgattactctgagcgccatcaccagcgattatgtcgtatgggtaaagctccctcagctgcagtgagggagcatcagag

SEQ ID NO: 5192 - DNA, 93 bp, synthetic construct
  misc_feature 1..93: note = engineered ribonucleic acid scaffold (ERS) sequence
  source 1..93: mol_type = other DNA
actggcgcttctatctgattactctgagcgccatcaccagcgacgatgtcgtatgggtaaagctccctcagctgcagtgagggagcatcagag

SEQ ID NO: 5193 - DNA, 93 bp, synthetic construct
  misc_feature 1..93: note = engineered ribonucleic acid scaffold (ERS) sequence
  source 1..93: mol_type = other DNA
actggcgcttctatctgattactctgagcgccatcaccagcgactctgtcgtatgggtaaagctccctcagctgcagtgagggagcatcagag

SEQ ID NO: 5194 - DNA, 93 bp, synthetic construct
  misc_feature 1..93: note = engineered ribonucleic acid scaffold (ERS) sequence
  source 1..93: mol_type = other DNA
actggcgcttctatctgattactctgagcgccatcaccagcgactatgtcgtgtgggtaaagctccctcagctgcagtgagggagcatcagag

SEQ ID NO: 5195 - DNA, 94 bp, synthetic construct
  misc_feature 1..94: note = engineered ribonucleic acid scaffold (ERS) sequence
  source 1..94: mol_type = other DNA
actggcgcttctatctgattactctgagcgccatcaccagcgactatgtcgtattgggtaaagctccctcagctgcagtgagggagcatcagag

SEQ ID NO: 5196 - DNA, 94 bp, synthetic construct
  misc_feature 1..94: note = engineered ribonucleic acid scaffold (ERS) sequence
  source 1..94: mol_type = other DNA
actggcgcttctatctgattactctgagcgccatcaccagcgactatgtcgtatggagtaaagctccctcagctgcagtgagggagcatcagag

SEQ ID NO: 5197 - DNA, 94 bp, synthetic construct
  misc_feature 1..94: note = engineered ribonucleic acid scaffold (ERS) sequence
  source 1..94: mol_type = other DNA
actggcgcttctatctgattactctgagcgccatcaccagcgactatgtcgtatggcgtaaagctccctcagctgcagtgagggagcatcagag

SEQ ID NO: 5198 - DNA, 94 bp, synthetic construct
  misc_feature 1..94: note = engineered ribonucleic acid scaffold (ERS) sequence
  source 1..94: mol_type = other DNA
actggcgcttctatctgattactctgagcgccatcaccagcgactatgtcgtatggtgtaaagctccctcagctgcagtgagggagcatcagag

SEQ ID NO: 5199 - DNA, 94 bp, synthetic construct
  misc_feature 1..94: note = engineered ribonucleic acid scaffold (ERS) sequence
  source 1..94: mol_type = other DNA
actggcgcttctatctgattactctgagcgccatcaccagcgactatgtcgtatgggctaaagctccctcagctgcagtgagggagcatcagag

SEQ ID NO: 5200 - DNA, 91 bp, synthetic construct
  misc_feature 1..91: note = engineered ribonucleic acid scaffold (ERS) sequence
  source 1..91: mol_type = other DNA
actggcgcttctatctgattactctgagcgccatcaccagcgactatgtcgtatgggtagctccctcagctgcagtgagggagcatcagag

SEQ ID NO: 5201 - DNA, 93 bp, synthetic construct
  misc_feature 1..93: note = engineered ribonucleic acid scaffold (ERS) sequence
  source 1..93: mol_type = other DNA
actggcgcttctatctgattactctgagcgccatcaccagcgactatgtcgtatgggtgaagctccctcagctgcagtgagggagcatcagag

SEQ ID NO: 5202 - DNA, 93 bp, synthetic construct
  misc_feature 1..93: note = engineered ribonucleic acid scaffold (ERS) sequence
  source 1..93: mol_type = other DNA
actggcgcttctatctgattactctgagcgccatcaccagcgactatgtcgtatgggtagagctccctcagctgcagtgagggagcatcagag

SEQ ID NO: 5203 - DNA, 88 bp, synthetic construct
  misc_feature 1..88: note = engineered ribonucleic acid scaffold (ERS) sequence
  source 1..88: mol_type = other DNA
actggcgcttctatctgattactctgagcgccaacaccagcgactatgtcgtatgggtaaagctccctcataggagggagcatcagag

SEQ ID NO: 5204 - DNA, 88 bp, synthetic construct
  misc_feature 1..88: note = engineered ribonucleic acid scaffold (ERS) sequence
  source 1..88: mol_type = other DNA
actggcgcttctatctgattactctgagcgccagcaccagcgactatgtcgtatgggtaaagctccctcataggagggagcatcagag

SEQ ID NO: 5205 - DNA, 88 bp, synthetic construct
  misc_feature 1..88: note = engineered ribonucleic acid scaffold (ERS) sequence
  source 1..88: mol_type = other DNA
actggcgcttctatctgattactctgagcgccatgaccagcgactatgtcgtatggctaaagctccctcataggagggagcatcagag

SEQ ID NO: 5206 - DNA, 89 bp, synthetic construct
  misc_feature 1..89: note = engineered ribonucleic acid scaffold (ERS) sequence
  source 1..89: mol_type = other DNA
actggcgcttctatctgattactctgagcgccatgaccagcgactatgtcgtatgggctaaagctccctcataggagggagcatcagag

SEQ ID NO: 5207 - DNA, 88 bp, synthetic construct
  misc_feature 1..88: note = engineered ribonucleic acid scaffold (ERS) sequence
  source 1..88: mol_type = other DNA
actggcgcttctatctgattactctgagcgccatgaccagcgactatgtcgtatgggtaaagctccctcataggagggagcatcagag

SEQ ID NO: 5208 - DNA, 88 bp, synthetic construct
  misc_feature 1..88: note = engineered ribonucleic acid scaffold (ERS) sequence
  source 1..88: mol_type = other DNA
actggcgcttctatctgattactctgagcgccatccccagcgactatgtcgtatgggtaaagctccctcataggagggagcatcagag

SEQ ID NO: 5209 - DNA, 89 bp, synthetic construct
  misc_feature 1..89: note = engineered ribonucleic acid scaffold (ERS) sequence
  source 1..89: mol_type = other DNA
actggcgcttctatctgattactctgagcgccatcgccagcgactatgtcgtatggcgtaaagctccctcataggagggagcatcagag

SEQ ID NO: 5210 - DNA, 88 bp, synthetic construct
  misc_feature 1..88: note = engineered ribonucleic acid scaffold (ERS) sequence
  source 1..88: mol_type = other DNA
actggcgcttctatctgattactctgagcgccatcgccagcgactatgtcgtatgggtaaagctccctcataggagggagcatcagag

SEQ ID NO: 5211 - DNA, 88 bp, synthetic construct
  misc_feature 1..88: note = engineered ribonucleic acid scaffold (ERS) sequence
  source 1..88: mol_type = other DNA
actggcgcttctatctgattactctgagcgccatctccagcgactatgtcgtatgggtaaagctccctcataggagggagcatcagag

SEQ ID NO: 5212 - DNA, 88 bp, synthetic construct
  misc_feature 1..88: note = engineered ribonucleic acid scaffold (ERS) sequence
  source 1..88: mol_type = other DNA
actggcgcttctatctgattactctgagcgccatcacctgcgactatgtcgtaagggtaaagctccctcataggagggagcatcagag

SEQ ID NO: 5213 - DNA, 88 bp, synthetic construct
  misc_feature 1..88: note = engineered ribonucleic acid scaffold (ERS) sequence
  source 1..88: mol_type = other DNA
actggcgcttctatctgattactctgagcgccatcaccagagactatgtcttatgggtaaagctccctcataggagggagcatcagag

SEQ ID NO: 5214 - DNA, 88 bp, synthetic construct
  misc_feature 1..88: note = engineered ribonucleic acid scaffold (ERS) sequence
  source 1..88: mol_type = other DNA
actggcgcttctatctgattactctgagcgccatcaccagggactatgtcctatgggtaaagctccctcataggagggagcatcagag

SEQ ID NO: 5215 - DNA, 89 bp, synthetic construct
  misc_feature 1..89: note = engineered ribonucleic acid scaffold (ERS) sequence
  source 1..89: mol_type = other DNA
actggcgcttctatctgattactctgagcgccatcaccaggcactatgtgctattgggtaaagctccctcataggagggagcatcagag

SEQ ID NO: 5216 - DNA, 88 bp, synthetic construct
  misc_feature 1..88: note = engineered ribonucleic acid scaffold (ERS) sequence
  source 1..88: mol_type = other DNA
actggcgcttctatctgattactctgagcgccatcaccagccactatgtggtatgggtaaagctccctcataggagggagcatcagag

SEQ ID NO: 5217 - DNA, 88 bp, synthetic construct
  misc_feature 1..88: note = engineered ribonucleic acid scaffold (ERS) sequence
  source 1..88: mol_type = other DNA
actggcgcttctatctgattactctgagcgccatcaccagctactatgtagtatgggtaaagctccctcataggagggagcatcagag

SEQ ID NO: 5218 - DNA, 88 bp, synthetic construct
  misc_feature 1..88: note = engineered ribonucleic acid scaffold (ERS) sequence
  source 1..88: mol_type = other DNA
actggcgcttctatctgattactctgagcgccatcaccagcgattatgtcgtatgggtaaagctccctcataggagggagcatcagag

SEQ ID NO: 5219 - DNA, 88 bp, synthetic construct
  misc_feature 1..88: note = engineered ribonucleic acid scaffold (ERS) sequence
  source 1..88: mol_type = other DNA
actggcgcttctatctgattactctgagcgccatcaccagcgacgatgtcgtatgggtaaagctccctcataggagggagcatcagag

SEQ ID NO: 5220 - DNA, 88 bp, synthetic construct
  misc_feature 1..88: note = engineered ribonucleic acid scaffold (ERS) sequence
  source 1..88: mol_type = other DNA
actggcgcttctatctgattactctgagcgccatcaccagcgactctgtcgtatgggtaaagctccctcataggagggagcatcagag

SEQ ID NO: 5221 - DNA, 88 bp, synthetic construct
  misc_feature 1..88: note = engineered ribonucleic acid scaffold (ERS) sequence
  source 1..88: mol_type = other DNA
actggcgcttctatctgattactctgagcgccatcaccagcgactatgtcgtgtgggtaaagctccctcataggagggagcatcagag

SEQ ID NO: 5222 - DNA, 89 bp, synthetic construct
  misc_feature 1..89: note = engineered ribonucleic acid scaffold (ERS) sequence
  source 1..89: mol_type = other DNA
actggcgcttctatctgattactctgagcgccatcaccagcgactatgtcgtattgggtaaagctccctcataggagggagcatcagag

SEQ ID NO: 5223 - DNA, 89 bp, synthetic construct
  misc_feature 1..89: note = engineered ribonucleic acid scaffold (ERS) sequence
  source 1..89: mol_type = other DNA
actggcgcttctatctgattactctgagcgccatcaccagcgactatgtcgtatggagtaaagctccctcataggagggagcatcagag

SEQ ID NO: 5224 - DNA, 89 bp, synthetic construct
  misc_feature 1..89: note = engineered ribonucleic acid scaffold (ERS) sequence
  source 1..89: mol_type = other DNA
actggcgcttctatctgattactctgagcgccatcaccagcgactatgtcgtatggcgtaaagctccctcataggagggagcatcagag

SEQ ID NO: 5225 - DNA, 89 bp, synthetic construct
  misc_feature 1..89: note = engineered ribonucleic acid scaffold (ERS) sequence
  source 1..89: mol_type = other DNA
actggcgcttctatctgattactctgagcgccatcaccagcgactatgtcgtatggtgtaaagctccctcataggagggagcatcagag

SEQ ID NO: 5226 - DNA, 89 bp, synthetic construct
  misc_feature 1..89: note = engineered ribonucleic acid scaffold (ERS) sequence
  source 1..89: mol_type = other DNA
actggcgcttctatctgattactctgagcgccatcaccagcgactatgtcgtatgggctaaagctccctcataggagggagcatcagag

SEQ ID NO: 5227 - DNA, 86 bp, synthetic construct
  misc_feature 1..86: note = engineered ribonucleic acid scaffold (ERS) sequence
  source 1..86: mol_type = other DNA
actggcgcttctatctgattactctgagcgccatcaccagcgactatgtcgtatgggtagctccctcataggagggagcatcagag

SEQ ID NO: 5228 - DNA, 88 bp, synthetic construct
  misc_feature 1..88: note = engineered ribonucleic acid scaffold (ERS) sequence
  source 1..88: mol_type = other DNA
actggcgcttctatctgattactctgagcgccatcaccagcgactatgtcgtatgggtgaagctccctcataggagggagcatcagag

SEQ ID NO: 5229 - DNA, 88 bp, synthetic construct
  misc_feature 1..88: note = engineered ribonucleic acid scaffold (ERS) sequence
  source 1..88: mol_type = other DNA
actggcgcttctatctgattactctgagcgccatcaccagcgactatgtcgtatgggtagagctccctcataggagggagcatcagag

SEQ ID NO: 5230 - DNA, 89 bp, synthetic construct
  misc_feature 1..89: note = engineered ribonucleic acid scaffold (ERS) sequence
  source 1..89: mol_type = other DNA
actggcgcttctatctgattactctgagcgccaacaccagcgactatgtcgtatgggtaaagctccctcttcaggagggagcatcagag

SEQ ID NO: 5231 - DNA, 89 bp, synthetic construct
  misc_feature 1..89: note = engineered ribonucleic acid scaffold (ERS) sequence
  source 1..89: mol_type = other DNA
actggcgcttctatctgattactctgagcgccagcaccagcgactatgtcgtatgggtaaagctccctcttcaggagggagcatcagag

SEQ ID NO: 5232 - DNA, 89 bp, synthetic construct
  misc_feature 1..89: note = engineered ribonucleic acid scaffold (ERS) sequence
  source 1..89: mol_type = other DNA
actggcgcttctatctgattactctgagcgccatgaccagcgactatgtcgtatggctaaagctccctcttcaggagggagcatcagag

SEQ ID NO: 5233 - DNA, 90 bp, synthetic construct
  misc_feature 1..90: note = engineered ribonucleic acid scaffold (ERS) sequence
  source 1..90: mol_type = other DNA
actggcgcttctatctgattactctgagcgccatgaccagcgactatgtcgtatgggctaaagctccctcttcaggagggagcatcagag

SEQ ID NO: 5234 - DNA, 89 bp, synthetic construct
  misc_feature 1..89: note = engineered ribonucleic acid scaffold (ERS) sequence
  source 1..89: mol_type = other DNA
actggcgcttctatctgattactctgagcgccatgaccagcgactatgtcgtatgggtaaagctccctcttcaggagggagcatcagag

SEQ ID NO: 5235 - DNA, 89 bp, synthetic construct
  misc_feature 1..89: note = engineered ribonucleic acid scaffold (ERS) sequence
  source 1..89: mol_type = other DNA
actggcgcttctatctgattactctgagcgccatccccagcgactatgtcgtatgggtaaagctccctcttcaggagggagcatcagag

SEQ ID NO: 5236 - DNA, 90 bp, synthetic construct
  misc_feature 1..90: note = engineered ribonucleic acid scaffold (ERS) sequence
  source 1..90: mol_type = other DNA
actggcgcttctatctgattactctgagcgccatcgccagcgactatgtcgtatggcgtaaagctccctcttcaggagggagcatcagag

SEQ ID NO: 5237 - DNA, 89 bp, synthetic construct
  misc_feature 1..89: note = engineered ribonucleic acid scaffold (ERS) sequence
  source 1..89: mol_type = other DNA
actggcgcttctatctgattactctgagcgccatcgccagcgactatgtcgtatgggtaaagctccctcttcaggagggagcatcagag

SEQ ID NO: 5238 - DNA, 89 bp, synthetic construct
  misc_feature 1..89: note = engineered ribonucleic acid scaffold (ERS) sequence
  source 1..89: mol_type = other DNA
actggcgcttctatctgattactctgagcgccatctccagcgactatgtcgtatgggtaaagctccctcttcaggagggagcatcagag

SEQ ID NO: 5239 - DNA, 89 bp, synthetic construct
  misc_feature 1..89: note = engineered ribonucleic acid scaffold (ERS) sequence
  source 1..89: mol_type = other DNA
actggcgcttctatctgattactctgagcgccatcacctgcgactatgtcgtaagggtaaagctccctcttcaggagggagcatcagag

SEQ ID NO: 5240 - DNA, 89 bp, synthetic construct
  misc_feature 1..89: note = engineered ribonucleic acid scaffold (ERS) sequence
  source 1..89: mol_type = other DNA
actggcgcttctatctgattactctgagcgccatcaccagagactatgtcttatgggtaaagctccctcttcaggagggagcatcagag

SEQ ID NO: 5241 - DNA, 89 bp, synthetic construct
  misc_feature 1..89: note = engineered ribonucleic acid scaffold (ERS) sequence
  source 1..89: mol_type = other DNA
actggcgcttctatctgattactctgagcgccatcaccagggactatgtcctatgggtaaagctccctcttcaggagggagcatcagag

SEQ ID NO: 5242 - DNA, 90 bp, synthetic construct
  misc_feature 1..90: note = engineered ribonucleic acid scaffold (ERS) sequence
  source 1..90: mol_type = other DNA
actggcgcttctatctgattactctgagcgccatcaccaggcactatgtgctattgggtaaagctccctcttcaggagggagcatcagag

SEQ ID NO: 5243 - DNA, 89 bp, synthetic construct
  misc_feature 1..89: note = engineered ribonucleic acid scaffold (ERS) sequence
  source 1..89: mol_type = other DNA
actggcgcttctatctgattactctgagcgccatcaccagccactatgtggtatgggtaaagctccctcttcaggagggagcatcagag

SEQ ID NO: 5244 - DNA, 89 bp, synthetic construct
  misc_feature 1..89: note = engineered ribonucleic acid scaffold (ERS) sequence
  source 1..89: mol_type = other DNA
actggcgcttctatctgattactctgagcgccatcaccagctactatgtagtatgggtaaagctccctcttcaggagggagcatcagag

SEQ ID NO: 5245 - DNA, 89 bp, synthetic construct
  misc_feature 1..89: note = engineered ribonucleic acid scaffold (ERS) sequence
  source 1..89: mol_type = other DNA
actggcgcttctatctgattactctgagcgccatcaccagcgattatgtcgtatgggtaaagctccctcttcaggagggagcatcagag

SEQ ID NO: 5246 - DNA, 89 bp, synthetic construct
  misc_feature 1..89: note = engineered ribonucleic acid scaffold (ERS) sequence
  source 1..89: mol_type = other DNA
actggcgcttctatctgattactctgagcgccatcaccagcgacgatgtcgtatgggtaaagctccctcttcaggagggagcatcagag

SEQ ID NO: 5247 - DNA, 89 bp, synthetic construct
  misc_feature 1..89: note = engineered ribonucleic acid scaffold (ERS) sequence
  source 1..89: mol_type = other DNA
actggcgcttctatctgattactctgagcgccatcaccagcgactctgtcgtatgggtaaagctccctcttcaggagggagcatcagag

SEQ ID NO: 5248 - DNA, 89 bp, synthetic construct
  misc_feature 1..89: note = engineered ribonucleic acid scaffold (ERS) sequence
  source 1..89: mol_type = other DNA
actggcgcttctatctgattactctgagcgccatcaccagcgactatgtcgtgtgggtaaagctccctcttcaggagggagcatcagag

SEQ ID NO: 5249 - DNA, 90 bp, synthetic construct
  misc_feature 1..90: note = engineered ribonucleic acid scaffold (ERS) sequence
  source 1..90: mol_type = other DNA
actggcgcttctatctgattactctgagcgccatcaccagcgactatgtcgtattgggtaaagctccctcttcaggagggagcatcagag

SEQ ID NO: 5250 - DNA, 90 bp, synthetic construct
  misc_feature 1..90: note = engineered ribonucleic acid scaffold (ERS) sequence
  source 1..90: mol_type = other DNA
actggcgcttctatctgattactctgagcgccatcaccagcgactatgtcgtatggagtaaagctccctcttcaggagggagcatcagag

SEQ ID NO: 5251 - DNA, 90 bp, synthetic construct
  misc_feature 1..90: note = engineered ribonucleic acid scaffold (ERS) sequence
  source 1..90: mol_type = other DNA
actggcgcttctatctgattactctgagcgccatcaccagcgactatgtcgtatggcgtaaagctccctcttcaggagggagcatcagag

SEQ ID NO: 5252 - DNA, 90 bp, synthetic construct
  misc_feature 1..90: note = engineered ribonucleic acid scaffold (ERS) sequence
  source 1..90: mol_type = other DNA
actggcgcttctatctgattactctgagcgccatcaccagcgactatgtcgtatggtgtaaagctccctcttcaggagggagcatcagag

SEQ ID NO: 5253 - DNA, 90 bp, synthetic construct
  misc_feature 1..90: note = engineered ribonucleic acid scaffold (ERS) sequence
  source 1..90: mol_type = other DNA
actggcgcttctatctgattactctgagcgccatcaccagcgactatgtcgtatgggctaaagctccctcttcaggagggagcatcagag

SEQ ID NO: 5254 - DNA, 87 bp, synthetic construct
  misc_feature 1..87: note = engineered ribonucleic acid scaffold (ERS) sequence
  source 1..87: mol_type = other DNA
actggcgcttctatctgattactctgagcgccatcaccagcgactatgtcgtatgggtagctccctcttcaggagggagcatcagag

SEQ ID NO: 5255 - DNA, 89 bp, synthetic construct
  misc_feature 1..89: note = engineered ribonucleic acid scaffold (ERS) sequence
  source 1..89: mol_type = other DNA
actggcgcttctatctgattactctgagcgccatcaccagcgactatgtcgtatgggtgaagctccctcttcaggagggagcatcagag

SEQ ID NO: 5256 - DNA, 89 bp, synthetic construct
  misc_feature 1..89: note = engineered ribonucleic acid scaffold (ERS) sequence
  source 1..89: mol_type = other DNA
actggcgcttctatctgattactctgagcgccatcaccagcgactatgtcgtatgggtagagctccctcttcaggagggagcatcagag

SEQ ID NO: 5257 - DNA, 88 bp, synthetic construct
  misc_feature 1..88: note = engineered ribonucleic acid scaffold (ERS) sequence
  source 1..88: mol_type = other DNA
actggcgcttctatctgattactctgagcgccaacaccagcgactatgtcgtatgggtaaagctccctcttcggagagtgcatcagag

SEQ ID NO: 5258 - DNA, 88 bp, synthetic construct
  misc_feature 1..88: note = engineered ribonucleic acid scaffold (ERS) sequence
  source 1..88: mol_type = other DNA
actggcgcttctatctgattactctgagcgccagcaccagcgactatgtcgtatgggtaaagctccctcttcggagagtgcatcagag

SEQ ID NO: 5259 - DNA, 88 bp, synthetic construct
  misc_feature 1..88: note = engineered ribonucleic acid scaffold (ERS) sequence
  source 1..88: mol_type = other DNA
actggcgcttctatctgattactctgagcgccatgaccagcgactatgtcgtatggctaaagctccctcttcggagagtgcatcagag

SEQ ID NO: 5260 - DNA, 89 bp, synthetic construct
  misc_feature 1..89: note = engineered ribonucleic acid scaffold (ERS) sequence
  source 1..89: mol_type = other DNA
actggcgcttctatctgattactctgagcgccatgaccagcgactatgtcgtatgggctaaagctccctcttcggagagtgcatcagag

SEQ ID NO: 5261 - DNA, 88 bp, synthetic construct
  misc_feature 1..88: note = engineered ribonucleic acid scaffold (ERS) sequence
  source 1..88: mol_type = other DNA
actggcgcttctatctgattactctgagcgccatgaccagcgactatgtcgtatgggtaaagctccctcttcggagagtgcatcagag

SEQ ID NO: 5262 - DNA, 88 bp, synthetic construct
  misc_feature 1..88: note = engineered ribonucleic acid scaffold (ERS) sequence
  source 1..88: mol_type = other DNA
actggcgcttctatctgattactctgagcgccatccccagcgactatgtcgtatgggtaaagctccctcttcggagagtgcatcagag

SEQ ID NO: 5263 - DNA, 89 bp, synthetic construct
  misc_feature 1..89: note = engineered ribonucleic acid scaffold (ERS) sequence
  source 1..89: mol_type = other DNA
actggcgcttctatctgattactctgagcgccatcgccagcgactatgtcgtatggcgtaaagctccctcttcggagagtgcatcagag

SEQ ID NO: 5264 - DNA, 88 bp, synthetic construct
  misc_feature 1..88: note = engineered ribonucleic acid scaffold (ERS) sequence
  source 1..88: mol_type = other DNA
actggcgcttctatctgattactctgagcgccatcgccagcgactatgtcgtatgggtaaagctccctcttcggagagtgcatcagag

SEQ ID NO: 5265 - DNA, 88 bp, synthetic construct
  misc_feature 1..88: note = engineered ribonucleic acid scaffold (ERS) sequence
  source 1..88: mol_type = other DNA
actggcgcttctatctgattactctgagcgccatctccagcgactatgtcgtatgggtaaagctccctcttcggagagtgcatcagag

SEQ ID NO: 5266 - DNA, 88 bp, synthetic construct
  misc_feature 1..88: note = engineered ribonucleic acid scaffold (ERS) sequence
  source 1..88: mol_type = other DNA
actggcgcttctatctgattactctgagcgccatcacctgcgactatgtcgtaagggtaaagctccctcttcggagagtgcatcagag

SEQ ID NO: 5267 - DNA, 88 bp, synthetic construct
  misc_feature 1..88: note = engineered ribonucleic acid scaffold (ERS) sequence
  source 1..88: mol_type = other DNA
actggcgcttctatctgattactctgagcgccatcaccagagactatgtcttatgggtaaagctccctcttcggagagtgcatcagag

SEQ ID NO: 5268 - DNA, 88 bp, synthetic construct
  misc_feature 1..88: note = engineered ribonucleic acid scaffold (ERS) sequence
  source 1..88: mol_type = other DNA
actggcgcttctatctgattactctgagcgccatcaccagggactatgtcctatgggtaaagctccctcttcggagagtgcatcagag

SEQ ID NO: 5269 - DNA, 89 bp, synthetic construct
  misc_feature 1..89: note = engineered ribonucleic acid scaffold (ERS) sequence
  source 1..89: mol_type = other DNA
actggcgcttctatctgattactctgagcgccatcaccaggcactatgtgctattgggtaaagctccctcttcggagagtgcatcagag

SEQ ID NO: 5270 - DNA, 88 bp, synthetic construct
  misc_feature 1..88: note = engineered ribonucleic acid scaffold (ERS) sequence
  source 1..88: mol_type = other DNA
actggcgcttctatctgattactctgagcgccatcaccagccactatgtggtatgggtaaagctccctcttcggagagtgcatcagag

SEQ ID NO: 5271 - DNA, 88 bp, synthetic construct
  misc_feature 1..88: note = engineered ribonucleic acid scaffold (ERS) sequence
  source 1..88: mol_type = other DNA
actggcgcttctatctgattactctgagcgccatcaccagctactatgtagtatgggtaaagctccctcttcggagagtgcatcagag

SEQ ID NO: 5272 - DNA, 88 bp, synthetic construct
  misc_feature 1..88: note = engineered ribonucleic acid scaffold (ERS) sequence
  source 1..88: mol_type = other DNA
actggcgcttctatctgattactctgagcgccatcaccagcgattatgtcgtatgggtaaagctccctcttcggagagtgcatcagag

SEQ ID NO: 5273 - DNA, 88 bp, synthetic construct
  misc_feature 1..88: note = engineered ribonucleic acid scaffold (ERS) sequence
  source 1..88: mol_type = other DNA
actggcgcttctatctgattactctgagcgccatcaccagcgacgatgtcgtatgggtaaagctccctcttcggagagtgcatcagag

SEQ ID NO: 5274 - DNA, 88 bp, synthetic construct
  misc_feature 1..88: note = engineered ribonucleic acid scaffold (ERS) sequence
  source 1..88: mol_type = other DNA
actggcgcttctatctgattactctgagcgccatcaccagcgactctgtcgtatgggtaaagctccctcttcggagagtgcatcagag

SEQ ID NO: 5275 - DNA, 88 bp, synthetic construct
  misc_feature 1..88: note = engineered ribonucleic acid scaffold (ERS) sequence
  source 1..88: mol_type = other DNA
actggcgcttctatctgattactctgagcgccatcaccagcgactatgtcgtgtgggtaaagctccctcttcggagagtgcatcagag

SEQ ID NO: 5276 - DNA, 89 bp, synthetic construct
  misc_feature 1..89: note = engineered ribonucleic acid scaffold (ERS) sequence
  source 1..89: mol_type = other DNA
actggcgcttctatctgattactctgagcgccatcaccagcgactatgtcgtattgggtaaagctccctcttcggagagtgcatcagag

SEQ ID NO: 5277 - DNA, 89 bp, synthetic construct
  misc_feature 1..89: note = engineered ribonucleic acid scaffold (ERS) sequence
  source 1..89: mol_type = other DNA
actggcgcttctatctgattactctgagcgccatcaccagcgactatgtcgtatggagtaaagctccctcttcggagagtgcatcagag

SEQ ID NO: 5278 - DNA, 89 bp, synthetic construct
  misc_feature 1..89: note = engineered ribonucleic acid scaffold (ERS) sequence
  source 1..89: mol_type = other DNA
actggcgcttctatctgattactctgagcgccatcaccagcgactatgtcgtatggcgtaaagctccctcttcggagagtgcatcagag

SEQ ID NO: 5279 - DNA, 89 bp, synthetic construct
  misc_feature 1..89: note = engineered ribonucleic acid scaffold (ERS) sequence
  source 1..89: mol_type = other DNA
actggcgcttctatctgattactctgagcgccatcaccagcgactatgtcgtatggtgtaaagctccctcttcggagagtgcatcagag

SEQ ID NO: 5280 - DNA, 89 bp, synthetic construct
  misc_feature 1..89: note = engineered ribonucleic acid scaffold (ERS) sequence
  source 1..89: mol_type = other DNA
actggcgcttctatctgattactctgagcgccatcaccagcgactatgtcgtatgggctaaagctccctcttcggagagtgcatcagag

SEQ ID NO: 5281 - DNA, 86 bp, synthetic construct
  misc_feature 1..86: note = engineered ribonucleic acid scaffold (ERS) sequence
  source 1..86: mol_type = other DNA
actggcgcttctatctgattactctgagcgccatcaccagcgactatgtcgtatgggtagctccctcttcggagagtgcatcagag

SEQ ID NO: 5282 - DNA, 88 bp, synthetic construct
  misc_feature 1..88: note = engineered ribonucleic acid scaffold (ERS) sequence
  source 1..88: mol_type = other DNA
actggcgcttctatctgattactctgagcgccatcaccagcgactatgtcgtatgggtgaagctccctcttcggagagtgcatcagag

SEQ ID NO: 5283 - DNA, 88 bp, synthetic construct
  misc_feature 1..88: note = engineered ribonucleic acid scaffold (ERS) sequence
  source 1..88: mol_type = other DNA
actggcgcttctatctgattactctgagcgccatcaccagcgactatgtcgtatgggtagagctccctcttcggagagtgcatcagag

SEQ ID NO: 5284 - DNA, 88 bp, synthetic construct
  misc_feature 1..88: note = engineered ribonucleic acid scaffold (ERS) sequence
  source 1..88: mol_type = other DNA
actggcgcttctatctgattactctgagcgccaacaccagcgactatgtcgtatgggtaaagctccctcttcggaggaggcatcagag

SEQ ID NO: 5285 - DNA, 88 bp, synthetic construct
  misc_feature 1..88: note = engineered ribonucleic acid scaffold (ERS) sequence
  source 1..88: mol_type = other DNA
actggcgcttctatctgattactctgagcgccagcaccagcgactatgtcgtatgggtaaagctccctcttcggaggaggcatcagag

SEQ ID NO: 5286 - DNA, 88 bp, synthetic construct
  misc_feature 1..88: note = engineered ribonucleic acid scaffold (ERS) sequence
  source 1..88: mol_type = other DNA
actggcgcttctatctgattactctgagcgccatgaccagcgactatgtcgtatggctaaagctccctcttcggaggaggcatcagag

SEQ ID NO: 5287 - DNA, 89 bp, synthetic construct
  misc_feature 1..89: note = engineered ribonucleic acid scaffold (ERS) sequence
  source 1..89: mol_type = other DNA
actggcgcttctatctgattactctgagcgccatgaccagcgactatgtcgtatgggctaaagctccctcttcggaggaggcatcagag

SEQ ID NO: 5288 - DNA, 88 bp, synthetic construct
  misc_feature 1..88: note = engineered ribonucleic acid scaffold (ERS) sequence
  source 1..88: mol_type = other DNA
actggcgcttctatctgattactctgagcgccatgaccagcgactatgtcgtatgggtaaagctccctcttcggaggaggcatcagag

SEQ ID NO: 5289 - DNA, 88 bp, synthetic construct
  misc_feature 1..88: note = engineered ribonucleic acid scaffold (ERS) sequence
  source 1..88: mol_type = other DNA
actggcgcttctatctgattactctgagcgccatccccagcgactatgtcgtatgggtaaagctccctcttcggaggaggcatcagag

SEQ ID NO: 5290 - DNA, 89 bp, synthetic construct
  misc_feature 1..89: note = engineered ribonucleic acid scaffold (ERS) sequence
  source 1..89: mol_type = other DNA
actggcgcttctatctgattactctgagcgccatcgccagcgactatgtcgtatggcgtaaagctccctcttcggaggaggcatcagag

SEQ ID NO: 5291 - DNA, 88 bp, synthetic construct
  misc_feature 1..88: note = engineered ribonucleic acid scaffold (ERS) sequence
  source 1..88: mol_type = other DNA
actggcgcttctatctgattactctgagcgccatcgccagcgactatgtcgtatgggtaaagctccctcttcggaggaggcatcagag

SEQ ID NO: 5292 - DNA, 88 bp, synthetic construct
  misc_feature 1..88: note = engineered ribonucleic acid scaffold (ERS) sequence
  source 1..88: mol_type = other DNA
actggcgcttctatctgattactctgagcgccatctccagcgactatgtcgtatgggtaaagctccctcttcggaggaggcatcagag

SEQ ID NO: 5293 - DNA, 88 bp, synthetic construct
  misc_feature 1..88: note = engineered ribonucleic acid scaffold (ERS) sequence
  source 1..88: mol_type = other DNA
actggcgcttctatctgattactctgagcgccatcacctgcgactatgtcgtaagggtaaagctccctcttcggaggaggcatcagag

SEQ ID NO: 5294 - DNA, 88 bp, synthetic construct
  misc_feature 1..88: note = engineered ribonucleic acid scaffold (ERS) sequence
  source 1..88: mol_type = other DNA
actggcgcttctatctgattactctgagcgccatcaccagagactatgtcttatgggtaaagctccctcttcggaggaggcatcagag

SEQ ID NO: 5295 - DNA, 88 bp, synthetic construct
  misc_feature 1..88: note = engineered ribonucleic acid scaffold (ERS) sequence
  source 1..88: mol_type = other DNA
actggcgcttctatctgattactctgagcgccatcaccagggactatgtcctatgggtaaagctccctcttcggaggaggcatcagag

SEQ ID NO: 5296 - DNA, 89 bp, synthetic construct
  misc_feature 1..89: note = engineered ribonucleic acid scaffold (ERS) sequence
  source 1..89: mol_type = other DNA
actggcgcttctatctgattactctgagcgccatcaccaggcactatgtgctattgggtaaagctccctcttcggaggaggcatcagag

SEQ ID NO: 5297 - DNA, 88 bp, synthetic construct
  misc_feature 1..88: note = engineered ribonucleic acid scaffold (ERS) sequence
  source 1..88: mol_type = other DNA
actggcgcttctatctgattactctgagcgccatcaccagccactatgtggtatgggtaaagctccctcttcggaggaggcatcagag

SEQ ID NO: 5298 - DNA, 88 bp, synthetic construct
  misc_feature 1..88: note = engineered ribonucleic acid scaffold (ERS) sequence
  source 1..88: mol_type = other DNA
actggcgcttctatctgattactctgagcgccatcaccagctactatgtagtatgggtaaagctccctcttcggaggaggcatcagag

SEQ ID NO: 5299 - DNA, 88 bp, synthetic construct
  misc_feature 1..88: note = engineered ribonucleic acid scaffold (ERS) sequence
  source 1..88: mol_type = other DNA
actggcgcttctatctgattactctgagcgccatcaccagcgattatgtcgtatgggtaaagctccctcttcggaggaggcatcagag

SEQ ID NO: 5300 - DNA, 88 bp, synthetic construct
  misc_feature 1..88: note = engineered ribonucleic acid scaffold (ERS) sequence
  source 1..88: mol_type = other DNA
actggcgcttctatctgattactctgagcgccatcaccagcgacgatgtcgtatgggtaaagctccctcttcggaggaggcatcagag

SEQ ID NO: 5301 - DNA, 88 bp, synthetic construct
  misc_feature 1..88: note = engineered ribonucleic acid scaffold (ERS) sequence
  source 1..88: mol_type = other DNA
actggcgcttctatctgattactctgagcgccatcaccagcgactctgtcgtatgggtaaagctccctcttcggaggaggcatcagag

SEQ ID NO: 5302 - DNA, 88 bp, synthetic construct
  misc_feature 1..88: note = engineered ribonucleic acid scaffold (ERS) sequence
  source 1..88: mol_type = other DNA
actggcgcttctatctgattactctgagcgccatcaccagcgactatgtcgtgtgggtaaagctccctcttcggaggaggcatcagag

SEQ ID NO: 5303 - DNA, 89 bp, synthetic construct
  misc_feature 1..89: note = engineered ribonucleic acid scaffold (ERS) sequence
  source 1..89: mol_type = other DNA
actggcgcttctatctgattactctgagcgccatcaccagcgactatgtcgtattgggtaaagctccctcttcggaggaggcatcagag

SEQ ID NO: 5304 - DNA, 89 bp, synthetic construct
  misc_feature 1..89: note = engineered ribonucleic acid scaffold (ERS) sequence
  source 1..89: mol_type = other DNA
actggcgcttctatctgattactctgagcgccatcaccagcgactatgtcgtatggagtaaagctccctcttcggaggaggcatcagag

SEQ ID NO: 5305 - DNA, 89 bp, synthetic construct
  misc_feature 1..89: note = engineered ribonucleic acid scaffold (ERS) sequence
  source 1..89: mol_type = other DNA
actggcgcttctatctgattactctgagcgccatcaccagcgactatgtcgtatggcgtaaagctccctcttcggaggaggcatcagag

SEQ ID NO: 5306 - DNA, 89 bp, synthetic construct
  misc_feature 1..89: note = engineered ribonucleic acid scaffold (ERS) sequence
  source 1..89: mol_type = other DNA
actggcgcttctatctgattactctgagcgccatcaccagcgactatgtcgtatggtgtaaagctccctcttcggaggaggcatcagag

SEQ ID NO: 5307 - DNA, 89 bp, synthetic construct
  misc_feature 1..89: note = engineered ribonucleic acid scaffold (ERS) sequence
  source 1..89: mol_type = other DNA
actggcgcttctatctgattactctgagcgccatcaccagcgactatgtcgtatgggctaaagctccctcttcggaggaggcatcagag

SEQ ID NO: 5308 - DNA, 86 bp, synthetic construct
  misc_feature 1..86: note = engineered ribonucleic acid scaffold (ERS) sequence
  source 1..86: mol_type = other DNA
actggcgcttctatctgattactctgagcgccatcaccagcgactatgtcgtatgggtagctccctcttcggaggaggcatcagag

SEQ ID NO: 5309 - DNA, 88 bp, synthetic construct
  misc_feature 1..88: note = engineered ribonucleic acid scaffold (ERS) sequence
  source 1..88: mol_type = other DNA
actggcgcttctatctgattactctgagcgccatcaccagcgactatgtcgtatgggtgaagctccctcttcggaggaggcatcagag

SEQ ID NO: 5310 - DNA, 88 bp, synthetic construct
  misc_feature 1..88: note = engineered ribonucleic acid scaffold (ERS) sequence
  source 1..88: mol_type = other DNA
actggcgcttctatctgattactctgagcgccatcaccagcgactatgtcgtatgggtagagctccctcttcggaggaggcatcagag

SEQ ID NO: 5311 - DNA, 90 bp, synthetic construct
  misc_feature 1..90: note = engineered ribonucleic acid scaffold (ERS) sequence
  source 1..90: mol_type = other DNA
actggcgcttctatctgattactctgagcgccaacaccagcgactatgtcgtatgggtaaagctccctcttcggagggaacgcatcagag

SEQ ID NO: 5312 - DNA, 90 bp, synthetic construct
  misc_feature 1..90: note = engineered ribonucleic acid scaffold (ERS) sequence
  source 1..90: mol_type = other DNA
actggcgcttctatctgattactctgagcgccagcaccagcgactatgtcgtatgggtaaagctccctcttcggagggaacgcatcagag

SEQ ID NO: 5313 - DNA, 90 bp, synthetic construct
  misc_feature 1..90: note = engineered ribonucleic acid scaffold (ERS) sequence
  source 1..90: mol_type = other DNA
actggcgcttctatctgattactctgagcgccatgaccagcgactatgtcgtatggctaaagctccctcttcggagggaacgcatcagag

SEQ ID NO: 5314 - DNA, 91 bp, synthetic construct
  misc_feature 1..91: note = engineered ribonucleic acid scaffold (ERS) sequence
  source 1..91: mol_type = other DNA
actggcgcttctatctgattactctgagcgccatgaccagcgactatgtcgtatgggctaaagctccctcttcggagggaacgcatcagag

SEQ ID NO: 5315 - DNA, 90 bp, synthetic construct
  misc_feature 1..90: note = engineered ribonucleic acid scaffold (ERS) sequence
  source 1..90: mol_type = other DNA
actggcgcttctatctgattactctgagcgccatgaccagcgactatgtcgtatgggtaaagctccctcttcggagggaacgcatcagag

SEQ ID NO: 5316 - DNA, 90 bp, synthetic construct
  misc_feature 1..90: note = engineered ribonucleic acid scaffold (ERS) sequence
  source 1..90: mol_type = other DNA
actggcgcttctatctgattactctgagcgccatccccagcgactatgtcgtatgggtaaagctccctcttcggagggaacgcatcagag

SEQ ID NO: 5317 - DNA, 91 bp, synthetic construct
  misc_feature 1..91: note = engineered ribonucleic acid scaffold (ERS) sequence
  source 1..91: mol_type = other DNA
actggcgcttctatctgattactctgagcgccatcgccagcgactatgtcgtatggcgtaaagctccctcttcggagggaacgcatcagag

SEQ ID NO: 5318 - DNA, 90 bp, synthetic construct
  misc_feature 1..90: note = engineered ribonucleic acid scaffold (ERS) sequence
  source 1..90: mol_type = other DNA
actggcgcttctatctgattactctgagcgccatcgccagcgactatgtcgtatgggtaaagctccctcttcggagggaacgcatcagag

SEQ ID NO: 5319 - DNA, 90 bp, synthetic construct
  misc_feature 1..90: note = engineered ribonucleic acid scaffold (ERS) sequence
  source 1..90: mol_type = other DNA
actggcgcttctatctgattactctgagcgccatctccagcgactatgtcgtatgggtaaagctccctcttcggagggaacgcatcagag

SEQ ID NO: 5320 - DNA, 90 bp, synthetic construct
  misc_feature 1..90: note = engineered ribonucleic acid scaffold (ERS) sequence
  source 1..90: mol_type = other DNA
actggcgcttctatctgattactctgagcgccatcacctgcgactatgtcgtaagggtaaagctccctcttcggagggaacgcatcagag

SEQ ID NO: 5321 - DNA, 90 bp, synthetic construct
  misc_feature 1..90: note = engineered ribonucleic acid scaffold (ERS) sequence
  source 1..90: mol_type = other DNA
actggcgcttctatctgattactctgagcgccatcaccagagactatgtcttatgggtaaagctccctcttcggagggaacgcatcagag

SEQ ID NO: 5322 - DNA, 90 bp, synthetic construct
  misc_feature 1..90: note = engineered ribonucleic acid scaffold (ERS) sequence
  source 1..90: mol_type = other DNA
actggcgcttctatctgattactctgagcgccatcaccagggactatgtcctatgggtaaagctccctcttcggagggaacgcatcagag

SEQ ID NO: 5323 - DNA, 91 bp, synthetic construct
  misc_feature 1..91: note = engineered ribonucleic acid scaffold (ERS) sequence
  source 1..91: mol_type = other DNA
actggcgcttctatctgattactctgagcgccatcaccaggcactatgtgctattgggtaaagctccctcttcggagggaacgcatcagag

SEQ ID NO: 5324 - DNA, 90 bp, synthetic construct
  misc_feature 1..90: note = engineered ribonucleic acid scaffold (ERS) sequence
  source 1..90: mol_type = other DNA
actggcgcttctatctgattactctgagcgccatcaccagccactatgtggtatgggtaaagctccctcttcggagggaacgcatcagag

SEQ ID NO: 5325 - DNA, 90 bp, synthetic construct
  misc_feature 1..90: note = engineered ribonucleic acid scaffold (ERS) sequence
  source 1..90: mol_type = other DNA
actggcgcttctatctgattactctgagcgccatcaccagctactatgtagtatgggtaaagctccctcttcggagggaacgcatcagag

SEQ ID NO: 5326 - DNA, 90 bp, synthetic construct
  misc_feature 1..90: note = engineered ribonucleic acid scaffold (ERS) sequence
  source 1..90: mol_type = other DNA
actggcgcttctatctgattactctgagcgccatcaccagcgattatgtcgtatgggtaaagctccctcttcggagggaacgcatcagag

SEQ ID NO: 5327 - DNA, 90 bp, synthetic construct
  misc_feature 1..90: note = engineered ribonucleic acid scaffold (ERS) sequence
  source 1..90: mol_type = other DNA
actggcgcttctatctgattactctgagcgccatcaccagcgacgatgtcgtatgggtaaagctccctcttcggagggaacgcatcagag

SEQ ID NO: 5328 - DNA, 90 bp, synthetic construct
  misc_feature 1..90: note = engineered ribonucleic acid scaffold (ERS) sequence
  source 1..90: mol_type = other DNA
actggcgcttctatctgattactctgagcgccatcaccagcgactctgtcgtatgggtaaagctccctcttcggagggaacgcatcagag

SEQ ID NO: 5329 - DNA, 90 bp, synthetic construct
  misc_feature 1..90: note = engineered ribonucleic acid scaffold (ERS) sequence
  source 1..90: mol_type = other DNA
actggcgcttctatctgattactctgagcgccatcaccagcgactatgtcgtgtgggtaaagctccctcttcggagggaacgcatcagag

SEQ ID NO: 5330 - DNA, 91 bp, synthetic construct
  misc_feature 1..91: note = engineered ribonucleic acid scaffold (ERS) sequence
  source 1..91: mol_type = other DNA
actggcgcttctatctgattactctgagcgccatcaccagcgactatgtcgtattgggtaaagctccctcttcggagggaacgcatcagag

SEQ ID NO: 5331 - DNA, 91 bp, synthetic construct
  misc_feature 1..91: note = engineered ribonucleic acid scaffold (ERS) sequence
  source 1..91: mol_type = other DNA
actggcgcttctatctgattactctgagcgccatcaccagcgactatgtcgtatggagtaaagctccctcttcggagggaacgcatcagag

SEQ ID NO: 5332 - DNA, 91 bp, synthetic construct
  misc_feature 1..91: note = engineered ribonucleic acid scaffold (ERS) sequence
  source 1..91: mol_type = other DNA
actggcgcttctatctgattactctgagcgccatcaccagcgactatgtcgtatggcgtaaagctccctcttcggagggaacgcatcagag

SEQ ID NO: 5333 - DNA, 91 bp, synthetic construct
  misc_feature 1..91: note = engineered ribonucleic acid scaffold (ERS) sequence
  source 1..91: mol_type = other DNA
actggcgcttctatctgattactctgagcgccatcaccagcgactatgtcgtatggtgtaaagctccctcttcggagggaacgcatcagag

SEQ ID NO: 5334 - DNA, 91 bp, synthetic construct
  misc_feature 1..91: note = engineered ribonucleic acid scaffold (ERS) sequence
  source 1..91: mol_type = other DNA
actggcgcttctatctgattactctgagcgccatcaccagcgactatgtcgtatgggctaaagctccctcttcggagggaacgcatcagag

SEQ ID NO: 5335 - DNA, 88 bp, synthetic construct
  misc_feature 1..88: note = engineered ribonucleic acid scaffold (ERS) sequence
  source 1..88: mol_type = other DNA
actggcgcttctatctgattactctgagcgccatcaccagcgactatgtcgtatgggtagctccctcttcggagggaacgcatcagag

SEQ ID NO: 5336 - DNA, 90 bp, synthetic construct
  misc_feature 1..90: note = engineered ribonucleic acid scaffold (ERS) sequence
  source 1..90: mol_type = other DNA
actggcgcttctatctgattactctgagcgccatcaccagcgactatgtcgtatgggtgaagctccctcttcggagggaacgcatcagag

SEQ ID NO: 5337 - DNA, 90 bp, synthetic construct
  misc_feature 1..90: note = engineered ribonucleic acid scaffold (ERS) sequence
  source 1..90: mol_type = other DNA
actggcgcttctatctgattactctgagcgccatcaccagcgactatgtcgtatgggtagagctccctcttcggagggaacgcatcagag

SEQ ID NO: 5338 - DNA, 88 bp, synthetic construct; identical to SEQ ID NO: 682
  misc_feature 1..88: note = engineered ribonucleic acid scaffold (ERS) sequence
  source 1..88: mol_type = other DNA

SEQ ID NO: 5339 - DNA, 88 bp, synthetic construct; identical to SEQ ID NO: 693
  misc_feature 1..88: note = engineered ribonucleic acid scaffold (ERS) sequence
  source 1..88: mol_type = other DNA

SEQ ID NO: 5340 - DNA, 88 bp, synthetic construct; identical to SEQ ID NO: 683
  misc_feature 1..88: note = engineered ribonucleic acid scaffold (ERS) sequence
  source 1..88: mol_type = other DNA

SEQ ID NO: 5341 - DNA, 89 bp, synthetic construct; identical to SEQ ID NO: 684
  misc_feature 1..89: note = engineered ribonucleic acid scaffold (ERS) sequence
  source 1..89: mol_type = other DNA

SEQ ID NO: 5342 - DNA, 88 bp, synthetic construct; identical to SEQ ID NO: 694
  misc_feature 1..88: note = engineered ribonucleic acid scaffold (ERS) sequence
  source 1..88: mol_type = other DNA

SEQ ID NO: 5343 - DNA, 88 bp, synthetic construct; identical to SEQ ID NO: 677
  misc_feature 1..88: note = engineered ribonucleic acid scaffold (ERS) sequence
  source 1..88: mol_type = other DNA

SEQ ID NO: 5344 - DNA, 89 bp, synthetic construct; identical to SEQ ID NO: 685
  misc_feature 1..89: note = engineered ribonucleic acid scaffold (ERS) sequence
  source 1..89: mol_type = other DNA

SEQ ID NO: 5345 - DNA, 88 bp, synthetic construct; identical to SEQ ID NO: 695
  misc_feature 1..88: note = engineered ribonucleic acid scaffold (ERS) sequence
  source 1..88: mol_type = other DNA

SEQ ID NO: 5346 - DNA, 88 bp, synthetic construct; identical to SEQ ID NO: 676
  misc_feature 1..88: note = engineered ribonucleic acid scaffold (ERS) sequence
  source 1..88: mol_type = other DNA

SEQ ID NO: 5347 - DNA, 88 bp, synthetic construct; identical to SEQ ID NO: 686
  misc_feature 1..88: note = engineered ribonucleic acid scaffold (ERS) sequence
  source 1..88: mol_type = other DNA

SEQ ID NO: 5348 - DNA, 88 bp, synthetic construct; identical to SEQ ID NO: 687
  misc_feature 1..88: note = engineered ribonucleic acid scaffold (ERS) sequence
  source 1..88: mol_type = other DNA

SEQ ID NO: 5349 - DNA, 88 bp, synthetic construct; identical to SEQ ID NO: 688
  misc_feature 1..88: note = engineered ribonucleic acid scaffold (ERS) sequence
  source 1..88: mol_type = other DNA

SEQ ID NO: 5350 - DNA, 89 bp, synthetic construct; identical to SEQ ID NO: 692
  misc_feature 1..89: note = engineered ribonucleic acid scaffold (ERS) sequence
  source 1..89: mol_type = other DNA

SEQ ID NO: 5351 - DNA, 88 bp, synthetic construct; identical to SEQ ID NO: 689
  misc_feature 1..88: note = engineered ribonucleic acid scaffold (ERS) sequence
  source 1..88: mol_type = other DNA

SEQ ID NO: 5352 - DNA, 88 bp, synthetic construct; identical to SEQ ID NO: 690
  misc_feature 1..88: note = engineered ribonucleic acid scaffold (ERS) sequence
  source 1..88: mol_type = other DNA

SEQ ID NO: 5353 - DNA, 88 bp, synthetic construct; identical to SEQ ID NO: 678
  misc_feature 1..88: note = engineered ribonucleic acid scaffold (ERS) sequence
  source 1..88: mol_type = other DNA

SEQ ID NO: 5354 - DNA, 88 bp, synthetic construct; identical to SEQ ID NO: 673
  misc_feature 1..88: note = engineered ribonucleic acid scaffold (ERS) sequence
  source 1..88: mol_type = other DNA

SEQ ID NO: 5355 - DNA, 88 bp, synthetic construct; identical to SEQ ID NO: 696
  misc_feature 1..88: note = engineered ribonucleic acid scaffold (ERS) sequence
  source 1..88: mol_type = other DNA

SEQ ID NO: 5356 - DNA, 88 bp, synthetic construct; identical to SEQ ID NO: 679
  misc_feature 1..88: note = engineered ribonucleic acid scaffold (ERS) sequence
  source 1..88: mol_type = other DNA

SEQ ID NO: 5357 - DNA, 89 bp, synthetic construct; identical to SEQ ID NO: 675
  misc_feature 1..89: note = engineered ribonucleic acid scaffold (ERS) sequence
  source 1..89: mol_type = other DNA

SEQ ID NO: 5358 - DNA, 89 bp, synthetic construct; identical to SEQ ID NO: 681
  misc_feature 1..89: note = engineered ribonucleic acid scaffold (ERS) sequence
  source 1..89: mol_type = other DNA

SEQ ID NO: 5359 - DNA, 89 bp, synthetic construct; identical to SEQ ID NO: 697
  misc_feature 1..89: note = engineered ribonucleic acid scaffold (ERS) sequence
  source 1..89: mol_type = other DNA

SEQ ID NO: 5360 - DNA, 89 bp, synthetic construct; identical to SEQ ID NO: 680
  misc_feature 1..89: note = engineered ribonucleic acid scaffold (ERS) sequence
  source 1..89: mol_type = other DNA

SEQ ID NO: 5361 - DNA, 89 bp, synthetic construct; identical to SEQ ID NO: 698
  misc_feature 1..89: note = engineered ribonucleic acid scaffold (ERS) sequence
  source 1..89: mol_type = other DNA

SEQ ID NO: 5362 - DNA, 86 bp, synthetic construct; identical to SEQ ID NO: 691
  misc_feature 1..86: note = engineered ribonucleic acid scaffold (ERS) sequence
  source 1..86: mol_type = other DNA

SEQ ID NO: 5363 - DNA, 88 bp, synthetic construct; identical to SEQ ID NO: 699
  misc_feature 1..88: note = engineered ribonucleic acid scaffold (ERS) sequence
  source 1..88: mol_type = other DNA

SEQ ID NO: 5364 - DNA, 88 bp, synthetic construct; identical to SEQ ID NO: 700
  misc_feature 1..88: note = engineered ribonucleic acid scaffold (ERS) sequence
  source 1..88: mol_type = other DNA

SEQ ID NO: 5365 - DNA, 88 bp, synthetic construct
  misc_feature 1..88: note = engineered ribonucleic acid scaffold (ERS) sequence
  source 1..88: mol_type = other DNA
actggcgcttctatctgattactctgagcgccaacaccagcgactatgtcgtatgggtaaagctccctggaaacagggagcatcagag

SEQ ID NO: 5366 - DNA, 88 bp, synthetic construct
  misc_feature 1..88: note = engineered ribonucleic acid scaffold (ERS) sequence
  source 1..88: mol_type = other DNA
actggcgcttctatctgattactctgagcgccagcaccagcgactatgtcgtatgggtaaagctccctggaaacagggagcatcagag

SEQ ID NO: 5367 - DNA, 88 bp, synthetic construct
  misc_feature 1..88: note = engineered ribonucleic acid scaffold (ERS) sequence
  source 1..88: mol_type = other DNA
actggcgcttctatctgattactctgagcgccatgaccagcgactatgtcgtatggctaaagctccctggaaacagggagcatcagag

SEQ ID NO: 5368 - DNA, 89 bp, synthetic construct
  misc_feature 1..89: note = engineered ribonucleic acid scaffold (ERS) sequence
  source 1..89: mol_type = other DNA
actggcgcttctatctgattactctgagcgccatgaccagcgactatgtcgtatgggctaaagctccctggaaacagggagcatcagag

SEQ ID NO: 5369 - DNA, 88 bp, synthetic construct
  misc_feature 1..88: note = engineered ribonucleic acid scaffold (ERS) sequence
  source 1..88: mol_type = other DNA
actggcgcttctatctgattactctgagcgccatgaccagcgactatgtcgtatgggtaaagctccctggaaacagggagcatcagag

SEQ ID NO: 5370 - DNA, 88 bp, synthetic construct
  misc_feature 1..88: note = engineered ribonucleic acid scaffold (ERS) sequence
  source 1..88: mol_type = other DNA
actggcgcttctatctgattactctgagcgccatccccagcgactatgtcgtatgggtaaagctccctggaaacagggagcatcagag

SEQ ID NO: 5371 - DNA, 89 bp, synthetic construct
  misc_feature 1..89: note = engineered ribonucleic acid scaffold (ERS) sequence
  source 1..89: mol_type = other DNA
actggcgcttctatctgattactctgagcgccatcgccagcgactatgtcgtatggcgtaaagctccctggaaacagggagcatcagag

SEQ ID NO: 5372 - DNA, 88 bp, synthetic construct
  misc_feature 1..88: note = engineered ribonucleic acid scaffold (ERS) sequence
  source 1..88: mol_type = other DNA
actggcgcttctatctgattactctgagcgccatcgccagcgactatgtcgtatgggtaaagctccctggaaacagggagcatcagag

SEQ ID NO: 5373 - DNA, 88 bp, synthetic construct
  misc_feature 1..88: note = engineered ribonucleic acid scaffold (ERS) sequence
  source 1..88: mol_type = other DNA
actggcgcttctatctgattactctgagcgccatctccagcgactatgtcgtatgggtaaagctccctggaaacagggagcatcagag

SEQ ID NO: 5374 - DNA, 88 bp, synthetic construct
  misc_feature 1..88: note = engineered ribonucleic acid scaffold (ERS) sequence
  source 1..88: mol_type = other DNA
actggcgcttctatctgattactctgagcgccatcacctgcgactatgtcgtaagggtaaagctccctggaaacagggagcatcagag

SEQ ID NO: 5375 - DNA, 88 bp, synthetic construct
  misc_feature 1..88: note = engineered ribonucleic acid scaffold (ERS) sequence
  source 1..88: mol_type = other DNA
actggcgcttctatctgattactctgagcgccatcaccagagactatgtcttatgggtaaagctccctggaaacagggagcatcagag

SEQ ID NO: 5376 - DNA, 88 bp, synthetic construct
  misc_feature 1..88: note = engineered ribonucleic acid scaffold (ERS) sequence
  source 1..88: mol_type = other DNA
actggcgcttctatctgattactctgagcgccatcaccagggactatgtcctatgggtaaagctccctggaaacagggagcatcagag

SEQ ID NO: 5377 - DNA, 89 bp, synthetic construct
  misc_feature 1..89: note = engineered ribonucleic acid scaffold (ERS) sequence
  source 1..89: mol_type = other DNA
actggcgcttctatctgattactctgagcgccatcaccaggcactatgtgctattgggtaaagctccctggaaacagggagcatcagag

SEQ ID NO: 5378 - DNA, 88 bp, synthetic construct
  misc_feature 1..88: note = engineered ribonucleic acid scaffold (ERS) sequence
  source 1..88: mol_type = other DNA
actggcgcttctatctgattactctgagcgccatcaccagccactatgtggtatgggtaaagctccctggaaacagggagcatcagag

SEQ ID NO: 5379 - DNA, 88 bp, synthetic construct
  misc_feature 1..88: note = engineered ribonucleic acid scaffold (ERS) sequence
  source 1..88: mol_type = other DNA
actggcgcttctatctgattactctgagcgccatcaccagctactatgtagtatgggtaaagctccctggaaacagggagcatcagag

SEQ ID NO: 5380 - DNA, 88 bp, synthetic construct
  misc_feature 1..88: note = engineered ribonucleic acid scaffold (ERS) sequence
  source 1..88: mol_type = other DNA
actggcgcttctatctgattactctgagcgccatcaccagcgattatgtcgtatgggtaaagctccctggaaacagggagcatcagag

SEQ ID NO: 5381 - DNA, 88 bp, synthetic construct
  misc_feature 1..88: note = engineered ribonucleic acid scaffold (ERS) sequence
  source 1..88: mol_type = other DNA
actggcgcttctatctgattactctgagcgccatcaccagcgacgatgtcgtatgggtaaagctccctggaaacagggagcatcagag

SEQ ID NO: 5382 - DNA, 88 bp, synthetic construct
  misc_feature 1..88: note = engineered ribonucleic acid scaffold (ERS) sequence
  source 1..88: mol_type = other DNA
actggcgcttctatctgattactctgagcgccatcaccagcgactctgtcgtatgggtaaagctccctggaaacagggagcatcagag

SEQ ID NO: 5383 - DNA, 88 bp, synthetic construct
  misc_feature 1..88: note = engineered ribonucleic acid scaffold (ERS) sequence
  source 1..88: mol_type = other DNA
actggcgcttctatctgattactctgagcgccatcaccagcgactatgtcgtgtgggtaaagctccctggaaacagggagcatcagag

SEQ ID NO: 5384 - DNA, 89 bp, synthetic construct
  misc_feature 1..89: note = engineered ribonucleic acid scaffold (ERS) sequence
  source 1..89: mol_type = other DNA
actggcgcttctatctgattactctgagcgccatcaccagcgactatgtcgtattgggtaaagctccctggaaacagggagcatcagag

SEQ ID NO: 5385 - DNA, 89 bp, synthetic construct
  misc_feature 1..89: note = engineered ribonucleic acid scaffold (ERS) sequence
  source 1..89: mol_type = other DNA
actggcgcttctatctgattactctgagcgccatcaccagcgactatgtcgtatggagtaaagctccctggaaacagggagcatcagag

SEQ ID NO: 5386 - DNA, 89 bp, synthetic construct
  misc_feature 1..89: note = engineered ribonucleic acid scaffold (ERS) sequence
  source 1..89: mol_type = other DNA
actggcgcttctatctgattactctgagcgccatcaccagcgactatgtcgtatggcgtaaagctccctggaaacagggagcatcagag

SEQ ID NO: 5387 - DNA, 89 bp, synthetic construct
  misc_feature 1..89: note = engineered ribonucleic acid scaffold (ERS) sequence
  source 1..89: mol_type = other DNA
actggcgcttctatctgattactctgagcgccatcaccagcgactatgtcgtatggtgtaaagctccctggaaacagggagcatcagag

SEQ ID NO: 5388 - DNA, 89 bp, synthetic construct
  misc_feature 1..89: note = engineered ribonucleic acid scaffold (ERS) sequence
  source 1..89: mol_type = other DNA
actggcgcttctatctgattactctgagcgccatcaccagcgactatgtcgtatgggctaaagctccctggaaacagggagcatcagag

SEQ ID NO: 5389 - DNA, 86 bp, synthetic construct
  misc_feature 1..86: note = engineered ribonucleic acid scaffold (ERS) sequence
  source 1..86: mol_type = other DNA
actggcgcttctatctgattactctgagcgccatcaccagcgactatgtcgtatgggtagctccctggaaacagggagcatcagag

SEQ ID NO: 5390 - DNA, 88 bp, synthetic construct
  misc_feature 1..88: note = engineered ribonucleic acid scaffold (ERS) sequence
  source 1..88: mol_type = other DNA
actggcgcttctatctgattactctgagcgccatcaccagcgactatgtcgtatgggtgaagctccctggaaacagggagcatcagag

SEQ ID NO: 5391 - DNA, 88 bp, synthetic construct
  misc_feature 1..88: note = engineered ribonucleic acid scaffold (ERS) sequence
  source 1..88: mol_type = other DNA
actggcgcttctatctgattactctgagcgccatcaccagcgactatgtcgtatgggtagagctccctggaaacagggagcatcagag

SEQ ID NO: 5392 - DNA, 84 bp, synthetic construct
  misc_feature 1..84: note = engineered ribonucleic acid scaffold (ERS) sequence
  source 1..84: mol_type = other DNA
actggcgcttctatctgattactctgagcgccaacaccagcgactatgtcgtatgggtaaagctcccttcggggagcatcagag

SEQ ID NO: 5393 - DNA, 84 bp, synthetic construct
  misc_feature 1..84: note = engineered ribonucleic acid scaffold (ERS) sequence
  source 1..84: mol_type = other DNA
actggcgcttctatctgattactctgagcgccagcaccagcgactatgtcgtatgggtaaagctcccttcggggagcatcagag

SEQ ID NO: 5394 - DNA, 84 bp, synthetic construct
  misc_feature 1..84: note = engineered ribonucleic acid scaffold (ERS) sequence
  source 1..84: mol_type = other DNA
actggcgcttctatctgattactctgagcgccatgaccagcgactatgtcgtatggctaaagctcccttcggggagcatcagag

SEQ ID NO: 5395 - DNA, 85 bp, synthetic construct
  misc_feature 1..85: note = engineered ribonucleic acid scaffold (ERS) sequence
  source 1..85: mol_type = other DNA
actggcgcttctatctgattactctgagcgccatgaccagcgactatgtcgtatgggctaaagctcccttcggggagcatcagag

SEQ ID NO: 5396 - DNA, 84 bp, synthetic construct
  misc_feature 1..84: note = engineered ribonucleic acid scaffold (ERS) sequence
  source 1..84: mol_type = other DNA
actggcgcttctatctgattactctgagcgccatgaccagcgactatgtcgtatgggtaaagctcccttcggggagcatcagag

SEQ ID NO: 5397 - DNA, 84 bp, synthetic construct
  misc_feature 1..84: note = engineered ribonucleic acid scaffold (ERS) sequence
  source 1..84: mol_type = other DNA
actggcgcttctatctgattactctgagcgccatccccagcgactatgtcgtatgggtaaagctcccttcggggagcatcagag

SEQ ID NO: 5398 - DNA, 85 bp, synthetic construct
  misc_feature 1..85: note = engineered ribonucleic acid scaffold (ERS) sequence
  source 1..85: mol_type = other DNA
actggcgcttctatctgattactctgagcgccatcgccagcgactatgtcgtatggcgtaaagctcccttcggggagcatcagag

SEQ ID NO: 5399 - DNA, 84 bp, synthetic construct
  misc_feature 1..84: note = engineered ribonucleic acid scaffold (ERS) sequence
  source 1..84: mol_type = other DNA
actggcgcttctatctgattactctgagcgccatcgccagcgactatgtcgtatgggtaaagctcccttcggggagcatcagag

SEQ ID NO: 5400 - DNA, 84 bp, synthetic construct
  misc_feature 1..84: note = engineered ribonucleic acid scaffold (ERS) sequence
  source 1..84: mol_type = other DNA
actggcgcttctatctgattactctgagcgccatctccagcgactatgtcgtatgggtaaagctcccttcggggagcatcagag

SEQ ID NO: 5401 - DNA, 84 bp, synthetic construct
  misc_feature 1..84: note = engineered ribonucleic acid scaffold (ERS) sequence
  source 1..84: mol_type = other DNA
actggcgcttctatctgattactctgagcgccatcacctgcgactatgtcgtaagggtaaagctcccttcggggagcatcagag

SEQ ID NO: 5402 - DNA, 84 bp, synthetic construct
  misc_feature 1..84: note = engineered ribonucleic acid scaffold (ERS) sequence
  source 1..84: mol_type = other DNA
actggcgcttctatctgattactctgagcgccatcaccagagactatgtcttatgggtaaagctcccttcggggagcatcagag

SEQ ID NO: 5403 - DNA, 84 bp, synthetic construct
  misc_feature 1..84: note = engineered ribonucleic acid scaffold (ERS) sequence
  source 1..84: mol_type = other DNA
actggcgcttctatctgattactctgagcgccatcaccagggactatgtcctatgggtaaagctcccttcggggagcatcagag

SEQ ID NO: 5404 - DNA, 85 bp, synthetic construct
  misc_feature 1..85: note = engineered ribonucleic acid scaffold (ERS) sequence
  source 1..85: mol_type = other DNA
actggcgcttctatctgattactctgagcgccatcaccaggcactatgtgctattgggtaaagctcccttcggggagcatcagag

SEQ ID NO: 5405 - DNA, 84 bp, synthetic construct
  misc_feature 1..84: note = engineered ribonucleic acid scaffold (ERS) sequence
  source 1..84: mol_type = other DNA
actggcgcttctatctgattactctgagcgccatcaccagccactatgtggtatgggtaaagctcccttcggggagcatcagag

SEQ ID NO: 5406 - DNA, 84 bp, synthetic construct
  misc_feature 1..84: note = engineered ribonucleic acid scaffold (ERS) sequence
  source 1..84: mol_type = other DNA
actggcgcttctatctgattactctgagcgccatcaccagctactatgtagtatgggtaaagctcccttcggggagcatcagag

SEQ ID NO: 5407 - DNA, 84 bp, synthetic construct
  misc_feature 1..84: note = engineered ribonucleic acid scaffold (ERS) sequence
  source 1..84: mol_type = other DNA
actggcgcttctatctgattactctgagcgccatcaccagcgattatgtcgtatgggtaaagctcccttcggggagcatcagag

SEQ ID NO: 5408 - DNA, 84 bp, synthetic construct
  misc_feature 1..84: note = engineered ribonucleic acid scaffold (ERS) sequence
  source 1..84: mol_type = other DNA
actggcgcttctatctgattactctgagcgccatcaccagcgacgatgtcgtatgggtaaagctcccttcggggagcatcagag

SEQ ID NO: 5409 - DNA, 84 bp, synthetic construct
  misc_feature 1..84: note = engineered ribonucleic acid scaffold (ERS) sequence
  source 1..84: mol_type = other DNA
actggcgcttctatctgattactctgagcgccatcaccagcgactctgtcgtatgggtaaagctcccttcggggagcatcagag

SEQ ID NO: 5410 - DNA, 84 bp, synthetic construct
  misc_feature 1..84: note = engineered ribonucleic acid scaffold (ERS) sequence
  source 1..84: mol_type = other DNA
actggcgcttctatctgattactctgagcgccatcaccagcgactatgtcgtgtgggtaaagctcccttcggggagcatcagag

SEQ ID NO: 5411 - DNA, 85 bp, synthetic construct
  misc_feature 1..85: note = engineered ribonucleic acid scaffold (ERS) sequence
  source 1..85: mol_type = other DNA
actggcgcttctatctgattactctgagcgccatcaccagcgactatgtcgtattgggtaaagctcccttcggggagcatcagag

SEQ ID NO: 5412 - DNA, 85 bp, synthetic construct
  misc_feature 1..85: note = engineered ribonucleic acid scaffold (ERS) sequence
  source 1..85: mol_type = other DNA
actggcgcttctatctgattactctgagcgccatcaccagcgactatgtcgtatggagtaaagctcccttcggggagcatcagag

SEQ ID NO: 5413 - DNA, 85 bp, synthetic construct
  misc_feature 1..85: note = engineered ribonucleic acid scaffold (ERS) sequence
  source 1..85: mol_type = other DNA
actggcgcttctatctgattactctgagcgccatcaccagcgactatgtcgtatggcgtaaagctcccttcggggagcatcagag

SEQ ID NO: 5414 - DNA, 85 bp, synthetic construct
  misc_feature 1..85: note = engineered ribonucleic acid scaffold (ERS) sequence
  source 1..85: mol_type = other DNA
actggcgcttctatctgattactctgagcgccatcaccagcgactatgtcgtatggtgtaaagctcccttcggggagcatcagag

SEQ ID NO: 5415 - DNA, 85 bp, synthetic construct
  misc_feature 1..85: note = engineered ribonucleic acid scaffold (ERS) sequence
  source 1..85: mol_type = other DNA
actggcgcttctatctgattactctgagcgccatcaccagcgactatgtcgtatgggctaaagctcccttcggggagcatcagag

SEQ ID NO: 5416 - DNA, 82 bp, synthetic construct
  misc_feature 1..82: note = engineered ribonucleic acid scaffold (ERS) sequence
  source 1..82: mol_type = other DNA
actggcgcttctatctgattactctgagcgccatcaccagcgactatgtcgtatgggtagctcccttcggggagcatcagag

SEQ ID NO: 5417 - DNA, 84 bp, synthetic construct
  misc_feature 1..84: note = engineered ribonucleic acid scaffold (ERS) sequence
  source 1..84: mol_type = other DNA
actggcgcttctatctgattactctgagcgccatcaccagcgactatgtcgtatgggtgaagctcccttcggggagcatcagag

SEQ ID NO: 5418 - DNA, 84 bp, synthetic construct
  misc_feature 1..84: note = engineered ribonucleic acid scaffold (ERS) sequence
  source 1..84: mol_type = other DNA
actggcgcttctatctgattactctgagcgccatcaccagcgactatgtcgtatgggtagagctcccttcggggagcatcagag

SEQ ID NO: 5419 - DNA, 84 bp, synthetic construct
  misc_feature 1..84: note = engineered ribonucleic acid scaffold (ERS) sequence
  source 1..84: mol_type = other DNA
actggcgcttctatctgattactctgagcgccaacaccagcgactatgtcgtatgggtaaagctccgttcgcggagcatcagag

SEQ ID NO: 5420 - DNA, 84 bp, synthetic construct
  misc_feature 1..84: note = engineered ribonucleic acid scaffold (ERS) sequence
  source 1..84: mol_type = other DNA
actggcgcttctatctgattactctgagcgccagcaccagcgactatgtcgtatgggtaaagctccgttcgcggagcatcagag

SEQ ID NO: 5421 - DNA, 84 bp, synthetic construct
  misc_feature 1..84: note = engineered ribonucleic acid scaffold (ERS) sequence
  source 1..84: mol_type = other DNA
actggcgcttctatctgattactctgagcgccatgaccagcgactatgtcgtatggctaaagctccgttcgcggagcatcagag

SEQ ID NO: 5422 - DNA, 85 bp, synthetic construct
  misc_feature 1..85: note = engineered ribonucleic acid scaffold (ERS) sequence
  source 1..85: mol_type = other DNA
actggcgcttctatctgattactctgagcgccatgaccagcgactatgtcgtatgggctaaagctccgttcgcggagcatcagag

SEQ ID NO: 5423 - DNA, 84 bp, synthetic construct
  misc_feature 1..84: note = engineered ribonucleic acid scaffold (ERS) sequence
  source 1..84: mol_type = other DNA
actggcgcttctatctgattactctgagcgccatgaccagcgactatgtcgtatgggtaaagctccgttcgcggagcatcagag

SEQ ID NO: 5424 - DNA, 84 bp, synthetic construct
  misc_feature 1..84: note = engineered ribonucleic acid scaffold (ERS) sequence
  source 1..84: mol_type = other DNA
actggcgcttctatctgattactctgagcgccatccccagcgactatgtcgtatgggtaaagctccgttcgcggagcatcagag

SEQ ID NO: 5425 - DNA, 85 bp, synthetic construct
  misc_feature 1..85: note = engineered ribonucleic acid scaffold (ERS) sequence
  source 1..85: mol_type = other DNA
actggcgcttctatctgattactctgagcgccatcgccagcgactatgtcgtatggcgtaaagctccgttcgcggagcatcagag

SEQ ID NO: 5426 - DNA, 84 bp, synthetic construct
  misc_feature 1..84: note = engineered ribonucleic acid scaffold (ERS) sequence
  source 1..84: mol_type = other DNA
actggcgcttctatctgattactctgagcgccatcgccagcgactatgtcgtatgggtaaagctccgttcgcggagcatcagag

SEQ ID NO: 5427 - DNA, 84 bp, synthetic construct
  misc_feature 1..84: note = engineered ribonucleic acid scaffold (ERS) sequence
  source 1..84: mol_type = other DNA
actggcgcttctatctgattactctgagcgccatctccagcgactatgtcgtatgggtaaagctccgttcgcggagcatcagag

SEQ ID NO: 5428 - DNA, 84 bp, synthetic construct
  misc_feature 1..84: note = engineered ribonucleic acid scaffold (ERS) sequence
  source 1..84: mol_type = other DNA
actggcgcttctatctgattactctgagcgccatcacctgcgactatgtcgtaagggtaaagctccgttcgcggagcatcagag

SEQ ID NO: 5429 - DNA, 84 bp, synthetic construct
  misc_feature 1..84: note = engineered ribonucleic acid scaffold (ERS) sequence
  source 1..84: mol_type = other DNA
actggcgcttctatctgattactctgagcgccatcaccagagactatgtcttatgggtaaagctccgttcgcggagcatcagag

SEQ ID NO: 5430 - DNA, 84 bp, synthetic construct
  misc_feature 1..84: note = engineered ribonucleic acid scaffold (ERS) sequence
  source 1..84: mol_type = other DNA
actggcgcttctatctgattactctgagcgccatcaccagggactatgtcctatgggtaaagctccgttcgcggagcatcagag

SEQ ID NO: 5431 - DNA, 85 bp, synthetic construct
  misc_feature 1..85: note = engineered ribonucleic acid scaffold (ERS) sequence
  source 1..85: mol_type = other DNA
actggcgcttctatctgattactctgagcgccatcaccaggcactatgtgctattgggtaaagctccgttcgcggagcatcagag

SEQ ID NO: 5432 - DNA, 84 bp, synthetic construct
  misc_feature 1..84: note = engineered ribonucleic acid scaffold (ERS) sequence
  source 1..84: mol_type = other DNA
actggcgcttctatctgattactctgagcgccatcaccagccactatgtggtatgggtaaagctccgttcgcggagcatcagag

SEQ ID NO: 5433 - DNA, 84 bp, synthetic construct
  misc_feature 1..84: note = engineered ribonucleic acid scaffold (ERS) sequence
  source 1..84: mol_type = other DNA
actggcgcttctatctgattactctgagcgccatcaccagctactatgtagtatgggtaaagctccgttcgcggagcatcagag

SEQ ID NO: 5434 - DNA, 84 bp, synthetic construct
  misc_feature 1..84: note = engineered ribonucleic acid scaffold (ERS) sequence
  source 1..84: mol_type = other DNA
actggcgcttctatctgattactctgagcgccatcaccagcgattatgtcgtatgggtaaagctccgttcgcggagcatcagag

SEQ ID NO: 5435 - DNA, 84 bp, synthetic construct
  misc_feature 1..84: note = engineered ribonucleic acid scaffold (ERS) sequence
  source 1..84: mol_type = other DNA
actggcgcttctatctgattactctgagcgccatcaccagcgacgatgtcgtatgggtaaagctccgttcgcggagcatcagag

SEQ ID NO: 5436 - DNA, 84 bp, synthetic construct
  misc_feature 1..84: note = engineered ribonucleic acid scaffold (ERS) sequence
  source 1..84: mol_type = other DNA
actggcgcttctatctgattactctgagcgccatcaccagcgactctgtcgtatgggtaaagctccgttcgcggagcatcagag

SEQ ID NO: 5437 - DNA, 84 bp, synthetic construct
  misc_feature 1..84: note = engineered ribonucleic acid scaffold (ERS) sequence
  source 1..84: mol_type = other DNA
actggcgcttctatctgattactctgagcgccatcaccagcgactatgtcgtgtgggtaaagctccgttcgcggagcatcagag

SEQ ID NO: 5438 - DNA, 85 bp, synthetic construct
  misc_feature 1..85: note = engineered ribonucleic acid scaffold (ERS) sequence
  source 1..85: mol_type = other DNA
actggcgcttctatctgattactctgagcgccatcaccagcgactatgtcgtattgggtaaagctccgttcgcggagcatcagag

SEQ ID NO: 5439 - DNA, 85 bp, synthetic construct
  misc_feature 1..85: note = engineered ribonucleic acid scaffold (ERS) sequence
  source 1..85: mol_type = other DNA
actggcgcttctatctgattactctgagcgccatcaccagcgactatgtcgtatggagtaaagctccgttcgcggagcatcagag

SEQ ID NO: 5440 - DNA, 85 bp, synthetic construct
  misc_feature 1..85: note = engineered ribonucleic acid scaffold (ERS) sequence
  source 1..85: mol_type = other DNA
actggcgcttctatctgattactctgagcgccatcaccagcgactatgtcgtatggcgtaaagctccgttcgcggagcatcagag

SEQ ID NO: 5441 - DNA, 85 bp, synthetic construct
  misc_feature 1..85: note = engineered ribonucleic acid scaffold (ERS) sequence
  source 1..85: mol_type = other DNA
actggcgcttctatctgattactctgagcgccatcaccagcgactatgtcgtatggtgtaaagctccgttcgcggagcatcagag

SEQ ID NO: 5442 - DNA, 85 bp, synthetic construct
  misc_feature 1..85: note = engineered ribonucleic acid scaffold (ERS) sequence
  source 1..85: mol_type = other DNA
actggcgcttctatctgattactctgagcgccatcaccagcgactatgtcgtatgggctaaagctccgttcgcggagcatcagag

SEQ ID NO: 5443 - DNA, 82 bp, synthetic construct
  misc_feature 1..82: note = engineered ribonucleic acid scaffold (ERS) sequence
  source 1..82: mol_type = other DNA
actggcgcttctatctgattactctgagcgccatcaccagcgactatgtcgtatgggtagctccgttcgcggagcatcagag

SEQ ID NO: 5444 - DNA, 84 bp, synthetic construct
  misc_feature 1..84: note = engineered ribonucleic acid scaffold (ERS) sequence
  source 1..84: mol_type = other DNA
actggcgcttctatctgattactctgagcgccatcaccagcgactatgtcgtatgggtgaagctccgttcgcggagcatcagag

SEQ ID NO: 5445 - DNA, 84 bp, synthetic construct
  misc_feature 1..84: note = engineered ribonucleic acid scaffold (ERS) sequence
  source 1..84: mol_type = other DNA
actggcgcttctatctgattactctgagcgccatcaccagcgactatgtcgtatgggtagagctccgttcgcggagcatcagag

SEQ ID NO: 5446 - DNA, 86 bp, synthetic construct
  misc_feature 1..86: note = engineered ribonucleic acid scaffold (ERS) sequence
  source 1..86: mol_type = other DNA
actggcgcttctatctgattactctgagcgccaacaccagcgactatgtcgtatgggtaaagctcctcttcggaggagcatcagag

SEQ ID NO: 5447 - DNA, 86 bp, synthetic construct
  misc_feature 1..86: note = engineered ribonucleic acid scaffold (ERS) sequence
  source 1..86: mol_type = other DNA
actggcgcttctatctgattactctgagcgccagcaccagcgactatgtcgtatgggtaaagctcctcttcggaggagcatcagag

SEQ ID NO: 5448 - DNA, 86 bp, synthetic construct
  misc_feature 1..86: note = engineered ribonucleic acid scaffold (ERS) sequence
  source 1..86: mol_type = other DNA
actggcgcttctatctgattactctgagcgccatgaccagcgactatgtcgtatggctaaagctcctcttcggaggagcatcagag

SEQ ID NO: 5449 - DNA, 87 bp, synthetic construct
  misc_feature 1..87: note = engineered ribonucleic acid scaffold (ERS) sequence
  source 1..87: mol_type = other DNA
actggcgcttctatctgattactctgagcgccatgaccagcgactatgtcgtatgggctaaagctcctcttcggaggagcatcagag

SEQ ID NO: 5450 - DNA, 86 bp, synthetic construct
  misc_feature 1..86: note = engineered ribonucleic acid scaffold (ERS) sequence
  source 1..86: mol_type = other DNA
actggcgcttctatctgattactctgagcgccatgaccagcgactatgtcgtatgggtaaagctcctcttcggaggagcatcagag

SEQ ID NO: 5451 - DNA, 86 bp, synthetic construct
  misc_feature 1..86: note = engineered ribonucleic acid scaffold (ERS) sequence
  source 1..86: mol_type = other DNA
actggcgcttctatctgattactctgagcgccatccccagcgactatgtcgtatgggtaaagctcctcttcggaggagcatcagag

SEQ ID NO: 5452 - DNA, 87 bp, synthetic construct
  misc_feature 1..87: note = engineered ribonucleic acid scaffold (ERS) sequence
  source 1..87: mol_type = other DNA
actggcgcttctatctgattactctgagcgccatcgccagcgactatgtcgtatggcgtaaagctcctcttcggaggagcatcagag

SEQ ID NO: 5453 - DNA, 86 bp, synthetic construct
  misc_feature 1..86: note = engineered ribonucleic acid scaffold (ERS) sequence
  source 1..86: mol_type = other DNA
actggcgcttctatctgattactctgagcgccatcgccagcgactatgtcgtatgggtaaagctcctcttcggaggagcatcagag

SEQ ID NO: 5454 - DNA, 86 bp, synthetic construct
  misc_feature 1..86: note = engineered ribonucleic acid scaffold (ERS) sequence
  source 1..86: mol_type = other DNA
actggcgcttctatctgattactctgagcgccatctccagcgactatgtcgtatgggtaaagctcctcttcggaggagcatcagag

SEQ ID NO: 5455 - DNA, 86 bp, synthetic construct
  misc_feature 1..86: note = engineered ribonucleic acid scaffold (ERS) sequence
  source 1..86: mol_type = other DNA
actggcgcttctatctgattactctgagcgccatcacctgcgactatgtcgtaagggtaaagctcctcttcggaggagcatcagag

SEQ ID NO: 5456 - DNA, 86 bp, synthetic construct
  misc_feature 1..86: note = engineered ribonucleic acid scaffold (ERS) sequence
  source 1..86: mol_type = other DNA
actggcgcttctatctgattactctgagcgccatcaccagagactatgtcttatgggtaaagctcctcttcggaggagcatcagag

SEQ ID NO: 5457 - DNA, 86 bp, synthetic construct
  misc_feature 1..86: note = engineered ribonucleic acid scaffold (ERS) sequence
  source 1..86: mol_type = other DNA
actggcgcttctatctgattactctgagcgccatcaccagggactatgtcctatgggtaaagctcctcttcggaggagcatcagag

SEQ ID NO: 5458 - DNA, 87 bp, synthetic construct
  misc_feature 1..87: note = engineered ribonucleic acid scaffold (ERS) sequence
  source 1..87: mol_type = other DNA
actggcgcttctatctgattactctgagcgccatcaccaggcactatgtgctattgggtaaagctcctcttcggaggagcatcagag

SEQ ID NO: 5459 - DNA, 86 bp, synthetic construct
  misc_feature 1..86: note = engineered ribonucleic acid scaffold (ERS) sequence
  source 1..86: mol_type = other DNA
actggcgcttctatctgattactctgagcgccatcaccagccactatgtggtatgggtaaagctcctcttcggaggagcatcagag

SEQ ID NO: 5460 - DNA, 86 bp, synthetic construct
  misc_feature 1..86: note = engineered ribonucleic acid scaffold (ERS) sequence
  source 1..86: mol_type = other DNA
actggcgcttctatctgattactctgagcgccatcaccagctactatgtagtatgggtaaagctcctcttcggaggagcatcagag

SEQ ID NO: 5461 - DNA, 86 bp, synthetic construct
  misc_feature 1..86: note = engineered ribonucleic acid scaffold (ERS) sequence
  source 1..86: mol_type = other DNA
actggcgcttctatctgattactctgagcgccatcaccagcgattatgtcgtatgggtaaagctcctcttcggaggagcatcagag

SEQ ID NO: 5462 - DNA, 86 bp, synthetic construct
  misc_feature 1..86: note = engineered ribonucleic acid scaffold (ERS) sequence
  source 1..86: mol_type = other DNA
actggcgcttctatctgattactctgagcgccatcaccagcgacgatgtcgtatgggtaaagctcctcttcggaggagcatcagag

SEQ ID NO: 5463 - DNA, 86 bp, synthetic construct
  misc_feature 1..86: note = engineered ribonucleic acid scaffold (ERS) sequence
  source 1..86: mol_type = other DNA
actggcgcttctatctgattactctgagcgccatcaccagcgactctgtcgtatgggtaaagctcctcttcggaggagcatcagag

SEQ ID NO: 5464 - DNA, 86 bp, synthetic construct
  misc_feature 1..86: note = engineered ribonucleic acid scaffold (ERS) sequence
  source 1..86: mol_type = other DNA
actggcgcttctatctgattactctgagcgccatcaccagcgactatgtcgtgtgggtaaagctcctcttcggaggagcatcagag

SEQ ID NO: 5465 - DNA, 87 bp, synthetic construct
  misc_feature 1..87: note = engineered ribonucleic acid scaffold (ERS) sequence
  source 1..87: mol_type = other DNA
actggcgcttctatctgattactctgagcgccatcaccagcgactatgtcgtattgggtaaagctcctcttcggaggagcatcagag

SEQ ID NO: 5466 - DNA, 87 bp, synthetic construct
  misc_feature 1..87: note = engineered ribonucleic acid scaffold (ERS) sequence
  source 1..87: mol_type = other DNA
actggcgcttctatctgattactctgagcgccatcaccagcgactatgtcgtatggagtaaagctcctcttcggaggagcatcagag

SEQ ID NO: 5467 - DNA, 87 bp, synthetic construct
  misc_feature 1..87: note = engineered ribonucleic acid scaffold (ERS) sequence
  source 1..87: mol_type = other DNA
actggcgcttctatctgattactctgagcgccatcaccagcgactatgtcgtatggcgtaaagctcctcttcggaggagcatcagag

SEQ ID NO: 5468 - DNA, 87 bp, synthetic construct
  misc_feature 1..87: note = engineered ribonucleic acid scaffold (ERS) sequence
  source 1..87: mol_type = other DNA
actggcgcttctatctgattactctgagcgccatcaccagcgactatgtcgtatggtgtaaagctcctcttcggaggagcatcagag

SEQ ID NO: 5469 - DNA, 87 bp, synthetic construct
  misc_feature 1..87: note = engineered ribonucleic acid scaffold (ERS) sequence
  source 1..87: mol_type = other DNA
actggcgcttctatctgattactctgagcgccatcaccagcgactatgtcgtatgggctaaagctcctcttcggaggagcatcagag

SEQ ID NO: 5470 - DNA, 84 bp, synthetic construct
  misc_feature 1..84: note = engineered ribonucleic acid scaffold (ERS) sequence
  source 1..84: mol_type = other DNA
actggcgcttctatctgattactctgagcgccatcaccagcgactatgtcgtatgggtagctcctcttcggaggagcatcagag

SEQ ID NO: 5471 - DNA, 86 bp, synthetic construct
  misc_feature 1..86: note = engineered ribonucleic acid scaffold (ERS) sequence
  source 1..86: mol_type = other DNA
actggcgcttctatctgattactctgagcgccatcaccagcgactatgtcgtatgggtgaagctcctcttcggaggagcatcagag

SEQ ID NO: 5472 - DNA, 86 bp, synthetic construct
  misc_feature 1..86: note = engineered ribonucleic acid scaffold (ERS) sequence
  source 1..86: mol_type = other DNA
actggcgcttctatctgattactctgagcgccatcaccagcgactatgtcgtatgggtagagctcctcttcggaggagcatcagag

SEQ ID NO: 5473 - DNA, 84 bp, synthetic construct
  misc_feature 1..84: note = engineered ribonucleic acid scaffold (ERS) sequence
  source 1..84: mol_type = other DNA
actggcgcttctatctgattactctgagcgccaacaccagcgactatgtcgtatgggtaaagctctcttcggagagcatcagag

SEQ ID NO: 5474 - DNA, 84 bp, synthetic construct
  misc_feature 1..84: note = engineered ribonucleic acid scaffold (ERS) sequence
  source 1..84: mol_type = other DNA
actggcgcttctatctgattactctgagcgccagcaccagcgactatgtcgtatgggtaaagctctcttcggagagcatcagag

SEQ ID NO: 5475 - DNA, 84 bp, synthetic construct
  misc_feature 1..84: note = engineered ribonucleic acid scaffold (ERS) sequence
  source 1..84: mol_type = other DNA
actggcgcttctatctgattactctgagcgccatgaccagcgactatgtcgtatggctaaagctctcttcggagagcatcagag

SEQ ID NO: 5476 - DNA, 85 bp, synthetic construct
  misc_feature 1..85: note = engineered ribonucleic acid scaffold (ERS) sequence
  source 1..85: mol_type = other DNA
actggcgcttctatctgattactctgagcgccatgaccagcgactatgtcgtatgggctaaagctctcttcggagagcatcagag

SEQ ID NO: 5477 - DNA, 84 bp, synthetic construct
  misc_feature 1..84: note = engineered ribonucleic acid scaffold (ERS) sequence
  source 1..84: mol_type = other DNA
actggcgcttctatctgattactctgagcgccatgaccagcgactatgtcgtatgggtaaagctctcttcggagagcatcagag

SEQ ID NO: 5478 - DNA, 84 bp, synthetic construct
  misc_feature 1..84: note = engineered ribonucleic acid scaffold (ERS) sequence
  source 1..84: mol_type = other DNA
actggcgcttctatctgattactctgagcgccatccccagcgactatgtcgtatgggtaaagctctcttcggagagcatcagag

SEQ ID NO: 5479 - DNA, 85 bp, synthetic construct
  misc_feature 1..85: note = engineered ribonucleic acid scaffold (ERS) sequence
  source 1..85: mol_type = other DNA
actggcgcttctatctgattactctgagcgccatcgccagcgactatgtcgtatggcgtaaagctctcttcggagagcatcagag

SEQ ID NO: 5480 - DNA, 84 bp, synthetic construct
  misc_feature 1..84: note = engineered ribonucleic acid scaffold (ERS) sequence
  source 1..84: mol_type = other DNA
actggcgcttctatctgattactctgagcgccatcgccagcgactatgtcgtatgggtaaagctctcttcggagagcatcagag

SEQ ID NO: 5481 - DNA, 84 bp, synthetic construct
  misc_feature 1..84: note = engineered ribonucleic acid scaffold (ERS) sequence
  source 1..84: mol_type = other DNA
actggcgcttctatctgattactctgagcgccatctccagcgactatgtcgtatgggtaaagctctcttcggagagcatcagag

SEQ ID NO: 5482 - DNA, 84 bp, synthetic construct
  misc_feature 1..84: note = engineered ribonucleic acid scaffold (ERS) sequence
  source 1..84: mol_type = other DNA
actggcgcttctatctgattactctgagcgccatcacctgcgactatgtcgtaagggtaaagctctcttcggagagcatcagag

SEQ ID NO: 5483 - DNA, 84 bp, synthetic construct
  misc_feature 1..84: note = engineered ribonucleic acid scaffold (ERS) sequence
  source 1..84: mol_type = other DNA
actggcgcttctatctgattactctgagcgccatcaccagagactatgtcttatgggtaaagctctcttcggagagcatcagag

SEQ ID NO: 5484 - DNA, 84 bp, synthetic construct
  misc_feature 1..84: note = engineered ribonucleic acid scaffold (ERS) sequence
  source 1..84: mol_type = other DNA
actggcgcttctatctgattactctgagcgccatcaccagggactatgtcctatgggtaaagctctcttcggagagcatcagag

SEQ ID NO: 5485 - DNA, 85 bp, synthetic construct
  misc_feature 1..85: note = engineered ribonucleic acid scaffold (ERS) sequence
  source 1..85: mol_type = other DNA
actggcgcttctatctgattactctgagcgccatcaccaggcactatgtgctattgggtaaagctctcttcggagagcatcagag

SEQ ID NO: 5486 - DNA, 84 bp, synthetic construct
  misc_feature 1..84: note = engineered ribonucleic acid scaffold (ERS) sequence
  source 1..84: mol_type = other DNA
actggcgcttctatctgattactctgagcgccatcaccagccactatgtggtatgggtaaagctctcttcggagagcatcagag

SEQ ID NO: 5487 - DNA, 84 bp, synthetic construct
  misc_feature 1..84: note = engineered ribonucleic acid scaffold (ERS) sequence
  source 1..84: mol_type = other DNA
actggcgcttctatctgattactctgagcgccatcaccagctactatgtagtatgggtaaagctctcttcggagagcatcagag

SEQ ID NO: 5488 - DNA, 84 bp, synthetic construct
  misc_feature 1..84: note = engineered ribonucleic acid scaffold (ERS) sequence
  source 1..84: mol_type = other DNA
actggcgcttctatctgattactctgagcgccatcaccagcgattatgtcgtatgggtaaagctctcttcggagagcatcagag

SEQ ID NO: 5489 - DNA, 84 bp, synthetic construct
  misc_feature 1..84: note = engineered ribonucleic acid scaffold (ERS) sequence
  source 1..84: mol_type = other DNA
actggcgcttctatctgattactctgagcgccatcaccagcgacgatgtcgtatgggtaaagctctcttcggagagcatcagag

SEQ ID NO: 5490 - DNA, 84 bp, synthetic construct
  misc_feature 1..84: note = engineered ribonucleic acid scaffold (ERS) sequence
  source 1..84: mol_type = other DNA
actggcgcttctatctgattactctgagcgccatcaccagcgactctgtcgtatgggtaaagctctcttcggagagcatcagag

SEQ ID NO: 5491 - DNA, 84 bp, synthetic construct
  misc_feature 1..84: note = engineered ribonucleic acid scaffold (ERS) sequence
  source 1..84: mol_type = other DNA
actggcgcttctatctgattactctgagcgccatcaccagcgactatgtcgtgtgggtaaagctctcttcggagagcatcagag

SEQ ID NO: 5492 - DNA, 85 bp, synthetic construct
  misc_feature 1..85: note = engineered ribonucleic acid scaffold (ERS) sequence
  source 1..85: mol_type = other DNA
actggcgcttctatctgattactctgagcgccatcaccagcgactatgtcgtattgggtaaagctctcttcggagagcatcagag

SEQ ID NO: 5493 - DNA, 85 bp, synthetic construct
  misc_feature 1..85: note = engineered ribonucleic acid scaffold (ERS) sequence
  source 1..85: mol_type = other DNA
actggcgcttctatctgattactctgagcgccatcaccagcgactatgtcgtatggagtaaagctctcttcggagagcatcagag

SEQ ID NO: 5494 - DNA, 85 bp, synthetic construct
  misc_feature 1..85: note = engineered ribonucleic acid scaffold (ERS) sequence
  source 1..85: mol_type = other DNA
actggcgcttctatctgattactctgagcgccatcaccagcgactatgtcgtatggcgtaaagctctcttcggagagcatcagag

SEQ ID NO: 5495 - DNA, 85 bp, synthetic construct
  misc_feature 1..85: note = engineered ribonucleic acid scaffold (ERS) sequence
  source 1..85: mol_type = other DNA
actggcgcttctatctgattactctgagcgccatcaccagcgactatgtcgtatggtgtaaagctctcttcggagagcatcagag

SEQ ID NO: 5496 - DNA, 85 bp, synthetic construct
  misc_feature 1..85: note = engineered ribonucleic acid scaffold (ERS) sequence
  source 1..85: mol_type = other DNA
actggcgcttctatctgattactctgagcgccatcaccagcgactatgtcgtatgggctaaagctctcttcggagagcatcagag

SEQ ID NO: 5497 - DNA, 82 bp, synthetic construct
  misc_feature 1..82: note = engineered ribonucleic acid scaffold (ERS) sequence
  source 1..82: mol_type = other DNA
actggcgcttctatctgattactctgagcgccatcaccagcgactatgtcgtatgggtagctctcttcggagagcatcagag

SEQ ID NO: 5498 - DNA, 84 bp, synthetic construct
  misc_feature 1..84: note = engineered ribonucleic acid scaffold (ERS) sequence
  source 1..84: mol_type = other DNA
actggcgcttctatctgattactctgagcgccatcaccagcgactatgtcgtatgggtgaagctctcttcggagagcatcagag

SEQ ID NO: 5499 - DNA, 84 bp, synthetic construct
  misc_feature 1..84: note = engineered ribonucleic acid scaffold (ERS) sequence
  source 1..84: mol_type = other DNA
actggcgcttctatctgattactctgagcgccatcaccagcgactatgtcgtatgggtagagctctcttcggagagcatcagag

SEQ ID NO: 5500 - DNA, 76 bp, synthetic construct
  misc_feature 1..76: note = engineered ribonucleic acid scaffold (ERS) sequence
  source 1..76: mol_type = other DNA
actggcgcttctatctgattactctgagcgccaacaccagcgactatgtcgtatgggtaaagctgcagcatcagag

SEQ ID NO: 5501 - DNA, 76 bp, synthetic construct
  misc_feature 1..76: note = engineered ribonucleic acid scaffold (ERS) sequence
  source 1..76: mol_type = other DNA
actggcgcttctatctgattactctgagcgccagcaccagcgactatgtcgtatgggtaaagctgcagcatcagag

SEQ ID NO: 5502 - DNA, 76 bp, synthetic construct
  misc_feature 1..76: note = engineered ribonucleic acid scaffold (ERS) sequence
  source 1..76: mol_type = other DNA
actggcgcttctatctgattactctgagcgccatgaccagcgactatgtcgtatggctaaagctgcagcatcagag

SEQ ID NO: 5503 - DNA, 77 bp, synthetic construct
  misc_feature 1..77: note = engineered ribonucleic acid scaffold (ERS) sequence
  source 1..77: mol_type = other DNA
actggcgcttctatctgattactctgagcgccatgaccagcgactatgtcgtatgggctaaagctgcagcatcagag

SEQ ID NO: 5504 - DNA, 76 bp, synthetic construct
  misc_feature 1..76: note = engineered ribonucleic acid scaffold (ERS) sequence
  source 1..76: mol_type = other DNA
actggcgcttctatctgattactctgagcgccatgaccagcgactatgtcgtatgggtaaagctgcagcatcagag

SEQ ID NO: 5505 - DNA, 76 bp, synthetic construct
  misc_feature 1..76: note = engineered ribonucleic acid scaffold (ERS) sequence
  source 1..76: mol_type = other DNA
actggcgcttctatctgattactctgagcgccatccccagcgactatgtcgtatgggtaaagctgcagcatcagag

SEQ ID NO: 5506 - DNA, 77 bp, synthetic construct
  misc_feature 1..77: note = engineered ribonucleic acid scaffold (ERS) sequence
  source 1..77: mol_type = other DNA
actggcgcttctatctgattactctgagcgccatcgccagcgactatgtcgtatggcgtaaagctgcagcatcagag

SEQ ID NO: 5507 - DNA, 76 bp, synthetic construct
  misc_feature 1..76: note = engineered ribonucleic acid scaffold (ERS) sequence
  source 1..76: mol_type = other DNA
actggcgcttctatctgattactctgagcgccatcgccagcgactatgtcgtatgggtaaagctgcagcatcagag

SEQ ID NO: 5508 - DNA, 76 bp, synthetic construct
  misc_feature 1..76: note = engineered ribonucleic acid scaffold (ERS) sequence
  source 1..76: mol_type = other DNA
actggcgcttctatctgattactctgagcgccatctccagcgactatgtcgtatgggtaaagctgcagcatcagag

SEQ ID NO: 5509 - DNA, 76 bp, synthetic construct
  misc_feature 1..76: note = engineered ribonucleic acid scaffold (ERS) sequence
  source 1..76: mol_type = other DNA
actggcgcttctatctgattactctgagcgccatcacctgcgactatgtcgtaagggtaaagctgcagcatcagag

SEQ ID NO: 5510 - DNA, 76 bp, synthetic construct
  misc_feature 1..76: note = engineered ribonucleic acid scaffold (ERS) sequence
  source 1..76: mol_type = other DNA
actggcgcttctatctgattactctgagcgccatcaccagagactatgtcttatgggtaaagctgcagcatcagag

SEQ ID NO: 5511 - DNA, 76 bp, synthetic construct
  misc_feature 1..76: note = engineered ribonucleic acid scaffold (ERS) sequence
  source 1..76: mol_type = other DNA
actggcgcttctatctgattactctgagcgccatcaccagggactatgtcctatgggtaaagctgcagcatcagag

SEQ ID NO: 5512 - DNA, 77 bp, synthetic construct
  misc_feature 1..77: note = engineered ribonucleic acid scaffold (ERS) sequence
  source 1..77: mol_type = other DNA
actggcgcttctatctgattactctgagcgccatcaccaggcactatgtgctattgggtaaagctgcagcatcagag

SEQ ID NO: 5513 - DNA, 76 bp, synthetic construct
  misc_feature 1..76: note = engineered ribonucleic acid scaffold (ERS) sequence
  source 1..76: mol_type = other DNA
actggcgcttctatctgattactctgagcgccatcaccagccactatgtggtatgggtaaagctgcagcatcagag

SEQ ID NO: 5514 - DNA, 76 bp, synthetic construct
  misc_feature 1..76: note = engineered ribonucleic acid scaffold (ERS) sequence
  source 1..76: mol_type = other DNA
actggcgcttctatctgattactctgagcgccatcaccagctactatgtagtatgggtaaagctgcagcatcagag

SEQ ID NO: 5515 - DNA, 76 bp, synthetic construct
  misc_feature 1..76: note = engineered ribonucleic acid scaffold (ERS) sequence
  source 1..76: mol_type = other DNA
actggcgcttctatctgattactctgagcgccatcaccagcgattatgtcgtatgggtaaagctgcagcatcagag

SEQ ID NO: 5516 - DNA, 76 bp, synthetic construct
  misc_feature 1..76: note = engineered ribonucleic acid scaffold (ERS) sequence
  source 1..76: mol_type = other DNA
actggcgcttctatctgattactctgagcgccatcaccagcgacgatgtcgtatgggtaaagctgcagcatcagag

SEQ ID NO: 5517 - DNA, 76 bp, synthetic construct
  misc_feature 1..76: note = engineered ribonucleic acid scaffold (ERS) sequence
  source 1..76: mol_type = other DNA
actggcgcttctatctgattactctgagcgccatcaccagcgactctgtcgtatgggtaaagctgcagcatcagag

SEQ ID NO: 5518 - DNA, 76 bp, synthetic construct
  misc_feature 1..76: note = engineered ribonucleic acid scaffold (ERS) sequence
  source 1..76: mol_type = other DNA
actggcgcttctatctgattactctgagcgccatcaccagcgactatgtcgtgtgggtaaagctgcagcatcagag

SEQ ID NO: 5519 - DNA, 77 bp, synthetic construct
  misc_feature 1..77: note = engineered ribonucleic acid scaffold (ERS) sequence
  source 1..77: mol_type = other DNA
actggcgcttctatctgattactctgagcgccatcaccagcgactatgtcgtattgggtaaagctgcagcatcagag

SEQ ID NO: 5520 - DNA, 77 bp, synthetic construct
  misc_feature 1..77: note = engineered ribonucleic acid scaffold (ERS) sequence
  source 1..77: mol_type = other DNA
actggcgcttctatctgattactctgagcgccatcaccagcgactatgtcgtatggagtaaagctgcagcatcagag

SEQ ID NO: 5521 - DNA, 77 bp, synthetic construct
  misc_feature 1..77: note = engineered ribonucleic acid scaffold (ERS) sequence
  source 1..77: mol_type = other DNA
actggcgcttctatctgattactctgagcgccatcaccagcgactatgtcgtatggcgtaaagctgcagcatcagag

SEQ ID NO: 5522 - DNA, 77 bp, synthetic construct
  misc_feature 1..77: note = engineered ribonucleic acid scaffold (ERS) sequence
  source 1..77: mol_type = other DNA
actggcgcttctatctgattactctgagcgccatcaccagcgactatgtcgtatggtgtaaagctgcagcatcagag

SEQ ID NO: 5523 - DNA, 77 bp, synthetic construct
  misc_feature 1..77: note = engineered ribonucleic acid scaffold (ERS) sequence
  source 1..77: mol_type = other DNA
actggcgcttctatctgattactctgagcgccatcaccagcgactatgtcgtatgggctaaagctgcagcatcagag

SEQ ID NO: 5524 - DNA, 74 bp, synthetic construct
  misc_feature 1..74: note = engineered ribonucleic acid scaffold (ERS) sequence
  source 1..74: mol_type = other DNA
actggcgcttctatctgattactctgagcgccatcaccagcgactatgtcgtatgggtagctgcagcatcagag

SEQ ID NO: 5525 - DNA, 76 bp, synthetic construct
  misc_feature 1..76: note = engineered ribonucleic acid scaffold (ERS) sequence
  source 1..76: mol_type = other DNA
actggcgcttctatctgattactctgagcgccatcaccagcgactatgtcgtatgggtgaagctgcagcatcagag

SEQ ID NO: 5526 - DNA, 76 bp, synthetic construct
  misc_feature 1..76: note = engineered ribonucleic acid scaffold (ERS) sequence
  source 1..76: mol_type = other DNA
actggcgcttctatctgattactctgagcgccatcaccagcgactatgtcgtatgggtagagctgcagcatcagag

SEQ ID NO: 5527 - DNA, 82 bp, synthetic construct
  misc_feature 1..82: note = engineered ribonucleic acid scaffold (ERS) sequence
  source 1..82: mol_type = other DNA
actggcgcttctatctgattactctgagcgccaacaccagcgactatgtcgtatgggtaaagctgcttcggcagcatcagag

SEQ ID NO: 5528 - DNA, 82 bp, synthetic construct
  misc_feature 1..82: note = engineered ribonucleic acid scaffold (ERS) sequence
  source 1..82: mol_type = other DNA
actggcgcttctatctgattactctgagcgccagcaccagcgactatgtcgtatgggtaaagctgcttcggcagcatcagag

SEQ ID NO: 5529 - DNA, 82 bp, synthetic construct
  misc_feature 1..82: note = engineered ribonucleic acid scaffold (ERS) sequence
  source 1..82: mol_type = other DNA
actggcgcttctatctgattactctgagcgccatgaccagcgactatgtcgtatggctaaagctgcttcggcagcatcagag

SEQ ID NO: 5530 - DNA, 83 bp, synthetic construct
  misc_feature 1..83: note = engineered ribonucleic acid scaffold (ERS) sequence
  source 1..83: mol_type = other DNA
actggcgcttctatctgattactctgagcgccatgaccagcgactatgtcgtatgggctaaagctgcttcggcagcatcagag

SEQ ID NO: 5531 - DNA, 82 bp, synthetic construct
  misc_feature 1..82: note = engineered ribonucleic acid scaffold (ERS) sequence
  source 1..82: mol_type = other DNA
actggcgcttctatctgattactctgagcgccatgaccagcgactatgtcgtatgggtaaagctgcttcggcagcatcagag

SEQ ID NO: 5532 - DNA, 82 bp, synthetic construct
  misc_feature 1..82: note = engineered ribonucleic acid scaffold (ERS) sequence
  source 1..82: mol_type = other DNA
actggcgcttctatctgattactctgagcgccatccccagcgactatgtcgtatgggtaaagctgcttcggcagcatcagag

SEQ ID NO: 5533 - DNA, 83 bp, synthetic construct
  misc_feature 1..83: note = engineered ribonucleic acid scaffold (ERS) sequence
  source 1..83: mol_type = other DNA
actggcgcttctatctgattactctgagcgccatcgccagcgactatgtcgtatggcgtaaagctgcttcggcagcatcagag

SEQ ID NO: 5534 - DNA, 82 bp, synthetic construct
  misc_feature 1..82: note = engineered ribonucleic acid scaffold (ERS) sequence
  source 1..82: mol_type = other DNA
actggcgcttctatctgattactctgagcgccatcgccagcgactatgtcgtatgggtaaagctgcttcggcagcatcagag

SEQ ID NO: 5535 - DNA, 82 bp, synthetic construct
  misc_feature 1..82: note = engineered ribonucleic acid scaffold (ERS) sequence
  source 1..82: mol_type = other DNA
actggcgcttctatctgattactctgagcgccatctccagcgactatgtcgtatgggtaaagctgcttcggcagcatcagag

SEQ ID NO: 5536 - DNA, 82 bp, synthetic construct
  misc_feature 1..82: note = engineered ribonucleic acid scaffold (ERS) sequence
  source 1..82: mol_type = other DNA
actggcgcttctatctgattactctgagcgccatcacctgcgactatgtcgtaagggtaaagctgcttcggcagcatcagag

SEQ ID NO: 5537 - DNA, 82 bp, synthetic construct
  misc_feature 1..82: note = engineered ribonucleic acid scaffold (ERS) sequence
  source 1..82: mol_type = other DNA
actggcgcttctatctgattactctgagcgccatcaccagagactatgtcttatgggtaaagctgcttcggcagcatcagag

SEQ ID NO: 5538 - DNA, 82 bp, synthetic construct
  misc_feature 1..82: note = engineered ribonucleic acid scaffold (ERS) sequence
  source 1..82: mol_type = other DNA
actggcgcttctatctgattactctgagcgccatcaccagggactatgtcctatgggtaaagctgcttcggcagcatcagag

SEQ ID NO: 5539 - DNA, 83 bp, synthetic construct
  misc_feature 1..83: note = engineered ribonucleic acid scaffold (ERS) sequence
  source 1..83: mol_type = other DNA
actggcgcttctatctgattactctgagcgccatcaccaggcactatgtgctattgggtaaagctgcttcggcagcatcagag

SEQ ID NO: 5540 - DNA, 82 bp, synthetic construct
  misc_feature 1..82: note = engineered ribonucleic acid scaffold (ERS) sequence
  source 1..82: mol_type = other DNA
actggcgcttctatctgattactctgagcgccatcaccagccactatgtggtatgggtaaagctgcttcggcagcatcagag

SEQ ID NO: 5541 - DNA, 82 bp, synthetic construct
  misc_feature 1..82: note = engineered ribonucleic acid scaffold (ERS) sequence
  source 1..82: mol_type = other DNA
actggcgcttctatctgattactctgagcgccatcaccagctactatgtagtatgggtaaagctgcttcggcagcatcagag

SEQ ID NO: 5542 - DNA, 82 bp, synthetic construct
  misc_feature 1..82: note = engineered ribonucleic acid scaffold (ERS) sequence
  source 1..82: mol_type = other DNA
actggcgcttctatctgattactctgagcgccatcaccagcgattatgtcgtatgggtaaagctgcttcggcagcatcagag

SEQ ID NO: 5543 - DNA, 82 bp, synthetic construct
  misc_feature 1..82: note = engineered ribonucleic acid scaffold (ERS) sequence
  source 1..82: mol_type = other DNA
actggcgcttctatctgattactctgagcgccatcaccagcgacgatgtcgtatgggtaaagctgcttcggcagcatcagag

SEQ ID NO: 5544 - DNA, 82 bp, synthetic construct
  misc_feature 1..82: note = engineered ribonucleic acid scaffold (ERS) sequence
  source 1..82: mol_type = other DNA
actggcgcttctatctgattactctgagcgccatcaccagcgactctgtcgtatgggtaaagctgcttcggcagcatcagag

SEQ ID NO: 5545 - DNA, 82 bp, synthetic construct
  misc_feature 1..82: note = engineered ribonucleic acid scaffold (ERS) sequence
  source 1..82: mol_type = other DNA
actggcgcttctatctgattactctgagcgccatcaccagcgactatgtcgtgtgggtaaagctgcttcggcagcatcagag

SEQ ID NO: 5546 - DNA, 83 bp, synthetic construct
  misc_feature 1..83: note = engineered ribonucleic acid scaffold (ERS) sequence
  source 1..83: mol_type = other DNA
actggcgcttctatctgattactctgagcgccatcaccagcgactatgtcgtattgggtaaagctgcttcggcagcatcagag

SEQ ID NO: 5547 - DNA, 83 bp, synthetic construct
  misc_feature 1..83: note = engineered ribonucleic acid scaffold (ERS) sequence
  source 1..83: mol_type = other DNA
actggcgcttctatctgattactctgagcgccatcaccagcgactatgtcgtatggagtaaagctgcttcggcagcatcagag

SEQ ID NO: 5548 - DNA, 83 bp, synthetic construct
  misc_feature 1..83: note = engineered ribonucleic acid scaffold (ERS) sequence
  source 1..83: mol_type = other DNA
actggcgcttctatctgattactctgagcgccatcaccagcgactatgtcgtatggcgtaaagctgcttcggcagcatcagag

SEQ ID NO: 5549 - DNA, 83 bp, synthetic construct
  misc_feature 1..83: note = engineered ribonucleic acid scaffold (ERS) sequence
  source 1..83: mol_type = other DNA
actggcgcttctatctgattactctgagcgccatcaccagcgactatgtcgtatggtgtaaagctgcttcggcagcatcagag

SEQ ID NO: 5550 - DNA, 83 bp, synthetic construct
  misc_feature 1..83: note = engineered ribonucleic acid scaffold (ERS) sequence
  source 1..83: mol_type = other DNA
actggcgcttctatctgattactctgagcgccatcaccagcgactatgtcgtatgggctaaagctgcttcggcagcatcagag

SEQ ID NO: 5551 - DNA, 80 bp, synthetic construct
  misc_feature 1..80: note = engineered ribonucleic acid scaffold (ERS) sequence
  source 1..80: mol_type = other DNA
actggcgcttctatctgattactctgagcgccatcaccagcgactatgtcgtatgggtagctgcttcggcagcatcagag

SEQ ID NO: 5552 - DNA, 82 bp, synthetic construct
  misc_feature 1..82: note = engineered ribonucleic acid scaffold (ERS) sequence
  source 1..82: mol_type = other DNA
actggcgcttctatctgattactctgagcgccatcaccagcgactatgtcgtatgggtgaagctgcttcggcagcatcagag

SEQ ID NO: 5553 - DNA, 82 bp, synthetic construct
  misc_feature 1..82: note = engineered ribonucleic acid scaffold (ERS) sequence
  source 1..82: mol_type = other DNA
actggcgcttctatctgattactctgagcgccatcaccagcgactatgtcgtatgggtagagctgcttcggcagcatcagag

SEQ ID NO: 5554 - DNA, 88 bp, synthetic construct
  misc_feature 1..88: note = engineered ribonucleic acid scaffold (ERS) sequence
  source 1..88: mol_type = other DNA
actggcgcttctatctgattactctgagcgccaacaccagcgactatgtcgtatgggtaaaggtccctcttcggagggaacatcagag

SEQ ID NO: 5555 - DNA, 88 bp, synthetic construct
  misc_feature 1..88: note = engineered ribonucleic acid scaffold (ERS) sequence
  source 1..88: mol_type = other DNA
actggcgcttctatctgattactctgagcgccagcaccagcgactatgtcgtatgggtaaaggtccctcttcggagggaacatcagag

SEQ ID NO: 5556 - DNA, 88 bp, synthetic construct
  misc_feature 1..88: note = engineered ribonucleic acid scaffold (ERS) sequence
  source 1..88: mol_type = other DNA
actggcgcttctatctgattactctgagcgccatgaccagcgactatgtcgtatggctaaaggtccctcttcggagggaacatcagag

SEQ ID NO: 5557 - DNA, 89 bp, synthetic construct
  misc_feature 1..89: note = engineered ribonucleic acid scaffold (ERS) sequence
  source 1..89: mol_type = other DNA
actggcgcttctatctgattactctgagcgccatgaccagcgactatgtcgtatgggctaaaggtccctcttcggagggaacatcagag

SEQ ID NO: 5558 - DNA, 88 bp, synthetic construct
  misc_feature 1..88: note = engineered ribonucleic acid scaffold (ERS) sequence
  source 1..88: mol_type = other DNA
actggcgcttctatctgattactctgagcgccatgaccagcgactatgtcgtatgggtaaaggtccctcttcggagggaacatcagag

SEQ ID NO: 5559 - DNA, 88 bp, synthetic construct
  misc_feature 1..88: note = engineered ribonucleic acid scaffold (ERS) sequence
  source 1..88: mol_type = other DNA
actggcgcttctatctgattactctgagcgccatccccagcgactatgtcgtatgggtaaaggtccctcttcggagggaacatcagag

SEQ ID NO: 5560 - DNA, 89 bp, synthetic construct
  misc_feature 1..89: note = engineered ribonucleic acid scaffold (ERS) sequence
  source 1..89: mol_type = other DNA
actggcgcttctatctgattactctgagcgccatcgccagcgactatgtcgtatggcgtaaaggtccctcttcggagggaacatcagag

SEQ ID NO: 5561 - DNA, 88 bp, synthetic construct
  misc_feature 1..88: note = engineered ribonucleic acid scaffold (ERS) sequence
  source 1..88: mol_type = other DNA
actggcgcttctatctgattactctgagcgccatcgccagcgactatgtcgtatgggtaaaggtccctcttcggagggaacatcagag

SEQ ID NO: 5562 - DNA, 88 bp, synthetic construct
  misc_feature 1..88: note = engineered ribonucleic acid scaffold (ERS) sequence
  source 1..88: mol_type = other DNA
actggcgcttctatctgattactctgagcgccatctccagcgactatgtcgtatgggtaaaggtccctcttcggagggaacatcagag

SEQ ID NO: 5563 - DNA, 88 bp, synthetic construct
  misc_feature 1..88: note = engineered ribonucleic acid scaffold (ERS) sequence
  source 1..88: mol_type = other DNA
actggcgcttctatctgattactctgagcgccatcacctgcgactatgtcgtaagggtaaaggtccctcttcggagggaacatcagag

SEQ ID NO: 5564 - DNA, 88 bp, synthetic construct
  misc_feature 1..88: note = engineered ribonucleic acid scaffold (ERS) sequence
  source 1..88: mol_type = other DNA
actggcgcttctatctgattactctgagcgccatcaccagagactatgtcttatgggtaaaggtccctcttcggagggaacatcagag

SEQ ID NO: 5565 - DNA, 88 bp, synthetic construct
  misc_feature 1..88: note = engineered ribonucleic acid scaffold (ERS) sequence
  source 1..88: mol_type = other DNA
actggcgcttctatctgattactctgagcgccatcaccagggactatgtcctatgggtaaaggtccctcttcggagggaacatcagag

SEQ ID NO: 5566 - DNA, 89 bp, synthetic construct
  misc_feature 1..89: note = engineered ribonucleic acid scaffold (ERS) sequence
  source 1..89: mol_type = other DNA
actggcgcttctatctgattactctgagcgccatcaccaggcactatgtgctattgggtaaaggtccctcttcggagggaacatcagag

SEQ ID NO: 5567 - DNA, 88 bp, synthetic construct
  misc_feature 1..88: note = engineered ribonucleic acid scaffold (ERS) sequence
  source 1..88: mol_type = other DNA
actggcgcttctatctgattactctgagcgccatcaccagccactatgtggtatgggtaaaggtccctcttcggagggaacatcagag

SEQ ID NO: 5568 - DNA, 88 bp, synthetic construct
  misc_feature 1..88: note = engineered ribonucleic acid scaffold (ERS) sequence
  source 1..88: mol_type = other DNA
actggcgcttctatctgattactctgagcgccatcaccagctactatgtagtatgggtaaaggtccctcttcggagggaacatcagag

SEQ ID NO: 5569 - DNA, 88 bp, synthetic construct
  misc_feature 1..88: note = engineered ribonucleic acid scaffold (ERS) sequence
  source 1..88: mol_type = other DNA
actggcgcttctatctgattactctgagcgccatcaccagcgattatgtcgtatgggtaaaggtccctcttcggagggaacatcagag

SEQ ID NO: 5570 - DNA, 88 bp, synthetic construct
  misc_feature 1..88: note = engineered ribonucleic acid scaffold (ERS) sequence
  source 1..88: mol_type = other DNA
actggcgcttctatctgattactctgagcgccatcaccagcgacgatgtcgtatgggtaaaggtccctcttcggagggaacatcagag

SEQ ID NO: 5571 - DNA, 88 bp, synthetic construct
  misc_feature 1..88: note = engineered ribonucleic acid scaffold (ERS) sequence
  source 1..88: mol_type = other DNA
actggcgcttctatctgattactctgagcgccatcaccagcgactctgtcgtatgggtaaaggtccctcttcggagggaacatcagag

SEQ ID NO: 5572 - DNA, 88 bp, synthetic construct
  misc_feature 1..88: note = engineered ribonucleic acid scaffold (ERS) sequence
  source 1..88: mol_type = other DNA
actggcgcttctatctgattactctgagcgccatcaccagcgactatgtcgtgtgggtaaaggtccctcttcggagggaacatcagag

SEQ ID NO: 5573 - DNA, 89 bp, synthetic construct
  misc_feature 1..89: note = engineered ribonucleic acid scaffold (ERS) sequence
  source 1..89: mol_type = other DNA
actggcgcttctatctgattactctgagcgccatcaccagcgactatgtcgtattgggtaaaggtccctcttcggagggaacatcagag

SEQ ID NO: 5574 - DNA, 89 bp, synthetic construct
  misc_feature 1..89: note = engineered ribonucleic acid scaffold (ERS) sequence
  source 1..89: mol_type = other DNA
actggcgcttctatctgattactctgagcgccatcaccagcgactatgtcgtatggagtaaaggtccctcttcggagggaacatcagag

SEQ ID NO: 5575 - DNA, 89 bp, synthetic construct
  misc_feature 1..89: note = engineered ribonucleic acid scaffold (ERS) sequence
  source 1..89: mol_type = other DNA
actggcgcttctatctgattactctgagcgccatcaccagcgactatgtcgtatggcgtaaaggtccctcttcggagggaacatcagag

SEQ ID NO: 5576 - DNA, 89 bp, synthetic construct
  misc_feature 1..89: note = engineered ribonucleic acid scaffold (ERS) sequence
  source 1..89: mol_type = other DNA
actggcgcttctatctgattactctgagcgccatcaccagcgactatgtcgtatggtgtaaaggtccctcttcggagggaacatcagag

SEQ ID NO: 5577 - DNA, 89 bp, synthetic construct
  misc_feature 1..89: note = engineered ribonucleic acid scaffold (ERS) sequence
  source 1..89: mol_type = other DNA
actggcgcttctatctgattactctgagcgccatcaccagcgactatgtcgtatgggctaaaggtccctcttcggagggaacatcagag

SEQ ID NO: 5578 - DNA, 86 bp, synthetic construct
  misc_feature 1..86: note = engineered ribonucleic acid scaffold (ERS) sequence
  source 1..86: mol_type = other DNA
actggcgcttctatctgattactctgagcgccatcaccagcgactatgtcgtatgggtaggtccctcttcggagggaacatcagag

SEQ ID NO: 5579 - DNA, 88 bp, synthetic construct
  misc_feature 1..88: note = engineered ribonucleic acid scaffold (ERS) sequence
  source 1..88: mol_type = other DNA
actggcgcttctatctgattactctgagcgccatcaccagcgactatgtcgtatgggtgaaggtccctcttcggagggaacatcagag

SEQ ID NO: 5580 - DNA, 88 bp, synthetic construct
  misc_feature 1..88: note = engineered ribonucleic acid scaffold (ERS) sequence
  source 1..88: mol_type = other DNA
actggcgcttctatctgattactctgagcgccatcaccagcgactatgtcgtatgggtagaggtccctcttcggagggaacatcagag

SEQ ID NO: 5581 - DNA, 92 bp, synthetic construct
  misc_feature 1..92: note = engineered ribonucleic acid scaffold (ERS) sequence
  source 1..92: mol_type = other DNA
actggcgcttctatctgattactctgagcgccaacaccagcgactatgtcgtatgggtaaaggtgacggtcttcggaccgtcaccatcagag

SEQ ID NO: 5582 - DNA, 92 bp, synthetic construct
  misc_feature 1..92: note = engineered ribonucleic acid scaffold (ERS) sequence
  source 1..92: mol_type = other DNA
actggcgcttctatctgattactctgagcgccagcaccagcgactatgtcgtatgggtaaaggtgacggtcttcggaccgtcaccatcagag

SEQ ID NO: 5583 - DNA, 92 bp, synthetic construct
  misc_feature 1..92: note = engineered ribonucleic acid scaffold (ERS) sequence
  source 1..92: mol_type = other DNA
actggcgcttctatctgattactctgagcgccatgaccagcgactatgtcgtatggctaaaggtgacggtcttcggaccgtcaccatcagag

SEQ ID NO: 5584 - DNA, 93 bp, synthetic construct
  misc_feature 1..93: note = engineered ribonucleic acid scaffold (ERS) sequence
  source 1..93: mol_type = other DNA
actggcgcttctatctgattactctgagcgccatgaccagcgactatgtcgtatgggctaaaggtgacggtcttcggaccgtcaccatcagag

SEQ ID NO: 5585 - DNA, 92 bp, synthetic construct
  misc_feature 1..92: note = engineered ribonucleic acid scaffold (ERS) sequence
  source 1..92: mol_type = other DNA
actggcgcttctatctgattactctgagcgccatgaccagcgactatgtcgtatgggtaaaggtgacggtcttcggaccgtcaccatcagag

SEQ ID NO: 5586 - DNA, 92 bp, synthetic construct
  misc_feature 1..92: note = engineered ribonucleic acid scaffold (ERS) sequence
  source 1..92: mol_type = other DNA
actggcgcttctatctgattactctgagcgccatccccagcgactatgtcgtatgggtaaaggtgacggtcttcggaccgtcaccatcagag

SEQ ID NO: 5587 - DNA, 93 bp, synthetic construct
  misc_feature 1..93: note = engineered ribonucleic acid scaffold (ERS) sequence
  source 1..93: mol_type = other DNA
actggcgcttctatctgattactctgagcgccatcgccagcgactatgtcgtatggcgtaaaggtgacggtcttcggaccgtcaccatcagag

SEQ ID NO: 5588 - DNA, 92 bp, synthetic construct
  misc_feature 1..92: note = engineered ribonucleic acid scaffold (ERS) sequence
  source 1..92: mol_type = other DNA
actggcgcttctatctgattactctgagcgccatcgccagcgactatgtcgtatgggtaaaggtgacggtcttcggaccgtcaccatcagag

SEQ ID NO: 5589 - DNA, 92 bp, synthetic construct
  misc_feature 1..92: note = engineered ribonucleic acid scaffold (ERS) sequence
  source 1..92: mol_type = other DNA
actggcgcttctatctgattactctgagcgccatctccagcgactatgtcgtatgggtaaaggtgacggtcttcggaccgtcaccatcagag

SEQ ID NO: 5590 - DNA, 92 bp, synthetic construct
  misc_feature 1..92: note = engineered ribonucleic acid scaffold (ERS) sequence
  source 1..92: mol_type = other DNA
actggcgcttctatctgattactctgagcgccatcacctgcgactatgtcgtaagggtaaaggtgacggtcttcggaccgtcaccatcagag

SEQ ID NO: 5591 - DNA, 92 bp, synthetic construct
  misc_feature 1..92: note = engineered ribonucleic acid scaffold (ERS) sequence
  source 1..92: mol_type = other DNA
actggcgcttctatctgattactctgagcgccatcaccagagactatgtcttatgggtaaaggtgacggtcttcggaccgtcaccatcagag

SEQ ID NO: 5592 - DNA, 92 bp, synthetic construct
  misc_feature 1..92: note = engineered ribonucleic acid scaffold (ERS) sequence
  source 1..92: mol_type = other DNA
actggcgcttctatctgattactctgagcgccatcaccagggactatgtcctatgggtaaaggtgacggtcttcggaccgtcaccatcagag

SEQ ID NO: 5593 - DNA, 93 bp, synthetic construct
  misc_feature 1..93: note = engineered ribonucleic acid scaffold (ERS) sequence
  source 1..93: mol_type = other DNA
actggcgcttctatctgattactctgagcgccatcaccaggcactatgtgctattgggtaaaggtgacggtcttcggaccgtcaccatcagag

SEQ ID NO: 5594 - DNA, 92 bp, synthetic construct
  misc_feature 1..92: note = engineered ribonucleic acid scaffold (ERS) sequence
  source 1..92: mol_type = other DNA
actggcgcttctatctgattactctgagcgccatcaccagccactatgtggtatgggtaaaggtgacggtcttcggaccgtcaccatcagag

SEQ ID NO: 5595 - DNA, 92 bp, synthetic construct
  misc_feature 1..92: note = engineered ribonucleic acid scaffold (ERS) sequence
  source 1..92: mol_type = other DNA
actggcgcttctatctgattactctgagcgccatcaccagctactatgtagtatgggtaaaggtgacggtcttcggaccgtcaccatcagag

SEQ ID NO: 5596 - DNA, 92 bp, synthetic construct
  misc_feature 1..92: note = engineered ribonucleic acid scaffold (ERS) sequence
  source 1..92: mol_type = other DNA
actggcgcttctatctgattactctgagcgccatcaccagcgattatgtcgtatgggtaaaggtgacggtcttcggaccgtcaccatcagag

SEQ ID NO: 5597 - DNA, 92 bp, synthetic construct
  misc_feature 1..92: note = engineered ribonucleic acid scaffold (ERS) sequence
  source 1..92: mol_type = other DNA
actggcgcttctatctgattactctgagcgccatcaccagcgacgatgtcgtatgggtaaaggtgacggtcttcggaccgtcaccatcagag

SEQ ID NO: 5598 - DNA, 92 bp, synthetic construct
  misc_feature 1..92: note = engineered ribonucleic acid scaffold (ERS) sequence
  source 1..92: mol_type = other DNA
actggcgcttctatctgattactctgagcgccatcaccagcgactctgtcgtatgggtaaaggtgacggtcttcggaccgtcaccatcagag

SEQ ID NO: 5599 - DNA, 92 bp, synthetic construct
  misc_feature 1..92: note = engineered ribonucleic acid scaffold (ERS) sequence
  source 1..92: mol_type = other DNA
actggcgcttctatctgattactctgagcgccatcaccagcgactatgtcgtgtgggtaaaggtgacggtcttcggaccgtcaccatcagag

SEQ ID NO: 5600 - DNA, 93 bp, synthetic construct
  misc_feature 1..93: note = engineered ribonucleic acid scaffold (ERS) sequence
  source 1..93: mol_type = other DNA
actggcgcttctatctgattactctgagcgccatcaccagcgactatgtcgtattgggtaaaggtgacggtcttcggaccgtcaccatcagag

SEQ ID NO: 5601 - DNA, 93 bp, synthetic construct
  misc_feature 1..93: note = engineered ribonucleic acid scaffold (ERS) sequence
  source 1..93: mol_type = other DNA
actggcgcttctatctgattactctgagcgccatcaccagcgactatgtcgtatggagtaaaggtgacggtcttcggaccgtcaccatcagag

SEQ ID NO: 5602 - DNA, 93 bp, synthetic construct
  misc_feature 1..93: note = engineered ribonucleic acid scaffold (ERS) sequence
  source 1..93: mol_type = other DNA
actggcgcttctatctgattactctgagcgccatcaccagcgactatgtcgtatggcgtaaaggtgacggtcttcggaccgtcaccatcagag

SEQ ID NO: 5603 - DNA, 93 bp, synthetic construct
  misc_feature 1..93: note = engineered ribonucleic acid scaffold (ERS) sequence
  source 1..93: mol_type = other DNA
actggcgcttctatctgattactctgagcgccatcaccagcgactatgtcgtatggtgtaaaggtgacggtcttcggaccgtcaccatcagag

SEQ ID NO: 5604 - DNA, 93 bp, synthetic construct
  misc_feature 1..93: note = engineered ribonucleic acid scaffold (ERS) sequence
  source 1..93: mol_type = other DNA
actggcgcttctatctgattactctgagcgccatcaccagcgactatgtcgtatgggctaaaggtgacggtcttcggaccgtcaccatcagag

SEQ ID NO: 5605 - DNA, 90 bp, synthetic construct
  misc_feature 1..90: note = engineered ribonucleic acid scaffold (ERS) sequence
  source 1..90: mol_type = other DNA
actggcgcttctatctgattactctgagcgccatcaccagcgactatgtcgtatgggtaggtgacggtcttcggaccgtcaccatcagag

SEQ ID NO: 5606 - DNA, 92 bp, synthetic construct
  misc_feature 1..92: note = engineered ribonucleic acid scaffold (ERS) sequence
  source 1..92: mol_type = other DNA
actggcgcttctatctgattactctgagcgccatcaccagcgactatgtcgtatgggtgaaggtgacggtcttcggaccgtcaccatcagag

SEQ ID NO: 5607 - DNA, 92 bp, synthetic construct
  misc_feature 1..92: note = engineered ribonucleic acid scaffold (ERS) sequence
  source 1..92: mol_type = other DNA
actggcgcttctatctgattactctgagcgccatcaccagcgactatgtcgtatgggtagaggtgacggtcttcggaccgtcaccatcagag

SEQ ID NO: 5608 - DNA, 90 bp, synthetic construct
  misc_feature 1..90: note = engineered ribonucleic acid scaffold (ERS) sequence
  source 1..90: mol_type = other DNA
actggcgcttctatctgattactctgagcgccaacaccagcgactatgtcgtatgggtaaagtctccctcttcggagggaggcatcagag

SEQ ID NO: 5609 - DNA, 90 bp, synthetic construct
  misc_feature 1..90: note = engineered ribonucleic acid scaffold (ERS) sequence
  source 1..90: mol_type = other DNA
actggcgcttctatctgattactctgagcgccagcaccagcgactatgtcgtatgggtaaagtctccctcttcggagggaggcatcagag

SEQ ID NO: 5610 - DNA, 90 bp, synthetic construct
  misc_feature 1..90: note = engineered ribonucleic acid scaffold (ERS) sequence
  source 1..90: mol_type = other DNA
actggcgcttctatctgattactctgagcgccatgaccagcgactatgtcgtatggctaaagtctccctcttcggagggaggcatcagag

SEQ ID NO: 5611 - DNA, 91 bp, synthetic construct
  misc_feature 1..91: note = engineered ribonucleic acid scaffold (ERS) sequence
  source 1..91: mol_type = other DNA
actggcgcttctatctgattactctgagcgccatgaccagcgactatgtcgtatgggctaaagtctccctcttcggagggaggcatcagag

SEQ ID NO: 5612 - DNA, 90 bp, synthetic construct
  misc_feature 1..90: note = engineered ribonucleic acid scaffold (ERS) sequence
  source 1..90: mol_type = other DNA
actggcgcttctatctgattactctgagcgccatgaccagcgactatgtcgtatgggtaaagtctccctcttcggagggaggcatcagag

SEQ ID NO: 5613 - DNA, 90 bp, synthetic construct
  misc_feature 1..90: note = engineered ribonucleic acid scaffold (ERS) sequence
  source 1..90: mol_type = other DNA
actggcgcttctatctgattactctgagcgccatccccagcgactatgtcgtatgggtaaagtctccctcttcggagggaggcatcagag

SEQ ID NO: 5614 - DNA, 91 bp, synthetic construct
  misc_feature 1..91: note = engineered ribonucleic acid scaffold (ERS) sequence
  source 1..91: mol_type = other DNA
actggcgcttctatctgattactctgagcgccatcgccagcgactatgtcgtatggcgtaaagtctccctcttcggagggaggcatcagag

SEQ ID NO: 5615 - DNA, 90 bp, synthetic construct
  misc_feature 1..90: note = engineered ribonucleic acid scaffold (ERS) sequence
  source 1..90: mol_type = other DNA
actggcgcttctatctgattactctgagcgccatcgccagcgactatgtcgtatgggtaaagtctccctcttcggagggaggcatcagag

SEQ ID NO: 5616 - DNA, 90 bp, synthetic construct
  misc_feature 1..90: note = engineered ribonucleic acid scaffold (ERS) sequence
  source 1..90: mol_type = other DNA
actggcgcttctatctgattactctgagcgccatctccagcgactatgtcgtatgggtaaagtctccctcttcggagggaggcatcagag

SEQ ID NO: 5617 - DNA, 90 bp, synthetic construct
  misc_feature 1..90: note = engineered ribonucleic acid scaffold (ERS) sequence
  source 1..90: mol_type = other DNA
actggcgcttctatctgattactctgagcgccatcacctgcgactatgtcgtaagggtaaagtctccctcttcggagggaggcatcagag

SEQ ID NO: 5618 - DNA, 90 bp, synthetic construct
  misc_feature 1..90: note = engineered ribonucleic acid scaffold (ERS) sequence
  source 1..90: mol_type = other DNA
actggcgcttctatctgattactctgagcgccatcaccagagactatgtcttatgggtaaagtctccctcttcggagggaggcatcagag

SEQ ID NO: 5619 - DNA, 90 bp, synthetic construct
  misc_feature 1..90: note = engineered ribonucleic acid scaffold (ERS) sequence
  source 1..90: mol_type = other DNA
actggcgcttctatctgattactctgagcgccatcaccagggactatgtcctatgggtaaagtctccctcttcggagggaggcatcagag

SEQ ID NO: 5620 - DNA, 91 bp, synthetic construct
  misc_feature 1..91: note = engineered ribonucleic acid scaffold (ERS) sequence
  source 1..91: mol_type = other DNA
actggcgcttctatctgattactctgagcgccatcaccaggcactatgtgctattgggtaaagtctccctcttcggagggaggcatcagag

SEQ ID NO: 5621 - DNA, 90 bp, synthetic construct
  misc_feature 1..90: note = engineered ribonucleic acid scaffold (ERS) sequence
  source 1..90: mol_type = other DNA
actggcgcttctatctgattactctgagcgccatcaccagccactatgtggtatgggtaaagtctccctcttcggagggaggcatcagag

SEQ ID NO: 5622 - DNA, 90 bp, synthetic construct
  misc_feature 1..90: note = engineered ribonucleic acid scaffold (ERS) sequence
  source 1..90: mol_type = other DNA
actggcgcttctatctgattactctgagcgccatcaccagctactatgtagtatgggtaaagtctccctcttcggagggaggcatcagag

SEQ ID NO: 5623 - DNA, 90 bp, synthetic construct
  misc_feature 1..90: note = engineered ribonucleic acid scaffold (ERS) sequence
  source 1..90: mol_type = other DNA
actggcgcttctatctgattactctgagcgccatcaccagcgattatgtcgtatgggtaaagtctccctcttcggagggaggcatcagag

SEQ ID NO: 5624 - DNA, 90 bp, synthetic construct
  misc_feature 1..90: note = engineered ribonucleic acid scaffold (ERS) sequence
  source 1..90: mol_type = other DNA
actggcgcttctatctgattactctgagcgccatcaccagcgacgatgtcgtatgggtaaagtctccctcttcggagggaggcatcagag

SEQ ID NO: 5625 - DNA, 90 bp, synthetic construct
  misc_feature 1..90: note = engineered ribonucleic acid scaffold (ERS) sequence
  source 1..90: mol_type = other DNA
actggcgcttctatctgattactctgagcgccatcaccagcgactctgtcgtatgggtaaagtctccctcttcggagggaggcatcagag

SEQ ID NO: 5626 - DNA, 90 bp, synthetic construct
  misc_feature 1..90: note = engineered ribonucleic acid scaffold (ERS) sequence
  source 1..90: mol_type = other DNA
actggcgcttctatctgattactctgagcgccatcaccagcgactatgtcgtgtgggtaaagtctccctcttcggagggaggcatcagag

SEQ ID NO: 5627 - DNA, 91 bp, synthetic construct
  misc_feature 1..91: note = engineered ribonucleic acid scaffold (ERS) sequence
  source 1..91: mol_type = other DNA
actggcgcttctatctgattactctgagcgccatcaccagcgactatgtcgtattgggtaaagtctccctcttcggagggaggcatcagag

SEQ ID NO: 5628 - DNA, 91 bp, synthetic construct
  misc_feature 1..91: note = engineered ribonucleic acid scaffold (ERS) sequence
  source 1..91: mol_type = other DNA
actggcgcttctatctgattactctgagcgccatcaccagcgactatgtcgtatggagtaaagtctccctcttcggagggaggcatcagag

SEQ ID NO: 5629 - DNA, 91 bp, synthetic construct
  misc_feature 1..91: note = engineered ribonucleic acid scaffold (ERS) sequence
  source 1..91: mol_type = other DNA
actggcgcttctatctgattactctgagcgccatcaccagcgactatgtcgtatggcgtaaagtctccctcttcggagggaggcatcagag

SEQ ID NO: 5630 - DNA, 91 bp, synthetic construct
  misc_feature 1..91: note = engineered ribonucleic acid scaffold (ERS) sequence
  source 1..91: mol_type = other DNA
actggcgcttctatctgattactctgagcgccatcaccagcgactatgtcgtatggtgtaaagtctccctcttcggagggaggcatcagag

SEQ ID NO: 5631 - DNA, 91 bp, synthetic construct
  misc_feature 1..91: note = engineered ribonucleic acid scaffold (ERS) sequence
  source 1..91: mol_type = other DNA
actggcgcttctatctgattactctgagcgccatcaccagcgactatgtcgtatgggctaaagtctccctcttcggagggaggcatcagag

SEQ ID NO: 5632 - DNA, 88 bp, synthetic construct
  misc_feature 1..88: note = engineered ribonucleic acid scaffold (ERS) sequence
  source 1..88: mol_type = other DNA
actggcgcttctatctgattactctgagcgccatcaccagcgactatgtcgtatgggtagtctccctcttcggagggaggcatcagag

SEQ ID NO: 5633 - DNA, 90 bp, synthetic construct
  misc_feature 1..90: note = engineered ribonucleic acid scaffold (ERS) sequence
  source 1..90: mol_type = other DNA
actggcgcttctatctgattactctgagcgccatcaccagcgactatgtcgtatgggtgaagtctccctcttcggagggaggcatcagag

SEQ ID NO: 5634 - DNA, 90 bp, synthetic construct
  misc_feature 1..90: note = engineered ribonucleic acid scaffold (ERS) sequence
  source 1..90: mol_type = other DNA
actggcgcttctatctgattactctgagcgccatcaccagcgactatgtcgtatgggtagagtctccctcttcggagggaggcatcagag

SEQ ID NO: 5635 - DNA, 92 bp, synthetic construct
  misc_feature 1..92: note = engineered ribonucleic acid scaffold (ERS) sequence
  source 1..92: mol_type = other DNA
actggcgcttctatctgattactctgagcgccaacaccagcgactatgtcgtatgggtaaagtgcgcccgcttcggcgggcgcacatcagag

SEQ ID NO: 5636 - DNA, 92 bp, synthetic construct
  misc_feature 1..92: note = engineered ribonucleic acid scaffold (ERS) sequence
  source 1..92: mol_type = other DNA
actggcgcttctatctgattactctgagcgccagcaccagcgactatgtcgtatgggtaaagtgcgcccgcttcggcgggcgcacatcagag

SEQ ID NO: 5637 - DNA, 92 bp, synthetic construct
  misc_feature 1..92: note = engineered ribonucleic acid scaffold (ERS) sequence
  source 1..92: mol_type = other DNA
actggcgcttctatctgattactctgagcgccatgaccagcgactatgtcgtatggctaaagtgcgcccgcttcggcgggcgcacatcagag

SEQ ID NO: 5638 - DNA, 93 bp, synthetic construct
  misc_feature 1..93: note = engineered ribonucleic acid scaffold (ERS) sequence
  source 1..93: mol_type = other DNA
actggcgcttctatctgattactctgagcgccatgaccagcgactatgtcgtatgggctaaagtgcgcccgcttcggcgggcgcacatcagag

SEQ ID NO: 5639 - DNA, 92 bp, synthetic construct
  misc_feature 1..92: note = engineered ribonucleic acid scaffold (ERS) sequence
  source 1..92: mol_type = other DNA
actggcgcttctatctgattactctgagcgccatgaccagcgactatgtcgtatgggtaaagtgcgcccgcttcggcgggcgcacatcagag

SEQ ID NO: 5640 - DNA, 92 bp, synthetic construct
  misc_feature 1..92: note = engineered ribonucleic acid scaffold (ERS) sequence
  source 1..92: mol_type = other DNA
actggcgcttctatctgattactctgagcgccatccccagcgactatgtcgtatgggtaaagtgcgcccgcttcggcgggcgcacatcagag

SEQ ID NO: 5641 - DNA, 93 bp, synthetic construct
  misc_feature 1..93: note = engineered ribonucleic acid scaffold (ERS) sequence
  source 1..93: mol_type = other DNA
actggcgcttctatctgattactctgagcgccatcgccagcgactatgtcgtatggcgtaaagtgcgcccgcttcggcgggcgcacatcagag

SEQ ID NO: 5642 - DNA, 92 bp, synthetic construct
  misc_feature 1..92: note = engineered ribonucleic acid scaffold (ERS) sequence
  source 1..92: mol_type = other DNA
actggcgcttctatctgattactctgagcgccatcgccagcgactatgtcgtatgggtaaagtgcgcccgcttcggcgggcgcacatcagag

SEQ ID NO: 5643 - DNA, 92 bp, synthetic construct
  misc_feature 1..92: note = engineered ribonucleic acid scaffold (ERS) sequence
  source 1..92: mol_type = other DNA
actggcgcttctatctgattactctgagcgccatctccagcgactatgtcgtatgggtaaagtgcgcccgcttcggcgggcgcacatcagag

SEQ ID NO: 5644 - DNA, 92 bp, synthetic construct
  misc_feature 1..92: note = engineered ribonucleic acid scaffold (ERS) sequence
  source 1..92: mol_type = other DNA
actggcgcttctatctgattactctgagcgccatcacctgcgactatgtcgtaagggtaaagtgcgcccgcttcggcgggcgcacatcagag

SEQ ID NO: 5645 - DNA, 92 bp, synthetic construct
  misc_feature 1..92: note = engineered ribonucleic acid scaffold (ERS) sequence
  source 1..92: mol_type = other DNA
actggcgcttctatctgattactctgagcgccatcaccagagactatgtcttatgggtaaagtgcgcccgcttcggcgggcgcacatcagag

SEQ ID NO: 5646 - DNA, 92 bp, synthetic construct
  misc_feature 1..92: note = engineered ribonucleic acid scaffold (ERS) sequence
  source 1..92: mol_type = other DNA
actggcgcttctatctgattactctgagcgccatcaccagggactatgtcctatgggtaaagtgcgcccgcttcggcgggcgcacatcagag

SEQ ID NO: 5647 - DNA, 93 bp, synthetic construct
  misc_feature 1..93: note = engineered ribonucleic acid scaffold (ERS) sequence
  source 1..93: mol_type = other DNA
actggcgcttctatctgattactctgagcgccatcaccaggcactatgtgctattgggtaaagtgcgcccgcttcggcgggcgcacatcagag

SEQ ID NO: 5648 - DNA, 92 bp, synthetic construct
  misc_feature 1..92: note = engineered ribonucleic acid scaffold (ERS) sequence
  source 1..92: mol_type = other DNA
actggcgcttctatctgattactctgagcgccatcaccagccactatgtggtatgggtaaagtgcgcccgcttcggcgggcgcacatcagag

SEQ ID NO: 5649 - DNA, 92 bp, synthetic construct
  misc_feature 1..92: note = engineered ribonucleic acid scaffold (ERS) sequence
  source 1..92: mol_type = other DNA
actggcgcttctatctgattactctgagcgccatcaccagctactatgtagtatgggtaaagtgcgcccgcttcggcgggcgcacatcagag

SEQ ID NO: 5650 - DNA, 92 bp, synthetic construct
  misc_feature 1..92: note = engineered ribonucleic acid scaffold (ERS) sequence
  source 1..92: mol_type = other DNA
actggcgcttctatctgattactctgagcgccatcaccagcgattatgtcgtatgggtaaagtgcgcccgcttcggcgggcgcacatcagag

SEQ ID NO: 5651 - DNA, 92 bp, synthetic construct
  misc_feature 1..92: note = engineered ribonucleic acid scaffold (ERS) sequence
  source 1..92: mol_type = other DNA
actggcgcttctatctgattactctgagcgccatcaccagcgacgatgtcgtatgggtaaagtgcgcccgcttcggcgggcgcacatcagag

SEQ ID NO: 5652 - DNA, 92 bp, synthetic construct
  misc_feature 1..92: note = engineered ribonucleic acid scaffold (ERS) sequence
  source 1..92: mol_type = other DNA
actggcgcttctatctgattactctgagcgccatcaccagcgactctgtcgtatgggtaaagtgcgcccgcttcggcgggcgcacatcagag

SEQ ID NO: 5653 - DNA, 92 bp, synthetic construct
  misc_feature 1..92: note = engineered ribonucleic acid scaffold (ERS) sequence
  source 1..92: mol_type = other DNA
actggcgcttctatctgattactctgagcgccatcaccagcgactatgtcgtgtgggtaaagtgcgcccgcttcggcgggcgcacatcagag

SEQ ID NO: 5654 - DNA, 93 bp, synthetic construct
  misc_feature 1..93: note = engineered ribonucleic acid scaffold (ERS) sequence
  source 1..93: mol_type = other DNA
actggcgcttctatctgattactctgagcgccatcaccagcgactatgtcgtattgggtaaagtgcgcccgcttcggcgggcgcacatcagag

SEQ ID NO: 5655 - DNA, 93 bp, synthetic construct
  misc_feature 1..93: note = engineered ribonucleic acid scaffold (ERS) sequence
  source 1..93: mol_type = other DNA
actggcgcttctatctgattactctgagcgccatcaccagcgactatgtcgtatggagtaaagtgcgcccgcttcggcgggcgcacatcagag

SEQ ID NO: 5656 - DNA, 93 bp, synthetic construct
  misc_feature 1..93: note = engineered ribonucleic acid scaffold (ERS) sequence
  source 1..93: mol_type = other DNA
actggcgcttctatctgattactctgagcgccatcaccagcgactatgtcgtatggcgtaaagtgcgcccgcttcggcgggcgcacatcagag

SEQ ID NO: 5657 - DNA, 93 bp, synthetic construct
  misc_feature 1..93: note = engineered ribonucleic acid scaffold (ERS) sequence
  source 1..93: mol_type = other DNA
actggcgcttctatctgattactctgagcgccatcaccagcgactatgtcgtatggtgtaaagtgcgcccgcttcggcgggcgcacatcagag

SEQ ID NO: 5658 - DNA, 93 bp, synthetic construct
  misc_feature 1..93: note = engineered ribonucleic acid scaffold (ERS) sequence
  source 1..93: mol_type = other DNA
actggcgcttctatctgattactctgagcgccatcaccagcgactatgtcgtatgggctaaagtgcgcccgcttcggcgggcgcacatcagag

SEQ ID NO: 5659 - DNA, 90 bp, synthetic construct
  misc_feature 1..90: note = engineered ribonucleic acid scaffold (ERS) sequence
  source 1..90: mol_type = other DNA
actggcgcttctatctgattactctgagcgccatcaccagcgactatgtcgtatgggtagtgcgcccgcttcggcgggcgcacatcagag

SEQ ID NO: 5660 - DNA, 92 bp, synthetic construct
  misc_feature 1..92: note = engineered ribonucleic acid scaffold (ERS) sequence
  source 1..92: mol_type = other DNA
actggcgcttctatctgattactctgagcgccatcaccagcgactatgtcgtatgggtgaagtgcgcccgcttcggcgggcgcacatcagag

SEQ ID NO: 5661 - DNA, 92 bp, synthetic construct
  misc_feature 1..92: note = engineered ribonucleic acid scaffold (ERS) sequence
  source 1..92: mol_type = other DNA
actggcgcttctatctgattactctgagcgccatcaccagcgactatgtcgtatgggtagagtgcgcccgcttcggcgggcgcacatcagag

SEQ ID NO: 5662 - DNA, 92 bp, synthetic construct
  misc_feature 1..92: note = engineered ribonucleic acid scaffold (ERS) sequence
  source 1..92: mol_type = other DNA
actggcgcttctatctgattactctgagcgccaacaccagcgactatgtcgtatgggtaaataatgaaaacttcggttttcattaatcagag

SEQ ID NO: 5663 - DNA, 92 bp, synthetic construct
  misc_feature 1..92: note = engineered ribonucleic acid scaffold (ERS) sequence
  source 1..92: mol_type = other DNA
actggcgcttctatctgattactctgagcgccagcaccagcgactatgtcgtatgggtaaataatgaaaacttcggttttcattaatcagag

SEQ ID NO: 5664 - DNA, 92 bp, synthetic construct
  misc_feature 1..92: note = engineered ribonucleic acid scaffold (ERS) sequence
  source 1..92: mol_type = other DNA
actggcgcttctatctgattactctgagcgccatgaccagcgactatgtcgtatggctaaataatgaaaacttcggttttcattaatcagag

SEQ ID NO: 5665 - DNA, 93 bp, synthetic construct
  misc_feature 1..93: note = engineered ribonucleic acid scaffold (ERS) sequence
  source 1..93: mol_type = other DNA
actggcgcttctatctgattactctgagcgccatgaccagcgactatgtcgtatgggctaaataatgaaaacttcggttttcattaatcagag

SEQ ID NO: 5666 - DNA, 92 bp, synthetic construct
  misc_feature 1..92: note = engineered ribonucleic acid scaffold (ERS) sequence
  source 1..92: mol_type = other DNA
actggcgcttctatctgattactctgagcgccatgaccagcgactatgtcgtatgggtaaataatgaaaacttcggttttcattaatcagag

SEQ ID NO: 5667 - DNA, 92 bp, synthetic construct
  misc_feature 1..92: note = engineered ribonucleic acid scaffold (ERS) sequence
  source 1..92: mol_type = other DNA
actggcgcttctatctgattactctgagcgccatccccagcgactatgtcgtatgggtaaataatgaaaacttcggttttcattaatcagag

SEQ ID NO: 5668 - DNA, 93 bp, synthetic construct
  misc_feature 1..93: note = engineered ribonucleic acid scaffold (ERS) sequence
  source 1..93: mol_type = other DNA
actggcgcttctatctgattactctgagcgccatcgccagcgactatgtcgtatggcgtaaataatgaaaacttcggttttcattaatcagag

SEQ ID NO: 5669 - DNA, 92 bp, synthetic construct
  misc_feature 1..92: note = engineered ribonucleic acid scaffold (ERS) sequence
  source 1..92: mol_type = other DNA
actggcgcttctatctgattactctgagcgccatcgccagcgactatgtcgtatgggtaaataatgaaaacttcggttttcattaatcagag

SEQ ID NO: 5670 - DNA, 92 bp, synthetic construct
  misc_feature 1..92: note = engineered ribonucleic acid scaffold (ERS) sequence
  source 1..92: mol_type = other DNA
actggcgcttctatctgattactctgagcgccatctccagcgactatgtcgtatgggtaaataatgaaaacttcggttttcattaatcagag

SEQ ID NO: 5671 - DNA, 92 bp, synthetic construct
  misc_feature 1..92: note = engineered ribonucleic acid scaffold (ERS) sequence
  source 1..92: mol_type = other DNA
actggcgcttctatctgattactctgagcgccatcacctgcgactatgtcgtaagggtaaataatgaaaacttcggttttcattaatcagag

SEQ ID NO: 5672 - DNA, 92 bp, synthetic construct
  misc_feature 1..92: note = engineered ribonucleic acid scaffold (ERS) sequence
  source 1..92: mol_type = other DNA
actggcgcttctatctgattactctgagcgccatcaccagagactatgtcttatgggtaaataatgaaaacttcggttttcattaatcagag

SEQ ID NO: 5673 - DNA, 92 bp, synthetic construct
  misc_feature 1..92: note = engineered ribonucleic acid scaffold (ERS) sequence
  source 1..92: mol_type = other DNA
actggcgcttctatctgattactctgagcgccatcaccagggactatgtcctatgggtaaataatgaaaacttcggttttcattaatcagag

SEQ ID NO: 5674 - DNA, 93 bp, synthetic construct
  misc_feature 1..93: note = engineered ribonucleic acid scaffold (ERS) sequence
  source 1..93: mol_type = other DNA
actggcgcttctatctgattactctgagcgccatcaccaggcactatgtgctattgggtaaataatgaaaacttcggttttcattaatcagag

SEQ ID NO: 5675 - DNA, 92 bp, synthetic construct
  misc_feature 1..92: note = engineered ribonucleic acid scaffold (ERS) sequence
  source 1..92: mol_type = other DNA
actggcgcttctatctgattactctgagcgccatcaccagccactatgtggtatgggtaaataatgaaaacttcggttttcattaatcagag

SEQ ID NO: 5676 - DNA, 92 bp, synthetic construct
  misc_feature 1..92: note = engineered ribonucleic acid scaffold (ERS) sequence
  source 1..92: mol_type = other DNA
actggcgcttctatctgattactctgagcgccatcaccagctactatgtagtatgggtaaataatgaaaacttcggttttcattaatcagag

SEQ ID NO: 5677 - DNA, 92 bp, synthetic construct
  misc_feature 1..92: note = engineered ribonucleic acid scaffold (ERS) sequence
  source 1..92: mol_type = other DNA
actggcgcttctatctgattactctgagcgccatcaccagcgattatgtcgtatgggtaaataatgaaaacttcggttttcattaatcagag

SEQ ID NO: 5678 - DNA, 92 bp, synthetic construct
  misc_feature 1..92: note = engineered ribonucleic acid scaffold (ERS) sequence
  source 1..92: mol_type = other DNA
actggcgcttctatctgattactctgagcgccatcaccagcgacgatgtcgtatgggtaaataatgaaaacttcggttttcattaatcagag

SEQ ID NO: 5679 - DNA, 92 bp, synthetic construct
  misc_feature 1..92: note = engineered ribonucleic acid scaffold (ERS) sequence
  source 1..92: mol_type = other DNA
actggcgcttctatctgattactctgagcgccatcaccagcgactctgtcgtatgggtaaataatgaaaacttcggttttcattaatcagag

SEQ ID NO: 5680 - DNA, 92 bp, synthetic construct
  misc_feature 1..92: note = engineered ribonucleic acid scaffold (ERS) sequence
  source 1..92: mol_type = other DNA
actggcgcttctatctgattactctgagcgccatcaccagcgactatgtcgtgtgggtaaataatgaaaacttcggttttcattaatcagag

SEQ ID NO: 5681 - DNA, 93 bp, synthetic construct
  misc_feature 1..93: note = engineered ribonucleic acid scaffold (ERS) sequence
  source 1..93: mol_type = other DNA
actggcgcttctatctgattactctgagcgccatcaccagcgactatgtcgtattgggtaaataatgaaaacttcggttttcattaatcagag

SEQ ID NO: 5682 - DNA, 93 bp, synthetic construct
  misc_feature 1..93: note = engineered ribonucleic acid scaffold (ERS) sequence
  source 1..93: mol_type = other DNA
actggcgcttctatctgattactctgagcgccatcaccagcgactatgtcgtatggagtaaataatgaaaacttcggttttcattaatcagag

SEQ ID NO: 5683 - DNA, 93 bp, synthetic construct
  misc_feature 1..93: note = engineered ribonucleic acid scaffold (ERS) sequence
  source 1..93: mol_type = other DNA
actggcgcttctatctgattactctgagcgccatcaccagcgactatgtcgtatggcgtaaataatgaaaacttcggttttcattaatcagag

SEQ ID NO: 5684 - DNA, 93 bp, synthetic construct
  misc_feature 1..93: note = engineered ribonucleic acid scaffold (ERS) sequence
  source 1..93: mol_type = other DNA
actggcgcttctatctgattactctgagcgccatcaccagcgactatgtcgtatggtgtaaataatgaaaacttcggttttcattaatcagag

SEQ ID NO: 5685 - DNA, 93 bp, synthetic construct
  misc_feature 1..93: note = engineered ribonucleic acid scaffold (ERS) sequence
  source 1..93: mol_type = other DNA
actggcgcttctatctgattactctgagcgccatcaccagcgactatgtcgtatgggctaaataatgaaaacttcggttttcattaatcagag

SEQ ID NO: 5686 - DNA, 90 bp, synthetic construct
  misc_feature 1..90: note = engineered ribonucleic acid scaffold (ERS) sequence
  source 1..90: mol_type = other DNA
actggcgcttctatctgattactctgagcgccatcaccagcgactatgtcgtatgggtataatgaaaacttcggttttcattaatcagag

SEQ ID NO: 5687 - DNA, 92 bp, synthetic construct
  misc_feature 1..92: note = engineered ribonucleic acid scaffold (ERS) sequence
  source 1..92: mol_type = other DNA
actggcgcttctatctgattactctgagcgccatcaccagcgactatgtcgtatgggtgaataatgaaaacttcggttttcattaatcagag

SEQ ID NO: 5688 - DNA, 92 bp, synthetic construct
  misc_feature 1..92: note = engineered ribonucleic acid scaffold (ERS) sequence
  source 1..92: mol_type = other DNA
actggcgcttctatctgattactctgagcgccatcaccagcgactatgtcgtatgggtagataatgaaaacttcggttttcattaatcagag

SEQ ID NO: 5689 - DNA, 92 bp, synthetic construct
  misc_feature 1..92: note = engineered ribonucleic acid scaffold (ERS) sequence
  source 1..92: mol_type = other DNA
actggcgcttctatctgattactctgagcgccaacaccagcgactatgtcgtatgggtaaatcgtaagaacttcggttcttacgaatcagag

SEQ ID NO: 5690 - DNA, 92 bp, synthetic construct
  misc_feature 1..92: note = engineered ribonucleic acid scaffold (ERS) sequence
  source 1..92: mol_type = other DNA
actggcgcttctatctgattactctgagcgccagcaccagcgactatgtcgtatgggtaaatcgtaagaacttcggttcttacgaatcagag

SEQ ID NO: 5691 - DNA, 92 bp, synthetic construct
  misc_feature 1..92: note = engineered ribonucleic acid scaffold (ERS) sequence
  source 1..92: mol_type = other DNA
actggcgcttctatctgattactctgagcgccatgaccagcgactatgtcgtatggctaaatcgtaagaacttcggttcttacgaatcagag

SEQ ID NO: 5692 - DNA, 93 bp, synthetic construct
  misc_feature 1..93: note = engineered ribonucleic acid scaffold (ERS) sequence
  source 1..93: mol_type = other DNA
actggcgcttctatctgattactctgagcgccatgaccagcgactatgtcgtatgggctaaatcgtaagaacttcggttcttacgaatcagag

SEQ ID NO: 5693 - DNA, 92 bp, synthetic construct
  misc_feature 1..92: note = engineered ribonucleic acid scaffold (ERS) sequence
  source 1..92: mol_type = other DNA
actggcgcttctatctgattactctgagcgccatgaccagcgactatgtcgtatgggtaaatcgtaagaacttcggttcttacgaatcagag

SEQ ID NO: 5694 - DNA, 92 bp, synthetic construct
  misc_feature 1..92: note = engineered ribonucleic acid scaffold (ERS) sequence
  source 1..92: mol_type = other DNA
actggcgcttctatctgattactctgagcgccatccccagcgactatgtcgtatgggtaaatcgtaagaacttcggttcttacgaatcagag

SEQ ID NO: 5695 - DNA, 93 bp, synthetic construct
  misc_feature 1..93: note = engineered ribonucleic acid scaffold (ERS) sequence
  source 1..93: mol_type = other DNA
actggcgcttctatctgattactctgagcgccatcgccagcgactatgtcgtatggcgtaaatcgtaagaacttcggttcttacgaatcagag

SEQ ID NO: 5696 - DNA, 92 bp, synthetic construct
  misc_feature 1..92: note = engineered ribonucleic acid scaffold (ERS) sequence
  source 1..92: mol_type = other DNA
actggcgcttctatctgattactctgagcgccatcgccagcgactatgtcgtatgggtaaatcgtaagaacttcggttcttacgaatcagag

SEQ ID NO: 5697 - DNA, 92 bp, synthetic construct
  misc_feature 1..92: note = engineered ribonucleic acid scaffold (ERS) sequence
  source 1..92: mol_type = other DNA
actggcgcttctatctgattactctgagcgccatctccagcgactatgtcgtatgggtaaatcgtaagaacttcggttcttacgaatcagag

SEQ ID NO: 5698 - DNA, 92 bp, synthetic construct
  misc_feature 1..92: note = engineered ribonucleic acid scaffold (ERS) sequence
  source 1..92: mol_type = other DNA
actggcgcttctatctgattactctgagcgccatcacctgcgactatgtcgtaagggtaaatcgtaagaacttcggttcttacgaatcagag

SEQ ID NO: 5699 - DNA, 92 bp, synthetic construct
  misc_feature 1..92: note = engineered ribonucleic acid scaffold (ERS) sequence
  source 1..92: mol_type = other DNA
actggcgcttctatctgattactctgagcgccatcaccagagactatgtcttatgggtaaatcgtaagaacttcggttcttacgaatcagag

SEQ ID NO: 5700 - DNA, 92 bp, synthetic construct
  misc_feature 1..92: note = engineered ribonucleic acid scaffold (ERS) sequence
  source 1..92: mol_type = other DNA
actggcgcttctatctgattactctgagcgccatcaccagggactatgtcctatgggtaaatcgtaagaacttcggttcttacgaatcagag

SEQ ID NO: 5701 - DNA, 93 bp, synthetic construct
  misc_feature 1..93: note = engineered ribonucleic acid scaffold (ERS) sequence
  source 1..93: mol_type = other DNA
actggcgcttctatctgattactctgagcgccatcaccaggcactatgtgctattgggtaaatcgtaagaacttcggttcttacgaatcagag

SEQ ID NO: 5702 - DNA, 92 bp, synthetic construct
  misc_feature 1..92: note = engineered ribonucleic acid scaffold (ERS) sequence
  source 1..92: mol_type = other DNA
actggcgcttctatctgattactctgagcgccatcaccagccactatgtggtatgggtaaatcgtaagaacttcggttcttacgaatcagag

SEQ ID NO: 5703 - DNA, 92 bp, synthetic construct
  misc_feature 1..92: note = engineered ribonucleic acid scaffold (ERS) sequence
  source 1..92: mol_type = other DNA
actggcgcttctatctgattactctgagcgccatcaccagctactatgtagtatgggtaaatcgtaagaacttcggttcttacgaatcagag

SEQ ID NO: 5704 - DNA, 92 bp, synthetic construct
  misc_feature 1..92: note = engineered ribonucleic acid scaffold (ERS) sequence
  source 1..92: mol_type = other DNA
actggcgcttctatctgattactctgagcgccatcaccagcgattatgtcgtatgggtaaatcgtaagaacttcggttcttacgaatcagag

SEQ ID NO: 5705 - DNA, 92 bp, synthetic construct
  misc_feature 1..92: note = engineered ribonucleic acid scaffold (ERS) sequence
  source 1..92: mol_type = other DNA
actggcgcttctatctgattactctgagcgccatcaccagcgacgatgtcgtatgggtaaatcgtaagaacttcggttcttacgaatcagag

SEQ ID NO: 5706 - DNA, 92 bp, synthetic construct
  misc_feature 1..92: note = engineered ribonucleic acid scaffold (ERS) sequence
  source 1..92: mol_type = other DNA
actggcgcttctatctgattactctgagcgccatcaccagcgactctgtcgtatgggtaaatcgtaagaacttcggttcttacgaatcagag

SEQ ID NO: 5707 - DNA, 92 bp, synthetic construct
  misc_feature 1..92: note = engineered ribonucleic acid scaffold (ERS) sequence
  source 1..92: mol_type = other DNA
actggcgcttctatctgattactctgagcgccatcaccagcgactatgtcgtgtgggtaaatcgtaagaacttcggttcttacgaatcagag

SEQ ID NO: 5708 - DNA, 93 bp, synthetic construct
  misc_feature 1..93: note = engineered ribonucleic acid scaffold (ERS) sequence
  source 1..93: mol_type = other DNA
actggcgcttctatctgattactctgagcgccatcaccagcgactatgtcgtattgggtaaatcgtaagaacttcggttcttacgaatcagag

SEQ ID NO: 5709 - DNA, 93 bp, synthetic construct
  misc_feature 1..93: note = engineered ribonucleic acid scaffold (ERS) sequence
  source 1..93: mol_type = other DNA
actggcgcttctatctgattactctgagcgccatcaccagcgactatgtcgtatggagtaaatcgtaagaacttcggttcttacgaatcagag

SEQ ID NO: 5710 - DNA, 93 bp, synthetic construct
  misc_feature 1..93: note = engineered ribonucleic acid scaffold (ERS) sequence
  source 1..93: mol_type = other DNA
actggcgcttctatctgattactctgagcgccatcaccagcgactatgtcgtatggcgtaaatcgtaagaacttcggttcttacgaatcagag

SEQ ID NO: 5711 - DNA, 93 bp, synthetic construct
  misc_feature 1..93: note = engineered ribonucleic acid scaffold (ERS) sequence
  source 1..93: mol_type = other DNA
actggcgcttctatctgattactctgagcgccatcaccagcgactatgtcgtatggtgtaaatcgtaagaacttcggttcttacgaatcagag

SEQ ID NO: 5712 - DNA, 93 bp, synthetic construct
  misc_feature 1..93: note = engineered ribonucleic acid scaffold (ERS) sequence
  source 1..93: mol_type = other DNA
actggcgcttctatctgattactctgagcgccatcaccagcgactatgtcgtatgggctaaatcgtaagaacttcggttcttacgaatcagag

SEQ ID NO: 5713 - DNA, 90 bp, synthetic construct
  misc_feature 1..90: note = engineered ribonucleic acid scaffold (ERS) sequence
  source 1..90: mol_type = other DNA
actggcgcttctatctgattactctgagcgccatcaccagcgactatgtcgtatgggtatcgtaagaacttcggttcttacgaatcagag

SEQ ID NO: 5714 - DNA, 92 bp, synthetic construct
  misc_feature 1..92: note = engineered ribonucleic acid scaffold (ERS) sequence
  source 1..92: mol_type = other DNA
actggcgcttctatctgattactctgagcgccatcaccagcgactatgtcgtatgggtgaatcgtaagaacttcggttcttacgaatcagag

SEQ ID NO: 5715 - DNA, 92 bp, synthetic construct
  misc_feature 1..92: note = engineered ribonucleic acid scaffold (ERS) sequence
  source 1..92: mol_type = other DNA
actggcgcttctatctgattactctgagcgccatcaccagcgactatgtcgtatgggtagatcgtaagaacttcggttcttacgaatcagag

SEQ ID NO: 5716 - DNA, 92 bp, synthetic construct
  misc_feature 1..92: note = engineered ribonucleic acid scaffold (ERS) sequence
  source 1..92: mol_type = other DNA
actggcgcttctatctgattactctgagcgccaacaccagcgactatgtcgtatgggtaaatggaagatgcttcggcatcttccaatcagag

SEQ ID NO: 5717 - DNA, 92 bp, synthetic construct
  misc_feature 1..92: note = engineered ribonucleic acid scaffold (ERS) sequence
  source 1..92: mol_type = other DNA
actggcgcttctatctgattactctgagcgccagcaccagcgactatgtcgtatgggtaaatggaagatgcttcggcatcttccaatcagag

SEQ ID NO: 5718 - DNA, 92 bp, synthetic construct
  misc_feature 1..92: note = engineered ribonucleic acid scaffold (ERS) sequence
  source 1..92: mol_type = other DNA
actggcgcttctatctgattactctgagcgccatgaccagcgactatgtcgtatggctaaatggaagatgcttcggcatcttccaatcagag

SEQ ID NO: 5719 - DNA, 93 bp, synthetic construct
  misc_feature 1..93: note = engineered ribonucleic acid scaffold (ERS) sequence
  source 1..93: mol_type = other DNA
actggcgcttctatctgattactctgagcgccatgaccagcgactatgtcgtatgggctaaatggaagatgcttcggcatcttccaatcagag

SEQ ID NO: 5720 - DNA, 92 bp, synthetic construct
  misc_feature 1..92: note = engineered ribonucleic acid scaffold (ERS) sequence
  source 1..92: mol_type = other DNA
actggcgcttctatctgattactctgagcgccatgaccagcgactatgtcgtatgggtaaatggaagatgcttcggcatcttccaatcagag

SEQ ID NO: 5721 - DNA, 92 bp, synthetic construct
  misc_feature 1..92: note = engineered ribonucleic acid scaffold (ERS) sequence
  source 1..92: mol_type = other DNA
actggcgcttctatctgattactctgagcgccatccccagcgactatgtcgtatgggtaaatggaagatgcttcggcatcttccaatcagag

SEQ ID NO: 5722 - DNA, 93 bp, synthetic construct
  misc_feature 1..93: note = engineered ribonucleic acid scaffold (ERS) sequence
  source 1..93: mol_type = other DNA
actggcgcttctatctgattactctgagcgccatcgccagcgactatgtcgtatggcgtaaatggaagatgcttcggcatcttccaatcagag

SEQ ID NO: 5723 - DNA, 92 bp, synthetic construct
  misc_feature 1..92: note = engineered ribonucleic acid scaffold (ERS) sequence
  source 1..92: mol_type = other DNA
actggcgcttctatctgattactctgagcgccatcgccagcgactatgtcgtatgggtaaatggaagatgcttcggcatcttccaatcagag

SEQ ID NO: 5724 - DNA, 92 bp, synthetic construct
  misc_feature 1..92: note = engineered ribonucleic acid scaffold (ERS) sequence
  source 1..92: mol_type = other DNA
actggcgcttctatctgattactctgagcgccatctccagcgactatgtcgtatgggtaaatggaagatgcttcggcatcttccaatcagag

SEQ ID NO: 5725 - DNA, 92 bp, synthetic construct
  misc_feature 1..92: note = engineered ribonucleic acid scaffold (ERS) sequence
  source 1..92: mol_type = other DNA
actggcgcttctatctgattactctgagcgccatcacctgcgactatgtcgtaagggtaaatggaagatgcttcggcatcttccaatcagag

SEQ ID NO: 5726 - DNA, 92 bp, synthetic construct
  misc_feature 1..92: note = engineered ribonucleic acid scaffold (ERS) sequence
  source 1..92: mol_type = other DNA
actggcgcttctatctgattactctgagcgccatcaccagagactatgtcttatgggtaaatggaagatgcttcggcatcttccaatcagag

SEQ ID NO: 5727 - DNA, 92 bp, synthetic construct
  misc_feature 1..92: note = engineered ribonucleic acid scaffold (ERS) sequence
  source 1..92: mol_type = other DNA
actggcgcttctatctgattactctgagcgccatcaccagggactatgtcctatgggtaaatggaagatgcttcggcatcttccaatcagag

SEQ ID NO: 5728 - DNA, 93 bp, synthetic construct
  misc_feature 1..93: note = engineered ribonucleic acid scaffold (ERS) sequence
  source 1..93: mol_type = other DNA
actggcgcttctatctgattactctgagcgccatcaccaggcactatgtgctattgggtaaatggaagatgcttcggcatcttccaatcagag

SEQ ID NO: 5729 - DNA, 92 bp, synthetic construct
  misc_feature 1..92: note = engineered ribonucleic acid scaffold (ERS) sequence
  source 1..92: mol_type = other DNA
actggcgcttctatctgattactctgagcgccatcaccagccactatgtggtatgggtaaatggaagatgcttcggcatcttccaatcagag

SEQ ID NO: 5730 - DNA, 92 bp, synthetic construct
  misc_feature 1..92: note = engineered ribonucleic acid scaffold (ERS) sequence
  source 1..92: mol_type = other DNA
actggcgcttctatctgattactctgagcgccatcaccagctactatgtagtatgggtaaatggaagatgcttcggcatcttccaatcagag

SEQ ID NO: 5731 - DNA, 92 bp, synthetic construct
  misc_feature 1..92: note = engineered ribonucleic acid scaffold (ERS) sequence
  source 1..92: mol_type = other DNA
actggcgcttctatctgattactctgagcgccatcaccagcgattatgtcgtatgggtaaatggaagatgcttcggcatcttccaatcagag

SEQ ID NO: 5732 - DNA, 92 bp, synthetic construct
  misc_feature 1..92: note = engineered ribonucleic acid scaffold (ERS) sequence
  source 1..92: mol_type = other DNA
actggcgcttctatctgattactctgagcgccatcaccagcgacgatgtcgtatgggtaaatggaagatgcttcggcatcttccaatcagag

SEQ ID NO: 5733 - DNA, 92 bp, synthetic construct
  misc_feature 1..92: note = engineered ribonucleic acid scaffold (ERS) sequence
  source 1..92: mol_type = other DNA
actggcgcttctatctgattactctgagcgccatcaccagcgactctgtcgtatgggtaaatggaagatgcttcggcatcttccaatcagag

SEQ ID NO: 5734 - DNA, 92 bp, synthetic construct
  misc_feature 1..92: note = engineered ribonucleic acid scaffold (ERS) sequence
  source 1..92: mol_type = other DNA
actggcgcttctatctgattactctgagcgccatcaccagcgactatgtcgtgtgggtaaatggaagatgcttcggcatcttccaatcagag

SEQ ID NO: 5735 - DNA, 93 bp, synthetic construct
  misc_feature 1..93: note = engineered ribonucleic acid scaffold (ERS) sequence
  source 1..93: mol_type = other DNA
actggcgcttctatctgattactctgagcgccatcaccagcgactatgtcgtattgggtaaatggaagatgcttcggcatcttccaatcagag

SEQ ID NO: 5736 - DNA, 93 bp, synthetic construct
  misc_feature 1..93: note = engineered ribonucleic acid scaffold (ERS) sequence
  source 1..93: mol_type = other DNA
actggcgcttctatctgattactctgagcgccatcaccagcgactatgtcgtatggagtaaatggaagatgcttcggcatcttccaatcagag

SEQ ID NO: 5737 - DNA, 93 bp, synthetic construct
  misc_feature 1..93: note = engineered ribonucleic acid scaffold (ERS) sequence
  source 1..93: mol_type = other DNA
actggcgcttctatctgattactctgagcgccatcaccagcgactatgtcgtatggcgtaaatggaagatgcttcggcatcttccaatcagag

SEQ ID NO: 5738 - DNA, 93 bp, synthetic construct
  misc_feature 1..93: note = engineered ribonucleic acid scaffold (ERS) sequence
  source 1..93: mol_type = other DNA
actggcgcttctatctgattactctgagcgccatcaccagcgactatgtcgtatggtgtaaatggaagatgcttcggcatcttccaatcagag

SEQ ID NO: 5739 - DNA, 93 bp, synthetic construct
  misc_feature 1..93: note = engineered ribonucleic acid scaffold (ERS) sequence
  source 1..93: mol_type = other DNA
actggcgcttctatctgattactctgagcgccatcaccagcgactatgtcgtatgggctaaatggaagatgcttcggcatcttccaatcagag

SEQ ID NO: 5740 - DNA, 90 bp, synthetic construct
  misc_feature 1..90: note = engineered ribonucleic acid scaffold (ERS) sequence
  source 1..90: mol_type = other DNA
actggcgcttctatctgattactctgagcgccatcaccagcgactatgtcgtatgggtatggaagatgcttcggcatcttccaatcagag

SEQ ID NO: 5741 - DNA, 92 bp, synthetic construct
  misc_feature 1..92: note = engineered ribonucleic acid scaffold (ERS) sequence
  source 1..92: mol_type = other DNA
actggcgcttctatctgattactctgagcgccatcaccagcgactatgtcgtatgggtgaatggaagatgcttcggcatcttccaatcagag

SEQ ID NO: 5742 - DNA, 92 bp, synthetic construct
  misc_feature 1..92: note = engineered ribonucleic acid scaffold (ERS) sequence
  source 1..92: mol_type = other DNA
actggcgcttctatctgattactctgagcgccatcaccagcgactatgtcgtatgggtagatggaagatgcttcggcatcttccaatcagag

SEQ ID NO: 5743 - DNA, 96 bp, synthetic construct
  misc_feature 1..96: note = engineered ribonucleic acid scaffold (ERS) sequence
  source 1..96: mol_type = other DNA
actggcgcttctatctgattactctgagcgccaacaccagcgactatgtcgtatgggtaaagcccttacggacttcggtccgtaagggcatcagag

SEQ ID NO: 5744 - DNA, 96 bp, synthetic construct
  misc_feature 1..96: note = engineered ribonucleic acid scaffold (ERS) sequence
  source 1..96: mol_type = other DNA
actggcgcttctatctgattactctgagcgccagcaccagcgactatgtcgtatgggtaaagcccttacggacttcggtccgtaagggcatcagag

SEQ ID NO: 5745 - DNA, 96 bp, synthetic construct
  misc_feature 1..96: note = engineered ribonucleic acid scaffold (ERS) sequence
  source 1..96: mol_type = other DNA
actggcgcttctatctgattactctgagcgccatgaccagcgactatgtcgtatggctaaagcccttacggacttcggtccgtaagggcatcagag

SEQ ID NO: 5746 - DNA, 97 bp, synthetic construct
  misc_feature 1..97: note = engineered ribonucleic acid scaffold (ERS) sequence
  source 1..97: mol_type = other DNA
actggcgcttctatctgattactctgagcgccatgaccagcgactatgtcgtatgggctaaagcccttacggacttcggtccgtaagggcatcagag

SEQ ID NO: 5747 - DNA, 96 bp, synthetic construct
  misc_feature 1..96: note = engineered ribonucleic acid scaffold (ERS) sequence
  source 1..96: mol_type = other DNA
actggcgcttctatctgattactctgagcgccatgaccagcgactatgtcgtatgggtaaagcccttacggacttcggtccgtaagggcatcagag

SEQ ID NO: 5748 - DNA, 96 bp, synthetic construct
  misc_feature 1..96: note = engineered ribonucleic acid scaffold (ERS) sequence
  source 1..96: mol_type = other DNA
actggcgcttctatctgattactctgagcgccatccccagcgactatgtcgtatgggtaaagcccttacggacttcggtccgtaagggcatcagag

SEQ ID NO: 5749 - DNA, 97 bp, synthetic construct
  misc_feature 1..97: note = engineered ribonucleic acid scaffold (ERS) sequence
  source 1..97: mol_type = other DNA
actggcgcttctatctgattactctgagcgccatcgccagcgactatgtcgtatggcgtaaagcccttacggacttcggtccgtaagggcatcagag

SEQ ID NO: 5750 - DNA, 96 bp, synthetic construct
  misc_feature 1..96: note = engineered ribonucleic acid scaffold (ERS) sequence
  source 1..96: mol_type = other DNA
actggcgcttctatctgattactctgagcgccatcgccagcgactatgtcgtatgggtaaagcccttacggacttcggtccgtaagggcatcagag

SEQ ID NO: 5751 - DNA, 96 bp, synthetic construct
  misc_feature 1..96: note = engineered ribonucleic acid scaffold (ERS) sequence
  source 1..96: mol_type = other DNA
actggcgcttctatctgattactctgagcgccatctccagcgactatgtcgtatgggtaaagcccttacggacttcggtccgtaagggcatcagag

SEQ ID NO: 5752 - DNA, 96 bp, synthetic construct
  misc_feature 1..96: note = engineered ribonucleic acid scaffold (ERS) sequence
  source 1..96: mol_type = other DNA
actggcgcttctatctgattactctgagcgccatcacctgcgactatgtcgtaagggtaaagcccttacggacttcggtccgtaagggcatcagag

SEQ ID NO: 5753 - DNA, 96 bp, synthetic construct
  misc_feature 1..96: note = engineered ribonucleic acid scaffold (ERS) sequence
  source 1..96: mol_type = other DNA
actggcgcttctatctgattactctgagcgccatcaccagagactatgtcttatgggtaaagcccttacggacttcggtccgtaagggcatcagag

SEQ ID NO: 5754 - DNA, 96 bp, synthetic construct
  misc_feature 1..96: note = engineered ribonucleic acid scaffold (ERS) sequence
  source 1..96: mol_type = other DNA
actggcgcttctatctgattactctgagcgccatcaccagggactatgtcctatgggtaaagcccttacggacttcggtccgtaagggcatcagag

SEQ ID NO: 5755 - DNA, 97 bp, synthetic construct
  misc_feature 1..97: note = engineered ribonucleic acid scaffold (ERS) sequence
  source 1..97: mol_type = other DNA
actggcgcttctatctgattactctgagcgccatcaccaggcactatgtgctattgggtaaagcccttacggacttcggtccgtaagggcatcagag

SEQ ID NO: 5756 - DNA, 96 bp, synthetic construct
  misc_feature 1..96: note = engineered ribonucleic acid scaffold (ERS) sequence
  source 1..96: mol_type = other DNA
actggcgcttctatctgattactctgagcgccatcaccagccactatgtggtatgggtaaagcccttacggacttcggtccgtaagggcatcagag

SEQ ID NO: 5757 - DNA, 96 bp, synthetic construct
  misc_feature 1..96: note = engineered ribonucleic acid scaffold (ERS) sequence
  source 1..96: mol_type = other DNA
actggcgcttctatctgattactctgagcgccatcaccagctactatgtagtatgggtaaagcccttacggacttcggtccgtaagggcatcagag

SEQ ID NO: 5758 - DNA, 96 bp, synthetic construct
  misc_feature 1..96: note = engineered ribonucleic acid scaffold (ERS) sequence
  source 1..96: mol_type = other DNA
actggcgcttctatctgattactctgagcgccatcaccagcgattatgtcgtatgggtaaagcccttacggacttcggtccgtaagggcatcagag

SEQ ID NO: 5759 - DNA, 96 bp, synthetic construct
  misc_feature 1..96: note = engineered ribonucleic acid scaffold (ERS) sequence
  source 1..96: mol_type = other DNA
actggcgcttctatctgattactctgagcgccatcaccagcgacgatgtcgtatgggtaaagcccttacggacttcggtccgtaagggcatcagag

SEQ ID NO: 5760 - DNA, 96 bp, synthetic construct
  misc_feature 1..96: note = engineered ribonucleic acid scaffold (ERS) sequence
  source 1..96: mol_type = other DNA
actggcgcttctatctgattactctgagcgccatcaccagcgactctgtcgtatgggtaaagcccttacggacttcggtccgtaagggcatcagag

SEQ ID NO: 5761 - DNA, 96 bp, synthetic construct
  misc_feature 1..96: note = engineered ribonucleic acid scaffold (ERS) sequence
  source 1..96: mol_type = other DNA
actggcgcttctatctgattactctgagcgccatcaccagcgactatgtcgtgtgggtaaagcccttacggacttcggtccgtaagggcatcagag

SEQ ID NO: 5762 - DNA, 97 bp, synthetic construct
  misc_feature 1..97: note = engineered ribonucleic acid scaffold (ERS) sequence
  source 1..97: mol_type = other DNA
actggcgcttctatctgattactctgagcgccatcaccagcgactatgtcgtattgggtaaagcccttacggacttcggtccgtaagggcatcagag

SEQ ID NO: 5763 - DNA, 97 bp, synthetic construct
  misc_feature 1..97: note = engineered ribonucleic acid scaffold (ERS) sequence
  source 1..97: mol_type = other DNA
actggcgcttctatctgattactctgagcgccatcaccagcgactatgtcgtatggagtaaagcccttacggacttcggtccgtaagggcatcagag

SEQ ID NO: 5764 - DNA, 97 bp, synthetic construct
  misc_feature 1..97: note = engineered ribonucleic acid scaffold (ERS) sequence
  source 1..97: mol_type = other DNA
actggcgcttctatctgattactctgagcgccatcaccagcgactatgtcgtatggcgtaaagcccttacggacttcggtccgtaagggcatcagag

SEQ ID NO: 5765 - DNA, 97 bp, synthetic construct
  misc_feature 1..97: note = engineered ribonucleic acid scaffold (ERS) sequence
  source 1..97: mol_type = other DNA
actggcgcttctatctgattactctgagcgccatcaccagcgactatgtcgtatggtgtaaagcccttacggacttcggtccgtaagggcatcagag

SEQ ID NO: 5766 - DNA, 97 bp, synthetic construct
  misc_feature 1..97: note = engineered ribonucleic acid scaffold (ERS) sequence
  source 1..97: mol_type = other DNA
actggcgcttctatctgattactctgagcgccatcaccagcgactatgtcgtatgggctaaagcccttacggacttcggtccgtaagggcatcagag

SEQ ID NO: 5767 - DNA, 94 bp, synthetic construct
  misc_feature 1..94: note = engineered ribonucleic acid scaffold (ERS) sequence
  source 1..94: mol_type = other DNA
actggcgcttctatctgattactctgagcgccatcaccagcgactatgtcgtatgggtagcccttacggacttcggtccgtaagggcatcagag

SEQ ID NO: 5768 - DNA, 96 bp, synthetic construct
  misc_feature 1..96: note = engineered ribonucleic acid scaffold (ERS) sequence
  source 1..96: mol_type = other DNA
actggcgcttctatctgattactctgagcgccatcaccagcgactatgtcgtatgggtgaagcccttacggacttcggtccgtaagggcatcagag

SEQ ID NO: 5769 - DNA, 96 bp, synthetic construct
  misc_feature 1..96: note = engineered ribonucleic acid scaffold (ERS) sequence
  source 1..96: mol_type = other DNA
actggcgcttctatctgattactctgagcgccatcaccagcgactatgtcgtatgggtagagcccttacggacttcggtccgtaagggcatcagag

SEQ ID NO: 5770 - DNA, 98 bp, synthetic construct
  misc_feature 1..98: note = engineered ribonucleic acid scaffold (ERS) sequence
  source 1..98: mol_type = other DNA
actggcgcttctatctgattactctgagcgccaacaccagcgactatgtcgtatgggtaaagcctcttacggacttcggtccgtaagaggcatcagag

SEQ ID NO: 5771 - DNA, 98 bp, synthetic construct
  misc_feature 1..98: note = engineered ribonucleic acid scaffold (ERS) sequence
  source 1..98: mol_type = other DNA
actggcgcttctatctgattactctgagcgccagcaccagcgactatgtcgtatgggtaaagcctcttacggacttcggtccgtaagaggcatcagag

SEQ ID NO: 5772 - DNA, 98 bp, synthetic construct
  misc_feature 1..98: note = engineered ribonucleic acid scaffold (ERS) sequence
  source 1..98: mol_type = other DNA
actggcgcttctatctgattactctgagcgccatgaccagcgactatgtcgtatggctaaagcctcttacggacttcggtccgtaagaggcatcagag

SEQ ID NO: 5773 - DNA, 99 bp, synthetic construct
  misc_feature 1..99: note = engineered ribonucleic acid scaffold (ERS) sequence
  source 1..99: mol_type = other DNA
actggcgcttctatctgattactctgagcgccatgaccagcgactatgtcgtatgggctaaagcctcttacggacttcggtccgtaagaggcatcagag

SEQ ID NO: 5774 - DNA, 98 bp, synthetic construct
  misc_feature 1..98: note = engineered ribonucleic acid scaffold (ERS) sequence
  source 1..98: mol_type = other DNA
actggcgcttctatctgattactctgagcgccatgaccagcgactatgtcgtatgggtaaagcctcttacggacttcggtccgtaagaggcatcagag

SEQ ID NO: 5775 - DNA, 98 bp, synthetic construct
  misc_feature 1..98: note = engineered ribonucleic acid scaffold (ERS) sequence
  source 1..98: mol_type = other DNA
actggcgcttctatctgattactctgagcgccatccccagcgactatgtcgtatgggtaaagcctcttacggacttcggtccgtaagaggcatcagag

SEQ ID NO: 5776 - DNA, 99 bp, synthetic construct
  misc_feature 1..99: note = engineered ribonucleic acid scaffold (ERS) sequence
  source 1..99: mol_type = other DNA
actggcgcttctatctgattactctgagcgccatcgccagcgactatgtcgtatggcgtaaagcctcttacggacttcggtccgtaagaggcatcagag

SEQ ID NO: 5777 - DNA, 98 bp, synthetic construct
  misc_feature 1..98: note = engineered ribonucleic acid scaffold (ERS) sequence
  source 1..98: mol_type = other DNA
actggcgcttctatctgattactctgagcgccatcgccagcgactatgtcgtatgggtaaagcctcttacggacttcggtccgtaagaggcatcagag

SEQ ID NO: 5778 - DNA, 98 bp, synthetic construct
  misc_feature 1..98: note = engineered ribonucleic acid scaffold (ERS) sequence
  source 1..98: mol_type = other DNA
actggcgcttctatctgattactctgagcgccatctccagcgactatgtcgtatgggtaaagcctcttacggacttcggtccgtaagaggcatcagag

SEQ ID NO: 5779 - DNA, 98 bp, synthetic construct
  misc_feature 1..98: note = engineered ribonucleic acid scaffold (ERS) sequence
  source 1..98: mol_type = other DNA
actggcgcttctatctgattactctgagcgccatcacctgcgactatgtcgtaagggtaaagcctcttacggacttcggtccgtaagaggcatcagag

SEQ ID NO: 5780 - DNA, 98 bp, synthetic construct
  misc_feature 1..98: note = engineered ribonucleic acid scaffold (ERS) sequence
  source 1..98: mol_type = other DNA
actggcgcttctatctgattactctgagcgccatcaccagagactatgtcttatgggtaaagcctcttacggacttcggtccgtaagaggcatcagag

SEQ ID NO: 5781 - DNA, 98 bp, synthetic construct
  misc_feature 1..98: note = engineered ribonucleic acid scaffold (ERS) sequence
  source 1..98: mol_type = other DNA
actggcgcttctatctgattactctgagcgccatcaccagggactatgtcctatgggtaaagcctcttacggacttcggtccgtaagaggcatcagag

SEQ ID NO: 5782 - DNA, 99 bp, synthetic construct
  misc_feature 1..99: note = engineered ribonucleic acid scaffold (ERS) sequence
  source 1..99: mol_type = other DNA
actggcgcttctatctgattactctgagcgccatcaccaggcactatgtgctattgggtaaagcctcttacggacttcggtccgtaagaggcatcagag

SEQ ID NO: 5783 - DNA, 98 bp, synthetic construct
  misc_feature 1..98: note = engineered ribonucleic acid scaffold (ERS) sequence
  source 1..98: mol_type = other DNA
actggcgcttctatctgattactctgagcgccatcaccagccactatgtggtatgggtaaagcctcttacggacttcggtccgtaagaggcatcagag

SEQ ID NO: 5784 - DNA, 98 bp, synthetic construct
  misc_feature 1..98: note = engineered ribonucleic acid scaffold (ERS) sequence
  source 1..98: mol_type = other DNA
actggcgcttctatctgattactctgagcgccatcaccagctactatgtagtatgggtaaagcctcttacggacttcggtccgtaagaggcatcagag

SEQ ID NO: 5785 - DNA, 98 bp, synthetic construct
  misc_feature 1..98: note = engineered ribonucleic acid scaffold (ERS) sequence
  source 1..98: mol_type = other DNA
actggcgcttctatctgattactctgagcgccatcaccagcgattatgtcgtatgggtaaagcctcttacggacttcggtccgtaagaggcatcagag

SEQ ID NO: 5786 - DNA, 98 bp, synthetic construct
  misc_feature 1..98: note = engineered ribonucleic acid scaffold (ERS) sequence
  source 1..98: mol_type = other DNA
actggcgcttctatctgattactctgagcgccatcaccagcgacgatgtcgtatgggtaaagcctcttacggacttcggtccgtaagaggcatcagag

SEQ ID NO: 5787 - DNA, 98 bp, synthetic construct
  misc_feature 1..98: note = engineered ribonucleic acid scaffold (ERS) sequence
  source 1..98: mol_type = other DNA
actggcgcttctatctgattactctgagcgccatcaccagcgactctgtcgtatgggtaaagcctcttacggacttcggtccgtaagaggcatcagag

SEQ ID NO: 5788 - DNA, 98 bp, synthetic construct
  misc_feature 1..98: note = engineered ribonucleic acid scaffold (ERS) sequence
  source 1..98: mol_type = other DNA
actggcgcttctatctgattactctgagcgccatcaccagcgactatgtcgtgtgggtaaagcctcttacggacttcggtccgtaagaggcatcagag

SEQ ID NO: 5789 - DNA, 99 bp, synthetic construct
  misc_feature 1..99: note = engineered ribonucleic acid scaffold (ERS) sequence
  source 1..99: mol_type = other DNA
actggcgcttctatctgattactctgagcgccatcaccagcgactatgtcgtattgggtaaagcctcttacggacttcggtccgtaagaggcatcagag

SEQ ID NO: 5790 - DNA, 99 bp, synthetic construct
  misc_feature 1..99: note = engineered ribonucleic acid scaffold (ERS) sequence
  source 1..99: mol_type = other DNA
actggcgcttctatctgattactctgagcgccatcaccagcgactatgtcgtatggagtaaagcctcttacggacttcggtccgtaagaggcatcagag

SEQ ID NO: 5791 - DNA, 99 bp, synthetic construct
  misc_feature 1..99: note = engineered ribonucleic acid scaffold (ERS) sequence
  source 1..99: mol_type = other DNA
actggcgcttctatctgattactctgagcgccatcaccagcgactatgtcgtatggcgtaaagcctcttacggacttcggtccgtaagaggcatcagag

SEQ ID NO: 5792 - DNA, 99 bp, synthetic construct
  misc_feature 1..99: note = engineered ribonucleic acid scaffold (ERS) sequence
  source 1..99: mol_type = other DNA
actggcgcttctatctgattactctgagcgccatcaccagcgactatgtcgtatggtgtaaagcctcttacggacttcggtccgtaagaggcatcagag

SEQ ID NO: 5793 - DNA, 99 bp, synthetic construct
  misc_feature 1..99: note = engineered ribonucleic acid scaffold (ERS) sequence
  source 1..99: mol_type = other DNA
actggcgcttctatctgattactctgagcgccatcaccagcgactatgtcgtatgggctaaagcctcttacggacttcggtccgtaagaggcatcagag

SEQ ID NO: 5794 - DNA, 96 bp, synthetic construct
  misc_feature 1..96: note = engineered ribonucleic acid scaffold (ERS) sequence
  source 1..96: mol_type = other DNA
actggcgcttctatctgattactctgagcgccatcaccagcgactatgtcgtatgggtagcctcttacggacttcggtccgtaagaggcatcagag

SEQ ID NO: 5795 - DNA, 98 bp, synthetic construct
  misc_feature 1..98: note = engineered ribonucleic acid scaffold (ERS) sequence
  source 1..98: mol_type = other DNA
actggcgcttctatctgattactctgagcgccatcaccagcgactatgtcgtatgggtgaagcctcttacggacttcggtccgtaagaggcatcagag

SEQ ID NO: 5796 - DNA, 98 bp, synthetic construct
  misc_feature 1..98: note = engineered ribonucleic acid scaffold (ERS) sequence
  source 1..98: mol_type = other DNA
actggcgcttctatctgattactctgagcgccatcaccagcgactatgtcgtatgggtagagcctcttacggacttcggtccgtaagaggcatcagag

SEQ ID NO: 5797 - DNA, 98 bp, synthetic construct
  misc_feature 1..98: note = engineered ribonucleic acid scaffold (ERS) sequence
  source 1..98: mol_type = other DNA
actggcgcttctatctgattactctgagcgccaacaccagcgactatgtcgtatgggtaaagccgcttagggacttcggtccctaagaggcatcagag

SEQ ID NO: 5798 - DNA, 98 bp, synthetic construct
  misc_feature 1..98: note = engineered ribonucleic acid scaffold (ERS) sequence
  source 1..98: mol_type = other DNA
actggcgcttctatctgattactctgagcgccagcaccagcgactatgtcgtatgggtaaagccgcttagggacttcggtccctaagaggcatcagag

SEQ ID NO: 5799 - DNA, 98 bp, synthetic construct
  misc_feature 1..98: note = engineered ribonucleic acid scaffold (ERS) sequence
  source 1..98: mol_type = other DNA
actggcgcttctatctgattactctgagcgccatgaccagcgactatgtcgtatggctaaagccgcttagggacttcggtccctaagaggcatcagag

SEQ ID NO: 5800 - DNA, 99 bp, synthetic construct
  misc_feature 1..99: note = engineered ribonucleic acid scaffold (ERS) sequence
  source 1..99: mol_type = other DNA
actggcgcttctatctgattactctgagcgccatgaccagcgactatgtcgtatgggctaaagccgcttagggacttcggtccctaagaggcatcagag

SEQ ID NO: 5801 - DNA, 98 bp, synthetic construct
  misc_feature 1..98: note = engineered ribonucleic acid scaffold (ERS) sequence
  source 1..98: mol_type = other DNA
actggcgcttctatctgattactctgagcgccatgaccagcgactatgtcgtatgggtaaagccgcttagggacttcggtccctaagaggcatcagag

SEQ ID NO: 5802 - DNA, 98 bp, synthetic construct
  misc_feature 1..98: note = engineered ribonucleic acid scaffold (ERS) sequence
  source 1..98: mol_type = other DNA
actggcgcttctatctgattactctgagcgccatccccagcgactatgtcgtatgggtaaagccgcttagggacttcggtccctaagaggcatcagag

SEQ ID NO: 5803 - DNA, 99 bp, synthetic construct
  misc_feature 1..99: note = engineered ribonucleic acid scaffold (ERS) sequence
  source 1..99: mol_type = other DNA
actggcgcttctatctgattactctgagcgccatcgccagcgactatgtcgtatggcgtaaagccgcttagggacttcggtccctaagaggcatcagag

SEQ ID NO: 5804 - DNA, 98 bp, synthetic construct
  misc_feature 1..98: note = engineered ribonucleic acid scaffold (ERS) sequence
  source 1..98: mol_type = other DNA
actggcgcttctatctgattactctgagcgccatcgccagcgactatgtcgtatgggtaaagccgcttagggacttcggtccctaagaggcatcagag

SEQ ID NO: 5805 - DNA, 98 bp, synthetic construct
  misc_feature 1..98: note = engineered ribonucleic acid scaffold (ERS) sequence
  source 1..98: mol_type = other DNA
actggcgcttctatctgattactctgagcgccatctccagcgactatgtcgtatgggtaaagccgcttagggacttcggtccctaagaggcatcagag

SEQ ID NO: 5806 - DNA, 98 bp, synthetic construct
  misc_feature 1..98: note = engineered ribonucleic acid scaffold (ERS) sequence
  source 1..98: mol_type = other DNA
actggcgcttctatctgattactctgagcgccatcacctgcgactatgtcgtaagggtaaagccgcttagggacttcggtccctaagaggcatcagag

SEQ ID NO: 5807 - DNA, 98 bp, synthetic construct
  misc_feature 1..98: note = engineered ribonucleic acid scaffold (ERS) sequence
  source 1..98: mol_type = other DNA
actggcgcttctatctgattactctgagcgccatcaccagagactatgtcttatgggtaaagccgcttagggacttcggtccctaagaggcatcagag

SEQ ID NO: 5808 - DNA, 98 bp, synthetic construct
  misc_feature 1..98: note = engineered ribonucleic acid scaffold (ERS) sequence
  source 1..98: mol_type = other DNA
actggcgcttctatctgattactctgagcgccatcaccagggactatgtcctatgggtaaagccgcttagggacttcggtccctaagaggcatcagag

SEQ ID NO: 5809 - DNA, 99 bp, synthetic construct
  misc_feature 1..99: note = engineered ribonucleic acid scaffold (ERS) sequence
  source 1..99: mol_type = other DNA
actggcgcttctatctgattactctgagcgccatcaccaggcactatgtgctattgggtaaagccgcttagggacttcggtccctaagaggcatcagag

SEQ ID NO: 5810 - DNA, 98 bp, synthetic construct
  misc_feature 1..98: note = engineered ribonucleic acid scaffold (ERS) sequence
  source 1..98: mol_type = other DNA
actggcgcttctatctgattactctgagcgccatcaccagccactatgtggtatgggtaaagccgcttagggacttcggtccctaagaggcatcagag

SEQ ID NO: 5811 - DNA, 98 bp, synthetic construct
  misc_feature 1..98: note = engineered ribonucleic acid scaffold (ERS) sequence
  source 1..98: mol_type = other DNA
actggcgcttctatctgattactctgagcgccatcaccagctactatgtagtatgggtaaagccgcttagggacttcggtccctaagaggcatcagag

SEQ ID NO: 5812 - DNA, 98 bp, synthetic construct
  misc_feature 1..98: note = engineered ribonucleic acid scaffold (ERS) sequence
  source 1..98: mol_type = other DNA
actggcgcttctatctgattactctgagcgccatcaccagcgattatgtcgtatgggtaaagccgcttagggacttcggtccctaagaggcatcagag

SEQ ID NO: 5813 - DNA, 98 bp, synthetic construct
  misc_feature 1..98: note = engineered ribonucleic acid scaffold (ERS) sequence
  source 1..98: mol_type = other DNA
actggcgcttctatctgattactctgagcgccatcaccagcgacgatgtcgtatgggtaaagccgcttagggacttcggtccctaagaggcatcagag

SEQ ID NO: 5814 - DNA, 98 bp, synthetic construct
  misc_feature 1..98: note = engineered ribonucleic acid scaffold (ERS) sequence
  source 1..98: mol_type = other DNA
actggcgcttctatctgattactctgagcgccatcaccagcgactctgtcgtatgggtaaagccgcttagggacttcggtccctaagaggcatcagag

SEQ ID NO: 5815 - DNA, 98 bp, synthetic construct
  misc_feature 1..98: note = engineered ribonucleic acid scaffold (ERS) sequence
  source 1..98: mol_type = other DNA
actggcgcttctatctgattactctgagcgccatcaccagcgactatgtcgtgtgggtaaagccgcttagggacttcggtccctaagaggcatcagag

SEQ ID NO: 5816 - DNA, 99 bp, synthetic construct
  misc_feature 1..99: note = engineered ribonucleic acid scaffold (ERS) sequence
  source 1..99: mol_type = other DNA
actggcgcttctatctgattactctgagcgccatcaccagcgactatgtcgtattgggtaaagccgcttagggacttcggtccctaagaggcatcagag

SEQ ID NO: 5817 - DNA, 99 bp, synthetic construct
  misc_feature 1..99: note = engineered ribonucleic acid scaffold (ERS) sequence
  source 1..99: mol_type = other DNA
actggcgcttctatctgattactctgagcgccatcaccagcgactatgtcgtatggagtaaagccgcttagggacttcggtccctaagaggcatcagag

SEQ ID NO: 5818 - DNA, 99 bp, synthetic construct
  misc_feature 1..99: note = engineered ribonucleic acid scaffold (ERS) sequence
  source 1..99: mol_type = other DNA
actggcgcttctatctgattactctgagcgccatcaccagcgactatgtcgtatggcgtaaagccgcttagggacttcggtccctaagaggcatcagag

SEQ ID NO: 5819 - DNA, 99 bp, synthetic construct
  misc_feature 1..99: note = engineered ribonucleic acid scaffold (ERS) sequence
  source 1..99: mol_type = other DNA
actggcgcttctatctgattactctgagcgccatcaccagcgactatgtcgtatggtgtaaagccgcttagggacttcggtccctaagaggcatcagag

SEQ ID NO: 5820 - DNA, 99 bp, synthetic construct
  misc_feature 1..99: note = engineered ribonucleic acid scaffold (ERS) sequence
  source 1..99: mol_type = other DNA
actggcgcttctatctgattactctgagcgccatcaccagcgactatgtcgtatgggctaaagccgcttagggacttcggtccctaagaggcatcagag

SEQ ID NO: 5821 - DNA, 96 bp, synthetic construct
  misc_feature 1..96: note = engineered ribonucleic acid scaffold (ERS) sequence
  source 1..96: mol_type = other DNA
actggcgcttctatctgattactctgagcgccatcaccagcgactatgtcgtatgggtagccgcttagggacttcggtccctaagaggcatcagag

SEQ ID NO: 5822 - DNA, 98 bp, synthetic construct
  misc_feature 1..98: note = engineered ribonucleic acid scaffold (ERS) sequence
  source 1..98: mol_type = other DNA
actggcgcttctatctgattactctgagcgccatcaccagcgactatgtcgtatgggtgaagccgcttagggacttcggtccctaagaggcatcagag

SEQ ID NO: 5823 - DNA, 98 bp, synthetic construct
  misc_feature 1..98: note = engineered ribonucleic acid scaffold (ERS) sequence
  source 1..98: mol_type = other DNA
actggcgcttctatctgattactctgagcgccatcaccagcgactatgtcgtatgggtagagccgcttagggacttcggtccctaagaggcatcagag

SEQ ID NO: 5824 - DNA, 87 bp, synthetic construct
  misc_feature 1..87: note = engineered ribonucleic acid scaffold (ERS) sequence
  source 1..87: mol_type = other DNA
actggcgcttctatctgattactctcagcgccatcaccagcgactatgtcgtagtgggtaaactccctcttcggagggagatcagac

SEQ ID NO: 5825 - DNA, 87 bp, synthetic construct
  misc_feature 1..87: note = engineered ribonucleic acid scaffold (ERS) sequence
  source 1..87: mol_type = other DNA
actggcgcttctatctgattactttgagcgccatcaccagcgactatgtcgtagtgggtaaactccctcttcggagggagatcagag

SEQ ID NO: 5826 - DNA, 87 bp, synthetic construct
  misc_feature 1..87: note = engineered ribonucleic acid scaffold (ERS) sequence
  source 1..87: mol_type = other DNA
actggcgcttctatctgattactttgagcgccatcaccagcgactatgtcgtagtgggtaaactccctcttcggagggagatcaaag

SEQ ID NO: 5827 - DNA, 87 bp, synthetic construct
  misc_feature 1..87: note = engineered ribonucleic acid scaffold (ERS) sequence
  source 1..87: mol_type = other DNA
actggcgcttctatctgattagtctcagcgccatcaccagcgactatgtcgtagtgggtaaactccctcttcggagggagatgagac

SEQ ID NO: 5828 - DNA, 87 bp, synthetic construct
  misc_feature 1..87: note = engineered ribonucleic acid scaffold (ERS) sequence
  source 1..87: mol_type = other DNA
actggcgcttctatctgattagtctgagcgccatcaccagcgactatgtcgtagtgggtaaactccctcttcggagggagatcagac

SEQ ID NO: 5829 - DNA, 87 bp, synthetic construct
  misc_feature 1..87: note = engineered ribonucleic acid scaffold (ERS) sequence
  source 1..87: mol_type = other DNA
actggcgcttctatctgattactctcagcgccatcaccagcgactatgtcgtagtgggtaaactccctcttcggagggagatgagag

SEQ ID NO: 5830 - DNA, 87 bp, synthetic construct
  misc_feature 1..87: note = engineered ribonucleic acid scaffold (ERS) sequence
  source 1..87: mol_type = other DNA
actggcgctcccatctgattaccccgagcgccatcaccagcgactatgtcgtagtgggtaaactccctcttcggagggagatcgggg

SEQ ID NO: 5831 - DNA, 87 bp, synthetic construct
  misc_feature 1..87: note = engineered ribonucleic acid scaffold (ERS) sequence
  source 1..87: mol_type = other DNA
actggcgctcctatctgattactccgagcgccatcaccagcgactatgtcgtagtgggtaaactccctcttcggagggagatcggag

SEQ ID NO: 5832 - DNA, 87 bp, synthetic construct
  misc_feature 1..87: note = engineered ribonucleic acid scaffold (ERS) sequence
  source 1..87: mol_type = other DNA
actggcgctgggatctgattaccccgagcgccatcaccagcgactatgtcgtagtgggtaaactccctcttcggagggagatcgggg

SEQ ID NO: 5833 - DNA, 87 bp, synthetic construct
  misc_feature 1..87: note = engineered ribonucleic acid scaffold (ERS) sequence
  source 1..87: mol_type = other DNA
actggcgctggtatctgattactccgagcgccatcaccagcgactatgtcgtagtgggtaaactccctcttcggagggagatcggag

SEQ ID NO: 5834 - DNA, 87 bp, synthetic construct
  misc_feature 1..87: note = engineered ribonucleic acid scaffold (ERS) sequence
  source 1..87: mol_type = other DNA
actggcgcttccatctgattaccctgagcgccatcaccagcgactatgtcgtagtgggtaaactccctcttcggagggagatcaggg

SEQ ID NO: 5835 - DNA, 87 bp, synthetic construct
  misc_feature 1..87: note = engineered ribonucleic acid scaffold (ERS) sequence
  source 1..87: mol_type = other DNA
actggcgcttggatctgattaccctgagcgccatcaccagcgactatgtcgtagtgggtaaactccctcttcggagggagatcaggg

SEQ ID NO: 5836 - DNA, 87 bp, synthetic construct
  misc_feature 1..87: note = engineered ribonucleic acid scaffold (ERS) sequence
  source 1..87: mol_type = other DNA
actggcgcttgtatctgattactctgagcgccatcaccagcgactatgtcgtagtgggtaaactccctcttcggagggagatcagag

SEQ ID NO: 5837 - DNA, 87 bp, synthetic construct
  misc_feature 1..87: note = engineered ribonucleic acid scaffold (ERS) sequence
  source 1..87: mol_type = other DNA
actggcgcttttatctgattactttgagcgccatcaccagcgactatgtcgtagtgggtaaactccctcttcggagggagatcagag

SEQ ID NO: 5838 - DNA, 87 bp, synthetic construct
  misc_feature 1..87: note = engineered ribonucleic acid scaffold (ERS) sequence
  source 1..87: mol_type = other DNA
actggcgcttttatctgattactctgagcgccatcaccagcgactatgtcgtagtgggtaaactccctcttcggagggagatcagag

SEQ ID NO: 5839 - DNA, 87 bp, synthetic construct
  misc_feature 1..87: note = engineered ribonucleic acid scaffold (ERS) sequence
  source 1..87: mol_type = other DNA
actggcgcttttatctgattactctgagcgccatcaccagcgactatgtcgtagtgggtaaactccctcttcggagggagatcaaag

SEQ ID NO: 5840 - DNA, 87 bp, synthetic construct
  misc_feature 1..87: note = engineered ribonucleic acid scaffold (ERS) sequence
  source 1..87: mol_type = other DNA
actggcgcttctatctgattactctgagcgccatcaccagcgactatgtcgtagtgggtaaactccctcttcggagggagctcagag

SEQ ID NO: 5841 - DNA, 87 bp, synthetic construct
  misc_feature 1..87: note = engineered ribonucleic acid scaffold (ERS) sequence
  source 1..87: mol_type = other DNA
actggcgcttctatctgattactctgagcgccatcaccagcgactatgtcgtagtgggtaaactccctcttcggagggaggtcagag

SEQ ID NO: 5842 - DNA, 87 bp, synthetic construct
  misc_feature 1..87: note = engineered ribonucleic acid scaffold (ERS) sequence
  source 1..87: mol_type = other DNA
actggcgcttctatctgattactctgagcgccatcaccagcgactatgtcgtagtgggtaaactccctcttcggagggagatcaaag

SEQ ID NO: 5843 - DNA, 89 bp, synthetic construct
  misc_feature 1..89: note = engineered ribonucleic acid scaffold (ERS) sequence
  source 1..89: mol_type = other DNA
actggcgcttctatctgattactctcagcgccatcaccagcgactatgtcgtagtgggtaaagcgccctcttcggagggagcatcagac

SEQ ID NO: 5844 - DNA, 89 bp, synthetic construct
  misc_feature 1..89: note = engineered ribonucleic acid scaffold (ERS) sequence
  source 1..89: mol_type = other DNA
actggcgcttctatctgattactttgagcgccatcaccagcgactatgtcgtagtgggtaaagcgccctcttcggagggagcatcagag

SEQ ID NO: 5845 - DNA, 89 bp, synthetic construct
  misc_feature 1..89: note = engineered ribonucleic acid scaffold (ERS) sequence
  source 1..89: mol_type = other DNA
actggcgcttctatctgattactttgagcgccatcaccagcgactatgtcgtagtgggtaaagcgccctcttcggagggagcatcaaag

SEQ ID NO: 5846 - DNA, 89 bp, synthetic construct
  misc_feature 1..89: note = engineered ribonucleic acid scaffold (ERS) sequence
  source 1..89: mol_type = other DNA
actggcgcttctatctgattagtctcagcgccatcaccagcgactatgtcgtagtgggtaaagcgccctcttcggagggagcatgagac

SEQ ID NO: 5847 - DNA, 89 bp, synthetic construct
  misc_feature 1..89: note = engineered ribonucleic acid scaffold (ERS) sequence
  source 1..89: mol_type = other DNA
actggcgcttctatctgattagtctgagcgccatcaccagcgactatgtcgtagtgggtaaagcgccctcttcggagggagcatcagac

SEQ ID NO: 5848 - DNA, 89 bp, synthetic construct
  misc_feature 1..89: note = engineered ribonucleic acid scaffold (ERS) sequence
  source 1..89: mol_type = other DNA
actggcgcttctatctgattactctcagcgccatcaccagcgactatgtcgtagtgggtaaagcgccctcttcggagggagcatgagag

SEQ ID NO: 5849 - DNA, 89 bp, synthetic construct
  misc_feature 1..89: note = engineered ribonucleic acid scaffold (ERS) sequence
  source 1..89: mol_type = other DNA
actggcgctcccatctgattaccccgagcgccatcaccagcgactatgtcgtagtgggtaaagcgccctcttcggagggagcatcgggg

SEQ ID NO: 5850 - DNA, 89 bp, synthetic construct
  misc_feature 1..89: note = engineered ribonucleic acid scaffold (ERS) sequence
  source 1..89: mol_type = other DNA
actggcgctcctatctgattactccgagcgccatcaccagcgactatgtcgtagtgggtaaagcgccctcttcggagggagcatcggag

SEQ ID NO: 5851 - DNA, 89 bp, synthetic construct
  misc_feature 1..89: note = engineered ribonucleic acid scaffold (ERS) sequence
  source 1..89: mol_type = other DNA
actggcgctgggatctgattaccccgagcgccatcaccagcgactatgtcgtagtgggtaaagcgccctcttcggagggagcatcgggg

SEQ ID NO: 5852 - DNA, 89 bp, synthetic construct
  misc_feature 1..89: note = engineered ribonucleic acid scaffold (ERS) sequence
  source 1..89: mol_type = other DNA
actggcgctggtatctgattactccgagcgccatcaccagcgactatgtcgtagtgggtaaagcgccctcttcggagggagcatcggag

SEQ ID NO: 5853 - DNA, 89 bp, synthetic construct
  misc_feature 1..89: note = engineered ribonucleic acid scaffold (ERS) sequence
  source 1..89: mol_type = other DNA
actggcgcttccatctgattaccctgagcgccatcaccagcgactatgtcgtagtgggtaaagcgccctcttcggagggagcatcaggg

SEQ ID NO: 5854 - DNA, 89 bp, synthetic construct
  misc_feature 1..89: note = engineered ribonucleic acid scaffold (ERS) sequence
  source 1..89: mol_type = other DNA
actggcgcttggatctgattaccctgagcgccatcaccagcgactatgtcgtagtgggtaaagcgccctcttcggagggagcatcaggg

SEQ ID NO: 5855 - DNA, 89 bp, synthetic construct
  misc_feature 1..89: note = engineered ribonucleic acid scaffold (ERS) sequence
  source 1..89: mol_type = other DNA
actggcgcttgtatctgattactctgagcgccatcaccagcgactatgtcgtagtgggtaaagcgccctcttcggagggagcatcagag

SEQ ID NO: 5856 - DNA, 89 bp, synthetic construct
  misc_feature 1..89: note = engineered ribonucleic acid scaffold (ERS) sequence
  source 1..89: mol_type = other DNA
actggcgcttttatctgattactttgagcgccatcaccagcgactatgtcgtagtgggtaaagcgccctcttcggagggagcatcagag

SEQ ID NO: 5857 - DNA, 89 bp, synthetic construct
  misc_feature 1..89: note = engineered ribonucleic acid scaffold (ERS) sequence
  source 1..89: mol_type = other DNA
actggcgcttttatctgattactctgagcgccatcaccagcgactatgtcgtagtgggtaaagcgccctcttcggagggagcatcagag

SEQ ID NO: 5858 - DNA, 89 bp, synthetic construct
  misc_feature 1..89: note = engineered ribonucleic acid scaffold (ERS) sequence
  source 1..89: mol_type = other DNA
actggcgcttttatctgattactctgagcgccatcaccagcgactatgtcgtagtgggtaaagcgccctcttcggagggagcatcaaag

SEQ ID NO: 5859 - DNA, 89 bp, synthetic construct
  misc_feature 1..89: note = engineered ribonucleic acid scaffold (ERS) sequence
  source 1..89: mol_type = other DNA
actggcgcttctatctgattactctgagcgccatcaccagcgactatgtcgtagtgggtaaagcgccctcttcggagggagcctcagag

SEQ ID NO: 5860 - DNA, 89 bp, synthetic construct
  misc_feature 1..89: note = engineered ribonucleic acid scaffold (ERS) sequence
  source 1..89: mol_type = other DNA
actggcgcttctatctgattactctgagcgccatcaccagcgactatgtcgtagtgggtaaagcgccctcttcggagggagcgtcagag

SEQ ID NO: 5861 - DNA, 89 bp, synthetic construct
  misc_feature 1..89: note = engineered ribonucleic acid scaffold (ERS) sequence
  source 1..89: mol_type = other DNA
actggcgcttctatctgattactctgagcgccatcaccagcgactatgtcgtagtgggtaaagcgccctcttcggagggagcatcaaag

SEQ ID NO: 5862 - DNA, 99 bp, synthetic construct
  misc_feature 1..99: note = engineered ribonucleic acid scaffold (ERS) sequence
  source 1..99: mol_type = other DNA
actggcgcttctatctgattactctcagcgccatcaccagcgactatgtcgtagtgggtaaagcgccttacggacttcggtccgtaaggagcatcagac

SEQ ID NO: 5863 - DNA, 99 bp, synthetic construct
  misc_feature 1..99: note = engineered ribonucleic acid scaffold (ERS) sequence
  source 1..99: mol_type = other DNA
actggcgcttctatctgattactttgagcgccatcaccagcgactatgtcgtagtgggtaaagcgccttacggacttcggtccgtaaggagcatcagag

SEQ ID NO: 5864 - DNA, 99 bp, synthetic construct
  misc_feature 1..99: note = engineered ribonucleic acid scaffold (ERS) sequence
  source 1..99: mol_type = other DNA
actggcgcttctatctgattactttgagcgccatcaccagcgactatgtcgtagtgggtaaagcgccttacggacttcggtccgtaaggagcatcaaag

SEQ ID NO: 5865 - DNA, 99 bp, synthetic construct
  misc_feature 1..99: note = engineered ribonucleic acid scaffold (ERS) sequence
  source 1..99: mol_type = other DNA
actggcgcttctatctgattagtctcagcgccatcaccagcgactatgtcgtagtgggtaaagcgccttacggacttcggtccgtaaggagcatgagac

SEQ ID NO: 5866 - DNA, 99 bp, synthetic construct
  misc_feature 1..99: note = engineered ribonucleic acid scaffold (ERS) sequence
  source 1..99: mol_type = other DNA
actggcgcttctatctgattagtctgagcgccatcaccagcgactatgtcgtagtgggtaaagcgccttacggacttcggtccgtaaggagcatcagac

SEQ ID NO: 5867 - DNA, 99 bp, synthetic construct
  misc_feature 1..99: note = engineered ribonucleic acid scaffold (ERS) sequence
  source 1..99: mol_type = other DNA
actggcgcttctatctgattactctcagcgccatcaccagcgactatgtcgtagtgggtaaagcgccttacggacttcggtccgtaaggagcatgagag

SEQ ID NO: 5868 - DNA, 99 bp, synthetic construct
  misc_feature 1..99: note = engineered ribonucleic acid scaffold (ERS) sequence
  source 1..99: mol_type = other DNA
actggcgctcccatctgattaccccgagcgccatcaccagcgactatgtcgtagtgggtaaagcgccttacggacttcggtccgtaaggagcatcgggg

SEQ ID NO: 5869 - DNA, 99 bp, synthetic construct
  misc_feature 1..99: note = engineered ribonucleic acid scaffold (ERS) sequence
  source 1..99: mol_type = other DNA
actggcgctcctatctgattactccgagcgccatcaccagcgactatgtcgtagtgggtaaagcgccttacggacttcggtccgtaaggagcatcggag

SEQ ID NO: 5870 - DNA, 99 bp, synthetic construct
  misc_feature 1..99: note = engineered ribonucleic acid scaffold (ERS) sequence
  source 1..99: mol_type = other DNA
actggcgctgggatctgattaccccgagcgccatcaccagcgactatgtcgtagtgggtaaagcgccttacggacttcggtccgtaaggagcatcgggg

SEQ ID NO: 5871 - DNA, 99 bp, synthetic construct
  misc_feature 1..99: note = engineered ribonucleic acid scaffold (ERS) sequence
  source 1..99: mol_type = other DNA
actggcgctggtatctgattactccgagcgccatcaccagcgactatgtcgtagtgggtaaagcgccttacggacttcggtccgtaaggagcatcggag

SEQ ID NO: 5872 - DNA, 99 bp, synthetic construct
  misc_feature 1..99: note = engineered ribonucleic acid scaffold (ERS) sequence
  source 1..99: mol_type = other DNA
actggcgcttccatctgattaccctgagcgccatcaccagcgactatgtcgtagtgggtaaagcgccttacggacttcggtccgtaaggagcatcaggg

SEQ ID NO: 5873 - DNA, 99 bp, synthetic construct
  misc_feature 1..99: note = engineered ribonucleic acid scaffold (ERS) sequence
  source 1..99: mol_type = other DNA
actggcgcttggatctgattaccctgagcgccatcaccagcgactatgtcgtagtgggtaaagcgccttacggacttcggtccgtaaggagcatcaggg

SEQ ID NO: 5874 - DNA, 99 bp, synthetic construct
  misc_feature 1..99: note = engineered ribonucleic acid scaffold (ERS) sequence
  source 1..99: mol_type = other DNA
actggcgcttgtatctgattactctgagcgccatcaccagcgactatgtcgtagtgggtaaagcgccttacggacttcggtccgtaaggagcatcagag

SEQ ID NO: 5875 - DNA, 99 bp, synthetic construct
  misc_feature 1..99: note = engineered ribonucleic acid scaffold (ERS) sequence
  source 1..99: mol_type = other DNA
actggcgcttttatctgattactttgagcgccatcaccagcgactatgtcgtagtgggtaaagcgccttacggacttcggtccgtaaggagcatcagag

SEQ ID NO: 5876 - DNA, 99 bp, synthetic construct
  misc_feature 1..99: note = engineered ribonucleic acid scaffold (ERS) sequence
  source 1..99: mol_type = other DNA
actggcgcttttatctgattactctgagcgccatcaccagcgactatgtcgtagtgggtaaagcgccttacggacttcggtccgtaaggagcatcagag

SEQ ID NO: 5877 - DNA, 99 bp, synthetic construct
  misc_feature 1..99: note = engineered ribonucleic acid scaffold (ERS) sequence
  source 1..99: mol_type = other DNA
actggcgcttttatctgattactctgagcgccatcaccagcgactatgtcgtagtgggtaaagcgccttacggacttcggtccgtaaggagcatcaaag

SEQ ID NO: 5878 - DNA, 99 bp, synthetic construct
  misc_feature 1..99: note = engineered ribonucleic acid scaffold (ERS) sequence
  source 1..99: mol_type = other DNA
actggcgcttctatctgattactctgagcgccatcaccagcgactatgtcgtagtgggtaaagcgccttacggacttcggtccgtaaggagcctcagag

SEQ ID NO: 5879 - DNA, 99 bp, synthetic construct
  misc_feature 1..99: note = engineered ribonucleic acid scaffold (ERS) sequence
  source 1..99: mol_type = other DNA
actggcgcttctatctgattactctgagcgccatcaccagcgactatgtcgtagtgggtaaagcgccttacggacttcggtccgtaaggagcgtcagag

SEQ ID NO: 5880 - DNA, 99 bp, synthetic construct
  misc_feature 1..99: note = engineered ribonucleic acid scaffold (ERS) sequence
  source 1..99: mol_type = other DNA
actggcgcttctatctgattactctgagcgccatcaccagcgactatgtcgtagtgggtaaagcgccttacggacttcggtccgtaaggagcatcaaag

SEQ ID NO: 5881 - DNA, 99 bp, synthetic construct
  misc_feature 1..99: note = engineered ribonucleic acid scaffold (ERS) sequence
  source 1..99: mol_type = other DNA
actggcgcttctatctgattactctcagcgccatcaccagcgactatgtcgtagtgggtaaagcgcttacggaattcgtgtccgtaagaagcatcagac

SEQ ID NO: 5882 - DNA, 99 bp, synthetic construct
  misc_feature 1..99: note = engineered ribonucleic acid scaffold (ERS) sequence
  source 1..99: mol_type = other DNA
actggcgcttctatctgattactttgagcgccatcaccagcgactatgtcgtagtgggtaaagcgcttacggaattcgtgtccgtaagaagcatcagag

SEQ ID NO: 5883 - DNA, 99 bp, synthetic construct
  misc_feature 1..99: note = engineered ribonucleic acid scaffold (ERS) sequence
  source 1..99: mol_type = other DNA
actggcgcttctatctgattactttgagcgccatcaccagcgactatgtcgtagtgggtaaagcgcttacggaattcgtgtccgtaagaagcatcaaag

SEQ ID NO: 5884 - DNA, 99 bp, synthetic construct
  misc_feature 1..99: note = engineered ribonucleic acid scaffold (ERS) sequence
  source 1..99: mol_type = other DNA
actggcgcttctatctgattagtctcagcgccatcaccagcgactatgtcgtagtgggtaaagcgcttacggaattcgtgtccgtaagaagcatgagac

SEQ ID NO: 5885 - DNA, 99 bp, synthetic construct
  misc_feature 1..99: note = engineered ribonucleic acid scaffold (ERS) sequence
  source 1..99: mol_type = other DNA
actggcgcttctatctgattagtctgagcgccatcaccagcgactatgtcgtagtgggtaaagcgcttacggaattcgtgtccgtaagaagcatcagac

SEQ ID NO: 5886 - DNA, 99 bp, synthetic construct
  misc_feature 1..99: note = engineered ribonucleic acid scaffold (ERS) sequence
  source 1..99: mol_type = other DNA
actggcgcttctatctgattactctcagcgccatcaccagcgactatgtcgtagtgggtaaagcgcttacggaattcgtgtccgtaagaagcatgagag

SEQ ID NO: 5887 - DNA, 99 bp, synthetic construct
  misc_feature 1..99: note = engineered ribonucleic acid scaffold (ERS) sequence
  source 1..99: mol_type = other DNA
actggcgctcccatctgattaccccgagcgccatcaccagcgactatgtcgtagtgggtaaagcgcttacggaattcgtgtccgtaagaagcatcgggg

SEQ ID NO: 5888 - DNA, 99 bp, synthetic construct
  misc_feature 1..99: note = engineered ribonucleic acid scaffold (ERS) sequence
  source 1..99: mol_type = other DNA
actggcgctcctatctgattactccgagcgccatcaccagcgactatgtcgtagtgggtaaagcgcttacggaattcgtgtccgtaagaagcatcggag

SEQ ID NO: 5889 - DNA, 99 bp, synthetic construct
  misc_feature 1..99: note = engineered ribonucleic acid scaffold (ERS) sequence
  source 1..99: mol_type = other DNA
actggcgctgggatctgattaccccgagcgccatcaccagcgactatgtcgtagtgggtaaagcgcttacggaattcgtgtccgtaagaagcatcgggg

SEQ ID NO: 5890 - DNA, 99 bp, synthetic construct
  misc_feature 1..99: note = engineered ribonucleic acid scaffold (ERS) sequence
  source 1..99: mol_type = other DNA
actggcgctggtatctgattactccgagcgccatcaccagcgactatgtcgtagtgggtaaagcgcttacggaattcgtgtccgtaagaagcatcggag

SEQ ID NO: 5891 - DNA, 99 bp, synthetic construct
  misc_feature 1..99: note = engineered ribonucleic acid scaffold (ERS) sequence
  source 1..99: mol_type = other DNA
actggcgcttccatctgattaccctgagcgccatcaccagcgactatgtcgtagtgggtaaagcgcttacggaattcgtgtccgtaagaagcatcaggg

SEQ ID NO: 5892 - DNA, 99 bp, synthetic construct
  misc_feature 1..99: note = engineered ribonucleic acid scaffold (ERS) sequence
  source 1..99: mol_type = other DNA
actggcgcttggatctgattaccctgagcgccatcaccagcgactatgtcgtagtgggtaaagcgcttacggaattcgtgtccgtaagaagcatcaggg

SEQ ID NO: 5893 - DNA, 99 bp, synthetic construct
  misc_feature 1..99: note = engineered ribonucleic acid scaffold (ERS) sequence
  source 1..99: mol_type = other DNA
actggcgcttgtatctgattactctgagcgccatcaccagcgactatgtcgtagtgggtaaagcgcttacggaattcgtgtccgtaagaagcatcagag

SEQ ID NO: 5894 - DNA, 99 bp, synthetic construct
  misc_feature 1..99: note = engineered ribonucleic acid scaffold (ERS) sequence
  source 1..99: mol_type = other DNA
actggcgcttttatctgattactttgagcgccatcaccagcgactatgtcgtagtgggtaaagcgcttacggaattcgtgtccgtaagaagcatcagag

SEQ ID NO: 5895 - DNA, 99 bp, synthetic construct
  misc_feature 1..99: note = engineered ribonucleic acid scaffold (ERS) sequence
  source 1..99: mol_type = other DNA
actggcgcttttatctgattactctgagcgccatcaccagcgactatgtcgtagtgggtaaagcgcttacggaattcgtgtccgtaagaagcatcagag

SEQ ID NO: 5896 - DNA, 99 bp, synthetic construct
  misc_feature 1..99: note = engineered ribonucleic acid scaffold (ERS) sequence
  source 1..99: mol_type = other DNA
actggcgcttttatctgattactctgagcgccatcaccagcgactatgtcgtagtgggtaaagcgcttacggaattcgtgtccgtaagaagcatcaaag

SEQ ID NO: 5897 - DNA, 99 bp, synthetic construct
  misc_feature 1..99: note = engineered ribonucleic acid scaffold (ERS) sequence
  source 1..99: mol_type = other DNA
actggcgcttctatctgattactctgagcgccatcaccagcgactatgtcgtagtgggtaaagcgcttacggaattcgtgtccgtaagaagcctcagag

SEQ ID NO: 5898 - DNA, 99 bp, synthetic construct
  misc_feature 1..99: note = engineered ribonucleic acid scaffold (ERS) sequence
  source 1..99: mol_type = other DNA
actggcgcttctatctgattactctgagcgccatcaccagcgactatgtcgtagtgggtaaagcgcttacggaattcgtgtccgtaagaagcgtcagag

SEQ ID NO: 5899 - DNA, 99 bp, synthetic construct
  misc_feature 1..99: note = engineered ribonucleic acid scaffold (ERS) sequence
  source 1..99: mol_type = other DNA
actggcgcttctatctgattactctgagcgccatcaccagcgactatgtcgtagtgggtaaagcgcttacggaattcgtgtccgtaagaagcatcaaag

SEQ ID NO: 5900 - DNA, 100 bp, synthetic construct
  misc_feature 1..100: note = engineered ribonucleic acid scaffold (ERS) sequence
  source 1..100: mol_type = other DNA
actggcgcttctatctgattactctcagcgccatcaccagcgactatgtcgtagtgggtaaagcgcttacggacttcgcggtccgtaagaagcatcagac

SEQ ID NO: 5901 - DNA, 100 bp, synthetic construct
  misc_feature 1..100: note = engineered ribonucleic acid scaffold (ERS) sequence
  source 1..100: mol_type = other DNA
actggcgcttctatctgattactttgagcgccatcaccagcgactatgtcgtagtgggtaaagcgcttacggacttcgcggtccgtaagaagcatcagag

SEQ ID NO: 5902 - DNA, 100 bp, synthetic construct
  misc_feature 1..100: note = engineered ribonucleic acid scaffold (ERS) sequence
  source 1..100: mol_type = other DNA
actggcgcttctatctgattactttgagcgccatcaccagcgactatgtcgtagtgggtaaagcgcttacggacttcgcggtccgtaagaagcatcaaag

SEQ ID NO: 5903 - DNA, 100 bp, synthetic construct
  misc_feature 1..100: note = engineered ribonucleic acid scaffold (ERS) sequence
  source 1..100: mol_type = other DNA
actggcgcttctatctgattagtctcagcgccatcaccagcgactatgtcgtagtgggtaaagcgcttacggacttcgcggtccgtaagaagcatgagac

SEQ ID NO: 5904 - DNA, 100 bp, synthetic construct
  misc_feature 1..100: note = engineered ribonucleic acid scaffold (ERS) sequence
  source 1..100: mol_type = other DNA
actggcgcttctatctgattagtctgagcgccatcaccagcgactatgtcgtagtgggtaaagcgcttacggacttcgcggtccgtaagaagcatcagac

SEQ ID NO: 5905 - DNA, 100 bp, synthetic construct
  misc_feature 1..100: note = engineered ribonucleic acid scaffold (ERS) sequence
  source 1..100: mol_type = other DNA
actggcgcttctatctgattactctcagcgccatcaccagcgactatgtcgtagtgggtaaagcgcttacggacttcgcggtccgtaagaagcatgagag

SEQ ID NO: 5906 - DNA, 100 bp, synthetic construct
  misc_feature 1..100: note = engineered ribonucleic acid scaffold (ERS) sequence
  source 1..100: mol_type = other DNA
actggcgctcccatctgattaccccgagcgccatcaccagcgactatgtcgtagtgggtaaagcgcttacggacttcgcggtccgtaagaagcatcgggg

SEQ ID NO: 5907 - DNA, 100 bp, synthetic construct
  misc_feature 1..100: note = engineered ribonucleic acid scaffold (ERS) sequence
  source 1..100: mol_type = other DNA
actggcgctcctatctgattactccgagcgccatcaccagcgactatgtcgtagtgggtaaagcgcttacggacttcgcggtccgtaagaagcatcggag

SEQ ID NO: 5908 - DNA, 100 bp, synthetic construct
  misc_feature 1..100: note = engineered ribonucleic acid scaffold (ERS) sequence
  source 1..100: mol_type = other DNA
actggcgctgggatctgattaccccgagcgccatcaccagcgactatgtcgtagtgggtaaagcgcttacggacttcgcggtccgtaagaagcatcgggg

SEQ ID NO: 5909 - DNA, 100 bp, synthetic construct
  misc_feature 1..100: note = engineered ribonucleic acid scaffold (ERS) sequence
  source 1..100: mol_type = other DNA
actggcgctggtatctgattactccgagcgccatcaccagcgactatgtcgtagtgggtaaagcgcttacggacttcgcggtccgtaagaagcatcggag

SEQ ID NO: 5910 - DNA, 100 bp, synthetic construct
  misc_feature 1..100: note = engineered ribonucleic acid scaffold (ERS) sequence
  source 1..100: mol_type = other DNA
actggcgcttccatctgattaccctgagcgccatcaccagcgactatgtcgtagtgggtaaagcgcttacggacttcgcggtccgtaagaagcatcaggg

SEQ ID NO: 5911 - DNA, 100 bp, synthetic construct
  misc_feature 1..100: note = engineered ribonucleic acid scaffold (ERS) sequence
  source 1..100: mol_type = other DNA
actggcgcttggatctgattaccctgagcgccatcaccagcgactatgtcgtagtgggtaaagcgcttacggacttcgcggtccgtaagaagcatcaggg

SEQ ID NO: 5912 - DNA, 100 bp, synthetic construct
  misc_feature 1..100: note = engineered ribonucleic acid scaffold (ERS) sequence
  source 1..100: mol_type = other DNA
actggcgcttgtatctgattactctgagcgccatcaccagcgactatgtcgtagtgggtaaagcgcttacggacttcgcggtccgtaagaagcatcagag

SEQ ID NO: 5913 - DNA, 100 bp, synthetic construct
  misc_feature 1..100: note = engineered ribonucleic acid scaffold (ERS) sequence
  source 1..100: mol_type = other DNA
actggcgcttttatctgattactttgagcgccatcaccagcgactatgtcgtagtgggtaaagcgcttacggacttcgcggtccgtaagaagcatcagag

SEQ ID NO: 5914 - DNA, 100 bp, synthetic construct
  misc_feature 1..100: note = engineered ribonucleic acid scaffold (ERS) sequence
  source 1..100: mol_type = other DNA
actggcgcttttatctgattactctgagcgccatcaccagcgactatgtcgtagtgggtaaagcgcttacggacttcgcggtccgtaagaagcatcagag

SEQ ID NO: 5915 - DNA, 100 bp, synthetic construct
  misc_feature 1..100: note = engineered ribonucleic acid scaffold (ERS) sequence
  source 1..100: mol_type = other DNA
actggcgcttttatctgattactctgagcgccatcaccagcgactatgtcgtagtgggtaaagcgcttacggacttcgcggtccgtaagaagcatcaaag

SEQ ID NO: 5916 - DNA, 100 bp, synthetic construct
  misc_feature 1..100: note = engineered ribonucleic acid scaffold (ERS) sequence
  source 1..100: mol_type = other DNA
actggcgcttctatctgattactctgagcgccatcaccagcgactatgtcgtagtgggtaaagcgcttacggacttcgcggtccgtaagaagcctcagag

SEQ ID NO: 5917 - DNA, 100 bp, synthetic construct
  misc_feature 1..100: note = engineered ribonucleic acid scaffold (ERS) sequence
  source 1..100: mol_type = other DNA
actggcgcttctatctgattactctgagcgccatcaccagcgactatgtcgtagtgggtaaagcgcttacggacttcgcggtccgtaagaagcgtcagag

SEQ ID NO: 5918 - DNA, 100 bp, synthetic construct
  misc_feature 1..100: note = engineered ribonucleic acid scaffold (ERS) sequence
  source 1..100: mol_type = other DNA
actggcgcttctatctgattactctgagcgccatcaccagcgactatgtcgtagtgggtaaagcgcttacggacttcgcggtccgtaagaagcatcaaag

SEQ ID NO: 5919 - DNA, 98 bp, synthetic construct
  misc_feature 1..98: note = engineered ribonucleic acid scaffold (ERS) sequence
  source 1..98: mol_type = other DNA
actggcgcttctatctgattactctcagcgccatcaccagcgactatgtcgtagtgggtaaagcgcttacggacttcggtccgtaagaagcatcagac

SEQ ID NO: 5920 - DNA, 98 bp, synthetic construct
  misc_feature 1..98: note = engineered ribonucleic acid scaffold (ERS) sequence
  source 1..98: mol_type = other DNA
actggcgcttctatctgattactttgagcgccatcaccagcgactatgtcgtagtgggtaaagcgcttacggacttcggtccgtaagaagcatcagag

SEQ ID NO: 5921 - DNA, 98 bp, synthetic construct
  misc_feature 1..98: note = engineered ribonucleic acid scaffold (ERS) sequence
  source 1..98: mol_type = other DNA
actggcgcttctatctgattactttgagcgccatcaccagcgactatgtcgtagtgggtaaagcgcttacggacttcggtccgtaagaagcatcaaag

SEQ ID NO: 5922 - DNA, 98 bp, synthetic construct
  misc_feature 1..98: note = engineered ribonucleic acid scaffold (ERS) sequence
  source 1..98: mol_type = other DNA
actggcgcttctatctgattagtctcagcgccatcaccagcgactatgtcgtagtgggtaaagcgcttacggacttcggtccgtaagaagcatgagac

SEQ ID NO: 5923 - DNA, 98 bp, synthetic construct
  misc_feature 1..98: note = engineered ribonucleic acid scaffold (ERS) sequence
  source 1..98: mol_type = other DNA
actggcgcttctatctgattagtctgagcgccatcaccagcgactatgtcgtagtgggtaaagcgcttacggacttcggtccgtaagaagcatcagac

SEQ ID NO: 5924 - DNA, 98 bp, synthetic construct
  misc_feature 1..98: note = engineered ribonucleic acid scaffold (ERS) sequence
  source 1..98: mol_type = other DNA
actggcgcttctatctgattactctcagcgccatcaccagcgactatgtcgtagtgggtaaagcgcttacggacttcggtccgtaagaagcatgagag

SEQ ID NO: 5925 - DNA, 98 bp, synthetic construct
  misc_feature 1..98: note = engineered ribonucleic acid scaffold (ERS) sequence
  source 1..98: mol_type = other DNA
actggcgctcccatctgattaccccgagcgccatcaccagcgactatgtcgtagtgggtaaagcgcttacggacttcggtccgtaagaagcatcgggg

SEQ ID NO: 5926 - DNA, 98 bp, synthetic construct
  misc_feature 1..98: note = engineered ribonucleic acid scaffold (ERS) sequence
  source 1..98: mol_type = other DNA
actggcgctcctatctgattactccgagcgccatcaccagcgactatgtcgtagtgggtaaagcgcttacggacttcggtccgtaagaagcatcggag

SEQ ID NO: 5927 - DNA, 98 bp, synthetic construct
  misc_feature 1..98: note = engineered ribonucleic acid scaffold (ERS) sequence
  source 1..98: mol_type = other DNA
actggcgctgggatctgattaccccgagcgccatcaccagcgactatgtcgtagtgggtaaagcgcttacggacttcggtccgtaagaagcatcgggg

SEQ ID NO: 5928 - DNA, 98 bp, synthetic construct
  misc_feature 1..98: note = engineered ribonucleic acid scaffold (ERS) sequence
  source 1..98: mol_type = other DNA
actggcgctggtatctgattactccgagcgccatcaccagcgactatgtcgtagtgggtaaagcgcttacggacttcggtccgtaagaagcatcggag

SEQ ID NO: 5929 - DNA, 98 bp, synthetic construct
  misc_feature 1..98: note = engineered ribonucleic acid scaffold (ERS) sequence
  source 1..98: mol_type = other DNA
actggcgcttccatctgattaccctgagcgccatcaccagcgactatgtcgtagtgggtaaagcgcttacggacttcggtccgtaagaagcatcaggg

SEQ ID NO: 5930 - DNA, 98 bp, synthetic construct
  misc_feature 1..98: note = engineered ribonucleic acid scaffold (ERS) sequence
  source 1..98: mol_type = other DNA
actggcgcttggatctgattaccctgagcgccatcaccagcgactatgtcgtagtgggtaaagcgcttacggacttcggtccgtaagaagcatcaggg

SEQ ID NO: 5931 - DNA, 98 bp, synthetic construct
  misc_feature 1..98: note = engineered ribonucleic acid scaffold (ERS) sequence
  source 1..98: mol_type = other DNA
actggcgcttgtatctgattactctgagcgccatcaccagcgactatgtcgtagtgggtaaagcgcttacggacttcggtccgtaagaagcatcagag

SEQ ID NO: 5932 - DNA, 98 bp, synthetic construct
  misc_feature 1..98: note = engineered ribonucleic acid scaffold (ERS) sequence
  source 1..98: mol_type = other DNA
actggcgcttttatctgattactttgagcgccatcaccagcgactatgtcgtagtgggtaaagcgcttacggacttcggtccgtaagaagcatcagag

SEQ ID NO: 5933 - DNA, 98 bp, synthetic construct
  misc_feature 1..98: note = engineered ribonucleic acid scaffold (ERS) sequence
  source 1..98: mol_type = other DNA
actggcgcttttatctgattactctgagcgccatcaccagcgactatgtcgtagtgggtaaagcgcttacggacttcggtccgtaagaagcatcagag

SEQ ID NO: 5934 - DNA, 98 bp, synthetic construct
  misc_feature 1..98: note = engineered ribonucleic acid scaffold (ERS) sequence
  source 1..98: mol_type = other DNA
actggcgcttttatctgattactctgagcgccatcaccagcgactatgtcgtagtgggtaaagcgcttacggacttcggtccgtaagaagcatcaaag

SEQ ID NO: 5935 - DNA, 98 bp, synthetic construct
  misc_feature 1..98: note = engineered ribonucleic acid scaffold (ERS) sequence
  source 1..98: mol_type = other DNA
actggcgcttctatctgattactctgagcgccatcaccagcgactatgtcgtagtgggtaaagcgcttacggacttcggtccgtaagaagcctcagag

SEQ ID NO: 5936 - DNA, 98 bp, synthetic construct
  misc_feature 1..98: note = engineered ribonucleic acid scaffold (ERS) sequence
  source 1..98: mol_type = other DNA
actggcgcttctatctgattactctgagcgccatcaccagcgactatgtcgtagtgggtaaagcgcttacggacttcggtccgtaagaagcgtcagag

SEQ ID NO: 5937 - DNA, 98 bp, synthetic construct
  misc_feature 1..98: note = engineered ribonucleic acid scaffold (ERS) sequence
  source 1..98: mol_type = other DNA
actggcgcttctatctgattactctgagcgccatcaccagcgactatgtcgtagtgggtaaagcgcttacggacttcggtccgtaagaagcatcaaag

SEQ ID NO: 5938 - DNA, 98 bp, synthetic construct
  misc_feature 1..98: note = engineered ribonucleic acid scaffold (ERS) sequence
  source 1..98: mol_type = other DNA
actggcgcttctatctgattactctcagcgccatcaccagcgactatgtcgtagtgggtaaagcgcttacggacttcggtccgtaagtcgcatcagac

SEQ ID NO: 5939 - DNA, 98 bp, synthetic construct
  misc_feature 1..98: note = engineered ribonucleic acid scaffold (ERS) sequence
  source 1..98: mol_type = other DNA
actggcgcttctatctgattactttgagcgccatcaccagcgactatgtcgtagtgggtaaagcgcttacggacttcggtccgtaagtcgcatcagag

SEQ ID NO: 5940 - DNA, 98 bp, synthetic construct
  misc_feature 1..98: note = engineered ribonucleic acid scaffold (ERS) sequence
  source 1..98: mol_type = other DNA
actggcgcttctatctgattactttgagcgccatcaccagcgactatgtcgtagtgggtaaagcgcttacggacttcggtccgtaagtcgcatcaaag

SEQ ID NO: 5941 - DNA, 98 bp, synthetic construct
  misc_feature 1..98: note = engineered ribonucleic acid scaffold (ERS) sequence
  source 1..98: mol_type = other DNA
actggcgcttctatctgattagtctcagcgccatcaccagcgactatgtcgtagtgggtaaagcgcttacggacttcggtccgtaagtcgcatgagac

SEQ ID NO: 5942 - DNA, 98 bp, synthetic construct
  misc_feature 1..98: note = engineered ribonucleic acid scaffold (ERS) sequence
  source 1..98: mol_type = other DNA
actggcgcttctatctgattagtctgagcgccatcaccagcgactatgtcgtagtgggtaaagcgcttacggacttcggtccgtaagtcgcatcagac

SEQ ID NO: 5943 - DNA, 98 bp, synthetic construct
  misc_feature 1..98: note = engineered ribonucleic acid scaffold (ERS) sequence
  source 1..98: mol_type = other DNA
actggcgcttctatctgattactctcagcgccatcaccagcgactatgtcgtagtgggtaaagcgcttacggacttcggtccgtaagtcgcatgagag

SEQ ID NO: 5944 - DNA, 98 bp, synthetic construct
  misc_feature 1..98: note = engineered ribonucleic acid scaffold (ERS) sequence
  source 1..98: mol_type = other DNA
actggcgctcccatctgattaccccgagcgccatcaccagcgactatgtcgtagtgggtaaagcgcttacggacttcggtccgtaagtcgcatcgggg

SEQ ID NO: 5945 - DNA, 98 bp, synthetic construct
  misc_feature 1..98: note = engineered ribonucleic acid scaffold (ERS) sequence
  source 1..98: mol_type = other DNA
actggcgctcctatctgattactccgagcgccatcaccagcgactatgtcgtagtgggtaaagcgcttacggacttcggtccgtaagtcgcatcggag

SEQ ID NO: 5946 - DNA, 98 bp, synthetic construct
  misc_feature 1..98: note = engineered ribonucleic acid scaffold (ERS) sequence
  source 1..98: mol_type = other DNA
actggcgctgggatctgattaccccgagcgccatcaccagcgactatgtcgtagtgggtaaagcgcttacggacttcggtccgtaagtcgcatcgggg

SEQ ID NO: 5947 - DNA, 98 bp, synthetic construct
  misc_feature 1..98: note = engineered ribonucleic acid scaffold (ERS) sequence
  source 1..98: mol_type = other DNA
actggcgctggtatctgattactccgagcgccatcaccagcgactatgtcgtagtgggtaaagcgcttacggacttcggtccgtaagtcgcatcggag

SEQ ID NO: 5948 - DNA, 98 bp, synthetic construct
  misc_feature 1..98: note = engineered ribonucleic acid scaffold (ERS) sequence
  source 1..98: mol_type = other DNA
actggcgcttccatctgattaccctgagcgccatcaccagcgactatgtcgtagtgggtaaagcgcttacggacttcggtccgtaagtcgcatcaggg

SEQ ID NO: 5949 - DNA, 98 bp, synthetic construct
  misc_feature 1..98: note = engineered ribonucleic acid scaffold (ERS) sequence
  source 1..98: mol_type = other DNA
actggcgcttggatctgattaccctgagcgccatcaccagcgactatgtcgtagtgggtaaagcgcttacggacttcggtccgtaagtcgcatcaggg

SEQ ID NO: 5950 - DNA, 98 bp, synthetic construct
  misc_feature 1..98: note = engineered ribonucleic acid scaffold (ERS) sequence
  source 1..98: mol_type = other DNA
actggcgcttgtatctgattactctgagcgccatcaccagcgactatgtcgtagtgggtaaagcgcttacggacttcggtccgtaagtcgcatcagag

SEQ ID NO: 5951 - DNA, 98 bp, synthetic construct
  misc_feature 1..98: note = engineered ribonucleic acid scaffold (ERS) sequence
  source 1..98: mol_type = other DNA
actggcgcttttatctgattactttgagcgccatcaccagcgactatgtcgtagtgggtaaagcgcttacggacttcggtccgtaagtcgcatcagag

SEQ ID NO: 5952 - DNA, 98 bp, synthetic construct
  misc_feature 1..98: note = engineered ribonucleic acid scaffold (ERS) sequence
  source 1..98: mol_type = other DNA
actggcgcttttatctgattactctgagcgccatcaccagcgactatgtcgtagtgggtaaagcgcttacggacttcggtccgtaagtcgcatcagag

SEQ ID NO: 5953 - DNA, 98 bp, synthetic construct
  misc_feature 1..98: note = engineered ribonucleic acid scaffold (ERS) sequence
  source 1..98: mol_type = other DNA
actggcgcttttatctgattactctgagcgccatcaccagcgactatgtcgtagtgggtaaagcgcttacggacttcggtccgtaagtcgcatcaaag

SEQ ID NO: 5954 - DNA, 98 bp, synthetic construct
  misc_feature 1..98: note = engineered ribonucleic acid scaffold (ERS) sequence
  source 1..98: mol_type = other DNA
actggcgcttctatctgattactctgagcgccatcaccagcgactatgtcgtagtgggtaaagcgcttacggacttcggtccgtaagtcgcctcagag

SEQ ID NO: 5955 - DNA, 98 bp, synthetic construct
  misc_feature 1..98: note = engineered ribonucleic acid scaffold (ERS) sequence
  source 1..98: mol_type = other DNA
actggcgcttctatctgattactctgagcgccatcaccagcgactatgtcgtagtgggtaaagcgcttacggacttcggtccgtaagtcgcgtcagag

SEQ ID NO: 5956 - DNA, 98 bp, synthetic construct
  misc_feature 1..98: note = engineered ribonucleic acid scaffold (ERS) sequence
  source 1..98: mol_type = other DNA
actggcgcttctatctgattactctgagcgccatcaccagcgactatgtcgtagtgggtaaagcgcttacggacttcggtccgtaagtcgcatcaaag

SEQ ID NO: 5957 - DNA, 98 bp, synthetic construct
  misc_feature 1..98: note = engineered ribonucleic acid scaffold (ERS) sequence
  source 1..98: mol_type = other DNA
actggcgcttctatctgattactctcagcgccatcaccagcgactatgtcgtagtgggtaaagcgcttacggagttcgatccgtaagaagcatcagac

SEQ ID NO: 5958 - DNA, 98 bp, synthetic construct
  misc_feature 1..98: note = engineered ribonucleic acid scaffold (ERS) sequence
  source 1..98: mol_type = other DNA
actggcgcttctatctgattactttgagcgccatcaccagcgactatgtcgtagtgggtaaagcgcttacggagttcgatccgtaagaagcatcagag

SEQ ID NO: 5959 - DNA, 98 bp, synthetic construct
  misc_feature 1..98: note = engineered ribonucleic acid scaffold (ERS) sequence
  source 1..98: mol_type = other DNA
actggcgcttctatctgattactttgagcgccatcaccagcgactatgtcgtagtgggtaaagcgcttacggagttcgatccgtaagaagcatcaaag

SEQ ID NO: 5960 - DNA, 98 bp, synthetic construct
  misc_feature 1..98: note = engineered ribonucleic acid scaffold (ERS) sequence
  source 1..98: mol_type = other DNA
actggcgcttctatctgattagtctcagcgccatcaccagcgactatgtcgtagtgggtaaagcgcttacggagttcgatccgtaagaagcatgagac

SEQ ID NO: 5961 - DNA, 98 bp, synthetic construct
  misc_feature 1..98: note = engineered ribonucleic acid scaffold (ERS) sequence
  source 1..98: mol_type = other DNA
actggcgcttctatctgattagtctgagcgccatcaccagcgactatgtcgtagtgggtaaagcgcttacggagttcgatccgtaagaagcatcagac

SEQ ID NO: 5962 - DNA, 98 bp, synthetic construct
  misc_feature 1..98: note = engineered ribonucleic acid scaffold (ERS) sequence
  source 1..98: mol_type = other DNA
actggcgcttctatctgattactctcagcgccatcaccagcgactatgtcgtagtgggtaaagcgcttacggagttcgatccgtaagaagcatgagag

SEQ ID NO: 5963 - DNA, 98 bp, synthetic construct
  misc_feature 1..98: note = engineered ribonucleic acid scaffold (ERS) sequence
  source 1..98: mol_type = other DNA
actggcgctcccatctgattaccccgagcgccatcaccagcgactatgtcgtagtgggtaaagcgcttacggagttcgatccgtaagaagcatcgggg

SEQ ID NO: 5964 - DNA, 98 bp, synthetic construct
  misc_feature 1..98: note = engineered ribonucleic acid scaffold (ERS) sequence
  source 1..98: mol_type = other DNA
actggcgctcctatctgattactccgagcgccatcaccagcgactatgtcgtagtgggtaaagcgcttacggagttcgatccgtaagaagcatcggag

SEQ ID NO: 5965 - DNA, 98 bp, synthetic construct
  misc_feature 1..98: note = engineered ribonucleic acid scaffold (ERS) sequence
  source 1..98: mol_type = other DNA
actggcgctgggatctgattaccccgagcgccatcaccagcgactatgtcgtagtgggtaaagcgcttacggagttcgatccgtaagaagcatcgggg

SEQ ID NO: 5966 - DNA, 98 bp, synthetic construct
  misc_feature 1..98: note = engineered ribonucleic acid scaffold (ERS) sequence
  source 1..98: mol_type = other DNA
actggcgctggtatctgattactccgagcgccatcaccagcgactatgtcgtagtgggtaaagcgcttacggagttcgatccgtaagaagcatcggag

SEQ ID NO: 5967 - DNA, 98 bp, synthetic construct
  misc_feature 1..98: note = engineered ribonucleic acid scaffold (ERS) sequence
  source 1..98: mol_type = other DNA
actggcgcttccatctgattaccctgagcgccatcaccagcgactatgtcgtagtgggtaaagcgcttacggagttcgatccgtaagaagcatcaggg

SEQ ID NO: 5968 - DNA, 98 bp, synthetic construct
  misc_feature 1..98: note = engineered ribonucleic acid scaffold (ERS) sequence
  source 1..98: mol_type = other DNA
actggcgcttggatctgattaccctgagcgccatcaccagcgactatgtcgtagtgggtaaagcgcttacggagttcgatccgtaagaagcatcaggg

SEQ ID NO: 5969 - DNA, 98 bp, synthetic construct
  misc_feature 1..98: note = engineered ribonucleic acid scaffold (ERS) sequence
  source 1..98: mol_type = other DNA
actggcgcttgtatctgattactctgagcgccatcaccagcgactatgtcgtagtgggtaaagcgcttacggagttcgatccgtaagaagcatcagag

SEQ ID NO: 5970 - DNA, 98 bp, synthetic construct
  misc_feature 1..98: note = engineered ribonucleic acid scaffold (ERS) sequence
  source 1..98: mol_type = other DNA
actggcgcttttatctgattactttgagcgccatcaccagcgactatgtcgtagtgggtaaagcgcttacggagttcgatccgtaagaagcatcagag

SEQ ID NO: 5971 - DNA, 98 bp, synthetic construct
  misc_feature 1..98: note = engineered ribonucleic acid scaffold (ERS) sequence
  source 1..98: mol_type = other DNA
actggcgcttttatctgattactctgagcgccatcaccagcgactatgtcgtagtgggtaaagcgcttacggagttcgatccgtaagaagcatcagag

SEQ ID NO: 5972 - DNA, 98 bp, synthetic construct
  misc_feature 1..98: note = engineered ribonucleic acid scaffold (ERS) sequence
  source 1..98: mol_type = other DNA
actggcgcttttatctgattactctgagcgccatcaccagcgactatgtcgtagtgggtaaagcgcttacggagttcgatccgtaagaagcatcaaag

SEQ ID NO: 5973 - DNA, 98 bp, synthetic construct
  misc_feature 1..98: note = engineered ribonucleic acid scaffold (ERS) sequence
  source 1..98: mol_type = other DNA
actggcgcttctatctgattactctgagcgccatcaccagcgactatgtcgtagtgggtaaagcgcttacggagttcgatccgtaagaagcctcagag

SEQ ID NO: 5974 - DNA, 98 bp, synthetic construct
  misc_feature 1..98: note = engineered ribonucleic acid scaffold (ERS) sequence
  source 1..98: mol_type = other DNA
actggcgcttctatctgattactctgagcgccatcaccagcgactatgtcgtagtgggtaaagcgcttacggagttcgatccgtaagaagcgtcagag

SEQ ID NO: 5975 - DNA, 98 bp, synthetic construct
  misc_feature 1..98: note = engineered ribonucleic acid scaffold (ERS) sequence
  source 1..98: mol_type = other DNA
actggcgcttctatctgattactctgagcgccatcaccagcgactatgtcgtagtgggtaaagcgcttacggagttcgatccgtaagaagcatcaaag

SEQ ID NO: 5976 - DNA, 98 bp, synthetic construct
  misc_feature 1..98: note = engineered ribonucleic acid scaffold (ERS) sequence
  source 1..98: mol_type = other DNA
actggcgcttctatctgattactctcagcgccatcaccagcgactatgtcgtagtgggtaaagcgctttcggacttcggtccggaagaagcatcagac

SEQ ID NO: 5977 - DNA, 98 bp, synthetic construct
  misc_feature 1..98: note = engineered ribonucleic acid scaffold (ERS) sequence
  source 1..98: mol_type = other DNA
actggcgcttctatctgattactttgagcgccatcaccagcgactatgtcgtagtgggtaaagcgctttcggacttcggtccggaagaagcatcagag

SEQ ID NO: 5978 - DNA, 98 bp, synthetic construct
  misc_feature 1..98: note = engineered ribonucleic acid scaffold (ERS) sequence
  source 1..98: mol_type = other DNA
actggcgcttctatctgattactttgagcgccatcaccagcgactatgtcgtagtgggtaaagcgctttcggacttcggtccggaagaagcatcaaag

SEQ ID NO: 5979 - DNA, 98 bp, synthetic construct
  misc_feature 1..98: note = engineered ribonucleic acid scaffold (ERS) sequence
  source 1..98: mol_type = other DNA
actggcgcttctatctgattagtctcagcgccatcaccagcgactatgtcgtagtgggtaaagcgctttcggacttcggtccggaagaagcatgagac

SEQ ID NO: 5980 - DNA, 98 bp, synthetic construct
  misc_feature 1..98: note = engineered ribonucleic acid scaffold (ERS) sequence
  source 1..98: mol_type = other DNA
actggcgcttctatctgattagtctgagcgccatcaccagcgactatgtcgtagtgggtaaagcgctttcggacttcggtccggaagaagcatcagac

SEQ ID NO: 5981 - DNA, 98 bp, synthetic construct
  misc_feature 1..98: note = engineered ribonucleic acid scaffold (ERS) sequence
  source 1..98: mol_type = other DNA
actggcgcttctatctgattactctcagcgccatcaccagcgactatgtcgtagtgggtaaagcgctttcggacttcggtccggaagaagcatgagag

SEQ ID NO: 5982 - DNA, 98 bp, synthetic construct
  misc_feature 1..98: note = engineered ribonucleic acid scaffold (ERS) sequence
  source 1..98: mol_type = other DNA
actggcgctcccatctgattaccccgagcgccatcaccagcgactatgtcgtagtgggtaaagcgctttcggacttcggtccggaagaagcatcgggg

SEQ ID NO: 5983 - DNA, 98 bp, synthetic construct
  misc_feature 1..98: note = engineered ribonucleic acid scaffold (ERS) sequence
  source 1..98: mol_type = other DNA
actggcgctcctatctgattactccgagcgccatcaccagcgactatgtcgtagtgggtaaagcgctttcggacttcggtccggaagaagcatcggag

SEQ ID NO: 5984 - DNA, 98 bp, synthetic construct
  misc_feature 1..98: note = engineered ribonucleic acid scaffold (ERS) sequence
  source 1..98: mol_type = other DNA
actggcgctgggatctgattaccccgagcgccatcaccagcgactatgtcgtagtgggtaaagcgctttcggacttcggtccggaagaagcatcgggg

SEQ ID NO: 5985 - DNA, 98 bp, synthetic construct
  misc_feature 1..98: note = engineered ribonucleic acid scaffold (ERS) sequence
  source 1..98: mol_type = other DNA
actggcgctggtatctgattactccgagcgccatcaccagcgactatgtcgtagtgggtaaagcgctttcggacttcggtccggaagaagcatcggag

SEQ ID NO: 5986 - DNA, 98 bp, synthetic construct
  misc_feature 1..98: note = engineered ribonucleic acid scaffold (ERS) sequence
  source 1..98: mol_type = other DNA
actggcgcttccatctgattaccctgagcgccatcaccagcgactatgtcgtagtgggtaaagcgctttcggacttcggtccggaagaagcatcaggg

SEQ ID NO: 5987 - DNA, 98 bp, synthetic construct
  misc_feature 1..98: note = engineered ribonucleic acid scaffold (ERS) sequence
  source 1..98: mol_type = other DNA
actggcgcttggatctgattaccctgagcgccatcaccagcgactatgtcgtagtgggtaaagcgctttcggacttcggtccggaagaagcatcaggg

SEQ ID NO: 5988 - DNA, 98 bp, synthetic construct
  misc_feature 1..98: note = engineered ribonucleic acid scaffold (ERS) sequence
  source 1..98: mol_type = other DNA
actggcgcttgtatctgattactctgagcgccatcaccagcgactatgtcgtagtgggtaaagcgctttcggacttcggtccggaagaagcatcagag

SEQ ID NO: 5989 - DNA, 98 bp, synthetic construct
  misc_feature 1..98: note = engineered ribonucleic acid scaffold (ERS) sequence
  source 1..98: mol_type = other DNA
actggcgcttttatctgattactttgagcgccatcaccagcgactatgtcgtagtgggtaaagcgctttcggacttcggtccggaagaagcatcagag

SEQ ID NO: 5990 - DNA, 98 bp, synthetic construct
  misc_feature 1..98: note = engineered ribonucleic acid scaffold (ERS) sequence
  source 1..98: mol_type = other DNA
actggcgcttttatctgattactctgagcgccatcaccagcgactatgtcgtagtgggtaaagcgctttcggacttcggtccggaagaagcatcagag

SEQ ID NO: 5991 - DNA, 98 bp, synthetic construct
  misc_feature 1..98: note = engineered ribonucleic acid scaffold (ERS) sequence
  source 1..98: mol_type = other DNA
actggcgcttttatctgattactctgagcgccatcaccagcgactatgtcgtagtgggtaaagcgctttcggacttcggtccggaagaagcatcaaag

SEQ ID NO: 5992 - DNA, 98 bp, synthetic construct
  misc_feature 1..98: note = engineered ribonucleic acid scaffold (ERS) sequence
  source 1..98: mol_type = other DNA
actggcgcttctatctgattactctgagcgccatcaccagcgactatgtcgtagtgggtaaagcgctttcggacttcggtccggaagaagcctcagag

SEQ ID NO: 5993 - DNA, 98 bp, synthetic construct
  misc_feature 1..98: note = engineered ribonucleic acid scaffold (ERS) sequence
  source 1..98: mol_type = other DNA
actggcgcttctatctgattactctgagcgccatcaccagcgactatgtcgtagtgggtaaagcgctttcggacttcggtccggaagaagcgtcagag

SEQ ID NO: 5994 - DNA, 98 bp, synthetic construct
  misc_feature 1..98: note = engineered ribonucleic acid scaffold (ERS) sequence
  source 1..98: mol_type = other DNA
actggcgcttctatctgattactctgagcgccatcaccagcgactatgtcgtagtgggtaaagcgctttcggacttcggtccggaagaagcatcaaag

SEQ ID NO: 5995 - DNA, 102 bp, synthetic construct
  misc_feature 1..102: note = engineered ribonucleic acid scaffold (ERS) sequence
  source 1..102: mol_type = other DNA
actggcgcttctatctgattactctcagcgccatcaccagcgactatgtcgtagtgggtaaagcggcagatctgagcctccgagctctctgccgcatcagac

SEQ ID NO: 5996 - DNA, 102 bp, synthetic construct
  misc_feature 1..102: note = engineered ribonucleic acid scaffold (ERS) sequence
  source 1..102: mol_type = other DNA
actggcgcttctatctgattactttgagcgccatcaccagcgactatgtcgtagtgggtaaagcggcagatctgagcctccgagctctctgccgcatcagag

SEQ ID NO: 5997 - DNA, 102 bp, synthetic construct
  misc_feature 1..102: note = engineered ribonucleic acid scaffold (ERS) sequence
  source 1..102: mol_type = other DNA
actggcgcttctatctgattactttgagcgccatcaccagcgactatgtcgtagtgggtaaagcggcagatctgagcctccgagctctctgccgcatcaaag

SEQ ID NO: 5998 - DNA, 102 bp, synthetic construct
  misc_feature 1..102: note = engineered ribonucleic acid scaffold (ERS) sequence
  source 1..102: mol_type = other DNA
actggcgcttctatctgattagtctcagcgccatcaccagcgactatgtcgtagtgggtaaagcggcagatctgagcctccgagctctctgccgcatgagac

SEQ ID NO: 5999 - DNA, 102 bp, synthetic construct
  misc_feature 1..102: note = engineered ribonucleic acid scaffold (ERS) sequence
  source 1..102: mol_type = other DNA
actggcgcttctatctgattagtctgagcgccatcaccagcgactatgtcgtagtgggtaaagcggcagatctgagcctccgagctctctgccgcatcagac

SEQ ID NO: 6000 - DNA, 102 bp, synthetic construct
  misc_feature 1..102: note = engineered ribonucleic acid scaffold (ERS) sequence
  source 1..102: mol_type = other DNA
actggcgcttctatctgattactctcagcgccatcaccagcgactatgtcgtagtgggtaaagcggcagatctgagcctccgagctctctgccgcatgagag

SEQ ID NO: 6001 - DNA, 102 bp, synthetic construct
  misc_feature 1..102: note = engineered ribonucleic acid scaffold (ERS) sequence
  source 1..102: mol_type = other DNA
actggcgctcccatctgattaccccgagcgccatcaccagcgactatgtcgtagtgggtaaagcggcagatctgagcctccgagctctctgccgcatcgggg

SEQ ID NO: 6002 - DNA, 102 bp, synthetic construct
  misc_feature 1..102: note = engineered ribonucleic acid scaffold (ERS) sequence
  source 1..102: mol_type = other DNA
actggcgctcctatctgattactccgagcgccatcaccagcgactatgtcgtagtgggtaaagcggcagatctgagcctccgagctctctgccgcatcggag

SEQ ID NO: 6003 - DNA, 102 bp, synthetic construct
  misc_feature 1..102: note = engineered ribonucleic acid scaffold (ERS) sequence
  source 1..102: mol_type = other DNA
actggcgctgggatctgattaccccgagcgccatcaccagcgactatgtcgtagtgggtaaagcggcagatctgagcctccgagctctctgccgcatcgggg

SEQ ID NO: 6004 - DNA, 102 bp, synthetic construct
  misc_feature 1..102: note = engineered ribonucleic acid scaffold (ERS) sequence
  source 1..102: mol_type = other DNA
actggcgctggtatctgattactccgagcgccatcaccagcgactatgtcgtagtgggtaaagcggcagatctgagcctccgagctctctgccgcatcggag

SEQ ID NO: 6005 - DNA, 102 bp, synthetic construct
  misc_feature 1..102: note = engineered ribonucleic acid scaffold (ERS) sequence
  source 1..102: mol_type = other DNA
actggcgcttccatctgattaccctgagcgccatcaccagcgactatgtcgtagtgggtaaagcggcagatctgagcctccgagctctctgccgcatcaggg

SEQ ID NO: 6006 - DNA, 102 bp, synthetic construct
  misc_feature 1..102: note = engineered ribonucleic acid scaffold (ERS) sequence
  source 1..102: mol_type = other DNA
actggcgcttggatctgattaccctgagcgccatcaccagcgactatgtcgtagtgggtaaagcggcagatctgagcctccgagctctctgccgcatcaggg

SEQ ID NO: 6007 - DNA, 102 bp, synthetic construct
  misc_feature 1..102: note = engineered ribonucleic acid scaffold (ERS) sequence
  source 1..102: mol_type = other DNA
actggcgcttgtatctgattactctgagcgccatcaccagcgactatgtcgtagtgggtaaagcggcagatctgagcctccgagctctctgccgcatcagag

SEQ ID NO: 6008 - DNA, 102 bp, synthetic construct
  misc_feature 1..102: note = engineered ribonucleic acid scaffold (ERS) sequence
  source 1..102: mol_type = other DNA
actggcgcttttatctgattactttgagcgccatcaccagcgactatgtcgtagtgggtaaagcggcagatctgagcctccgagctctctgccgcatcagag

SEQ ID NO: 6009 - DNA, 102 bp, synthetic construct
  misc_feature 1..102: note = engineered ribonucleic acid scaffold (ERS) sequence
  source 1..102: mol_type = other DNA
actggcgcttttatctgattactctgagcgccatcaccagcgactatgtcgtagtgggtaaagcggcagatctgagcctccgagctctctgccgcatcagag

SEQ ID NO: 6010 - DNA, 102 bp, synthetic construct
  misc_feature 1..102: note = engineered ribonucleic acid scaffold (ERS) sequence
  source 1..102: mol_type = other DNA
actggcgcttttatctgattactctgagcgccatcaccagcgactatgtcgtagtgggtaaagcggcagatctgagcctccgagctctctgccgcatcaaag

SEQ ID NO: 6011 - DNA, 102 bp, synthetic construct
  misc_feature 1..102: note = engineered ribonucleic acid scaffold (ERS) sequence
  source 1..102: mol_type = other DNA
actggcgcttctatctgattactctgagcgccatcaccagcgactatgtcgtagtgggtaaagcggcagatctgagcctccgagctctctgccgcctcagag

SEQ ID NO: 6012 - DNA, 102 bp, synthetic construct
  misc_feature 1..102: note = engineered ribonucleic acid scaffold (ERS) sequence
  source 1..102: mol_type = other DNA
actggcgcttctatctgattactctgagcgccatcaccagcgactatgtcgtagtgggtaaagcggcagatctgagcctccgagctctctgccgcgtcagag

SEQ ID NO: 6013 - DNA, 102 bp, synthetic construct
  misc_feature 1..102: note = engineered ribonucleic acid scaffold (ERS) sequence
  source 1..102: mol_type = other DNA
actggcgcttctatctgattactctgagcgccatcaccagcgactatgtcgtagtgggtaaagcggcagatctgagcctccgagctctctgccgcatcaaag

SEQ ID NO: 6014 - DNA, 98 bp, synthetic construct
  misc_feature 1..98: note = engineered ribonucleic acid scaffold (ERS) sequence
  source 1..98: mol_type = other DNA
actggcgcttctatctgattactctcagcgccatcaccagcgactatgtcgtagtgggtaaagcggttacggacttcggtccgtaagacgcatcagac

SEQ ID NO: 6015 - DNA, 98 bp, synthetic construct
  misc_feature 1..98: note = engineered ribonucleic acid scaffold (ERS) sequence
  source 1..98: mol_type = other DNA
actggcgcttctatctgattactttgagcgccatcaccagcgactatgtcgtagtgggtaaagcggttacggacttcggtccgtaagacgcatcagag

SEQ ID NO: 6016 - DNA, 98 bp, synthetic construct
  misc_feature 1..98: note = engineered ribonucleic acid scaffold (ERS) sequence
  source 1..98: mol_type = other DNA
actggcgcttctatctgattactttgagcgccatcaccagcgactatgtcgtagtgggtaaagcggttacggacttcggtccgtaagacgcatcaaag

SEQ ID NO: 6017 - DNA, 98 bp, synthetic construct
  misc_feature 1..98: note = engineered ribonucleic acid scaffold (ERS) sequence
  source 1..98: mol_type = other DNA
actggcgcttctatctgattagtctcagcgccatcaccagcgactatgtcgtagtgggtaaagcggttacggacttcggtccgtaagacgcatgagac

SEQ ID NO: 6018 - DNA, 98 bp, synthetic construct
  misc_feature 1..98: note = engineered ribonucleic acid scaffold (ERS) sequence
  source 1..98: mol_type = other DNA
actggcgcttctatctgattagtctgagcgccatcaccagcgactatgtcgtagtgggtaaagcggttacggacttcggtccgtaagacgcatcagac

SEQ ID NO: 6019 - DNA, 98 bp, synthetic construct
  misc_feature 1..98: note = engineered ribonucleic acid scaffold (ERS) sequence
  source 1..98: mol_type = other DNA
actggcgcttctatctgattactctcagcgccatcaccagcgactatgtcgtagtgggtaaagcggttacggacttcggtccgtaagacgcatgagag

SEQ ID NO: 6020 - DNA, 98 bp, synthetic construct
  misc_feature 1..98: note = engineered ribonucleic acid scaffold (ERS) sequence
  source 1..98: mol_type = other DNA
actggcgctcccatctgattaccccgagcgccatcaccagcgactatgtcgtagtgggtaaagcggttacggacttcggtccgtaagacgcatcgggg

SEQ ID NO: 6021 - DNA, 98 bp, synthetic construct
  misc_feature 1..98: note = engineered ribonucleic acid scaffold (ERS) sequence
  source 1..98: mol_type = other DNA
actggcgctcctatctgattactccgagcgccatcaccagcgactatgtcgtagtgggtaaagcggttacggacttcggtccgtaagacgcatcggag

SEQ ID NO: 6022 - DNA, 98 bp, synthetic construct
  misc_feature 1..98: note = engineered ribonucleic acid scaffold (ERS) sequence
  source 1..98: mol_type = other DNA
actggcgctgggatctgattaccccgagcgccatcaccagcgactatgtcgtagtgggtaaagcggttacggacttcggtccgtaagacgcatcgggg

SEQ ID NO: 6023 - DNA, 98 bp, synthetic construct
  misc_feature 1..98: note = engineered ribonucleic acid scaffold (ERS) sequence
  source 1..98: mol_type = other DNA
actggcgctggtatctgattactccgagcgccatcaccagcgactatgtcgtagtgggtaaagcggttacggacttcggtccgtaagacgcatcggag

SEQ ID NO: 6024 - DNA, 98 bp, synthetic construct
  misc_feature 1..98: note = engineered ribonucleic acid scaffold (ERS) sequence
  source 1..98: mol_type = other DNA
actggcgcttccatctgattaccctgagcgccatcaccagcgactatgtcgtagtgggtaaagcggttacggacttcggtccgtaagacgcatcaggg

SEQ ID NO: 6025 - DNA, 98 bp, synthetic construct
  misc_feature 1..98: note = engineered ribonucleic acid scaffold (ERS) sequence
  source 1..98: mol_type = other DNA
actggcgcttggatctgattaccctgagcgccatcaccagcgactatgtcgtagtgggtaaagcggttacggacttcggtccgtaagacgcatcaggg

SEQ ID NO: 6026 - DNA, 98 bp, synthetic construct
  misc_feature 1..98: note = engineered ribonucleic acid scaffold (ERS) sequence
  source 1..98: mol_type = other DNA
actggcgcttgtatctgattactctgagcgccatcaccagcgactatgtcgtagtgggtaaagcggttacggacttcggtccgtaagacgcatcagag

SEQ ID NO: 6027 - DNA, 98 bp, synthetic construct
  misc_feature 1..98: note = engineered ribonucleic acid scaffold (ERS) sequence
  source 1..98: mol_type = other DNA
actggcgcttttatctgattactttgagcgccatcaccagcgactatgtcgtagtgggtaaagcggttacggacttcggtccgtaagacgcatcagag

SEQ ID NO: 6028 - DNA, 98 bp, synthetic construct
  misc_feature 1..98: note = engineered ribonucleic acid scaffold (ERS) sequence
  source 1..98: mol_type = other DNA
actggcgcttttatctgattactctgagcgccatcaccagcgactatgtcgtagtgggtaaagcggttacggacttcggtccgtaagacgcatcagag

SEQ ID NO: 6029 - DNA, 98 bp, synthetic construct
  misc_feature 1..98: note = engineered ribonucleic acid scaffold (ERS) sequence
  source 1..98: mol_type = other DNA
actggcgcttttatctgattactctgagcgccatcaccagcgactatgtcgtagtgggtaaagcggttacggacttcggtccgtaagacgcatcaaag

SEQ ID NO: 6030 - DNA, 98 bp, synthetic construct
  misc_feature 1..98: note = engineered ribonucleic acid scaffold (ERS) sequence
  source 1..98: mol_type = other DNA
actggcgcttctatctgattactctgagcgccatcaccagcgactatgtcgtagtgggtaaagcggttacggacttcggtccgtaagacgcctcagag

SEQ ID NO: 6031 - DNA, 98 bp, synthetic construct
  misc_feature 1..98: note = engineered ribonucleic acid scaffold (ERS) sequence
  source 1..98: mol_type = other DNA
actggcgcttctatctgattactctgagcgccatcaccagcgactatgtcgtagtgggtaaagcggttacggacttcggtccgtaagacgcgtcagag

SEQ ID NO: 6032 - DNA, 98 bp, synthetic construct
  misc_feature 1..98: note = engineered ribonucleic acid scaffold (ERS) sequence
  source 1..98: mol_type = other DNA
actggcgcttctatctgattactctgagcgccatcaccagcgactatgtcgtagtgggtaaagcggttacggacttcggtccgtaagacgcatcaaag

SEQ ID NO: 6033 - DNA, 75 bp, synthetic construct
  misc_feature 1..75: note = engineered ribonucleic acid scaffold (ERS) sequence
  source 1..75: mol_type = other DNA
actggcgcttctatctgattactctcagcgccatcaccagcgactatgtcgtagtgggtaaagctagcatcagac

SEQ ID NO: 6034 - DNA, 75 bp, synthetic construct
  misc_feature 1..75: note = engineered ribonucleic acid scaffold (ERS) sequence
  source 1..75: mol_type = other DNA
actggcgcttctatctgattactttgagcgccatcaccagcgactatgtcgtagtgggtaaagctagcatcagag

SEQ ID NO: 6035 - DNA, 75 bp, synthetic construct
  misc_feature 1..75: note = engineered ribonucleic acid scaffold (ERS) sequence
  source 1..75: mol_type = other DNA
actggcgcttctatctgattactttgagcgccatcaccagcgactatgtcgtagtgggtaaagctagcatcaaag

SEQ ID NO: 6036 - DNA, 75 bp, synthetic construct
  misc_feature 1..75: note = engineered ribonucleic acid scaffold (ERS) sequence
  source 1..75: mol_type = other DNA
actggcgcttctatctgattagtctcagcgccatcaccagcgactatgtcgtagtgggtaaagctagcatgagac

SEQ ID NO: 6037 - DNA, 75 bp, synthetic construct
  misc_feature 1..75: note = engineered ribonucleic acid scaffold (ERS) sequence
  source 1..75: mol_type = other DNA
actggcgcttctatctgattagtctgagcgccatcaccagcgactatgtcgtagtgggtaaagctagcatcagac

SEQ ID NO: 6038 - DNA, 75 bp, synthetic construct
  misc_feature 1..75: note = engineered ribonucleic acid scaffold (ERS) sequence
  source 1..75: mol_type = other DNA
actggcgcttctatctgattactctcagcgccatcaccagcgactatgtcgtagtgggtaaagctagcatgagag

SEQ ID NO: 6039 - DNA, 75 bp, synthetic construct
  misc_feature 1..75: note = engineered ribonucleic acid scaffold (ERS) sequence
  source 1..75: mol_type = other DNA
actggcgctcccatctgattaccccgagcgccatcaccagcgactatgtcgtagtgggtaaagctagcatcgggg

SEQ ID NO: 6040 - DNA, 75 bp, synthetic construct
  misc_feature 1..75: note = engineered ribonucleic acid scaffold (ERS) sequence
  source 1..75: mol_type = other DNA
actggcgctcctatctgattactccgagcgccatcaccagcgactatgtcgtagtgggtaaagctagcatcggag

SEQ ID NO: 6041 - DNA, 75 bp, synthetic construct
  misc_feature 1..75: note = engineered ribonucleic acid scaffold (ERS) sequence
  source 1..75: mol_type = other DNA
actggcgctgggatctgattaccccgagcgccatcaccagcgactatgtcgtagtgggtaaagctagcatcgggg

SEQ ID NO: 6042 - DNA, 75 bp, synthetic construct
  misc_feature 1..75: note = engineered ribonucleic acid scaffold (ERS) sequence
  source 1..75: mol_type = other DNA
actggcgctggtatctgattactccgagcgccatcaccagcgactatgtcgtagtgggtaaagctagcatcggag

SEQ ID NO: 6043 - DNA, 75 bp, synthetic construct
  misc_feature 1..75: note = engineered ribonucleic acid scaffold (ERS) sequence
  source 1..75: mol_type = other DNA
actggcgcttccatctgattaccctgagcgccatcaccagcgactatgtcgtagtgggtaaagctagcatcaggg

SEQ ID NO: 6044 - DNA, 75 bp, synthetic construct
  misc_feature 1..75: note = engineered ribonucleic acid scaffold (ERS) sequence
  source 1..75: mol_type = other DNA
actggcgcttggatctgattaccctgagcgccatcaccagcgactatgtcgtagtgggtaaagctagcatcaggg

SEQ ID NO: 6045 - DNA, 75 bp, synthetic construct
  misc_feature 1..75: note = engineered ribonucleic acid scaffold (ERS) sequence
  source 1..75: mol_type = other DNA
actggcgcttgtatctgattactctgagcgccatcaccagcgactatgtcgtagtgggtaaagctagcatcagag

SEQ ID NO: 6046 - DNA, 75 bp, synthetic construct
  misc_feature 1..75: note = engineered ribonucleic acid scaffold (ERS) sequence
  source 1..75: mol_type = other DNA
actggcgcttttatctgattactttgagcgccatcaccagcgactatgtcgtagtgggtaaagctagcatcagag

SEQ ID NO: 6047 - DNA, 75 bp, synthetic construct
  misc_feature 1..75: note = engineered ribonucleic acid scaffold (ERS) sequence
  source 1..75: mol_type = other DNA
actggcgcttttatctgattactctgagcgccatcaccagcgactatgtcgtagtgggtaaagctagcatcagag

SEQ ID NO: 6048 - DNA, 75 bp, synthetic construct
  misc_feature 1..75: note = engineered ribonucleic acid scaffold (ERS) sequence
  source 1..75: mol_type = other DNA
actggcgcttttatctgattactctgagcgccatcaccagcgactatgtcgtagtgggtaaagctagcatcaaag

SEQ ID NO: 6049 - DNA, 75 bp, synthetic construct
  misc_feature 1..75: note = engineered ribonucleic acid scaffold (ERS) sequence
  source 1..75: mol_type = other DNA
actggcgcttctatctgattactctgagcgccatcaccagcgactatgtcgtagtgggtaaagctagcctcagag

SEQ ID NO: 6050 - DNA, 75 bp, synthetic construct
  misc_feature 1..75: note = engineered ribonucleic acid scaffold (ERS) sequence
  source 1..75: mol_type = other DNA
actggcgcttctatctgattactctgagcgccatcaccagcgactatgtcgtagtgggtaaagctagcgtcagag

SEQ ID NO: 6051 - DNA, 75 bp, synthetic construct
  misc_feature 1..75: note = engineered ribonucleic acid scaffold (ERS) sequence
  source 1..75: mol_type = other DNA
actggcgcttctatctgattactctgagcgccatcaccagcgactatgtcgtagtgggtaaagctagcatcaaag

SEQ ID NO: 6052 - DNA, 89 bp, synthetic construct
  misc_feature 1..89: note = engineered ribonucleic acid scaffold (ERS) sequence
  source 1..89: mol_type = other DNA
actggcgcttctatctgattactctcagcgccatcaccagcgactatgtcgtagtgggtaaagctccctattcggatggagcatcagac

SEQ ID NO: 6053 - DNA, 89 bp, synthetic construct
  misc_feature 1..89: note = engineered ribonucleic acid scaffold (ERS) sequence
  source 1..89: mol_type = other DNA
actggcgcttctatctgattactttgagcgccatcaccagcgactatgtcgtagtgggtaaagctccctattcggatggagcatcagag

SEQ ID NO: 6054 - DNA, 89 bp, synthetic construct
  misc_feature 1..89: note = engineered ribonucleic acid scaffold (ERS) sequence
  source 1..89: mol_type = other DNA
actggcgcttctatctgattactttgagcgccatcaccagcgactatgtcgtagtgggtaaagctccctattcggatggagcatcaaag

SEQ ID NO: 6055 - DNA, 89 bp, synthetic construct
  misc_feature 1..89: note = engineered ribonucleic acid scaffold (ERS) sequence
  source 1..89: mol_type = other DNA
actggcgcttctatctgattagtctcagcgccatcaccagcgactatgtcgtagtgggtaaagctccctattcggatggagcatgagac

SEQ ID NO: 6056 - DNA, 89 bp, synthetic construct
  misc_feature 1..89: note = engineered ribonucleic acid scaffold (ERS) sequence
  source 1..89: mol_type = other DNA
actggcgcttctatctgattagtctgagcgccatcaccagcgactatgtcgtagtgggtaaagctccctattcggatggagcatcagac

SEQ ID NO: 6057 - DNA, 89 bp, synthetic construct
  misc_feature 1..89: note = engineered ribonucleic acid scaffold (ERS) sequence
  source 1..89: mol_type = other DNA
actggcgcttctatctgattactctcagcgccatcaccagcgactatgtcgtagtgggtaaagctccctattcggatggagcatgagag

SEQ ID NO: 6058 - DNA, 89 bp, synthetic construct
  misc_feature 1..89: note = engineered ribonucleic acid scaffold (ERS) sequence
  source 1..89: mol_type = other DNA
actggcgctcccatctgattaccccgagcgccatcaccagcgactatgtcgtagtgggtaaagctccctattcggatggagcatcgggg

SEQ ID NO: 6059 - DNA, 89 bp, synthetic construct
  misc_feature 1..89: note = engineered ribonucleic acid scaffold (ERS) sequence
  source 1..89: mol_type = other DNA
actggcgctcctatctgattactccgagcgccatcaccagcgactatgtcgtagtgggtaaagctccctattcggatggagcatcggag

SEQ ID NO: 6060 - DNA, 89 bp, synthetic construct
  misc_feature 1..89: note = engineered ribonucleic acid scaffold (ERS) sequence
  source 1..89: mol_type = other DNA
actggcgctgggatctgattaccccgagcgccatcaccagcgactatgtcgtagtgggtaaagctccctattcggatggagcatcgggg

SEQ ID NO: 6061 - DNA, 89 bp, synthetic construct
  misc_feature 1..89: note = engineered ribonucleic acid scaffold (ERS) sequence
  source 1..89: mol_type = other DNA
actggcgctggtatctgattactccgagcgccatcaccagcgactatgtcgtagtgggtaaagctccctattcggatggagcatcggag

SEQ ID NO: 6062 - DNA, 89 bp, synthetic construct
  misc_feature 1..89: note = engineered ribonucleic acid scaffold (ERS) sequence
  source 1..89: mol_type = other DNA
actggcgcttccatctgattaccctgagcgccatcaccagcgactatgtcgtagtgggtaaagctccctattcggatggagcatcaggg

SEQ ID NO: 6063 - DNA, 89 bp, synthetic construct
  misc_feature 1..89: note = engineered ribonucleic acid scaffold (ERS) sequence
  source 1..89: mol_type = other DNA
actggcgcttggatctgattaccctgagcgccatcaccagcgactatgtcgtagtgggtaaagctccctattcggatggagcatcaggg

SEQ ID NO: 6064 - DNA, 89 bp, synthetic construct
  misc_feature 1..89: note = engineered ribonucleic acid scaffold (ERS) sequence
  source 1..89: mol_type = other DNA
actggcgcttgtatctgattactctgagcgccatcaccagcgactatgtcgtagtgggtaaagctccctattcggatggagcatcagag

SEQ ID NO: 6065 - DNA, 89 bp, synthetic construct
  misc_feature 1..89: note = engineered ribonucleic acid scaffold (ERS) sequence
  source 1..89: mol_type = other DNA
actggcgcttttatctgattactttgagcgccatcaccagcgactatgtcgtagtgggtaaagctccctattcggatggagcatcagag

SEQ ID NO: 6066 - DNA, 89 bp, synthetic construct
  misc_feature 1..89: note = engineered ribonucleic acid scaffold (ERS) sequence
  source 1..89: mol_type = other DNA
actggcgcttttatctgattactctgagcgccatcaccagcgactatgtcgtagtgggtaaagctccctattcggatggagcatcagag

SEQ ID NO: 6067 - DNA, 89 bp, synthetic construct
  misc_feature 1..89: note = engineered ribonucleic acid scaffold (ERS) sequence
  source 1..89: mol_type = other DNA
actggcgcttttatctgattactctgagcgccatcaccagcgactatgtcgtagtgggtaaagctccctattcggatggagcatcaaag

SEQ ID NO: 6068 - DNA, 89 bp, synthetic construct
  misc_feature 1..89: note = engineered ribonucleic acid scaffold (ERS) sequence
  source 1..89: mol_type = other DNA
actggcgcttctatctgattactctgagcgccatcaccagcgactatgtcgtagtgggtaaagctccctattcggatggagcctcagag

SEQ ID NO: 6069 - DNA, 89 bp, synthetic construct
  misc_feature 1..89: note = engineered ribonucleic acid scaffold (ERS) sequence
  source 1..89: mol_type = other DNA
actggcgcttctatctgattactctgagcgccatcaccagcgactatgtcgtagtgggtaaagctccctattcggatggagcgtcagag

SEQ ID NO: 6070 - DNA, 89 bp, synthetic construct
  misc_feature 1..89: note = engineered ribonucleic acid scaffold (ERS) sequence
  source 1..89: mol_type = other DNA
actggcgcttctatctgattactctgagcgccatcaccagcgactatgtcgtagtgggtaaagctccctattcggatggagcatcaaag

SEQ ID NO: 6071 - DNA, 95 bp, synthetic construct
  misc_feature 1..95: note = engineered ribonucleic acid scaffold (ERS) sequence
  source 1..95: mol_type = other DNA
actggcgcttctatctgattactctcagcgccatcaccagcgactatgtcgtagtgggtaaagctccctcacagggatgtgagggagcatcagac

SEQ ID NO: 6072 - DNA, 95 bp, synthetic construct
  misc_feature 1..95: note = engineered ribonucleic acid scaffold (ERS) sequence
  source 1..95: mol_type = other DNA
actggcgcttctatctgattactttgagcgccatcaccagcgactatgtcgtagtgggtaaagctccctcacagggatgtgagggagcatcagag

SEQ ID NO: 6073 - DNA, 95 bp, synthetic construct
  misc_feature 1..95: note = engineered ribonucleic acid scaffold (ERS) sequence
  source 1..95: mol_type = other DNA
actggcgcttctatctgattactttgagcgccatcaccagcgactatgtcgtagtgggtaaagctccctcacagggatgtgagggagcatcaaag

SEQ ID NO: 6074 - DNA, 95 bp, synthetic construct
  misc_feature 1..95: note = engineered ribonucleic acid scaffold (ERS) sequence
  source 1..95: mol_type = other DNA
actggcgcttctatctgattagtctcagcgccatcaccagcgactatgtcgtagtgggtaaagctccctcacagggatgtgagggagcatgagac

SEQ ID NO: 6075 - DNA, 95 bp, synthetic construct
  misc_feature 1..95: note = engineered ribonucleic acid scaffold (ERS) sequence
  source 1..95: mol_type = other DNA
actggcgcttctatctgattagtctgagcgccatcaccagcgactatgtcgtagtgggtaaagctccctcacagggatgtgagggagcatcagac

SEQ ID NO: 6076 - DNA, 95 bp, synthetic construct
  misc_feature 1..95: note = engineered ribonucleic acid scaffold (ERS) sequence
  source 1..95: mol_type = other DNA
actggcgcttctatctgattactctcagcgccatcaccagcgactatgtcgtagtgggtaaagctccctcacagggatgtgagggagcatgagag

SEQ ID NO: 6077 - DNA, 95 bp, synthetic construct
  misc_feature 1..95: note = engineered ribonucleic acid scaffold (ERS) sequence
  source 1..95: mol_type = other DNA
actggcgctcccatctgattaccccgagcgccatcaccagcgactatgtcgtagtgggtaaagctccctcacagggatgtgagggagcatcgggg

SEQ ID NO: 6078 - DNA, 95 bp, synthetic construct
  misc_feature 1..95: note = engineered ribonucleic acid scaffold (ERS) sequence
  source 1..95: mol_type = other DNA
actggcgctcctatctgattactccgagcgccatcaccagcgactatgtcgtagtgggtaaagctccctcacagggatgtgagggagcatcggag

SEQ ID NO: 6079 - DNA, 95 bp, synthetic construct
  misc_feature 1..95: note = engineered ribonucleic acid scaffold (ERS) sequence
  source 1..95: mol_type = other DNA
actggcgctgggatctgattaccccgagcgccatcaccagcgactatgtcgtagtgggtaaagctccctcacagggatgtgagggagcatcgggg

SEQ ID NO: 6080 - DNA, 95 bp, synthetic construct
  misc_feature 1..95: note = engineered ribonucleic acid scaffold (ERS) sequence
  source 1..95: mol_type = other DNA
actggcgctggtatctgattactccgagcgccatcaccagcgactatgtcgtagtgggtaaagctccctcacagggatgtgagggagcatcggag

SEQ ID NO: 6081 - DNA, 95 bp, synthetic construct
  misc_feature 1..95: note = engineered ribonucleic acid scaffold (ERS) sequence
  source 1..95: mol_type = other DNA
actggcgcttccatctgattaccctgagcgccatcaccagcgactatgtcgtagtgggtaaagctccctcacagggatgtgagggagcatcaggg

SEQ ID NO: 6082 - DNA, 95 bp, synthetic construct
  misc_feature 1..95: note = engineered ribonucleic acid scaffold (ERS) sequence
  source 1..95: mol_type = other DNA
actggcgcttggatctgattaccctgagcgccatcaccagcgactatgtcgtagtgggtaaagctccctcacagggatgtgagggagcatcaggg

SEQ ID NO: 6083 - DNA, 95 bp, synthetic construct
  misc_feature 1..95: note = engineered ribonucleic acid scaffold (ERS) sequence
  source 1..95: mol_type = other DNA
actggcgcttgtatctgattactctgagcgccatcaccagcgactatgtcgtagtgggtaaagctccctcacagggatgtgagggagcatcagag

SEQ ID NO: 6084 - DNA, 95 bp, synthetic construct
  misc_feature 1..95: note = engineered ribonucleic acid scaffold (ERS) sequence
  source 1..95: mol_type = other DNA
actggcgcttttatctgattactttgagcgccatcaccagcgactatgtcgtagtgggtaaagctccctcacagggatgtgagggagcatcagag

SEQ ID NO: 6085 - DNA, 95 bp, synthetic construct
  misc_feature 1..95: note = engineered ribonucleic acid scaffold (ERS) sequence
  source 1..95: mol_type = other DNA
actggcgcttttatctgattactctgagcgccatcaccagcgactatgtcgtagtgggtaaagctccctcacagggatgtgagggagcatcagag

SEQ ID NO: 6086 - DNA, 95 bp, synthetic construct
  misc_feature 1..95: note = engineered ribonucleic acid scaffold (ERS) sequence
  source 1..95: mol_type = other DNA
actggcgcttttatctgattactctgagcgccatcaccagcgactatgtcgtagtgggtaaagctccctcacagggatgtgagggagcatcaaag

SEQ ID NO: 6087 - DNA, 95 bp, synthetic construct
  misc_feature 1..95: note = engineered ribonucleic acid scaffold (ERS) sequence
  source 1..95: mol_type = other DNA
actggcgcttctatctgattactctgagcgccatcaccagcgactatgtcgtagtgggtaaagctccctcacagggatgtgagggagcctcagag

SEQ ID NO: 6088 - DNA, 95 bp, synthetic construct
  misc_feature 1..95: note = engineered ribonucleic acid scaffold (ERS) sequence
  source 1..95: mol_type = other DNA
actggcgcttctatctgattactctgagcgccatcaccagcgactatgtcgtagtgggtaaagctccctcacagggatgtgagggagcgtcagag

SEQ ID NO: 6089 - DNA, 95 bp, synthetic construct
  misc_feature 1..95: note = engineered ribonucleic acid scaffold (ERS) sequence
  source 1..95: mol_type = other DNA
actggcgcttctatctgattactctgagcgccatcaccagcgactatgtcgtagtgggtaaagctccctcacagggatgtgagggagcatcaaag

SEQ ID NO: 6090 - DNA, 94 bp, synthetic construct
  misc_feature 1..94: note = engineered ribonucleic acid scaffold (ERS) sequence
  source 1..94: mol_type = other DNA
actggcgcttctatctgattactctcagcgccatcaccagcgactatgtcgtagtgggtaaagctccctcagctgcagtgagggagcatcagac

SEQ ID NO: 6091 - DNA, 94 bp, synthetic construct
  misc_feature 1..94: note = engineered ribonucleic acid scaffold (ERS) sequence
  source 1..94: mol_type = other DNA
actggcgcttctatctgattactttgagcgccatcaccagcgactatgtcgtagtgggtaaagctccctcagctgcagtgagggagcatcagag

SEQ ID NO: 6092 - DNA, 94 bp, synthetic construct
  misc_feature 1..94: note = engineered ribonucleic acid scaffold (ERS) sequence
  source 1..94: mol_type = other DNA
actggcgcttctatctgattactttgagcgccatcaccagcgactatgtcgtagtgggtaaagctccctcagctgcagtgagggagcatcaaag

SEQ ID NO: 6093 - DNA, 94 bp, synthetic construct
  misc_feature 1..94: note = engineered ribonucleic acid scaffold (ERS) sequence
  source 1..94: mol_type = other DNA
actggcgcttctatctgattagtctcagcgccatcaccagcgactatgtcgtagtgggtaaagctccctcagctgcagtgagggagcatgagac

SEQ ID NO: 6094 - DNA, 94 bp, synthetic construct
  misc_feature 1..94: note = engineered ribonucleic acid scaffold (ERS) sequence
  source 1..94: mol_type = other DNA
actggcgcttctatctgattagtctgagcgccatcaccagcgactatgtcgtagtgggtaaagctccctcagctgcagtgagggagcatcagac

SEQ ID NO: 6095 - DNA, 94 bp, synthetic construct
  misc_feature 1..94: note = engineered ribonucleic acid scaffold (ERS) sequence
  source 1..94: mol_type = other DNA
actggcgcttctatctgattactctcagcgccatcaccagcgactatgtcgtagtgggtaaagctccctcagctgcagtgagggagcatgagag

SEQ ID NO: 6096 - DNA, 94 bp, synthetic construct
  misc_feature 1..94: note = engineered ribonucleic acid scaffold (ERS) sequence
  source 1..94: mol_type = other DNA
actggcgctcccatctgattaccccgagcgccatcaccagcgactatgtcgtagtgggtaaagctccctcagctgcagtgagggagcatcgggg

SEQ ID NO: 6097 - DNA, 94 bp, synthetic construct
  misc_feature 1..94: note = engineered ribonucleic acid scaffold (ERS) sequence
  source 1..94: mol_type = other DNA
actggcgctcctatctgattactccgagcgccatcaccagcgactatgtcgtagtgggtaaagctccctcagctgcagtgagggagcatcggag

SEQ ID NO: 6098 - DNA, 94 bp, synthetic construct
  misc_feature 1..94: note = engineered ribonucleic acid scaffold (ERS) sequence
  source 1..94: mol_type = other DNA
actggcgctgggatctgattaccccgagcgccatcaccagcgactatgtcgtagtgggtaaagctccctcagctgcagtgagggagcatcgggg

SEQ ID NO: 6099 - DNA, 94 bp, synthetic construct
  misc_feature 1..94: note = engineered ribonucleic acid scaffold (ERS) sequence
  source 1..94: mol_type = other DNA
actggcgctggtatctgattactccgagcgccatcaccagcgactatgtcgtagtgggtaaagctccctcagctgcagtgagggagcatcggag

SEQ ID NO: 6100 - DNA, 94 bp, synthetic construct
  misc_feature 1..94: note = engineered ribonucleic acid scaffold (ERS) sequence
  source 1..94: mol_type = other DNA
actggcgcttccatctgattaccctgagcgccatcaccagcgactatgtcgtagtgggtaaagctccctcagctgcagtgagggagcatcaggg

SEQ ID NO: 6101 - DNA, 94 bp, synthetic construct
  misc_feature 1..94: note = engineered ribonucleic acid scaffold (ERS) sequence
  source 1..94: mol_type = other DNA
actggcgcttggatctgattaccctgagcgccatcaccagcgactatgtcgtagtgggtaaagctccctcagctgcagtgagggagcatcaggg

SEQ ID NO: 6102 - DNA, 94 bp, synthetic construct
  misc_feature 1..94: note = engineered ribonucleic acid scaffold (ERS) sequence
  source 1..94: mol_type = other DNA
actggcgcttgtatctgattactctgagcgccatcaccagcgactatgtcgtagtgggtaaagctccctcagctgcagtgagggagcatcagag

SEQ ID NO: 6103 - DNA, 94 bp, synthetic construct
  misc_feature 1..94: note = engineered ribonucleic acid scaffold (ERS) sequence
  source 1..94: mol_type = other DNA
actggcgcttttatctgattactttgagcgccatcaccagcgactatgtcgtagtgggtaaagctccctcagctgcagtgagggagcatcagag

SEQ ID NO: 6104 - DNA, 94 bp, synthetic construct
  misc_feature 1..94: note = engineered ribonucleic acid scaffold (ERS) sequence
  source 1..94: mol_type = other DNA
actggcgcttttatctgattactctgagcgccatcaccagcgactatgtcgtagtgggtaaagctccctcagctgcagtgagggagcatcagag

SEQ ID NO: 6105 - DNA, 94 bp, synthetic construct
  misc_feature 1..94: note = engineered ribonucleic acid scaffold (ERS) sequence
  source 1..94: mol_type = other DNA
actggcgcttttatctgattactctgagcgccatcaccagcgactatgtcgtagtgggtaaagctccctcagctgcagtgagggagcatcaaag

SEQ ID NO: 6106 - DNA, 94 bp, synthetic construct
  misc_feature 1..94: note = engineered ribonucleic acid scaffold (ERS) sequence
  source 1..94: mol_type = other DNA
actggcgcttctatctgattactctgagcgccatcaccagcgactatgtcgtagtgggtaaagctccctcagctgcagtgagggagcctcagag

SEQ ID NO: 6107 - DNA, 94 bp, synthetic construct
  misc_feature 1..94: note = engineered ribonucleic acid scaffold (ERS) sequence
  source 1..94: mol_type = other DNA
actggcgcttctatctgattactctgagcgccatcaccagcgactatgtcgtagtgggtaaagctccctcagctgcagtgagggagcgtcagag

SEQ ID NO: 6108 - DNA, 94 bp, synthetic construct
  misc_feature 1..94: note = engineered ribonucleic acid scaffold (ERS) sequence
  source 1..94: mol_type = other DNA
actggcgcttctatctgattactctgagcgccatcaccagcgactatgtcgtagtgggtaaagctccctcagctgcagtgagggagcatcaaag

SEQ ID NO: 6109 - DNA, 89 bp, synthetic construct
  misc_feature 1..89: note = engineered ribonucleic acid scaffold (ERS) sequence
  source 1..89: mol_type = other DNA
actggcgcttctatctgattactctcagcgccatcaccagcgactatgtcgtagtgggtaaagctccctcataggagggagcatcagac

SEQ ID NO: 6110 - DNA, 89 bp, synthetic construct
  misc_feature 1..89: note = engineered ribonucleic acid scaffold (ERS) sequence
  source 1..89: mol_type = other DNA
actggcgcttctatctgattactttgagcgccatcaccagcgactatgtcgtagtgggtaaagctccctcataggagggagcatcagag

SEQ ID NO: 6111 - DNA, 89 bp, synthetic construct
  misc_feature 1..89: note = engineered ribonucleic acid scaffold (ERS) sequence
  source 1..89: mol_type = other DNA
actggcgcttctatctgattactttgagcgccatcaccagcgactatgtcgtagtgggtaaagctccctcataggagggagcatcaaag

SEQ ID NO: 6112 - DNA, 89 bp, synthetic construct
  misc_feature 1..89: note = engineered ribonucleic acid scaffold (ERS) sequence
  source 1..89: mol_type = other DNA
actggcgcttctatctgattagtctcagcgccatcaccagcgactatgtcgtagtgggtaaagctccctcataggagggagcatgagac

SEQ ID NO: 6113 - DNA, 89 bp, synthetic construct
  misc_feature 1..89: note = engineered ribonucleic acid scaffold (ERS) sequence
  source 1..89: mol_type = other DNA
actggcgcttctatctgattagtctgagcgccatcaccagcgactatgtcgtagtgggtaaagctccctcataggagggagcatcagac

SEQ ID NO: 6114 - DNA, 89 bp, synthetic construct
  misc_feature 1..89: note = engineered ribonucleic acid scaffold (ERS) sequence
  source 1..89: mol_type = other DNA
actggcgcttctatctgattactctcagcgccatcaccagcgactatgtcgtagtgggtaaagctccctcataggagggagcatgagag

SEQ ID NO: 6115 - DNA, 89 bp, synthetic construct
  misc_feature 1..89: note = engineered ribonucleic acid scaffold (ERS) sequence
  source 1..89: mol_type = other DNA
actggcgctcccatctgattaccccgagcgccatcaccagcgactatgtcgtagtgggtaaagctccctcataggagggagcatcgggg

SEQ ID NO: 6116 - DNA, 89 bp, synthetic construct
  misc_feature 1..89: note = engineered ribonucleic acid scaffold (ERS) sequence
  source 1..89: mol_type = other DNA
actggcgctcctatctgattactccgagcgccatcaccagcgactatgtcgtagtgggtaaagctccctcataggagggagcatcggag

SEQ ID NO: 6117 - DNA, 89 bp, synthetic construct
  misc_feature 1..89: note = engineered ribonucleic acid scaffold (ERS) sequence
  source 1..89: mol_type = other DNA
actggcgctgggatctgattaccccgagcgccatcaccagcgactatgtcgtagtgggtaaagctccctcataggagggagcatcgggg

SEQ ID NO: 6118 - DNA, 89 bp, synthetic construct
  misc_feature 1..89: note = engineered ribonucleic acid scaffold (ERS) sequence
  source 1..89: mol_type = other DNA
actggcgctggtatctgattactccgagcgccatcaccagcgactatgtcgtagtgggtaaagctccctcataggagggagcatcggag

SEQ ID NO: 6119 - DNA, 89 bp, synthetic construct
  misc_feature 1..89: note = engineered ribonucleic acid scaffold (ERS) sequence
  source 1..89: mol_type = other DNA
actggcgcttccatctgattaccctgagcgccatcaccagcgactatgtcgtagtgggtaaagctccctcataggagggagcatcaggg

SEQ ID NO: 6120 - DNA, 89 bp, synthetic construct
  misc_feature 1..89: note = engineered ribonucleic acid scaffold (ERS) sequence
  source 1..89: mol_type = other DNA
actggcgcttggatctgattaccctgagcgccatcaccagcgactatgtcgtagtgggtaaagctccctcataggagggagcatcaggg

SEQ ID NO: 6121 - DNA, 89 bp, synthetic construct
  misc_feature 1..89: note = engineered ribonucleic acid scaffold (ERS) sequence
  source 1..89: mol_type = other DNA
actggcgcttgtatctgattactctgagcgccatcaccagcgactatgtcgtagtgggtaaagctccctcataggagggagcatcagag

SEQ ID NO: 6122 - DNA, 89 bp, synthetic construct
  misc_feature 1..89: note = engineered ribonucleic acid scaffold (ERS) sequence
  source 1..89: mol_type = other DNA
actggcgcttttatctgattactttgagcgccatcaccagcgactatgtcgtagtgggtaaagctccctcataggagggagcatcagag

SEQ ID NO: 6123 - DNA, 89 bp, synthetic construct
  misc_feature 1..89: note = engineered ribonucleic acid scaffold (ERS) sequence
  source 1..89: mol_type = other DNA
actggcgcttttatctgattactctgagcgccatcaccagcgactatgtcgtagtgggtaaagctccctcataggagggagcatcagag

SEQ ID NO: 6124 - DNA, 89 bp, synthetic construct
  misc_feature 1..89: note = engineered ribonucleic acid scaffold (ERS) sequence
  source 1..89: mol_type = other DNA
actggcgcttttatctgattactctgagcgccatcaccagcgactatgtcgtagtgggtaaagctccctcataggagggagcatcaaag

SEQ ID NO: 6125 - DNA, 89 bp, synthetic construct
  misc_feature 1..89: note = engineered ribonucleic acid scaffold (ERS) sequence
  source 1..89: mol_type = other DNA
actggcgcttctatctgattactctgagcgccatcaccagcgactatgtcgtagtgggtaaagctccctcataggagggagcctcagag

SEQ ID NO: 6126 - DNA, 89 bp, synthetic construct
  misc_feature 1..89: note = engineered ribonucleic acid scaffold (ERS) sequence
  source 1..89: mol_type = other DNA
actggcgcttctatctgattactctgagcgccatcaccagcgactatgtcgtagtgggtaaagctccctcataggagggagcgtcagag

SEQ ID NO: 6127 - DNA, 89 bp, synthetic construct
  misc_feature 1..89: note = engineered ribonucleic acid scaffold (ERS) sequence
  source 1..89: mol_type = other DNA
actggcgcttctatctgattactctgagcgccatcaccagcgactatgtcgtagtgggtaaagctccctcataggagggagcatcaaag

SEQ ID NO: 6128 - DNA, 90 bp, synthetic construct
  misc_feature 1..90: note = engineered ribonucleic acid scaffold (ERS) sequence
  source 1..90: mol_type = other DNA
actggcgcttctatctgattactctcagcgccatcaccagcgactatgtcgtagtgggtaaagctccctcttcaggagggagcatcagac

SEQ ID NO: 6129 - DNA, 90 bp, synthetic construct
  misc_feature 1..90: note = engineered ribonucleic acid scaffold (ERS) sequence
  source 1..90: mol_type = other DNA
actggcgcttctatctgattactttgagcgccatcaccagcgactatgtcgtagtgggtaaagctccctcttcaggagggagcatcagag

SEQ ID NO: 6130 - DNA, 90 bp, synthetic construct
  misc_feature 1..90: note = engineered ribonucleic acid scaffold (ERS) sequence
  source 1..90: mol_type = other DNA
actggcgcttctatctgattactttgagcgccatcaccagcgactatgtcgtagtgggtaaagctccctcttcaggagggagcatcaaag

SEQ ID NO: 6131 - DNA, 90 bp, synthetic construct
  misc_feature 1..90: note = engineered ribonucleic acid scaffold (ERS) sequence
  source 1..90: mol_type = other DNA
actggcgcttctatctgattagtctcagcgccatcaccagcgactatgtcgtagtgggtaaagctccctcttcaggagggagcatgagac

SEQ ID NO: 6132 - DNA, 90 bp, synthetic construct
  misc_feature 1..90: note = engineered ribonucleic acid scaffold (ERS) sequence
  source 1..90: mol_type = other DNA
actggcgcttctatctgattagtctgagcgccatcaccagcgactatgtcgtagtgggtaaagctccctcttcaggagggagcatcagac

SEQ ID NO: 6133 - DNA, 90 bp, synthetic construct
  misc_feature 1..90: note = engineered ribonucleic acid scaffold (ERS) sequence
  source 1..90: mol_type = other DNA
actggcgcttctatctgattactctcagcgccatcaccagcgactatgtcgtagtgggtaaagctccctcttcaggagggagcatgagag

SEQ ID NO: 6134 - DNA, 90 bp, synthetic construct
  misc_feature 1..90: note = engineered ribonucleic acid scaffold (ERS) sequence
  source 1..90: mol_type = other DNA
actggcgctcccatctgattaccccgagcgccatcaccagcgactatgtcgtagtgggtaaagctccctcttcaggagggagcatcgggg

SEQ ID NO: 6135 - DNA, 90 bp, synthetic construct
  misc_feature 1..90: note = engineered ribonucleic acid scaffold (ERS) sequence
  source 1..90: mol_type = other DNA
actggcgctcctatctgattactccgagcgccatcaccagcgactatgtcgtagtgggtaaagctccctcttcaggagggagcatcggag

SEQ ID NO: 6136 - DNA, 90 bp, synthetic construct
  misc_feature 1..90: note = engineered ribonucleic acid scaffold (ERS) sequence
  source 1..90: mol_type = other DNA
actggcgctgggatctgattaccccgagcgccatcaccagcgactatgtcgtagtgggtaaagctccctcttcaggagggagcatcgggg

SEQ ID NO: 6137 - DNA, 90 bp, synthetic construct
  misc_feature 1..90: note = engineered ribonucleic acid scaffold (ERS) sequence
  source 1..90: mol_type = other DNA
actggcgctggtatctgattactccgagcgccatcaccagcgactatgtcgtagtgggtaaagctccctcttcaggagggagcatcggag

SEQ ID NO: 6138 - DNA, 90 bp, synthetic construct
  misc_feature 1..90: note = engineered ribonucleic acid scaffold (ERS) sequence
  source 1..90: mol_type = other DNA
actggcgcttccatctgattaccctgagcgccatcaccagcgactatgtcgtagtgggtaaagctccctcttcaggagggagcatcaggg

SEQ ID NO: 6139 - DNA, 90 bp, synthetic construct
  misc_feature 1..90: note = engineered ribonucleic acid scaffold (ERS) sequence
  source 1..90: mol_type = other DNA
actggcgcttggatctgattaccctgagcgccatcaccagcgactatgtcgtagtgggtaaagctccctcttcaggagggagcatcaggg

SEQ ID NO: 6140 - DNA, 90 bp, synthetic construct
  misc_feature 1..90: note = engineered ribonucleic acid scaffold (ERS) sequence
  source 1..90: mol_type = other DNA
actggcgcttgtatctgattactctgagcgccatcaccagcgactatgtcgtagtgggtaaagctccctcttcaggagggagcatcagag

SEQ ID NO: 6141 - DNA, 90 bp, synthetic construct
  misc_feature 1..90: note = engineered ribonucleic acid scaffold (ERS) sequence
  source 1..90: mol_type = other DNA
actggcgcttttatctgattactttgagcgccatcaccagcgactatgtcgtagtgggtaaagctccctcttcaggagggagcatcagag

SEQ ID NO: 6142 - DNA, 90 bp, synthetic construct
  misc_feature 1..90: note = engineered ribonucleic acid scaffold (ERS) sequence
  source 1..90: mol_type = other DNA
actggcgcttttatctgattactctgagcgccatcaccagcgactatgtcgtagtgggtaaagctccctcttcaggagggagcatcagag

SEQ ID NO: 6143 - DNA, 90 bp, synthetic construct
  misc_feature 1..90: note = engineered ribonucleic acid scaffold (ERS) sequence
  source 1..90: mol_type = other DNA
actggcgcttttatctgattactctgagcgccatcaccagcgactatgtcgtagtgggtaaagctccctcttcaggagggagcatcaaag

SEQ ID NO: 6144 - DNA, 90 bp, synthetic construct
  misc_feature 1..90: note = engineered ribonucleic acid scaffold (ERS) sequence
  source 1..90: mol_type = other DNA
actggcgcttctatctgattactctgagcgccatcaccagcgactatgtcgtagtgggtaaagctccctcttcaggagggagcctcagag

SEQ ID NO: 6145 - DNA, 90 bp, synthetic construct
  misc_feature 1..90: note = engineered ribonucleic acid scaffold (ERS) sequence
  source 1..90: mol_type = other DNA
actggcgcttctatctgattactctgagcgccatcaccagcgactatgtcgtagtgggtaaagctccctcttcaggagggagcgtcagag

SEQ ID NO: 6146 - DNA, 90 bp, synthetic construct
  misc_feature 1..90: note = engineered ribonucleic acid scaffold (ERS) sequence
  source 1..90: mol_type = other DNA
actggcgcttctatctgattactctgagcgccatcaccagcgactatgtcgtagtgggtaaagctccctcttcaggagggagcatcaaag

SEQ ID NO: 6147 - DNA, 89 bp, synthetic construct
  misc_feature 1..89: note = engineered ribonucleic acid scaffold (ERS) sequence
  source 1..89: mol_type = other DNA
actggcgcttctatctgattactctcagcgccatcaccagcgactatgtcgtagtgggtaaagctccctcttcggagagtgcatcagac

SEQ ID NO: 6148 - DNA, 89 bp, synthetic construct
  misc_feature 1..89: note = engineered ribonucleic acid scaffold (ERS) sequence
  source 1..89: mol_type = other DNA
actggcgcttctatctgattactttgagcgccatcaccagcgactatgtcgtagtgggtaaagctccctcttcggagagtgcatcagag

SEQ ID NO: 6149 - DNA, 89 bp, synthetic construct
  misc_feature 1..89: note = engineered ribonucleic acid scaffold (ERS) sequence
  source 1..89: mol_type = other DNA
actggcgcttctatctgattactttgagcgccatcaccagcgactatgtcgtagtgggtaaagctccctcttcggagagtgcatcaaag

SEQ ID NO: 6150 - DNA, 89 bp, synthetic construct
  misc_feature 1..89: note = engineered ribonucleic acid scaffold (ERS) sequence
  source 1..89: mol_type = other DNA
actggcgcttctatctgattagtctcagcgccatcaccagcgactatgtcgtagtgggtaaagctccctcttcggagagtgcatgagac

SEQ ID NO: 6151 - DNA, 89 bp, synthetic construct
  misc_feature 1..89: note = engineered ribonucleic acid scaffold (ERS) sequence
  source 1..89: mol_type = other DNA
actggcgcttctatctgattagtctgagcgccatcaccagcgactatgtcgtagtgggtaaagctccctcttcggagagtgcatcagac

SEQ ID NO: 6152 - DNA, 89 bp, synthetic construct
  misc_feature 1..89: note = engineered ribonucleic acid scaffold (ERS) sequence
  source 1..89: mol_type = other DNA
actggcgcttctatctgattactctcagcgccatcaccagcgactatgtcgtagtgggtaaagctccctcttcggagagtgcatgagag

SEQ ID NO: 6153 - DNA, 89 bp, synthetic construct
  misc_feature 1..89: note = engineered ribonucleic acid scaffold (ERS) sequence
  source 1..89: mol_type = other DNA
actggcgctcccatctgattaccccgagcgccatcaccagcgactatgtcgtagtgggtaaagctccctcttcggagagtgcatcgggg

SEQ ID NO: 6154 - DNA, 89 bp, synthetic construct
  misc_feature 1..89: note = engineered ribonucleic acid scaffold (ERS) sequence
  source 1..89: mol_type = other DNA
actggcgctcctatctgattactccgagcgccatcaccagcgactatgtcgtagtgggtaaagctccctcttcggagagtgcatcggag

SEQ ID NO: 6155 - DNA, 89 bp, synthetic construct
  misc_feature 1..89: note = engineered ribonucleic acid scaffold (ERS) sequence
  source 1..89: mol_type = other DNA
actggcgctgggatctgattaccccgagcgccatcaccagcgactatgtcgtagtgggtaaagctccctcttcggagagtgcatcgggg

SEQ ID NO: 6156 - DNA, 89 bp, synthetic construct
  misc_feature 1..89: note = engineered ribonucleic acid scaffold (ERS) sequence
  source 1..89: mol_type = other DNA
actggcgctggtatctgattactccgagcgccatcaccagcgactatgtcgtagtgggtaaagctccctcttcggagagtgcatcggag

SEQ ID NO: 6157 - DNA, 89 bp, synthetic construct
  misc_feature 1..89: note = engineered ribonucleic acid scaffold (ERS) sequence
  source 1..89: mol_type = other DNA
actggcgcttccatctgattaccctgagcgccatcaccagcgactatgtcgtagtgggtaaagctccctcttcggagagtgcatcaggg

SEQ ID NO: 6158 - DNA, 89 bp, synthetic construct
  misc_feature 1..89: note = engineered ribonucleic acid scaffold (ERS) sequence
  source 1..89: mol_type = other DNA
actggcgcttggatctgattaccctgagcgccatcaccagcgactatgtcgtagtgggtaaagctccctcttcggagagtgcatcaggg

SEQ ID NO: 6159 - DNA, 89 bp, synthetic construct
  misc_feature 1..89: note = engineered ribonucleic acid scaffold (ERS) sequence
  source 1..89: mol_type = other DNA
actggcgcttgtatctgattactctgagcgccatcaccagcgactatgtcgtagtgggtaaagctccctcttcggagagtgcatcagag

SEQ ID NO: 6160 - DNA, 89 bp, synthetic construct
  misc_feature 1..89: note = engineered ribonucleic acid scaffold (ERS) sequence
  source 1..89: mol_type = other DNA
actggcgcttttatctgattactttgagcgccatcaccagcgactatgtcgtagtgggtaaagctccctcttcggagagtgcatcagag

SEQ ID NO: 6161 - DNA, 89 bp, synthetic construct
  misc_feature 1..89: note = engineered ribonucleic acid scaffold (ERS) sequence
  source 1..89: mol_type = other DNA
actggcgcttttatctgattactctgagcgccatcaccagcgactatgtcgtagtgggtaaagctccctcttcggagagtgcatcagag

SEQ ID NO: 6162 - DNA, 89 bp, synthetic construct
  misc_feature 1..89: note = engineered ribonucleic acid scaffold (ERS) sequence
  source 1..89: mol_type = other DNA
actggcgcttttatctgattactctgagcgccatcaccagcgactatgtcgtagtgggtaaagctccctcttcggagagtgcatcaaag

SEQ ID NO: 6163 - DNA, 89 bp, synthetic construct
  misc_feature 1..89: note = engineered ribonucleic acid scaffold (ERS) sequence
  source 1..89: mol_type = other DNA
actggcgcttctatctgattactctgagcgccatcaccagcgactatgtcgtagtgggtaaagctccctcttcggagagtgcctcagag

SEQ ID NO: 6164 - DNA, 89 bp, synthetic construct
  misc_feature 1..89: note = engineered ribonucleic acid scaffold (ERS) sequence
  source 1..89: mol_type = other DNA
actggcgcttctatctgattactctgagcgccatcaccagcgactatgtcgtagtgggtaaagctccctcttcggagagtgcgtcagag

SEQ ID NO: 6165 - DNA, 89 bp, synthetic construct
  misc_feature 1..89: note = engineered ribonucleic acid scaffold (ERS) sequence
  source 1..89: mol_type = other DNA
actggcgcttctatctgattactctgagcgccatcaccagcgactatgtcgtagtgggtaaagctccctcttcggagagtgcatcaaag

SEQ ID NO: 6166 - DNA, 89 bp, synthetic construct
  misc_feature 1..89: note = engineered ribonucleic acid scaffold (ERS) sequence
  source 1..89: mol_type = other DNA
actggcgcttctatctgattactctcagcgccatcaccagcgactatgtcgtagtgggtaaagctccctcttcggaggaggcatcagac

SEQ ID NO: 6167 - DNA, 89 bp, synthetic construct
  misc_feature 1..89: note = engineered ribonucleic acid scaffold (ERS) sequence
  source 1..89: mol_type = other DNA
actggcgcttctatctgattactttgagcgccatcaccagcgactatgtcgtagtgggtaaagctccctcttcggaggaggcatcagag

SEQ ID NO: 6168 - DNA, 89 bp, synthetic construct
  misc_feature 1..89: note = engineered ribonucleic acid scaffold (ERS) sequence
  source 1..89: mol_type = other DNA
actggcgcttctatctgattactttgagcgccatcaccagcgactatgtcgtagtgggtaaagctccctcttcggaggaggcatcaaag

SEQ ID NO: 6169 - DNA, 89 bp, synthetic construct
  misc_feature 1..89: note = engineered ribonucleic acid scaffold (ERS) sequence
  source 1..89: mol_type = other DNA
actggcgcttctatctgattagtctcagcgccatcaccagcgactatgtcgtagtgggtaaagctccctcttcggaggaggcatgagac

SEQ ID NO: 6170 - DNA, 89 bp, synthetic construct
  misc_feature 1..89: note = engineered ribonucleic acid scaffold (ERS) sequence
  source 1..89: mol_type = other DNA
actggcgcttctatctgattagtctgagcgccatcaccagcgactatgtcgtagtgggtaaagctccctcttcggaggaggcatcagac

SEQ ID NO: 6171 - DNA, 89 bp, synthetic construct
  misc_feature 1..89: note = engineered ribonucleic acid scaffold (ERS) sequence
  source 1..89: mol_type = other DNA
actggcgcttctatctgattactctcagcgccatcaccagcgactatgtcgtagtgggtaaagctccctcttcggaggaggcatgagag

SEQ ID NO: 6172 - DNA, 89 bp, synthetic construct
  misc_feature 1..89: note = engineered ribonucleic acid scaffold (ERS) sequence
  source 1..89: mol_type = other DNA
actggcgctcccatctgattaccccgagcgccatcaccagcgactatgtcgtagtgggtaaagctccctcttcggaggaggcatcgggg

SEQ ID NO: 6173 - DNA, 89 bp, synthetic construct
  misc_feature 1..89: note = engineered ribonucleic acid scaffold (ERS) sequence
  source 1..89: mol_type = other DNA
actggcgctcctatctgattactccgagcgccatcaccagcgactatgtcgtagtgggtaaagctccctcttcggaggaggcatcggag

SEQ ID NO: 6174 - DNA, 89 bp, synthetic construct
  misc_feature 1..89: note = engineered ribonucleic acid scaffold (ERS) sequence
  source 1..89: mol_type = other DNA
actggcgctgggatctgattaccccgagcgccatcaccagcgactatgtcgtagtgggtaaagctccctcttcggaggaggcatcgggg

SEQ ID NO: 6175 - DNA, 89 bp, synthetic construct
  misc_feature 1..89: note = engineered ribonucleic acid scaffold (ERS) sequence
  source 1..89: mol_type = other DNA
actggcgctggtatctgattactccgagcgccatcaccagcgactatgtcgtagtgggtaaagctccctcttcggaggaggcatcggag

SEQ ID NO: 6176 - DNA, 89 bp, synthetic construct
  misc_feature 1..89: note = engineered ribonucleic acid scaffold (ERS) sequence
  source 1..89: mol_type = other DNA
actggcgcttccatctgattaccctgagcgccatcaccagcgactatgtcgtagtgggtaaagctccctcttcggaggaggcatcaggg

SEQ ID NO: 6177 - DNA, 89 bp, synthetic construct
  misc_feature 1..89: note = engineered ribonucleic acid scaffold (ERS) sequence
  source 1..89: mol_type = other DNA
actggcgcttggatctgattaccctgagcgccatcaccagcgactatgtcgtagtgggtaaagctccctcttcggaggaggcatcaggg

SEQ ID NO: 6178 - DNA, 89 bp, synthetic construct
  misc_feature 1..89: note = engineered ribonucleic acid scaffold (ERS) sequence
  source 1..89: mol_type = other DNA
actggcgcttgtatctgattactctgagcgccatcaccagcgactatgtcgtagtgggtaaagctccctcttcggaggaggcatcagag

SEQ ID NO: 6179 - DNA, 89 bp, synthetic construct
  misc_feature 1..89: note = engineered ribonucleic acid scaffold (ERS) sequence
  source 1..89: mol_type = other DNA
actggcgcttttatctgattactttgagcgccatcaccagcgactatgtcgtagtgggtaaagctccctcttcggaggaggcatcagag

SEQ ID NO: 6180 - DNA, 89 bp, synthetic construct
  misc_feature 1..89: note = engineered ribonucleic acid scaffold (ERS) sequence
  source 1..89: mol_type = other DNA
actggcgcttttatctgattactctgagcgccatcaccagcgactatgtcgtagtgggtaaagctccctcttcggaggaggcatcagag

SEQ ID NO: 6181 - DNA, 89 bp, synthetic construct
  misc_feature 1..89: note = engineered ribonucleic acid scaffold (ERS) sequence
  source 1..89: mol_type = other DNA
actggcgcttttatctgattactctgagcgccatcaccagcgactatgtcgtagtgggtaaagctccctcttcggaggaggcatcaaag

SEQ ID NO: 6182 - DNA, 89 bp, synthetic construct
  misc_feature 1..89: note = engineered ribonucleic acid scaffold (ERS) sequence
  source 1..89: mol_type = other DNA
actggcgcttctatctgattactctgagcgccatcaccagcgactatgtcgtagtgggtaaagctccctcttcggaggaggcctcagag

SEQ ID NO: 6183 - DNA, 89 bp, synthetic construct
  misc_feature 1..89: note = engineered ribonucleic acid scaffold (ERS) sequence
  source 1..89: mol_type = other DNA
actggcgcttctatctgattactctgagcgccatcaccagcgactatgtcgtagtgggtaaagctccctcttcggaggaggcgtcagag

SEQ ID NO: 6184 - DNA, 89 bp, synthetic construct
  misc_feature 1..89: note = engineered ribonucleic acid scaffold (ERS) sequence
  source 1..89: mol_type = other DNA
actggcgcttctatctgattactctgagcgccatcaccagcgactatgtcgtagtgggtaaagctccctcttcggaggaggcatcaaag

SEQ ID NO: 6185 - DNA, 91 bp, synthetic construct
  misc_feature 1..91: note = engineered ribonucleic acid scaffold (ERS) sequence
  source 1..91: mol_type = other DNA
actggcgcttctatctgattactctcagcgccatcaccagcgactatgtcgtagtgggtaaagctccctcttcggagggaacgcatcagac

SEQ ID NO: 6186 - DNA, 91 bp, synthetic construct
  misc_feature 1..91: note = engineered ribonucleic acid scaffold (ERS) sequence
  source 1..91: mol_type = other DNA
actggcgcttctatctgattactttgagcgccatcaccagcgactatgtcgtagtgggtaaagctccctcttcggagggaacgcatcagag

SEQ ID NO: 6187 - DNA, 91 bp, synthetic construct
  misc_feature 1..91: note = engineered ribonucleic acid scaffold (ERS) sequence
  source 1..91: mol_type = other DNA
actggcgcttctatctgattactttgagcgccatcaccagcgactatgtcgtagtgggtaaagctccctcttcggagggaacgcatcaaag

SEQ ID NO: 6188 - DNA, 91 bp, synthetic construct
  misc_feature 1..91: note = engineered ribonucleic acid scaffold (ERS) sequence
  source 1..91: mol_type = other DNA
actggcgcttctatctgattagtctcagcgccatcaccagcgactatgtcgtagtgggtaaagctccctcttcggagggaacgcatgagac

SEQ ID NO: 6189 - DNA, 91 bp, synthetic construct
  misc_feature 1..91: note = engineered ribonucleic acid scaffold (ERS) sequence
  source 1..91: mol_type = other DNA
actggcgcttctatctgattagtctgagcgccatcaccagcgactatgtcgtagtgggtaaagctccctcttcggagggaacgcatcagac

SEQ ID NO: 6190 - DNA, 91 bp, synthetic construct
  misc_feature 1..91: note = engineered ribonucleic acid scaffold (ERS) sequence
  source 1..91: mol_type = other DNA
actggcgcttctatctgattactctcagcgccatcaccagcgactatgtcgtagtgggtaaagctccctcttcggagggaacgcatgagag

SEQ ID NO: 6191 - DNA, 91 bp, synthetic construct
  misc_feature 1..91: note = engineered ribonucleic acid scaffold (ERS) sequence
  source 1..91: mol_type = other DNA
actggcgctcccatctgattaccccgagcgccatcaccagcgactatgtcgtagtgggtaaagctccctcttcggagggaacgcatcgggg

SEQ ID NO: 6192 - DNA, 91 bp, synthetic construct
  misc_feature 1..91: note = engineered ribonucleic acid scaffold (ERS) sequence
  source 1..91: mol_type = other DNA
actggcgctcctatctgattactccgagcgccatcaccagcgactatgtcgtagtgggtaaagctccctcttcggagggaacgcatcggag

SEQ ID NO: 6193 - DNA, 91 bp, synthetic construct
  misc_feature 1..91: note = engineered ribonucleic acid scaffold (ERS) sequence
  source 1..91: mol_type = other DNA
actggcgctgggatctgattaccccgagcgccatcaccagcgactatgtcgtagtgggtaaagctccctcttcggagggaacgcatcgggg

SEQ ID NO: 6194 - DNA, 91 bp, synthetic construct
  misc_feature 1..91: note = engineered ribonucleic acid scaffold (ERS) sequence
  source 1..91: mol_type = other DNA
actggcgctggtatctgattactccgagcgccatcaccagcgactatgtcgtagtgggtaaagctccctcttcggagggaacgcatcggag

SEQ ID NO: 6195 - DNA, 91 bp, synthetic construct
  misc_feature 1..91: note = engineered ribonucleic acid scaffold (ERS) sequence
  source 1..91: mol_type = other DNA
actggcgcttccatctgattaccctgagcgccatcaccagcgactatgtcgtagtgggtaaagctccctcttcggagggaacgcatcaggg

SEQ ID NO: 6196 - DNA, 91 bp, synthetic construct
  misc_feature 1..91: note = engineered ribonucleic acid scaffold (ERS) sequence
  source 1..91: mol_type = other DNA
actggcgcttggatctgattaccctgagcgccatcaccagcgactatgtcgtagtgggtaaagctccctcttcggagggaacgcatcaggg

SEQ ID NO: 6197 - DNA, 91 bp, synthetic construct
  misc_feature 1..91: note = engineered ribonucleic acid scaffold (ERS) sequence
  source 1..91: mol_type = other DNA
actggcgcttgtatctgattactctgagcgccatcaccagcgactatgtcgtagtgggtaaagctccctcttcggagggaacgcatcagag

SEQ ID NO: 6198 - DNA, 91 bp, synthetic construct
  misc_feature 1..91: note = engineered ribonucleic acid scaffold (ERS) sequence
  source 1..91: mol_type = other DNA
actggcgcttttatctgattactttgagcgccatcaccagcgactatgtcgtagtgggtaaagctccctcttcggagggaacgcatcagag

SEQ ID NO: 6199 - DNA, 91 bp, synthetic construct
  misc_feature 1..91: note = engineered ribonucleic acid scaffold (ERS) sequence
  source 1..91: mol_type = other DNA
actggcgcttttatctgattactctgagcgccatcaccagcgactatgtcgtagtgggtaaagctccctcttcggagggaacgcatcagag

SEQ ID NO: 6200 - DNA, 91 bp, synthetic construct
  misc_feature 1..91: note = engineered ribonucleic acid scaffold (ERS) sequence
  source 1..91: mol_type = other DNA
actggcgcttttatctgattactctgagcgccatcaccagcgactatgtcgtagtgggtaaagctccctcttcggagggaacgcatcaaag

SEQ ID NO: 6201 - DNA, 91 bp, synthetic construct
  misc_feature 1..91: note = engineered ribonucleic acid scaffold (ERS) sequence
  source 1..91: mol_type = other DNA
actggcgcttctatctgattactctgagcgccatcaccagcgactatgtcgtagtgggtaaagctccctcttcggagggaacgcctcagag

SEQ ID NO: 6202 - DNA, 91 bp, synthetic construct
  misc_feature 1..91: note = engineered ribonucleic acid scaffold (ERS) sequence
  source 1..91: mol_type = other DNA
actggcgcttctatctgattactctgagcgccatcaccagcgactatgtcgtagtgggtaaagctccctcttcggagggaacgcgtcagag

SEQ ID NO: 6203 - DNA, 91 bp, synthetic construct
  misc_feature 1..91: note = engineered ribonucleic acid scaffold (ERS) sequence
  source 1..91: mol_type = other DNA
actggcgcttctatctgattactctgagcgccatcaccagcgactatgtcgtagtgggtaaagctccctcttcggagggaacgcatcaaag

SEQ ID NO: 6204 - DNA, 89 bp, synthetic construct; identical to SEQ ID NO: 620
  misc_feature 1..89: note = engineered ribonucleic acid scaffold (ERS) sequence
  source 1..89: mol_type = other DNA

SEQ ID NO: 6205 - DNA, 89 bp, synthetic construct; identical to SEQ ID NO: 606
  misc_feature 1..89: note = engineered ribonucleic acid scaffold (ERS) sequence
  source 1..89: mol_type = other DNA

SEQ ID NO: 6206 - DNA, 89 bp, synthetic construct; identical to SEQ ID NO: 610
  misc_feature 1..89: note = engineered ribonucleic acid scaffold (ERS) sequence
  source 1..89: mol_type = other DNA

SEQ ID NO: 6207 - DNA, 89 bp, synthetic construct; identical to SEQ ID NO: 618
  misc_feature 1..89: note = engineered ribonucleic acid scaffold (ERS) sequence
  source 1..89: mol_type = other DNA

SEQ ID NO: 6208 - DNA, 89 bp, synthetic construct; identical to SEQ ID NO: 619
  misc_feature 1..89: note = engineered ribonucleic acid scaffold (ERS) sequence
  source 1..89: mol_type = other DNA

SEQ ID NO: 6209 - DNA, 89 bp, synthetic construct; identical to SEQ ID NO: 604
  misc_feature 1..89: note = engineered ribonucleic acid scaffold (ERS) sequence
  source 1..89: mol_type = other DNA

SEQ ID NO: 6210 - DNA, 89 bp, synthetic construct; identical to SEQ ID NO: 616
  misc_feature 1..89: note = engineered ribonucleic acid scaffold (ERS) sequence
  source 1..89: mol_type = other DNA

SEQ ID NO: 6211 - DNA, 89 bp, synthetic construct; identical to SEQ ID NO: 613
  misc_feature 1..89: note = engineered ribonucleic acid scaffold (ERS) sequence
  source 1..89: mol_type = other DNA

SEQ ID NO: 6212 - DNA, 89 bp, synthetic construct; identical to SEQ ID NO: 617
  misc_feature 1..89: note = engineered ribonucleic acid scaffold (ERS) sequence
  source 1..89: mol_type = other DNA

SEQ ID NO: 6213 - DNA, 89 bp, synthetic construct; identical to SEQ ID NO: 615
  misc_feature 1..89: note = engineered ribonucleic acid scaffold (ERS) sequence
  source 1..89: mol_type = other DNA

SEQ ID NO: 6214 - DNA, 89 bp, synthetic construct; identical to SEQ ID NO: 612
  misc_feature 1..89: note = engineered ribonucleic acid scaffold (ERS) sequence
  source 1..89: mol_type = other DNA

SEQ ID NO: 6215 - DNA, 89 bp, synthetic construct; identical to SEQ ID NO: 614
  misc_feature 1..89: note = engineered ribonucleic acid scaffold (ERS) sequence
  source 1..89: mol_type = other DNA

SEQ ID NO: 6216 - DNA, 89 bp, synthetic construct; identical to SEQ ID NO: 611
  misc_feature 1..89: note = engineered ribonucleic acid scaffold (ERS) sequence
  source 1..89: mol_type = other DNA

SEQ ID NO: 6217 - DNA, 89 bp, synthetic construct; identical to SEQ ID NO: 608
  misc_feature 1..89: note = engineered ribonucleic acid scaffold (ERS) sequence
  source 1..89: mol_type = other DNA

SEQ ID NO: 6218 - DNA, 89 bp, synthetic construct; identical to SEQ ID NO: 605
  misc_feature 1..89: note = engineered ribonucleic acid scaffold (ERS) sequence
  source 1..89: mol_type = other DNA

SEQ ID NO: 6219 - DNA, 89 bp, synthetic construct; identical to SEQ ID NO: 609
  misc_feature 1..89: note = engineered ribonucleic acid scaffold (ERS) sequence
  source 1..89: mol_type = other DNA

SEQ ID NO: 6220 - DNA, 89 bp, synthetic construct; identical to SEQ ID NO: 621
  misc_feature 1..89: note = engineered ribonucleic acid scaffold (ERS) sequence
  source 1..89: mol_type = other DNA

SEQ ID NO: 6221 - DNA, 89 bp, synthetic construct; identical to SEQ ID NO: 622
  misc_feature 1..89: note = engineered ribonucleic acid scaffold (ERS) sequence
  source 1..89: mol_type = other DNA

SEQ ID NO: 6222 - DNA, 89 bp, synthetic construct; identical to SEQ ID NO: 607
  misc_feature 1..89: note = engineered ribonucleic acid scaffold (ERS) sequence
  source 1..89: mol_type = other DNA

SEQ ID NO: 6223 - DNA, 89 bp, synthetic construct
  misc_feature 1..89: note = engineered ribonucleic acid scaffold (ERS) sequence
  source 1..89: mol_type = other DNA
actggcgcttctatctgattactctcagcgccatcaccagcgactatgtcgtagtgggtaaagctccctggaaacagggagcatcagac

SEQ ID NO: 6224 - DNA, 89 bp, synthetic construct
  misc_feature 1..89: note = engineered ribonucleic acid scaffold (ERS) sequence
  source 1..89: mol_type = other DNA
actggcgcttctatctgattactttgagcgccatcaccagcgactatgtcgtagtgggtaaagctccctggaaacagggagcatcagag

SEQ ID NO: 6225 - DNA, 89 bp, synthetic construct
  misc_feature 1..89: note = engineered ribonucleic acid scaffold (ERS) sequence
  source 1..89: mol_type = other DNA
actggcgcttctatctgattactttgagcgccatcaccagcgactatgtcgtagtgggtaaagctccctggaaacagggagcatcaaag

SEQ ID NO: 6226 - DNA, 89 bp, synthetic construct
  misc_feature 1..89: note = engineered ribonucleic acid scaffold (ERS) sequence
  source 1..89: mol_type = other DNA
actggcgcttctatctgattagtctcagcgccatcaccagcgactatgtcgtagtgggtaaagctccctggaaacagggagcatgagac

SEQ ID NO: 6227 - DNA, 89 bp, synthetic construct
  misc_feature 1..89: note = engineered ribonucleic acid scaffold (ERS) sequence
  source 1..89: mol_type = other DNA
actggcgcttctatctgattagtctgagcgccatcaccagcgactatgtcgtagtgggtaaagctccctggaaacagggagcatcagac

SEQ ID NO: 6228 - DNA, 89 bp, synthetic construct
  misc_feature 1..89: note = engineered ribonucleic acid scaffold (ERS) sequence
  source 1..89: mol_type = other DNA
actggcgcttctatctgattactctcagcgccatcaccagcgactatgtcgtagtgggtaaagctccctggaaacagggagcatgagag

SEQ ID NO: 6229 - DNA, 89 bp, synthetic construct
  misc_feature 1..89: note = engineered ribonucleic acid scaffold (ERS) sequence
  source 1..89: mol_type = other DNA
actggcgctcccatctgattaccccgagcgccatcaccagcgactatgtcgtagtgggtaaagctccctggaaacagggagcatcgggg

SEQ ID NO: 6230 - DNA, 89 bp, synthetic construct
  misc_feature 1..89: note = engineered ribonucleic acid scaffold (ERS) sequence
  source 1..89: mol_type = other DNA
actggcgctcctatctgattactccgagcgccatcaccagcgactatgtcgtagtgggtaaagctccctggaaacagggagcatcggag

SEQ ID NO: 6231 - DNA, 89 bp, synthetic construct
  misc_feature 1..89: note = engineered ribonucleic acid scaffold (ERS) sequence
  source 1..89: mol_type = other DNA
actggcgctgggatctgattaccccgagcgccatcaccagcgactatgtcgtagtgggtaaagctccctggaaacagggagcatcgggg

SEQ ID NO: 6232 - DNA, 89 bp, synthetic construct
  misc_feature 1..89: note = engineered ribonucleic acid scaffold (ERS) sequence
  source 1..89: mol_type = other DNA
actggcgctggtatctgattactccgagcgccatcaccagcgactatgtcgtagtgggtaaagctccctggaaacagggagcatcggag

SEQ ID NO: 6233 - DNA, 89 bp, synthetic construct
  misc_feature 1..89: note = engineered ribonucleic acid scaffold (ERS) sequence
  source 1..89: mol_type = other DNA
actggcgcttccatctgattaccctgagcgccatcaccagcgactatgtcgtagtgggtaaagctccctggaaacagggagcatcaggg

SEQ ID NO: 6234 - DNA, 89 bp, synthetic construct
  misc_feature 1..89: note = engineered ribonucleic acid scaffold (ERS) sequence
  source 1..89: mol_type = other DNA
actggcgcttggatctgattaccctgagcgccatcaccagcgactatgtcgtagtgggtaaagctccctggaaacagggagcatcaggg

SEQ ID NO: 6235 - DNA, 89 bp, synthetic construct
  misc_feature 1..89: note = engineered ribonucleic acid scaffold (ERS) sequence
  source 1..89: mol_type = other DNA
actggcgcttgtatctgattactctgagcgccatcaccagcgactatgtcgtagtgggtaaagctccctggaaacagggagcatcagag

SEQ ID NO: 6236 - DNA, 89 bp, synthetic construct
  misc_feature 1..89: note = engineered ribonucleic acid scaffold (ERS) sequence
  source 1..89: mol_type = other DNA
actggcgcttttatctgattactttgagcgccatcaccagcgactatgtcgtagtgggtaaagctccctggaaacagggagcatcagag

SEQ ID NO: 6237 - DNA, 89 bp, synthetic construct
  misc_feature 1..89: note = engineered ribonucleic acid scaffold (ERS) sequence
  source 1..89: mol_type = other DNA
actggcgcttttatctgattactctgagcgccatcaccagcgactatgtcgtagtgggtaaagctccctggaaacagggagcatcagag

SEQ ID NO: 6238 - DNA, 89 bp, synthetic construct
  misc_feature 1..89: note = engineered ribonucleic acid scaffold (ERS) sequence
  source 1..89: mol_type = other DNA
actggcgcttttatctgattactctgagcgccatcaccagcgactatgtcgtagtgggtaaagctccctggaaacagggagcatcaaag

SEQ ID NO: 6239 - DNA, 89 bp, synthetic construct
  misc_feature 1..89: note = engineered ribonucleic acid scaffold (ERS) sequence
  source 1..89: mol_type = other DNA
actggcgcttctatctgattactctgagcgccatcaccagcgactatgtcgtagtgggtaaagctccctggaaacagggagcctcagag

SEQ ID NO: 6240 - DNA, 89 bp, synthetic construct
  misc_feature 1..89: note = engineered ribonucleic acid scaffold (ERS) sequence
  source 1..89: mol_type = other DNA
actggcgcttctatctgattactctgagcgccatcaccagcgactatgtcgtagtgggtaaagctccctggaaacagggagcgtcagag

SEQ ID NO: 6241 - DNA, 89 bp, synthetic construct
  misc_feature 1..89: note = engineered ribonucleic acid scaffold (ERS) sequence
  source 1..89: mol_type = other DNA
actggcgcttctatctgattactctgagcgccatcaccagcgactatgtcgtagtgggtaaagctccctggaaacagggagcatcaaag

SEQ ID NO: 6242 - DNA, 85 bp, synthetic construct
  misc_feature 1..85: note = engineered ribonucleic acid scaffold (ERS) sequence
  source 1..85: mol_type = other DNA
actggcgcttctatctgattactctcagcgccatcaccagcgactatgtcgtagtgggtaaagctcccttcggggagcatcagac

SEQ ID NO: 6243 - DNA, 85 bp, synthetic construct
  misc_feature 1..85: note = engineered ribonucleic acid scaffold (ERS) sequence
  source 1..85: mol_type = other DNA
actggcgcttctatctgattactttgagcgccatcaccagcgactatgtcgtagtgggtaaagctcccttcggggagcatcagag

SEQ ID NO: 6244 - DNA, 85 bp, synthetic construct
  misc_feature 1..85: note = engineered ribonucleic acid scaffold (ERS) sequence
  source 1..85: mol_type = other DNA
actggcgcttctatctgattactttgagcgccatcaccagcgactatgtcgtagtgggtaaagctcccttcggggagcatcaaag

SEQ ID NO: 6245 - DNA, 85 bp, synthetic construct
  misc_feature 1..85: note = engineered ribonucleic acid scaffold (ERS) sequence
  source 1..85: mol_type = other DNA
actggcgcttctatctgattagtctcagcgccatcaccagcgactatgtcgtagtgggtaaagctcccttcggggagcatgagac

SEQ ID NO: 6246 - DNA, 85 bp, synthetic construct
  misc_feature 1..85: note = engineered ribonucleic acid scaffold (ERS) sequence
  source 1..85: mol_type = other DNA
actggcgcttctatctgattagtctgagcgccatcaccagcgactatgtcgtagtgggtaaagctcccttcggggagcatcagac

SEQ ID NO: 6247 - DNA, 85 bp, synthetic construct
  misc_feature 1..85: note = engineered ribonucleic acid scaffold (ERS) sequence
  source 1..85: mol_type = other DNA
actggcgcttctatctgattactctcagcgccatcaccagcgactatgtcgtagtgggtaaagctcccttcggggagcatgagag

SEQ ID NO: 6248 - DNA, 85 bp, synthetic construct
  misc_feature 1..85: note = engineered ribonucleic acid scaffold (ERS) sequence
  source 1..85: mol_type = other DNA
actggcgctcccatctgattaccccgagcgccatcaccagcgactatgtcgtagtgggtaaagctcccttcggggagcatcgggg

SEQ ID NO: 6249 - DNA, 85 bp, synthetic construct
  misc_feature 1..85: note = engineered ribonucleic acid scaffold (ERS) sequence
  source 1..85: mol_type = other DNA
actggcgctcctatctgattactccgagcgccatcaccagcgactatgtcgtagtgggtaaagctcccttcggggagcatcggag

SEQ ID NO: 6250 - DNA, 85 bp, synthetic construct
  misc_feature 1..85: note = engineered ribonucleic acid scaffold (ERS) sequence
  source 1..85: mol_type = other DNA
actggcgctgggatctgattaccccgagcgccatcaccagcgactatgtcgtagtgggtaaagctcccttcggggagcatcgggg

SEQ ID NO: 6251 - DNA, 85 bp, synthetic construct
  misc_feature 1..85: note = engineered ribonucleic acid scaffold (ERS) sequence
  source 1..85: mol_type = other DNA
actggcgctggtatctgattactccgagcgccatcaccagcgactatgtcgtagtgggtaaagctcccttcggggagcatcggag

SEQ ID NO: 6252 - DNA, 85 bp, synthetic construct
  misc_feature 1..85: note = engineered ribonucleic acid scaffold (ERS) sequence
  source 1..85: mol_type = other DNA
actggcgcttccatctgattaccctgagcgccatcaccagcgactatgtcgtagtgggtaaagctcccttcggggagcatcaggg

SEQ ID NO: 6253 - DNA, 85 bp, synthetic construct
  misc_feature 1..85: note = engineered ribonucleic acid scaffold (ERS) sequence
  source 1..85: mol_type = other DNA
actggcgcttggatctgattaccctgagcgccatcaccagcgactatgtcgtagtgggtaaagctcccttcggggagcatcaggg

SEQ ID NO: 6254 - DNA, 85 bp, synthetic construct
  misc_feature 1..85: note = engineered ribonucleic acid scaffold (ERS) sequence
  source 1..85: mol_type = other DNA
actggcgcttgtatctgattactctgagcgccatcaccagcgactatgtcgtagtgggtaaagctcccttcggggagcatcagag

SEQ ID NO: 6255 - DNA, 85 bp, synthetic construct
  misc_feature 1..85: note = engineered ribonucleic acid scaffold (ERS) sequence
  source 1..85: mol_type = other DNA
actggcgcttttatctgattactttgagcgccatcaccagcgactatgtcgtagtgggtaaagctcccttcggggagcatcagag

SEQ ID NO: 6256 - DNA, 85 bp, synthetic construct
  misc_feature 1..85: note = engineered ribonucleic acid scaffold (ERS) sequence
  source 1..85: mol_type = other DNA
actggcgcttttatctgattactctgagcgccatcaccagcgactatgtcgtagtgggtaaagctcccttcggggagcatcagag

SEQ ID NO: 6257 - DNA, 85 bp, synthetic construct
  misc_feature 1..85: note = engineered ribonucleic acid scaffold (ERS) sequence
  source 1..85: mol_type = other DNA
actggcgcttttatctgattactctgagcgccatcaccagcgactatgtcgtagtgggtaaagctcccttcggggagcatcaaag

SEQ ID NO: 6258 - DNA, 85 bp, synthetic construct
  misc_feature 1..85: note = engineered ribonucleic acid scaffold (ERS) sequence
  source 1..85: mol_type = other DNA
actggcgcttctatctgattactctgagcgccatcaccagcgactatgtcgtagtgggtaaagctcccttcggggagcctcagag

SEQ ID NO: 6259 - DNA, 85 bp, synthetic construct
  misc_feature 1..85: note = engineered ribonucleic acid scaffold (ERS) sequence
  source 1..85: mol_type = other DNA
actggcgcttctatctgattactctgagcgccatcaccagcgactatgtcgtagtgggtaaagctcccttcggggagcgtcagag

SEQ ID NO: 6260 - DNA, 85 bp, synthetic construct
  misc_feature 1..85: note = engineered ribonucleic acid scaffold (ERS) sequence
  source 1..85: mol_type = other DNA
actggcgcttctatctgattactctgagcgccatcaccagcgactatgtcgtagtgggtaaagctcccttcggggagcatcaaag

SEQ ID NO: 6261 - DNA, 85 bp, synthetic construct
  misc_feature 1..85: note = engineered ribonucleic acid scaffold (ERS) sequence
  source 1..85: mol_type = other DNA
actggcgcttctatctgattactctcagcgccatcaccagcgactatgtcgtagtgggtaaagctccgttcgcggagcatcagac

SEQ ID NO: 6262 - DNA, 85 bp, synthetic construct
  misc_feature 1..85: note = engineered ribonucleic acid scaffold (ERS) sequence
  source 1..85: mol_type = other DNA
actggcgcttctatctgattactttgagcgccatcaccagcgactatgtcgtagtgggtaaagctccgttcgcggagcatcagag

SEQ ID NO: 6263 - DNA, 85 bp, synthetic construct
  misc_feature 1..85: note = engineered ribonucleic acid scaffold (ERS) sequence
  source 1..85: mol_type = other DNA
actggcgcttctatctgattactttgagcgccatcaccagcgactatgtcgtagtgggtaaagctccgttcgcggagcatcaaag

SEQ ID NO: 6264 - DNA, 85 bp, synthetic construct
  misc_feature 1..85: note = engineered ribonucleic acid scaffold (ERS) sequence
  source 1..85: mol_type = other DNA
actggcgcttctatctgattagtctcagcgccatcaccagcgactatgtcgtagtgggtaaagctccgttcgcggagcatgagac

SEQ ID NO: 6265 - DNA, 85 bp, synthetic construct
  misc_feature 1..85: note = engineered ribonucleic acid scaffold (ERS) sequence
  source 1..85: mol_type = other DNA
actggcgcttctatctgattagtctgagcgccatcaccagcgactatgtcgtagtgggtaaagctccgttcgcggagcatcagac

SEQ ID NO: 6266 - DNA, 85 bp, synthetic construct
  misc_feature 1..85: note = engineered ribonucleic acid scaffold (ERS) sequence
  source 1..85: mol_type = other DNA
actggcgcttctatctgattactctcagcgccatcaccagcgactatgtcgtagtgggtaaagctccgttcgcggagcatgagag

SEQ ID NO: 6267 - DNA, 85 bp, synthetic construct
  misc_feature 1..85: note = engineered ribonucleic acid scaffold (ERS) sequence
  source 1..85: mol_type = other DNA
actggcgctcccatctgattaccccgagcgccatcaccagcgactatgtcgtagtgggtaaagctccgttcgcggagcatcgggg

SEQ ID NO: 6268 - DNA, 85 bp, synthetic construct
  misc_feature 1..85: note = engineered ribonucleic acid scaffold (ERS) sequence
  source 1..85: mol_type = other DNA
actggcgctcctatctgattactccgagcgccatcaccagcgactatgtcgtagtgggtaaagctccgttcgcggagcatcggag

SEQ ID NO: 6269 - DNA, 85 bp, synthetic construct
  misc_feature 1..85: note = engineered ribonucleic acid scaffold (ERS) sequence
  source 1..85: mol_type = other DNA
actggcgctgggatctgattaccccgagcgccatcaccagcgactatgtcgtagtgggtaaagctccgttcgcggagcatcgggg

SEQ ID NO: 6270 - DNA, 85 bp, synthetic construct
  misc_feature 1..85: note = engineered ribonucleic acid scaffold (ERS) sequence
  source 1..85: mol_type = other DNA
actggcgctggtatctgattactccgagcgccatcaccagcgactatgtcgtagtgggtaaagctccgttcgcggagcatcggag

SEQ ID NO: 6271 - DNA, 85 bp, synthetic construct
  misc_feature 1..85: note = engineered ribonucleic acid scaffold (ERS) sequence
  source 1..85: mol_type = other DNA
actggcgcttccatctgattaccctgagcgccatcaccagcgactatgtcgtagtgggtaaagctccgttcgcggagcatcaggg

SEQ ID NO: 6272 - DNA, 85 bp, synthetic construct
  misc_feature 1..85: note = engineered ribonucleic acid scaffold (ERS) sequence
  source 1..85: mol_type = other DNA
actggcgcttggatctgattaccctgagcgccatcaccagcgactatgtcgtagtgggtaaagctccgttcgcggagcatcaggg

SEQ ID NO: 6273 - DNA, 85 bp, synthetic construct
  misc_feature 1..85: note = engineered ribonucleic acid scaffold (ERS) sequence
  source 1..85: mol_type = other DNA
actggcgcttgtatctgattactctgagcgccatcaccagcgactatgtcgtagtgggtaaagctccgttcgcggagcatcagag

SEQ ID NO: 6274 - DNA, 85 bp, synthetic construct
  misc_feature 1..85: note = engineered ribonucleic acid scaffold (ERS) sequence
  source 1..85: mol_type = other DNA
actggcgcttttatctgattactttgagcgccatcaccagcgactatgtcgtagtgggtaaagctccgttcgcggagcatcagag

SEQ ID NO: 6275 - DNA, 85 bp, synthetic construct
  misc_feature 1..85: note = engineered ribonucleic acid scaffold (ERS) sequence
  source 1..85: mol_type = other DNA
actggcgcttttatctgattactctgagcgccatcaccagcgactatgtcgtagtgggtaaagctccgttcgcggagcatcagag

SEQ ID NO: 6276 - DNA, 85 bp, synthetic construct
  misc_feature 1..85: note = engineered ribonucleic acid scaffold (ERS) sequence
  source 1..85: mol_type = other DNA
actggcgcttttatctgattactctgagcgccatcaccagcgactatgtcgtagtgggtaaagctccgttcgcggagcatcaaag

SEQ ID NO: 6277 - DNA, 85 bp, synthetic construct
  misc_feature 1..85: note = engineered ribonucleic acid scaffold (ERS) sequence
  source 1..85: mol_type = other DNA
actggcgcttctatctgattactctgagcgccatcaccagcgactatgtcgtagtgggtaaagctccgttcgcggagcctcagag

SEQ ID NO: 6278 - DNA, 85 bp, synthetic construct
  misc_feature 1..85: note = engineered ribonucleic acid scaffold (ERS) sequence
  source 1..85: mol_type = other DNA
actggcgcttctatctgattactctgagcgccatcaccagcgactatgtcgtagtgggtaaagctccgttcgcggagcgtcagag

SEQ ID NO: 6279 - DNA, 85 bp, synthetic construct
  misc_feature 1..85: note = engineered ribonucleic acid scaffold (ERS) sequence
  source 1..85: mol_type = other DNA
actggcgcttctatctgattactctgagcgccatcaccagcgactatgtcgtagtgggtaaagctccgttcgcggagcatcaaag

SEQ ID NO: 6280 - DNA, 87 bp, synthetic construct
  misc_feature 1..87: note = engineered ribonucleic acid scaffold (ERS) sequence
  source 1..87: mol_type = other DNA
actggcgcttctatctgattactctcagcgccatcaccagcgactatgtcgtagtgggtaaagctcctcttcggaggagcatcagac

SEQ ID NO: 6281 - DNA, 87 bp, synthetic construct
  misc_feature 1..87: note = engineered ribonucleic acid scaffold (ERS) sequence
  source 1..87: mol_type = other DNA
actggcgcttctatctgattactttgagcgccatcaccagcgactatgtcgtagtgggtaaagctcctcttcggaggagcatcagag

SEQ ID NO: 6282 - DNA, 87 bp, synthetic construct
  misc_feature 1..87: note = engineered ribonucleic acid scaffold (ERS) sequence
  source 1..87: mol_type = other DNA
actggcgcttctatctgattactttgagcgccatcaccagcgactatgtcgtagtgggtaaagctcctcttcggaggagcatcaaag

SEQ ID NO: 6283 - DNA, 87 bp, synthetic construct
  misc_feature 1..87: note = engineered ribonucleic acid scaffold (ERS) sequence
  source 1..87: mol_type = other DNA
actggcgcttctatctgattagtctcagcgccatcaccagcgactatgtcgtagtgggtaaagctcctcttcggaggagcatgagac

SEQ ID NO: 6284 - DNA, 87 bp, synthetic construct
  misc_feature 1..87: note = engineered ribonucleic acid scaffold (ERS) sequence
  source 1..87: mol_type = other DNA
actggcgcttctatctgattagtctgagcgccatcaccagcgactatgtcgtagtgggtaaagctcctcttcggaggagcatcagac

SEQ ID NO: 6285 - DNA, 87 bp, synthetic construct
  misc_feature 1..87: note = engineered ribonucleic acid scaffold (ERS) sequence
  source 1..87: mol_type = other DNA
actggcgcttctatctgattactctcagcgccatcaccagcgactatgtcgtagtgggtaaagctcctcttcggaggagcatgagag

SEQ ID NO: 6286 - DNA, 87 bp, synthetic construct
  misc_feature 1..87: note = engineered ribonucleic acid scaffold (ERS) sequence
  source 1..87: mol_type = other DNA
actggcgctcccatctgattaccccgagcgccatcaccagcgactatgtcgtagtgggtaaagctcctcttcggaggagcatcgggg

SEQ ID NO: 6287 - DNA, 87 bp, synthetic construct
  misc_feature 1..87: note = engineered ribonucleic acid scaffold (ERS) sequence
  source 1..87: mol_type = other DNA
actggcgctcctatctgattactccgagcgccatcaccagcgactatgtcgtagtgggtaaagctcctcttcggaggagcatcggag

SEQ ID NO: 6288 - DNA, 87 bp, synthetic construct
  misc_feature 1..87: note = engineered ribonucleic acid scaffold (ERS) sequence
  source 1..87: mol_type = other DNA
actggcgctgggatctgattaccccgagcgccatcaccagcgactatgtcgtagtgggtaaagctcctcttcggaggagcatcgggg

SEQ ID NO: 6289 - DNA, 87 bp, synthetic construct
  misc_feature 1..87: note = engineered ribonucleic acid scaffold (ERS) sequence
  source 1..87: mol_type = other DNA
actggcgctggtatctgattactccgagcgccatcaccagcgactatgtcgtagtgggtaaagctcctcttcggaggagcatcggag

SEQ ID NO: 6290 - DNA, 87 bp, synthetic construct
  misc_feature 1..87: note = engineered ribonucleic acid scaffold (ERS) sequence
  source 1..87: mol_type = other DNA
actggcgcttccatctgattaccctgagcgccatcaccagcgactatgtcgtagtgggtaaagctcctcttcggaggagcatcaggg

SEQ ID NO: 6291 - DNA, 87 bp, synthetic construct
  misc_feature 1..87: note = engineered ribonucleic acid scaffold (ERS) sequence
  source 1..87: mol_type = other DNA
actggcgcttggatctgattaccctgagcgccatcaccagcgactatgtcgtagtgggtaaagctcctcttcggaggagcatcaggg

SEQ ID NO: 6292 - DNA, 87 bp, synthetic construct
  misc_feature 1..87: note = engineered ribonucleic acid scaffold (ERS) sequence
  source 1..87: mol_type = other DNA
actggcgcttgtatctgattactctgagcgccatcaccagcgactatgtcgtagtgggtaaagctcctcttcggaggagcatcagag

SEQ ID NO: 6293 - DNA, 87 bp, synthetic construct
  misc_feature 1..87: note = engineered ribonucleic acid scaffold (ERS) sequence
  source 1..87: mol_type = other DNA
actggcgcttttatctgattactttgagcgccatcaccagcgactatgtcgtagtgggtaaagctcctcttcggaggagcatcagag

SEQ ID NO: 6294 - DNA, 87 bp, synthetic construct
  misc_feature 1..87: note = engineered ribonucleic acid scaffold (ERS) sequence
  source 1..87: mol_type = other DNA
actggcgcttttatctgattactctgagcgccatcaccagcgactatgtcgtagtgggtaaagctcctcttcggaggagcatcagag

SEQ ID NO: 6295 - DNA, 87 bp, synthetic construct
  misc_feature 1..87: note = engineered ribonucleic acid scaffold (ERS) sequence
  source 1..87: mol_type = other DNA
actggcgcttttatctgattactctgagcgccatcaccagcgactatgtcgtagtgggtaaagctcctcttcggaggagcatcaaag

SEQ ID NO: 6296 - DNA, 87 bp, synthetic construct
  misc_feature 1..87: note = engineered ribonucleic acid scaffold (ERS) sequence
  source 1..87: mol_type = other DNA
actggcgcttctatctgattactctgagcgccatcaccagcgactatgtcgtagtgggtaaagctcctcttcggaggagcctcagag

SEQ ID NO: 6297 - DNA, 87 bp, synthetic construct
  misc_feature 1..87: note = engineered ribonucleic acid scaffold (ERS) sequence
  source 1..87: mol_type = other DNA
actggcgcttctatctgattactctgagcgccatcaccagcgactatgtcgtagtgggtaaagctcctcttcggaggagcgtcagag

SEQ ID NO: 6298 - DNA, 87 bp, synthetic construct
  misc_feature 1..87: note = engineered ribonucleic acid scaffold (ERS) sequence
  source 1..87: mol_type = other DNA
actggcgcttctatctgattactctgagcgccatcaccagcgactatgtcgtagtgggtaaagctcctcttcggaggagcatcaaag

SEQ ID NO: 6299 - DNA, 85 bp, synthetic construct
  misc_feature 1..85: note = engineered ribonucleic acid scaffold (ERS) sequence
  source 1..85: mol_type = other DNA
actggcgcttctatctgattactctcagcgccatcaccagcgactatgtcgtagtgggtaaagctctcttcggagagcatcagac

SEQ ID NO: 6300 - DNA, 85 bp, synthetic construct
  misc_feature 1..85: note = engineered ribonucleic acid scaffold (ERS) sequence
  source 1..85: mol_type = other DNA
actggcgcttctatctgattactttgagcgccatcaccagcgactatgtcgtagtgggtaaagctctcttcggagagcatcagag

SEQ ID NO: 6301 - DNA, 85 bp, synthetic construct
  misc_feature 1..85: note = engineered ribonucleic acid scaffold (ERS) sequence
  source 1..85: mol_type = other DNA
actggcgcttctatctgattactttgagcgccatcaccagcgactatgtcgtagtgggtaaagctctcttcggagagcatcaaag

SEQ ID NO: 6302 - DNA, 85 bp, synthetic construct
  misc_feature 1..85: note = engineered ribonucleic acid scaffold (ERS) sequence
  source 1..85: mol_type = other DNA
actggcgcttctatctgattagtctcagcgccatcaccagcgactatgtcgtagtgggtaaagctctcttcggagagcatgagac

SEQ ID NO: 6303 - DNA, 85 bp, synthetic construct
  misc_feature 1..85: note = engineered ribonucleic acid scaffold (ERS) sequence
  source 1..85: mol_type = other DNA
actggcgcttctatctgattagtctgagcgccatcaccagcgactatgtcgtagtgggtaaagctctcttcggagagcatcagac

SEQ ID NO: 6304 - DNA, 85 bp, synthetic construct
  misc_feature 1..85: note = engineered ribonucleic acid scaffold (ERS) sequence
  source 1..85: mol_type = other DNA
actggcgcttctatctgattactctcagcgccatcaccagcgactatgtcgtagtgggtaaagctctcttcggagagcatgagag

SEQ ID NO: 6305 - DNA, 85 bp, synthetic construct
  misc_feature 1..85: note = engineered ribonucleic acid scaffold (ERS) sequence
  source 1..85: mol_type = other DNA
actggcgctcccatctgattaccccgagcgccatcaccagcgactatgtcgtagtgggtaaagctctcttcggagagcatcgggg

SEQ ID NO: 6306 - DNA, 85 bp, synthetic construct
  misc_feature 1..85: note = engineered ribonucleic acid scaffold (ERS) sequence
  source 1..85: mol_type = other DNA
actggcgctcctatctgattactccgagcgccatcaccagcgactatgtcgtagtgggtaaagctctcttcggagagcatcggag

SEQ ID NO: 6307 - DNA, 85 bp, synthetic construct
  misc_feature 1..85: note = engineered ribonucleic acid scaffold (ERS) sequence
  source 1..85: mol_type = other DNA
actggcgctgggatctgattaccccgagcgccatcaccagcgactatgtcgtagtgggtaaagctctcttcggagagcatcgggg

SEQ ID NO: 6308 - DNA, 85 bp, synthetic construct
  misc_feature 1..85: note = engineered ribonucleic acid scaffold (ERS) sequence
  source 1..85: mol_type = other DNA
actggcgctggtatctgattactccgagcgccatcaccagcgactatgtcgtagtgggtaaagctctcttcggagagcatcggag

SEQ ID NO: 6309 - DNA, 85 bp, synthetic construct
  misc_feature 1..85: note = engineered ribonucleic acid scaffold (ERS) sequence
  source 1..85: mol_type = other DNA
actggcgcttccatctgattaccctgagcgccatcaccagcgactatgtcgtagtgggtaaagctctcttcggagagcatcaggg

SEQ ID NO: 6310 - DNA, 85 bp, synthetic construct
  misc_feature 1..85: note = engineered ribonucleic acid scaffold (ERS) sequence
  source 1..85: mol_type = other DNA
actggcgcttggatctgattaccctgagcgccatcaccagcgactatgtcgtagtgggtaaagctctcttcggagagcatcaggg

SEQ ID NO: 6311 - DNA, 85 bp, synthetic construct
  misc_feature 1..85: note = engineered ribonucleic acid scaffold (ERS) sequence
  source 1..85: mol_type = other DNA
actggcgcttgtatctgattactctgagcgccatcaccagcgactatgtcgtagtgggtaaagctctcttcggagagcatcagag

SEQ ID NO: 6312 - DNA, 85 bp, synthetic construct
  misc_feature 1..85: note = engineered ribonucleic acid scaffold (ERS) sequence
  source 1..85: mol_type = other DNA
actggcgcttttatctgattactttgagcgccatcaccagcgactatgtcgtagtgggtaaagctctcttcggagagcatcagag

SEQ ID NO: 6313 - DNA, 85 bp, synthetic construct
  misc_feature 1..85: note = engineered ribonucleic acid scaffold (ERS) sequence
  source 1..85: mol_type = other DNA
actggcgcttttatctgattactctgagcgccatcaccagcgactatgtcgtagtgggtaaagctctcttcggagagcatcagag

SEQ ID NO: 6314 - DNA, 85 bp, synthetic construct
  misc_feature 1..85: note = engineered ribonucleic acid scaffold (ERS) sequence
  source 1..85: mol_type = other DNA
actggcgcttttatctgattactctgagcgccatcaccagcgactatgtcgtagtgggtaaagctctcttcggagagcatcaaag

SEQ ID NO: 6315 - DNA, 85 bp, synthetic construct
  misc_feature 1..85: note = engineered ribonucleic acid scaffold (ERS) sequence
  source 1..85: mol_type = other DNA
actggcgcttctatctgattactctgagcgccatcaccagcgactatgtcgtagtgggtaaagctctcttcggagagcctcagag

SEQ ID NO: 6316 - DNA, 85 bp, synthetic construct
  misc_feature 1..85: note = engineered ribonucleic acid scaffold (ERS) sequence
  source 1..85: mol_type = other DNA
actggcgcttctatctgattactctgagcgccatcaccagcgactatgtcgtagtgggtaaagctctcttcggagagcgtcagag

SEQ ID NO: 6317 - DNA, 85 bp, synthetic construct
  misc_feature 1..85: note = engineered ribonucleic acid scaffold (ERS) sequence
  source 1..85: mol_type = other DNA
actggcgcttctatctgattactctgagcgccatcaccagcgactatgtcgtagtgggtaaagctctcttcggagagcatcaaag

SEQ ID NO: 6318 - DNA, 77 bp, synthetic construct
  misc_feature 1..77: note = engineered ribonucleic acid scaffold (ERS) sequence
  source 1..77: mol_type = other DNA
actggcgcttctatctgattactctcagcgccatcaccagcgactatgtcgtagtgggtaaagctgcagcatcagac

SEQ ID NO: 6319 - DNA, 77 bp, synthetic construct
  misc_feature 1..77: note = engineered ribonucleic acid scaffold (ERS) sequence
  source 1..77: mol_type = other DNA
actggcgcttctatctgattactttgagcgccatcaccagcgactatgtcgtagtgggtaaagctgcagcatcagag

SEQ ID NO: 6320 - DNA, 77 bp, synthetic construct
  misc_feature 1..77: note = engineered ribonucleic acid scaffold (ERS) sequence
  source 1..77: mol_type = other DNA
actggcgcttctatctgattactttgagcgccatcaccagcgactatgtcgtagtgggtaaagctgcagcatcaaag

SEQ ID NO: 6321 - DNA, 77 bp, synthetic construct
  misc_feature 1..77: note = engineered ribonucleic acid scaffold (ERS) sequence
  source 1..77: mol_type = other DNA
actggcgcttctatctgattagtctcagcgccatcaccagcgactatgtcgtagtgggtaaagctgcagcatgagac

SEQ ID NO: 6322 - DNA, 77 bp, synthetic construct
  misc_feature 1..77: note = engineered ribonucleic acid scaffold (ERS) sequence
  source 1..77: mol_type = other DNA
actggcgcttctatctgattagtctgagcgccatcaccagcgactatgtcgtagtgggtaaagctgcagcatcagac

SEQ ID NO: 6323 - DNA, 77 bp, synthetic construct
  misc_feature 1..77: note = engineered ribonucleic acid scaffold (ERS) sequence
  source 1..77: mol_type = other DNA
actggcgcttctatctgattactctcagcgccatcaccagcgactatgtcgtagtgggtaaagctgcagcatgagag

SEQ ID NO: 6324 - DNA, 77 bp, synthetic construct
  misc_feature 1..77: note = engineered ribonucleic acid scaffold (ERS) sequence
  source 1..77: mol_type = other DNA
actggcgctcccatctgattaccccgagcgccatcaccagcgactatgtcgtagtgggtaaagctgcagcatcgggg

SEQ ID NO: 6325 - DNA, 77 bp, synthetic construct
  misc_feature 1..77: note = engineered ribonucleic acid scaffold (ERS) sequence
  source 1..77: mol_type = other DNA
actggcgctcctatctgattactccgagcgccatcaccagcgactatgtcgtagtgggtaaagctgcagcatcggag

SEQ ID NO: 6326 - DNA, 77 bp, synthetic construct
  misc_feature 1..77: note = engineered ribonucleic acid scaffold (ERS) sequence
  source 1..77: mol_type = other DNA
actggcgctgggatctgattaccccgagcgccatcaccagcgactatgtcgtagtgggtaaagctgcagcatcgggg

SEQ ID NO: 6327 - DNA, 77 bp, synthetic construct
  misc_feature 1..77: note = engineered ribonucleic acid scaffold (ERS) sequence
  source 1..77: mol_type = other DNA
actggcgctggtatctgattactccgagcgccatcaccagcgactatgtcgtagtgggtaaagctgcagcatcggag

SEQ ID NO: 6328 - DNA, 77 bp, synthetic construct
  misc_feature 1..77: note = engineered ribonucleic acid scaffold (ERS) sequence
  source 1..77: mol_type = other DNA
actggcgcttccatctgattaccctgagcgccatcaccagcgactatgtcgtagtgggtaaagctgcagcatcaggg

SEQ ID NO: 6329 - DNA, 77 bp, synthetic construct
  misc_feature 1..77: note = engineered ribonucleic acid scaffold (ERS) sequence
  source 1..77: mol_type = other DNA
actggcgcttggatctgattaccctgagcgccatcaccagcgactatgtcgtagtgggtaaagctgcagcatcaggg

SEQ ID NO: 6330 - DNA, 77 bp, synthetic construct
  misc_feature 1..77: note = engineered ribonucleic acid scaffold (ERS) sequence
  source 1..77: mol_type = other DNA
actggcgcttgtatctgattactctgagcgccatcaccagcgactatgtcgtagtgggtaaagctgcagcatcagag

SEQ ID NO: 6331 - DNA, 77 bp, synthetic construct
  misc_feature 1..77: note = engineered ribonucleic acid scaffold (ERS) sequence
  source 1..77: mol_type = other DNA
actggcgcttttatctgattactttgagcgccatcaccagcgactatgtcgtagtgggtaaagctgcagcatcagag

SEQ ID NO: 6332 - DNA, 77 bp, synthetic construct
  misc_feature 1..77: note = engineered ribonucleic acid scaffold (ERS) sequence
  source 1..77: mol_type = other DNA
actggcgcttttatctgattactctgagcgccatcaccagcgactatgtcgtagtgggtaaagctgcagcatcagag

SEQ ID NO: 6333 - DNA, 77 bp, synthetic construct
  misc_feature 1..77: note = engineered ribonucleic acid scaffold (ERS) sequence
  source 1..77: mol_type = other DNA
actggcgcttttatctgattactctgagcgccatcaccagcgactatgtcgtagtgggtaaagctgcagcatcaaag

SEQ ID NO: 6334 - DNA, 77 bp, synthetic construct
  misc_feature 1..77: note = engineered ribonucleic acid scaffold (ERS) sequence
  source 1..77: mol_type = other DNA
actggcgcttctatctgattactctgagcgccatcaccagcgactatgtcgtagtgggtaaagctgcagcctcagag

SEQ ID NO: 6335 - DNA, 77 bp, synthetic construct
  misc_feature 1..77: note = engineered ribonucleic acid scaffold (ERS) sequence
  source 1..77: mol_type = other DNA
actggcgcttctatctgattactctgagcgccatcaccagcgactatgtcgtagtgggtaaagctgcagcgtcagag

SEQ ID NO: 6336 - DNA, 77 bp, synthetic construct
  misc_feature 1..77: note = engineered ribonucleic acid scaffold (ERS) sequence
  source 1..77: mol_type = other DNA
actggcgcttctatctgattactctgagcgccatcaccagcgactatgtcgtagtgggtaaagctgcagcatcaaag

SEQ ID NO: 6337 - DNA, 83 bp, synthetic construct
  misc_feature 1..83: note = engineered ribonucleic acid scaffold (ERS) sequence
  source 1..83: mol_type = other DNA
actggcgcttctatctgattactctcagcgccatcaccagcgactatgtcgtagtgggtaaagctgcttcggcagcatcagac

SEQ ID NO: 6338 - DNA, 83 bp, synthetic construct
  misc_feature 1..83: note = engineered ribonucleic acid scaffold (ERS) sequence
  source 1..83: mol_type = other DNA
actggcgcttctatctgattactttgagcgccatcaccagcgactatgtcgtagtgggtaaagctgcttcggcagcatcagag

SEQ ID NO: 6339 - DNA, 83 bp, synthetic construct
  misc_feature 1..83: note = engineered ribonucleic acid scaffold (ERS) sequence
  source 1..83: mol_type = other DNA
actggcgcttctatctgattactttgagcgccatcaccagcgactatgtcgtagtgggtaaagctgcttcggcagcatcaaag

SEQ ID NO: 6340 - DNA, 83 bp, synthetic construct
  misc_feature 1..83: note = engineered ribonucleic acid scaffold (ERS) sequence
  source 1..83: mol_type = other DNA
actggcgcttctatctgattagtctcagcgccatcaccagcgactatgtcgtagtgggtaaagctgcttcggcagcatgagac

SEQ ID NO: 6341 - DNA, 83 bp, synthetic construct
  misc_feature 1..83: note = engineered ribonucleic acid scaffold (ERS) sequence
  source 1..83: mol_type = other DNA
actggcgcttctatctgattagtctgagcgccatcaccagcgactatgtcgtagtgggtaaagctgcttcggcagcatcagac

SEQ ID NO: 6342 - DNA, 83 bp, synthetic construct
  misc_feature 1..83: note = engineered ribonucleic acid scaffold (ERS) sequence
  source 1..83: mol_type = other DNA
actggcgcttctatctgattactctcagcgccatcaccagcgactatgtcgtagtgggtaaagctgcttcggcagcatgagag

SEQ ID NO: 6343 - DNA, 83 bp, synthetic construct
  misc_feature 1..83: note = engineered ribonucleic acid scaffold (ERS) sequence
  source 1..83: mol_type = other DNA
actggcgctcccatctgattaccccgagcgccatcaccagcgactatgtcgtagtgggtaaagctgcttcggcagcatcgggg

SEQ ID NO: 6344 - DNA, 83 bp, synthetic construct
  misc_feature 1..83: note = engineered ribonucleic acid scaffold (ERS) sequence
  source 1..83: mol_type = other DNA
actggcgctcctatctgattactccgagcgccatcaccagcgactatgtcgtagtgggtaaagctgcttcggcagcatcggag

SEQ ID NO: 6345 - DNA, 83 bp, synthetic construct
  misc_feature 1..83: note = engineered ribonucleic acid scaffold (ERS) sequence
  source 1..83: mol_type = other DNA
actggcgctgggatctgattaccccgagcgccatcaccagcgactatgtcgtagtgggtaaagctgcttcggcagcatcgggg

SEQ ID NO: 6346 - DNA, 83 bp, synthetic construct
  misc_feature 1..83: note = engineered ribonucleic acid scaffold (ERS) sequence
  source 1..83: mol_type = other DNA
actggcgctggtatctgattactccgagcgccatcaccagcgactatgtcgtagtgggtaaagctgcttcggcagcatcggag

SEQ ID NO: 6347 - DNA, 83 bp, synthetic construct
  misc_feature 1..83: note = engineered ribonucleic acid scaffold (ERS) sequence
  source 1..83: mol_type = other DNA
actggcgcttccatctgattaccctgagcgccatcaccagcgactatgtcgtagtgggtaaagctgcttcggcagcatcaggg

SEQ ID NO: 6348 - DNA, 83 bp, synthetic construct
  misc_feature 1..83: note = engineered ribonucleic acid scaffold (ERS) sequence
  source 1..83: mol_type = other DNA
actggcgcttggatctgattaccctgagcgccatcaccagcgactatgtcgtagtgggtaaagctgcttcggcagcatcaggg

SEQ ID NO: 6349 - DNA, 83 bp, synthetic construct
  misc_feature 1..83: note = engineered ribonucleic acid scaffold (ERS) sequence
  source 1..83: mol_type = other DNA
actggcgcttgtatctgattactctgagcgccatcaccagcgactatgtcgtagtgggtaaagctgcttcggcagcatcagag

SEQ ID NO: 6350 - DNA, 83 bp, synthetic construct
  misc_feature 1..83: note = engineered ribonucleic acid scaffold (ERS) sequence
  source 1..83: mol_type = other DNA
actggcgcttttatctgattactttgagcgccatcaccagcgactatgtcgtagtgggtaaagctgcttcggcagcatcagag

SEQ ID NO: 6351 - DNA, 83 bp, synthetic construct
  misc_feature 1..83: note = engineered ribonucleic acid scaffold (ERS) sequence
  source 1..83: mol_type = other DNA
actggcgcttttatctgattactctgagcgccatcaccagcgactatgtcgtagtgggtaaagctgcttcggcagcatcagag

SEQ ID NO: 6352 - DNA, 83 bp, synthetic construct
  misc_feature 1..83: note = engineered ribonucleic acid scaffold (ERS) sequence
  source 1..83: mol_type = other DNA
actggcgcttttatctgattactctgagcgccatcaccagcgactatgtcgtagtgggtaaagctgcttcggcagcatcaaag

SEQ ID NO: 6353 - DNA, 83 bp, synthetic construct
  misc_feature 1..83: note = engineered ribonucleic acid scaffold (ERS) sequence
  source 1..83: mol_type = other DNA
actggcgcttctatctgattactctgagcgccatcaccagcgactatgtcgtagtgggtaaagctgcttcggcagcctcagag

SEQ ID NO: 6354 - DNA, 83 bp, synthetic construct
  misc_feature 1..83: note = engineered ribonucleic acid scaffold (ERS) sequence
  source 1..83: mol_type = other DNA
actggcgcttctatctgattactctgagcgccatcaccagcgactatgtcgtagtgggtaaagctgcttcggcagcgtcagag

SEQ ID NO: 6355 - DNA, 83 bp, synthetic construct
  misc_feature 1..83: note = engineered ribonucleic acid scaffold (ERS) sequence
  source 1..83: mol_type = other DNA
actggcgcttctatctgattactctgagcgccatcaccagcgactatgtcgtagtgggtaaagctgcttcggcagcatcaaag

SEQ ID NO: 6356 - DNA, 89 bp, synthetic construct
  misc_feature 1..89: note = engineered ribonucleic acid scaffold (ERS) sequence
  source 1..89: mol_type = other DNA
actggcgcttctatctgattactctcagcgccatcaccagcgactatgtcgtagtgggtaaaggtccctcttcggagggaacatcagac

SEQ ID NO: 6357 - DNA, 89 bp, synthetic construct
  misc_feature 1..89: note = engineered ribonucleic acid scaffold (ERS) sequence
  source 1..89: mol_type = other DNA
actggcgcttctatctgattactttgagcgccatcaccagcgactatgtcgtagtgggtaaaggtccctcttcggagggaacatcagag

SEQ ID NO: 6358 - DNA, 89 bp, synthetic construct
  misc_feature 1..89: note = engineered ribonucleic acid scaffold (ERS) sequence
  source 1..89: mol_type = other DNA
actggcgcttctatctgattactttgagcgccatcaccagcgactatgtcgtagtgggtaaaggtccctcttcggagggaacatcaaag

SEQ ID NO: 6359 - DNA, 89 bp, synthetic construct
  misc_feature 1..89: note = engineered ribonucleic acid scaffold (ERS) sequence
  source 1..89: mol_type = other DNA
actggcgcttctatctgattagtctcagcgccatcaccagcgactatgtcgtagtgggtaaaggtccctcttcggagggaacatgagac

SEQ ID NO: 6360 - DNA, 89 bp, synthetic construct
  misc_feature 1..89: note = engineered ribonucleic acid scaffold (ERS) sequence
  source 1..89: mol_type = other DNA
actggcgcttctatctgattagtctgagcgccatcaccagcgactatgtcgtagtgggtaaaggtccctcttcggagggaacatcagac

SEQ ID NO: 6361 - DNA, 89 bp, synthetic construct
  misc_feature 1..89: note = engineered ribonucleic acid scaffold (ERS) sequence
  source 1..89: mol_type = other DNA
actggcgcttctatctgattactctcagcgccatcaccagcgactatgtcgtagtgggtaaaggtccctcttcggagggaacatgagag

SEQ ID NO: 6362 - DNA, 89 bp, synthetic construct
  misc_feature 1..89: note = engineered ribonucleic acid scaffold (ERS) sequence
  source 1..89: mol_type = other DNA
actggcgctcccatctgattaccccgagcgccatcaccagcgactatgtcgtagtgggtaaaggtccctcttcggagggaacatcgggg

SEQ ID NO: 6363 - DNA, 89 bp, synthetic construct
  misc_feature 1..89: note = engineered ribonucleic acid scaffold (ERS) sequence
  source 1..89: mol_type = other DNA
actggcgctcctatctgattactccgagcgccatcaccagcgactatgtcgtagtgggtaaaggtccctcttcggagggaacatcggag

SEQ ID NO: 6364 - DNA, 89 bp, synthetic construct
  misc_feature 1..89: note = engineered ribonucleic acid scaffold (ERS) sequence
  source 1..89: mol_type = other DNA
actggcgctgggatctgattaccccgagcgccatcaccagcgactatgtcgtagtgggtaaaggtccctcttcggagggaacatcgggg

SEQ ID NO: 6365 - DNA, 89 bp, synthetic construct
  misc_feature 1..89: note = engineered ribonucleic acid scaffold (ERS) sequence
  source 1..89: mol_type = other DNA
actggcgctggtatctgattactccgagcgccatcaccagcgactatgtcgtagtgggtaaaggtccctcttcggagggaacatcggag

SEQ ID NO: 6366 - DNA, 89 bp, synthetic construct
  misc_feature 1..89: note = engineered ribonucleic acid scaffold (ERS) sequence
  source 1..89: mol_type = other DNA
actggcgcttccatctgattaccctgagcgccatcaccagcgactatgtcgtagtgggtaaaggtccctcttcggagggaacatcaggg

SEQ ID NO: 6367 - DNA, 89 bp, synthetic construct
  misc_feature 1..89: note = engineered ribonucleic acid scaffold (ERS) sequence
  source 1..89: mol_type = other DNA
actggcgcttggatctgattaccctgagcgccatcaccagcgactatgtcgtagtgggtaaaggtccctcttcggagggaacatcaggg

SEQ ID NO: 6368 - DNA, 89 bp, synthetic construct
  misc_feature 1..89: note = engineered ribonucleic acid scaffold (ERS) sequence
  source 1..89: mol_type = other DNA
actggcgcttgtatctgattactctgagcgccatcaccagcgactatgtcgtagtgggtaaaggtccctcttcggagggaacatcagag

SEQ ID NO: 6369 - DNA, 89 bp, synthetic construct
  misc_feature 1..89: note = engineered ribonucleic acid scaffold (ERS) sequence
  source 1..89: mol_type = other DNA
actggcgcttttatctgattactttgagcgccatcaccagcgactatgtcgtagtgggtaaaggtccctcttcggagggaacatcagag

SEQ ID NO: 6370 - DNA, 89 bp, synthetic construct
  misc_feature 1..89: note = engineered ribonucleic acid scaffold (ERS) sequence
  source 1..89: mol_type = other DNA
actggcgcttttatctgattactctgagcgccatcaccagcgactatgtcgtagtgggtaaaggtccctcttcggagggaacatcagag

SEQ ID NO: 6371 - DNA, 89 bp, synthetic construct
  misc_feature 1..89: note = engineered ribonucleic acid scaffold (ERS) sequence
  source 1..89: mol_type = other DNA
actggcgcttttatctgattactctgagcgccatcaccagcgactatgtcgtagtgggtaaaggtccctcttcggagggaacatcaaag

SEQ ID NO: 6372 - DNA, 89 bp, synthetic construct
  misc_feature 1..89: note = engineered ribonucleic acid scaffold (ERS) sequence
  source 1..89: mol_type = other DNA
actggcgcttctatctgattactctgagcgccatcaccagcgactatgtcgtagtgggtaaaggtccctcttcggagggaacctcagag

SEQ ID NO: 6373 - DNA, 89 bp, synthetic construct
  misc_feature 1..89: note = engineered ribonucleic acid scaffold (ERS) sequence
  source 1..89: mol_type = other DNA
actggcgcttctatctgattactctgagcgccatcaccagcgactatgtcgtagtgggtaaaggtccctcttcggagggaacgtcagag

SEQ ID NO: 6374 - DNA, 89 bp, synthetic construct
  misc_feature 1..89: note = engineered ribonucleic acid scaffold (ERS) sequence
  source 1..89: mol_type = other DNA
actggcgcttctatctgattactctgagcgccatcaccagcgactatgtcgtagtgggtaaaggtccctcttcggagggaacatcaaag

SEQ ID NO: 6375 - DNA, 93 bp, synthetic construct
  misc_feature 1..93: note = engineered ribonucleic acid scaffold (ERS) sequence
  source 1..93: mol_type = other DNA
actggcgcttctatctgattactctcagcgccatcaccagcgactatgtcgtagtgggtaaaggtgacggtcttcggaccgtcaccatcagac

SEQ ID NO: 6376 - DNA, 93 bp, synthetic construct
  misc_feature 1..93: note = engineered ribonucleic acid scaffold (ERS) sequence
  source 1..93: mol_type = other DNA
actggcgcttctatctgattactttgagcgccatcaccagcgactatgtcgtagtgggtaaaggtgacggtcttcggaccgtcaccatcagag

SEQ ID NO: 6377 - DNA, 93 bp, synthetic construct
  misc_feature 1..93: note = engineered ribonucleic acid scaffold (ERS) sequence
  source 1..93: mol_type = other DNA
actggcgcttctatctgattactttgagcgccatcaccagcgactatgtcgtagtgggtaaaggtgacggtcttcggaccgtcaccatcaaag

SEQ ID NO: 6378 - DNA, 93 bp, synthetic construct
  misc_feature 1..93: note = engineered ribonucleic acid scaffold (ERS) sequence
  source 1..93: mol_type = other DNA
actggcgcttctatctgattagtctcagcgccatcaccagcgactatgtcgtagtgggtaaaggtgacggtcttcggaccgtcaccatgagac

SEQ ID NO: 6379 - DNA, 93 bp, synthetic construct
  misc_feature 1..93: note = engineered ribonucleic acid scaffold (ERS) sequence
  source 1..93: mol_type = other DNA
actggcgcttctatctgattagtctgagcgccatcaccagcgactatgtcgtagtgggtaaaggtgacggtcttcggaccgtcaccatcagac

SEQ ID NO: 6380 - DNA, 93 bp, synthetic construct
  misc_feature 1..93: note = engineered ribonucleic acid scaffold (ERS) sequence
  source 1..93: mol_type = other DNA
actggcgcttctatctgattactctcagcgccatcaccagcgactatgtcgtagtgggtaaaggtgacggtcttcggaccgtcaccatgagag

SEQ ID NO: 6381 - DNA, 93 bp, synthetic construct
  misc_feature 1..93: note = engineered ribonucleic acid scaffold (ERS) sequence
  source 1..93: mol_type = other DNA
actggcgctcccatctgattaccccgagcgccatcaccagcgactatgtcgtagtgggtaaaggtgacggtcttcggaccgtcaccatcgggg

SEQ ID NO: 6382 - DNA, 93 bp, synthetic construct
  misc_feature 1..93: note = engineered ribonucleic acid scaffold (ERS) sequence
  source 1..93: mol_type = other DNA
actggcgctcctatctgattactccgagcgccatcaccagcgactatgtcgtagtgggtaaaggtgacggtcttcggaccgtcaccatcggag

SEQ ID NO: 6383 - DNA, 93 bp, synthetic construct
  misc_feature 1..93: note = engineered ribonucleic acid scaffold (ERS) sequence
  source 1..93: mol_type = other DNA
actggcgctgggatctgattaccccgagcgccatcaccagcgactatgtcgtagtgggtaaaggtgacggtcttcggaccgtcaccatcgggg

SEQ ID NO: 6384 - DNA, 93 bp, synthetic construct
  misc_feature 1..93: note = engineered ribonucleic acid scaffold (ERS) sequence
  source 1..93: mol_type = other DNA
actggcgctggtatctgattactccgagcgccatcaccagcgactatgtcgtagtgggtaaaggtgacggtcttcggaccgtcaccatcggag

SEQ ID NO: 6385 - DNA, 93 bp, synthetic construct
  misc_feature 1..93: note = engineered ribonucleic acid scaffold (ERS) sequence
  source 1..93: mol_type = other DNA
actggcgcttccatctgattaccctgagcgccatcaccagcgactatgtcgtagtgggtaaaggtgacggtcttcggaccgtcaccatcaggg

SEQ ID NO: 6386 - DNA, 93 bp, synthetic construct
  misc_feature 1..93: note = engineered ribonucleic acid scaffold (ERS) sequence
  source 1..93: mol_type = other DNA
actggcgcttggatctgattaccctgagcgccatcaccagcgactatgtcgtagtgggtaaaggtgacggtcttcggaccgtcaccatcaggg

SEQ ID NO: 6387 - DNA, 93 bp, synthetic construct
  misc_feature 1..93: note = engineered ribonucleic acid scaffold (ERS) sequence
  source 1..93: mol_type = other DNA
actggcgcttgtatctgattactctgagcgccatcaccagcgactatgtcgtagtgggtaaaggtgacggtcttcggaccgtcaccatcagag

SEQ ID NO: 6388 - DNA, 93 bp, synthetic construct
  misc_feature 1..93: note = engineered ribonucleic acid scaffold (ERS) sequence
  source 1..93: mol_type = other DNA
actggcgcttttatctgattactttgagcgccatcaccagcgactatgtcgtagtgggtaaaggtgacggtcttcggaccgtcaccatcagag

SEQ ID NO: 6389 - DNA, 93 bp, synthetic construct
  misc_feature 1..93: note = engineered ribonucleic acid scaffold (ERS) sequence
  source 1..93: mol_type = other DNA
actggcgcttttatctgattactctgagcgccatcaccagcgactatgtcgtagtgggtaaaggtgacggtcttcggaccgtcaccatcagag

SEQ ID NO: 6390 - DNA, 93 bp, synthetic construct
  misc_feature 1..93: note = engineered ribonucleic acid scaffold (ERS) sequence
  source 1..93: mol_type = other DNA
actggcgcttttatctgattactctgagcgccatcaccagcgactatgtcgtagtgggtaaaggtgacggtcttcggaccgtcaccatcaaag

SEQ ID NO: 6391 - DNA, 93 bp, synthetic construct
  misc_feature 1..93: note = engineered ribonucleic acid scaffold (ERS) sequence
  source 1..93: mol_type = other DNA
actggcgcttctatctgattactctgagcgccatcaccagcgactatgtcgtagtgggtaaaggtgacggtcttcggaccgtcaccctcagag

SEQ ID NO: 6392 - DNA, 93 bp, synthetic construct
  misc_feature 1..93: note = engineered ribonucleic acid scaffold (ERS) sequence
  source 1..93: mol_type = other DNA
actggcgcttctatctgattactctgagcgccatcaccagcgactatgtcgtagtgggtaaaggtgacggtcttcggaccgtcaccgtcagag

SEQ ID NO: 6393 - DNA, 93 bp, synthetic construct
  misc_feature 1..93: note = engineered ribonucleic acid scaffold (ERS) sequence
  source 1..93: mol_type = other DNA
actggcgcttctatctgattactctgagcgccatcaccagcgactatgtcgtagtgggtaaaggtgacggtcttcggaccgtcaccatcaaag

SEQ ID NO: 6394 - DNA, 91 bp, synthetic construct
  misc_feature 1..91: note = engineered ribonucleic acid scaffold (ERS) sequence
  source 1..91: mol_type = other DNA
actggcgcttctatctgattactctcagcgccatcaccagcgactatgtcgtagtgggtaaagtctccctcttcggagggaggcatcagac

SEQ ID NO: 6395 - DNA, 91 bp, synthetic construct
  misc_feature 1..91: note = engineered ribonucleic acid scaffold (ERS) sequence
  source 1..91: mol_type = other DNA
actggcgcttctatctgattactttgagcgccatcaccagcgactatgtcgtagtgggtaaagtctccctcttcggagggaggcatcagag

SEQ ID NO: 6396 - DNA, 91 bp, synthetic construct
  misc_feature 1..91: note = engineered ribonucleic acid scaffold (ERS) sequence
  source 1..91: mol_type = other DNA
actggcgcttctatctgattactttgagcgccatcaccagcgactatgtcgtagtgggtaaagtctccctcttcggagggaggcatcaaag

SEQ ID NO: 6397 - DNA, 91 bp, synthetic construct
  misc_feature 1..91: note = engineered ribonucleic acid scaffold (ERS) sequence
  source 1..91: mol_type = other DNA
actggcgcttctatctgattagtctcagcgccatcaccagcgactatgtcgtagtgggtaaagtctccctcttcggagggaggcatgagac

SEQ ID NO: 6398 - DNA, 91 bp, synthetic construct
  misc_feature 1..91: note = engineered ribonucleic acid scaffold (ERS) sequence
  source 1..91: mol_type = other DNA
actggcgcttctatctgattagtctgagcgccatcaccagcgactatgtcgtagtgggtaaagtctccctcttcggagggaggcatcagac

SEQ ID NO: 6399 - DNA, 91 bp, synthetic construct
  misc_feature 1..91: note = engineered ribonucleic acid scaffold (ERS) sequence
  source 1..91: mol_type = other DNA
actggcgcttctatctgattactctcagcgccatcaccagcgactatgtcgtagtgggtaaagtctccctcttcggagggaggcatgagag

SEQ ID NO: 6400 - DNA, 91 bp, synthetic construct
  misc_feature 1..91: note = engineered ribonucleic acid scaffold (ERS) sequence
  source 1..91: mol_type = other DNA
actggcgctcccatctgattaccccgagcgccatcaccagcgactatgtcgtagtgggtaaagtctccctcttcggagggaggcatcgggg

SEQ ID NO: 6401 - DNA, 91 bp, synthetic construct
  misc_feature 1..91: note = engineered ribonucleic acid scaffold (ERS) sequence
  source 1..91: mol_type = other DNA
actggcgctcctatctgattactccgagcgccatcaccagcgactatgtcgtagtgggtaaagtctccctcttcggagggaggcatcggag

SEQ ID NO: 6402 - DNA, 91 bp, synthetic construct
  misc_feature 1..91: note = engineered ribonucleic acid scaffold (ERS) sequence
  source 1..91: mol_type = other DNA
actggcgctgggatctgattaccccgagcgccatcaccagcgactatgtcgtagtgggtaaagtctccctcttcggagggaggcatcgggg

SEQ ID NO: 6403 - DNA, 91 bp, synthetic construct
  misc_feature 1..91: note = engineered ribonucleic acid scaffold (ERS) sequence
  source 1..91: mol_type = other DNA
actggcgctggtatctgattactccgagcgccatcaccagcgactatgtcgtagtgggtaaagtctccctcttcggagggaggcatcggag

SEQ ID NO: 6404 - DNA, 91 bp, synthetic construct
  misc_feature 1..91: note = engineered ribonucleic acid scaffold (ERS) sequence
  source 1..91: mol_type = other DNA
actggcgcttccatctgattaccctgagcgccatcaccagcgactatgtcgtagtgggtaaagtctccctcttcggagggaggcatcaggg

SEQ ID NO: 6405 - DNA, 91 bp, synthetic construct
  misc_feature 1..91: note = engineered ribonucleic acid scaffold (ERS) sequence
  source 1..91: mol_type = other DNA
actggcgcttggatctgattaccctgagcgccatcaccagcgactatgtcgtagtgggtaaagtctccctcttcggagggaggcatcaggg

SEQ ID NO: 6406 - DNA, 91 bp, synthetic construct
  misc_feature 1..91: note = engineered ribonucleic acid scaffold (ERS) sequence
  source 1..91: mol_type = other DNA
actggcgcttgtatctgattactctgagcgccatcaccagcgactatgtcgtagtgggtaaagtctccctcttcggagggaggcatcagag

SEQ ID NO: 6407 - DNA, 91 bp, synthetic construct
  misc_feature 1..91: note = engineered ribonucleic acid scaffold (ERS) sequence
  source 1..91: mol_type = other DNA
actggcgcttttatctgattactttgagcgccatcaccagcgactatgtcgtagtgggtaaagtctccctcttcggagggaggcatcagag

SEQ ID NO: 6408 - DNA, 91 bp, synthetic construct
  misc_feature 1..91: note = engineered ribonucleic acid scaffold (ERS) sequence
  source 1..91: mol_type = other DNA
actggcgcttttatctgattactctgagcgccatcaccagcgactatgtcgtagtgggtaaagtctccctcttcggagggaggcatcagag

SEQ ID NO: 6409 - DNA, 91 bp, synthetic construct
  misc_feature 1..91: note = engineered ribonucleic acid scaffold (ERS) sequence
  source 1..91: mol_type = other DNA
actggcgcttttatctgattactctgagcgccatcaccagcgactatgtcgtagtgggtaaagtctccctcttcggagggaggcatcaaag

SEQ ID NO: 6410 - DNA, 91 bp, synthetic construct
  misc_feature 1..91: note = engineered ribonucleic acid scaffold (ERS) sequence
  source 1..91: mol_type = other DNA
actggcgcttctatctgattactctgagcgccatcaccagcgactatgtcgtagtgggtaaagtctccctcttcggagggaggcctcagag

SEQ ID NO: 6411 - DNA, 91 bp, synthetic construct
  misc_feature 1..91: note = engineered ribonucleic acid scaffold (ERS) sequence
  source 1..91: mol_type = other DNA
actggcgcttctatctgattactctgagcgccatcaccagcgactatgtcgtagtgggtaaagtctccctcttcggagggaggcgtcagag

SEQ ID NO: 6412 - DNA, 91 bp, synthetic construct
  misc_feature 1..91: note = engineered ribonucleic acid scaffold (ERS) sequence
  source 1..91: mol_type = other DNA
actggcgcttctatctgattactctgagcgccatcaccagcgactatgtcgtagtgggtaaagtctccctcttcggagggaggcatcaaag

SEQ ID NO: 6413 - DNA, 93 bp, synthetic construct
  misc_feature 1..93: note = engineered ribonucleic acid scaffold (ERS) sequence
  source 1..93: mol_type = other DNA
actggcgcttctatctgattactctcagcgccatcaccagcgactatgtcgtagtgggtaaagtgcgcccgcttcggcgggcgcacatcagac

SEQ ID NO: 6414 - DNA, 93 bp, synthetic construct
  misc_feature 1..93: note = engineered ribonucleic acid scaffold (ERS) sequence
  source 1..93: mol_type = other DNA
actggcgcttctatctgattactttgagcgccatcaccagcgactatgtcgtagtgggtaaagtgcgcccgcttcggcgggcgcacatcagag

SEQ ID NO: 6415 - DNA, 93 bp, synthetic construct
  misc_feature 1..93: note = engineered ribonucleic acid scaffold (ERS) sequence
  source 1..93: mol_type = other DNA
actggcgcttctatctgattactttgagcgccatcaccagcgactatgtcgtagtgggtaaagtgcgcccgcttcggcgggcgcacatcaaag

SEQ ID NO: 6416 - DNA, 93 bp, synthetic construct
  misc_feature 1..93: note = engineered ribonucleic acid scaffold (ERS) sequence
  source 1..93: mol_type = other DNA
actggcgcttctatctgattagtctcagcgccatcaccagcgactatgtcgtagtgggtaaagtgcgcccgcttcggcgggcgcacatgagac

SEQ ID NO: 6417 - DNA, 93 bp, synthetic construct
  misc_feature 1..93: note = engineered ribonucleic acid scaffold (ERS) sequence
  source 1..93: mol_type = other DNA
actggcgcttctatctgattagtctgagcgccatcaccagcgactatgtcgtagtgggtaaagtgcgcccgcttcggcgggcgcacatcagac

SEQ ID NO: 6418 - DNA, 93 bp, synthetic construct
  misc_feature 1..93: note = engineered ribonucleic acid scaffold (ERS) sequence
  source 1..93: mol_type = other DNA
actggcgcttctatctgattactctcagcgccatcaccagcgactatgtcgtagtgggtaaagtgcgcccgcttcggcgggcgcacatgagag

SEQ ID NO: 6419 - DNA, 93 bp, synthetic construct
  misc_feature 1..93: note = engineered ribonucleic acid scaffold (ERS) sequence
  source 1..93: mol_type = other DNA
actggcgctcccatctgattaccccgagcgccatcaccagcgactatgtcgtagtgggtaaagtgcgcccgcttcggcgggcgcacatcgggg

SEQ ID NO: 6420 - DNA, 93 bp, synthetic construct
  misc_feature 1..93: note = engineered ribonucleic acid scaffold (ERS) sequence
  source 1..93: mol_type = other DNA
actggcgctcctatctgattactccgagcgccatcaccagcgactatgtcgtagtgggtaaagtgcgcccgcttcggcgggcgcacatcggag

SEQ ID NO: 6421 - DNA, 93 bp, synthetic construct
  misc_feature 1..93: note = engineered ribonucleic acid scaffold (ERS) sequence
  source 1..93: mol_type = other DNA
actggcgctgggatctgattaccccgagcgccatcaccagcgactatgtcgtagtgggtaaagtgcgcccgcttcggcgggcgcacatcgggg

SEQ ID NO: 6422 - DNA, 93 bp, synthetic construct
  misc_feature 1..93: note = engineered ribonucleic acid scaffold (ERS) sequence
  source 1..93: mol_type = other DNA
actggcgctggtatctgattactccgagcgccatcaccagcgactatgtcgtagtgggtaaagtgcgcccgcttcggcgggcgcacatcggag

SEQ ID NO: 6423 - DNA, 93 bp, synthetic construct
  misc_feature 1..93: note = engineered ribonucleic acid scaffold (ERS) sequence
  source 1..93: mol_type = other DNA
actggcgcttccatctgattaccctgagcgccatcaccagcgactatgtcgtagtgggtaaagtgcgcccgcttcggcgggcgcacatcaggg

SEQ ID NO: 6424 - DNA, 93 bp, synthetic construct
  misc_feature 1..93: note = engineered ribonucleic acid scaffold (ERS) sequence
  source 1..93: mol_type = other DNA
actggcgcttggatctgattaccctgagcgccatcaccagcgactatgtcgtagtgggtaaagtgcgcccgcttcggcgggcgcacatcaggg

SEQ ID NO: 6425 - DNA, 93 bp, synthetic construct
  misc_feature 1..93: note = engineered ribonucleic acid scaffold (ERS) sequence
  source 1..93: mol_type = other DNA
actggcgcttgtatctgattactctgagcgccatcaccagcgactatgtcgtagtgggtaaagtgcgcccgcttcggcgggcgcacatcagag

SEQ ID NO: 6426 - DNA, 93 bp, synthetic construct
  misc_feature 1..93: note = engineered ribonucleic acid scaffold (ERS) sequence
  source 1..93: mol_type = other DNA
actggcgcttttatctgattactttgagcgccatcaccagcgactatgtcgtagtgggtaaagtgcgcccgcttcggcgggcgcacatcagag

SEQ ID NO: 6427 - DNA, 93 bp, synthetic construct
  misc_feature 1..93: note = engineered ribonucleic acid scaffold (ERS) sequence
  source 1..93: mol_type = other DNA
actggcgcttttatctgattactctgagcgccatcaccagcgactatgtcgtagtgggtaaagtgcgcccgcttcggcgggcgcacatcagag

SEQ ID NO: 6428 - DNA, 93 bp, synthetic construct
  misc_feature 1..93: note = engineered ribonucleic acid scaffold (ERS) sequence
  source 1..93: mol_type = other DNA
actggcgcttttatctgattactctgagcgccatcaccagcgactatgtcgtagtgggtaaagtgcgcccgcttcggcgggcgcacatcaaag

SEQ ID NO: 6429 - DNA, 93 bp, synthetic construct
  misc_feature 1..93: note = engineered ribonucleic acid scaffold (ERS) sequence
  source 1..93: mol_type = other DNA
actggcgcttctatctgattactctgagcgccatcaccagcgactatgtcgtagtgggtaaagtgcgcccgcttcggcgggcgcacctcagag

SEQ ID NO: 6430 - DNA, 93 bp, synthetic construct
  misc_feature 1..93: note = engineered ribonucleic acid scaffold (ERS) sequence
  source 1..93: mol_type = other DNA
actggcgcttctatctgattactctgagcgccatcaccagcgactatgtcgtagtgggtaaagtgcgcccgcttcggcgggcgcacgtcagag

SEQ ID NO: 6431 - DNA, 93 bp, synthetic construct
  misc_feature 1..93: note = engineered ribonucleic acid scaffold (ERS) sequence
  source 1..93: mol_type = other DNA
actggcgcttctatctgattactctgagcgccatcaccagcgactatgtcgtagtgggtaaagtgcgcccgcttcggcgggcgcacatcaaag

SEQ ID NO: 6432 - DNA, 93 bp, synthetic construct
  misc_feature 1..93: note = engineered ribonucleic acid scaffold (ERS) sequence
  source 1..93: mol_type = other DNA
actggcgcttctatctgattactctcagcgccatcaccagcgactatgtcgtagtgggtaaataatgaaaacttcggttttcattaatcagac

SEQ ID NO: 6433 - DNA, 93 bp, synthetic construct
  misc_feature 1..93: note = engineered ribonucleic acid scaffold (ERS) sequence
  source 1..93: mol_type = other DNA
actggcgcttctatctgattactttgagcgccatcaccagcgactatgtcgtagtgggtaaataatgaaaacttcggttttcattaatcagag

SEQ ID NO: 6434 - DNA, 93 bp, synthetic construct
  misc_feature 1..93: note = engineered ribonucleic acid scaffold (ERS) sequence
  source 1..93: mol_type = other DNA
actggcgcttctatctgattactttgagcgccatcaccagcgactatgtcgtagtgggtaaataatgaaaacttcggttttcattaatcaaag

SEQ ID NO: 6435 - DNA, 93 bp, synthetic construct
  misc_feature 1..93: note = engineered ribonucleic acid scaffold (ERS) sequence
  source 1..93: mol_type = other DNA
actggcgcttctatctgattagtctcagcgccatcaccagcgactatgtcgtagtgggtaaataatgaaaacttcggttttcattaatgagac

SEQ ID NO: 6436 - DNA, 93 bp, synthetic construct
  misc_feature 1..93: note = engineered ribonucleic acid scaffold (ERS) sequence
  source 1..93: mol_type = other DNA
actggcgcttctatctgattagtctgagcgccatcaccagcgactatgtcgtagtgggtaaataatgaaaacttcggttttcattaatcagac

SEQ ID NO: 6437 - DNA, 93 bp, synthetic construct
  misc_feature 1..93: note = engineered ribonucleic acid scaffold (ERS) sequence
  source 1..93: mol_type = other DNA
actggcgcttctatctgattactctcagcgccatcaccagcgactatgtcgtagtgggtaaataatgaaaacttcggttttcattaatgagag

SEQ ID NO: 6438 - DNA, 93 bp, synthetic construct
  misc_feature 1..93: note = engineered ribonucleic acid scaffold (ERS) sequence
  source 1..93: mol_type = other DNA
actggcgctcccatctgattaccccgagcgccatcaccagcgactatgtcgtagtgggtaaataatgaaaacttcggttttcattaatcgggg

SEQ ID NO: 6439 - DNA, 93 bp, synthetic construct
  misc_feature 1..93: note = engineered ribonucleic acid scaffold (ERS) sequence
  source 1..93: mol_type = other DNA
actggcgctcctatctgattactccgagcgccatcaccagcgactatgtcgtagtgggtaaataatgaaaacttcggttttcattaatcggag

SEQ ID NO: 6440 - DNA, 93 bp, synthetic construct
  misc_feature 1..93: note = engineered ribonucleic acid scaffold (ERS) sequence
  source 1..93: mol_type = other DNA
actggcgctgggatctgattaccccgagcgccatcaccagcgactatgtcgtagtgggtaaataatgaaaacttcggttttcattaatcgggg

SEQ ID NO: 6441 - DNA, 93 bp, synthetic construct
  misc_feature 1..93: note = engineered ribonucleic acid scaffold (ERS) sequence
  source 1..93: mol_type = other DNA
actggcgctggtatctgattactccgagcgccatcaccagcgactatgtcgtagtgggtaaataatgaaaacttcggttttcattaatcggag

SEQ ID NO: 6442 - DNA, 93 bp, synthetic construct
  misc_feature 1..93: note = engineered ribonucleic acid scaffold (ERS) sequence
  source 1..93: mol_type = other DNA
actggcgcttccatctgattaccctgagcgccatcaccagcgactatgtcgtagtgggtaaataatgaaaacttcggttttcattaatcaggg

SEQ ID NO: 6443 - DNA, 93 bp, synthetic construct
  misc_feature 1..93: note = engineered ribonucleic acid scaffold (ERS) sequence
  source 1..93: mol_type = other DNA
actggcgcttggatctgattaccctgagcgccatcaccagcgactatgtcgtagtgggtaaataatgaaaacttcggttttcattaatcaggg

SEQ ID NO: 6444 - DNA, 93 bp, synthetic construct
  misc_feature 1..93: note = engineered ribonucleic acid scaffold (ERS) sequence
  source 1..93: mol_type = other DNA
actggcgcttgtatctgattactctgagcgccatcaccagcgactatgtcgtagtgggtaaataatgaaaacttcggttttcattaatcagag

SEQ ID NO: 6445 - DNA, 93 bp, synthetic construct
  misc_feature 1..93: note = engineered ribonucleic acid scaffold (ERS) sequence
  source 1..93: mol_type = other DNA
actggcgcttttatctgattactttgagcgccatcaccagcgactatgtcgtagtgggtaaataatgaaaacttcggttttcattaatcagag

SEQ ID NO: 6446 - DNA, 93 bp, synthetic construct
  misc_feature 1..93: note = engineered ribonucleic acid scaffold (ERS) sequence
  source 1..93: mol_type = other DNA
actggcgcttttatctgattactctgagcgccatcaccagcgactatgtcgtagtgggtaaataatgaaaacttcggttttcattaatcagag

SEQ ID NO: 6447 - DNA, 93 bp, synthetic construct
  misc_feature 1..93: note = engineered ribonucleic acid scaffold (ERS) sequence
  source 1..93: mol_type = other DNA
actggcgcttttatctgattactctgagcgccatcaccagcgactatgtcgtagtgggtaaataatgaaaacttcggttttcattaatcaaag

SEQ ID NO: 6448 - DNA, 93 bp, synthetic construct
  misc_feature 1..93: note = engineered ribonucleic acid scaffold (ERS) sequence
  source 1..93: mol_type = other DNA
actggcgcttctatctgattactctgagcgccatcaccagcgactatgtcgtagtgggtaaataatgaaaacttcggttttcattactcagag

SEQ ID NO: 6449 - DNA, 93 bp, synthetic construct
  misc_feature 1..93: note = engineered ribonucleic acid scaffold (ERS) sequence
  source 1..93: mol_type = other DNA
actggcgcttctatctgattactctgagcgccatcaccagcgactatgtcgtagtgggtaaataatgaaaacttcggttttcattagtcagag

SEQ ID NO: 6450 - DNA, 93 bp, synthetic construct
  misc_feature 1..93: note = engineered ribonucleic acid scaffold (ERS) sequence
  source 1..93: mol_type = other DNA
actggcgcttctatctgattactctgagcgccatcaccagcgactatgtcgtagtgggtaaataatgaaaacttcggttttcattaatcaaag

SEQ ID NO: 6451 - DNA, 93 bp, synthetic construct
  misc_feature 1..93: note = engineered ribonucleic acid scaffold (ERS) sequence
  source 1..93: mol_type = other DNA
actggcgcttctatctgattactctcagcgccatcaccagcgactatgtcgtagtgggtaaatcgtaagaacttcggttcttacgaatcagac

SEQ ID NO: 6452 - DNA, 93 bp, synthetic construct
  misc_feature 1..93: note = engineered ribonucleic acid scaffold (ERS) sequence
  source 1..93: mol_type = other DNA
actggcgcttctatctgattactttgagcgccatcaccagcgactatgtcgtagtgggtaaatcgtaagaacttcggttcttacgaatcagag

SEQ ID NO: 6453 - DNA, 93 bp, synthetic construct
  misc_feature 1..93: note = engineered ribonucleic acid scaffold (ERS) sequence
  source 1..93: mol_type = other DNA
actggcgcttctatctgattactttgagcgccatcaccagcgactatgtcgtagtgggtaaatcgtaagaacttcggttcttacgaatcaaag

SEQ ID NO: 6454 - DNA, 93 bp, synthetic construct
  misc_feature 1..93: note = engineered ribonucleic acid scaffold (ERS) sequence
  source 1..93: mol_type = other DNA
actggcgcttctatctgattagtctcagcgccatcaccagcgactatgtcgtagtgggtaaatcgtaagaacttcggttcttacgaatgagac

SEQ ID NO: 6455 - DNA, 93 bp, synthetic construct
  misc_feature 1..93: note = engineered ribonucleic acid scaffold (ERS) sequence
  source 1..93: mol_type = other DNA
actggcgcttctatctgattagtctgagcgccatcaccagcgactatgtcgtagtgggtaaatcgtaagaacttcggttcttacgaatcagac

SEQ ID NO: 6456 - DNA, 93 bp, synthetic construct
  misc_feature 1..93: note = engineered ribonucleic acid scaffold (ERS) sequence
  source 1..93: mol_type = other DNA
actggcgcttctatctgattactctcagcgccatcaccagcgactatgtcgtagtgggtaaatcgtaagaacttcggttcttacgaatgagag

SEQ ID NO: 6457 - DNA, 93 bp, synthetic construct
  misc_feature 1..93: note = engineered ribonucleic acid scaffold (ERS) sequence
  source 1..93: mol_type = other DNA
actggcgctcccatctgattaccccgagcgccatcaccagcgactatgtcgtagtgggtaaatcgtaagaacttcggttcttacgaatcgggg

SEQ ID NO: 6458 - DNA, 93 bp, synthetic construct
  misc_feature 1..93: note = engineered ribonucleic acid scaffold (ERS) sequence
  source 1..93: mol_type = other DNA
actggcgctcctatctgattactccgagcgccatcaccagcgactatgtcgtagtgggtaaatcgtaagaacttcggttcttacgaatcggag

SEQ ID NO: 6459 - DNA, 93 bp, synthetic construct
  misc_feature 1..93: note = engineered ribonucleic acid scaffold (ERS) sequence
  source 1..93: mol_type = other DNA
actggcgctgggatctgattaccccgagcgccatcaccagcgactatgtcgtagtgggtaaatcgtaagaacttcggttcttacgaatcgggg

SEQ ID NO: 6460 - DNA, 93 bp, synthetic construct
  misc_feature 1..93: note = engineered ribonucleic acid scaffold (ERS) sequence
  source 1..93: mol_type = other DNA
actggcgctggtatctgattactccgagcgccatcaccagcgactatgtcgtagtgggtaaatcgtaagaacttcggttcttacgaatcggag

SEQ ID NO: 6461 - DNA, 93 bp, synthetic construct
  misc_feature 1..93: note = engineered ribonucleic acid scaffold (ERS) sequence
  source 1..93: mol_type = other DNA
actggcgcttccatctgattaccctgagcgccatcaccagcgactatgtcgtagtgggtaaatcgtaagaacttcggttcttacgaatcaggg

SEQ ID NO: 6462 - DNA, 93 bp, synthetic construct
  misc_feature 1..93: note = engineered ribonucleic acid scaffold (ERS) sequence
  source 1..93: mol_type = other DNA
actggcgcttggatctgattaccctgagcgccatcaccagcgactatgtcgtagtgggtaaatcgtaagaacttcggttcttacgaatcaggg

SEQ ID NO: 6463 - DNA, 93 bp, synthetic construct
  misc_feature 1..93: note = engineered ribonucleic acid scaffold (ERS) sequence
  source 1..93: mol_type = other DNA
actggcgcttgtatctgattactctgagcgccatcaccagcgactatgtcgtagtgggtaaatcgtaagaacttcggttcttacgaatcagag

SEQ ID NO: 6464 - DNA, 93 bp, synthetic construct
  misc_feature 1..93: note = engineered ribonucleic acid scaffold (ERS) sequence
  source 1..93: mol_type = other DNA
actggcgcttttatctgattactttgagcgccatcaccagcgactatgtcgtagtgggtaaatcgtaagaacttcggttcttacgaatcagag

SEQ ID NO: 6465 - DNA, 93 bp, synthetic construct
  misc_feature 1..93: note = engineered ribonucleic acid scaffold (ERS) sequence
  source 1..93: mol_type = other DNA
actggcgcttttatctgattactctgagcgccatcaccagcgactatgtcgtagtgggtaaatcgtaagaacttcggttcttacgaatcagag

SEQ ID NO: 6466 - DNA, 93 bp, synthetic construct
  misc_feature 1..93: note = engineered ribonucleic acid scaffold (ERS) sequence
  source 1..93: mol_type = other DNA
actggcgcttttatctgattactctgagcgccatcaccagcgactatgtcgtagtgggtaaatcgtaagaacttcggttcttacgaatcaaag

SEQ ID NO: 6467 - DNA, 93 bp, synthetic construct
  misc_feature 1..93: note = engineered ribonucleic acid scaffold (ERS) sequence
  source 1..93: mol_type = other DNA
actggcgcttctatctgattactctgagcgccatcaccagcgactatgtcgtagtgggtaaatcgtaagaacttcggttcttacgactcagag

SEQ ID NO: 6468 - DNA, 93 bp, synthetic construct
  misc_feature 1..93: note = engineered ribonucleic acid scaffold (ERS) sequence
  source 1..93: mol_type = other DNA
actggcgcttctatctgattactctgagcgccatcaccagcgactatgtcgtagtgggtaaatcgtaagaacttcggttcttacgagtcagag

SEQ ID NO: 6469 - DNA, 93 bp, synthetic construct
  misc_feature 1..93: note = engineered ribonucleic acid scaffold (ERS) sequence
  source 1..93: mol_type = other DNA
actggcgcttctatctgattactctgagcgccatcaccagcgactatgtcgtagtgggtaaatcgtaagaacttcggttcttacgaatcaaag

SEQ ID NO: 6470 - DNA, 93 bp, synthetic construct
  misc_feature 1..93: note = engineered ribonucleic acid scaffold (ERS) sequence
  source 1..93: mol_type = other DNA
actggcgcttctatctgattactctcagcgccatcaccagcgactatgtcgtagtgggtaaatggaagatgcttcggcatcttccaatcagac

SEQ ID NO: 6471 - DNA, 93 bp, synthetic construct
  misc_feature 1..93: note = engineered ribonucleic acid scaffold (ERS) sequence
  source 1..93: mol_type = other DNA
actggcgcttctatctgattactttgagcgccatcaccagcgactatgtcgtagtgggtaaatggaagatgcttcggcatcttccaatcagag

SEQ ID NO: 6472 - DNA, 93 bp, synthetic construct
  misc_feature 1..93: note = engineered ribonucleic acid scaffold (ERS) sequence
  source 1..93: mol_type = other DNA
actggcgcttctatctgattactttgagcgccatcaccagcgactatgtcgtagtgggtaaatggaagatgcttcggcatcttccaatcaaag

SEQ ID NO: 6473 - DNA, 93 bp, synthetic construct
  misc_feature 1..93: note = engineered ribonucleic acid scaffold (ERS) sequence
  source 1..93: mol_type = other DNA
actggcgcttctatctgattagtctcagcgccatcaccagcgactatgtcgtagtgggtaaatggaagatgcttcggcatcttccaatgagac

SEQ ID NO: 6474 - DNA, 93 bp, synthetic construct
  misc_feature 1..93: note = engineered ribonucleic acid scaffold (ERS) sequence
  source 1..93: mol_type = other DNA
actggcgcttctatctgattagtctgagcgccatcaccagcgactatgtcgtagtgggtaaatggaagatgcttcggcatcttccaatcagac

SEQ ID NO: 6475 - DNA, 93 bp, synthetic construct
  misc_feature 1..93: note = engineered ribonucleic acid scaffold (ERS) sequence
  source 1..93: mol_type = other DNA
actggcgcttctatctgattactctcagcgccatcaccagcgactatgtcgtagtgggtaaatggaagatgcttcggcatcttccaatgagag

SEQ ID NO: 6476 - DNA, 93 bp, synthetic construct
  misc_feature 1..93: note = engineered ribonucleic acid scaffold (ERS) sequence
  source 1..93: mol_type = other DNA
actggcgctcccatctgattaccccgagcgccatcaccagcgactatgtcgtagtgggtaaatggaagatgcttcggcatcttccaatcgggg

SEQ ID NO: 6477 - DNA, 93 bp, synthetic construct
  misc_feature 1..93: note = engineered ribonucleic acid scaffold (ERS) sequence
  source 1..93: mol_type = other DNA
actggcgctcctatctgattactccgagcgccatcaccagcgactatgtcgtagtgggtaaatggaagatgcttcggcatcttccaatcggag

SEQ ID NO: 6478 - DNA, 93 bp, synthetic construct
  misc_feature 1..93: note = engineered ribonucleic acid scaffold (ERS) sequence
  source 1..93: mol_type = other DNA
actggcgctgggatctgattaccccgagcgccatcaccagcgactatgtcgtagtgggtaaatggaagatgcttcggcatcttccaatcgggg

SEQ ID NO: 6479 - DNA, 93 bp, synthetic construct
  misc_feature 1..93: note = engineered ribonucleic acid scaffold (ERS) sequence
  source 1..93: mol_type = other DNA
actggcgctggtatctgattactccgagcgccatcaccagcgactatgtcgtagtgggtaaatggaagatgcttcggcatcttccaatcggag

SEQ ID NO: 6480 - DNA, 93 bp, synthetic construct
  misc_feature 1..93: note = engineered ribonucleic acid scaffold (ERS) sequence
  source 1..93: mol_type = other DNA
actggcgcttccatctgattaccctgagcgccatcaccagcgactatgtcgtagtgggtaaatggaagatgcttcggcatcttccaatcaggg

SEQ ID NO: 6481 - DNA, 93 bp, synthetic construct
  misc_feature 1..93: note = engineered ribonucleic acid scaffold (ERS) sequence
  source 1..93: mol_type = other DNA
actggcgcttggatctgattaccctgagcgccatcaccagcgactatgtcgtagtgggtaaatggaagatgcttcggcatcttccaatcaggg

SEQ ID NO: 6482 - DNA, 93 bp, synthetic construct
  misc_feature 1..93: note = engineered ribonucleic acid scaffold (ERS) sequence
  source 1..93: mol_type = other DNA
actggcgcttgtatctgattactctgagcgccatcaccagcgactatgtcgtagtgggtaaatggaagatgcttcggcatcttccaatcagag

SEQ ID NO: 6483 - DNA, 93 bp, synthetic construct
  misc_feature 1..93: note = engineered ribonucleic acid scaffold (ERS) sequence
  source 1..93: mol_type = other DNA
actggcgcttttatctgattactttgagcgccatcaccagcgactatgtcgtagtgggtaaatggaagatgcttcggcatcttccaatcagag

SEQ ID NO: 6484 - DNA, 93 bp, synthetic construct
  misc_feature 1..93: note = engineered ribonucleic acid scaffold (ERS) sequence
  source 1..93: mol_type = other DNA
actggcgcttttatctgattactctgagcgccatcaccagcgactatgtcgtagtgggtaaatggaagatgcttcggcatcttccaatcagag

SEQ ID NO: 6485 - DNA, 93 bp, synthetic construct
  misc_feature 1..93: note = engineered ribonucleic acid scaffold (ERS) sequence
  source 1..93: mol_type = other DNA
actggcgcttttatctgattactctgagcgccatcaccagcgactatgtcgtagtgggtaaatggaagatgcttcggcatcttccaatcaaag

SEQ ID NO: 6486 - DNA, 93 bp, synthetic construct
  misc_feature 1..93: note = engineered ribonucleic acid scaffold (ERS) sequence
  source 1..93: mol_type = other DNA
actggcgcttctatctgattactctgagcgccatcaccagcgactatgtcgtagtgggtaaatggaagatgcttcggcatcttccactcagag

SEQ ID NO: 6487 - DNA, 93 bp, synthetic construct
  misc_feature 1..93: note = engineered ribonucleic acid scaffold (ERS) sequence
  source 1..93: mol_type = other DNA
actggcgcttctatctgattactctgagcgccatcaccagcgactatgtcgtagtgggtaaatggaagatgcttcggcatcttccagtcagag

SEQ ID NO: 6488 - DNA, 93 bp, synthetic construct
  misc_feature 1..93: note = engineered ribonucleic acid scaffold (ERS) sequence
  source 1..93: mol_type = other DNA
actggcgcttctatctgattactctgagcgccatcaccagcgactatgtcgtagtgggtaaatggaagatgcttcggcatcttccaatcaaag

SEQ ID NO: 6489 - DNA, 97 bp, synthetic construct
  misc_feature 1..97: note = engineered ribonucleic acid scaffold (ERS) sequence
  source 1..97: mol_type = other DNA
actggcgcttctatctgattactctcagcgccatcaccagcgactatgtcgtagtgggtaaagcccttacggacttcggtccgtaagggcatcagac

SEQ ID NO: 6490 - DNA, 97 bp, synthetic construct
  misc_feature 1..97: note = engineered ribonucleic acid scaffold (ERS) sequence
  source 1..97: mol_type = other DNA
actggcgcttctatctgattactttgagcgccatcaccagcgactatgtcgtagtgggtaaagcccttacggacttcggtccgtaagggcatcagag

SEQ ID NO: 6491 - DNA, 97 bp, synthetic construct
  misc_feature 1..97: note = engineered ribonucleic acid scaffold (ERS) sequence
  source 1..97: mol_type = other DNA
actggcgcttctatctgattactttgagcgccatcaccagcgactatgtcgtagtgggtaaagcccttacggacttcggtccgtaagggcatcaaag

SEQ ID NO: 6492 - DNA, 97 bp, synthetic construct
  misc_feature 1..97: note = engineered ribonucleic acid scaffold (ERS) sequence
  source 1..97: mol_type = other DNA
actggcgcttctatctgattagtctcagcgccatcaccagcgactatgtcgtagtgggtaaagcccttacggacttcggtccgtaagggcatgagac

SEQ ID NO: 6493 - DNA, 97 bp, synthetic construct
  misc_feature 1..97: note = engineered ribonucleic acid scaffold (ERS) sequence
  source 1..97: mol_type = other DNA
actggcgcttctatctgattagtctgagcgccatcaccagcgactatgtcgtagtgggtaaagcccttacggacttcggtccgtaagggcatcagac

SEQ ID NO: 6494 - DNA, 97 bp, synthetic construct
  misc_feature 1..97: note = engineered ribonucleic acid scaffold (ERS) sequence
  source 1..97: mol_type = other DNA
actggcgcttctatctgattactctcagcgccatcaccagcgactatgtcgtagtgggtaaagcccttacggacttcggtccgtaagggcatgagag

SEQ ID NO: 6495 - DNA, 97 bp, synthetic construct
  misc_feature 1..97: note = engineered ribonucleic acid scaffold (ERS) sequence
  source 1..97: mol_type = other DNA
actggcgctcccatctgattaccccgagcgccatcaccagcgactatgtcgtagtgggtaaagcccttacggacttcggtccgtaagggcatcgggg

SEQ ID NO: 6496 - DNA, 97 bp, synthetic construct
  misc_feature 1..97: note = engineered ribonucleic acid scaffold (ERS) sequence
  source 1..97: mol_type = other DNA
actggcgctcctatctgattactccgagcgccatcaccagcgactatgtcgtagtgggtaaagcccttacggacttcggtccgtaagggcatcggag

SEQ ID NO: 6497 - DNA, 97 bp, synthetic construct
  misc_feature 1..97: note = engineered ribonucleic acid scaffold (ERS) sequence
  source 1..97: mol_type = other DNA
actggcgctgggatctgattaccccgagcgccatcaccagcgactatgtcgtagtgggtaaagcccttacggacttcggtccgtaagggcatcgggg

SEQ ID NO: 6498 - DNA, 97 bp, synthetic construct
  misc_feature 1..97: note = engineered ribonucleic acid scaffold (ERS) sequence
  source 1..97: mol_type = other DNA
actggcgctggtatctgattactccgagcgccatcaccagcgactatgtcgtagtgggtaaagcccttacggacttcggtccgtaagggcatcggag

SEQ ID NO: 6499 - DNA, 97 bp, synthetic construct
  misc_feature 1..97: note = engineered ribonucleic acid scaffold (ERS) sequence
  source 1..97: mol_type = other DNA
actggcgcttccatctgattaccctgagcgccatcaccagcgactatgtcgtagtgggtaaagcccttacggacttcggtccgtaagggcatcaggg

SEQ ID NO: 6500 - DNA, 97 bp, synthetic construct
  misc_feature 1..97: note = engineered ribonucleic acid scaffold (ERS) sequence
  source 1..97: mol_type = other DNA
actggcgcttggatctgattaccctgagcgccatcaccagcgactatgtcgtagtgggtaaagcccttacggacttcggtccgtaagggcatcaggg

SEQ ID NO: 6501 - DNA, 97 bp, synthetic construct
  misc_feature 1..97: note = engineered ribonucleic acid scaffold (ERS) sequence
  source 1..97: mol_type = other DNA
actggcgcttgtatctgattactctgagcgccatcaccagcgactatgtcgtagtgggtaaagcccttacggacttcggtccgtaagggcatcagag

SEQ ID NO: 6502 - DNA, 97 bp, synthetic construct
  misc_feature 1..97: note = engineered ribonucleic acid scaffold (ERS) sequence
  source 1..97: mol_type = other DNA
actggcgcttttatctgattactttgagcgccatcaccagcgactatgtcgtagtgggtaaagcccttacggacttcggtccgtaagggcatcagag

SEQ ID NO: 6503 - DNA, 97 bp, synthetic construct
  misc_feature 1..97: note = engineered ribonucleic acid scaffold (ERS) sequence
  source 1..97: mol_type = other DNA
actggcgcttttatctgattactctgagcgccatcaccagcgactatgtcgtagtgggtaaagcccttacggacttcggtccgtaagggcatcagag

SEQ ID NO: 6504 - DNA, 97 bp, synthetic construct
  misc_feature 1..97: note = engineered ribonucleic acid scaffold (ERS) sequence
  source 1..97: mol_type = other DNA
actggcgcttttatctgattactctgagcgccatcaccagcgactatgtcgtagtgggtaaagcccttacggacttcggtccgtaagggcatcaaag

SEQ ID NO: 6505 - DNA, 97 bp, synthetic construct
  misc_feature 1..97: note = engineered ribonucleic acid scaffold (ERS) sequence
  source 1..97: mol_type = other DNA
actggcgcttctatctgattactctgagcgccatcaccagcgactatgtcgtagtgggtaaagcccttacggacttcggtccgtaagggcctcagag

SEQ ID NO: 6506 - DNA, 97 bp, synthetic construct
  misc_feature 1..97: note = engineered ribonucleic acid scaffold (ERS) sequence
  source 1..97: mol_type = other DNA
actggcgcttctatctgattactctgagcgccatcaccagcgactatgtcgtagtgggtaaagcccttacggacttcggtccgtaagggcgtcagag

SEQ ID NO: 6507 - DNA, 97 bp, synthetic construct
  misc_feature 1..97: note = engineered ribonucleic acid scaffold (ERS) sequence
  source 1..97: mol_type = other DNA
actggcgcttctatctgattactctgagcgccatcaccagcgactatgtcgtagtgggtaaagcccttacggacttcggtccgtaagggcatcaaag

SEQ ID NO: 6508 - DNA, 99 bp, synthetic construct
  misc_feature 1..99: note = engineered ribonucleic acid scaffold (ERS) sequence
  source 1..99: mol_type = other DNA
actggcgcttctatctgattactctcagcgccatcaccagcgactatgtcgtagtgggtaaagcctcttacggacttcggtccgtaagaggcatcagac

SEQ ID NO: 6509 - DNA, 99 bp, synthetic construct
  misc_feature 1..99: note = engineered ribonucleic acid scaffold (ERS) sequence
  source 1..99: mol_type = other DNA
actggcgcttctatctgattactttgagcgccatcaccagcgactatgtcgtagtgggtaaagcctcttacggacttcggtccgtaagaggcatcagag

SEQ ID NO: 6510 - DNA, 99 bp, synthetic construct
  misc_feature 1..99: note = engineered ribonucleic acid scaffold (ERS) sequence
  source 1..99: mol_type = other DNA
actggcgcttctatctgattactttgagcgccatcaccagcgactatgtcgtagtgggtaaagcctcttacggacttcggtccgtaagaggcatcaaag

SEQ ID NO: 6511 - DNA, 99 bp, synthetic construct
  misc_feature 1..99: note = engineered ribonucleic acid scaffold (ERS) sequence
  source 1..99: mol_type = other DNA
actggcgcttctatctgattagtctcagcgccatcaccagcgactatgtcgtagtgggtaaagcctcttacggacttcggtccgtaagaggcatgagac

SEQ ID NO: 6512 - DNA, 99 bp, synthetic construct
  misc_feature 1..99: note = engineered ribonucleic acid scaffold (ERS) sequence
  source 1..99: mol_type = other DNA
actggcgcttctatctgattagtctgagcgccatcaccagcgactatgtcgtagtgggtaaagcctcttacggacttcggtccgtaagaggcatcagac

SEQ ID NO: 6513 - DNA, 99 bp, synthetic construct
  misc_feature 1..99: note = engineered ribonucleic acid scaffold (ERS) sequence
  source 1..99: mol_type = other DNA
actggcgcttctatctgattactctcagcgccatcaccagcgactatgtcgtagtgggtaaagcctcttacggacttcggtccgtaagaggcatgagag

SEQ ID NO: 6514 - DNA, 99 bp, synthetic construct
  misc_feature 1..99: note = engineered ribonucleic acid scaffold (ERS) sequence
  source 1..99: mol_type = other DNA
actggcgctcccatctgattaccccgagcgccatcaccagcgactatgtcgtagtgggtaaagcctcttacggacttcggtccgtaagaggcatcgggg

SEQ ID NO: 6515 - DNA, 99 bp, synthetic construct
  misc_feature 1..99: note = engineered ribonucleic acid scaffold (ERS) sequence
  source 1..99: mol_type = other DNA
actggcgctcctatctgattactccgagcgccatcaccagcgactatgtcgtagtgggtaaagcctcttacggacttcggtccgtaagaggcatcggag

SEQ ID NO: 6516 - DNA, 99 bp, synthetic construct
  misc_feature 1..99: note = engineered ribonucleic acid scaffold (ERS) sequence
  source 1..99: mol_type = other DNA
actggcgctgggatctgattaccccgagcgccatcaccagcgactatgtcgtagtgggtaaagcctcttacggacttcggtccgtaagaggcatcgggg

SEQ ID NO: 6517 - DNA, 99 bp, synthetic construct
  misc_feature 1..99: note = engineered ribonucleic acid scaffold (ERS) sequence
  source 1..99: mol_type = other DNA
actggcgctggtatctgattactccgagcgccatcaccagcgactatgtcgtagtgggtaaagcctcttacggacttcggtccgtaagaggcatcggag

SEQ ID NO: 6518 - DNA, 99 bp, synthetic construct
  misc_feature 1..99: note = engineered ribonucleic acid scaffold (ERS) sequence
  source 1..99: mol_type = other DNA
actggcgcttccatctgattaccctgagcgccatcaccagcgactatgtcgtagtgggtaaagcctcttacggacttcggtccgtaagaggcatcaggg

SEQ ID NO: 6519 - DNA, 99 bp, synthetic construct
  misc_feature 1..99: note = engineered ribonucleic acid scaffold (ERS) sequence
  source 1..99: mol_type = other DNA
actggcgcttggatctgattaccctgagcgccatcaccagcgactatgtcgtagtgggtaaagcctcttacggacttcggtccgtaagaggcatcaggg

SEQ ID NO: 6520 - DNA, 99 bp, synthetic construct
  misc_feature 1..99: note = engineered ribonucleic acid scaffold (ERS) sequence
  source 1..99: mol_type = other DNA
actggcgcttgtatctgattactctgagcgccatcaccagcgactatgtcgtagtgggtaaagcctcttacggacttcggtccgtaagaggcatcagag

SEQ ID NO: 6521 - DNA, 99 bp, synthetic construct
  misc_feature 1..99: note = engineered ribonucleic acid scaffold (ERS) sequence
  source 1..99: mol_type = other DNA
actggcgcttttatctgattactttgagcgccatcaccagcgactatgtcgtagtgggtaaagcctcttacggacttcggtccgtaagaggcatcagag

SEQ ID NO: 6522 - DNA, 99 bp, synthetic construct
  misc_feature 1..99: note = engineered ribonucleic acid scaffold (ERS) sequence
  source 1..99: mol_type = other DNA
actggcgcttttatctgattactctgagcgccatcaccagcgactatgtcgtagtgggtaaagcctcttacggacttcggtccgtaagaggcatcagag

SEQ ID NO: 6523 - DNA, 99 bp, synthetic construct
  misc_feature 1..99: note = engineered ribonucleic acid scaffold (ERS) sequence
  source 1..99: mol_type = other DNA
actggcgcttttatctgattactctgagcgccatcaccagcgactatgtcgtagtgggtaaagcctcttacggacttcggtccgtaagaggcatcaaag

SEQ ID NO: 6524 - DNA, 99 bp, synthetic construct
  misc_feature 1..99: note = engineered ribonucleic acid scaffold (ERS) sequence
  source 1..99: mol_type = other DNA
actggcgcttctatctgattactctgagcgccatcaccagcgactatgtcgtagtgggtaaagcctcttacggacttcggtccgtaagaggcctcagag

SEQ ID NO: 6525 - DNA, 99 bp, synthetic construct
  misc_feature 1..99: note = engineered ribonucleic acid scaffold (ERS) sequence
  source 1..99: mol_type = other DNA
actggcgcttctatctgattactctgagcgccatcaccagcgactatgtcgtagtgggtaaagcctcttacggacttcggtccgtaagaggcgtcagag

SEQ ID NO: 6526 - DNA, 99 bp, synthetic construct
  misc_feature 1..99: note = engineered ribonucleic acid scaffold (ERS) sequence
  source 1..99: mol_type = other DNA
actggcgcttctatctgattactctgagcgccatcaccagcgactatgtcgtagtgggtaaagcctcttacggacttcggtccgtaagaggcatcaaag

SEQ ID NO: 6527 - DNA, 99 bp, synthetic construct
  misc_feature 1..99: note = engineered ribonucleic acid scaffold (ERS) sequence
  source 1..99: mol_type = other DNA
actggcgcttctatctgattactctcagcgccatcaccagcgactatgtcgtagtgggtaaagccgcttagggacttcggtccctaagaggcatcagac

SEQ ID NO: 6528 - DNA, 99 bp, synthetic construct
  misc_feature 1..99: note = engineered ribonucleic acid scaffold (ERS) sequence
  source 1..99: mol_type = other DNA
actggcgcttctatctgattactttgagcgccatcaccagcgactatgtcgtagtgggtaaagccgcttagggacttcggtccctaagaggcatcagag

SEQ ID NO: 6529 - DNA, 99 bp, synthetic construct
  misc_feature 1..99: note = engineered ribonucleic acid scaffold (ERS) sequence
  source 1..99: mol_type = other DNA
actggcgcttctatctgattactttgagcgccatcaccagcgactatgtcgtagtgggtaaagccgcttagggacttcggtccctaagaggcatcaaag

SEQ ID NO: 6530 - DNA, 99 bp, synthetic construct
  misc_feature 1..99: note = engineered ribonucleic acid scaffold (ERS) sequence
  source 1..99: mol_type = other DNA
actggcgcttctatctgattagtctcagcgccatcaccagcgactatgtcgtagtgggtaaagccgcttagggacttcggtccctaagaggcatgagac

SEQ ID NO: 6531 - DNA, 99 bp, synthetic construct
  misc_feature 1..99: note = engineered ribonucleic acid scaffold (ERS) sequence
  source 1..99: mol_type = other DNA
actggcgcttctatctgattagtctgagcgccatcaccagcgactatgtcgtagtgggtaaagccgcttagggacttcggtccctaagaggcatcagac

SEQ ID NO: 6532 - DNA, 99 bp, synthetic construct
  misc_feature 1..99: note = engineered ribonucleic acid scaffold (ERS) sequence
  source 1..99: mol_type = other DNA
actggcgcttctatctgattactctcagcgccatcaccagcgactatgtcgtagtgggtaaagccgcttagggacttcggtccctaagaggcatgagag

SEQ ID NO: 6533 - DNA, 99 bp, synthetic construct
  misc_feature 1..99: note = engineered ribonucleic acid scaffold (ERS) sequence
  source 1..99: mol_type = other DNA
actggcgctcccatctgattaccccgagcgccatcaccagcgactatgtcgtagtgggtaaagccgcttagggacttcggtccctaagaggcatcgggg

SEQ ID NO: 6534 - DNA, 99 bp, synthetic construct
  misc_feature 1..99: note = engineered ribonucleic acid scaffold (ERS) sequence
  source 1..99: mol_type = other DNA
actggcgctcctatctgattactccgagcgccatcaccagcgactatgtcgtagtgggtaaagccgcttagggacttcggtccctaagaggcatcggag

SEQ ID NO: 6535 - DNA, 99 bp, synthetic construct
  misc_feature 1..99: note = engineered ribonucleic acid scaffold (ERS) sequence
  source 1..99: mol_type = other DNA
actggcgctgggatctgattaccccgagcgccatcaccagcgactatgtcgtagtgggtaaagccgcttagggacttcggtccctaagaggcatcgggg

SEQ ID NO: 6536 - DNA, 99 bp, synthetic construct
  misc_feature 1..99: note = engineered ribonucleic acid scaffold (ERS) sequence
  source 1..99: mol_type = other DNA
actggcgctggtatctgattactccgagcgccatcaccagcgactatgtcgtagtgggtaaagccgcttagggacttcggtccctaagaggcatcggag

SEQ ID NO: 6537 - DNA, 99 bp, synthetic construct
  misc_feature 1..99: note = engineered ribonucleic acid scaffold (ERS) sequence
  source 1..99: mol_type = other DNA
actggcgcttccatctgattaccctgagcgccatcaccagcgactatgtcgtagtgggtaaagccgcttagggacttcggtccctaagaggcatcaggg

SEQ ID NO: 6538 - DNA, 99 bp, synthetic construct
  misc_feature 1..99: note = engineered ribonucleic acid scaffold (ERS) sequence
  source 1..99: mol_type = other DNA
actggcgcttggatctgattaccctgagcgccatcaccagcgactatgtcgtagtgggtaaagccgcttagggacttcggtccctaagaggcatcaggg

SEQ ID NO: 6539 - DNA, 99 bp, synthetic construct
  misc_feature 1..99: note = engineered ribonucleic acid scaffold (ERS) sequence
  source 1..99: mol_type = other DNA
actggcgcttgtatctgattactctgagcgccatcaccagcgactatgtcgtagtgggtaaagccgcttagggacttcggtccctaagaggcatcagag

SEQ ID NO: 6540 - DNA, 99 bp, synthetic construct
  misc_feature 1..99: note = engineered ribonucleic acid scaffold (ERS) sequence
  source 1..99: mol_type = other DNA
actggcgcttttatctgattactttgagcgccatcaccagcgactatgtcgtagtgggtaaagccgcttagggacttcggtccctaagaggcatcagag

SEQ ID NO: 6541 - DNA, 99 bp, synthetic construct
  misc_feature 1..99: note = engineered ribonucleic acid scaffold (ERS) sequence
  source 1..99: mol_type = other DNA
actggcgcttttatctgattactctgagcgccatcaccagcgactatgtcgtagtgggtaaagccgcttagggacttcggtccctaagaggcatcagag

SEQ ID NO: 6542 - DNA, 99 bp, synthetic construct
  misc_feature 1..99: note = engineered ribonucleic acid scaffold (ERS) sequence
  source 1..99: mol_type = other DNA
actggcgcttttatctgattactctgagcgccatcaccagcgactatgtcgtagtgggtaaagccgcttagggacttcggtccctaagaggcatcaaag

SEQ ID NO: 6543 - DNA, 99 bp, synthetic construct
  misc_feature 1..99: note = engineered ribonucleic acid scaffold (ERS) sequence
  source 1..99: mol_type = other DNA
actggcgcttctatctgattactctgagcgccatcaccagcgactatgtcgtagtgggtaaagccgcttagggacttcggtccctaagaggcctcagag

SEQ ID NO: 6544 - DNA, 99 bp, synthetic construct
  misc_feature 1..99: note = engineered ribonucleic acid scaffold (ERS) sequence
  source 1..99: mol_type = other DNA
actggcgcttctatctgattactctgagcgccatcaccagcgactatgtcgtagtgggtaaagccgcttagggacttcggtccctaagaggcgtcagag

SEQ ID NO: 6545 - DNA, 99 bp, synthetic construct
  misc_feature 1..99: note = engineered ribonucleic acid scaffold (ERS) sequence
  source 1..99: mol_type = other DNA
actggcgcttctatctgattactctgagcgccatcaccagcgactatgtcgtagtgggtaaagccgcttagggacttcggtccctaagaggcatcaaag

SEQ ID NO: 6546 - DNA, 89 bp, synthetic construct
  misc_feature 1..89: note = engineered ribonucleic acid scaffold (ERS) sequence
  source 1..89: mol_type = other DNA
actggcgcttctatatctgattactctgagcgccatcaccagcgactatgtcgtagtgggtaaactccctcttcggagggagatcagag

SEQ ID NO: 6547 - DNA, 88 bp, synthetic construct
  misc_feature 1..88: note = engineered ribonucleic acid scaffold (ERS) sequence
  source 1..88: mol_type = other DNA
actggcgcttctaatctgattactctgagcgccatcaccagcgactatgtcgtagtgggtaaactccctcttcggagggagatcagag

SEQ ID NO: 6548 - DNA, 86 bp, synthetic construct
  misc_feature 1..86: note = engineered ribonucleic acid scaffold (ERS) sequence
  source 1..86: mol_type = other DNA
actggcgcttctactgattactctgagcgccatcaccagcgactatgtcgtagtgggtaaactccctcttcggagggagatcagag

SEQ ID NO: 6549 - DNA, 87 bp, synthetic construct
  misc_feature 1..87: note = engineered ribonucleic acid scaffold (ERS) sequence
  source 1..87: mol_type = other DNA
actggcgcttctaactgattactctgagcgccatcaccagcgactatgtcgtagtgggtaaactccctcttcggagggagatcagag

SEQ ID NO: 6550 - DNA, 87 bp, synthetic construct
  misc_feature 1..87: note = engineered ribonucleic acid scaffold (ERS) sequence
  source 1..87: mol_type = other DNA
actggcgcttctacctgattactctgagcgccatcaccagcgactatgtcgtagtgggtaaactccctcttcggagggagatcagag

SEQ ID NO: 6551 - DNA, 87 bp, synthetic construct
  misc_feature 1..87: note = engineered ribonucleic acid scaffold (ERS) sequence
  source 1..87: mol_type = other DNA
actggcgcttctagctgattactctgagcgccatcaccagcgactatgtcgtagtgggtaaactccctcttcggagggagatcagag

SEQ ID NO: 6552 - DNA, 89 bp, synthetic construct
  misc_feature 1..89: note = engineered ribonucleic acid scaffold (ERS) sequence
  source 1..89: mol_type = other DNA
actggcgcttctattactgattactctgagcgccatcaccagcgactatgtcgtagtgggtaaactccctcttcggagggagatcagag

SEQ ID NO: 6553 - DNA, 87 bp, synthetic construct
  misc_feature 1..87: note = engineered ribonucleic acid scaffold (ERS) sequence
  source 1..87: mol_type = other DNA
actggcgcttctatatgattactctgagcgccatcaccagcgactatgtcgtagtgggtaaactccctcttcggagggagatcagag

SEQ ID NO: 6554 - DNA, 87 bp, synthetic construct
  misc_feature 1..87: note = engineered ribonucleic acid scaffold (ERS) sequence
  source 1..87: mol_type = other DNA
actggcgcttctatgtgattactctgagcgccatcaccagcgactatgtcgtagtgggtaaactccctcttcggagggagatcagag

SEQ ID NO: 6555 - DNA, 87 bp, synthetic construct
  misc_feature 1..87: note = engineered ribonucleic acid scaffold (ERS) sequence
  source 1..87: mol_type = other DNA
actggcgcttctatttgattactctgagcgccatcaccagcgactatgtcgtagtgggtaaactccctcttcggagggagatcagag

SEQ ID NO: 6556 - DNA, 88 bp, synthetic construct
  misc_feature 1..88: note = engineered ribonucleic acid scaffold (ERS) sequence
  source 1..88: mol_type = other DNA
actggcgcttctatcttgattactctgagcgccatcaccagcgactatgtcgtagtgggtaaactccctcttcggagggagatcagag

SEQ ID NO: 6557 - DNA, 87 bp, synthetic construct
  misc_feature 1..87: note = engineered ribonucleic acid scaffold (ERS) sequence
  source 1..87: mol_type = other DNA
actggcgcttctatcagattactctgagcgccatcaccagcgactatgtcgtagtgggtaaactccctcttcggagggagatcagag

SEQ ID NO: 6558 - DNA, 87 bp, synthetic construct
  misc_feature 1..87: note = engineered ribonucleic acid scaffold (ERS) sequence
  source 1..87: mol_type = other DNA
actggcgcttctatcggattactctgagcgccatcaccagcgactatgtcgtagtgggtaaactccctcttcggagggagatcagag

SEQ ID NO: 6559 - DNA, 88 bp, synthetic construct
  misc_feature 1..88: note = engineered ribonucleic acid scaffold (ERS) sequence
  source 1..88: mol_type = other DNA
actggcgcttctatctgaattactctgagcgccatcaccagcgactatgtcgtagtgggtaaactccctcttcggagggagatcagag

SEQ ID NO: 6560 - DNA, 88 bp, synthetic construct
  misc_feature 1..88: note = engineered ribonucleic acid scaffold (ERS) sequence
  source 1..88: mol_type = other DNA
actggcgcttctatctgtattactctgagcgccatcaccagcgactatgtcgtagtgggtaaactccctcttcggagggagatcagag

SEQ ID NO: 6561 - DNA, 87 bp, synthetic construct
  misc_feature 1..87: note = engineered ribonucleic acid scaffold (ERS) sequence
  source 1..87: mol_type = other DNA
actggcgcttctatctggttactctgagcgccatcaccagcgactatgtcgtagtgggtaaactccctcttcggagggagatcagag

SEQ ID NO: 6562 - DNA, 87 bp, synthetic construct
  misc_feature 1..87: note = engineered ribonucleic acid scaffold (ERS) sequence
  source 1..87: mol_type = other DNA
actggcgcttctatctgtttactctgagcgccatcaccagcgactatgtcgtagtgggtaaactccctcttcggagggagatcagag

SEQ ID NO: 6563 - DNA, 88 bp, synthetic construct
  misc_feature 1..88: note = engineered ribonucleic acid scaffold (ERS) sequence
  source 1..88: mol_type = other DNA
actggcgcttctatctgatttactctgagcgccatcaccagcgactatgtcgtagtgggtaaactccctcttcggagggagatcagag

SEQ ID NO: 6564 - DNA, 87 bp, synthetic construct
  misc_feature 1..87: note = engineered ribonucleic acid scaffold (ERS) sequence
  source 1..87: mol_type = other DNA
actggcgcttctatctgattgctctgagcgccatcaccagcgactatgtcgtagtgggtaaactccctcttcggagggagatcagag

SEQ ID NO: 6565 - DNA, 91 bp, synthetic construct
  misc_feature 1..91: note = engineered ribonucleic acid scaffold (ERS) sequence
  source 1..91: mol_type = other DNA
actggcgcttctatatctgattactctgagcgccatcaccagcgactatgtcgtagtgggtaaagcgccctcttcggagggagcatcagag

SEQ ID NO: 6566 - DNA, 90 bp, synthetic construct
  misc_feature 1..90: note = engineered ribonucleic acid scaffold (ERS) sequence
  source 1..90: mol_type = other DNA
actggcgcttctaatctgattactctgagcgccatcaccagcgactatgtcgtagtgggtaaagcgccctcttcggagggagcatcagag

SEQ ID NO: 6567 - DNA, 88 bp, synthetic construct
  misc_feature 1..88: note = engineered ribonucleic acid scaffold (ERS) sequence
  source 1..88: mol_type = other DNA
actggcgcttctactgattactctgagcgccatcaccagcgactatgtcgtagtgggtaaagcgccctcttcggagggagcatcagag

SEQ ID NO: 6568 - DNA, 89 bp, synthetic construct
  misc_feature 1..89: note = engineered ribonucleic acid scaffold (ERS) sequence
  source 1..89: mol_type = other DNA
actggcgcttctaactgattactctgagcgccatcaccagcgactatgtcgtagtgggtaaagcgccctcttcggagggagcatcagag

SEQ ID NO: 6569 - DNA, 89 bp, synthetic construct
  misc_feature 1..89: note = engineered ribonucleic acid scaffold (ERS) sequence
  source 1..89: mol_type = other DNA
actggcgcttctacctgattactctgagcgccatcaccagcgactatgtcgtagtgggtaaagcgccctcttcggagggagcatcagag

SEQ ID NO: 6570 - DNA, 89 bp, synthetic construct
  misc_feature 1..89: note = engineered ribonucleic acid scaffold (ERS) sequence
  source 1..89: mol_type = other DNA
actggcgcttctagctgattactctgagcgccatcaccagcgactatgtcgtagtgggtaaagcgccctcttcggagggagcatcagag

SEQ ID NO: 6571 - DNA, 91 bp, synthetic construct
  misc_feature 1..91: note = engineered ribonucleic acid scaffold (ERS) sequence
  source 1..91: mol_type = other DNA
actggcgcttctattactgattactctgagcgccatcaccagcgactatgtcgtagtgggtaaagcgccctcttcggagggagcatcagag

SEQ ID NO: 6572 - DNA, 89 bp, synthetic construct
  misc_feature 1..89: note = engineered ribonucleic acid scaffold (ERS) sequence
  source 1..89: mol_type = other DNA
actggcgcttctatatgattactctgagcgccatcaccagcgactatgtcgtagtgggtaaagcgccctcttcggagggagcatcagag

SEQ ID NO: 6573 - DNA, 89 bp, synthetic construct
  misc_feature 1..89: note = engineered ribonucleic acid scaffold (ERS) sequence
  source 1..89: mol_type = other DNA
actggcgcttctatgtgattactctgagcgccatcaccagcgactatgtcgtagtgggtaaagcgccctcttcggagggagcatcagag

SEQ ID NO: 6574 - DNA, 89 bp, synthetic construct
  misc_feature 1..89: note = engineered ribonucleic acid scaffold (ERS) sequence
  source 1..89: mol_type = other DNA
actggcgcttctatttgattactctgagcgccatcaccagcgactatgtcgtagtgggtaaagcgccctcttcggagggagcatcagag

SEQ ID NO: 6575 - DNA, 90 bp, synthetic construct
  misc_feature 1..90: note = engineered ribonucleic acid scaffold (ERS) sequence
  source 1..90: mol_type = other DNA
actggcgcttctatcttgattactctgagcgccatcaccagcgactatgtcgtagtgggtaaagcgccctcttcggagggagcatcagag

SEQ ID NO: 6576 - DNA, 89 bp, synthetic construct
  misc_feature 1..89: note = engineered ribonucleic acid scaffold (ERS) sequence
  source 1..89: mol_type = other DNA
actggcgcttctatcagattactctgagcgccatcaccagcgactatgtcgtagtgggtaaagcgccctcttcggagggagcatcagag

SEQ ID NO: 6577 - DNA, 89 bp, synthetic construct
  misc_feature 1..89: note = engineered ribonucleic acid scaffold (ERS) sequence
  source 1..89: mol_type = other DNA
actggcgcttctatcggattactctgagcgccatcaccagcgactatgtcgtagtgggtaaagcgccctcttcggagggagcatcagag

SEQ ID NO: 6578 - DNA, 90 bp, synthetic construct
  misc_feature 1..90: note = engineered ribonucleic acid scaffold (ERS) sequence
  source 1..90: mol_type = other DNA
actggcgcttctatctgaattactctgagcgccatcaccagcgactatgtcgtagtgggtaaagcgccctcttcggagggagcatcagag

SEQ ID NO: 6579 - DNA, 90 bp, synthetic construct
  misc_feature 1..90: note = engineered ribonucleic acid scaffold (ERS) sequence
  source 1..90: mol_type = other DNA
actggcgcttctatctgtattactctgagcgccatcaccagcgactatgtcgtagtgggtaaagcgccctcttcggagggagcatcagag

SEQ ID NO: 6580 - DNA, 89 bp, synthetic construct
  misc_feature 1..89: note = engineered ribonucleic acid scaffold (ERS) sequence
  source 1..89: mol_type = other DNA
actggcgcttctatctggttactctgagcgccatcaccagcgactatgtcgtagtgggtaaagcgccctcttcggagggagcatcagag

SEQ ID NO: 6581 - DNA, 89 bp, synthetic construct
  misc_feature 1..89: note = engineered ribonucleic acid scaffold (ERS) sequence
  source 1..89: mol_type = other DNA
actggcgcttctatctgtttactctgagcgccatcaccagcgactatgtcgtagtgggtaaagcgccctcttcggagggagcatcagag

SEQ ID NO: 6582 - DNA, 90 bp, synthetic construct
  misc_feature 1..90: note = engineered ribonucleic acid scaffold (ERS) sequence
  source 1..90: mol_type = other DNA
actggcgcttctatctgatttactctgagcgccatcaccagcgactatgtcgtagtgggtaaagcgccctcttcggagggagcatcagag

SEQ ID NO: 6583 - DNA, 89 bp, synthetic construct
  misc_feature 1..89: note = engineered ribonucleic acid scaffold (ERS) sequence
  source 1..89: mol_type = other DNA
actggcgcttctatctgattgctctgagcgccatcaccagcgactatgtcgtagtgggtaaagcgccctcttcggagggagcatcagag

SEQ ID NO: 6584 - DNA, 101 bp, synthetic construct
  misc_feature 1..101: note = engineered ribonucleic acid scaffold (ERS) sequence
  source 1..101: mol_type = other DNA
actggcgcttctatatctgattactctgagcgccatcaccagcgactatgtcgtagtgggtaaagcgccttacggacttcggtccgtaaggagcatcagag

SEQ ID NO: 6585 - DNA, 100 bp, synthetic construct
  misc_feature 1..100: note = engineered ribonucleic acid scaffold (ERS) sequence
  source 1..100: mol_type = other DNA
actggcgcttctaatctgattactctgagcgccatcaccagcgactatgtcgtagtgggtaaagcgccttacggacttcggtccgtaaggagcatcagag

SEQ ID NO: 6586 - DNA, 98 bp, synthetic construct
  misc_feature 1..98: note = engineered ribonucleic acid scaffold (ERS) sequence
  source 1..98: mol_type = other DNA
actggcgcttctactgattactctgagcgccatcaccagcgactatgtcgtagtgggtaaagcgccttacggacttcggtccgtaaggagcatcagag

SEQ ID NO: 6587 - DNA, 99 bp, synthetic construct
  misc_feature 1..99: note = engineered ribonucleic acid scaffold (ERS) sequence
  source 1..99: mol_type = other DNA
actggcgcttctaactgattactctgagcgccatcaccagcgactatgtcgtagtgggtaaagcgccttacggacttcggtccgtaaggagcatcagag

SEQ ID NO: 6588 - DNA, 99 bp, synthetic construct
  misc_feature 1..99: note = engineered ribonucleic acid scaffold (ERS) sequence
  source 1..99: mol_type = other DNA
actggcgcttctacctgattactctgagcgccatcaccagcgactatgtcgtagtgggtaaagcgccttacggacttcggtccgtaaggagcatcagag

SEQ ID NO: 6589 - DNA, 99 bp, synthetic construct
  misc_feature 1..99: note = engineered ribonucleic acid scaffold (ERS) sequence
  source 1..99: mol_type = other DNA
actggcgcttctagctgattactctgagcgccatcaccagcgactatgtcgtagtgggtaaagcgccttacggacttcggtccgtaaggagcatcagag

SEQ ID NO: 6590 - DNA, 101 bp, synthetic construct
  misc_feature 1..101: note = engineered ribonucleic acid scaffold (ERS) sequence
  source 1..101: mol_type = other DNA
actggcgcttctattactgattactctgagcgccatcaccagcgactatgtcgtagtgggtaaagcgccttacggacttcggtccgtaaggagcatcagag

SEQ ID NO: 6591 - DNA, 99 bp, synthetic construct
  misc_feature 1..99: note = engineered ribonucleic acid scaffold (ERS) sequence
  source 1..99: mol_type = other DNA
actggcgcttctatatgattactctgagcgccatcaccagcgactatgtcgtagtgggtaaagcgccttacggacttcggtccgtaaggagcatcagag

SEQ ID NO: 6592 - DNA, 99 bp, synthetic construct
  misc_feature 1..99: note = engineered ribonucleic acid scaffold (ERS) sequence
  source 1..99: mol_type = other DNA
actggcgcttctatgtgattactctgagcgccatcaccagcgactatgtcgtagtgggtaaagcgccttacggacttcggtccgtaaggagcatcagag

SEQ ID NO: 6593 - DNA, 99 bp, synthetic construct
  misc_feature 1..99: note = engineered ribonucleic acid scaffold (ERS) sequence
  source 1..99: mol_type = other DNA
actggcgcttctatttgattactctgagcgccatcaccagcgactatgtcgtagtgggtaaagcgccttacggacttcggtccgtaaggagcatcagag

SEQ ID NO: 6594 - DNA, 100 bp, synthetic construct
  misc_feature 1..100: note = engineered ribonucleic acid scaffold (ERS) sequence
  source 1..100: mol_type = other DNA
actggcgcttctatcttgattactctgagcgccatcaccagcgactatgtcgtagtgggtaaagcgccttacggacttcggtccgtaaggagcatcagag

SEQ ID NO: 6595 - DNA, 99 bp, synthetic construct
  misc_feature 1..99: note = engineered ribonucleic acid scaffold (ERS) sequence
  source 1..99: mol_type = other DNA
actggcgcttctatcagattactctgagcgccatcaccagcgactatgtcgtagtgggtaaagcgccttacggacttcggtccgtaaggagcatcagag

SEQ ID NO: 6596 - DNA, 99 bp, synthetic construct
  misc_feature 1..99: note = engineered ribonucleic acid scaffold (ERS) sequence
  source 1..99: mol_type = other DNA
actggcgcttctatcggattactctgagcgccatcaccagcgactatgtcgtagtgggtaaagcgccttacggacttcggtccgtaaggagcatcagag

SEQ ID NO: 6597 - DNA, 100 bp, synthetic construct
  misc_feature 1..100: note = engineered ribonucleic acid scaffold (ERS) sequence
  source 1..100: mol_type = other DNA
actggcgcttctatctgaattactctgagcgccatcaccagcgactatgtcgtagtgggtaaagcgccttacggacttcggtccgtaaggagcatcagag

SEQ ID NO: 6598 - DNA, 100 bp, synthetic construct
  misc_feature 1..100: note = engineered ribonucleic acid scaffold (ERS) sequence
  source 1..100: mol_type = other DNA
actggcgcttctatctgtattactctgagcgccatcaccagcgactatgtcgtagtgggtaaagcgccttacggacttcggtccgtaaggagcatcagag

SEQ ID NO: 6599 - DNA, 99 bp, synthetic construct
  misc_feature 1..99: note = engineered ribonucleic acid scaffold (ERS) sequence
  source 1..99: mol_type = other DNA
actggcgcttctatctggttactctgagcgccatcaccagcgactatgtcgtagtgggtaaagcgccttacggacttcggtccgtaaggagcatcagag

SEQ ID NO: 6600 - DNA, 99 bp, synthetic construct
  misc_feature 1..99: note = engineered ribonucleic acid scaffold (ERS) sequence
  source 1..99: mol_type = other DNA
actggcgcttctatctgtttactctgagcgccatcaccagcgactatgtcgtagtgggtaaagcgccttacggacttcggtccgtaaggagcatcagag

SEQ ID NO: 6601 - DNA, 100 bp, synthetic construct
  misc_feature 1..100: note = engineered ribonucleic acid scaffold (ERS) sequence
  source 1..100: mol_type = other DNA
actggcgcttctatctgatttactctgagcgccatcaccagcgactatgtcgtagtgggtaaagcgccttacggacttcggtccgtaaggagcatcagag

SEQ ID NO: 6602 - DNA, 99 bp, synthetic construct
  misc_feature 1..99: note = engineered ribonucleic acid scaffold (ERS) sequence
  source 1..99: mol_type = other DNA
actggcgcttctatctgattgctctgagcgccatcaccagcgactatgtcgtagtgggtaaagcgccttacggacttcggtccgtaaggagcatcagag

SEQ ID NO: 6603 - DNA, 101 bp, synthetic construct
  misc_feature 1..101: note = engineered ribonucleic acid scaffold (ERS) sequence
  source 1..101: mol_type = other DNA
actggcgcttctatatctgattactctgagcgccatcaccagcgactatgtcgtagtgggtaaagcgcttacggaattcgtgtccgtaagaagcatcagag

SEQ ID NO: 6604 - DNA, 100 bp, synthetic construct
  misc_feature 1..100: note = engineered ribonucleic acid scaffold (ERS) sequence
  source 1..100: mol_type = other DNA
actggcgcttctaatctgattactctgagcgccatcaccagcgactatgtcgtagtgggtaaagcgcttacggaattcgtgtccgtaagaagcatcagag

SEQ ID NO: 6605 - DNA, 98 bp, synthetic construct
  misc_feature 1..98: note = engineered ribonucleic acid scaffold (ERS) sequence
  source 1..98: mol_type = other DNA
actggcgcttctactgattactctgagcgccatcaccagcgactatgtcgtagtgggtaaagcgcttacggaattcgtgtccgtaagaagcatcagag

SEQ ID NO: 6606 - DNA, 99 bp, synthetic construct
  misc_feature 1..99: note = engineered ribonucleic acid scaffold (ERS) sequence
  source 1..99: mol_type = other DNA
actggcgcttctaactgattactctgagcgccatcaccagcgactatgtcgtagtgggtaaagcgcttacggaattcgtgtccgtaagaagcatcagag

SEQ ID NO: 6607 - DNA, 99 bp, synthetic construct
  misc_feature 1..99: note = engineered ribonucleic acid scaffold (ERS) sequence
  source 1..99: mol_type = other DNA
actggcgcttctacctgattactctgagcgccatcaccagcgactatgtcgtagtgggtaaagcgcttacggaattcgtgtccgtaagaagcatcagag

SEQ ID NO: 6608 - DNA, 99 bp, synthetic construct
  misc_feature 1..99: note = engineered ribonucleic acid scaffold (ERS) sequence
  source 1..99: mol_type = other DNA
actggcgcttctagctgattactctgagcgccatcaccagcgactatgtcgtagtgggtaaagcgcttacggaattcgtgtccgtaagaagcatcagag

SEQ ID NO: 6609 - DNA, 101 bp, synthetic construct
  misc_feature 1..101: note = engineered ribonucleic acid scaffold (ERS) sequence
  source 1..101: mol_type = other DNA
actggcgcttctattactgattactctgagcgccatcaccagcgactatgtcgtagtgggtaaagcgcttacggaattcgtgtccgtaagaagcatcagag

SEQ ID NO: 6610 - DNA, 99 bp, synthetic construct
  misc_feature 1..99: note = engineered ribonucleic acid scaffold (ERS) sequence
  source 1..99: mol_type = other DNA
actggcgcttctatatgattactctgagcgccatcaccagcgactatgtcgtagtgggtaaagcgcttacggaattcgtgtccgtaagaagcatcagag

SEQ ID NO: 6611 - DNA, 99 bp, synthetic construct
  misc_feature 1..99: note = engineered ribonucleic acid scaffold (ERS) sequence
  source 1..99: mol_type = other DNA
actggcgcttctatgtgattactctgagcgccatcaccagcgactatgtcgtagtgggtaaagcgcttacggaattcgtgtccgtaagaagcatcagag

SEQ ID NO: 6612 - DNA, 99 bp, synthetic construct
  misc_feature 1..99: note = engineered ribonucleic acid scaffold (ERS) sequence
  source 1..99: mol_type = other DNA
actggcgcttctatttgattactctgagcgccatcaccagcgactatgtcgtagtgggtaaagcgcttacggaattcgtgtccgtaagaagcatcagag

SEQ ID NO: 6613 - DNA, 100 bp, synthetic construct
  misc_feature 1..100: note = engineered ribonucleic acid scaffold (ERS) sequence
  source 1..100: mol_type = other DNA
actggcgcttctatcttgattactctgagcgccatcaccagcgactatgtcgtagtgggtaaagcgcttacggaattcgtgtccgtaagaagcatcagag

SEQ ID NO: 6614 - DNA, 99 bp, synthetic construct
  misc_feature 1..99: note = engineered ribonucleic acid scaffold (ERS) sequence
  source 1..99: mol_type = other DNA
actggcgcttctatcagattactctgagcgccatcaccagcgactatgtcgtagtgggtaaagcgcttacggaattcgtgtccgtaagaagcatcagag

SEQ ID NO: 6615 - DNA, 99 bp, synthetic construct
  misc_feature 1..99: note = engineered ribonucleic acid scaffold (ERS) sequence
  source 1..99: mol_type = other DNA
actggcgcttctatcggattactctgagcgccatcaccagcgactatgtcgtagtgggtaaagcgcttacggaattcgtgtccgtaagaagcatcagag

SEQ ID NO: 6616 - DNA, 100 bp, synthetic construct
  misc_feature 1..100: note = engineered ribonucleic acid scaffold (ERS) sequence
  source 1..100: mol_type = other DNA
actggcgcttctatctgaattactctgagcgccatcaccagcgactatgtcgtagtgggtaaagcgcttacggaattcgtgtccgtaagaagcatcagag

SEQ ID NO: 6617 - DNA, 100 bp, synthetic construct
  misc_feature 1..100: note = engineered ribonucleic acid scaffold (ERS) sequence
  source 1..100: mol_type = other DNA
actggcgcttctatctgtattactctgagcgccatcaccagcgactatgtcgtagtgggtaaagcgcttacggaattcgtgtccgtaagaagcatcagag

SEQ ID NO: 6618 - DNA, 99 bp, synthetic construct
  misc_feature 1..99: note = engineered ribonucleic acid scaffold (ERS) sequence
  source 1..99: mol_type = other DNA
actggcgcttctatctggttactctgagcgccatcaccagcgactatgtcgtagtgggtaaagcgcttacggaattcgtgtccgtaagaagcatcagag

SEQ ID NO: 6619 - DNA, 99 bp, synthetic construct
  misc_feature 1..99: note = engineered ribonucleic acid scaffold (ERS) sequence
  source 1..99: mol_type = other DNA
actggcgcttctatctgtttactctgagcgccatcaccagcgactatgtcgtagtgggtaaagcgcttacggaattcgtgtccgtaagaagcatcagag

SEQ ID NO: 6620 - DNA, 100 bp, synthetic construct
  misc_feature 1..100: note = engineered ribonucleic acid scaffold (ERS) sequence
  source 1..100: mol_type = other DNA
actggcgcttctatctgatttactctgagcgccatcaccagcgactatgtcgtagtgggtaaagcgcttacggaattcgtgtccgtaagaagcatcagag

SEQ ID NO: 6621 - DNA, 99 bp, synthetic construct
  misc_feature 1..99: note = engineered ribonucleic acid scaffold (ERS) sequence
  source 1..99: mol_type = other DNA
actggcgcttctatctgattgctctgagcgccatcaccagcgactatgtcgtagtgggtaaagcgcttacggaattcgtgtccgtaagaagcatcagag

SEQ ID NO: 6622 - DNA, 102 bp, synthetic construct
  misc_feature 1..102: note = engineered ribonucleic acid scaffold (ERS) sequence
  source 1..102: mol_type = other DNA
actggcgcttctatatctgattactctgagcgccatcaccagcgactatgtcgtagtgggtaaagcgcttacggacttcgcggtccgtaagaagcatcagag

SEQ ID NO: 6623 - DNA, 101 bp, synthetic construct
  misc_feature 1..101: note = engineered ribonucleic acid scaffold (ERS) sequence
  source 1..101: mol_type = other DNA
actggcgcttctaatctgattactctgagcgccatcaccagcgactatgtcgtagtgggtaaagcgcttacggacttcgcggtccgtaagaagcatcagag

SEQ ID NO: 6624 - DNA, 99 bp, synthetic construct
  misc_feature 1..99: note = engineered ribonucleic acid scaffold (ERS) sequence
  source 1..99: mol_type = other DNA
actggcgcttctactgattactctgagcgccatcaccagcgactatgtcgtagtgggtaaagcgcttacggacttcgcggtccgtaagaagcatcagag

SEQ ID NO: 6625 - DNA, 100 bp, synthetic construct
  misc_feature 1..100: note = engineered ribonucleic acid scaffold (ERS) sequence
  source 1..100: mol_type = other DNA
actggcgcttctaactgattactctgagcgccatcaccagcgactatgtcgtagtgggtaaagcgcttacggacttcgcggtccgtaagaagcatcagag

SEQ ID NO: 6626 - DNA, 100 bp, synthetic construct
  misc_feature 1..100: note = engineered ribonucleic acid scaffold (ERS) sequence
  source 1..100: mol_type = other DNA
actggcgcttctacctgattactctgagcgccatcaccagcgactatgtcgtagtgggtaaagcgcttacggacttcgcggtccgtaagaagcatcagag

SEQ ID NO: 6627 - DNA, 100 bp, synthetic construct
  misc_feature 1..100: note = engineered ribonucleic acid scaffold (ERS) sequence
  source 1..100: mol_type = other DNA
actggcgcttctagctgattactctgagcgccatcaccagcgactatgtcgtagtgggtaaagcgcttacggacttcgcggtccgtaagaagcatcagag

SEQ ID NO: 6628 - DNA, 102 bp, synthetic construct
  misc_feature 1..102: note = engineered ribonucleic acid scaffold (ERS) sequence
  source 1..102: mol_type = other DNA
actggcgcttctattactgattactctgagcgccatcaccagcgactatgtcgtagtgggtaaagcgcttacggacttcgcggtccgtaagaagcatcagag

SEQ ID NO: 6629 - DNA, 100 bp, synthetic construct
  misc_feature 1..100: note = engineered ribonucleic acid scaffold (ERS) sequence
  source 1..100: mol_type = other DNA
actggcgcttctatatgattactctgagcgccatcaccagcgactatgtcgtagtgggtaaagcgcttacggacttcgcggtccgtaagaagcatcagag

SEQ ID NO: 6630 - DNA, 100 bp, synthetic construct
  misc_feature 1..100: note = engineered ribonucleic acid scaffold (ERS) sequence
  source 1..100: mol_type = other DNA
actggcgcttctatgtgattactctgagcgccatcaccagcgactatgtcgtagtgggtaaagcgcttacggacttcgcggtccgtaagaagcatcagag

SEQ ID NO: 6631 - DNA, 100 bp, synthetic construct
  misc_feature 1..100: note = engineered ribonucleic acid scaffold (ERS) sequence
  source 1..100: mol_type = other DNA
actggcgcttctatttgattactctgagcgccatcaccagcgactatgtcgtagtgggtaaagcgcttacggacttcgcggtccgtaagaagcatcagag

SEQ ID NO: 6632 - DNA, 101 bp, synthetic construct
  misc_feature 1..101: note = engineered ribonucleic acid scaffold (ERS) sequence
  source 1..101: mol_type = other DNA
actggcgcttctatcttgattactctgagcgccatcaccagcgactatgtcgtagtgggtaaagcgcttacggacttcgcggtccgtaagaagcatcagag

SEQ ID NO: 6633 - DNA, 100 bp, synthetic construct
  misc_feature 1..100: note = engineered ribonucleic acid scaffold (ERS) sequence
  source 1..100: mol_type = other DNA
actggcgcttctatcagattactctgagcgccatcaccagcgactatgtcgtagtgggtaaagcgcttacggacttcgcggtccgtaagaagcatcagag

SEQ ID NO: 6634 - DNA, 100 bp, synthetic construct
  misc_feature 1..100: note = engineered ribonucleic acid scaffold (ERS) sequence
  source 1..100: mol_type = other DNA
actggcgcttctatcggattactctgagcgccatcaccagcgactatgtcgtagtgggtaaagcgcttacggacttcgcggtccgtaagaagcatcagag

SEQ ID NO: 6635 - DNA, 101 bp, synthetic construct
  misc_feature 1..101: note = engineered ribonucleic acid scaffold (ERS) sequence
  source 1..101: mol_type = other DNA
actggcgcttctatctgaattactctgagcgccatcaccagcgactatgtcgtagtgggtaaagcgcttacggacttcgcggtccgtaagaagcatcagag

SEQ ID NO: 6636 - DNA, 101 bp, synthetic construct
  misc_feature 1..101: note = engineered ribonucleic acid scaffold (ERS) sequence
  source 1..101: mol_type = other DNA
actggcgcttctatctgtattactctgagcgccatcaccagcgactatgtcgtagtgggtaaagcgcttacggacttcgcggtccgtaagaagcatcagag

SEQ ID NO: 6637 - DNA, 100 bp, synthetic construct
  misc_feature 1..100: note = engineered ribonucleic acid scaffold (ERS) sequence
  source 1..100: mol_type = other DNA
actggcgcttctatctggttactctgagcgccatcaccagcgactatgtcgtagtgggtaaagcgcttacggacttcgcggtccgtaagaagcatcagag

SEQ ID NO: 6638 - DNA, 100 bp, synthetic construct
  misc_feature 1..100: note = engineered ribonucleic acid scaffold (ERS) sequence
  source 1..100: mol_type = other DNA
actggcgcttctatctgtttactctgagcgccatcaccagcgactatgtcgtagtgggtaaagcgcttacggacttcgcggtccgtaagaagcatcagag

SEQ ID NO: 6639 - DNA, 101 bp, synthetic construct
  misc_feature 1..101: note = engineered ribonucleic acid scaffold (ERS) sequence
  source 1..101: mol_type = other DNA
actggcgcttctatctgatttactctgagcgccatcaccagcgactatgtcgtagtgggtaaagcgcttacggacttcgcggtccgtaagaagcatcagag

SEQ ID NO: 6640 - DNA, 100 bp, synthetic construct
  misc_feature 1..100: note = engineered ribonucleic acid scaffold (ERS) sequence
  source 1..100: mol_type = other DNA
actggcgcttctatctgattgctctgagcgccatcaccagcgactatgtcgtagtgggtaaagcgcttacggacttcgcggtccgtaagaagcatcagag

SEQ ID NO: 6641 - DNA, 100 bp, synthetic construct
  misc_feature 1..100: note = engineered ribonucleic acid scaffold (ERS) sequence
  source 1..100: mol_type = other DNA
actggcgcttctatatctgattactctgagcgccatcaccagcgactatgtcgtagtgggtaaagcgcttacggacttcggtccgtaagaagcatcagag

SEQ ID NO: 6642 - DNA, 99 bp, synthetic construct
  misc_feature 1..99: note = engineered ribonucleic acid scaffold (ERS) sequence
  source 1..99: mol_type = other DNA
actggcgcttctaatctgattactctgagcgccatcaccagcgactatgtcgtagtgggtaaagcgcttacggacttcggtccgtaagaagcatcagag

SEQ ID NO: 6643 - DNA, 97 bp, synthetic construct
  misc_feature 1..97: note = engineered ribonucleic acid scaffold (ERS) sequence
  source 1..97: mol_type = other DNA
actggcgcttctactgattactctgagcgccatcaccagcgactatgtcgtagtgggtaaagcgcttacggacttcggtccgtaagaagcatcagag

SEQ ID NO: 6644 - DNA, 98 bp, synthetic construct
  misc_feature 1..98: note = engineered ribonucleic acid scaffold (ERS) sequence
  source 1..98: mol_type = other DNA
actggcgcttctaactgattactctgagcgccatcaccagcgactatgtcgtagtgggtaaagcgcttacggacttcggtccgtaagaagcatcagag

SEQ ID NO: 6645 - DNA, 98 bp, synthetic construct
  misc_feature 1..98: note = engineered ribonucleic acid scaffold (ERS) sequence
  source 1..98: mol_type = other DNA
actggcgcttctacctgattactctgagcgccatcaccagcgactatgtcgtagtgggtaaagcgcttacggacttcggtccgtaagaagcatcagag

SEQ ID NO: 6646 - DNA, 98 bp, synthetic construct
  misc_feature 1..98: note = engineered ribonucleic acid scaffold (ERS) sequence
  source 1..98: mol_type = other DNA
actggcgcttctagctgattactctgagcgccatcaccagcgactatgtcgtagtgggtaaagcgcttacggacttcggtccgtaagaagcatcagag

SEQ ID NO: 6647 - DNA, 100 bp, synthetic construct
  misc_feature 1..100: note = engineered ribonucleic acid scaffold (ERS) sequence
  source 1..100: mol_type = other DNA
actggcgcttctattactgattactctgagcgccatcaccagcgactatgtcgtagtgggtaaagcgcttacggacttcggtccgtaagaagcatcagag

SEQ ID NO: 6648 - DNA, 98 bp, synthetic construct
  misc_feature 1..98: note = engineered ribonucleic acid scaffold (ERS) sequence
  source 1..98: mol_type = other DNA
actggcgcttctatatgattactctgagcgccatcaccagcgactatgtcgtagtgggtaaagcgcttacggacttcggtccgtaagaagcatcagag

SEQ ID NO: 6649 - DNA, 98 bp, synthetic construct
  misc_feature 1..98: note = engineered ribonucleic acid scaffold (ERS) sequence
  source 1..98: mol_type = other DNA
actggcgcttctatgtgattactctgagcgccatcaccagcgactatgtcgtagtgggtaaagcgcttacggacttcggtccgtaagaagcatcagag

SEQ ID NO: 6650 - DNA, 98 bp, synthetic construct
  misc_feature 1..98: note = engineered ribonucleic acid scaffold (ERS) sequence
  source 1..98: mol_type = other DNA
actggcgcttctatttgattactctgagcgccatcaccagcgactatgtcgtagtgggtaaagcgcttacggacttcggtccgtaagaagcatcagag

SEQ ID NO: 6651 - DNA, 99 bp, synthetic construct
  misc_feature 1..99: note = engineered ribonucleic acid scaffold (ERS) sequence
  source 1..99: mol_type = other DNA
actggcgcttctatcttgattactctgagcgccatcaccagcgactatgtcgtagtgggtaaagcgcttacggacttcggtccgtaagaagcatcagag

SEQ ID NO: 6652 - DNA, 98 bp, synthetic construct
  misc_feature 1..98: note = engineered ribonucleic acid scaffold (ERS) sequence
  source 1..98: mol_type = other DNA
actggcgcttctatcagattactctgagcgccatcaccagcgactatgtcgtagtgggtaaagcgcttacggacttcggtccgtaagaagcatcagag

SEQ ID NO: 6653 - DNA, 98 bp, synthetic construct
  misc_feature 1..98: note = engineered ribonucleic acid scaffold (ERS) sequence
  source 1..98: mol_type = other DNA
actggcgcttctatcggattactctgagcgccatcaccagcgactatgtcgtagtgggtaaagcgcttacggacttcggtccgtaagaagcatcagag

SEQ ID NO: 6654 - DNA, 99 bp, synthetic construct
  misc_feature 1..99: note = engineered ribonucleic acid scaffold (ERS) sequence
  source 1..99: mol_type = other DNA
actggcgcttctatctgaattactctgagcgccatcaccagcgactatgtcgtagtgggtaaagcgcttacggacttcggtccgtaagaagcatcagag

SEQ ID NO: 6655 - DNA, 99 bp, synthetic construct
  misc_feature 1..99: note = engineered ribonucleic acid scaffold (ERS) sequence
  source 1..99: mol_type = other DNA
actggcgcttctatctgtattactctgagcgccatcaccagcgactatgtcgtagtgggtaaagcgcttacggacttcggtccgtaagaagcatcagag

SEQ ID NO: 6656 - DNA, 98 bp, synthetic construct
  misc_feature 1..98: note = engineered ribonucleic acid scaffold (ERS) sequence
  source 1..98: mol_type = other DNA
actggcgcttctatctggttactctgagcgccatcaccagcgactatgtcgtagtgggtaaagcgcttacggacttcggtccgtaagaagcatcagag

SEQ ID NO: 6657 - DNA, 98 bp, synthetic construct
  misc_feature 1..98: note = engineered ribonucleic acid scaffold (ERS) sequence
  source 1..98: mol_type = other DNA
actggcgcttctatctgtttactctgagcgccatcaccagcgactatgtcgtagtgggtaaagcgcttacggacttcggtccgtaagaagcatcagag

SEQ ID NO: 6658 - DNA, 99 bp, synthetic construct
  misc_feature 1..99: note = engineered ribonucleic acid scaffold (ERS) sequence
  source 1..99: mol_type = other DNA
actggcgcttctatctgatttactctgagcgccatcaccagcgactatgtcgtagtgggtaaagcgcttacggacttcggtccgtaagaagcatcagag

SEQ ID NO: 6659 - DNA, 98 bp, synthetic construct
  misc_feature 1..98: note = engineered ribonucleic acid scaffold (ERS) sequence
  source 1..98: mol_type = other DNA
actggcgcttctatctgattgctctgagcgccatcaccagcgactatgtcgtagtgggtaaagcgcttacggacttcggtccgtaagaagcatcagag

SEQ ID NO: 6660 - DNA, 100 bp, synthetic construct
  misc_feature 1..100: note = engineered ribonucleic acid scaffold (ERS) sequence
  source 1..100: mol_type = other DNA
actggcgcttctatatctgattactctgagcgccatcaccagcgactatgtcgtagtgggtaaagcgcttacggacttcggtccgtaagtcgcatcagag

SEQ ID NO: 6661 - DNA, 99 bp, synthetic construct
  misc_feature 1..99: note = engineered ribonucleic acid scaffold (ERS) sequence
  source 1..99: mol_type = other DNA
actggcgcttctaatctgattactctgagcgccatcaccagcgactatgtcgtagtgggtaaagcgcttacggacttcggtccgtaagtcgcatcagag

SEQ ID NO: 6662 - DNA, 97 bp, synthetic construct
  misc_feature 1..97: note = engineered ribonucleic acid scaffold (ERS) sequence
  source 1..97: mol_type = other DNA
actggcgcttctactgattactctgagcgccatcaccagcgactatgtcgtagtgggtaaagcgcttacggacttcggtccgtaagtcgcatcagag

SEQ ID NO: 6663 - DNA, 98 bp, synthetic construct
  misc_feature 1..98: note = engineered ribonucleic acid scaffold (ERS) sequence
  source 1..98: mol_type = other DNA
actggcgcttctaactgattactctgagcgccatcaccagcgactatgtcgtagtgggtaaagcgcttacggacttcggtccgtaagtcgcatcagag

SEQ ID NO: 6664 - DNA, 98 bp, synthetic construct
  misc_feature 1..98: note = engineered ribonucleic acid scaffold (ERS) sequence
  source 1..98: mol_type = other DNA
actggcgcttctacctgattactctgagcgccatcaccagcgactatgtcgtagtgggtaaagcgcttacggacttcggtccgtaagtcgcatcagag

SEQ ID NO: 6665 - DNA, 98 bp, synthetic construct
  misc_feature 1..98: note = engineered ribonucleic acid scaffold (ERS) sequence
  source 1..98: mol_type = other DNA
actggcgcttctagctgattactctgagcgccatcaccagcgactatgtcgtagtgggtaaagcgcttacggacttcggtccgtaagtcgcatcagag

SEQ ID NO: 6666 - DNA, 100 bp, synthetic construct
  misc_feature 1..100: note = engineered ribonucleic acid scaffold (ERS) sequence
  source 1..100: mol_type = other DNA
actggcgcttctattactgattactctgagcgccatcaccagcgactatgtcgtagtgggtaaagcgcttacggacttcggtccgtaagtcgcatcagag

SEQ ID NO: 6667 - DNA, 98 bp, synthetic construct
  misc_feature 1..98: note = engineered ribonucleic acid scaffold (ERS) sequence
  source 1..98: mol_type = other DNA
actggcgcttctatatgattactctgagcgccatcaccagcgactatgtcgtagtgggtaaagcgcttacggacttcggtccgtaagtcgcatcagag

SEQ ID NO: 6668 - DNA, 98 bp, synthetic construct
  misc_feature 1..98: note = engineered ribonucleic acid scaffold (ERS) sequence
  source 1..98: mol_type = other DNA
actggcgcttctatgtgattactctgagcgccatcaccagcgactatgtcgtagtgggtaaagcgcttacggacttcggtccgtaagtcgcatcagag

SEQ ID NO: 6669 - DNA, 98 bp, synthetic construct
  misc_feature 1..98: note = engineered ribonucleic acid scaffold (ERS) sequence
  source 1..98: mol_type = other DNA
actggcgcttctatttgattactctgagcgccatcaccagcgactatgtcgtagtgggtaaagcgcttacggacttcggtccgtaagtcgcatcagag

SEQ ID NO: 6670 - DNA, 99 bp, synthetic construct
  misc_feature 1..99: note = engineered ribonucleic acid scaffold (ERS) sequence
  source 1..99: mol_type = other DNA
actggcgcttctatcttgattactctgagcgccatcaccagcgactatgtcgtagtgggtaaagcgcttacggacttcggtccgtaagtcgcatcagag

SEQ ID NO: 6671 - DNA, 98 bp, synthetic construct
  misc_feature 1..98: note = engineered ribonucleic acid scaffold (ERS) sequence
  source 1..98: mol_type = other DNA
actggcgcttctatcagattactctgagcgccatcaccagcgactatgtcgtagtgggtaaagcgcttacggacttcggtccgtaagtcgcatcagag

SEQ ID NO: 6672 - DNA, 98 bp, synthetic construct
  misc_feature 1..98: note = engineered ribonucleic acid scaffold (ERS) sequence
  source 1..98: mol_type = other DNA
actggcgcttctatcggattactctgagcgccatcaccagcgactatgtcgtagtgggtaaagcgcttacggacttcggtccgtaagtcgcatcagag

SEQ ID NO: 6673 - DNA, 99 bp, synthetic construct
  misc_feature 1..99: note = engineered ribonucleic acid scaffold (ERS) sequence
  source 1..99: mol_type = other DNA
actggcgcttctatctgaattactctgagcgccatcaccagcgactatgtcgtagtgggtaaagcgcttacggacttcggtccgtaagtcgcatcagag

SEQ ID NO: 6674 - DNA, 99 bp, synthetic construct
  misc_feature 1..99: note = engineered ribonucleic acid scaffold (ERS) sequence
  source 1..99: mol_type = other DNA
actggcgcttctatctgtattactctgagcgccatcaccagcgactatgtcgtagtgggtaaagcgcttacggacttcggtccgtaagtcgcatcagag

SEQ ID NO: 6675 - DNA, 98 bp, synthetic construct
  misc_feature 1..98: note = engineered ribonucleic acid scaffold (ERS) sequence
  source 1..98: mol_type = other DNA
actggcgcttctatctggttactctgagcgccatcaccagcgactatgtcgtagtgggtaaagcgcttacggacttcggtccgtaagtcgcatcagag

SEQ ID NO: 6676 - DNA, 98 bp, synthetic construct
  misc_feature 1..98: note = engineered ribonucleic acid scaffold (ERS) sequence
  source 1..98: mol_type = other DNA
actggcgcttctatctgtttactctgagcgccatcaccagcgactatgtcgtagtgggtaaagcgcttacggacttcggtccgtaagtcgcatcagag

SEQ ID NO: 6677 - DNA, 99 bp, synthetic construct
  misc_feature 1..99: note = engineered ribonucleic acid scaffold (ERS) sequence
  source 1..99: mol_type = other DNA
actggcgcttctatctgatttactctgagcgccatcaccagcgactatgtcgtagtgggtaaagcgcttacggacttcggtccgtaagtcgcatcagag

SEQ ID NO: 6678 - DNA, 98 bp, synthetic construct
  misc_feature 1..98: note = engineered ribonucleic acid scaffold (ERS) sequence
  source 1..98: mol_type = other DNA
actggcgcttctatctgattgctctgagcgccatcaccagcgactatgtcgtagtgggtaaagcgcttacggacttcggtccgtaagtcgcatcagag

SEQ ID NO: 6679 - DNA, 100 bp, synthetic construct
  misc_feature 1..100: note = engineered ribonucleic acid scaffold (ERS) sequence
  source 1..100: mol_type = other DNA
actggcgcttctatatctgattactctgagcgccatcaccagcgactatgtcgtagtgggtaaagcgcttacggagttcgatccgtaagaagcatcagag

SEQ ID NO: 6680 - DNA, 99 bp, synthetic construct
  misc_feature 1..99: note = engineered ribonucleic acid scaffold (ERS) sequence
  source 1..99: mol_type = other DNA
actggcgcttctaatctgattactctgagcgccatcaccagcgactatgtcgtagtgggtaaagcgcttacggagttcgatccgtaagaagcatcagag

SEQ ID NO: 6681 - DNA, 97 bp, synthetic construct
  misc_feature 1..97: note = engineered ribonucleic acid scaffold (ERS) sequence
  source 1..97: mol_type = other DNA
actggcgcttctactgattactctgagcgccatcaccagcgactatgtcgtagtgggtaaagcgcttacggagttcgatccgtaagaagcatcagag

SEQ ID NO: 6682 - DNA, 98 bp, synthetic construct
  misc_feature 1..98: note = engineered ribonucleic acid scaffold (ERS) sequence
  source 1..98: mol_type = other DNA
actggcgcttctaactgattactctgagcgccatcaccagcgactatgtcgtagtgggtaaagcgcttacggagttcgatccgtaagaagcatcagag

SEQ ID NO: 6683 - DNA, 98 bp, synthetic construct
  misc_feature 1..98: note = engineered ribonucleic acid scaffold (ERS) sequence
  source 1..98: mol_type = other DNA
actggcgcttctacctgattactctgagcgccatcaccagcgactatgtcgtagtgggtaaagcgcttacggagttcgatccgtaagaagcatcagag

SEQ ID NO: 6684 - DNA, 98 bp, synthetic construct
  misc_feature 1..98: note = engineered ribonucleic acid scaffold (ERS) sequence
  source 1..98: mol_type = other DNA
actggcgcttctagctgattactctgagcgccatcaccagcgactatgtcgtagtgggtaaagcgcttacggagttcgatccgtaagaagcatcagag

SEQ ID NO: 6685 - DNA, 100 bp, synthetic construct
  misc_feature 1..100: note = engineered ribonucleic acid scaffold (ERS) sequence
  source 1..100: mol_type = other DNA
actggcgcttctattactgattactctgagcgccatcaccagcgactatgtcgtagtgggtaaagcgcttacggagttcgatccgtaagaagcatcagag

SEQ ID NO: 6686 - DNA, 98 bp, synthetic construct
  misc_feature 1..98: note = engineered ribonucleic acid scaffold (ERS) sequence
  source 1..98: mol_type = other DNA
actggcgcttctatatgattactctgagcgccatcaccagcgactatgtcgtagtgggtaaagcgcttacggagttcgatccgtaagaagcatcagag

SEQ ID NO: 6687 - DNA, 98 bp, synthetic construct
  misc_feature 1..98: note = engineered ribonucleic acid scaffold (ERS) sequence
  source 1..98: mol_type = other DNA
actggcgcttctatgtgattactctgagcgccatcaccagcgactatgtcgtagtgggtaaagcgcttacggagttcgatccgtaagaagcatcagag

SEQ ID NO: 6688 - DNA, 98 bp, synthetic construct
  misc_feature 1..98: note = engineered ribonucleic acid scaffold (ERS) sequence
  source 1..98: mol_type = other DNA
actggcgcttctatttgattactctgagcgccatcaccagcgactatgtcgtagtgggtaaagcgcttacggagttcgatccgtaagaagcatcagag

SEQ ID NO: 6689 - DNA, 99 bp, synthetic construct
  misc_feature 1..99: note = engineered ribonucleic acid scaffold (ERS) sequence
  source 1..99: mol_type = other DNA
actggcgcttctatcttgattactctgagcgccatcaccagcgactatgtcgtagtgggtaaagcgcttacggagttcgatccgtaagaagcatcagag

SEQ ID NO: 6690 - DNA, 98 bp, synthetic construct
  misc_feature 1..98: note = engineered ribonucleic acid scaffold (ERS) sequence
  source 1..98: mol_type = other DNA
actggcgcttctatcagattactctgagcgccatcaccagcgactatgtcgtagtgggtaaagcgcttacggagttcgatccgtaagaagcatcagag

SEQ ID NO: 6691 - DNA, 98 bp, synthetic construct
  misc_feature 1..98: note = engineered ribonucleic acid scaffold (ERS) sequence
  source 1..98: mol_type = other DNA
actggcgcttctatcggattactctgagcgccatcaccagcgactatgtcgtagtgggtaaagcgcttacggagttcgatccgtaagaagcatcagag

SEQ ID NO: 6692 - DNA, 99 bp, synthetic construct
  misc_feature 1..99: note = engineered ribonucleic acid scaffold (ERS) sequence
  source 1..99: mol_type = other DNA
actggcgcttctatctgaattactctgagcgccatcaccagcgactatgtcgtagtgggtaaagcgcttacggagttcgatccgtaagaagcatcagag

SEQ ID NO: 6693 - DNA, 99 bp, synthetic construct
  misc_feature 1..99: note = engineered ribonucleic acid scaffold (ERS) sequence
  source 1..99: mol_type = other DNA
actggcgcttctatctgtattactctgagcgccatcaccagcgactatgtcgtagtgggtaaagcgcttacggagttcgatccgtaagaagcatcagag

SEQ ID NO: 6694 - DNA, 98 bp, synthetic construct
  misc_feature 1..98: note = engineered ribonucleic acid scaffold (ERS) sequence
  source 1..98: mol_type = other DNA
actggcgcttctatctggttactctgagcgccatcaccagcgactatgtcgtagtgggtaaagcgcttacggagttcgatccgtaagaagcatcagag

SEQ ID NO: 6695 - DNA, 98 bp, synthetic construct
  misc_feature 1..98: note = engineered ribonucleic acid scaffold (ERS) sequence
  source 1..98: mol_type = other DNA
actggcgcttctatctgtttactctgagcgccatcaccagcgactatgtcgtagtgggtaaagcgcttacggagttcgatccgtaagaagcatcagag

SEQ ID NO: 6696 - DNA, 99 bp, synthetic construct
  misc_feature 1..99: note = engineered ribonucleic acid scaffold (ERS) sequence
  source 1..99: mol_type = other DNA
actggcgcttctatctgatttactctgagcgccatcaccagcgactatgtcgtagtgggtaaagcgcttacggagttcgatccgtaagaagcatcagag

SEQ ID NO: 6697 - DNA, 98 bp, synthetic construct
  misc_feature 1..98: note = engineered ribonucleic acid scaffold (ERS) sequence
  source 1..98: mol_type = other DNA
actggcgcttctatctgattgctctgagcgccatcaccagcgactatgtcgtagtgggtaaagcgcttacggagttcgatccgtaagaagcatcagag

SEQ ID NO: 6698 - DNA, 100 bp, synthetic construct
  misc_feature 1..100: note = engineered ribonucleic acid scaffold (ERS) sequence
  source 1..100: mol_type = other DNA
actggcgcttctatatctgattactctgagcgccatcaccagcgactatgtcgtagtgggtaaagcgctttcggacttcggtccggaagaagcatcagag

SEQ ID NO: 6699 - DNA, 99 bp, synthetic construct
  misc_feature 1..99: note = engineered ribonucleic acid scaffold (ERS) sequence
  source 1..99: mol_type = other DNA
actggcgcttctaatctgattactctgagcgccatcaccagcgactatgtcgtagtgggtaaagcgctttcggacttcggtccggaagaagcatcagag

SEQ ID NO: 6700 - DNA, 97 bp, synthetic construct
  misc_feature 1..97: note = engineered ribonucleic acid scaffold (ERS) sequence
  source 1..97: mol_type = other DNA
actggcgcttctactgattactctgagcgccatcaccagcgactatgtcgtagtgggtaaagcgctttcggacttcggtccggaagaagcatcagag

SEQ ID NO: 6701 - DNA, 98 bp, synthetic construct
  misc_feature 1..98: note = engineered ribonucleic acid scaffold (ERS) sequence
  source 1..98: mol_type = other DNA
actggcgcttctaactgattactctgagcgccatcaccagcgactatgtcgtagtgggtaaagcgctttcggacttcggtccggaagaagcatcagag

SEQ ID NO: 6702 - DNA, 98 bp, synthetic construct
  misc_feature 1..98: note = engineered ribonucleic acid scaffold (ERS) sequence
  source 1..98: mol_type = other DNA
actggcgcttctacctgattactctgagcgccatcaccagcgactatgtcgtagtgggtaaagcgctttcggacttcggtccggaagaagcatcagag

SEQ ID NO: 6703 - DNA, 98 bp, synthetic construct
  misc_feature 1..98: note = engineered ribonucleic acid scaffold (ERS) sequence
  source 1..98: mol_type = other DNA
actggcgcttctagctgattactctgagcgccatcaccagcgactatgtcgtagtgggtaaagcgctttcggacttcggtccggaagaagcatcagag

SEQ ID NO: 6704 - DNA, 100 bp, synthetic construct
  misc_feature 1..100: note = engineered ribonucleic acid scaffold (ERS) sequence
  source 1..100: mol_type = other DNA
actggcgcttctattactgattactctgagcgccatcaccagcgactatgtcgtagtgggtaaagcgctttcggacttcggtccggaagaagcatcagag

SEQ ID NO: 6705 - DNA, 98 bp, synthetic construct
  misc_feature 1..98: note = engineered ribonucleic acid scaffold (ERS) sequence
  source 1..98: mol_type = other DNA
actggcgcttctatatgattactctgagcgccatcaccagcgactatgtcgtagtgggtaaagcgctttcggacttcggtccggaagaagcatcagag

SEQ ID NO: 6706 - DNA, 98 bp, synthetic construct
  misc_feature 1..98: note = engineered ribonucleic acid scaffold (ERS) sequence
  source 1..98: mol_type = other DNA
actggcgcttctatgtgattactctgagcgccatcaccagcgactatgtcgtagtgggtaaagcgctttcggacttcggtccggaagaagcatcagag

SEQ ID NO: 6707 - DNA, 98 bp, synthetic construct
  misc_feature 1..98: note = engineered ribonucleic acid scaffold (ERS) sequence
  source 1..98: mol_type = other DNA
actggcgcttctatttgattactctgagcgccatcaccagcgactatgtcgtagtgggtaaagcgctttcggacttcggtccggaagaagcatcagag

SEQ ID NO: 6708 - DNA, 99 bp, synthetic construct
  misc_feature 1..99: note = engineered ribonucleic acid scaffold (ERS) sequence
  source 1..99: mol_type = other DNA
actggcgcttctatcttgattactctgagcgccatcaccagcgactatgtcgtagtgggtaaagcgctttcggacttcggtccggaagaagcatcagag

SEQ ID NO: 6709 - DNA, 98 bp, synthetic construct
  misc_feature 1..98: note = engineered ribonucleic acid scaffold (ERS) sequence
  source 1..98: mol_type = other DNA
actggcgcttctatcagattactctgagcgccatcaccagcgactatgtcgtagtgggtaaagcgctttcggacttcggtccggaagaagcatcagag

SEQ ID NO: 6710 - DNA, 98 bp, synthetic construct
  misc_feature 1..98: note = engineered ribonucleic acid scaffold (ERS) sequence
  source 1..98: mol_type = other DNA
actggcgcttctatcggattactctgagcgccatcaccagcgactatgtcgtagtgggtaaagcgctttcggacttcggtccggaagaagcatcagag

SEQ ID NO: 6711 - DNA, 99 bp, synthetic construct
  misc_feature 1..99: note = engineered ribonucleic acid scaffold (ERS) sequence
  source 1..99: mol_type = other DNA
actggcgcttctatctgaattactctgagcgccatcaccagcgactatgtcgtagtgggtaaagcgctttcggacttcggtccggaagaagcatcagag

SEQ ID NO: 6712 - DNA, 99 bp, synthetic construct
  misc_feature 1..99: note = engineered ribonucleic acid scaffold (ERS) sequence
  source 1..99: mol_type = other DNA
actggcgcttctatctgtattactctgagcgccatcaccagcgactatgtcgtagtgggtaaagcgctttcggacttcggtccggaagaagcatcagag

SEQ ID NO: 6713 - DNA, 98 bp, synthetic construct
  misc_feature 1..98: note = engineered ribonucleic acid scaffold (ERS) sequence
  source 1..98: mol_type = other DNA
actggcgcttctatctggttactctgagcgccatcaccagcgactatgtcgtagtgggtaaagcgctttcggacttcggtccggaagaagcatcagag

SEQ ID NO: 6714 - DNA, 98 bp, synthetic construct
  misc_feature 1..98: note = engineered ribonucleic acid scaffold (ERS) sequence
  source 1..98: mol_type = other DNA
actggcgcttctatctgtttactctgagcgccatcaccagcgactatgtcgtagtgggtaaagcgctttcggacttcggtccggaagaagcatcagag

SEQ ID NO: 6715 - DNA, 99 bp, synthetic construct
  misc_feature 1..99: note = engineered ribonucleic acid scaffold (ERS) sequence
  source 1..99: mol_type = other DNA
actggcgcttctatctgatttactctgagcgccatcaccagcgactatgtcgtagtgggtaaagcgctttcggacttcggtccggaagaagcatcagag

SEQ ID NO: 6716 - DNA, 98 bp, synthetic construct
  misc_feature 1..98: note = engineered ribonucleic acid scaffold (ERS) sequence
  source 1..98: mol_type = other DNA
actggcgcttctatctgattgctctgagcgccatcaccagcgactatgtcgtagtgggtaaagcgctttcggacttcggtccggaagaagcatcagag

SEQ ID NO: 6717 - DNA, 104 bp, synthetic construct
  misc_feature 1..104: note = engineered ribonucleic acid scaffold (ERS) sequence
  source 1..104: mol_type = other DNA
actggcgcttctatatctgattactctgagcgccatcaccagcgactatgtcgtagtgggtaaagcggcagatctgagcctccgagctctctgccgcatcagag

SEQ ID NO: 6718 - DNA, 103 bp, synthetic construct
  misc_feature 1..103: note = engineered ribonucleic acid scaffold (ERS) sequence
  source 1..103: mol_type = other DNA
actggcgcttctaatctgattactctgagcgccatcaccagcgactatgtcgtagtgggtaaagcggcagatctgagcctccgagctctctgccgcatcagag

SEQ ID NO: 6719 - DNA, 101 bp, synthetic construct
  misc_feature 1..101: note = engineered ribonucleic acid scaffold (ERS) sequence
  source 1..101: mol_type = other DNA
actggcgcttctactgattactctgagcgccatcaccagcgactatgtcgtagtgggtaaagcggcagatctgagcctccgagctctctgccgcatcagag

SEQ ID NO: 6720 - DNA, 102 bp, synthetic construct
  misc_feature 1..102: note = engineered ribonucleic acid scaffold (ERS) sequence
  source 1..102: mol_type = other DNA
actggcgcttctaactgattactctgagcgccatcaccagcgactatgtcgtagtgggtaaagcggcagatctgagcctccgagctctctgccgcatcagag

SEQ ID NO: 6721 - DNA, 102 bp, synthetic construct
  misc_feature 1..102: note = engineered ribonucleic acid scaffold (ERS) sequence
  source 1..102: mol_type = other DNA
actggcgcttctacctgattactctgagcgccatcaccagcgactatgtcgtagtgggtaaagcggcagatctgagcctccgagctctctgccgcatcagag

SEQ ID NO: 6722 - DNA, 102 bp, synthetic construct
  misc_feature 1..102: note = engineered ribonucleic acid scaffold (ERS) sequence
  source 1..102: mol_type = other DNA
actggcgcttctagctgattactctgagcgccatcaccagcgactatgtcgtagtgggtaaagcggcagatctgagcctccgagctctctgccgcatcagag

SEQ ID NO: 6723 - DNA, 104 bp, synthetic construct
  misc_feature 1..104: note = engineered ribonucleic acid scaffold (ERS) sequence
  source 1..104: mol_type = other DNA
actggcgcttctattactgattactctgagcgccatcaccagcgactatgtcgtagtgggtaaagcggcagatctgagcctccgagctctctgccgcatcagag

SEQ ID NO: 6724 - DNA, 102 bp, synthetic construct
  misc_feature 1..102: note = engineered ribonucleic acid scaffold (ERS) sequence
  source 1..102: mol_type = other DNA
actggcgcttctatatgattactctgagcgccatcaccagcgactatgtcgtagtgggtaaagcggcagatctgagcctccgagctctctgccgcatcagag

SEQ ID NO: 6725 - DNA, 102 bp, synthetic construct
  misc_feature 1..102: note = engineered ribonucleic acid scaffold (ERS) sequence
  source 1..102: mol_type = other DNA
actggcgcttctatgtgattactctgagcgccatcaccagcgactatgtcgtagtgggtaaagcggcagatctgagcctccgagctctctgccgcatcagag

SEQ ID NO: 6726 - DNA, 102 bp, synthetic construct
  misc_feature 1..102: note = engineered ribonucleic acid scaffold (ERS) sequence
  source 1..102: mol_type = other DNA
actggcgcttctatttgattactctgagcgccatcaccagcgactatgtcgtagtgggtaaagcggcagatctgagcctccgagctctctgccgcatcagag

SEQ ID NO: 6727 - DNA, 103 bp, synthetic construct
  misc_feature 1..103: note = engineered ribonucleic acid scaffold (ERS) sequence
  source 1..103: mol_type = other DNA
actggcgcttctatcttgattactctgagcgccatcaccagcgactatgtcgtagtgggtaaagcggcagatctgagcctccgagctctctgccgcatcagag

SEQ ID NO: 6728 - DNA, 102 bp, synthetic construct
  misc_feature 1..102: note = engineered ribonucleic acid scaffold (ERS) sequence
  source 1..102: mol_type = other DNA
actggcgcttctatcagattactctgagcgccatcaccagcgactatgtcgtagtgggtaaagcggcagatctgagcctccgagctctctgccgcatcagag

SEQ ID NO: 6729 - DNA, 102 bp, synthetic construct
  misc_feature 1..102: note = engineered ribonucleic acid scaffold (ERS) sequence
  source 1..102: mol_type = other DNA
actggcgcttctatcggattactctgagcgccatcaccagcgactatgtcgtagtgggtaaagcggcagatctgagcctccgagctctctgccgcatcagag

SEQ ID NO: 6730 - DNA, 103 bp, synthetic construct
  misc_feature 1..103: note = engineered ribonucleic acid scaffold (ERS) sequence
  source 1..103: mol_type = other DNA
actggcgcttctatctgaattactctgagcgccatcaccagcgactatgtcgtagtgggtaaagcggcagatctgagcctccgagctctctgccgcatcagag

SEQ ID NO: 6731 - DNA, 103 bp, synthetic construct
  misc_feature 1..103: note = engineered ribonucleic acid scaffold (ERS) sequence
  source 1..103: mol_type = other DNA
actggcgcttctatctgtattactctgagcgccatcaccagcgactatgtcgtagtgggtaaagcggcagatctgagcctccgagctctctgccgcatcagag

SEQ ID NO: 6732 - DNA, 102 bp, synthetic construct
  misc_feature 1..102: note = engineered ribonucleic acid scaffold (ERS) sequence
  source 1..102: mol_type = other DNA
actggcgcttctatctggttactctgagcgccatcaccagcgactatgtcgtagtgggtaaagcggcagatctgagcctccgagctctctgccgcatcagag

SEQ ID NO: 6733 - DNA, 102 bp, synthetic construct
  misc_feature 1..102: note = engineered ribonucleic acid scaffold (ERS) sequence
  source 1..102: mol_type = other DNA
actggcgcttctatctgtttactctgagcgccatcaccagcgactatgtcgtagtgggtaaagcggcagatctgagcctccgagctctctgccgcatcagag

SEQ ID NO: 6734 - DNA, 103 bp, synthetic construct
  misc_feature 1..103: note = engineered ribonucleic acid scaffold (ERS) sequence
  source 1..103: mol_type = other DNA
actggcgcttctatctgatttactctgagcgccatcaccagcgactatgtcgtagtgggtaaagcggcagatctgagcctccgagctctctgccgcatcagag

SEQ ID NO: 6735 - DNA, 102 bp, synthetic construct
  misc_feature 1..102: note = engineered ribonucleic acid scaffold (ERS) sequence
  source 1..102: mol_type = other DNA
actggcgcttctatctgattgctctgagcgccatcaccagcgactatgtcgtagtgggtaaagcggcagatctgagcctccgagctctctgccgcatcagag

SEQ ID NO: 6736 - DNA, 100 bp, synthetic construct
  misc_feature 1..100: note = engineered ribonucleic acid scaffold (ERS) sequence
  source 1..100: mol_type = other DNA
actggcgcttctatatctgattactctgagcgccatcaccagcgactatgtcgtagtgggtaaagcggttacggacttcggtccgtaagacgcatcagag

SEQ ID NO: 6737 - DNA, 99 bp, synthetic construct
  misc_feature 1..99: note = engineered ribonucleic acid scaffold (ERS) sequence
  source 1..99: mol_type = other DNA
actggcgcttctaatctgattactctgagcgccatcaccagcgactatgtcgtagtgggtaaagcggttacggacttcggtccgtaagacgcatcagag

SEQ ID NO: 6738 - DNA, 97 bp, synthetic construct
  misc_feature 1..97: note = engineered ribonucleic acid scaffold (ERS) sequence
  source 1..97: mol_type = other DNA
actggcgcttctactgattactctgagcgccatcaccagcgactatgtcgtagtgggtaaagcggttacggacttcggtccgtaagacgcatcagag

SEQ ID NO: 6739 - DNA, 98 bp, synthetic construct
  misc_feature 1..98: note = engineered ribonucleic acid scaffold (ERS) sequence
  source 1..98: mol_type = other DNA
actggcgcttctaactgattactctgagcgccatcaccagcgactatgtcgtagtgggtaaagcggttacggacttcggtccgtaagacgcatcagag

SEQ ID NO: 6740 - DNA, 98 bp, synthetic construct
  misc_feature 1..98: note = engineered ribonucleic acid scaffold (ERS) sequence
  source 1..98: mol_type = other DNA
actggcgcttctacctgattactctgagcgccatcaccagcgactatgtcgtagtgggtaaagcggttacggacttcggtccgtaagacgcatcagag

SEQ ID NO: 6741 - DNA, 98 bp, synthetic construct
  misc_feature 1..98: note = engineered ribonucleic acid scaffold (ERS) sequence
  source 1..98: mol_type = other DNA
actggcgcttctagctgattactctgagcgccatcaccagcgactatgtcgtagtgggtaaagcggttacggacttcggtccgtaagacgcatcagag

SEQ ID NO: 6742 - DNA, 100 bp, synthetic construct
  misc_feature 1..100: note = engineered ribonucleic acid scaffold (ERS) sequence
  source 1..100: mol_type = other DNA
actggcgcttctattactgattactctgagcgccatcaccagcgactatgtcgtagtgggtaaagcggttacggacttcggtccgtaagacgcatcagag

SEQ ID NO: 6743 - DNA, 98 bp, synthetic construct
  misc_feature 1..98: note = engineered ribonucleic acid scaffold (ERS) sequence
  source 1..98: mol_type = other DNA
actggcgcttctatatgattactctgagcgccatcaccagcgactatgtcgtagtgggtaaagcggttacggacttcggtccgtaagacgcatcagag

SEQ ID NO: 6744 - DNA, 98 bp, synthetic construct
  misc_feature 1..98: note = engineered ribonucleic acid scaffold (ERS) sequence
  source 1..98: mol_type = other DNA
actggcgcttctatgtgattactctgagcgccatcaccagcgactatgtcgtagtgggtaaagcggttacggacttcggtccgtaagacgcatcagag

SEQ ID NO: 6745 - DNA, 98 bp, synthetic construct
  misc_feature 1..98: note = engineered ribonucleic acid scaffold (ERS) sequence
  source 1..98: mol_type = other DNA
actggcgcttctatttgattactctgagcgccatcaccagcgactatgtcgtagtgggtaaagcggttacggacttcggtccgtaagacgcatcagag

SEQ ID NO: 6746 - DNA, 99 bp, synthetic construct
  misc_feature 1..99: note = engineered ribonucleic acid scaffold (ERS) sequence
  source 1..99: mol_type = other DNA
actggcgcttctatcttgattactctgagcgccatcaccagcgactatgtcgtagtgggtaaagcggttacggacttcggtccgtaagacgcatcagag

SEQ ID NO: 6747 - DNA, 98 bp, synthetic construct
  misc_feature 1..98: note = engineered ribonucleic acid scaffold (ERS) sequence
  source 1..98: mol_type = other DNA
actggcgcttctatcagattactctgagcgccatcaccagcgactatgtcgtagtgggtaaagcggttacggacttcggtccgtaagacgcatcagag

SEQ ID NO: 6748 - DNA, 98 bp, synthetic construct
  misc_feature 1..98: note = engineered ribonucleic acid scaffold (ERS) sequence
  source 1..98: mol_type = other DNA
actggcgcttctatcggattactctgagcgccatcaccagcgactatgtcgtagtgggtaaagcggttacggacttcggtccgtaagacgcatcagag

SEQ ID NO: 6749 - DNA, 99 bp, synthetic construct
  misc_feature 1..99: note = engineered ribonucleic acid scaffold (ERS) sequence
  source 1..99: mol_type = other DNA
actggcgcttctatctgaattactctgagcgccatcaccagcgactatgtcgtagtgggtaaagcggttacggacttcggtccgtaagacgcatcagag

SEQ ID NO: 6750 - DNA, 99 bp, synthetic construct
  misc_feature 1..99: note = engineered ribonucleic acid scaffold (ERS) sequence
  source 1..99: mol_type = other DNA
actggcgcttctatctgtattactctgagcgccatcaccagcgactatgtcgtagtgggtaaagcggttacggacttcggtccgtaagacgcatcagag

SEQ ID NO: 6751 - DNA, 98 bp, synthetic construct
  misc_feature 1..98: note = engineered ribonucleic acid scaffold (ERS) sequence
  source 1..98: mol_type = other DNA
actggcgcttctatctggttactctgagcgccatcaccagcgactatgtcgtagtgggtaaagcggttacggacttcggtccgtaagacgcatcagag

SEQ ID NO: 6752 - DNA, 98 bp, synthetic construct
  misc_feature 1..98: note = engineered ribonucleic acid scaffold (ERS) sequence
  source 1..98: mol_type = other DNA
actggcgcttctatctgtttactctgagcgccatcaccagcgactatgtcgtagtgggtaaagcggttacggacttcggtccgtaagacgcatcagag

SEQ ID NO: 6753 - DNA, 99 bp, synthetic construct
  misc_feature 1..99: note = engineered ribonucleic acid scaffold (ERS) sequence
  source 1..99: mol_type = other DNA
actggcgcttctatctgatttactctgagcgccatcaccagcgactatgtcgtagtgggtaaagcggttacggacttcggtccgtaagacgcatcagag

SEQ ID NO: 6754 - DNA, 98 bp, synthetic construct
  misc_feature 1..98: note = engineered ribonucleic acid scaffold (ERS) sequence
  source 1..98: mol_type = other DNA
actggcgcttctatctgattgctctgagcgccatcaccagcgactatgtcgtagtgggtaaagcggttacggacttcggtccgtaagacgcatcagag

SEQ ID NO: 6755 - DNA, 77 bp, synthetic construct
  misc_feature 1..77: note = engineered ribonucleic acid scaffold (ERS) sequence
  source 1..77: mol_type = other DNA
actggcgcttctatatctgattactctgagcgccatcaccagcgactatgtcgtagtgggtaaagctagcatcagag

SEQ ID NO: 6756 - DNA, 76 bp, synthetic construct
  misc_feature 1..76: note = engineered ribonucleic acid scaffold (ERS) sequence
  source 1..76: mol_type = other DNA
actggcgcttctaatctgattactctgagcgccatcaccagcgactatgtcgtagtgggtaaagctagcatcagag

SEQ ID NO: 6757 - DNA, 74 bp, synthetic construct
  misc_feature 1..74: note = engineered ribonucleic acid scaffold (ERS) sequence
  source 1..74: mol_type = other DNA
actggcgcttctactgattactctgagcgccatcaccagcgactatgtcgtagtgggtaaagctagcatcagag

SEQ ID NO: 6758 - DNA, 75 bp, synthetic construct
  misc_feature 1..75: note = engineered ribonucleic acid scaffold (ERS) sequence
  source 1..75: mol_type = other DNA
actggcgcttctaactgattactctgagcgccatcaccagcgactatgtcgtagtgggtaaagctagcatcagag

SEQ ID NO: 6759 - DNA, 75 bp, synthetic construct
  misc_feature 1..75: note = engineered ribonucleic acid scaffold (ERS) sequence
  source 1..75: mol_type = other DNA
actggcgcttctacctgattactctgagcgccatcaccagcgactatgtcgtagtgggtaaagctagcatcagag

SEQ ID NO: 6760 - DNA, 75 bp, synthetic construct
  misc_feature 1..75: note = engineered ribonucleic acid scaffold (ERS) sequence
  source 1..75: mol_type = other DNA
actggcgcttctagctgattactctgagcgccatcaccagcgactatgtcgtagtgggtaaagctagcatcagag

SEQ ID NO: 6761 - DNA, 77 bp, synthetic construct
  misc_feature 1..77: note = engineered ribonucleic acid scaffold (ERS) sequence
  source 1..77: mol_type = other DNA
actggcgcttctattactgattactctgagcgccatcaccagcgactatgtcgtagtgggtaaagctagcatcagag

SEQ ID NO: 6762 - DNA, 75 bp, synthetic construct
  misc_feature 1..75: note = engineered ribonucleic acid scaffold (ERS) sequence
  source 1..75: mol_type = other DNA
actggcgcttctatatgattactctgagcgccatcaccagcgactatgtcgtagtgggtaaagctagcatcagag

SEQ ID NO: 6763 - DNA, 75 bp, synthetic construct
  misc_feature 1..75: note = engineered ribonucleic acid scaffold (ERS) sequence
  source 1..75: mol_type = other DNA
actggcgcttctatgtgattactctgagcgccatcaccagcgactatgtcgtagtgggtaaagctagcatcagag

SEQ ID NO: 6764 - DNA, 75 bp, synthetic construct
  misc_feature 1..75: note = engineered ribonucleic acid scaffold (ERS) sequence
  source 1..75: mol_type = other DNA
actggcgcttctatttgattactctgagcgccatcaccagcgactatgtcgtagtgggtaaagctagcatcagag

SEQ ID NO: 6765 - DNA, 76 bp, synthetic construct
  misc_feature 1..76: note = engineered ribonucleic acid scaffold (ERS) sequence
  source 1..76: mol_type = other DNA
actggcgcttctatcttgattactctgagcgccatcaccagcgactatgtcgtagtgggtaaagctagcatcagag

SEQ ID NO: 6766 - DNA, 75 bp, synthetic construct
  misc_feature 1..75: note = engineered ribonucleic acid scaffold (ERS) sequence
  source 1..75: mol_type = other DNA
actggcgcttctatcagattactctgagcgccatcaccagcgactatgtcgtagtgggtaaagctagcatcagag

SEQ ID NO: 6767 - DNA, 75 bp, synthetic construct
  misc_feature 1..75: note = engineered ribonucleic acid scaffold (ERS) sequence
  source 1..75: mol_type = other DNA
actggcgcttctatcggattactctgagcgccatcaccagcgactatgtcgtagtgggtaaagctagcatcagag

SEQ ID NO: 6768 - DNA, 76 bp, synthetic construct
  misc_feature 1..76: note = engineered ribonucleic acid scaffold (ERS) sequence
  source 1..76: mol_type = other DNA
actggcgcttctatctgaattactctgagcgccatcaccagcgactatgtcgtagtgggtaaagctagcatcagag

SEQ ID NO: 6769 - DNA, 76 bp, synthetic construct
  misc_feature 1..76: note = engineered ribonucleic acid scaffold (ERS) sequence
  source 1..76: mol_type = other DNA
actggcgcttctatctgtattactctgagcgccatcaccagcgactatgtcgtagtgggtaaagctagcatcagag

SEQ ID NO: 6770 - DNA, 75 bp, synthetic construct
  misc_feature 1..75: note = engineered ribonucleic acid scaffold (ERS) sequence
  source 1..75: mol_type = other DNA
actggcgcttctatctggttactctgagcgccatcaccagcgactatgtcgtagtgggtaaagctagcatcagag

SEQ ID NO: 6771 - DNA, 75 bp, synthetic construct
  misc_feature 1..75: note = engineered ribonucleic acid scaffold (ERS) sequence
  source 1..75: mol_type = other DNA
actggcgcttctatctgtttactctgagcgccatcaccagcgactatgtcgtagtgggtaaagctagcatcagag

SEQ ID NO: 6772 - DNA, 76 bp, synthetic construct
  misc_feature 1..76: note = engineered ribonucleic acid scaffold (ERS) sequence
  source 1..76: mol_type = other DNA
actggcgcttctatctgatttactctgagcgccatcaccagcgactatgtcgtagtgggtaaagctagcatcagag

SEQ ID NO: 6773 - DNA, 75 bp, synthetic construct
  misc_feature 1..75: note = engineered ribonucleic acid scaffold (ERS) sequence
  source 1..75: mol_type = other DNA
actggcgcttctatctgattgctctgagcgccatcaccagcgactatgtcgtagtgggtaaagctagcatcagag

SEQ ID NO: 6774 - DNA, 91 bp, synthetic construct
  misc_feature 1..91: note = engineered ribonucleic acid scaffold (ERS) sequence
  source 1..91: mol_type = other DNA
actggcgcttctatatctgattactctgagcgccatcaccagcgactatgtcgtagtgggtaaagctccctattcggatggagcatcagag

SEQ ID NO: 6775 - DNA, 90 bp, synthetic construct
  misc_feature 1..90: note = engineered ribonucleic acid scaffold (ERS) sequence
  source 1..90: mol_type = other DNA
actggcgcttctaatctgattactctgagcgccatcaccagcgactatgtcgtagtgggtaaagctccctattcggatggagcatcagag

SEQ ID NO: 6776 - DNA, 88 bp, synthetic construct
  misc_feature 1..88: note = engineered ribonucleic acid scaffold (ERS) sequence
  source 1..88: mol_type = other DNA
actggcgcttctactgattactctgagcgccatcaccagcgactatgtcgtagtgggtaaagctccctattcggatggagcatcagag

SEQ ID NO: 6777 - DNA, 89 bp, synthetic construct
  misc_feature 1..89: note = engineered ribonucleic acid scaffold (ERS) sequence
  source 1..89: mol_type = other DNA
actggcgcttctaactgattactctgagcgccatcaccagcgactatgtcgtagtgggtaaagctccctattcggatggagcatcagag

SEQ ID NO: 6778 - DNA, 89 bp, synthetic construct
  misc_feature 1..89: note = engineered ribonucleic acid scaffold (ERS) sequence
  source 1..89: mol_type = other DNA
actggcgcttctacctgattactctgagcgccatcaccagcgactatgtcgtagtgggtaaagctccctattcggatggagcatcagag

SEQ ID NO: 6779 - DNA, 89 bp, synthetic construct
  misc_feature 1..89: note = engineered ribonucleic acid scaffold (ERS) sequence
  source 1..89: mol_type = other DNA
actggcgcttctagctgattactctgagcgccatcaccagcgactatgtcgtagtgggtaaagctccctattcggatggagcatcagag

SEQ ID NO: 6780 - DNA, 91 bp, synthetic construct
  misc_feature 1..91: note = engineered ribonucleic acid scaffold (ERS) sequence
  source 1..91: mol_type = other DNA
actggcgcttctattactgattactctgagcgccatcaccagcgactatgtcgtagtgggtaaagctccctattcggatggagcatcagag

SEQ ID NO: 6781 - DNA, 89 bp, synthetic construct
  misc_feature 1..89: note = engineered ribonucleic acid scaffold (ERS) sequence
  source 1..89: mol_type = other DNA
actggcgcttctatatgattactctgagcgccatcaccagcgactatgtcgtagtgggtaaagctccctattcggatggagcatcagag

SEQ ID NO: 6782 - DNA, 89 bp, synthetic construct
  misc_feature 1..89: note = engineered ribonucleic acid scaffold (ERS) sequence
  source 1..89: mol_type = other DNA
actggcgcttctatgtgattactctgagcgccatcaccagcgactatgtcgtagtgggtaaagctccctattcggatggagcatcagag

SEQ ID NO: 6783 - DNA, 89 bp, synthetic construct
  misc_feature 1..89: note = engineered ribonucleic acid scaffold (ERS) sequence
  source 1..89: mol_type = other DNA
actggcgcttctatttgattactctgagcgccatcaccagcgactatgtcgtagtgggtaaagctccctattcggatggagcatcagag

SEQ ID NO: 6784 - DNA, 90 bp, synthetic construct
  misc_feature 1..90: note = engineered ribonucleic acid scaffold (ERS) sequence
  source 1..90: mol_type = other DNA
actggcgcttctatcttgattactctgagcgccatcaccagcgactatgtcgtagtgggtaaagctccctattcggatggagcatcagag

SEQ ID NO: 6785 - DNA, 89 bp, synthetic construct
  misc_feature 1..89: note = engineered ribonucleic acid scaffold (ERS) sequence
  source 1..89: mol_type = other DNA
actggcgcttctatcagattactctgagcgccatcaccagcgactatgtcgtagtgggtaaagctccctattcggatggagcatcagag

SEQ ID NO: 6786 - DNA, 89 bp, synthetic construct
  misc_feature 1..89: note = engineered ribonucleic acid scaffold (ERS) sequence
  source 1..89: mol_type = other DNA
actggcgcttctatcggattactctgagcgccatcaccagcgactatgtcgtagtgggtaaagctccctattcggatggagcatcagag

SEQ ID NO: 6787 - DNA, 90 bp, synthetic construct
  misc_feature 1..90: note = engineered ribonucleic acid scaffold (ERS) sequence
  source 1..90: mol_type = other DNA
actggcgcttctatctgaattactctgagcgccatcaccagcgactatgtcgtagtgggtaaagctccctattcggatggagcatcagag

SEQ ID NO: 6788 - DNA, 90 bp, synthetic construct
  misc_feature 1..90: note = engineered ribonucleic acid scaffold (ERS) sequence
  source 1..90: mol_type = other DNA
actggcgcttctatctgtattactctgagcgccatcaccagcgactatgtcgtagtgggtaaagctccctattcggatggagcatcagag

SEQ ID NO: 6789 - DNA, 89 bp, synthetic construct
  misc_feature 1..89: note = engineered ribonucleic acid scaffold (ERS) sequence
  source 1..89: mol_type = other DNA
actggcgcttctatctggttactctgagcgccatcaccagcgactatgtcgtagtgggtaaagctccctattcggatggagcatcagag

SEQ ID NO: 6790 - DNA, 89 bp, synthetic construct
  misc_feature 1..89: note = engineered ribonucleic acid scaffold (ERS) sequence
  source 1..89: mol_type = other DNA
actggcgcttctatctgtttactctgagcgccatcaccagcgactatgtcgtagtgggtaaagctccctattcggatggagcatcagag

SEQ ID NO: 6791 - DNA, 90 bp, synthetic construct
  misc_feature 1..90: note = engineered ribonucleic acid scaffold (ERS) sequence
  source 1..90: mol_type = other DNA
actggcgcttctatctgatttactctgagcgccatcaccagcgactatgtcgtagtgggtaaagctccctattcggatggagcatcagag

SEQ ID NO: 6792 - DNA, 89 bp, synthetic construct
  misc_feature 1..89: note = engineered ribonucleic acid scaffold (ERS) sequence
  source 1..89: mol_type = other DNA
actggcgcttctatctgattgctctgagcgccatcaccagcgactatgtcgtagtgggtaaagctccctattcggatggagcatcagag

SEQ ID NO: 6793 - DNA, 97 bp, synthetic construct
  misc_feature 1..97: note = engineered ribonucleic acid scaffold (ERS) sequence
  source 1..97: mol_type = other DNA
actggcgcttctatatctgattactctgagcgccatcaccagcgactatgtcgtagtgggtaaagctccctcacagggatgtgagggagcatcagag

SEQ ID NO: 6794 - DNA, 96 bp, synthetic construct
  misc_feature 1..96: note = engineered ribonucleic acid scaffold (ERS) sequence
  source 1..96: mol_type = other DNA
actggcgcttctaatctgattactctgagcgccatcaccagcgactatgtcgtagtgggtaaagctccctcacagggatgtgagggagcatcagag

SEQ ID NO: 6795 - DNA, 94 bp, synthetic construct
  misc_feature 1..94: note = engineered ribonucleic acid scaffold (ERS) sequence
  source 1..94: mol_type = other DNA
actggcgcttctactgattactctgagcgccatcaccagcgactatgtcgtagtgggtaaagctccctcacagggatgtgagggagcatcagag

SEQ ID NO: 6796 - DNA, 95 bp, synthetic construct
  misc_feature 1..95: note = engineered ribonucleic acid scaffold (ERS) sequence
  source 1..95: mol_type = other DNA
actggcgcttctaactgattactctgagcgccatcaccagcgactatgtcgtagtgggtaaagctccctcacagggatgtgagggagcatcagag

SEQ ID NO: 6797 - DNA, 95 bp, synthetic construct
  misc_feature 1..95: note = engineered ribonucleic acid scaffold (ERS) sequence
  source 1..95: mol_type = other DNA
actggcgcttctacctgattactctgagcgccatcaccagcgactatgtcgtagtgggtaaagctccctcacagggatgtgagggagcatcagag

SEQ ID NO: 6798 - DNA, 95 bp, synthetic construct
  misc_feature 1..95: note = engineered ribonucleic acid scaffold (ERS) sequence
  source 1..95: mol_type = other DNA
actggcgcttctagctgattactctgagcgccatcaccagcgactatgtcgtagtgggtaaagctccctcacagggatgtgagggagcatcagag

SEQ ID NO: 6799 - DNA, 97 bp, synthetic construct
  misc_feature 1..97: note = engineered ribonucleic acid scaffold (ERS) sequence
  source 1..97: mol_type = other DNA
actggcgcttctattactgattactctgagcgccatcaccagcgactatgtcgtagtgggtaaagctccctcacagggatgtgagggagcatcagag

SEQ ID NO: 6800 - DNA, 95 bp, synthetic construct
  misc_feature 1..95: note = engineered ribonucleic acid scaffold (ERS) sequence
  source 1..95: mol_type = other DNA
actggcgcttctatatgattactctgagcgccatcaccagcgactatgtcgtagtgggtaaagctccctcacagggatgtgagggagcatcagag

SEQ ID NO: 6801 - DNA, 95 bp, synthetic construct
  misc_feature 1..95: note = engineered ribonucleic acid scaffold (ERS) sequence
  source 1..95: mol_type = other DNA
actggcgcttctatgtgattactctgagcgccatcaccagcgactatgtcgtagtgggtaaagctccctcacagggatgtgagggagcatcagag

SEQ ID NO: 6802 - DNA, 95 bp, synthetic construct
  misc_feature 1..95: note = engineered ribonucleic acid scaffold (ERS) sequence
  source 1..95: mol_type = other DNA
actggcgcttctatttgattactctgagcgccatcaccagcgactatgtcgtagtgggtaaagctccctcacagggatgtgagggagcatcagag

SEQ ID NO: 6803 - DNA, 96 bp, synthetic construct
  misc_feature 1..96: note = engineered ribonucleic acid scaffold (ERS) sequence
  source 1..96: mol_type = other DNA
actggcgcttctatcttgattactctgagcgccatcaccagcgactatgtcgtagtgggtaaagctccctcacagggatgtgagggagcatcagag

SEQ ID NO: 6804 - DNA, 95 bp, synthetic construct
  misc_feature 1..95: note = engineered ribonucleic acid scaffold (ERS) sequence
  source 1..95: mol_type = other DNA
actggcgcttctatcagattactctgagcgccatcaccagcgactatgtcgtagtgggtaaagctccctcacagggatgtgagggagcatcagag

SEQ ID NO: 6805 - DNA, 95 bp, synthetic construct
  misc_feature 1..95: note = engineered ribonucleic acid scaffold (ERS) sequence
  source 1..95: mol_type = other DNA
actggcgcttctatcggattactctgagcgccatcaccagcgactatgtcgtagtgggtaaagctccctcacagggatgtgagggagcatcagag

SEQ ID NO: 6806 - DNA, 96 bp, synthetic construct
  misc_feature 1..96: note = engineered ribonucleic acid scaffold (ERS) sequence
  source 1..96: mol_type = other DNA
actggcgcttctatctgaattactctgagcgccatcaccagcgactatgtcgtagtgggtaaagctccctcacagggatgtgagggagcatcagag

SEQ ID NO: 6807 - DNA, 96 bp, synthetic construct
  misc_feature 1..96: note = engineered ribonucleic acid scaffold (ERS) sequence
  source 1..96: mol_type = other DNA
actggcgcttctatctgtattactctgagcgccatcaccagcgactatgtcgtagtgggtaaagctccctcacagggatgtgagggagcatcagag

SEQ ID NO: 6808 - DNA, 95 bp, synthetic construct
  misc_feature 1..95: note = engineered ribonucleic acid scaffold (ERS) sequence
  source 1..95: mol_type = other DNA
actggcgcttctatctggttactctgagcgccatcaccagcgactatgtcgtagtgggtaaagctccctcacagggatgtgagggagcatcagag

SEQ ID NO: 6809 - DNA, 95 bp, synthetic construct
  misc_feature 1..95: note = engineered ribonucleic acid scaffold (ERS) sequence
  source 1..95: mol_type = other DNA
actggcgcttctatctgtttactctgagcgccatcaccagcgactatgtcgtagtgggtaaagctccctcacagggatgtgagggagcatcagag

SEQ ID NO: 6810 - DNA, 96 bp, synthetic construct
  misc_feature 1..96: note = engineered ribonucleic acid scaffold (ERS) sequence
  source 1..96: mol_type = other DNA
actggcgcttctatctgatttactctgagcgccatcaccagcgactatgtcgtagtgggtaaagctccctcacagggatgtgagggagcatcagag

SEQ ID NO: 6811 - DNA, 95 bp, synthetic construct
  misc_feature 1..95: note = engineered ribonucleic acid scaffold (ERS) sequence
  source 1..95: mol_type = other DNA
actggcgcttctatctgattgctctgagcgccatcaccagcgactatgtcgtagtgggtaaagctccctcacagggatgtgagggagcatcagag

SEQ ID NO: 6812 - DNA, 96 bp, synthetic construct
  misc_feature 1..96: note = engineered ribonucleic acid scaffold (ERS) sequence
  source 1..96: mol_type = other DNA
actggcgcttctatatctgattactctgagcgccatcaccagcgactatgtcgtagtgggtaaagctccctcagctgcagtgagggagcatcagag

SEQ ID NO: 6813 - DNA, 95 bp, synthetic construct
  misc_feature 1..95: note = engineered ribonucleic acid scaffold (ERS) sequence
  source 1..95: mol_type = other DNA
actggcgcttctaatctgattactctgagcgccatcaccagcgactatgtcgtagtgggtaaagctccctcagctgcagtgagggagcatcagag

SEQ ID NO: 6814 - DNA, 93 bp, synthetic construct
  misc_feature 1..93: note = engineered ribonucleic acid scaffold (ERS) sequence
  source 1..93: mol_type = other DNA
actggcgcttctactgattactctgagcgccatcaccagcgactatgtcgtagtgggtaaagctccctcagctgcagtgagggagcatcagag

SEQ ID NO: 6815 - DNA, 94 bp, synthetic construct
  misc_feature 1..94: note = engineered ribonucleic acid scaffold (ERS) sequence
  source 1..94: mol_type = other DNA
actggcgcttctaactgattactctgagcgccatcaccagcgactatgtcgtagtgggtaaagctccctcagctgcagtgagggagcatcagag

SEQ ID NO: 6816 - DNA, 94 bp, synthetic construct
  misc_feature 1..94: note = engineered ribonucleic acid scaffold (ERS) sequence
  source 1..94: mol_type = other DNA
actggcgcttctacctgattactctgagcgccatcaccagcgactatgtcgtagtgggtaaagctccctcagctgcagtgagggagcatcagag

SEQ ID NO: 6817 - DNA, 94 bp, synthetic construct
  misc_feature 1..94: note = engineered ribonucleic acid scaffold (ERS) sequence
  source 1..94: mol_type = other DNA
actggcgcttctagctgattactctgagcgccatcaccagcgactatgtcgtagtgggtaaagctccctcagctgcagtgagggagcatcagag

SEQ ID NO: 6818 - DNA, 96 bp, synthetic construct
  misc_feature 1..96: note = engineered ribonucleic acid scaffold (ERS) sequence
  source 1..96: mol_type = other DNA
actggcgcttctattactgattactctgagcgccatcaccagcgactatgtcgtagtgggtaaagctccctcagctgcagtgagggagcatcagag

SEQ ID NO: 6819 - DNA, 94 bp, synthetic construct
  misc_feature 1..94: note = engineered ribonucleic acid scaffold (ERS) sequence
  source 1..94: mol_type = other DNA
actggcgcttctatatgattactctgagcgccatcaccagcgactatgtcgtagtgggtaaagctccctcagctgcagtgagggagcatcagag

SEQ ID NO: 6820 - DNA, 94 bp, synthetic construct
  misc_feature 1..94: note = engineered ribonucleic acid scaffold (ERS) sequence
  source 1..94: mol_type = other DNA
actggcgcttctatgtgattactctgagcgccatcaccagcgactatgtcgtagtgggtaaagctccctcagctgcagtgagggagcatcagag

SEQ ID NO: 6821 - DNA, 94 bp, synthetic construct
  misc_feature 1..94: note = engineered ribonucleic acid scaffold (ERS) sequence
  source 1..94: mol_type = other DNA
actggcgcttctatttgattactctgagcgccatcaccagcgactatgtcgtagtgggtaaagctccctcagctgcagtgagggagcatcagag

SEQ ID NO: 6822 - DNA, 95 bp, synthetic construct
  misc_feature 1..95: note = engineered ribonucleic acid scaffold (ERS) sequence
  source 1..95: mol_type = other DNA
actggcgcttctatcttgattactctgagcgccatcaccagcgactatgtcgtagtgggtaaagctccctcagctgcagtgagggagcatcagag

SEQ ID NO: 6823 - DNA, 94 bp, synthetic construct
  misc_feature 1..94: note = engineered ribonucleic acid scaffold (ERS) sequence
  source 1..94: mol_type = other DNA
actggcgcttctatcagattactctgagcgccatcaccagcgactatgtcgtagtgggtaaagctccctcagctgcagtgagggagcatcagag

SEQ ID NO: 6824 - DNA, 94 bp, synthetic construct
  misc_feature 1..94: note = engineered ribonucleic acid scaffold (ERS) sequence
  source 1..94: mol_type = other DNA
actggcgcttctatcggattactctgagcgccatcaccagcgactatgtcgtagtgggtaaagctccctcagctgcagtgagggagcatcagag

SEQ ID NO: 6825 - DNA, 95 bp, synthetic construct
  misc_feature 1..95: note = engineered ribonucleic acid scaffold (ERS) sequence
  source 1..95: mol_type = other DNA
actggcgcttctatctgaattactctgagcgccatcaccagcgactatgtcgtagtgggtaaagctccctcagctgcagtgagggagcatcagag

SEQ ID NO: 6826 - DNA, 95 bp, synthetic construct
  misc_feature 1..95: note = engineered ribonucleic acid scaffold (ERS) sequence
  source 1..95: mol_type = other DNA
actggcgcttctatctgtattactctgagcgccatcaccagcgactatgtcgtagtgggtaaagctccctcagctgcagtgagggagcatcagag

SEQ ID NO: 6827 - DNA, 94 bp, synthetic construct
  misc_feature 1..94: note = engineered ribonucleic acid scaffold (ERS) sequence
  source 1..94: mol_type = other DNA
actggcgcttctatctggttactctgagcgccatcaccagcgactatgtcgtagtgggtaaagctccctcagctgcagtgagggagcatcagag

SEQ ID NO: 6828 - DNA, 94 bp, synthetic construct
  misc_feature 1..94: note = engineered ribonucleic acid scaffold (ERS) sequence
  source 1..94: mol_type = other DNA
actggcgcttctatctgtttactctgagcgccatcaccagcgactatgtcgtagtgggtaaagctccctcagctgcagtgagggagcatcagag

SEQ ID NO: 6829 - DNA, 95 bp, synthetic construct
  misc_feature 1..95: note = engineered ribonucleic acid scaffold (ERS) sequence
  source 1..95: mol_type = other DNA
actggcgcttctatctgatttactctgagcgccatcaccagcgactatgtcgtagtgggtaaagctccctcagctgcagtgagggagcatcagag

SEQ ID NO: 6830 - DNA, 94 bp, synthetic construct
  misc_feature 1..94: note = engineered ribonucleic acid scaffold (ERS) sequence
  source 1..94: mol_type = other DNA
actggcgcttctatctgattgctctgagcgccatcaccagcgactatgtcgtagtgggtaaagctccctcagctgcagtgagggagcatcagag

SEQ ID NO: 6831 - DNA, 91 bp, synthetic construct
  misc_feature 1..91: note = engineered ribonucleic acid scaffold (ERS) sequence
  source 1..91: mol_type = other DNA
actggcgcttctatatctgattactctgagcgccatcaccagcgactatgtcgtagtgggtaaagctccctcataggagggagcatcagag

SEQ ID NO: 6832 - DNA, 90 bp, synthetic construct
  misc_feature 1..90: note = engineered ribonucleic acid scaffold (ERS) sequence
  source 1..90: mol_type = other DNA
actggcgcttctaatctgattactctgagcgccatcaccagcgactatgtcgtagtgggtaaagctccctcataggagggagcatcagag

SEQ ID NO: 6833 - DNA, 88 bp, synthetic construct
  misc_feature 1..88: note = engineered ribonucleic acid scaffold (ERS) sequence
  source 1..88: mol_type = other DNA
actggcgcttctactgattactctgagcgccatcaccagcgactatgtcgtagtgggtaaagctccctcataggagggagcatcagag

SEQ ID NO: 6834 - DNA, 89 bp, synthetic construct
  misc_feature 1..89: note = engineered ribonucleic acid scaffold (ERS) sequence
  source 1..89: mol_type = other DNA
actggcgcttctaactgattactctgagcgccatcaccagcgactatgtcgtagtgggtaaagctccctcataggagggagcatcagag

SEQ ID NO: 6835 - DNA, 89 bp, synthetic construct
  misc_feature 1..89: note = engineered ribonucleic acid scaffold (ERS) sequence
  source 1..89: mol_type = other DNA
actggcgcttctacctgattactctgagcgccatcaccagcgactatgtcgtagtgggtaaagctccctcataggagggagcatcagag

SEQ ID NO: 6836 - DNA, 89 bp, synthetic construct
  misc_feature 1..89: note = engineered ribonucleic acid scaffold (ERS) sequence
  source 1..89: mol_type = other DNA
actggcgcttctagctgattactctgagcgccatcaccagcgactatgtcgtagtgggtaaagctccctcataggagggagcatcagag

SEQ ID NO: 6837 - DNA, 91 bp, synthetic construct
  misc_feature 1..91: note = engineered ribonucleic acid scaffold (ERS) sequence
  source 1..91: mol_type = other DNA
actggcgcttctattactgattactctgagcgccatcaccagcgactatgtcgtagtgggtaaagctccctcataggagggagcatcagag

SEQ ID NO: 6838 - DNA, 89 bp, synthetic construct
  misc_feature 1..89: note = engineered ribonucleic acid scaffold (ERS) sequence
  source 1..89: mol_type = other DNA
actggcgcttctatatgattactctgagcgccatcaccagcgactatgtcgtagtgggtaaagctccctcataggagggagcatcagag

SEQ ID NO: 6839 - DNA, 89 bp, synthetic construct
  misc_feature 1..89: note = engineered ribonucleic acid scaffold (ERS) sequence
  source 1..89: mol_type = other DNA
actggcgcttctatgtgattactctgagcgccatcaccagcgactatgtcgtagtgggtaaagctccctcataggagggagcatcagag

SEQ ID NO: 6840 - DNA, 89 bp, synthetic construct
  misc_feature 1..89: note = engineered ribonucleic acid scaffold (ERS) sequence
  source 1..89: mol_type = other DNA
actggcgcttctatttgattactctgagcgccatcaccagcgactatgtcgtagtgggtaaagctccctcataggagggagcatcagag

SEQ ID NO: 6841 - DNA, 90 bp, synthetic construct
  misc_feature 1..90: note = engineered ribonucleic acid scaffold (ERS) sequence
  source 1..90: mol_type = other DNA
actggcgcttctatcttgattactctgagcgccatcaccagcgactatgtcgtagtgggtaaagctccctcataggagggagcatcagag

SEQ ID NO: 6842 - DNA, 89 bp, synthetic construct
  misc_feature 1..89: note = engineered ribonucleic acid scaffold (ERS) sequence
  source 1..89: mol_type = other DNA
actggcgcttctatcagattactctgagcgccatcaccagcgactatgtcgtagtgggtaaagctccctcataggagggagcatcagag

SEQ ID NO: 6843 - DNA, 89 bp, synthetic construct
  misc_feature 1..89: note = engineered ribonucleic acid scaffold (ERS) sequence
  source 1..89: mol_type = other DNA
actggcgcttctatcggattactctgagcgccatcaccagcgactatgtcgtagtgggtaaagctccctcataggagggagcatcagag

SEQ ID NO: 6844 - DNA, 90 bp, synthetic construct
  misc_feature 1..90: note = engineered ribonucleic acid scaffold (ERS) sequence
  source 1..90: mol_type = other DNA
actggcgcttctatctgaattactctgagcgccatcaccagcgactatgtcgtagtgggtaaagctccctcataggagggagcatcagag

SEQ ID NO: 6845 - DNA, 90 bp, synthetic construct
  misc_feature 1..90: note = engineered ribonucleic acid scaffold (ERS) sequence
  source 1..90: mol_type = other DNA
actggcgcttctatctgtattactctgagcgccatcaccagcgactatgtcgtagtgggtaaagctccctcataggagggagcatcagag

SEQ ID NO: 6846 - DNA, 89 bp, synthetic construct
  misc_feature 1..89: note = engineered ribonucleic acid scaffold (ERS) sequence
  source 1..89: mol_type = other DNA
actggcgcttctatctggttactctgagcgccatcaccagcgactatgtcgtagtgggtaaagctccctcataggagggagcatcagag

SEQ ID NO: 6847 - DNA, 89 bp, synthetic construct
  misc_feature 1..89: note = engineered ribonucleic acid scaffold (ERS) sequence
  source 1..89: mol_type = other DNA
actggcgcttctatctgtttactctgagcgccatcaccagcgactatgtcgtagtgggtaaagctccctcataggagggagcatcagag

SEQ ID NO: 6848 - DNA, 90 bp, synthetic construct
  misc_feature 1..90: note = engineered ribonucleic acid scaffold (ERS) sequence
  source 1..90: mol_type = other DNA
actggcgcttctatctgatttactctgagcgccatcaccagcgactatgtcgtagtgggtaaagctccctcataggagggagcatcagag

SEQ ID NO: 6849 - DNA, 89 bp, synthetic construct
  misc_feature 1..89: note = engineered ribonucleic acid scaffold (ERS) sequence
  source 1..89: mol_type = other DNA
actggcgcttctatctgattgctctgagcgccatcaccagcgactatgtcgtagtgggtaaagctccctcataggagggagcatcagag

SEQ ID NO: 6850 - DNA, 92 bp, synthetic construct
  misc_feature 1..92: note = engineered ribonucleic acid scaffold (ERS) sequence
  source 1..92: mol_type = other DNA
actggcgcttctatatctgattactctgagcgccatcaccagcgactatgtcgtagtgggtaaagctccctcttcaggagggagcatcagag

SEQ ID NO: 6851 - DNA, 91 bp, synthetic construct
  misc_feature 1..91: note = engineered ribonucleic acid scaffold (ERS) sequence
  source 1..91: mol_type = other DNA
actggcgcttctaatctgattactctgagcgccatcaccagcgactatgtcgtagtgggtaaagctccctcttcaggagggagcatcagag

SEQ ID NO: 6852 - DNA, 89 bp, synthetic construct
  misc_feature 1..89: note = engineered ribonucleic acid scaffold (ERS) sequence
  source 1..89: mol_type = other DNA
actggcgcttctactgattactctgagcgccatcaccagcgactatgtcgtagtgggtaaagctccctcttcaggagggagcatcagag

SEQ ID NO: 6853 - DNA, 90 bp, synthetic construct
  misc_feature 1..90: note = engineered ribonucleic acid scaffold (ERS) sequence
  source 1..90: mol_type = other DNA
actggcgcttctaactgattactctgagcgccatcaccagcgactatgtcgtagtgggtaaagctccctcttcaggagggagcatcagag

SEQ ID NO: 6854 - DNA, 90 bp, synthetic construct
  misc_feature 1..90: note = engineered ribonucleic acid scaffold (ERS) sequence
  source 1..90: mol_type = other DNA
actggcgcttctacctgattactctgagcgccatcaccagcgactatgtcgtagtgggtaaagctccctcttcaggagggagcatcagag

SEQ ID NO: 6855 - DNA, 90 bp, synthetic construct
  misc_feature 1..90: note = engineered ribonucleic acid scaffold (ERS) sequence
  source 1..90: mol_type = other DNA
actggcgcttctagctgattactctgagcgccatcaccagcgactatgtcgtagtgggtaaagctccctcttcaggagggagcatcagag

SEQ ID NO: 6856 - DNA, 92 bp, synthetic construct
  misc_feature 1..92: note = engineered ribonucleic acid scaffold (ERS) sequence
  source 1..92: mol_type = other DNA
actggcgcttctattactgattactctgagcgccatcaccagcgactatgtcgtagtgggtaaagctccctcttcaggagggagcatcagag

SEQ ID NO: 6857 - DNA, 90 bp, synthetic construct
  misc_feature 1..90: note = engineered ribonucleic acid scaffold (ERS) sequence
  source 1..90: mol_type = other DNA
actggcgcttctatatgattactctgagcgccatcaccagcgactatgtcgtagtgggtaaagctccctcttcaggagggagcatcagag

SEQ ID NO: 6858 - DNA, 90 bp, synthetic construct
  misc_feature 1..90: note = engineered ribonucleic acid scaffold (ERS) sequence
  source 1..90: mol_type = other DNA
actggcgcttctatgtgattactctgagcgccatcaccagcgactatgtcgtagtgggtaaagctccctcttcaggagggagcatcagag

SEQ ID NO: 6859 - DNA, 90 bp, synthetic construct
  misc_feature 1..90: note = engineered ribonucleic acid scaffold (ERS) sequence
  source 1..90: mol_type = other DNA
actggcgcttctatttgattactctgagcgccatcaccagcgactatgtcgtagtgggtaaagctccctcttcaggagggagcatcagag

SEQ ID NO: 6860 - DNA, 91 bp, synthetic construct
  misc_feature 1..91: note = engineered ribonucleic acid scaffold (ERS) sequence
  source 1..91: mol_type = other DNA
actggcgcttctatcttgattactctgagcgccatcaccagcgactatgtcgtagtgggtaaagctccctcttcaggagggagcatcagag

SEQ ID NO: 6861 - DNA, 90 bp, synthetic construct
  misc_feature 1..90: note = engineered ribonucleic acid scaffold (ERS) sequence
  source 1..90: mol_type = other DNA
actggcgcttctatcagattactctgagcgccatcaccagcgactatgtcgtagtgggtaaagctccctcttcaggagggagcatcagag

SEQ ID NO: 6862 - DNA, 90 bp, synthetic construct
  misc_feature 1..90: note = engineered ribonucleic acid scaffold (ERS) sequence
  source 1..90: mol_type = other DNA
actggcgcttctatcggattactctgagcgccatcaccagcgactatgtcgtagtgggtaaagctccctcttcaggagggagcatcagag

SEQ ID NO: 6863 - DNA, 91 bp, synthetic construct
  misc_feature 1..91: note = engineered ribonucleic acid scaffold (ERS) sequence
  source 1..91: mol_type = other DNA
actggcgcttctatctgaattactctgagcgccatcaccagcgactatgtcgtagtgggtaaagctccctcttcaggagggagcatcagag

SEQ ID NO: 6864 - DNA, 91 bp, synthetic construct
  misc_feature 1..91: note = engineered ribonucleic acid scaffold (ERS) sequence
  source 1..91: mol_type = other DNA
actggcgcttctatctgtattactctgagcgccatcaccagcgactatgtcgtagtgggtaaagctccctcttcaggagggagcatcagag

SEQ ID NO: 6865 - DNA, 90 bp, synthetic construct
  misc_feature 1..90: note = engineered ribonucleic acid scaffold (ERS) sequence
  source 1..90: mol_type = other DNA
actggcgcttctatctggttactctgagcgccatcaccagcgactatgtcgtagtgggtaaagctccctcttcaggagggagcatcagag

SEQ ID NO: 6866 - DNA, 90 bp, synthetic construct
  misc_feature 1..90: note = engineered ribonucleic acid scaffold (ERS) sequence
  source 1..90: mol_type = other DNA
actggcgcttctatctgtttactctgagcgccatcaccagcgactatgtcgtagtgggtaaagctccctcttcaggagggagcatcagag

SEQ ID NO: 6867 - DNA, 91 bp, synthetic construct
  misc_feature 1..91: note = engineered ribonucleic acid scaffold (ERS) sequence
  source 1..91: mol_type = other DNA
actggcgcttctatctgatttactctgagcgccatcaccagcgactatgtcgtagtgggtaaagctccctcttcaggagggagcatcagag

SEQ ID NO: 6868 - DNA, 90 bp, synthetic construct
  misc_feature 1..90: note = engineered ribonucleic acid scaffold (ERS) sequence
  source 1..90: mol_type = other DNA
actggcgcttctatctgattgctctgagcgccatcaccagcgactatgtcgtagtgggtaaagctccctcttcaggagggagcatcagag

SEQ ID NO: 6869 - DNA, 91 bp, synthetic construct
  misc_feature 1..91: note = engineered ribonucleic acid scaffold (ERS) sequence
  source 1..91: mol_type = other DNA
actggcgcttctatatctgattactctgagcgccatcaccagcgactatgtcgtagtgggtaaagctccctcttcggagagtgcatcagag

SEQ ID NO: 6870 - DNA, 90 bp, synthetic construct
  misc_feature 1..90: note = engineered ribonucleic acid scaffold (ERS) sequence
  source 1..90: mol_type = other DNA
actggcgcttctaatctgattactctgagcgccatcaccagcgactatgtcgtagtgggtaaagctccctcttcggagagtgcatcagag

SEQ ID NO: 6871 - DNA, 88 bp, synthetic construct
  misc_feature 1..88: note = engineered ribonucleic acid scaffold (ERS) sequence
  source 1..88: mol_type = other DNA
actggcgcttctactgattactctgagcgccatcaccagcgactatgtcgtagtgggtaaagctccctcttcggagagtgcatcagag

SEQ ID NO: 6872 - DNA, 89 bp, synthetic construct
  misc_feature 1..89: note = engineered ribonucleic acid scaffold (ERS) sequence
  source 1..89: mol_type = other DNA
actggcgcttctaactgattactctgagcgccatcaccagcgactatgtcgtagtgggtaaagctccctcttcggagagtgcatcagag

SEQ ID NO: 6873 - DNA, 89 bp, synthetic construct
  misc_feature 1..89: note = engineered ribonucleic acid scaffold (ERS) sequence
  source 1..89: mol_type = other DNA
actggcgcttctacctgattactctgagcgccatcaccagcgactatgtcgtagtgggtaaagctccctcttcggagagtgcatcagag

SEQ ID NO: 6874 - DNA, 89 bp, synthetic construct
  misc_feature 1..89: note = engineered ribonucleic acid scaffold (ERS) sequence
  source 1..89: mol_type = other DNA
actggcgcttctagctgattactctgagcgccatcaccagcgactatgtcgtagtgggtaaagctccctcttcggagagtgcatcagag

SEQ ID NO: 6875 - DNA, 91 bp, synthetic construct
  misc_feature 1..91: note = engineered ribonucleic acid scaffold (ERS) sequence
  source 1..91: mol_type = other DNA
actggcgcttctattactgattactctgagcgccatcaccagcgactatgtcgtagtgggtaaagctccctcttcggagagtgcatcagag

SEQ ID NO: 6876 - DNA, 89 bp, synthetic construct
  misc_feature 1..89: note = engineered ribonucleic acid scaffold (ERS) sequence
  source 1..89: mol_type = other DNA
actggcgcttctatatgattactctgagcgccatcaccagcgactatgtcgtagtgggtaaagctccctcttcggagagtgcatcagag

SEQ ID NO: 6877 - DNA, 89 bp, synthetic construct
  misc_feature 1..89: note = engineered ribonucleic acid scaffold (ERS) sequence
  source 1..89: mol_type = other DNA
actggcgcttctatgtgattactctgagcgccatcaccagcgactatgtcgtagtgggtaaagctccctcttcggagagtgcatcagag

SEQ ID NO: 6878 - DNA, 89 bp, synthetic construct
  misc_feature 1..89: note = engineered ribonucleic acid scaffold (ERS) sequence
  source 1..89: mol_type = other DNA
actggcgcttctatttgattactctgagcgccatcaccagcgactatgtcgtagtgggtaaagctccctcttcggagagtgcatcagag

SEQ ID NO: 6879 - DNA, 90 bp, synthetic construct
  misc_feature 1..90: note = engineered ribonucleic acid scaffold (ERS) sequence
  source 1..90: mol_type = other DNA
actggcgcttctatcttgattactctgagcgccatcaccagcgactatgtcgtagtgggtaaagctccctcttcggagagtgcatcagag

SEQ ID NO: 6880 - DNA, 89 bp, synthetic construct
  misc_feature 1..89: note = engineered ribonucleic acid scaffold (ERS) sequence
  source 1..89: mol_type = other DNA
actggcgcttctatcagattactctgagcgccatcaccagcgactatgtcgtagtgggtaaagctccctcttcggagagtgcatcagag

SEQ ID NO: 6881 - DNA, 89 bp, synthetic construct
  misc_feature 1..89: note = engineered ribonucleic acid scaffold (ERS) sequence
  source 1..89: mol_type = other DNA
actggcgcttctatcggattactctgagcgccatcaccagcgactatgtcgtagtgggtaaagctccctcttcggagagtgcatcagag

SEQ ID NO: 6882 - DNA, 90 bp, synthetic construct
  misc_feature 1..90: note = engineered ribonucleic acid scaffold (ERS) sequence
  source 1..90: mol_type = other DNA
actggcgcttctatctgaattactctgagcgccatcaccagcgactatgtcgtagtgggtaaagctccctcttcggagagtgcatcagag

SEQ ID NO: 6883 - DNA, 90 bp, synthetic construct
  misc_feature 1..90: note = engineered ribonucleic acid scaffold (ERS) sequence
  source 1..90: mol_type = other DNA
actggcgcttctatctgtattactctgagcgccatcaccagcgactatgtcgtagtgggtaaagctccctcttcggagagtgcatcagag

SEQ ID NO: 6884 - DNA, 89 bp, synthetic construct
  misc_feature 1..89: note = engineered ribonucleic acid scaffold (ERS) sequence
  source 1..89: mol_type = other DNA
actggcgcttctatctggttactctgagcgccatcaccagcgactatgtcgtagtgggtaaagctccctcttcggagagtgcatcagag

SEQ ID NO: 6885 - DNA, 89 bp, synthetic construct
  misc_feature 1..89: note = engineered ribonucleic acid scaffold (ERS) sequence
  source 1..89: mol_type = other DNA
actggcgcttctatctgtttactctgagcgccatcaccagcgactatgtcgtagtgggtaaagctccctcttcggagagtgcatcagag

SEQ ID NO: 6886 - DNA, 90 bp, synthetic construct
  misc_feature 1..90: note = engineered ribonucleic acid scaffold (ERS) sequence
  source 1..90: mol_type = other DNA
actggcgcttctatctgatttactctgagcgccatcaccagcgactatgtcgtagtgggtaaagctccctcttcggagagtgcatcagag

SEQ ID NO: 6887 - DNA, 89 bp, synthetic construct
  misc_feature 1..89: note = engineered ribonucleic acid scaffold (ERS) sequence
  source 1..89: mol_type = other DNA
actggcgcttctatctgattgctctgagcgccatcaccagcgactatgtcgtagtgggtaaagctccctcttcggagagtgcatcagag

SEQ ID NO: 6888 - DNA, 91 bp, synthetic construct
  misc_feature 1..91: note = engineered ribonucleic acid scaffold (ERS) sequence
  source 1..91: mol_type = other DNA
actggcgcttctatatctgattactctgagcgccatcaccagcgactatgtcgtagtgggtaaagctccctcttcggaggaggcatcagag

SEQ ID NO: 6889 - DNA, 90 bp, synthetic construct
  misc_feature 1..90: note = engineered ribonucleic acid scaffold (ERS) sequence
  source 1..90: mol_type = other DNA
actggcgcttctaatctgattactctgagcgccatcaccagcgactatgtcgtagtgggtaaagctccctcttcggaggaggcatcagag

SEQ ID NO: 6890 - DNA, 88 bp, synthetic construct
  misc_feature 1..88: note = engineered ribonucleic acid scaffold (ERS) sequence
  source 1..88: mol_type = other DNA
actggcgcttctactgattactctgagcgccatcaccagcgactatgtcgtagtgggtaaagctccctcttcggaggaggcatcagag

SEQ ID NO: 6891 - DNA, 89 bp, synthetic construct
  misc_feature 1..89: note = engineered ribonucleic acid scaffold (ERS) sequence
  source 1..89: mol_type = other DNA
actggcgcttctaactgattactctgagcgccatcaccagcgactatgtcgtagtgggtaaagctccctcttcggaggaggcatcagag

SEQ ID NO: 6892 - DNA, 89 bp, synthetic construct
  misc_feature 1..89: note = engineered ribonucleic acid scaffold (ERS) sequence
  source 1..89: mol_type = other DNA
actggcgcttctacctgattactctgagcgccatcaccagcgactatgtcgtagtgggtaaagctccctcttcggaggaggcatcagag

SEQ ID NO: 6893 - DNA, 89 bp, synthetic construct
  misc_feature 1..89: note = engineered ribonucleic acid scaffold (ERS) sequence
  source 1..89: mol_type = other DNA
actggcgcttctagctgattactctgagcgccatcaccagcgactatgtcgtagtgggtaaagctccctcttcggaggaggcatcagag

SEQ ID NO: 6894 - DNA, 91 bp, synthetic construct
  misc_feature 1..91: note = engineered ribonucleic acid scaffold (ERS) sequence
  source 1..91: mol_type = other DNA
actggcgcttctattactgattactctgagcgccatcaccagcgactatgtcgtagtgggtaaagctccctcttcggaggaggcatcagag

SEQ ID NO: 6895 - DNA, 89 bp, synthetic construct
  misc_feature 1..89: note = engineered ribonucleic acid scaffold (ERS) sequence
  source 1..89: mol_type = other DNA
actggcgcttctatatgattactctgagcgccatcaccagcgactatgtcgtagtgggtaaagctccctcttcggaggaggcatcagag

SEQ ID NO: 6896 - DNA, 89 bp, synthetic construct
  misc_feature 1..89: note = engineered ribonucleic acid scaffold (ERS) sequence
  source 1..89: mol_type = other DNA
actggcgcttctatgtgattactctgagcgccatcaccagcgactatgtcgtagtgggtaaagctccctcttcggaggaggcatcagag

SEQ ID NO: 6897 - DNA, 89 bp, synthetic construct
  misc_feature 1..89: note = engineered ribonucleic acid scaffold (ERS) sequence
  source 1..89: mol_type = other DNA
actggcgcttctatttgattactctgagcgccatcaccagcgactatgtcgtagtgggtaaagctccctcttcggaggaggcatcagag

SEQ ID NO: 6898 - DNA, 90 bp, synthetic construct
  misc_feature 1..90: note = engineered ribonucleic acid scaffold (ERS) sequence
  source 1..90: mol_type = other DNA
actggcgcttctatcttgattactctgagcgccatcaccagcgactatgtcgtagtgggtaaagctccctcttcggaggaggcatcagag

SEQ ID NO: 6899 - DNA, 89 bp, synthetic construct
  misc_feature 1..89: note = engineered ribonucleic acid scaffold (ERS) sequence
  source 1..89: mol_type = other DNA
actggcgcttctatcagattactctgagcgccatcaccagcgactatgtcgtagtgggtaaagctccctcttcggaggaggcatcagag

SEQ ID NO: 6900 - DNA, 89 bp, synthetic construct
  misc_feature 1..89: note = engineered ribonucleic acid scaffold (ERS) sequence
  source 1..89: mol_type = other DNA
actggcgcttctatcggattactctgagcgccatcaccagcgactatgtcgtagtgggtaaagctccctcttcggaggaggcatcagag

SEQ ID NO: 6901 - DNA, 90 bp, synthetic construct
  misc_feature 1..90: note = engineered ribonucleic acid scaffold (ERS) sequence
  source 1..90: mol_type = other DNA
actggcgcttctatctgaattactctgagcgccatcaccagcgactatgtcgtagtgggtaaagctccctcttcggaggaggcatcagag

SEQ ID NO: 6902 - DNA, 90 bp, synthetic construct
  misc_feature 1..90: note = engineered ribonucleic acid scaffold (ERS) sequence
  source 1..90: mol_type = other DNA
actggcgcttctatctgtattactctgagcgccatcaccagcgactatgtcgtagtgggtaaagctccctcttcggaggaggcatcagag

SEQ ID NO: 6903 - DNA, 89 bp, synthetic construct
  misc_feature 1..89: note = engineered ribonucleic acid scaffold (ERS) sequence
  source 1..89: mol_type = other DNA
actggcgcttctatctggttactctgagcgccatcaccagcgactatgtcgtagtgggtaaagctccctcttcggaggaggcatcagag

SEQ ID NO: 6904 - DNA, 89 bp, synthetic construct
  misc_feature 1..89: note = engineered ribonucleic acid scaffold (ERS) sequence
  source 1..89: mol_type = other DNA
actggcgcttctatctgtttactctgagcgccatcaccagcgactatgtcgtagtgggtaaagctccctcttcggaggaggcatcagag

SEQ ID NO: 6905 - DNA, 90 bp, synthetic construct
  misc_feature 1..90: note = engineered ribonucleic acid scaffold (ERS) sequence
  source 1..90: mol_type = other DNA
actggcgcttctatctgatttactctgagcgccatcaccagcgactatgtcgtagtgggtaaagctccctcttcggaggaggcatcagag

SEQ ID NO: 6906 - DNA, 89 bp, synthetic construct
  misc_feature 1..89: note = engineered ribonucleic acid scaffold (ERS) sequence
  source 1..89: mol_type = other DNA
actggcgcttctatctgattgctctgagcgccatcaccagcgactatgtcgtagtgggtaaagctccctcttcggaggaggcatcagag

SEQ ID NO: 6907 - DNA, 93 bp, synthetic construct
  misc_feature 1..93: note = engineered ribonucleic acid scaffold (ERS) sequence
  source 1..93: mol_type = other DNA
actggcgcttctatatctgattactctgagcgccatcaccagcgactatgtcgtagtgggtaaagctccctcttcggagggaacgcatcagag

SEQ ID NO: 6908 - DNA, 92 bp, synthetic construct
  misc_feature 1..92: note = engineered ribonucleic acid scaffold (ERS) sequence
  source 1..92: mol_type = other DNA
actggcgcttctaatctgattactctgagcgccatcaccagcgactatgtcgtagtgggtaaagctccctcttcggagggaacgcatcagag

SEQ ID NO: 6909 - DNA, 90 bp, synthetic construct
  misc_feature 1..90: note = engineered ribonucleic acid scaffold (ERS) sequence
  source 1..90: mol_type = other DNA
actggcgcttctactgattactctgagcgccatcaccagcgactatgtcgtagtgggtaaagctccctcttcggagggaacgcatcagag

SEQ ID NO: 6910 - DNA, 91 bp, synthetic construct
  misc_feature 1..91: note = engineered ribonucleic acid scaffold (ERS) sequence
  source 1..91: mol_type = other DNA
actggcgcttctaactgattactctgagcgccatcaccagcgactatgtcgtagtgggtaaagctccctcttcggagggaacgcatcagag

SEQ ID NO: 6911 - DNA, 91 bp, synthetic construct
  misc_feature 1..91: note = engineered ribonucleic acid scaffold (ERS) sequence
  source 1..91: mol_type = other DNA
actggcgcttctacctgattactctgagcgccatcaccagcgactatgtcgtagtgggtaaagctccctcttcggagggaacgcatcagag

SEQ ID NO: 6912 - DNA, 91 bp, synthetic construct
  misc_feature 1..91: note = engineered ribonucleic acid scaffold (ERS) sequence
  source 1..91: mol_type = other DNA
actggcgcttctagctgattactctgagcgccatcaccagcgactatgtcgtagtgggtaaagctccctcttcggagggaacgcatcagag

SEQ ID NO: 6913 - DNA, 93 bp, synthetic construct
  misc_feature 1..93: note = engineered ribonucleic acid scaffold (ERS) sequence
  source 1..93: mol_type = other DNA
actggcgcttctattactgattactctgagcgccatcaccagcgactatgtcgtagtgggtaaagctccctcttcggagggaacgcatcagag

SEQ ID NO: 6914 - DNA, 91 bp, synthetic construct
  misc_feature 1..91: note = engineered ribonucleic acid scaffold (ERS) sequence
  source 1..91: mol_type = other DNA
actggcgcttctatatgattactctgagcgccatcaccagcgactatgtcgtagtgggtaaagctccctcttcggagggaacgcatcagag

SEQ ID NO: 6915 - DNA, 91 bp, synthetic construct
  misc_feature 1..91: note = engineered ribonucleic acid scaffold (ERS) sequence
  source 1..91: mol_type = other DNA
actggcgcttctatgtgattactctgagcgccatcaccagcgactatgtcgtagtgggtaaagctccctcttcggagggaacgcatcagag

SEQ ID NO: 6916 - DNA, 91 bp, synthetic construct
  misc_feature 1..91: note = engineered ribonucleic acid scaffold (ERS) sequence
  source 1..91: mol_type = other DNA
actggcgcttctatttgattactctgagcgccatcaccagcgactatgtcgtagtgggtaaagctccctcttcggagggaacgcatcagag

SEQ ID NO: 6917 - DNA, 92 bp, synthetic construct
  misc_feature 1..92: note = engineered ribonucleic acid scaffold (ERS) sequence
  source 1..92: mol_type = other DNA
actggcgcttctatcttgattactctgagcgccatcaccagcgactatgtcgtagtgggtaaagctccctcttcggagggaacgcatcagag

SEQ ID NO: 6918 - DNA, 91 bp, synthetic construct
  misc_feature 1..91: note = engineered ribonucleic acid scaffold (ERS) sequence
  source 1..91: mol_type = other DNA
actggcgcttctatcagattactctgagcgccatcaccagcgactatgtcgtagtgggtaaagctccctcttcggagggaacgcatcagag

SEQ ID NO: 6919 - DNA, 91 bp, synthetic construct
  misc_feature 1..91: note = engineered ribonucleic acid scaffold (ERS) sequence
  source 1..91: mol_type = other DNA
actggcgcttctatcggattactctgagcgccatcaccagcgactatgtcgtagtgggtaaagctccctcttcggagggaacgcatcagag

SEQ ID NO: 6920 - DNA, 92 bp, synthetic construct
  misc_feature 1..92: note = engineered ribonucleic acid scaffold (ERS) sequence
  source 1..92: mol_type = other DNA
actggcgcttctatctgaattactctgagcgccatcaccagcgactatgtcgtagtgggtaaagctccctcttcggagggaacgcatcagag

SEQ ID NO: 6921 - DNA, 92 bp, synthetic construct
  misc_feature 1..92: note = engineered ribonucleic acid scaffold (ERS) sequence
  source 1..92: mol_type = other DNA
actggcgcttctatctgtattactctgagcgccatcaccagcgactatgtcgtagtgggtaaagctccctcttcggagggaacgcatcagag

SEQ ID NO: 6922 - DNA, 91 bp, synthetic construct
  misc_feature 1..91: note = engineered ribonucleic acid scaffold (ERS) sequence
  source 1..91: mol_type = other DNA
actggcgcttctatctggttactctgagcgccatcaccagcgactatgtcgtagtgggtaaagctccctcttcggagggaacgcatcagag

SEQ ID NO: 6923 - DNA, 91 bp, synthetic construct
  misc_feature 1..91: note = engineered ribonucleic acid scaffold (ERS) sequence
  source 1..91: mol_type = other DNA
actggcgcttctatctgtttactctgagcgccatcaccagcgactatgtcgtagtgggtaaagctccctcttcggagggaacgcatcagag

SEQ ID NO: 6924 - DNA, 92 bp, synthetic construct
  misc_feature 1..92: note = engineered ribonucleic acid scaffold (ERS) sequence
  source 1..92: mol_type = other DNA
actggcgcttctatctgatttactctgagcgccatcaccagcgactatgtcgtagtgggtaaagctccctcttcggagggaacgcatcagag

SEQ ID NO: 6925 - DNA, 91 bp, synthetic construct
  misc_feature 1..91: note = engineered ribonucleic acid scaffold (ERS) sequence
  source 1..91: mol_type = other DNA
actggcgcttctatctgattgctctgagcgccatcaccagcgactatgtcgtagtgggtaaagctccctcttcggagggaacgcatcagag

SEQ ID NO: 6926 - DNA, 91 bp, synthetic construct; identical to SEQ ID NO: 599
  misc_feature 1..91: note = engineered ribonucleic acid scaffold (ERS) sequence
  source 1..91: mol_type = other DNA

SEQ ID NO: 6927 - DNA, 90 bp, synthetic construct; identical to SEQ ID NO: 585
  misc_feature 1..90: note = engineered ribonucleic acid scaffold (ERS) sequence
  source 1..90: mol_type = other DNA

SEQ ID NO: 6928 - DNA, 88 bp, synthetic construct; identical to SEQ ID NO: 588
  misc_feature 1..88: note = engineered ribonucleic acid scaffold (ERS) sequence
  source 1..88: mol_type = other DNA

SEQ ID NO: 6929 - DNA, 89 bp, synthetic construct; identical to SEQ ID NO: 586
  misc_feature 1..89: note = engineered ribonucleic acid scaffold (ERS) sequence
  source 1..89: mol_type = other DNA

SEQ ID NO: 6930 - DNA, 89 bp, synthetic construct; identical to SEQ ID NO: 601
  misc_feature 1..89: note = engineered ribonucleic acid scaffold (ERS) sequence
  source 1..89: mol_type = other DNA

SEQ ID NO: 6931 - DNA, 89 bp, synthetic construct; identical to SEQ ID NO: 587
  misc_feature 1..89: note = engineered ribonucleic acid scaffold (ERS) sequence
  source 1..89: mol_type = other DNA

SEQ ID NO: 6932 - DNA, 91 bp, synthetic construct; identical to SEQ ID NO: 600
  misc_feature 1..91: note = engineered ribonucleic acid scaffold (ERS) sequence
  source 1..91: mol_type = other DNA

SEQ ID NO: 6933 - DNA, 89 bp, synthetic construct; identical to SEQ ID NO: 589
  misc_feature 1..89: note = engineered ribonucleic acid scaffold (ERS) sequence
  source 1..89: mol_type = other DNA

SEQ ID NO: 6934 - DNA, 89 bp, synthetic construct; identical to SEQ ID NO: 591
  misc_feature 1..89: note = engineered ribonucleic acid scaffold (ERS) sequence
  source 1..89: mol_type = other DNA

SEQ ID NO: 6935 - DNA, 89 bp, synthetic construct; identical to SEQ ID NO: 590
  misc_feature 1..89: note = engineered ribonucleic acid scaffold (ERS) sequence
  source 1..89: mol_type = other DNA

SEQ ID NO: 6936 - DNA, 90 bp, synthetic construct; identical to SEQ ID NO: 592
  misc_feature 1..90: note = engineered ribonucleic acid scaffold (ERS) sequence
  source 1..90: mol_type = other DNA

SEQ ID NO: 6937 - DNA, 89 bp, synthetic construct; identical to SEQ ID NO: 602
  misc_feature 1..89: note = engineered ribonucleic acid scaffold (ERS) sequence
  source 1..89: mol_type = other DNA

SEQ ID NO: 6938 - DNA, 89 bp, synthetic construct; identical to SEQ ID NO: 603
  misc_feature 1..89: note = engineered ribonucleic acid scaffold (ERS) sequence
  source 1..89: mol_type = other DNA

SEQ ID NO: 6939 - DNA, 90 bp, synthetic construct; identical to SEQ ID NO: 595
  misc_feature 1..90: note = engineered ribonucleic acid scaffold (ERS) sequence
  source 1..90: mol_type = other DNA

SEQ ID NO: 6940 - DNA, 90 bp, synthetic construct; identical to SEQ ID NO: 594
  misc_feature 1..90: note = engineered ribonucleic acid scaffold (ERS) sequence
  source 1..90: mol_type = other DNA

SEQ ID NO: 6941 - DNA, 89 bp, synthetic construct; identical to SEQ ID NO: 596
  misc_feature 1..89: note = engineered ribonucleic acid scaffold (ERS) sequence
  source 1..89: mol_type = other DNA

SEQ ID NO: 6942 - DNA, 89 bp, synthetic construct; identical to SEQ ID NO: 597
  misc_feature 1..89: note = engineered ribonucleic acid scaffold (ERS) sequence
  source 1..89: mol_type = other DNA

SEQ ID NO: 6943 - DNA, 90 bp, synthetic construct; identical to SEQ ID NO: 593
  misc_feature 1..90: note = engineered ribonucleic acid scaffold (ERS) sequence
  source 1..90: mol_type = other DNA

SEQ ID NO: 6944 - DNA, 89 bp, synthetic construct; identical to SEQ ID NO: 598
  misc_feature 1..89: note = engineered ribonucleic acid scaffold (ERS) sequence
  source 1..89: mol_type = other DNA

SEQ ID NO: 6945 - DNA, 91 bp, synthetic construct
  misc_feature 1..91: note = engineered ribonucleic acid scaffold (ERS) sequence
  source 1..91: mol_type = other DNA
actggcgcttctatatctgattactctgagcgccatcaccagcgactatgtcgtagtgggtaaagctccctggaaacagggagcatcagag

SEQ ID NO: 6946 - DNA, 90 bp, synthetic construct
  misc_feature 1..90: note = engineered ribonucleic acid scaffold (ERS) sequence
  source 1..90: mol_type = other DNA
actggcgcttctaatctgattactctgagcgccatcaccagcgactatgtcgtagtgggtaaagctccctggaaacagggagcatcagag

SEQ ID NO: 6947 - DNA, 88 bp, synthetic construct
  misc_feature 1..88: note = engineered ribonucleic acid scaffold (ERS) sequence
  source 1..88: mol_type = other DNA
actggcgcttctactgattactctgagcgccatcaccagcgactatgtcgtagtgggtaaagctccctggaaacagggagcatcagag

SEQ ID NO: 6948 - DNA, 89 bp, synthetic construct
  misc_feature 1..89: note = engineered ribonucleic acid scaffold (ERS) sequence
  source 1..89: mol_type = other DNA
actggcgcttctaactgattactctgagcgccatcaccagcgactatgtcgtagtgggtaaagctccctggaaacagggagcatcagag

SEQ ID NO: 6949 - DNA, 89 bp, synthetic construct
  misc_feature 1..89: note = engineered ribonucleic acid scaffold (ERS) sequence
  source 1..89: mol_type = other DNA
actggcgcttctacctgattactctgagcgccatcaccagcgactatgtcgtagtgggtaaagctccctggaaacagggagcatcagag

SEQ ID NO: 6950 - DNA, 89 bp, synthetic construct
  misc_feature 1..89: note = engineered ribonucleic acid scaffold (ERS) sequence
  source 1..89: mol_type = other DNA
actggcgcttctagctgattactctgagcgccatcaccagcgactatgtcgtagtgggtaaagctccctggaaacagggagcatcagag

SEQ ID NO: 6951 - DNA, 91 bp, synthetic construct
  misc_feature 1..91: note = engineered ribonucleic acid scaffold (ERS) sequence
  source 1..91: mol_type = other DNA
actggcgcttctattactgattactctgagcgccatcaccagcgactatgtcgtagtgggtaaagctccctggaaacagggagcatcagag

SEQ ID NO: 6952 - DNA, 89 bp, synthetic construct
  misc_feature 1..89: note = engineered ribonucleic acid scaffold (ERS) sequence
  source 1..89: mol_type = other DNA
actggcgcttctatatgattactctgagcgccatcaccagcgactatgtcgtagtgggtaaagctccctggaaacagggagcatcagag

SEQ ID NO: 6953 - DNA, 89 bp, synthetic construct
  misc_feature 1..89: note = engineered ribonucleic acid scaffold (ERS) sequence
  source 1..89: mol_type = other DNA
actggcgcttctatgtgattactctgagcgccatcaccagcgactatgtcgtagtgggtaaagctccctggaaacagggagcatcagag

SEQ ID NO: 6954 - DNA, 89 bp, synthetic construct
  misc_feature 1..89: note = engineered ribonucleic acid scaffold (ERS) sequence
  source 1..89: mol_type = other DNA
actggcgcttctatttgattactctgagcgccatcaccagcgactatgtcgtagtgggtaaagctccctggaaacagggagcatcagag

SEQ ID NO: 6955 - DNA, 90 bp, synthetic construct
  misc_feature 1..90: note = engineered ribonucleic acid scaffold (ERS) sequence
  source 1..90: mol_type = other DNA
actggcgcttctatcttgattactctgagcgccatcaccagcgactatgtcgtagtgggtaaagctccctggaaacagggagcatcagag

SEQ ID NO: 6956 - DNA, 89 bp, synthetic construct
  misc_feature 1..89: note = engineered ribonucleic acid scaffold (ERS) sequence
  source 1..89: mol_type = other DNA
actggcgcttctatcagattactctgagcgccatcaccagcgactatgtcgtagtgggtaaagctccctggaaacagggagcatcagag

SEQ ID NO: 6957 - DNA, 89 bp, synthetic construct
  misc_feature 1..89: note = engineered ribonucleic acid scaffold (ERS) sequence
  source 1..89: mol_type = other DNA
actggcgcttctatcggattactctgagcgccatcaccagcgactatgtcgtagtgggtaaagctccctggaaacagggagcatcagag

SEQ ID NO: 6958 - DNA, 90 bp, synthetic construct
  misc_feature 1..90: note = engineered ribonucleic acid scaffold (ERS) sequence
  source 1..90: mol_type = other DNA
actggcgcttctatctgaattactctgagcgccatcaccagcgactatgtcgtagtgggtaaagctccctggaaacagggagcatcagag

SEQ ID NO: 6959 - DNA, 90 bp, synthetic construct
  misc_feature 1..90: note = engineered ribonucleic acid scaffold (ERS) sequence
  source 1..90: mol_type = other DNA
actggcgcttctatctgtattactctgagcgccatcaccagcgactatgtcgtagtgggtaaagctccctggaaacagggagcatcagag

SEQ ID NO: 6960 - DNA, 89 bp, synthetic construct
  misc_feature 1..89: note = engineered ribonucleic acid scaffold (ERS) sequence
  source 1..89: mol_type = other DNA
actggcgcttctatctggttactctgagcgccatcaccagcgactatgtcgtagtgggtaaagctccctggaaacagggagcatcagag

SEQ ID NO: 6961 - DNA, 89 bp, synthetic construct
  misc_feature 1..89: note = engineered ribonucleic acid scaffold (ERS) sequence
  source 1..89: mol_type = other DNA
actggcgcttctatctgtttactctgagcgccatcaccagcgactatgtcgtagtgggtaaagctccctggaaacagggagcatcagag

SEQ ID NO: 6962 - DNA, 90 bp, synthetic construct
  misc_feature 1..90: note = engineered ribonucleic acid scaffold (ERS) sequence
  source 1..90: mol_type = other DNA
actggcgcttctatctgatttactctgagcgccatcaccagcgactatgtcgtagtgggtaaagctccctggaaacagggagcatcagag

SEQ ID NO: 6963 - DNA, 89 bp, synthetic construct
  misc_feature 1..89: note = engineered ribonucleic acid scaffold (ERS) sequence
  source 1..89: mol_type = other DNA
actggcgcttctatctgattgctctgagcgccatcaccagcgactatgtcgtagtgggtaaagctccctggaaacagggagcatcagag

SEQ ID NO: 6964 - DNA, 87 bp, synthetic construct
  misc_feature 1..87: note = engineered ribonucleic acid scaffold (ERS) sequence
  source 1..87: mol_type = other DNA
actggcgcttctatatctgattactctgagcgccatcaccagcgactatgtcgtagtgggtaaagctcccttcggggagcatcagag

SEQ ID NO: 6965 - DNA, 86 bp, synthetic construct
  misc_feature 1..86: note = engineered ribonucleic acid scaffold (ERS) sequence
  source 1..86: mol_type = other DNA
actggcgcttctaatctgattactctgagcgccatcaccagcgactatgtcgtagtgggtaaagctcccttcggggagcatcagag

SEQ ID NO: 6966 - DNA, 84 bp, synthetic construct
  misc_feature 1..84: note = engineered ribonucleic acid scaffold (ERS) sequence
  source 1..84: mol_type = other DNA
actggcgcttctactgattactctgagcgccatcaccagcgactatgtcgtagtgggtaaagctcccttcggggagcatcagag

SEQ ID NO: 6967 - DNA, 85 bp, synthetic construct
  misc_feature 1..85: note = engineered ribonucleic acid scaffold (ERS) sequence
  source 1..85: mol_type = other DNA
actggcgcttctaactgattactctgagcgccatcaccagcgactatgtcgtagtgggtaaagctcccttcggggagcatcagag

SEQ ID NO: 6968 - DNA, 85 bp, synthetic construct
  misc_feature 1..85: note = engineered ribonucleic acid scaffold (ERS) sequence
  source 1..85: mol_type = other DNA
actggcgcttctacctgattactctgagcgccatcaccagcgactatgtcgtagtgggtaaagctcccttcggggagcatcagag

SEQ ID NO: 6969 - DNA, 85 bp, synthetic construct
  misc_feature 1..85: note = engineered ribonucleic acid scaffold (ERS) sequence
  source 1..85: mol_type = other DNA
actggcgcttctagctgattactctgagcgccatcaccagcgactatgtcgtagtgggtaaagctcccttcggggagcatcagag

SEQ ID NO: 6970 - DNA, 87 bp, synthetic construct
  misc_feature 1..87: note = engineered ribonucleic acid scaffold (ERS) sequence
  source 1..87: mol_type = other DNA
actggcgcttctattactgattactctgagcgccatcaccagcgactatgtcgtagtgggtaaagctcccttcggggagcatcagag

SEQ ID NO: 6971 - DNA, 85 bp, synthetic construct
  misc_feature 1..85: note = engineered ribonucleic acid scaffold (ERS) sequence
  source 1..85: mol_type = other DNA
actggcgcttctatatgattactctgagcgccatcaccagcgactatgtcgtagtgggtaaagctcccttcggggagcatcagag

SEQ ID NO: 6972 - DNA, 85 bp, synthetic construct
  misc_feature 1..85: note = engineered ribonucleic acid scaffold (ERS) sequence
  source 1..85: mol_type = other DNA
actggcgcttctatgtgattactctgagcgccatcaccagcgactatgtcgtagtgggtaaagctcccttcggggagcatcagag

SEQ ID NO: 6973 - DNA, 85 bp, synthetic construct
  misc_feature 1..85: note = engineered ribonucleic acid scaffold (ERS) sequence
  source 1..85: mol_type = other DNA
actggcgcttctatttgattactctgagcgccatcaccagcgactatgtcgtagtgggtaaagctcccttcggggagcatcagag

SEQ ID NO: 6974 - DNA, 86 bp, synthetic construct
  misc_feature 1..86: note = engineered ribonucleic acid scaffold (ERS) sequence
  source 1..86: mol_type = other DNA
actggcgcttctatcttgattactctgagcgccatcaccagcgactatgtcgtagtgggtaaagctcccttcggggagcatcagag

SEQ ID NO: 6975 - DNA, 85 bp, synthetic construct
  misc_feature 1..85: note = engineered ribonucleic acid scaffold (ERS) sequence
  source 1..85: mol_type = other DNA
actggcgcttctatcagattactctgagcgccatcaccagcgactatgtcgtagtgggtaaagctcccttcggggagcatcagag

SEQ ID NO: 6976 - DNA, 85 bp, synthetic construct
  misc_feature 1..85: note = engineered ribonucleic acid scaffold (ERS) sequence
  source 1..85: mol_type = other DNA
actggcgcttctatcggattactctgagcgccatcaccagcgactatgtcgtagtgggtaaagctcccttcggggagcatcagag

SEQ ID NO: 6977 - DNA, 86 bp, synthetic construct
  misc_feature 1..86: note = engineered ribonucleic acid scaffold (ERS) sequence
  source 1..86: mol_type = other DNA
actggcgcttctatctgaattactctgagcgccatcaccagcgactatgtcgtagtgggtaaagctcccttcggggagcatcagag

SEQ ID NO: 6978 - DNA, 86 bp, synthetic construct
  misc_feature 1..86: note = engineered ribonucleic acid scaffold (ERS) sequence
  source 1..86: mol_type = other DNA
actggcgcttctatctgtattactctgagcgccatcaccagcgactatgtcgtagtgggtaaagctcccttcggggagcatcagag

SEQ ID NO: 6979 - DNA, 85 bp, synthetic construct
  misc_feature 1..85: note = engineered ribonucleic acid scaffold (ERS) sequence
  source 1..85: mol_type = other DNA
actggcgcttctatctggttactctgagcgccatcaccagcgactatgtcgtagtgggtaaagctcccttcggggagcatcagag

SEQ ID NO: 6980 - DNA, 85 bp, synthetic construct
  misc_feature 1..85: note = engineered ribonucleic acid scaffold (ERS) sequence
  source 1..85: mol_type = other DNA
actggcgcttctatctgtttactctgagcgccatcaccagcgactatgtcgtagtgggtaaagctcccttcggggagcatcagag

SEQ ID NO: 6981 - DNA, 86 bp, synthetic construct
  misc_feature 1..86: note = engineered ribonucleic acid scaffold (ERS) sequence
  source 1..86: mol_type = other DNA
actggcgcttctatctgatttactctgagcgccatcaccagcgactatgtcgtagtgggtaaagctcccttcggggagcatcagag

SEQ ID NO: 6982 - DNA, 85 bp, synthetic construct
  misc_feature 1..85: note = engineered ribonucleic acid scaffold (ERS) sequence
  source 1..85: mol_type = other DNA
actggcgcttctatctgattgctctgagcgccatcaccagcgactatgtcgtagtgggtaaagctcccttcggggagcatcagag

SEQ ID NO: 6983 - DNA, 87 bp, synthetic construct
  misc_feature 1..87: note = engineered ribonucleic acid scaffold (ERS) sequence
  source 1..87: mol_type = other DNA
actggcgcttctatatctgattactctgagcgccatcaccagcgactatgtcgtagtgggtaaagctccgttcgcggagcatcagag

SEQ ID NO: 6984 - DNA, 86 bp, synthetic construct
  misc_feature 1..86: note = engineered ribonucleic acid scaffold (ERS) sequence
  source 1..86: mol_type = other DNA
actggcgcttctaatctgattactctgagcgccatcaccagcgactatgtcgtagtgggtaaagctccgttcgcggagcatcagag

SEQ ID NO: 6985 - DNA, 84 bp, synthetic construct
  misc_feature 1..84: note = engineered ribonucleic acid scaffold (ERS) sequence
  source 1..84: mol_type = other DNA
actggcgcttctactgattactctgagcgccatcaccagcgactatgtcgtagtgggtaaagctccgttcgcggagcatcagag

SEQ ID NO: 6986 - DNA, 85 bp, synthetic construct
  misc_feature 1..85: note = engineered ribonucleic acid scaffold (ERS) sequence
  source 1..85: mol_type = other DNA
actggcgcttctaactgattactctgagcgccatcaccagcgactatgtcgtagtgggtaaagctccgttcgcggagcatcagag

SEQ ID NO: 6987 - DNA, 85 bp, synthetic construct
  misc_feature 1..85: note = engineered ribonucleic acid scaffold (ERS) sequence
  source 1..85: mol_type = other DNA
actggcgcttctacctgattactctgagcgccatcaccagcgactatgtcgtagtgggtaaagctccgttcgcggagcatcagag

SEQ ID NO: 6988 - DNA, 85 bp, synthetic construct
  misc_feature 1..85: note = engineered ribonucleic acid scaffold (ERS) sequence
  source 1..85: mol_type = other DNA
actggcgcttctagctgattactctgagcgccatcaccagcgactatgtcgtagtgggtaaagctccgttcgcggagcatcagag

SEQ ID NO: 6989 - DNA, 87 bp, synthetic construct
  misc_feature 1..87: note = engineered ribonucleic acid scaffold (ERS) sequence
  source 1..87: mol_type = other DNA
actggcgcttctattactgattactctgagcgccatcaccagcgactatgtcgtagtgggtaaagctccgttcgcggagcatcagag

SEQ ID NO: 6990 - DNA, 85 bp, synthetic construct
  misc_feature 1..85: note = engineered ribonucleic acid scaffold (ERS) sequence
  source 1..85: mol_type = other DNA
actggcgcttctatatgattactctgagcgccatcaccagcgactatgtcgtagtgggtaaagctccgttcgcggagcatcagag

SEQ ID NO: 6991 - DNA, 85 bp, synthetic construct
  misc_feature 1..85: note = engineered ribonucleic acid scaffold (ERS) sequence
  source 1..85: mol_type = other DNA
actggcgcttctatgtgattactctgagcgccatcaccagcgactatgtcgtagtgggtaaagctccgttcgcggagcatcagag

SEQ ID NO: 6992 - DNA, 85 bp, synthetic construct
  misc_feature 1..85: note = engineered ribonucleic acid scaffold (ERS) sequence
  source 1..85: mol_type = other DNA
actggcgcttctatttgattactctgagcgccatcaccagcgactatgtcgtagtgggtaaagctccgttcgcggagcatcagag

SEQ ID NO: 6993 - DNA, 86 bp, synthetic construct
  misc_feature 1..86: note = engineered ribonucleic acid scaffold (ERS) sequence
  source 1..86: mol_type = other DNA
actggcgcttctatcttgattactctgagcgccatcaccagcgactatgtcgtagtgggtaaagctccgttcgcggagcatcagag

SEQ ID NO: 6994 - DNA, 85 bp, synthetic construct
  misc_feature 1..85: note = engineered ribonucleic acid scaffold (ERS) sequence
  source 1..85: mol_type = other DNA
actggcgcttctatcagattactctgagcgccatcaccagcgactatgtcgtagtgggtaaagctccgttcgcggagcatcagag

SEQ ID NO: 6995 - DNA, 85 bp, synthetic construct
  misc_feature 1..85: note = engineered ribonucleic acid scaffold (ERS) sequence
  source 1..85: mol_type = other DNA
actggcgcttctatcggattactctgagcgccatcaccagcgactatgtcgtagtgggtaaagctccgttcgcggagcatcagag

SEQ ID NO: 6996 - DNA, 86 bp, synthetic construct
  misc_feature 1..86: note = engineered ribonucleic acid scaffold (ERS) sequence
  source 1..86: mol_type = other DNA
actggcgcttctatctgaattactctgagcgccatcaccagcgactatgtcgtagtgggtaaagctccgttcgcggagcatcagag

SEQ ID NO: 6997 - DNA, 86 bp, synthetic construct
  misc_feature 1..86: note = engineered ribonucleic acid scaffold (ERS) sequence
  source 1..86: mol_type = other DNA
actggcgcttctatctgtattactctgagcgccatcaccagcgactatgtcgtagtgggtaaagctccgttcgcggagcatcagag

SEQ ID NO: 6998 - DNA, 85 bp, synthetic construct
  misc_feature 1..85: note = engineered ribonucleic acid scaffold (ERS) sequence
  source 1..85: mol_type = other DNA
actggcgcttctatctggttactctgagcgccatcaccagcgactatgtcgtagtgggtaaagctccgttcgcggagcatcagag

SEQ ID NO: 6999 - DNA, 85 bp, synthetic construct
  misc_feature 1..85: note = engineered ribonucleic acid scaffold (ERS) sequence
  source 1..85: mol_type = other DNA
actggcgcttctatctgtttactctgagcgccatcaccagcgactatgtcgtagtgggtaaagctccgttcgcggagcatcagag

SEQ ID NO: 7000 - DNA, 86 bp, synthetic construct
  misc_feature 1..86: note = engineered ribonucleic acid scaffold (ERS) sequence
  source 1..86: mol_type = other DNA
actggcgcttctatctgatttactctgagcgccatcaccagcgactatgtcgtagtgggtaaagctccgttcgcggagcatcagag

SEQ ID NO: 7001 - DNA, 85 bp, synthetic construct
  misc_feature 1..85: note = engineered ribonucleic acid scaffold (ERS) sequence
  source 1..85: mol_type = other DNA
actggcgcttctatctgattgctctgagcgccatcaccagcgactatgtcgtagtgggtaaagctccgttcgcggagcatcagag

SEQ ID NO: 7002 - DNA, 89 bp, synthetic construct
  misc_feature 1..89: note = engineered ribonucleic acid scaffold (ERS) sequence
  source 1..89: mol_type = other DNA
actggcgcttctatatctgattactctgagcgccatcaccagcgactatgtcgtagtgggtaaagctcctcttcggaggagcatcagag

SEQ ID NO: 7003 - DNA, 88 bp, synthetic construct
  misc_feature 1..88: note = engineered ribonucleic acid scaffold (ERS) sequence
  source 1..88: mol_type = other DNA
actggcgcttctaatctgattactctgagcgccatcaccagcgactatgtcgtagtgggtaaagctcctcttcggaggagcatcagag

SEQ ID NO: 7004 - DNA, 86 bp, synthetic construct
  misc_feature 1..86: note = engineered ribonucleic acid scaffold (ERS) sequence
  source 1..86: mol_type = other DNA
actggcgcttctactgattactctgagcgccatcaccagcgactatgtcgtagtgggtaaagctcctcttcggaggagcatcagag

SEQ ID NO: 7005 - DNA, 87 bp, synthetic construct
  misc_feature 1..87: note = engineered ribonucleic acid scaffold (ERS) sequence
  source 1..87: mol_type = other DNA
actggcgcttctaactgattactctgagcgccatcaccagcgactatgtcgtagtgggtaaagctcctcttcggaggagcatcagag

SEQ ID NO: 7006 - DNA, 87 bp, synthetic construct
  misc_feature 1..87: note = engineered ribonucleic acid scaffold (ERS) sequence
  source 1..87: mol_type = other DNA
actggcgcttctacctgattactctgagcgccatcaccagcgactatgtcgtagtgggtaaagctcctcttcggaggagcatcagag

SEQ ID NO: 7007 - DNA, 87 bp, synthetic construct
  misc_feature 1..87: note = engineered ribonucleic acid scaffold (ERS) sequence
  source 1..87: mol_type = other DNA
actggcgcttctagctgattactctgagcgccatcaccagcgactatgtcgtagtgggtaaagctcctcttcggaggagcatcagag

SEQ ID NO: 7008 - DNA, 89 bp, synthetic construct
  misc_feature 1..89: note = engineered ribonucleic acid scaffold (ERS) sequence
  source 1..89: mol_type = other DNA
actggcgcttctattactgattactctgagcgccatcaccagcgactatgtcgtagtgggtaaagctcctcttcggaggagcatcagag

SEQ ID NO: 7009 - DNA, 87 bp, synthetic construct
  misc_feature 1..87: note = engineered ribonucleic acid scaffold (ERS) sequence
  source 1..87: mol_type = other DNA
actggcgcttctatatgattactctgagcgccatcaccagcgactatgtcgtagtgggtaaagctcctcttcggaggagcatcagag

SEQ ID NO: 7010 - DNA, 87 bp, synthetic construct
  misc_feature 1..87: note = engineered ribonucleic acid scaffold (ERS) sequence
  source 1..87: mol_type = other DNA
actggcgcttctatgtgattactctgagcgccatcaccagcgactatgtcgtagtgggtaaagctcctcttcggaggagcatcagag

SEQ ID NO: 7011 - DNA, 87 bp, synthetic construct
  misc_feature 1..87: note = engineered ribonucleic acid scaffold (ERS) sequence
  source 1..87: mol_type = other DNA
actggcgcttctatttgattactctgagcgccatcaccagcgactatgtcgtagtgggtaaagctcctcttcggaggagcatcagag

SEQ ID NO: 7012 - DNA, 88 bp, synthetic construct
  misc_feature 1..88: note = engineered ribonucleic acid scaffold (ERS) sequence
  source 1..88: mol_type = other DNA
actggcgcttctatcttgattactctgagcgccatcaccagcgactatgtcgtagtgggtaaagctcctcttcggaggagcatcagag

SEQ ID NO: 7013 - DNA, 87 bp, synthetic construct
  misc_feature 1..87: note = engineered ribonucleic acid scaffold (ERS) sequence
  source 1..87: mol_type = other DNA
actggcgcttctatcagattactctgagcgccatcaccagcgactatgtcgtagtgggtaaagctcctcttcggaggagcatcagag

SEQ ID NO: 7014 - DNA, 87 bp, synthetic construct
  misc_feature 1..87: note = engineered ribonucleic acid scaffold (ERS) sequence
  source 1..87: mol_type = other DNA
actggcgcttctatcggattactctgagcgccatcaccagcgactatgtcgtagtgggtaaagctcctcttcggaggagcatcagag

SEQ ID NO: 7015 - DNA, 88 bp, synthetic construct
  misc_feature 1..88: note = engineered ribonucleic acid scaffold (ERS) sequence
  source 1..88: mol_type = other DNA
actggcgcttctatctgaattactctgagcgccatcaccagcgactatgtcgtagtgggtaaagctcctcttcggaggagcatcagag

SEQ ID NO: 7016 - DNA, 88 bp, synthetic construct
  misc_feature 1..88: note = engineered ribonucleic acid scaffold (ERS) sequence
  source 1..88: mol_type = other DNA
actggcgcttctatctgtattactctgagcgccatcaccagcgactatgtcgtagtgggtaaagctcctcttcggaggagcatcagag

SEQ ID NO: 7017 - DNA, 87 bp, synthetic construct
  misc_feature 1..87: note = engineered ribonucleic acid scaffold (ERS) sequence
  source 1..87: mol_type = other DNA
actggcgcttctatctggttactctgagcgccatcaccagcgactatgtcgtagtgggtaaagctcctcttcggaggagcatcagag

SEQ ID NO: 7018 - DNA, 87 bp, synthetic construct
  misc_feature 1..87: note = engineered ribonucleic acid scaffold (ERS) sequence
  source 1..87: mol_type = other DNA
actggcgcttctatctgtttactctgagcgccatcaccagcgactatgtcgtagtgggtaaagctcctcttcggaggagcatcagag

SEQ ID NO: 7019 - DNA, 88 bp, synthetic construct
  misc_feature 1..88: note = engineered ribonucleic acid scaffold (ERS) sequence
  source 1..88: mol_type = other DNA
actggcgcttctatctgatttactctgagcgccatcaccagcgactatgtcgtagtgggtaaagctcctcttcggaggagcatcagag

SEQ ID NO: 7020 - DNA, 87 bp, synthetic construct
  misc_feature 1..87: note = engineered ribonucleic acid scaffold (ERS) sequence
  source 1..87: mol_type = other DNA
actggcgcttctatctgattgctctgagcgccatcaccagcgactatgtcgtagtgggtaaagctcctcttcggaggagcatcagag

SEQ ID NO: 7021 - DNA, 87 bp, synthetic construct
  misc_feature 1..87: note = engineered ribonucleic acid scaffold (ERS) sequence
  source 1..87: mol_type = other DNA
actggcgcttctatatctgattactctgagcgccatcaccagcgactatgtcgtagtgggtaaagctctcttcggagagcatcagag

SEQ ID NO: 7022 - DNA, 86 bp, synthetic construct
  misc_feature 1..86: note = engineered ribonucleic acid scaffold (ERS) sequence
  source 1..86: mol_type = other DNA
actggcgcttctaatctgattactctgagcgccatcaccagcgactatgtcgtagtgggtaaagctctcttcggagagcatcagag

SEQ ID NO: 7023 - DNA, 84 bp, synthetic construct
  misc_feature 1..84: note = engineered ribonucleic acid scaffold (ERS) sequence
  source 1..84: mol_type = other DNA
actggcgcttctactgattactctgagcgccatcaccagcgactatgtcgtagtgggtaaagctctcttcggagagcatcagag

SEQ ID NO: 7024 - DNA, 85 bp, synthetic construct
  misc_feature 1..85: note = engineered ribonucleic acid scaffold (ERS) sequence
  source 1..85: mol_type = other DNA
actggcgcttctaactgattactctgagcgccatcaccagcgactatgtcgtagtgggtaaagctctcttcggagagcatcagag

SEQ ID NO: 7025 - DNA, 85 bp, synthetic construct
  misc_feature 1..85: note = engineered ribonucleic acid scaffold (ERS) sequence
  source 1..85: mol_type = other DNA
actggcgcttctacctgattactctgagcgccatcaccagcgactatgtcgtagtgggtaaagctctcttcggagagcatcagag

SEQ ID NO: 7026 - DNA, 85 bp, synthetic construct
  misc_feature 1..85: note = engineered ribonucleic acid scaffold (ERS) sequence
  source 1..85: mol_type = other DNA
actggcgcttctagctgattactctgagcgccatcaccagcgactatgtcgtagtgggtaaagctctcttcggagagcatcagag

SEQ ID NO: 7027 - DNA, 87 bp, synthetic construct
  misc_feature 1..87: note = engineered ribonucleic acid scaffold (ERS) sequence
  source 1..87: mol_type = other DNA
actggcgcttctattactgattactctgagcgccatcaccagcgactatgtcgtagtgggtaaagctctcttcggagagcatcagag

SEQ ID NO: 7028 - DNA, 85 bp, synthetic construct
  misc_feature 1..85: note = engineered ribonucleic acid scaffold (ERS) sequence
  source 1..85: mol_type = other DNA
actggcgcttctatatgattactctgagcgccatcaccagcgactatgtcgtagtgggtaaagctctcttcggagagcatcagag

SEQ ID NO: 7029 - DNA, 85 bp, synthetic construct
  misc_feature 1..85: note = engineered ribonucleic acid scaffold (ERS) sequence
  source 1..85: mol_type = other DNA
actggcgcttctatgtgattactctgagcgccatcaccagcgactatgtcgtagtgggtaaagctctcttcggagagcatcagag

SEQ ID NO: 7030 - DNA, 85 bp, synthetic construct
  misc_feature 1..85: note = engineered ribonucleic acid scaffold (ERS) sequence
  source 1..85: mol_type = other DNA
actggcgcttctatttgattactctgagcgccatcaccagcgactatgtcgtagtgggtaaagctctcttcggagagcatcagag

SEQ ID NO: 7031 - DNA, 86 bp, synthetic construct
  misc_feature 1..86: note = engineered ribonucleic acid scaffold (ERS) sequence
  source 1..86: mol_type = other DNA
actggcgcttctatcttgattactctgagcgccatcaccagcgactatgtcgtagtgggtaaagctctcttcggagagcatcagag

SEQ ID NO: 7032 - DNA, 85 bp, synthetic construct
  misc_feature 1..85: note = engineered ribonucleic acid scaffold (ERS) sequence
  source 1..85: mol_type = other DNA
actggcgcttctatcagattactctgagcgccatcaccagcgactatgtcgtagtgggtaaagctctcttcggagagcatcagag

SEQ ID NO: 7033 - DNA, 85 bp, synthetic construct
  misc_feature 1..85: note = engineered ribonucleic acid scaffold (ERS) sequence
  source 1..85: mol_type = other DNA
actggcgcttctatcggattactctgagcgccatcaccagcgactatgtcgtagtgggtaaagctctcttcggagagcatcagag

SEQ ID NO: 7034 - DNA, 86 bp, synthetic construct
  misc_feature 1..86: note = engineered ribonucleic acid scaffold (ERS) sequence
  source 1..86: mol_type = other DNA
actggcgcttctatctgaattactctgagcgccatcaccagcgactatgtcgtagtgggtaaagctctcttcggagagcatcagag

SEQ ID NO: 7035 - DNA, 86 bp, synthetic construct
  misc_feature 1..86: note = engineered ribonucleic acid scaffold (ERS) sequence
  source 1..86: mol_type = other DNA
actggcgcttctatctgtattactctgagcgccatcaccagcgactatgtcgtagtgggtaaagctctcttcggagagcatcagag

SEQ ID NO: 7036 - DNA, 85 bp, synthetic construct
  misc_feature 1..85: note = engineered ribonucleic acid scaffold (ERS) sequence
  source 1..85: mol_type = other DNA
actggcgcttctatctggttactctgagcgccatcaccagcgactatgtcgtagtgggtaaagctctcttcggagagcatcagag

SEQ ID NO: 7037 - DNA, 85 bp, synthetic construct
  misc_feature 1..85: note = engineered ribonucleic acid scaffold (ERS) sequence
  source 1..85: mol_type = other DNA
actggcgcttctatctgtttactctgagcgccatcaccagcgactatgtcgtagtgggtaaagctctcttcggagagcatcagag

SEQ ID NO: 7038 - DNA, 86 bp, synthetic construct
  misc_feature 1..86: note = engineered ribonucleic acid scaffold (ERS) sequence
  source 1..86: mol_type = other DNA
actggcgcttctatctgatttactctgagcgccatcaccagcgactatgtcgtagtgggtaaagctctcttcggagagcatcagag

SEQ ID NO: 7039 - DNA, 85 bp, synthetic construct
  misc_feature 1..85: note = engineered ribonucleic acid scaffold (ERS) sequence
  source 1..85: mol_type = other DNA
actggcgcttctatctgattgctctgagcgccatcaccagcgactatgtcgtagtgggtaaagctctcttcggagagcatcagag

SEQ ID NO: 7040 - DNA, 79 bp, synthetic construct
  misc_feature 1..79: note = engineered ribonucleic acid scaffold (ERS) sequence
  source 1..79: mol_type = other DNA
actggcgcttctatatctgattactctgagcgccatcaccagcgactatgtcgtagtgggtaaagctgcagcatcagag

SEQ ID NO: 7041 - DNA, 78 bp, synthetic construct
  misc_feature 1..78: note = engineered ribonucleic acid scaffold (ERS) sequence
  source 1..78: mol_type = other DNA
actggcgcttctaatctgattactctgagcgccatcaccagcgactatgtcgtagtgggtaaagctgcagcatcagag

SEQ ID NO: 7042 - DNA, 76 bp, synthetic construct
  misc_feature 1..76: note = engineered ribonucleic acid scaffold (ERS) sequence
  source 1..76: mol_type = other DNA
actggcgcttctactgattactctgagcgccatcaccagcgactatgtcgtagtgggtaaagctgcagcatcagag

SEQ ID NO: 7043 - DNA, 77 bp, synthetic construct
  misc_feature 1..77: note = engineered ribonucleic acid scaffold (ERS) sequence
  source 1..77: mol_type = other DNA
actggcgcttctaactgattactctgagcgccatcaccagcgactatgtcgtagtgggtaaagctgcagcatcagag

SEQ ID NO: 7044 - DNA, 77 bp, synthetic construct
  misc_feature 1..77: note = engineered ribonucleic acid scaffold (ERS) sequence
  source 1..77: mol_type = other DNA
actggcgcttctacctgattactctgagcgccatcaccagcgactatgtcgtagtgggtaaagctgcagcatcagag

SEQ ID NO: 7045 - DNA, 77 bp, synthetic construct
  misc_feature 1..77: note = engineered ribonucleic acid scaffold (ERS) sequence
  source 1..77: mol_type = other DNA
actggcgcttctagctgattactctgagcgccatcaccagcgactatgtcgtagtgggtaaagctgcagcatcagag

SEQ ID NO: 7046 - DNA, 79 bp, synthetic construct
  misc_feature 1..79: note = engineered ribonucleic acid scaffold (ERS) sequence
  source 1..79: mol_type = other DNA
actggcgcttctattactgattactctgagcgccatcaccagcgactatgtcgtagtgggtaaagctgcagcatcagag

SEQ ID NO: 7047 - DNA, 77 bp, synthetic construct
  misc_feature 1..77: note = engineered ribonucleic acid scaffold (ERS) sequence
  source 1..77: mol_type = other DNA
actggcgcttctatatgattactctgagcgccatcaccagcgactatgtcgtagtgggtaaagctgcagcatcagag

SEQ ID NO: 7048 - DNA, 77 bp, synthetic construct
  misc_feature 1..77: note = engineered ribonucleic acid scaffold (ERS) sequence
  source 1..77: mol_type = other DNA
actggcgcttctatgtgattactctgagcgccatcaccagcgactatgtcgtagtgggtaaagctgcagcatcagag

SEQ ID NO: 7049 - DNA, 77 bp, synthetic construct
  misc_feature 1..77: note = engineered ribonucleic acid scaffold (ERS) sequence
  source 1..77: mol_type = other DNA
actggcgcttctatttgattactctgagcgccatcaccagcgactatgtcgtagtgggtaaagctgcagcatcagag

SEQ ID NO: 7050 - DNA, 78 bp, synthetic construct
  misc_feature 1..78: note = engineered ribonucleic acid scaffold (ERS) sequence
  source 1..78: mol_type = other DNA
actggcgcttctatcttgattactctgagcgccatcaccagcgactatgtcgtagtgggtaaagctgcagcatcagag

SEQ ID NO: 7051 - DNA, 77 bp, synthetic construct
  misc_feature 1..77: note = engineered ribonucleic acid scaffold (ERS) sequence
  source 1..77: mol_type = other DNA
actggcgcttctatcagattactctgagcgccatcaccagcgactatgtcgtagtgggtaaagctgcagcatcagag

SEQ ID NO: 7052 - DNA, 77 bp, synthetic construct
  misc_feature 1..77: note = engineered ribonucleic acid scaffold (ERS) sequence
  source 1..77: mol_type = other DNA
actggcgcttctatcggattactctgagcgccatcaccagcgactatgtcgtagtgggtaaagctgcagcatcagag

SEQ ID NO: 7053 - DNA, 78 bp, synthetic construct
  misc_feature 1..78: note = engineered ribonucleic acid scaffold (ERS) sequence
  source 1..78: mol_type = other DNA
actggcgcttctatctgaattactctgagcgccatcaccagcgactatgtcgtagtgggtaaagctgcagcatcagag

SEQ ID NO: 7054 - DNA, 78 bp, synthetic construct
  misc_feature 1..78: note = engineered ribonucleic acid scaffold (ERS) sequence
  source 1..78: mol_type = other DNA
actggcgcttctatctgtattactctgagcgccatcaccagcgactatgtcgtagtgggtaaagctgcagcatcagag

SEQ ID NO: 7055 - DNA, 77 bp, synthetic construct
  misc_feature 1..77: note = engineered ribonucleic acid scaffold (ERS) sequence
  source 1..77: mol_type = other DNA
actggcgcttctatctggttactctgagcgccatcaccagcgactatgtcgtagtgggtaaagctgcagcatcagag

SEQ ID NO: 7056 - DNA, 77 bp, synthetic construct
  misc_feature 1..77: note = engineered ribonucleic acid scaffold (ERS) sequence
  source 1..77: mol_type = other DNA
actggcgcttctatctgtttactctgagcgccatcaccagcgactatgtcgtagtgggtaaagctgcagcatcagag

SEQ ID NO: 7057 - DNA, 78 bp, synthetic construct
  misc_feature 1..78: note = engineered ribonucleic acid scaffold (ERS) sequence
  source 1..78: mol_type = other DNA
actggcgcttctatctgatttactctgagcgccatcaccagcgactatgtcgtagtgggtaaagctgcagcatcagag

SEQ ID NO: 7058 - DNA, 77 bp, synthetic construct
  misc_feature 1..77: note = engineered ribonucleic acid scaffold (ERS) sequence
  source 1..77: mol_type = other DNA
actggcgcttctatctgattgctctgagcgccatcaccagcgactatgtcgtagtgggtaaagctgcagcatcagag

SEQ ID NO: 7059 - DNA, 85 bp, synthetic construct
  misc_feature 1..85: note = engineered ribonucleic acid scaffold (ERS) sequence
  source 1..85: mol_type = other DNA
actggcgcttctatatctgattactctgagcgccatcaccagcgactatgtcgtagtgggtaaagctgcttcggcagcatcagag

SEQ ID NO: 7060 - DNA, 84 bp, synthetic construct
  misc_feature 1..84: note = engineered ribonucleic acid scaffold (ERS) sequence
  source 1..84: mol_type = other DNA
actggcgcttctaatctgattactctgagcgccatcaccagcgactatgtcgtagtgggtaaagctgcttcggcagcatcagag

SEQ ID NO: 7061 - DNA, 82 bp, synthetic construct
  misc_feature 1..82: note = engineered ribonucleic acid scaffold (ERS) sequence
  source 1..82: mol_type = other DNA
actggcgcttctactgattactctgagcgccatcaccagcgactatgtcgtagtgggtaaagctgcttcggcagcatcagag

SEQ ID NO: 7062 - DNA, 83 bp, synthetic construct
  misc_feature 1..83: note = engineered ribonucleic acid scaffold (ERS) sequence
  source 1..83: mol_type = other DNA
actggcgcttctaactgattactctgagcgccatcaccagcgactatgtcgtagtgggtaaagctgcttcggcagcatcagag

SEQ ID NO: 7063 - DNA, 83 bp, synthetic construct
  misc_feature 1..83: note = engineered ribonucleic acid scaffold (ERS) sequence
  source 1..83: mol_type = other DNA
actggcgcttctacctgattactctgagcgccatcaccagcgactatgtcgtagtgggtaaagctgcttcggcagcatcagag

SEQ ID NO: 7064 - DNA, 83 bp, synthetic construct
  misc_feature 1..83: note = engineered ribonucleic acid scaffold (ERS) sequence
  source 1..83: mol_type = other DNA
actggcgcttctagctgattactctgagcgccatcaccagcgactatgtcgtagtgggtaaagctgcttcggcagcatcagag

SEQ ID NO: 7065 - DNA, 85 bp, synthetic construct
  misc_feature 1..85: note = engineered ribonucleic acid scaffold (ERS) sequence
  source 1..85: mol_type = other DNA
actggcgcttctattactgattactctgagcgccatcaccagcgactatgtcgtagtgggtaaagctgcttcggcagcatcagag

SEQ ID NO: 7066 - DNA, 83 bp, synthetic construct
  misc_feature 1..83: note = engineered ribonucleic acid scaffold (ERS) sequence
  source 1..83: mol_type = other DNA
actggcgcttctatatgattactctgagcgccatcaccagcgactatgtcgtagtgggtaaagctgcttcggcagcatcagag

SEQ ID NO: 7067 - DNA, 83 bp, synthetic construct
  misc_feature 1..83: note = engineered ribonucleic acid scaffold (ERS) sequence
  source 1..83: mol_type = other DNA
actggcgcttctatgtgattactctgagcgccatcaccagcgactatgtcgtagtgggtaaagctgcttcggcagcatcagag

SEQ ID NO: 7068 - DNA, 83 bp, synthetic construct
  misc_feature 1..83: note = engineered ribonucleic acid scaffold (ERS) sequence
  source 1..83: mol_type = other DNA
actggcgcttctatttgattactctgagcgccatcaccagcgactatgtcgtagtgggtaaagctgcttcggcagcatcagag

SEQ ID NO: 7069 - DNA, 84 bp, synthetic construct
  misc_feature 1..84: note = engineered ribonucleic acid scaffold (ERS) sequence
  source 1..84: mol_type = other DNA
actggcgcttctatcttgattactctgagcgccatcaccagcgactatgtcgtagtgggtaaagctgcttcggcagcatcagag

SEQ ID NO: 7070 - DNA, 83 bp, synthetic construct
  misc_feature 1..83: note = engineered ribonucleic acid scaffold (ERS) sequence
  source 1..83: mol_type = other DNA
actggcgcttctatcagattactctgagcgccatcaccagcgactatgtcgtagtgggtaaagctgcttcggcagcatcagag

SEQ ID NO: 7071 - DNA, 83 bp, synthetic construct
  misc_feature 1..83: note = engineered ribonucleic acid scaffold (ERS) sequence
  source 1..83: mol_type = other DNA
actggcgcttctatcggattactctgagcgccatcaccagcgactatgtcgtagtgggtaaagctgcttcggcagcatcagag

SEQ ID NO: 7072 - DNA, 84 bp, synthetic construct
  misc_feature 1..84: note = engineered ribonucleic acid scaffold (ERS) sequence
  source 1..84: mol_type = other DNA
actggcgcttctatctgaattactctgagcgccatcaccagcgactatgtcgtagtgggtaaagctgcttcggcagcatcagag

SEQ ID NO: 7073 - DNA, 84 bp, synthetic construct
  misc_feature 1..84: note = engineered ribonucleic acid scaffold (ERS) sequence
  source 1..84: mol_type = other DNA
actggcgcttctatctgtattactctgagcgccatcaccagcgactatgtcgtagtgggtaaagctgcttcggcagcatcagag

SEQ ID NO: 7074 - DNA, 83 bp, synthetic construct
  misc_feature 1..83: note = engineered ribonucleic acid scaffold (ERS) sequence
  source 1..83: mol_type = other DNA
actggcgcttctatctggttactctgagcgccatcaccagcgactatgtcgtagtgggtaaagctgcttcggcagcatcagag

SEQ ID NO: 7075 - DNA, 83 bp, synthetic construct
  misc_feature 1..83: note = engineered ribonucleic acid scaffold (ERS) sequence
  source 1..83: mol_type = other DNA
actggcgcttctatctgtttactctgagcgccatcaccagcgactatgtcgtagtgggtaaagctgcttcggcagcatcagag

SEQ ID NO: 7076 - DNA, 84 bp, synthetic construct
  misc_feature 1..84: note = engineered ribonucleic acid scaffold (ERS) sequence
  source 1..84: mol_type = other DNA
actggcgcttctatctgatttactctgagcgccatcaccagcgactatgtcgtagtgggtaaagctgcttcggcagcatcagag

SEQ ID NO: 7077 - DNA, 83 bp, synthetic construct
  misc_feature 1..83: note = engineered ribonucleic acid scaffold (ERS) sequence
  source 1..83: mol_type = other DNA
actggcgcttctatctgattgctctgagcgccatcaccagcgactatgtcgtagtgggtaaagctgcttcggcagcatcagag

SEQ ID NO: 7078 - DNA, 91 bp, synthetic construct
  misc_feature 1..91: note = engineered ribonucleic acid scaffold (ERS) sequence
  source 1..91: mol_type = other DNA
actggcgcttctatatctgattactctgagcgccatcaccagcgactatgtcgtagtgggtaaaggtccctcttcggagggaacatcagag

SEQ ID NO: 7079 - DNA, 90 bp, synthetic construct
  misc_feature 1..90: note = engineered ribonucleic acid scaffold (ERS) sequence
  source 1..90: mol_type = other DNA
actggcgcttctaatctgattactctgagcgccatcaccagcgactatgtcgtagtgggtaaaggtccctcttcggagggaacatcagag

SEQ ID NO: 7080 - DNA, 88 bp, synthetic construct
  misc_feature 1..88: note = engineered ribonucleic acid scaffold (ERS) sequence
  source 1..88: mol_type = other DNA
actggcgcttctactgattactctgagcgccatcaccagcgactatgtcgtagtgggtaaaggtccctcttcggagggaacatcagag

SEQ ID NO: 7081 - DNA, 89 bp, synthetic construct
  misc_feature 1..89: note = engineered ribonucleic acid scaffold (ERS) sequence
  source 1..89: mol_type = other DNA
actggcgcttctaactgattactctgagcgccatcaccagcgactatgtcgtagtgggtaaaggtccctcttcggagggaacatcagag

SEQ ID NO: 7082 - DNA, 89 bp, synthetic construct
  misc_feature 1..89: note = engineered ribonucleic acid scaffold (ERS) sequence
  source 1..89: mol_type = other DNA
actggcgcttctacctgattactctgagcgccatcaccagcgactatgtcgtagtgggtaaaggtccctcttcggagggaacatcagag

SEQ ID NO: 7083 - DNA, 89 bp, synthetic construct
  misc_feature 1..89: note = engineered ribonucleic acid scaffold (ERS) sequence
  source 1..89: mol_type = other DNA
actggcgcttctagctgattactctgagcgccatcaccagcgactatgtcgtagtgggtaaaggtccctcttcggagggaacatcagag

SEQ ID NO: 7084 - DNA, 91 bp, synthetic construct
  misc_feature 1..91: note = engineered ribonucleic acid scaffold (ERS) sequence
  source 1..91: mol_type = other DNA
actggcgcttctattactgattactctgagcgccatcaccagcgactatgtcgtagtgggtaaaggtccctcttcggagggaacatcagag

SEQ ID NO: 7085 - DNA, 89 bp, synthetic construct
  misc_feature 1..89: note = engineered ribonucleic acid scaffold (ERS) sequence
  source 1..89: mol_type = other DNA
actggcgcttctatatgattactctgagcgccatcaccagcgactatgtcgtagtgggtaaaggtccctcttcggagggaacatcagag

SEQ ID NO: 7086 - DNA, 89 bp, synthetic construct
  misc_feature 1..89: note = engineered ribonucleic acid scaffold (ERS) sequence
  source 1..89: mol_type = other DNA
actggcgcttctatgtgattactctgagcgccatcaccagcgactatgtcgtagtgggtaaaggtccctcttcggagggaacatcagag

SEQ ID NO: 7087 - DNA, 89 bp, synthetic construct
  misc_feature 1..89: note = engineered ribonucleic acid scaffold (ERS) sequence
  source 1..89: mol_type = other DNA
actggcgcttctatttgattactctgagcgccatcaccagcgactatgtcgtagtgggtaaaggtccctcttcggagggaacatcagag

SEQ ID NO: 7088 - DNA, 90 bp, synthetic construct
  misc_feature 1..90: note = engineered ribonucleic acid scaffold (ERS) sequence
  source 1..90: mol_type = other DNA
actggcgcttctatcttgattactctgagcgccatcaccagcgactatgtcgtagtgggtaaaggtccctcttcggagggaacatcagag

SEQ ID NO: 7089 - DNA, 89 bp, synthetic construct
  misc_feature 1..89: note = engineered ribonucleic acid scaffold (ERS) sequence
  source 1..89: mol_type = other DNA
actggcgcttctatcagattactctgagcgccatcaccagcgactatgtcgtagtgggtaaaggtccctcttcggagggaacatcagag

SEQ ID NO: 7090 - DNA, 89 bp, synthetic construct
  misc_feature 1..89: note = engineered ribonucleic acid scaffold (ERS) sequence
  source 1..89: mol_type = other DNA
actggcgcttctatcggattactctgagcgccatcaccagcgactatgtcgtagtgggtaaaggtccctcttcggagggaacatcagag

SEQ ID NO: 7091 - DNA, 90 bp, synthetic construct
  misc_feature 1..90: note = engineered ribonucleic acid scaffold (ERS) sequence
  source 1..90: mol_type = other DNA
actggcgcttctatctgaattactctgagcgccatcaccagcgactatgtcgtagtgggtaaaggtccctcttcggagggaacatcagag

SEQ ID NO: 7092 - DNA, 90 bp, synthetic construct
  misc_feature 1..90: note = engineered ribonucleic acid scaffold (ERS) sequence
  source 1..90: mol_type = other DNA
actggcgcttctatctgtattactctgagcgccatcaccagcgactatgtcgtagtgggtaaaggtccctcttcggagggaacatcagag

SEQ ID NO: 7093 - DNA, 89 bp, synthetic construct
  misc_feature 1..89: note = engineered ribonucleic acid scaffold (ERS) sequence
  source 1..89: mol_type = other DNA
actggcgcttctatctggttactctgagcgccatcaccagcgactatgtcgtagtgggtaaaggtccctcttcggagggaacatcagag

SEQ ID NO: 7094 - DNA, 89 bp, synthetic construct
  misc_feature 1..89: note = engineered ribonucleic acid scaffold (ERS) sequence
  source 1..89: mol_type = other DNA
actggcgcttctatctgtttactctgagcgccatcaccagcgactatgtcgtagtgggtaaaggtccctcttcggagggaacatcagag

SEQ ID NO: 7095 - DNA, 90 bp, synthetic construct
  misc_feature 1..90: note = engineered ribonucleic acid scaffold (ERS) sequence
  source 1..90: mol_type = other DNA
actggcgcttctatctgatttactctgagcgccatcaccagcgactatgtcgtagtgggtaaaggtccctcttcggagggaacatcagag

SEQ ID NO: 7096 - DNA, 89 bp, synthetic construct
  misc_feature 1..89: note = engineered ribonucleic acid scaffold (ERS) sequence
  source 1..89: mol_type = other DNA
actggcgcttctatctgattgctctgagcgccatcaccagcgactatgtcgtagtgggtaaaggtccctcttcggagggaacatcagag

SEQ ID NO: 7097 - DNA, 95 bp, synthetic construct
  misc_feature 1..95: note = engineered ribonucleic acid scaffold (ERS) sequence
  source 1..95: mol_type = other DNA
actggcgcttctatatctgattactctgagcgccatcaccagcgactatgtcgtagtgggtaaaggtgacggtcttcggaccgtcaccatcagag

SEQ ID NO: 7098 - DNA, 94 bp, synthetic construct
  misc_feature 1..94: note = engineered ribonucleic acid scaffold (ERS) sequence
  source 1..94: mol_type = other DNA
actggcgcttctaatctgattactctgagcgccatcaccagcgactatgtcgtagtgggtaaaggtgacggtcttcggaccgtcaccatcagag

SEQ ID NO: 7099 - DNA, 92 bp, synthetic construct
  misc_feature 1..92: note = engineered ribonucleic acid scaffold (ERS) sequence
  source 1..92: mol_type = other DNA
actggcgcttctactgattactctgagcgccatcaccagcgactatgtcgtagtgggtaaaggtgacggtcttcggaccgtcaccatcagag

SEQ ID NO: 7100 - DNA, 93 bp, synthetic construct
  misc_feature 1..93: note = engineered ribonucleic acid scaffold (ERS) sequence
  source 1..93: mol_type = other DNA
actggcgcttctaactgattactctgagcgccatcaccagcgactatgtcgtagtgggtaaaggtgacggtcttcggaccgtcaccatcagag

SEQ ID NO: 7101 - DNA, 93 bp, synthetic construct
  misc_feature 1..93: note = engineered ribonucleic acid scaffold (ERS) sequence
  source 1..93: mol_type = other DNA
actggcgcttctacctgattactctgagcgccatcaccagcgactatgtcgtagtgggtaaaggtgacggtcttcggaccgtcaccatcagag

SEQ ID NO: 7102 - DNA, 93 bp, synthetic construct
  misc_feature 1..93: note = engineered ribonucleic acid scaffold (ERS) sequence
  source 1..93: mol_type = other DNA
actggcgcttctagctgattactctgagcgccatcaccagcgactatgtcgtagtgggtaaaggtgacggtcttcggaccgtcaccatcagag

SEQ ID NO: 7103 - DNA, 95 bp, synthetic construct
  misc_feature 1..95: note = engineered ribonucleic acid scaffold (ERS) sequence
  source 1..95: mol_type = other DNA
actggcgcttctattactgattactctgagcgccatcaccagcgactatgtcgtagtgggtaaaggtgacggtcttcggaccgtcaccatcagag

SEQ ID NO: 7104 - DNA, 93 bp, synthetic construct
  misc_feature 1..93: note = engineered ribonucleic acid scaffold (ERS) sequence
  source 1..93: mol_type = other DNA
actggcgcttctatatgattactctgagcgccatcaccagcgactatgtcgtagtgggtaaaggtgacggtcttcggaccgtcaccatcagag

SEQ ID NO: 7105 - DNA, 93 bp, synthetic construct
  misc_feature 1..93: note = engineered ribonucleic acid scaffold (ERS) sequence
  source 1..93: mol_type = other DNA
actggcgcttctatgtgattactctgagcgccatcaccagcgactatgtcgtagtgggtaaaggtgacggtcttcggaccgtcaccatcagag

SEQ ID NO: 7106 - DNA, 93 bp, synthetic construct
  misc_feature 1..93: note = engineered ribonucleic acid scaffold (ERS) sequence
  source 1..93: mol_type = other DNA
actggcgcttctatttgattactctgagcgccatcaccagcgactatgtcgtagtgggtaaaggtgacggtcttcggaccgtcaccatcagag

SEQ ID NO: 7107 - DNA, 94 bp, synthetic construct
  misc_feature 1..94: note = engineered ribonucleic acid scaffold (ERS) sequence
  source 1..94: mol_type = other DNA
actggcgcttctatcttgattactctgagcgccatcaccagcgactatgtcgtagtgggtaaaggtgacggtcttcggaccgtcaccatcagag

SEQ ID NO: 7108 - DNA, 93 bp, synthetic construct
  misc_feature 1..93: note = engineered ribonucleic acid scaffold (ERS) sequence
  source 1..93: mol_type = other DNA
actggcgcttctatcagattactctgagcgccatcaccagcgactatgtcgtagtgggtaaaggtgacggtcttcggaccgtcaccatcagag

SEQ ID NO: 7109 - DNA, 93 bp, synthetic construct
  misc_feature 1..93: note = engineered ribonucleic acid scaffold (ERS) sequence
  source 1..93: mol_type = other DNA
actggcgcttctatcggattactctgagcgccatcaccagcgactatgtcgtagtgggtaaaggtgacggtcttcggaccgtcaccatcagag

SEQ ID NO: 7110 - DNA, 94 bp, synthetic construct
  misc_feature 1..94: note = engineered ribonucleic acid scaffold (ERS) sequence
  source 1..94: mol_type = other DNA
actggcgcttctatctgaattactctgagcgccatcaccagcgactatgtcgtagtgggtaaaggtgacggtcttcggaccgtcaccatcagag

SEQ ID NO: 7111 - DNA, 94 bp, synthetic construct
  misc_feature 1..94: note = engineered ribonucleic acid scaffold (ERS) sequence
  source 1..94: mol_type = other DNA
actggcgcttctatctgtattactctgagcgccatcaccagcgactatgtcgtagtgggtaaaggtgacggtcttcggaccgtcaccatcagag

SEQ ID NO: 7112 - DNA, 93 bp, synthetic construct
  misc_feature 1..93: note = engineered ribonucleic acid scaffold (ERS) sequence
  source 1..93: mol_type = other DNA
actggcgcttctatctggttactctgagcgccatcaccagcgactatgtcgtagtgggtaaaggtgacggtcttcggaccgtcaccatcagag

SEQ ID NO: 7113 - DNA, 93 bp, synthetic construct
  misc_feature 1..93: note = engineered ribonucleic acid scaffold (ERS) sequence
  source 1..93: mol_type = other DNA
actggcgcttctatctgtttactctgagcgccatcaccagcgactatgtcgtagtgggtaaaggtgacggtcttcggaccgtcaccatcagag

SEQ ID NO: 7114 - DNA, 94 bp, synthetic construct
  misc_feature 1..94: note = engineered ribonucleic acid scaffold (ERS) sequence
  source 1..94: mol_type = other DNA
actggcgcttctatctgatttactctgagcgccatcaccagcgactatgtcgtagtgggtaaaggtgacggtcttcggaccgtcaccatcagag

SEQ ID NO: 7115 - DNA, 93 bp, synthetic construct
  misc_feature 1..93: note = engineered ribonucleic acid scaffold (ERS) sequence
  source 1..93: mol_type = other DNA
actggcgcttctatctgattgctctgagcgccatcaccagcgactatgtcgtagtgggtaaaggtgacggtcttcggaccgtcaccatcagag

SEQ ID NO: 7116 - DNA, 93 bp, synthetic construct
  misc_feature 1..93: note = engineered ribonucleic acid scaffold (ERS) sequence
  source 1..93: mol_type = other DNA
actggcgcttctatatctgattactctgagcgccatcaccagcgactatgtcgtagtgggtaaagtctccctcttcggagggaggcatcagag

SEQ ID NO: 7117 - DNA, 92 bp, synthetic construct
  misc_feature 1..92: note = engineered ribonucleic acid scaffold (ERS) sequence
  source 1..92: mol_type = other DNA
actggcgcttctaatctgattactctgagcgccatcaccagcgactatgtcgtagtgggtaaagtctccctcttcggagggaggcatcagag

SEQ ID NO: 7118 - DNA, 90 bp, synthetic construct
  misc_feature 1..90: note = engineered ribonucleic acid scaffold (ERS) sequence
  source 1..90: mol_type = other DNA
actggcgcttctactgattactctgagcgccatcaccagcgactatgtcgtagtgggtaaagtctccctcttcggagggaggcatcagag

SEQ ID NO: 7119 - DNA, 91 bp, synthetic construct
  misc_feature 1..91: note = engineered ribonucleic acid scaffold (ERS) sequence
  source 1..91: mol_type = other DNA
actggcgcttctaactgattactctgagcgccatcaccagcgactatgtcgtagtgggtaaagtctccctcttcggagggaggcatcagag

SEQ ID NO: 7120 - DNA, 91 bp, synthetic construct
  misc_feature 1..91: note = engineered ribonucleic acid scaffold (ERS) sequence
  source 1..91: mol_type = other DNA
actggcgcttctacctgattactctgagcgccatcaccagcgactatgtcgtagtgggtaaagtctccctcttcggagggaggcatcagag

SEQ ID NO: 7121 - DNA, 91 bp, synthetic construct
  misc_feature 1..91: note = engineered ribonucleic acid scaffold (ERS) sequence
  source 1..91: mol_type = other DNA
actggcgcttctagctgattactctgagcgccatcaccagcgactatgtcgtagtgggtaaagtctccctcttcggagggaggcatcagag

SEQ ID NO: 7122 - DNA, 93 bp, synthetic construct
  misc_feature 1..93: note = engineered ribonucleic acid scaffold (ERS) sequence
  source 1..93: mol_type = other DNA
actggcgcttctattactgattactctgagcgccatcaccagcgactatgtcgtagtgggtaaagtctccctcttcggagggaggcatcagag

SEQ ID NO: 7123 - DNA, 91 bp, synthetic construct
  misc_feature 1..91: note = engineered ribonucleic acid scaffold (ERS) sequence
  source 1..91: mol_type = other DNA
actggcgcttctatatgattactctgagcgccatcaccagcgactatgtcgtagtgggtaaagtctccctcttcggagggaggcatcagag

SEQ ID NO: 7124 - DNA, 91 bp, synthetic construct
  misc_feature 1..91: note = engineered ribonucleic acid scaffold (ERS) sequence
  source 1..91: mol_type = other DNA
actggcgcttctatgtgattactctgagcgccatcaccagcgactatgtcgtagtgggtaaagtctccctcttcggagggaggcatcagag

SEQ ID NO: 7125 - DNA, 91 bp, synthetic construct
  misc_feature 1..91: note = engineered ribonucleic acid scaffold (ERS) sequence
  source 1..91: mol_type = other DNA
actggcgcttctatttgattactctgagcgccatcaccagcgactatgtcgtagtgggtaaagtctccctcttcggagggaggcatcagag

SEQ ID NO: 7126 - DNA, 92 bp, synthetic construct
  misc_feature 1..92: note = engineered ribonucleic acid scaffold (ERS) sequence
  source 1..92: mol_type = other DNA
actggcgcttctatcttgattactctgagcgccatcaccagcgactatgtcgtagtgggtaaagtctccctcttcggagggaggcatcagag

SEQ ID NO: 7127 - DNA, 91 bp, synthetic construct
  misc_feature 1..91: note = engineered ribonucleic acid scaffold (ERS) sequence
  source 1..91: mol_type = other DNA
actggcgcttctatcagattactctgagcgccatcaccagcgactatgtcgtagtgggtaaagtctccctcttcggagggaggcatcagag

SEQ ID NO: 7128 - DNA, 91 bp, synthetic construct
  misc_feature 1..91: note = engineered ribonucleic acid scaffold (ERS) sequence
  source 1..91: mol_type = other DNA
actggcgcttctatcggattactctgagcgccatcaccagcgactatgtcgtagtgggtaaagtctccctcttcggagggaggcatcagag

SEQ ID NO: 7129 - DNA, 92 bp, synthetic construct
  misc_feature 1..92: note = engineered ribonucleic acid scaffold (ERS) sequence
  source 1..92: mol_type = other DNA
actggcgcttctatctgaattactctgagcgccatcaccagcgactatgtcgtagtgggtaaagtctccctcttcggagggaggcatcagag

SEQ ID NO: 7130 - DNA, 92 bp, synthetic construct
  misc_feature 1..92: note = engineered ribonucleic acid scaffold (ERS) sequence
  source 1..92: mol_type = other DNA
actggcgcttctatctgtattactctgagcgccatcaccagcgactatgtcgtagtgggtaaagtctccctcttcggagggaggcatcagag

SEQ ID NO: 7131 - DNA, 91 bp, synthetic construct
  misc_feature 1..91: note = engineered ribonucleic acid scaffold (ERS) sequence
  source 1..91: mol_type = other DNA
actggcgcttctatctggttactctgagcgccatcaccagcgactatgtcgtagtgggtaaagtctccctcttcggagggaggcatcagag

SEQ ID NO: 7132 - DNA, 91 bp, synthetic construct
  misc_feature 1..91: note = engineered ribonucleic acid scaffold (ERS) sequence
  source 1..91: mol_type = other DNA
actggcgcttctatctgtttactctgagcgccatcaccagcgactatgtcgtagtgggtaaagtctccctcttcggagggaggcatcagag

SEQ ID NO: 7133 - DNA, 92 bp, synthetic construct
  misc_feature 1..92: note = engineered ribonucleic acid scaffold (ERS) sequence
  source 1..92: mol_type = other DNA
actggcgcttctatctgatttactctgagcgccatcaccagcgactatgtcgtagtgggtaaagtctccctcttcggagggaggcatcagag

SEQ ID NO: 7134 - DNA, 91 bp, synthetic construct
  misc_feature 1..91: note = engineered ribonucleic acid scaffold (ERS) sequence
  source 1..91: mol_type = other DNA
actggcgcttctatctgattgctctgagcgccatcaccagcgactatgtcgtagtgggtaaagtctccctcttcggagggaggcatcagag

SEQ ID NO: 7135 - DNA, 95 bp, synthetic construct
  misc_feature 1..95: note = engineered ribonucleic acid scaffold (ERS) sequence
  source 1..95: mol_type = other DNA
actggcgcttctatatctgattactctgagcgccatcaccagcgactatgtcgtagtgggtaaagtgcgcccgcttcggcgggcgcacatcagag

SEQ ID NO: 7136 - DNA, 94 bp, synthetic construct
  misc_feature 1..94: note = engineered ribonucleic acid scaffold (ERS) sequence
  source 1..94: mol_type = other DNA
actggcgcttctaatctgattactctgagcgccatcaccagcgactatgtcgtagtgggtaaagtgcgcccgcttcggcgggcgcacatcagag

SEQ ID NO: 7137 - DNA, 92 bp, synthetic construct
  misc_feature 1..92: note = engineered ribonucleic acid scaffold (ERS) sequence
  source 1..92: mol_type = other DNA
actggcgcttctactgattactctgagcgccatcaccagcgactatgtcgtagtgggtaaagtgcgcccgcttcggcgggcgcacatcagag

SEQ ID NO: 7138 - DNA, 93 bp, synthetic construct
  misc_feature 1..93: note = engineered ribonucleic acid scaffold (ERS) sequence
  source 1..93: mol_type = other DNA
actggcgcttctaactgattactctgagcgccatcaccagcgactatgtcgtagtgggtaaagtgcgcccgcttcggcgggcgcacatcagag

SEQ ID NO: 7139 - DNA, 93 bp, synthetic construct
  misc_feature 1..93: note = engineered ribonucleic acid scaffold (ERS) sequence
  source 1..93: mol_type = other DNA
actggcgcttctacctgattactctgagcgccatcaccagcgactatgtcgtagtgggtaaagtgcgcccgcttcggcgggcgcacatcagag

SEQ ID NO: 7140 - DNA, 93 bp, synthetic construct
  misc_feature 1..93: note = engineered ribonucleic acid scaffold (ERS) sequence
  source 1..93: mol_type = other DNA
actggcgcttctagctgattactctgagcgccatcaccagcgactatgtcgtagtgggtaaagtgcgcccgcttcggcgggcgcacatcagag

SEQ ID NO: 7141 - DNA, 95 bp, synthetic construct
  misc_feature 1..95: note = engineered ribonucleic acid scaffold (ERS) sequence
  source 1..95: mol_type = other DNA
actggcgcttctattactgattactctgagcgccatcaccagcgactatgtcgtagtgggtaaagtgcgcccgcttcggcgggcgcacatcagag

SEQ ID NO: 7142 - DNA, 93 bp, synthetic construct
  misc_feature 1..93: note = engineered ribonucleic acid scaffold (ERS) sequence
  source 1..93: mol_type = other DNA
actggcgcttctatatgattactctgagcgccatcaccagcgactatgtcgtagtgggtaaagtgcgcccgcttcggcgggcgcacatcagag

SEQ ID NO: 7143 - DNA, 93 bp, synthetic construct
  misc_feature 1..93: note = engineered ribonucleic acid scaffold (ERS) sequence
  source 1..93: mol_type = other DNA
actggcgcttctatgtgattactctgagcgccatcaccagcgactatgtcgtagtgggtaaagtgcgcccgcttcggcgggcgcacatcagag

SEQ ID NO: 7144 - DNA, 93 bp, synthetic construct
  misc_feature 1..93: note = engineered ribonucleic acid scaffold (ERS) sequence
  source 1..93: mol_type = other DNA
actggcgcttctatttgattactctgagcgccatcaccagcgactatgtcgtagtgggtaaagtgcgcccgcttcggcgggcgcacatcagag

SEQ ID NO: 7145 - DNA, 94 bp, synthetic construct
  misc_feature 1..94: note = engineered ribonucleic acid scaffold (ERS) sequence
  source 1..94: mol_type = other DNA
actggcgcttctatcttgattactctgagcgccatcaccagcgactatgtcgtagtgggtaaagtgcgcccgcttcggcgggcgcacatcagag

SEQ ID NO: 7146 - DNA, 93 bp, synthetic construct
  misc_feature 1..93: note = engineered ribonucleic acid scaffold (ERS) sequence
  source 1..93: mol_type = other DNA
actggcgcttctatcagattactctgagcgccatcaccagcgactatgtcgtagtgggtaaagtgcgcccgcttcggcgggcgcacatcagag

SEQ ID NO: 7147 - DNA, 93 bp, synthetic construct
  misc_feature 1..93: note = engineered ribonucleic acid scaffold (ERS) sequence
  source 1..93: mol_type = other DNA
actggcgcttctatcggattactctgagcgccatcaccagcgactatgtcgtagtgggtaaagtgcgcccgcttcggcgggcgcacatcagag

SEQ ID NO: 7148 - DNA, 94 bp, synthetic construct
  misc_feature 1..94: note = engineered ribonucleic acid scaffold (ERS) sequence
  source 1..94: mol_type = other DNA
actggcgcttctatctgaattactctgagcgccatcaccagcgactatgtcgtagtgggtaaagtgcgcccgcttcggcgggcgcacatcagag

SEQ ID NO: 7149 - DNA, 94 bp, synthetic construct
  misc_feature 1..94: note = engineered ribonucleic acid scaffold (ERS) sequence
  source 1..94: mol_type = other DNA
actggcgcttctatctgtattactctgagcgccatcaccagcgactatgtcgtagtgggtaaagtgcgcccgcttcggcgggcgcacatcagag

SEQ ID NO: 7150 - DNA, 93 bp, synthetic construct
  misc_feature 1..93: note = engineered ribonucleic acid scaffold (ERS) sequence
  source 1..93: mol_type = other DNA
actggcgcttctatctggttactctgagcgccatcaccagcgactatgtcgtagtgggtaaagtgcgcccgcttcggcgggcgcacatcagag

SEQ ID NO: 7151 - DNA, 93 bp, synthetic construct
  misc_feature 1..93: note = engineered ribonucleic acid scaffold (ERS) sequence
  source 1..93: mol_type = other DNA
actggcgcttctatctgtttactctgagcgccatcaccagcgactatgtcgtagtgggtaaagtgcgcccgcttcggcgggcgcacatcagag

SEQ ID NO: 7152 - DNA, 94 bp, synthetic construct
  misc_feature 1..94: note = engineered ribonucleic acid scaffold (ERS) sequence
  source 1..94: mol_type = other DNA
actggcgcttctatctgatttactctgagcgccatcaccagcgactatgtcgtagtgggtaaagtgcgcccgcttcggcgggcgcacatcagag

SEQ ID NO: 7153 - DNA, 93 bp, synthetic construct
  misc_feature 1..93: note = engineered ribonucleic acid scaffold (ERS) sequence
  source 1..93: mol_type = other DNA
actggcgcttctatctgattgctctgagcgccatcaccagcgactatgtcgtagtgggtaaagtgcgcccgcttcggcgggcgcacatcagag

SEQ ID NO: 7154 - DNA, 95 bp, synthetic construct
  misc_feature 1..95: note = engineered ribonucleic acid scaffold (ERS) sequence
  source 1..95: mol_type = other DNA
actggcgcttctatatctgattactctgagcgccatcaccagcgactatgtcgtagtgggtaaataatgaaaacttcggttttcattaatcagag

SEQ ID NO: 7155 - DNA, 94 bp, synthetic construct
  misc_feature 1..94: note = engineered ribonucleic acid scaffold (ERS) sequence
  source 1..94: mol_type = other DNA
actggcgcttctaatctgattactctgagcgccatcaccagcgactatgtcgtagtgggtaaataatgaaaacttcggttttcattaatcagag

SEQ ID NO: 7156 - DNA, 92 bp, synthetic construct
  misc_feature 1..92: note = engineered ribonucleic acid scaffold (ERS) sequence
  source 1..92: mol_type = other DNA
actggcgcttctactgattactctgagcgccatcaccagcgactatgtcgtagtgggtaaataatgaaaacttcggttttcattaatcagag

SEQ ID NO: 7157 - DNA, 93 bp, synthetic construct
  misc_feature 1..93: note = engineered ribonucleic acid scaffold (ERS) sequence
  source 1..93: mol_type = other DNA
actggcgcttctaactgattactctgagcgccatcaccagcgactatgtcgtagtgggtaaataatgaaaacttcggttttcattaatcagag

SEQ ID NO: 7158 - DNA, 93 bp, synthetic construct
  misc_feature 1..93: note = engineered ribonucleic acid scaffold (ERS) sequence
  source 1..93: mol_type = other DNA
actggcgcttctacctgattactctgagcgccatcaccagcgactatgtcgtagtgggtaaataatgaaaacttcggttttcattaatcagag

SEQ ID NO: 7159 - DNA, 93 bp, synthetic construct
  misc_feature 1..93: note = engineered ribonucleic acid scaffold (ERS) sequence
  source 1..93: mol_type = other DNA
actggcgcttctagctgattactctgagcgccatcaccagcgactatgtcgtagtgggtaaataatgaaaacttcggttttcattaatcagag

SEQ ID NO: 7160 - DNA, 95 bp, synthetic construct
  misc_feature 1..95: note = engineered ribonucleic acid scaffold (ERS) sequence
  source 1..95: mol_type = other DNA
actggcgcttctattactgattactctgagcgccatcaccagcgactatgtcgtagtgggtaaataatgaaaacttcggttttcattaatcagag

SEQ ID NO: 7161 - DNA, 93 bp, synthetic construct
  misc_feature 1..93: note = engineered ribonucleic acid scaffold (ERS) sequence
  source 1..93: mol_type = other DNA
actggcgcttctatatgattactctgagcgccatcaccagcgactatgtcgtagtgggtaaataatgaaaacttcggttttcattaatcagag

SEQ ID NO: 7162 - DNA, 93 bp, synthetic construct
  misc_feature 1..93: note = engineered ribonucleic acid scaffold (ERS) sequence
  source 1..93: mol_type = other DNA
actggcgcttctatgtgattactctgagcgccatcaccagcgactatgtcgtagtgggtaaataatgaaaacttcggttttcattaatcagag

SEQ ID NO: 7163 - DNA, 93 bp, synthetic construct
  misc_feature 1..93: note = engineered ribonucleic acid scaffold (ERS) sequence
  source 1..93: mol_type = other DNA
actggcgcttctatttgattactctgagcgccatcaccagcgactatgtcgtagtgggtaaataatgaaaacttcggttttcattaatcagag

SEQ ID NO: 7164 - DNA, 94 bp, synthetic construct
  misc_feature 1..94: note = engineered ribonucleic acid scaffold (ERS) sequence
  source 1..94: mol_type = other DNA
actggcgcttctatcttgattactctgagcgccatcaccagcgactatgtcgtagtgggtaaataatgaaaacttcggttttcattaatcagag

SEQ ID NO: 7165 - DNA, 93 bp, synthetic construct
  misc_feature 1..93: note = engineered ribonucleic acid scaffold (ERS) sequence
  source 1..93: mol_type = other DNA
actggcgcttctatcagattactctgagcgccatcaccagcgactatgtcgtagtgggtaaataatgaaaacttcggttttcattaatcagag

SEQ ID NO: 7166 - DNA, 93 bp, synthetic construct
  misc_feature 1..93: note = engineered ribonucleic acid scaffold (ERS) sequence
  source 1..93: mol_type = other DNA
actggcgcttctatcggattactctgagcgccatcaccagcgactatgtcgtagtgggtaaataatgaaaacttcggttttcattaatcagag

SEQ ID NO: 7167 - DNA, 94 bp, synthetic construct
  misc_feature 1..94: note = engineered ribonucleic acid scaffold (ERS) sequence
  source 1..94: mol_type = other DNA
actggcgcttctatctgaattactctgagcgccatcaccagcgactatgtcgtagtgggtaaataatgaaaacttcggttttcattaatcagag

SEQ ID NO: 7168 - DNA, 94 bp, synthetic construct
  misc_feature 1..94: note = engineered ribonucleic acid scaffold (ERS) sequence
  source 1..94: mol_type = other DNA
actggcgcttctatctgtattactctgagcgccatcaccagcgactatgtcgtagtgggtaaataatgaaaacttcggttttcattaatcagag

SEQ ID NO: 7169 - DNA, 93 bp, synthetic construct
  misc_feature 1..93: note = engineered ribonucleic acid scaffold (ERS) sequence
  source 1..93: mol_type = other DNA
actggcgcttctatctggttactctgagcgccatcaccagcgactatgtcgtagtgggtaaataatgaaaacttcggttttcattaatcagag

SEQ ID NO: 7170 - DNA, 93 bp, synthetic construct
  misc_feature 1..93: note = engineered ribonucleic acid scaffold (ERS) sequence
  source 1..93: mol_type = other DNA
actggcgcttctatctgtttactctgagcgccatcaccagcgactatgtcgtagtgggtaaataatgaaaacttcggttttcattaatcagag

SEQ ID NO: 7171 - DNA, 94 bp, synthetic construct
  misc_feature 1..94: note = engineered ribonucleic acid scaffold (ERS) sequence
  source 1..94: mol_type = other DNA
actggcgcttctatctgatttactctgagcgccatcaccagcgactatgtcgtagtgggtaaataatgaaaacttcggttttcattaatcagag

SEQ ID NO: 7172 - DNA, 93 bp, synthetic construct
  misc_feature 1..93: note = engineered ribonucleic acid scaffold (ERS) sequence
  source 1..93: mol_type = other DNA
actggcgcttctatctgattgctctgagcgccatcaccagcgactatgtcgtagtgggtaaataatgaaaacttcggttttcattaatcagag

SEQ ID NO: 7173 - DNA, 95 bp, synthetic construct
  misc_feature 1..95: note = engineered ribonucleic acid scaffold (ERS) sequence
  source 1..95: mol_type = other DNA
actggcgcttctatatctgattactctgagcgccatcaccagcgactatgtcgtagtgggtaaatcgtaagaacttcggttcttacgaatcagag

SEQ ID NO: 7174 - DNA, 94 bp, synthetic construct
  misc_feature 1..94: note = engineered ribonucleic acid scaffold (ERS) sequence
  source 1..94: mol_type = other DNA
actggcgcttctaatctgattactctgagcgccatcaccagcgactatgtcgtagtgggtaaatcgtaagaacttcggttcttacgaatcagag

SEQ ID NO: 7175 - DNA, 92 bp, synthetic construct
  misc_feature 1..92: note = engineered ribonucleic acid scaffold (ERS) sequence
  source 1..92: mol_type = other DNA
actggcgcttctactgattactctgagcgccatcaccagcgactatgtcgtagtgggtaaatcgtaagaacttcggttcttacgaatcagag

SEQ ID NO: 7176 - DNA, 93 bp, synthetic construct
  misc_feature 1..93: note = engineered ribonucleic acid scaffold (ERS) sequence
  source 1..93: mol_type = other DNA
actggcgcttctaactgattactctgagcgccatcaccagcgactatgtcgtagtgggtaaatcgtaagaacttcggttcttacgaatcagag

SEQ ID NO: 7177 - DNA, 93 bp, synthetic construct
  misc_feature 1..93: note = engineered ribonucleic acid scaffold (ERS) sequence
  source 1..93: mol_type = other DNA
actggcgcttctacctgattactctgagcgccatcaccagcgactatgtcgtagtgggtaaatcgtaagaacttcggttcttacgaatcagag

SEQ ID NO: 7178 - DNA, 93 bp, synthetic construct
  misc_feature 1..93: note = engineered ribonucleic acid scaffold (ERS) sequence
  source 1..93: mol_type = other DNA
actggcgcttctagctgattactctgagcgccatcaccagcgactatgtcgtagtgggtaaatcgtaagaacttcggttcttacgaatcagag

SEQ ID NO: 7179 - DNA, 95 bp, synthetic construct
  misc_feature 1..95: note = engineered ribonucleic acid scaffold (ERS) sequence
  source 1..95: mol_type = other DNA
actggcgcttctattactgattactctgagcgccatcaccagcgactatgtcgtagtgggtaaatcgtaagaacttcggttcttacgaatcagag

SEQ ID NO: 7180 - DNA, 93 bp, synthetic construct
  misc_feature 1..93: note = engineered ribonucleic acid scaffold (ERS) sequence
  source 1..93: mol_type = other DNA
actggcgcttctatatgattactctgagcgccatcaccagcgactatgtcgtagtgggtaaatcgtaagaacttcggttcttacgaatcagag

SEQ ID NO: 7181 - DNA, 93 bp, synthetic construct
  misc_feature 1..93: note = engineered ribonucleic acid scaffold (ERS) sequence
  source 1..93: mol_type = other DNA
actggcgcttctatgtgattactctgagcgccatcaccagcgactatgtcgtagtgggtaaatcgtaagaacttcggttcttacgaatcagag

SEQ ID NO: 7182 - DNA, 93 bp, synthetic construct
  misc_feature 1..93: note = engineered ribonucleic acid scaffold (ERS) sequence
  source 1..93: mol_type = other DNA
actggcgcttctatttgattactctgagcgccatcaccagcgactatgtcgtagtgggtaaatcgtaagaacttcggttcttacgaatcagag

SEQ ID NO: 7183 - DNA, 94 bp, synthetic construct
  misc_feature 1..94: note = engineered ribonucleic acid scaffold (ERS) sequence
  source 1..94: mol_type = other DNA
actggcgcttctatcttgattactctgagcgccatcaccagcgactatgtcgtagtgggtaaatcgtaagaacttcggttcttacgaatcagag

SEQ ID NO: 7184 - DNA, 93 bp, synthetic construct
  misc_feature 1..93: note = engineered ribonucleic acid scaffold (ERS) sequence
  source 1..93: mol_type = other DNA
actggcgcttctatcagattactctgagcgccatcaccagcgactatgtcgtagtgggtaaatcgtaagaacttcggttcttacgaatcagag

SEQ ID NO: 7185 - DNA, 93 bp, synthetic construct
  misc_feature 1..93: note = engineered ribonucleic acid scaffold (ERS) sequence
  source 1..93: mol_type = other DNA
actggcgcttctatcggattactctgagcgccatcaccagcgactatgtcgtagtgggtaaatcgtaagaacttcggttcttacgaatcagag

SEQ ID NO: 7186 - DNA, 94 bp, synthetic construct
  misc_feature 1..94: note = engineered ribonucleic acid scaffold (ERS) sequence
  source 1..94: mol_type = other DNA
actggcgcttctatctgaattactctgagcgccatcaccagcgactatgtcgtagtgggtaaatcgtaagaacttcggttcttacgaatcagag

SEQ ID NO: 7187 - DNA, 94 bp, synthetic construct
  misc_feature 1..94: note = engineered ribonucleic acid scaffold (ERS) sequence
  source 1..94: mol_type = other DNA
actggcgcttctatctgtattactctgagcgccatcaccagcgactatgtcgtagtgggtaaatcgtaagaacttcggttcttacgaatcagag

SEQ ID NO: 7188 - DNA, 93 bp, synthetic construct
  misc_feature 1..93: note = engineered ribonucleic acid scaffold (ERS) sequence
  source 1..93: mol_type = other DNA
actggcgcttctatctggttactctgagcgccatcaccagcgactatgtcgtagtgggtaaatcgtaagaacttcggttcttacgaatcagag

SEQ ID NO: 7189 - DNA, 93 bp, synthetic construct
  misc_feature 1..93: note = engineered ribonucleic acid scaffold (ERS) sequence
  source 1..93: mol_type = other DNA
actggcgcttctatctgtttactctgagcgccatcaccagcgactatgtcgtagtgggtaaatcgtaagaacttcggttcttacgaatcagag

SEQ ID NO: 7190 - DNA, 94 bp, synthetic construct
  misc_feature 1..94: note = engineered ribonucleic acid scaffold (ERS) sequence
  source 1..94: mol_type = other DNA
actggcgcttctatctgatttactctgagcgccatcaccagcgactatgtcgtagtgggtaaatcgtaagaacttcggttcttacgaatcagag

SEQ ID NO: 7191 - DNA, 93 bp, synthetic construct
  misc_feature 1..93: note = engineered ribonucleic acid scaffold (ERS) sequence
  source 1..93: mol_type = other DNA
actggcgcttctatctgattgctctgagcgccatcaccagcgactatgtcgtagtgggtaaatcgtaagaacttcggttcttacgaatcagag

SEQ ID NO: 7192 - DNA, 95 bp, synthetic construct
  misc_feature 1..95: note = engineered ribonucleic acid scaffold (ERS) sequence
  source 1..95: mol_type = other DNA
actggcgcttctatatctgattactctgagcgccatcaccagcgactatgtcgtagtgggtaaatggaagatgcttcggcatcttccaatcagag

SEQ ID NO: 7193 - DNA, 94 bp, synthetic construct
  misc_feature 1..94: note = engineered ribonucleic acid scaffold (ERS) sequence
  source 1..94: mol_type = other DNA
actggcgcttctaatctgattactctgagcgccatcaccagcgactatgtcgtagtgggtaaatggaagatgcttcggcatcttccaatcagag

SEQ ID NO: 7194 - DNA, 92 bp, synthetic construct
  misc_feature 1..92: note = engineered ribonucleic acid scaffold (ERS) sequence
  source 1..92: mol_type = other DNA
actggcgcttctactgattactctgagcgccatcaccagcgactatgtcgtagtgggtaaatggaagatgcttcggcatcttccaatcagag

SEQ ID NO: 7195 - DNA, 93 bp, synthetic construct
  misc_feature 1..93: note = engineered ribonucleic acid scaffold (ERS) sequence
  source 1..93: mol_type = other DNA
actggcgcttctaactgattactctgagcgccatcaccagcgactatgtcgtagtgggtaaatggaagatgcttcggcatcttccaatcagag

SEQ ID NO: 7196 - DNA, 93 bp, synthetic construct
  misc_feature 1..93: note = engineered ribonucleic acid scaffold (ERS) sequence
  source 1..93: mol_type = other DNA
actggcgcttctacctgattactctgagcgccatcaccagcgactatgtcgtagtgggtaaatggaagatgcttcggcatcttccaatcagag

SEQ ID NO: 7197 - DNA, 93 bp, synthetic construct
  misc_feature 1..93: note = engineered ribonucleic acid scaffold (ERS) sequence
  source 1..93: mol_type = other DNA
actggcgcttctagctgattactctgagcgccatcaccagcgactatgtcgtagtgggtaaatggaagatgcttcggcatcttccaatcagag

SEQ ID NO: 7198 - DNA, 95 bp, synthetic construct
  misc_feature 1..95: note = engineered ribonucleic acid scaffold (ERS) sequence
  source 1..95: mol_type = other DNA
actggcgcttctattactgattactctgagcgccatcaccagcgactatgtcgtagtgggtaaatggaagatgcttcggcatcttccaatcagag

SEQ ID NO: 7199 - DNA, 93 bp, synthetic construct
  misc_feature 1..93: note = engineered ribonucleic acid scaffold (ERS) sequence
  source 1..93: mol_type = other DNA
actggcgcttctatatgattactctgagcgccatcaccagcgactatgtcgtagtgggtaaatggaagatgcttcggcatcttccaatcagag

SEQ ID NO: 7200 - DNA, 93 bp, synthetic construct
  misc_feature 1..93: note = engineered ribonucleic acid scaffold (ERS) sequence
  source 1..93: mol_type = other DNA
actggcgcttctatgtgattactctgagcgccatcaccagcgactatgtcgtagtgggtaaatggaagatgcttcggcatcttccaatcagag

SEQ ID NO: 7201 - DNA, 93 bp, synthetic construct
  misc_feature 1..93: note = engineered ribonucleic acid scaffold (ERS) sequence
  source 1..93: mol_type = other DNA
actggcgcttctatttgattactctgagcgccatcaccagcgactatgtcgtagtgggtaaatggaagatgcttcggcatcttccaatcagag

SEQ ID NO: 7202 - DNA, 94 bp, synthetic construct
  misc_feature 1..94: note = engineered ribonucleic acid scaffold (ERS) sequence
  source 1..94: mol_type = other DNA
actggcgcttctatcttgattactctgagcgccatcaccagcgactatgtcgtagtgggtaaatggaagatgcttcggcatcttccaatcagag

SEQ ID NO: 7203 - DNA, 93 bp, synthetic construct
  misc_feature 1..93: note = engineered ribonucleic acid scaffold (ERS) sequence
  source 1..93: mol_type = other DNA
actggcgcttctatcagattactctgagcgccatcaccagcgactatgtcgtagtgggtaaatggaagatgcttcggcatcttccaatcagag

SEQ ID NO: 7204 - DNA, 93 bp, synthetic construct
  misc_feature 1..93: note = engineered ribonucleic acid scaffold (ERS) sequence
  source 1..93: mol_type = other DNA
actggcgcttctatcggattactctgagcgccatcaccagcgactatgtcgtagtgggtaaatggaagatgcttcggcatcttccaatcagag

SEQ ID NO: 7205 - DNA, 94 bp, synthetic construct
  misc_feature 1..94: note = engineered ribonucleic acid scaffold (ERS) sequence
  source 1..94: mol_type = other DNA
actggcgcttctatctgaattactctgagcgccatcaccagcgactatgtcgtagtgggtaaatggaagatgcttcggcatcttccaatcagag

SEQ ID NO: 7206 - DNA, 94 bp, synthetic construct
  misc_feature 1..94: note = engineered ribonucleic acid scaffold (ERS) sequence
  source 1..94: mol_type = other DNA
actggcgcttctatctgtattactctgagcgccatcaccagcgactatgtcgtagtgggtaaatggaagatgcttcggcatcttccaatcagag

SEQ ID NO: 7207 - DNA, 93 bp, synthetic construct
  misc_feature 1..93: note = engineered ribonucleic acid scaffold (ERS) sequence
  source 1..93: mol_type = other DNA
actggcgcttctatctggttactctgagcgccatcaccagcgactatgtcgtagtgggtaaatggaagatgcttcggcatcttccaatcagag

SEQ ID NO: 7208 - DNA, 93 bp, synthetic construct
  misc_feature 1..93: note = engineered ribonucleic acid scaffold (ERS) sequence
  source 1..93: mol_type = other DNA
actggcgcttctatctgtttactctgagcgccatcaccagcgactatgtcgtagtgggtaaatggaagatgcttcggcatcttccaatcagag

SEQ ID NO: 7209 - DNA, 94 bp, synthetic construct
  misc_feature 1..94: note = engineered ribonucleic acid scaffold (ERS) sequence
  source 1..94: mol_type = other DNA
actggcgcttctatctgatttactctgagcgccatcaccagcgactatgtcgtagtgggtaaatggaagatgcttcggcatcttccaatcagag

SEQ ID NO: 7210 - DNA, 93 bp, synthetic construct
  misc_feature 1..93: note = engineered ribonucleic acid scaffold (ERS) sequence
  source 1..93: mol_type = other DNA
actggcgcttctatctgattgctctgagcgccatcaccagcgactatgtcgtagtgggtaaatggaagatgcttcggcatcttccaatcagag

SEQ ID NO: 7211 - DNA, 99 bp, synthetic construct
  misc_feature 1..99: note = engineered ribonucleic acid scaffold (ERS) sequence
  source 1..99: mol_type = other DNA
actggcgcttctatatctgattactctgagcgccatcaccagcgactatgtcgtagtgggtaaagcccttacggacttcggtccgtaagggcatcagag

SEQ ID NO: 7212 - DNA, 98 bp, synthetic construct
  misc_feature 1..98: note = engineered ribonucleic acid scaffold (ERS) sequence
  source 1..98: mol_type = other DNA
actggcgcttctaatctgattactctgagcgccatcaccagcgactatgtcgtagtgggtaaagcccttacggacttcggtccgtaagggcatcagag

SEQ ID NO: 7213 - DNA, 96 bp, synthetic construct
  misc_feature 1..96: note = engineered ribonucleic acid scaffold (ERS) sequence
  source 1..96: mol_type = other DNA
actggcgcttctactgattactctgagcgccatcaccagcgactatgtcgtagtgggtaaagcccttacggacttcggtccgtaagggcatcagag

SEQ ID NO: 7214 - DNA, 97 bp, synthetic construct
  misc_feature 1..97: note = engineered ribonucleic acid scaffold (ERS) sequence
  source 1..97: mol_type = other DNA
actggcgcttctaactgattactctgagcgccatcaccagcgactatgtcgtagtgggtaaagcccttacggacttcggtccgtaagggcatcagag

SEQ ID NO: 7215 - DNA, 97 bp, synthetic construct
  misc_feature 1..97: note = engineered ribonucleic acid scaffold (ERS) sequence
  source 1..97: mol_type = other DNA
actggcgcttctacctgattactctgagcgccatcaccagcgactatgtcgtagtgggtaaagcccttacggacttcggtccgtaagggcatcagag

SEQ ID NO: 7216 - DNA, 97 bp, synthetic construct
  misc_feature 1..97: note = engineered ribonucleic acid scaffold (ERS) sequence
  source 1..97: mol_type = other DNA
actggcgcttctagctgattactctgagcgccatcaccagcgactatgtcgtagtgggtaaagcccttacggacttcggtccgtaagggcatcagag

SEQ ID NO: 7217 - DNA, 99 bp, synthetic construct
  misc_feature 1..99: note = engineered ribonucleic acid scaffold (ERS) sequence
  source 1..99: mol_type = other DNA
actggcgcttctattactgattactctgagcgccatcaccagcgactatgtcgtagtgggtaaagcccttacggacttcggtccgtaagggcatcagag

SEQ ID NO: 7218 - DNA, 97 bp, synthetic construct
  misc_feature 1..97: note = engineered ribonucleic acid scaffold (ERS) sequence
  source 1..97: mol_type = other DNA
actggcgcttctatatgattactctgagcgccatcaccagcgactatgtcgtagtgggtaaagcccttacggacttcggtccgtaagggcatcagag

SEQ ID NO: 7219 - DNA, 97 bp, synthetic construct
  misc_feature 1..97: note = engineered ribonucleic acid scaffold (ERS) sequence
  source 1..97: mol_type = other DNA
actggcgcttctatgtgattactctgagcgccatcaccagcgactatgtcgtagtgggtaaagcccttacggacttcggtccgtaagggcatcagag

SEQ ID NO: 7220 - DNA, 97 bp, synthetic construct
  misc_feature 1..97: note = engineered ribonucleic acid scaffold (ERS) sequence
  source 1..97: mol_type = other DNA
actggcgcttctatttgattactctgagcgccatcaccagcgactatgtcgtagtgggtaaagcccttacggacttcggtccgtaagggcatcagag

SEQ ID NO: 7221 - DNA, 98 bp, synthetic construct
  misc_feature 1..98: note = engineered ribonucleic acid scaffold (ERS) sequence
  source 1..98: mol_type = other DNA
actggcgcttctatcttgattactctgagcgccatcaccagcgactatgtcgtagtgggtaaagcccttacggacttcggtccgtaagggcatcagag

SEQ ID NO: 7222 - DNA, 97 bp, synthetic construct
  misc_feature 1..97: note = engineered ribonucleic acid scaffold (ERS) sequence
  source 1..97: mol_type = other DNA
actggcgcttctatcagattactctgagcgccatcaccagcgactatgtcgtagtgggtaaagcccttacggacttcggtccgtaagggcatcagag

SEQ ID NO: 7223 - DNA, 97 bp, synthetic construct
  misc_feature 1..97: note = engineered ribonucleic acid scaffold (ERS) sequence
  source 1..97: mol_type = other DNA
actggcgcttctatcggattactctgagcgccatcaccagcgactatgtcgtagtgggtaaagcccttacggacttcggtccgtaagggcatcagag

SEQ ID NO: 7224 - DNA, 98 bp, synthetic construct
  misc_feature 1..98: note = engineered ribonucleic acid scaffold (ERS) sequence
  source 1..98: mol_type = other DNA
actggcgcttctatctgaattactctgagcgccatcaccagcgactatgtcgtagtgggtaaagcccttacggacttcggtccgtaagggcatcagag

SEQ ID NO: 7225 - DNA, 98 bp, synthetic construct
  misc_feature 1..98: note = engineered ribonucleic acid scaffold (ERS) sequence
  source 1..98: mol_type = other DNA
actggcgcttctatctgtattactctgagcgccatcaccagcgactatgtcgtagtgggtaaagcccttacggacttcggtccgtaagggcatcagag

SEQ ID NO: 7226 - DNA, 97 bp, synthetic construct
  misc_feature 1..97: note = engineered ribonucleic acid scaffold (ERS) sequence
  source 1..97: mol_type = other DNA
actggcgcttctatctggttactctgagcgccatcaccagcgactatgtcgtagtgggtaaagcccttacggacttcggtccgtaagggcatcagag

SEQ ID NO: 7227 - DNA, 97 bp, synthetic construct
  misc_feature 1..97: note = engineered ribonucleic acid scaffold (ERS) sequence
  source 1..97: mol_type = other DNA
actggcgcttctatctgtttactctgagcgccatcaccagcgactatgtcgtagtgggtaaagcccttacggacttcggtccgtaagggcatcagag

SEQ ID NO: 7228 - DNA, 98 bp, synthetic construct
  misc_feature 1..98: note = engineered ribonucleic acid scaffold (ERS) sequence
  source 1..98: mol_type = other DNA
actggcgcttctatctgatttactctgagcgccatcaccagcgactatgtcgtagtgggtaaagcccttacggacttcggtccgtaagggcatcagag

SEQ ID NO: 7229 - DNA, 97 bp, synthetic construct
  misc_feature 1..97: note = engineered ribonucleic acid scaffold (ERS) sequence
  source 1..97: mol_type = other DNA
actggcgcttctatctgattgctctgagcgccatcaccagcgactatgtcgtagtgggtaaagcccttacggacttcggtccgtaagggcatcagag

SEQ ID NO: 7230 - DNA, 101 bp, synthetic construct
  misc_feature 1..101: note = engineered ribonucleic acid scaffold (ERS) sequence
  source 1..101: mol_type = other DNA
actggcgcttctatatctgattactctgagcgccatcaccagcgactatgtcgtagtgggtaaagcctcttacggacttcggtccgtaagaggcatcagag

SEQ ID NO: 7231 - DNA, 100 bp, synthetic construct
  misc_feature 1..100: note = engineered ribonucleic acid scaffold (ERS) sequence
  source 1..100: mol_type = other DNA
actggcgcttctaatctgattactctgagcgccatcaccagcgactatgtcgtagtgggtaaagcctcttacggacttcggtccgtaagaggcatcagag

SEQ ID NO: 7232 - DNA, 98 bp, synthetic construct
  misc_feature 1..98: note = engineered ribonucleic acid scaffold (ERS) sequence
  source 1..98: mol_type = other DNA
actggcgcttctactgattactctgagcgccatcaccagcgactatgtcgtagtgggtaaagcctcttacggacttcggtccgtaagaggcatcagag

SEQ ID NO: 7233 - DNA, 99 bp, synthetic construct
  misc_feature 1..99: note = engineered ribonucleic acid scaffold (ERS) sequence
  source 1..99: mol_type = other DNA
actggcgcttctaactgattactctgagcgccatcaccagcgactatgtcgtagtgggtaaagcctcttacggacttcggtccgtaagaggcatcagag

SEQ ID NO: 7234 - DNA, 99 bp, synthetic construct
  misc_feature 1..99: note = engineered ribonucleic acid scaffold (ERS) sequence
  source 1..99: mol_type = other DNA
actggcgcttctacctgattactctgagcgccatcaccagcgactatgtcgtagtgggtaaagcctcttacggacttcggtccgtaagaggcatcagag

SEQ ID NO: 7235 - DNA, 99 bp, synthetic construct
  misc_feature 1..99: note = engineered ribonucleic acid scaffold (ERS) sequence
  source 1..99: mol_type = other DNA
actggcgcttctagctgattactctgagcgccatcaccagcgactatgtcgtagtgggtaaagcctcttacggacttcggtccgtaagaggcatcagag

SEQ ID NO: 7236 - DNA, 101 bp, synthetic construct
  misc_feature 1..101: note = engineered ribonucleic acid scaffold (ERS) sequence
  source 1..101: mol_type = other DNA
actggcgcttctattactgattactctgagcgccatcaccagcgactatgtcgtagtgggtaaagcctcttacggacttcggtccgtaagaggcatcagag

SEQ ID NO: 7237 - DNA, 99 bp, synthetic construct
  misc_feature 1..99: note = engineered ribonucleic acid scaffold (ERS) sequence
  source 1..99: mol_type = other DNA
actggcgcttctatatgattactctgagcgccatcaccagcgactatgtcgtagtgggtaaagcctcttacggacttcggtccgtaagaggcatcagag

SEQ ID NO: 7238 - DNA, 99 bp, synthetic construct
  misc_feature 1..99: note = engineered ribonucleic acid scaffold (ERS) sequence
  source 1..99: mol_type = other DNA
actggcgcttctatgtgattactctgagcgccatcaccagcgactatgtcgtagtgggtaaagcctcttacggacttcggtccgtaagaggcatcagag

SEQ ID NO: 7239 - DNA, 99 bp, synthetic construct
  misc_feature 1..99: note = engineered ribonucleic acid scaffold (ERS) sequence
  source 1..99: mol_type = other DNA
actggcgcttctatttgattactctgagcgccatcaccagcgactatgtcgtagtgggtaaagcctcttacggacttcggtccgtaagaggcatcagag

SEQ ID NO: 7240 - DNA, 100 bp, synthetic construct
  misc_feature 1..100: note = engineered ribonucleic acid scaffold (ERS) sequence
  source 1..100: mol_type = other DNA
actggcgcttctatcttgattactctgagcgccatcaccagcgactatgtcgtagtgggtaaagcctcttacggacttcggtccgtaagaggcatcagag

SEQ ID NO: 7241 - DNA, 99 bp, synthetic construct
  misc_feature 1..99: note = engineered ribonucleic acid scaffold (ERS) sequence
  source 1..99: mol_type = other DNA
actggcgcttctatcagattactctgagcgccatcaccagcgactatgtcgtagtgggtaaagcctcttacggacttcggtccgtaagaggcatcagag

SEQ ID NO: 7242 - DNA, 99 bp, synthetic construct
  misc_feature 1..99: note = engineered ribonucleic acid scaffold (ERS) sequence
  source 1..99: mol_type = other DNA
actggcgcttctatcggattactctgagcgccatcaccagcgactatgtcgtagtgggtaaagcctcttacggacttcggtccgtaagaggcatcagag

SEQ ID NO: 7243 - DNA, 100 bp, synthetic construct
  misc_feature 1..100: note = engineered ribonucleic acid scaffold (ERS) sequence
  source 1..100: mol_type = other DNA
actggcgcttctatctgaattactctgagcgccatcaccagcgactatgtcgtagtgggtaaagcctcttacggacttcggtccgtaagaggcatcagag

SEQ ID NO: 7244 - DNA, 100 bp, synthetic construct
  misc_feature 1..100: note = engineered ribonucleic acid scaffold (ERS) sequence
  source 1..100: mol_type = other DNA
actggcgcttctatctgtattactctgagcgccatcaccagcgactatgtcgtagtgggtaaagcctcttacggacttcggtccgtaagaggcatcagag

SEQ ID NO: 7245 - DNA, 99 bp, synthetic construct
  misc_feature 1..99: note = engineered ribonucleic acid scaffold (ERS) sequence
  source 1..99: mol_type = other DNA
actggcgcttctatctggttactctgagcgccatcaccagcgactatgtcgtagtgggtaaagcctcttacggacttcggtccgtaagaggcatcagag

SEQ ID NO: 7246 - DNA, 99 bp, synthetic construct
  misc_feature 1..99: note = engineered ribonucleic acid scaffold (ERS) sequence
  source 1..99: mol_type = other DNA
actggcgcttctatctgtttactctgagcgccatcaccagcgactatgtcgtagtgggtaaagcctcttacggacttcggtccgtaagaggcatcagag

SEQ ID NO: 7247 - DNA, 100 bp, synthetic construct
  misc_feature 1..100: note = engineered ribonucleic acid scaffold (ERS) sequence
  source 1..100: mol_type = other DNA
actggcgcttctatctgatttactctgagcgccatcaccagcgactatgtcgtagtgggtaaagcctcttacggacttcggtccgtaagaggcatcagag

SEQ ID NO: 7248 - DNA, 99 bp, synthetic construct
  misc_feature 1..99: note = engineered ribonucleic acid scaffold (ERS) sequence
  source 1..99: mol_type = other DNA
actggcgcttctatctgattgctctgagcgccatcaccagcgactatgtcgtagtgggtaaagcctcttacggacttcggtccgtaagaggcatcagag

SEQ ID NO: 7249 - DNA, 101 bp, synthetic construct
  misc_feature 1..101: note = engineered ribonucleic acid scaffold (ERS) sequence
  source 1..101: mol_type = other DNA
actggcgcttctatatctgattactctgagcgccatcaccagcgactatgtcgtagtgggtaaagccgcttagggacttcggtccctaagaggcatcagag

SEQ ID NO: 7250 - DNA, 100 bp, synthetic construct
  misc_feature 1..100: note = engineered ribonucleic acid scaffold (ERS) sequence
  source 1..100: mol_type = other DNA
actggcgcttctaatctgattactctgagcgccatcaccagcgactatgtcgtagtgggtaaagccgcttagggacttcggtccctaagaggcatcagag

SEQ ID NO: 7251 - DNA, 98 bp, synthetic construct
  misc_feature 1..98: note = engineered ribonucleic acid scaffold (ERS) sequence
  source 1..98: mol_type = other DNA
actggcgcttctactgattactctgagcgccatcaccagcgactatgtcgtagtgggtaaagccgcttagggacttcggtccctaagaggcatcagag

SEQ ID NO: 7252 - DNA, 99 bp, synthetic construct
  misc_feature 1..99: note = engineered ribonucleic acid scaffold (ERS) sequence
  source 1..99: mol_type = other DNA
actggcgcttctaactgattactctgagcgccatcaccagcgactatgtcgtagtgggtaaagccgcttagggacttcggtccctaagaggcatcagag

SEQ ID NO: 7253 - DNA, 99 bp, synthetic construct
  misc_feature 1..99: note = engineered ribonucleic acid scaffold (ERS) sequence
  source 1..99: mol_type = other DNA
actggcgcttctacctgattactctgagcgccatcaccagcgactatgtcgtagtgggtaaagccgcttagggacttcggtccctaagaggcatcagag

SEQ ID NO: 7254 - DNA, 99 bp, synthetic construct
  misc_feature 1..99: note = engineered ribonucleic acid scaffold (ERS) sequence
  source 1..99: mol_type = other DNA
actggcgcttctagctgattactctgagcgccatcaccagcgactatgtcgtagtgggtaaagccgcttagggacttcggtccctaagaggcatcagag

SEQ ID NO: 7255 - DNA, 101 bp, synthetic construct
  misc_feature 1..101: note = engineered ribonucleic acid scaffold (ERS) sequence
  source 1..101: mol_type = other DNA
actggcgcttctattactgattactctgagcgccatcaccagcgactatgtcgtagtgggtaaagccgcttagggacttcggtccctaagaggcatcagag

SEQ ID NO: 7256 - DNA, 99 bp, synthetic construct
  misc_feature 1..99: note = engineered ribonucleic acid scaffold (ERS) sequence
  source 1..99: mol_type = other DNA
actggcgcttctatatgattactctgagcgccatcaccagcgactatgtcgtagtgggtaaagccgcttagggacttcggtccctaagaggcatcagag

SEQ ID NO: 7257 - DNA, 99 bp, synthetic construct
  misc_feature 1..99: note = engineered ribonucleic acid scaffold (ERS) sequence
  source 1..99: mol_type = other DNA
actggcgcttctatgtgattactctgagcgccatcaccagcgactatgtcgtagtgggtaaagccgcttagggacttcggtccctaagaggcatcagag

SEQ ID NO: 7258 - DNA, 99 bp, synthetic construct
  misc_feature 1..99: note = engineered ribonucleic acid scaffold (ERS) sequence
  source 1..99: mol_type = other DNA
actggcgcttctatttgattactctgagcgccatcaccagcgactatgtcgtagtgggtaaagccgcttagggacttcggtccctaagaggcatcagag

SEQ ID NO: 7259 - DNA, 100 bp, synthetic construct
  misc_feature 1..100: note = engineered ribonucleic acid scaffold (ERS) sequence
  source 1..100: mol_type = other DNA
actggcgcttctatcttgattactctgagcgccatcaccagcgactatgtcgtagtgggtaaagccgcttagggacttcggtccctaagaggcatcagag

SEQ ID NO: 7260 - DNA, 99 bp, synthetic construct
  misc_feature 1..99: note = engineered ribonucleic acid scaffold (ERS) sequence
  source 1..99: mol_type = other DNA
actggcgcttctatcagattactctgagcgccatcaccagcgactatgtcgtagtgggtaaagccgcttagggacttcggtccctaagaggcatcagag

SEQ ID NO: 7261 - DNA, 99 bp, synthetic construct
  misc_feature 1..99: note = engineered ribonucleic acid scaffold (ERS) sequence
  source 1..99: mol_type = other DNA
actggcgcttctatcggattactctgagcgccatcaccagcgactatgtcgtagtgggtaaagccgcttagggacttcggtccctaagaggcatcagag

SEQ ID NO: 7262 - DNA, 100 bp, synthetic construct
  misc_feature 1..100: note = engineered ribonucleic acid scaffold (ERS) sequence
  source 1..100: mol_type = other DNA
actggcgcttctatctgaattactctgagcgccatcaccagcgactatgtcgtagtgggtaaagccgcttagggacttcggtccctaagaggcatcagag

SEQ ID NO: 7263 - DNA, 100 bp, synthetic construct
  misc_feature 1..100: note = engineered ribonucleic acid scaffold (ERS) sequence
  source 1..100: mol_type = other DNA
actggcgcttctatctgtattactctgagcgccatcaccagcgactatgtcgtagtgggtaaagccgcttagggacttcggtccctaagaggcatcagag

SEQ ID NO: 7264 - DNA, 99 bp, synthetic construct
  misc_feature 1..99: note = engineered ribonucleic acid scaffold (ERS) sequence
  source 1..99: mol_type = other DNA
actggcgcttctatctggttactctgagcgccatcaccagcgactatgtcgtagtgggtaaagccgcttagggacttcggtccctaagaggcatcagag

SEQ ID NO: 7265 - DNA, 99 bp, synthetic construct
  misc_feature 1..99: note = engineered ribonucleic acid scaffold (ERS) sequence
  source 1..99: mol_type = other DNA
actggcgcttctatctgtttactctgagcgccatcaccagcgactatgtcgtagtgggtaaagccgcttagggacttcggtccctaagaggcatcagag

SEQ ID NO: 7266 - DNA, 100 bp, synthetic construct
  misc_feature 1..100: note = engineered ribonucleic acid scaffold (ERS) sequence
  source 1..100: mol_type = other DNA
actggcgcttctatctgatttactctgagcgccatcaccagcgactatgtcgtagtgggtaaagccgcttagggacttcggtccctaagaggcatcagag

SEQ ID NO: 7267 - DNA, 99 bp, synthetic construct
  misc_feature 1..99: note = engineered ribonucleic acid scaffold (ERS) sequence
  source 1..99: mol_type = other DNA
actggcgcttctatctgattgctctgagcgccatcaccagcgactatgtcgtagtgggtaaagccgcttagggacttcggtccctaagaggcatcagag

SEQ ID NO: 7268 - DNA, 93 bp, synthetic construct
  misc_feature 1..93: note = engineered ribonucleic acid scaffold (ERS) sequence
  source 1..93: mol_type = other DNA
acacgggggcacttctatctgattactctgccgtgtctcaccagcgactatgtcgtagtgggtaaagctccctcttcggagggagcatcagag

SEQ ID NO: 7269 - DNA, 92 bp, synthetic construct
  misc_feature 1..92: note = engineered ribonucleic acid scaffold (ERS) sequence
  source 1..92: mol_type = other DNA
aacacggggcacttctatctgattactctgccgtgttcaccagcgactatgtcgtagtgggtaaagctccctcttcggagggagcatcagag

SEQ ID NO: 7270 - DNA, 93 bp, synthetic construct
  misc_feature 1..93: note = engineered ribonucleic acid scaffold (ERS) sequence
  source 1..93: mol_type = other DNA
acacacggggcacttctatctgattactctgccgtgttcaccagcgactatgtcgtagtgggtaaagctccctcttcggagggagcatcagag

SEQ ID NO: 7271 - DNA, 94 bp, synthetic construct
  misc_feature 1..94: note = engineered ribonucleic acid scaffold (ERS) sequence
  source 1..94: mol_type = other DNA
acacacgggggcacttctatctgattactctgccgtgttcaccagcgactatgtcgtagtgggtaaagctccctcttcggagggagcatcagag

SEQ ID NO: 7272 - DNA, 93 bp, synthetic construct
  misc_feature 1..93: note = engineered ribonucleic acid scaffold (ERS) sequence
  source 1..93: mol_type = other DNA
actggtgggcacttctatctgattactctgaccagtctcaccagcgactatgtcgtagtgggtaaagctccctcttcggagggagcatcagag

SEQ ID NO: 7273 - DNA, 92 bp, synthetic construct
  misc_feature 1..92: note = engineered ribonucleic acid scaffold (ERS) sequence
  source 1..92: mol_type = other DNA
aactggtggcacttctatctgattactctgaccagttcaccagcgactatgtcgtagtgggtaaagctccctcttcggagggagcatcagag

SEQ ID NO: 7274 - DNA, 93 bp, synthetic construct
  misc_feature 1..93: note = engineered ribonucleic acid scaffold (ERS) sequence
  source 1..93: mol_type = other DNA
acactggtggcacttctatctgattactctgaccagttcaccagcgactatgtcgtagtgggtaaagctccctcttcggagggagcatcagag

SEQ ID NO: 7275 - DNA, 94 bp, synthetic construct
  misc_feature 1..94: note = engineered ribonucleic acid scaffold (ERS) sequence
  source 1..94: mol_type = other DNA
acactggtgggcacttctatctgattactctgaccagttcaccagcgactatgtcgtagtgggtaaagctccctcttcggagggagcatcagag

SEQ ID NO: 7276 - DNA, 93 bp, synthetic construct
  misc_feature 1..93: note = engineered ribonucleic acid scaffold (ERS) sequence
  source 1..93: mol_type = other DNA
aggccggggcacttctatctgattactctgcggcctctcaccagcgactatgtcgtagtgggtaaagctccctcttcggagggagcatcagag

SEQ ID NO: 7277 - DNA, 92 bp, synthetic construct
  misc_feature 1..92: note = engineered ribonucleic acid scaffold (ERS) sequence
  source 1..92: mol_type = other DNA
aaggccgggcacttctatctgattactctgcggccttcaccagcgactatgtcgtagtgggtaaagctccctcttcggagggagcatcagag

SEQ ID NO: 7278 - DNA, 93 bp, synthetic construct
  misc_feature 1..93: note = engineered ribonucleic acid scaffold (ERS) sequence
  source 1..93: mol_type = other DNA
acaggccgggcacttctatctgattactctgcggccttcaccagcgactatgtcgtagtgggtaaagctccctcttcggagggagcatcagag

SEQ ID NO: 7279 - DNA, 94 bp, synthetic construct
  misc_feature 1..94: note = engineered ribonucleic acid scaffold (ERS) sequence
  source 1..94: mol_type = other DNA
acaggccggggcacttctatctgattactctgcggccttcaccagcgactatgtcgtagtgggtaaagctccctcttcggagggagcatcagag

SEQ ID NO: 7280 - DNA, 93 bp, synthetic construct
  misc_feature 1..93: note = engineered ribonucleic acid scaffold (ERS) sequence
  source 1..93: mol_type = other DNA
aggtccgggcacttctatctgattactctgggacctctcaccagcgactatgtcgtagtgggtaaagctccctcttcggagggagcatcagag

SEQ ID NO: 7281 - DNA, 92 bp, synthetic construct
  misc_feature 1..92: note = engineered ribonucleic acid scaffold (ERS) sequence
  source 1..92: mol_type = other DNA
aaggtccggcacttctatctgattactctgggaccttcaccagcgactatgtcgtagtgggtaaagctccctcttcggagggagcatcagag

SEQ ID NO: 7282 - DNA, 93 bp, synthetic construct
  misc_feature 1..93: note = engineered ribonucleic acid scaffold (ERS) sequence
  source 1..93: mol_type = other DNA
acaggtccggcacttctatctgattactctgggaccttcaccagcgactatgtcgtagtgggtaaagctccctcttcggagggagcatcagag

SEQ ID NO: 7283 - DNA, 94 bp, synthetic construct
  misc_feature 1..94: note = engineered ribonucleic acid scaffold (ERS) sequence
  source 1..94: mol_type = other DNA
acaggtccgggcacttctatctgattactctgggaccttcaccagcgactatgtcgtagtgggtaaagctccctcttcggagggagcatcagag

SEQ ID NO: 7284 - DNA, 93 bp, synthetic construct
  misc_feature 1..93: note = engineered ribonucleic acid scaffold (ERS) sequence
  source 1..93: mol_type = other DNA
cagcaagggcacttctatctgattactctgttgctgctcaccagcgactatgtcgtagtgggtaaagctccctcttcggagggagcatcagag

SEQ ID NO: 7285 - DNA, 92 bp, synthetic construct
  misc_feature 1..92: note = engineered ribonucleic acid scaffold (ERS) sequence
  source 1..92: mol_type = other DNA
acagcaaggcacttctatctgattactctgttgctgtcaccagcgactatgtcgtagtgggtaaagctccctcttcggagggagcatcagag

SEQ ID NO: 7286 - DNA, 93 bp, synthetic construct
  misc_feature 1..93: note = engineered ribonucleic acid scaffold (ERS) sequence
  source 1..93: mol_type = other DNA
accagcaaggcacttctatctgattactctgttgctgtcaccagcgactatgtcgtagtgggtaaagctccctcttcggagggagcatcagag

SEQ ID NO: 7287 - DNA, 94 bp, synthetic construct
  misc_feature 1..94: note = engineered ribonucleic acid scaffold (ERS) sequence
  source 1..94: mol_type = other DNA
accagcaagggcacttctatctgattactctgttgctgtcaccagcgactatgtcgtagtgggtaaagctccctcttcggagggagcatcagag

SEQ ID NO: 7288 - DNA, 93 bp, synthetic construct
  misc_feature 1..93: note = engineered ribonucleic acid scaffold (ERS) sequence
  source 1..93: mol_type = other DNA
cgagacgggcacttctatctgattactctgggctcgctcaccagcgactatgtcgtagtgggtaaagctccctcttcggagggagcatcagag

SEQ ID NO: 7289 - DNA, 92 bp, synthetic construct
  misc_feature 1..92: note = engineered ribonucleic acid scaffold (ERS) sequence
  source 1..92: mol_type = other DNA
acgagacggcacttctatctgattactctgggctcgtcaccagcgactatgtcgtagtgggtaaagctccctcttcggagggagcatcagag

SEQ ID NO: 7290 - DNA, 93 bp, synthetic construct
  misc_feature 1..93: note = engineered ribonucleic acid scaffold (ERS) sequence
  source 1..93: mol_type = other DNA
accgagacggcacttctatctgattactctgggctcgtcaccagcgactatgtcgtagtgggtaaagctccctcttcggagggagcatcagag

SEQ ID NO: 7291 - DNA, 94 bp, synthetic construct
  misc_feature 1..94: note = engineered ribonucleic acid scaffold (ERS) sequence
  source 1..94: mol_type = other DNA
accgagacgggcacttctatctgattactctgggctcgtcaccagcgactatgtcgtagtgggtaaagctccctcttcggagggagcatcagag

SEQ ID NO: 7292 - DNA, 93 bp, synthetic construct
  misc_feature 1..93: note = engineered ribonucleic acid scaffold (ERS) sequence
  source 1..93: mol_type = other DNA
ctgtaggggcacttctatctgattactctgctacagctcaccagcgactatgtcgtagtgggtaaagctccctcttcggagggagcatcagag

SEQ ID NO: 7293 - DNA, 92 bp, synthetic construct
  misc_feature 1..92: note = engineered ribonucleic acid scaffold (ERS) sequence
  source 1..92: mol_type = other DNA
actgtagggcacttctatctgattactctgctacagtcaccagcgactatgtcgtagtgggtaaagctccctcttcggagggagcatcagag

SEQ ID NO: 7294 - DNA, 93 bp, synthetic construct
  misc_feature 1..93: note = engineered ribonucleic acid scaffold (ERS) sequence
  source 1..93: mol_type = other DNA
acctgtagggcacttctatctgattactctgctacagtcaccagcgactatgtcgtagtgggtaaagctccctcttcggagggagcatcagag

SEQ ID NO: 7295 - DNA, 94 bp, synthetic construct
  misc_feature 1..94: note = engineered ribonucleic acid scaffold (ERS) sequence
  source 1..94: mol_type = other DNA
acctgtaggggcacttctatctgattactctgctacagtcaccagcgactatgtcgtagtgggtaaagctccctcttcggagggagcatcagag

SEQ ID NO: 7296 - DNA, 93 bp, synthetic construct
  misc_feature 1..93: note = engineered ribonucleic acid scaffold (ERS) sequence
  source 1..93: mol_type = other DNA
gagcacgggcacttctatctgattactctggggctcctcaccagcgactatgtcgtagtgggtaaagctccctcttcggagggagcatcagag

SEQ ID NO: 7297 - DNA, 92 bp, synthetic construct
  misc_feature 1..92: note = engineered ribonucleic acid scaffold (ERS) sequence
  source 1..92: mol_type = other DNA
agagcacggcacttctatctgattactctggggctctcaccagcgactatgtcgtagtgggtaaagctccctcttcggagggagcatcagag

SEQ ID NO: 7298 - DNA, 93 bp, synthetic construct
  misc_feature 1..93: note = engineered ribonucleic acid scaffold (ERS) sequence
  source 1..93: mol_type = other DNA
acgagcacggcacttctatctgattactctggggctctcaccagcgactatgtcgtagtgggtaaagctccctcttcggagggagcatcagag

SEQ ID NO: 7299 - DNA, 94 bp, synthetic construct
  misc_feature 1..94: note = engineered ribonucleic acid scaffold (ERS) sequence
  source 1..94: mol_type = other DNA
acgagcacgggcacttctatctgattactctggggctctcaccagcgactatgtcgtagtgggtaaagctccctcttcggagggagcatcagag

SEQ ID NO: 7300 - DNA, 93 bp, synthetic construct
  misc_feature 1..93: note = engineered ribonucleic acid scaffold (ERS) sequence
  source 1..93: mol_type = other DNA
gaggtggggcacttctatctgattactctgcacctcctcaccagcgactatgtcgtagtgggtaaagctccctcttcggagggagcatcagag

SEQ ID NO: 7301 - DNA, 92 bp, synthetic construct
  misc_feature 1..92: note = engineered ribonucleic acid scaffold (ERS) sequence
  source 1..92: mol_type = other DNA
agaggtgggcacttctatctgattactctgcacctctcaccagcgactatgtcgtagtgggtaaagctccctcttcggagggagcatcagag

SEQ ID NO: 7302 - DNA, 93 bp, synthetic construct
  misc_feature 1..93: note = engineered ribonucleic acid scaffold (ERS) sequence
  source 1..93: mol_type = other DNA
acgaggtgggcacttctatctgattactctgcacctctcaccagcgactatgtcgtagtgggtaaagctccctcttcggagggagcatcagag

SEQ ID NO: 7303 - DNA, 94 bp, synthetic construct
  misc_feature 1..94: note = engineered ribonucleic acid scaffold (ERS) sequence
  source 1..94: mol_type = other DNA
acgaggtggggcacttctatctgattactctgcacctctcaccagcgactatgtcgtagtgggtaaagctccctcttcggagggagcatcagag

SEQ ID NO: 7304 - DNA, 93 bp, synthetic construct
  misc_feature 1..93: note = engineered ribonucleic acid scaffold (ERS) sequence
  source 1..93: mol_type = other DNA
gggactgggcacttctatctgattactctgagtcccctcaccagcgactatgtcgtagtgggtaaagctccctcttcggagggagcatcagag

SEQ ID NO: 7305 - DNA, 92 bp, synthetic construct
  misc_feature 1..92: note = engineered ribonucleic acid scaffold (ERS) sequence
  source 1..92: mol_type = other DNA
agggactggcacttctatctgattactctgagtccctcaccagcgactatgtcgtagtgggtaaagctccctcttcggagggagcatcagag

SEQ ID NO: 7306 - DNA, 93 bp, synthetic construct
  misc_feature 1..93: note = engineered ribonucleic acid scaffold (ERS) sequence
  source 1..93: mol_type = other DNA
acgggactggcacttctatctgattactctgagtccctcaccagcgactatgtcgtagtgggtaaagctccctcttcggagggagcatcagag

SEQ ID NO: 7307 - DNA, 94 bp, synthetic construct
  misc_feature 1..94: note = engineered ribonucleic acid scaffold (ERS) sequence
  source 1..94: mol_type = other DNA
acgggactgggcacttctatctgattactctgagtccctcaccagcgactatgtcgtagtgggtaaagctccctcttcggagggagcatcagag

SEQ ID NO: 7308 - DNA, 93 bp, synthetic construct
  misc_feature 1..93: note = engineered ribonucleic acid scaffold (ERS) sequence
  source 1..93: mol_type = other DNA
gggcaagggcacttctatctgattactctgttgcccctcaccagcgactatgtcgtagtgggtaaagctccctcttcggagggagcatcagag

SEQ ID NO: 7309 - DNA, 92 bp, synthetic construct
  misc_feature 1..92: note = engineered ribonucleic acid scaffold (ERS) sequence
  source 1..92: mol_type = other DNA
agggcaaggcacttctatctgattactctgttgccctcaccagcgactatgtcgtagtgggtaaagctccctcttcggagggagcatcagag

SEQ ID NO: 7310 - DNA, 93 bp, synthetic construct
  misc_feature 1..93: note = engineered ribonucleic acid scaffold (ERS) sequence
  source 1..93: mol_type = other DNA
acgggcaaggcacttctatctgattactctgttgccctcaccagcgactatgtcgtagtgggtaaagctccctcttcggagggagcatcagag

SEQ ID NO: 7311 - DNA, 94 bp, synthetic construct
  misc_feature 1..94: note = engineered ribonucleic acid scaffold (ERS) sequence
  source 1..94: mol_type = other DNA
acgggcaagggcacttctatctgattactctgttgccctcaccagcgactatgtcgtagtgggtaaagctccctcttcggagggagcatcagag

SEQ ID NO: 7312 - DNA, 93 bp, synthetic construct
  misc_feature 1..93: note = engineered ribonucleic acid scaffold (ERS) sequence
  source 1..93: mol_type = other DNA
tgtgcggggcacttctatctgattactctgcgcacactcaccagcgactatgtcgtagtgggtaaagctccctcttcggagggagcatcagag

SEQ ID NO: 7313 - DNA, 92 bp, synthetic construct
  misc_feature 1..92: note = engineered ribonucleic acid scaffold (ERS) sequence
  source 1..92: mol_type = other DNA
atgtgcgggcacttctatctgattactctgcgcacatcaccagcgactatgtcgtagtgggtaaagctccctcttcggagggagcatcagag

SEQ ID NO: 7314 - DNA, 93 bp, synthetic construct
  misc_feature 1..93: note = engineered ribonucleic acid scaffold (ERS) sequence
  source 1..93: mol_type = other DNA
actgtgcgggcacttctatctgattactctgcgcacatcaccagcgactatgtcgtagtgggtaaagctccctcttcggagggagcatcagag

SEQ ID NO: 7315 - DNA, 94 bp, synthetic construct
  misc_feature 1..94: note = engineered ribonucleic acid scaffold (ERS) sequence
  source 1..94: mol_type = other DNA
actgtgcggggcacttctatctgattactctgcgcacatcaccagcgactatgtcgtagtgggtaaagctccctcttcggagggagcatcagag

SEQ ID NO: 7316 - DNA, 88 bp, synthetic construct
  misc_feature 1..88: note = engineered ribonucleic acid scaffold (ERS) sequence
  source 1..88: mol_type = other DNA
gggcgcttctatctgattactctgagtgccgctcaccagcgactatgtcgtagtgggtaaagctccctcttcggagggagcatcagag

SEQ ID NO: 7317 - DNA, 88 bp, synthetic construct
  misc_feature 1..88: note = engineered ribonucleic acid scaffold (ERS) sequence
  source 1..88: mol_type = other DNA
gggcgcttctatctgattactctgagagccgctcaccagcgactatgtcgtagtgggtaaagctccctcttcggagggagcatcagag

SEQ ID NO: 7318 - DNA, 88 bp, synthetic construct
  misc_feature 1..88: note = engineered ribonucleic acid scaffold (ERS) sequence
  source 1..88: mol_type = other DNA
gggcgcttctatctgattactctgagagcctctcaccagcgactatgtcgtagtgggtaaagctccctcttcggagggagcatcagag

SEQ ID NO: 7319 - DNA, 89 bp, synthetic construct
  misc_feature 1..89: note = engineered ribonucleic acid scaffold (ERS) sequence
  source 1..89: mol_type = other DNA
atgggtgcttctatctgattactctgagacccatcaccagcgactatgtcgtagtgggtaaagctccctcttcggagggagcatcagag

SEQ ID NO: 7320 - DNA, 90 bp, synthetic construct
  misc_feature 1..90: note = engineered ribonucleic acid scaffold (ERS) sequence
  source 1..90: mol_type = other DNA
atgggctacttctatctgattactctgaggcccatcaccagcgactatgtcgtagtgggtaaagctccctcttcggagggagcatcagag

SEQ ID NO: 7321 - DNA, 87 bp, synthetic construct
  misc_feature 1..87: note = engineered ribonucleic acid scaffold (ERS) sequence
  source 1..87: mol_type = other DNA
acacacggttctatctgattactctgccgtgtacaccagcgactatgtcgtatgggtaaagctccctcttcggagggagcatcagag

SEQ ID NO: 7322 - DNA, 87 bp, synthetic construct
  misc_feature 1..87: note = engineered ribonucleic acid scaffold (ERS) sequence
  source 1..87: mol_type = other DNA
acacacggttctatctgattactctgccgtgtgcaccagcgactatgtcgtatgggtaaagctccctcttcggagggagcatcagag

SEQ ID NO: 7323 - DNA, 87 bp, synthetic construct
  misc_feature 1..87: note = engineered ribonucleic acid scaffold (ERS) sequence
  source 1..87: mol_type = other DNA
acacacggttctatctgattactctgccgtgttgaccagcgactatgtcgtatggctaaagctccctcttcggagggagcatcagag

SEQ ID NO: 7324 - DNA, 88 bp, synthetic construct
  misc_feature 1..88: note = engineered ribonucleic acid scaffold (ERS) sequence
  source 1..88: mol_type = other DNA
acacacggttctatctgattactctgccgtgttgaccagcgactatgtcgtatgggctaaagctccctcttcggagggagcatcagag

SEQ ID NO: 7325 - DNA, 87 bp, synthetic construct
  misc_feature 1..87: note = engineered ribonucleic acid scaffold (ERS) sequence
  source 1..87: mol_type = other DNA
acacacggttctatctgattactctgccgtgttgaccagcgactatgtcgtatgggtaaagctccctcttcggagggagcatcagag

SEQ ID NO: 7326 - DNA, 87 bp, synthetic construct
  misc_feature 1..87: note = engineered ribonucleic acid scaffold (ERS) sequence
  source 1..87: mol_type = other DNA
acacacggttctatctgattactctgccgtgttccccagcgactatgtcgtatgggtaaagctccctcttcggagggagcatcagag

SEQ ID NO: 7327 - DNA, 88 bp, synthetic construct
  misc_feature 1..88: note = engineered ribonucleic acid scaffold (ERS) sequence
  source 1..88: mol_type = other DNA
acacacggttctatctgattactctgccgtgttcgccagcgactatgtcgtatggcgtaaagctccctcttcggagggagcatcagag

SEQ ID NO: 7328 - DNA, 87 bp, synthetic construct
  misc_feature 1..87: note = engineered ribonucleic acid scaffold (ERS) sequence
  source 1..87: mol_type = other DNA
acacacggttctatctgattactctgccgtgttcgccagcgactatgtcgtatgggtaaagctccctcttcggagggagcatcagag

SEQ ID NO: 7329 - DNA, 87 bp, synthetic construct
  misc_feature 1..87: note = engineered ribonucleic acid scaffold (ERS) sequence
  source 1..87: mol_type = other DNA
acacacggttctatctgattactctgccgtgttctccagcgactatgtcgtatgggtaaagctccctcttcggagggagcatcagag

SEQ ID NO: 7330 - DNA, 87 bp, synthetic construct
  misc_feature 1..87: note = engineered ribonucleic acid scaffold (ERS) sequence
  source 1..87: mol_type = other DNA
acacacggttctatctgattactctgccgtgttcacctgcgactatgtcgtaagggtaaagctccctcttcggagggagcatcagag

SEQ ID NO: 7331 - DNA, 87 bp, synthetic construct
  misc_feature 1..87: note = engineered ribonucleic acid scaffold (ERS) sequence
  source 1..87: mol_type = other DNA
acacacggttctatctgattactctgccgtgttcaccagagactatgtcttatgggtaaagctccctcttcggagggagcatcagag

SEQ ID NO: 7332 - DNA, 87 bp, synthetic construct
  misc_feature 1..87: note = engineered ribonucleic acid scaffold (ERS) sequence
  source 1..87: mol_type = other DNA
acacacggttctatctgattactctgccgtgttcaccagggactatgtcctatgggtaaagctccctcttcggagggagcatcagag

SEQ ID NO: 7333 - DNA, 88 bp, synthetic construct
  misc_feature 1..88: note = engineered ribonucleic acid scaffold (ERS) sequence
  source 1..88: mol_type = other DNA
acacacggttctatctgattactctgccgtgttcaccaggcactatgtgctattgggtaaagctccctcttcggagggagcatcagag

SEQ ID NO: 7334 - DNA, 87 bp, synthetic construct
  misc_feature 1..87: note = engineered ribonucleic acid scaffold (ERS) sequence
  source 1..87: mol_type = other DNA
acacacggttctatctgattactctgccgtgttcaccagccactatgtggtatgggtaaagctccctcttcggagggagcatcagag

SEQ ID NO: 7335 - DNA, 87 bp, synthetic construct
  misc_feature 1..87: note = engineered ribonucleic acid scaffold (ERS) sequence
  source 1..87: mol_type = other DNA
acacacggttctatctgattactctgccgtgttcaccagctactatgtagtatgggtaaagctccctcttcggagggagcatcagag

SEQ ID NO: 7336 - DNA, 87 bp, synthetic construct
  misc_feature 1..87: note = engineered ribonucleic acid scaffold (ERS) sequence
  source 1..87: mol_type = other DNA
acacacggttctatctgattactctgccgtgttcaccagcgattatgtcgtatgggtaaagctccctcttcggagggagcatcagag

SEQ ID NO: 7337 - DNA, 87 bp, synthetic construct
  misc_feature 1..87: note = engineered ribonucleic acid scaffold (ERS) sequence
  source 1..87: mol_type = other DNA
acacacggttctatctgattactctgccgtgttcaccagcgacgatgtcgtatgggtaaagctccctcttcggagggagcatcagag

SEQ ID NO: 7338 - DNA, 87 bp, synthetic construct
  misc_feature 1..87: note = engineered ribonucleic acid scaffold (ERS) sequence
  source 1..87: mol_type = other DNA
acacacggttctatctgattactctgccgtgttcaccagcgactctgtcgtatgggtaaagctccctcttcggagggagcatcagag

SEQ ID NO: 7339 - DNA, 87 bp, synthetic construct
  misc_feature 1..87: note = engineered ribonucleic acid scaffold (ERS) sequence
  source 1..87: mol_type = other DNA
acacacggttctatctgattactctgccgtgttcaccagcgactatgtcgtgtgggtaaagctccctcttcggagggagcatcagag

SEQ ID NO: 7340 - DNA, 88 bp, synthetic construct
  misc_feature 1..88: note = engineered ribonucleic acid scaffold (ERS) sequence
  source 1..88: mol_type = other DNA
acacacggttctatctgattactctgccgtgttcaccagcgactatgtcgtattgggtaaagctccctcttcggagggagcatcagag

SEQ ID NO: 7341 - DNA, 88 bp, synthetic construct
  misc_feature 1..88: note = engineered ribonucleic acid scaffold (ERS) sequence
  source 1..88: mol_type = other DNA
acacacggttctatctgattactctgccgtgttcaccagcgactatgtcgtatggagtaaagctccctcttcggagggagcatcagag

SEQ ID NO: 7342 - DNA, 88 bp, synthetic construct
  misc_feature 1..88: note = engineered ribonucleic acid scaffold (ERS) sequence
  source 1..88: mol_type = other DNA
acacacggttctatctgattactctgccgtgttcaccagcgactatgtcgtatggcgtaaagctccctcttcggagggagcatcagag

SEQ ID NO: 7343 - DNA, 88 bp, synthetic construct
  misc_feature 1..88: note = engineered ribonucleic acid scaffold (ERS) sequence
  source 1..88: mol_type = other DNA
acacacggttctatctgattactctgccgtgttcaccagcgactatgtcgtatggtgtaaagctccctcttcggagggagcatcagag

SEQ ID NO: 7344 - DNA, 88 bp, synthetic construct
  misc_feature 1..88: note = engineered ribonucleic acid scaffold (ERS) sequence
  source 1..88: mol_type = other DNA
acacacggttctatctgattactctgccgtgttcaccagcgactatgtcgtatgggctaaagctccctcttcggagggagcatcagag

SEQ ID NO: 7345 - DNA, 85 bp, synthetic construct
  misc_feature 1..85: note = engineered ribonucleic acid scaffold (ERS) sequence
  source 1..85: mol_type = other DNA
acacacggttctatctgattactctgccgtgttcaccagcgactatgtcgtatgggtagctccctcttcggagggagcatcagag

SEQ ID NO: 7346 - DNA, 87 bp, synthetic construct
  misc_feature 1..87: note = engineered ribonucleic acid scaffold (ERS) sequence
  source 1..87: mol_type = other DNA
acacacggttctatctgattactctgccgtgttcaccagcgactatgtcgtatgggtgaagctccctcttcggagggagcatcagag

SEQ ID NO: 7347 - DNA, 87 bp, synthetic construct
  misc_feature 1..87: note = engineered ribonucleic acid scaffold (ERS) sequence
  source 1..87: mol_type = other DNA
acacacggttctatctgattactctgccgtgttcaccagcgactatgtcgtatgggtagagctccctcttcggagggagcatcagag

SEQ ID NO: 7348 - DNA, 87 bp, synthetic construct
  misc_feature 1..87: note = engineered ribonucleic acid scaffold (ERS) sequence
  source 1..87: mol_type = other DNA
acactggtttctatctgattactctgaccagtacaccagcgactatgtcgtatgggtaaagctccctcttcggagggagcatcagag

SEQ ID NO: 7349 - DNA, 87 bp, synthetic construct
  misc_feature 1..87: note = engineered ribonucleic acid scaffold (ERS) sequence
  source 1..87: mol_type = other DNA
acactggtttctatctgattactctgaccagtgcaccagcgactatgtcgtatgggtaaagctccctcttcggagggagcatcagag

SEQ ID NO: 7350 - DNA, 87 bp, synthetic construct
  misc_feature 1..87: note = engineered ribonucleic acid scaffold (ERS) sequence
  source 1..87: mol_type = other DNA
acactggtttctatctgattactctgaccagttgaccagcgactatgtcgtatggctaaagctccctcttcggagggagcatcagag

SEQ ID NO: 7351 - DNA, 88 bp, synthetic construct
  misc_feature 1..88: note = engineered ribonucleic acid scaffold (ERS) sequence
  source 1..88: mol_type = other DNA
acactggtttctatctgattactctgaccagttgaccagcgactatgtcgtatgggctaaagctccctcttcggagggagcatcagag

SEQ ID NO: 7352 - DNA, 87 bp, synthetic construct
  misc_feature 1..87: note = engineered ribonucleic acid scaffold (ERS) sequence
  source 1..87: mol_type = other DNA
acactggtttctatctgattactctgaccagttgaccagcgactatgtcgtatgggtaaagctccctcttcggagggagcatcagag

SEQ ID NO: 7353 - DNA, 87 bp, synthetic construct
  misc_feature 1..87: note = engineered ribonucleic acid scaffold (ERS) sequence
  source 1..87: mol_type = other DNA
acactggtttctatctgattactctgaccagttccccagcgactatgtcgtatgggtaaagctccctcttcggagggagcatcagag

SEQ ID NO: 7354 - DNA, 88 bp, synthetic construct
  misc_feature 1..88: note = engineered ribonucleic acid scaffold (ERS) sequence
  source 1..88: mol_type = other DNA
acactggtttctatctgattactctgaccagttcgccagcgactatgtcgtatggcgtaaagctccctcttcggagggagcatcagag

SEQ ID NO: 7355 - DNA, 87 bp, synthetic construct
  misc_feature 1..87: note = engineered ribonucleic acid scaffold (ERS) sequence
  source 1..87: mol_type = other DNA
acactggtttctatctgattactctgaccagttcgccagcgactatgtcgtatgggtaaagctccctcttcggagggagcatcagag

SEQ ID NO: 7356 - DNA, 87 bp, synthetic construct
  misc_feature 1..87: note = engineered ribonucleic acid scaffold (ERS) sequence
  source 1..87: mol_type = other DNA
acactggtttctatctgattactctgaccagttctccagcgactatgtcgtatgggtaaagctccctcttcggagggagcatcagag

SEQ ID NO: 7357 - DNA, 87 bp, synthetic construct
  misc_feature 1..87: note = engineered ribonucleic acid scaffold (ERS) sequence
  source 1..87: mol_type = other DNA
acactggtttctatctgattactctgaccagttcacctgcgactatgtcgtaagggtaaagctccctcttcggagggagcatcagag

SEQ ID NO: 7358 - DNA, 87 bp, synthetic construct
  misc_feature 1..87: note = engineered ribonucleic acid scaffold (ERS) sequence
  source 1..87: mol_type = other DNA
acactggtttctatctgattactctgaccagttcaccagagactatgtcttatgggtaaagctccctcttcggagggagcatcagag

SEQ ID NO: 7359 - DNA, 87 bp, synthetic construct
  misc_feature 1..87: note = engineered ribonucleic acid scaffold (ERS) sequence
  source 1..87: mol_type = other DNA
acactggtttctatctgattactctgaccagttcaccagggactatgtcctatgggtaaagctccctcttcggagggagcatcagag

SEQ ID NO: 7360 - DNA, 88 bp, synthetic construct
  misc_feature 1..88: note = engineered ribonucleic acid scaffold (ERS) sequence
  source 1..88: mol_type = other DNA
acactggtttctatctgattactctgaccagttcaccaggcactatgtgctattgggtaaagctccctcttcggagggagcatcagag

SEQ ID NO: 7361 - DNA, 87 bp, synthetic construct
  misc_feature 1..87: note = engineered ribonucleic acid scaffold (ERS) sequence
  source 1..87: mol_type = other DNA
acactggtttctatctgattactctgaccagttcaccagccactatgtggtatgggtaaagctccctcttcggagggagcatcagag

SEQ ID NO: 7362 - DNA, 87 bp, synthetic construct
  misc_feature 1..87: note = engineered ribonucleic acid scaffold (ERS) sequence
  source 1..87: mol_type = other DNA
acactggtttctatctgattactctgaccagttcaccagctactatgtagtatgggtaaagctccctcttcggagggagcatcagag

SEQ ID NO: 7363 - DNA, 87 bp, synthetic construct
  misc_feature 1..87: note = engineered ribonucleic acid scaffold (ERS) sequence
  source 1..87: mol_type = other DNA
acactggtttctatctgattactctgaccagttcaccagcgattatgtcgtatgggtaaagctccctcttcggagggagcatcagag

SEQ ID NO: 7364 - DNA, 87 bp, synthetic construct
  misc_feature 1..87: note = engineered ribonucleic acid scaffold (ERS) sequence
  source 1..87: mol_type = other DNA
acactggtttctatctgattactctgaccagttcaccagcgacgatgtcgtatgggtaaagctccctcttcggagggagcatcagag

SEQ ID NO: 7365 - DNA, 87 bp, synthetic construct
  misc_feature 1..87: note = engineered ribonucleic acid scaffold (ERS) sequence
  source 1..87: mol_type = other DNA
acactggtttctatctgattactctgaccagttcaccagcgactctgtcgtatgggtaaagctccctcttcggagggagcatcagag

SEQ ID NO: 7366 - DNA, 87 bp, synthetic construct
  misc_feature 1..87: note = engineered ribonucleic acid scaffold (ERS) sequence
  source 1..87: mol_type = other DNA
acactggtttctatctgattactctgaccagttcaccagcgactatgtcgtgtgggtaaagctccctcttcggagggagcatcagag

SEQ ID NO: 7367 - DNA, 88 bp, synthetic construct
  misc_feature 1..88: note = engineered ribonucleic acid scaffold (ERS) sequence
  source 1..88: mol_type = other DNA
acactggtttctatctgattactctgaccagttcaccagcgactatgtcgtattgggtaaagctccctcttcggagggagcatcagag

SEQ ID NO: 7368 - DNA, 88 bp, synthetic construct
  misc_feature 1..88: note = engineered ribonucleic acid scaffold (ERS) sequence
  source 1..88: mol_type = other DNA
acactggtttctatctgattactctgaccagttcaccagcgactatgtcgtatggagtaaagctccctcttcggagggagcatcagag

SEQ ID NO: 7369 - DNA, 88 bp, synthetic construct
  misc_feature 1..88: note = engineered ribonucleic acid scaffold (ERS) sequence
  source 1..88: mol_type = other DNA
acactggtttctatctgattactctgaccagttcaccagcgactatgtcgtatggcgtaaagctccctcttcggagggagcatcagag

SEQ ID NO: 7370 - DNA, 88 bp, synthetic construct
  misc_feature 1..88: note = engineered ribonucleic acid scaffold (ERS) sequence
  source 1..88: mol_type = other DNA
acactggtttctatctgattactctgaccagttcaccagcgactatgtcgtatggtgtaaagctccctcttcggagggagcatcagag

SEQ ID NO: 7371 - DNA, 88 bp, synthetic construct
  misc_feature 1..88: note = engineered ribonucleic acid scaffold (ERS) sequence
  source 1..88: mol_type = other DNA
acactggtttctatctgattactctgaccagttcaccagcgactatgtcgtatgggctaaagctccctcttcggagggagcatcagag

SEQ ID NO: 7372 - DNA, 85 bp, synthetic construct
  misc_feature 1..85: note = engineered ribonucleic acid scaffold (ERS) sequence
  source 1..85: mol_type = other DNA
acactggtttctatctgattactctgaccagttcaccagcgactatgtcgtatgggtagctccctcttcggagggagcatcagag

SEQ ID NO: 7373 - DNA, 87 bp, synthetic construct
  misc_feature 1..87: note = engineered ribonucleic acid scaffold (ERS) sequence
  source 1..87: mol_type = other DNA
acactggtttctatctgattactctgaccagttcaccagcgactatgtcgtatgggtgaagctccctcttcggagggagcatcagag

SEQ ID NO: 7374 - DNA, 87 bp, synthetic construct
  misc_feature 1..87: note = engineered ribonucleic acid scaffold (ERS) sequence
  source 1..87: mol_type = other DNA
acactggtttctatctgattactctgaccagttcaccagcgactatgtcgtatgggtagagctccctcttcggagggagcatcagag

SEQ ID NO: 7375 - DNA, 87 bp, synthetic construct
  misc_feature 1..87: note = engineered ribonucleic acid scaffold (ERS) sequence
  source 1..87: mol_type = other DNA
acaggccgttctatctgattactctgcggcctacaccagcgactatgtcgtatgggtaaagctccctcttcggagggagcatcagag

SEQ ID NO: 7376 - DNA, 87 bp, synthetic construct
  misc_feature 1..87: note = engineered ribonucleic acid scaffold (ERS) sequence
  source 1..87: mol_type = other DNA
acaggccgttctatctgattactctgcggcctgcaccagcgactatgtcgtatgggtaaagctccctcttcggagggagcatcagag

SEQ ID NO: 7377 - DNA, 87 bp, synthetic construct
  misc_feature 1..87: note = engineered ribonucleic acid scaffold (ERS) sequence
  source 1..87: mol_type = other DNA
acaggccgttctatctgattactctgcggccttgaccagcgactatgtcgtatggctaaagctccctcttcggagggagcatcagag

SEQ ID NO: 7378 - DNA, 88 bp, synthetic construct
  misc_feature 1..88: note = engineered ribonucleic acid scaffold (ERS) sequence
  source 1..88: mol_type = other DNA
acaggccgttctatctgattactctgcggccttgaccagcgactatgtcgtatgggctaaagctccctcttcggagggagcatcagag

SEQ ID NO: 7379 - DNA, 87 bp, synthetic construct
  misc_feature 1..87: note = engineered ribonucleic acid scaffold (ERS) sequence
  source 1..87: mol_type = other DNA
acaggccgttctatctgattactctgcggccttgaccagcgactatgtcgtatgggtaaagctccctcttcggagggagcatcagag

SEQ ID NO: 7380 - DNA, 87 bp, synthetic construct
  misc_feature 1..87: note = engineered ribonucleic acid scaffold (ERS) sequence
  source 1..87: mol_type = other DNA
acaggccgttctatctgattactctgcggccttccccagcgactatgtcgtatgggtaaagctccctcttcggagggagcatcagag

SEQ ID NO: 7381 - DNA, 88 bp, synthetic construct
  misc_feature 1..88: note = engineered ribonucleic acid scaffold (ERS) sequence
  source 1..88: mol_type = other DNA
acaggccgttctatctgattactctgcggccttcgccagcgactatgtcgtatggcgtaaagctccctcttcggagggagcatcagag

SEQ ID NO: 7382 - DNA, 87 bp, synthetic construct
  misc_feature 1..87: note = engineered ribonucleic acid scaffold (ERS) sequence
  source 1..87: mol_type = other DNA
acaggccgttctatctgattactctgcggccttcgccagcgactatgtcgtatgggtaaagctccctcttcggagggagcatcagag

SEQ ID NO: 7383 - DNA, 87 bp, synthetic construct
  misc_feature 1..87: note = engineered ribonucleic acid scaffold (ERS) sequence
  source 1..87: mol_type = other DNA
acaggccgttctatctgattactctgcggccttctccagcgactatgtcgtatgggtaaagctccctcttcggagggagcatcagag

SEQ ID NO: 7384 - DNA, 87 bp, synthetic construct
  misc_feature 1..87: note = engineered ribonucleic acid scaffold (ERS) sequence
  source 1..87: mol_type = other DNA
acaggccgttctatctgattactctgcggccttcacctgcgactatgtcgtaagggtaaagctccctcttcggagggagcatcagag

SEQ ID NO: 7385 - DNA, 87 bp, synthetic construct
  misc_feature 1..87: note = engineered ribonucleic acid scaffold (ERS) sequence
  source 1..87: mol_type = other DNA
acaggccgttctatctgattactctgcggccttcaccagagactatgtcttatgggtaaagctccctcttcggagggagcatcagag

SEQ ID NO: 7386 - DNA, 87 bp, synthetic construct
  misc_feature 1..87: note = engineered ribonucleic acid scaffold (ERS) sequence
  source 1..87: mol_type = other DNA
acaggccgttctatctgattactctgcggccttcaccagggactatgtcctatgggtaaagctccctcttcggagggagcatcagag

SEQ ID NO: 7387 - DNA, 88 bp, synthetic construct
  misc_feature 1..88: note = engineered ribonucleic acid scaffold (ERS) sequence
  source 1..88: mol_type = other DNA
acaggccgttctatctgattactctgcggccttcaccaggcactatgtgctattgggtaaagctccctcttcggagggagcatcagag

SEQ ID NO: 7388 - DNA, 87 bp, synthetic construct
  misc_feature 1..87: note = engineered ribonucleic acid scaffold (ERS) sequence
  source 1..87: mol_type = other DNA
acaggccgttctatctgattactctgcggccttcaccagccactatgtggtatgggtaaagctccctcttcggagggagcatcagag

SEQ ID NO: 7389 - DNA, 87 bp, synthetic construct
  misc_feature 1..87: note = engineered ribonucleic acid scaffold (ERS) sequence
  source 1..87: mol_type = other DNA
acaggccgttctatctgattactctgcggccttcaccagctactatgtagtatgggtaaagctccctcttcggagggagcatcagag

SEQ ID NO: 7390 - DNA, 87 bp, synthetic construct
  misc_feature 1..87: note = engineered ribonucleic acid scaffold (ERS) sequence
  source 1..87: mol_type = other DNA
acaggccgttctatctgattactctgcggccttcaccagcgattatgtcgtatgggtaaagctccctcttcggagggagcatcagag

SEQ ID NO: 7391 - DNA, 87 bp, synthetic construct
  misc_feature 1..87: note = engineered ribonucleic acid scaffold (ERS) sequence
  source 1..87: mol_type = other DNA
acaggccgttctatctgattactctgcggccttcaccagcgacgatgtcgtatgggtaaagctccctcttcggagggagcatcagag

SEQ ID NO: 7392 - DNA, 87 bp, synthetic construct
  misc_feature 1..87: note = engineered ribonucleic acid scaffold (ERS) sequence
  source 1..87: mol_type = other DNA
acaggccgttctatctgattactctgcggccttcaccagcgactctgtcgtatgggtaaagctccctcttcggagggagcatcagag

SEQ ID NO: 7393 - DNA, 87 bp, synthetic construct
  misc_feature 1..87: note = engineered ribonucleic acid scaffold (ERS) sequence
  source 1..87: mol_type = other DNA
acaggccgttctatctgattactctgcggccttcaccagcgactatgtcgtgtgggtaaagctccctcttcggagggagcatcagag

SEQ ID NO: 7394 - DNA, 88 bp, synthetic construct
  misc_feature 1..88: note = engineered ribonucleic acid scaffold (ERS) sequence
  source 1..88: mol_type = other DNA
acaggccgttctatctgattactctgcggccttcaccagcgactatgtcgtattgggtaaagctccctcttcggagggagcatcagag

SEQ ID NO: 7395 - DNA, 88 bp, synthetic construct
  misc_feature 1..88: note = engineered ribonucleic acid scaffold (ERS) sequence
  source 1..88: mol_type = other DNA
acaggccgttctatctgattactctgcggccttcaccagcgactatgtcgtatggagtaaagctccctcttcggagggagcatcagag

SEQ ID NO: 7396 - DNA, 88 bp, synthetic construct
  misc_feature 1..88: note = engineered ribonucleic acid scaffold (ERS) sequence
  source 1..88: mol_type = other DNA
acaggccgttctatctgattactctgcggccttcaccagcgactatgtcgtatggcgtaaagctccctcttcggagggagcatcagag

SEQ ID NO: 7397 - DNA, 88 bp, synthetic construct
  misc_feature 1..88: note = engineered ribonucleic acid scaffold (ERS) sequence
  source 1..88: mol_type = other DNA
acaggccgttctatctgattactctgcggccttcaccagcgactatgtcgtatggtgtaaagctccctcttcggagggagcatcagag

SEQ ID NO: 7398 - DNA, 88 bp, synthetic construct
  misc_feature 1..88: note = engineered ribonucleic acid scaffold (ERS) sequence
  source 1..88: mol_type = other DNA
acaggccgttctatctgattactctgcggccttcaccagcgactatgtcgtatgggctaaagctccctcttcggagggagcatcagag

SEQ ID NO: 7399 - DNA, 85 bp, synthetic construct
  misc_feature 1..85: note = engineered ribonucleic acid scaffold (ERS) sequence
  source 1..85: mol_type = other DNA
acaggccgttctatctgattactctgcggccttcaccagcgactatgtcgtatgggtagctccctcttcggagggagcatcagag

SEQ ID NO: 7400 - DNA, 87 bp, synthetic construct
  misc_feature 1..87: note = engineered ribonucleic acid scaffold (ERS) sequence
  source 1..87: mol_type = other DNA
acaggccgttctatctgattactctgcggccttcaccagcgactatgtcgtatgggtgaagctccctcttcggagggagcatcagag

SEQ ID NO: 7401 - DNA, 87 bp, synthetic construct
  misc_feature 1..87: note = engineered ribonucleic acid scaffold (ERS) sequence
  source 1..87: mol_type = other DNA
acaggccgttctatctgattactctgcggccttcaccagcgactatgtcgtatgggtagagctccctcttcggagggagcatcagag

SEQ ID NO: 7402 - DNA, 87 bp, synthetic construct
  misc_feature 1..87: note = engineered ribonucleic acid scaffold (ERS) sequence
  source 1..87: mol_type = other DNA
acaggtccttctatctgattactctgggacctacaccagcgactatgtcgtatgggtaaagctccctcttcggagggagcatcagag

SEQ ID NO: 7403 - DNA, 87 bp, synthetic construct
  misc_feature 1..87: note = engineered ribonucleic acid scaffold (ERS) sequence
  source 1..87: mol_type = other DNA
acaggtccttctatctgattactctgggacctgcaccagcgactatgtcgtatgggtaaagctccctcttcggagggagcatcagag

SEQ ID NO: 7404 - DNA, 87 bp, synthetic construct
  misc_feature 1..87: note = engineered ribonucleic acid scaffold (ERS) sequence
  source 1..87: mol_type = other DNA
acaggtccttctatctgattactctgggaccttgaccagcgactatgtcgtatggctaaagctccctcttcggagggagcatcagag

SEQ ID NO: 7405 - DNA, 88 bp, synthetic construct
  misc_feature 1..88: note = engineered ribonucleic acid scaffold (ERS) sequence
  source 1..88: mol_type = other DNA
acaggtccttctatctgattactctgggaccttgaccagcgactatgtcgtatgggctaaagctccctcttcggagggagcatcagag

SEQ ID NO: 7406 - DNA, 87 bp, synthetic construct
  misc_feature 1..87: note = engineered ribonucleic acid scaffold (ERS) sequence
  source 1..87: mol_type = other DNA
acaggtccttctatctgattactctgggaccttgaccagcgactatgtcgtatgggtaaagctccctcttcggagggagcatcagag

SEQ ID NO: 7407 - DNA, 87 bp, synthetic construct
  misc_feature 1..87: note = engineered ribonucleic acid scaffold (ERS) sequence
  source 1..87: mol_type = other DNA
acaggtccttctatctgattactctgggaccttccccagcgactatgtcgtatgggtaaagctccctcttcggagggagcatcagag

SEQ ID NO: 7408 - DNA, 88 bp, synthetic construct
  misc_feature 1..88: note = engineered ribonucleic acid scaffold (ERS) sequence
  source 1..88: mol_type = other DNA
acaggtccttctatctgattactctgggaccttcgccagcgactatgtcgtatggcgtaaagctccctcttcggagggagcatcagag

SEQ ID NO: 7409 - DNA, 87 bp, synthetic construct
  misc_feature 1..87: note = engineered ribonucleic acid scaffold (ERS) sequence
  source 1..87: mol_type = other DNA
acaggtccttctatctgattactctgggaccttcgccagcgactatgtcgtatgggtaaagctccctcttcggagggagcatcagag

SEQ ID NO: 7410 - DNA, 87 bp, synthetic construct
  misc_feature 1..87: note = engineered ribonucleic acid scaffold (ERS) sequence
  source 1..87: mol_type = other DNA
acaggtccttctatctgattactctgggaccttctccagcgactatgtcgtatgggtaaagctccctcttcggagggagcatcagag

SEQ ID NO: 7411 - DNA, 87 bp, synthetic construct
  misc_feature 1..87: note = engineered ribonucleic acid scaffold (ERS) sequence
  source 1..87: mol_type = other DNA
acaggtccttctatctgattactctgggaccttcacctgcgactatgtcgtaagggtaaagctccctcttcggagggagcatcagag

SEQ ID NO: 7412 - DNA, 87 bp, synthetic construct
  misc_feature 1..87: note = engineered ribonucleic acid scaffold (ERS) sequence
  source 1..87: mol_type = other DNA
acaggtccttctatctgattactctgggaccttcaccagagactatgtcttatgggtaaagctccctcttcggagggagcatcagag

SEQ ID NO: 7413 - DNA, 87 bp, synthetic construct
  misc_feature 1..87: note = engineered ribonucleic acid scaffold (ERS) sequence
  source 1..87: mol_type = other DNA
acaggtccttctatctgattactctgggaccttcaccagggactatgtcctatgggtaaagctccctcttcggagggagcatcagag

SEQ ID NO: 7414 - DNA, 88 bp, synthetic construct
  misc_feature 1..88: note = engineered ribonucleic acid scaffold (ERS) sequence
  source 1..88: mol_type = other DNA
acaggtccttctatctgattactctgggaccttcaccaggcactatgtgctattgggtaaagctccctcttcggagggagcatcagag

SEQ ID NO: 7415 - DNA, 87 bp, synthetic construct
  misc_feature 1..87: note = engineered ribonucleic acid scaffold (ERS) sequence
  source 1..87: mol_type = other DNA
acaggtccttctatctgattactctgggaccttcaccagccactatgtggtatgggtaaagctccctcttcggagggagcatcagag

SEQ ID NO: 7416 - DNA, 87 bp, synthetic construct
  misc_feature 1..87: note = engineered ribonucleic acid scaffold (ERS) sequence
  source 1..87: mol_type = other DNA
acaggtccttctatctgattactctgggaccttcaccagctactatgtagtatgggtaaagctccctcttcggagggagcatcagag

SEQ ID NO: 7417 - DNA, 87 bp, synthetic construct
  misc_feature 1..87: note = engineered ribonucleic acid scaffold (ERS) sequence
  source 1..87: mol_type = other DNA
acaggtccttctatctgattactctgggaccttcaccagcgattatgtcgtatgggtaaagctccctcttcggagggagcatcagag

SEQ ID NO: 7418 - DNA, 87 bp, synthetic construct
  misc_feature 1..87: note = engineered ribonucleic acid scaffold (ERS) sequence
  source 1..87: mol_type = other DNA
acaggtccttctatctgattactctgggaccttcaccagcgacgatgtcgtatgggtaaagctccctcttcggagggagcatcagag

SEQ ID NO: 7419 - DNA, 87 bp, synthetic construct
  misc_feature 1..87: note = engineered ribonucleic acid scaffold (ERS) sequence
  source 1..87: mol_type = other DNA
acaggtccttctatctgattactctgggaccttcaccagcgactctgtcgtatgggtaaagctccctcttcggagggagcatcagag

SEQ ID NO: 7420 - DNA, 87 bp, synthetic construct
  misc_feature 1..87: note = engineered ribonucleic acid scaffold (ERS) sequence
  source 1..87: mol_type = other DNA
acaggtccttctatctgattactctgggaccttcaccagcgactatgtcgtgtgggtaaagctccctcttcggagggagcatcagag

SEQ ID NO: 7421 - DNA, 88 bp, synthetic construct
  misc_feature 1..88: note = engineered ribonucleic acid scaffold (ERS) sequence
  source 1..88: mol_type = other DNA
acaggtccttctatctgattactctgggaccttcaccagcgactatgtcgtattgggtaaagctccctcttcggagggagcatcagag

SEQ ID NO: 7422 - DNA, 88 bp, synthetic construct
  misc_feature 1..88: note = engineered ribonucleic acid scaffold (ERS) sequence
  source 1..88: mol_type = other DNA
acaggtccttctatctgattactctgggaccttcaccagcgactatgtcgtatggagtaaagctccctcttcggagggagcatcagag

SEQ ID NO: 7423 - DNA, 88 bp, synthetic construct
  misc_feature 1..88: note = engineered ribonucleic acid scaffold (ERS) sequence
  source 1..88: mol_type = other DNA
acaggtccttctatctgattactctgggaccttcaccagcgactatgtcgtatggcgtaaagctccctcttcggagggagcatcagag

SEQ ID NO: 7424 - DNA, 88 bp, synthetic construct
  misc_feature 1..88: note = engineered ribonucleic acid scaffold (ERS) sequence
  source 1..88: mol_type = other DNA
acaggtccttctatctgattactctgggaccttcaccagcgactatgtcgtatggtgtaaagctccctcttcggagggagcatcagag

SEQ ID NO: 7425 - DNA, 88 bp, synthetic construct
  misc_feature 1..88: note = engineered ribonucleic acid scaffold (ERS) sequence
  source 1..88: mol_type = other DNA
acaggtccttctatctgattactctgggaccttcaccagcgactatgtcgtatgggctaaagctccctcttcggagggagcatcagag

SEQ ID NO: 7426 - DNA, 85 bp, synthetic construct
  misc_feature 1..85: note = engineered ribonucleic acid scaffold (ERS) sequence
  source 1..85: mol_type = other DNA
acaggtccttctatctgattactctgggaccttcaccagcgactatgtcgtatgggtagctccctcttcggagggagcatcagag

SEQ ID NO: 7427 - DNA, 87 bp, synthetic construct
  misc_feature 1..87: note = engineered ribonucleic acid scaffold (ERS) sequence
  source 1..87: mol_type = other DNA
acaggtccttctatctgattactctgggaccttcaccagcgactatgtcgtatgggtgaagctccctcttcggagggagcatcagag

SEQ ID NO: 7428 - DNA, 87 bp, synthetic construct
  misc_feature 1..87: note = engineered ribonucleic acid scaffold (ERS) sequence
  source 1..87: mol_type = other DNA
acaggtccttctatctgattactctgggaccttcaccagcgactatgtcgtatgggtagagctccctcttcggagggagcatcagag

SEQ ID NO: 7429 - DNA, 87 bp, synthetic construct
  misc_feature 1..87: note = engineered ribonucleic acid scaffold (ERS) sequence
  source 1..87: mol_type = other DNA
accagcaattctatctgattactctgttgctgacaccagcgactatgtcgtatgggtaaagctccctcttcggagggagcatcagag

SEQ ID NO: 7430 - DNA, 87 bp, synthetic construct
  misc_feature 1..87: note = engineered ribonucleic acid scaffold (ERS) sequence
  source 1..87: mol_type = other DNA
accagcaattctatctgattactctgttgctggcaccagcgactatgtcgtatgggtaaagctccctcttcggagggagcatcagag

SEQ ID NO: 7431 - DNA, 87 bp, synthetic construct
  misc_feature 1..87: note = engineered ribonucleic acid scaffold (ERS) sequence
  source 1..87: mol_type = other DNA
accagcaattctatctgattactctgttgctgtgaccagcgactatgtcgtatggctaaagctccctcttcggagggagcatcagag

SEQ ID NO: 7432 - DNA, 88 bp, synthetic construct
  misc_feature 1..88: note = engineered ribonucleic acid scaffold (ERS) sequence
  source 1..88: mol_type = other DNA
accagcaattctatctgattactctgttgctgtgaccagcgactatgtcgtatgggctaaagctccctcttcggagggagcatcagag

SEQ ID NO: 7433 - DNA, 87 bp, synthetic construct
  misc_feature 1..87: note = engineered ribonucleic acid scaffold (ERS) sequence
  source 1..87: mol_type = other DNA
accagcaattctatctgattactctgttgctgtgaccagcgactatgtcgtatgggtaaagctccctcttcggagggagcatcagag

SEQ ID NO: 7434 - DNA, 87 bp, synthetic construct
  misc_feature 1..87: note = engineered ribonucleic acid scaffold (ERS) sequence
  source 1..87: mol_type = other DNA
accagcaattctatctgattactctgttgctgtccccagcgactatgtcgtatgggtaaagctccctcttcggagggagcatcagag

SEQ ID NO: 7435 - DNA, 88 bp, synthetic construct
  misc_feature 1..88: note = engineered ribonucleic acid scaffold (ERS) sequence
  source 1..88: mol_type = other DNA
accagcaattctatctgattactctgttgctgtcgccagcgactatgtcgtatggcgtaaagctccctcttcggagggagcatcagag

SEQ ID NO: 7436 - DNA, 87 bp, synthetic construct
  misc_feature 1..87: note = engineered ribonucleic acid scaffold (ERS) sequence
  source 1..87: mol_type = other DNA
accagcaattctatctgattactctgttgctgtcgccagcgactatgtcgtatgggtaaagctccctcttcggagggagcatcagag

SEQ ID NO: 7437 - DNA, 87 bp, synthetic construct
  misc_feature 1..87: note = engineered ribonucleic acid scaffold (ERS) sequence
  source 1..87: mol_type = other DNA
accagcaattctatctgattactctgttgctgtctccagcgactatgtcgtatgggtaaagctccctcttcggagggagcatcagag

SEQ ID NO: 7438 - DNA, 87 bp, synthetic construct
  misc_feature 1..87: note = engineered ribonucleic acid scaffold (ERS) sequence
  source 1..87: mol_type = other DNA
accagcaattctatctgattactctgttgctgtcacctgcgactatgtcgtaagggtaaagctccctcttcggagggagcatcagag

SEQ ID NO: 7439 - DNA, 87 bp, synthetic construct
  misc_feature 1..87: note = engineered ribonucleic acid scaffold (ERS) sequence
  source 1..87: mol_type = other DNA
accagcaattctatctgattactctgttgctgtcaccagagactatgtcttatgggtaaagctccctcttcggagggagcatcagag

SEQ ID NO: 7440 - DNA, 87 bp, synthetic construct
  misc_feature 1..87: note = engineered ribonucleic acid scaffold (ERS) sequence
  source 1..87: mol_type = other DNA
accagcaattctatctgattactctgttgctgtcaccagggactatgtcctatgggtaaagctccctcttcggagggagcatcagag

SEQ ID NO: 7441 - DNA, 88 bp, synthetic construct
  misc_feature 1..88: note = engineered ribonucleic acid scaffold (ERS) sequence
  source 1..88: mol_type = other DNA
accagcaattctatctgattactctgttgctgtcaccaggcactatgtgctattgggtaaagctccctcttcggagggagcatcagag

SEQ ID NO: 7442 - DNA, 87 bp, synthetic construct
  misc_feature 1..87: note = engineered ribonucleic acid scaffold (ERS) sequence
  source 1..87: mol_type = other DNA
accagcaattctatctgattactctgttgctgtcaccagccactatgtggtatgggtaaagctccctcttcggagggagcatcagag

SEQ ID NO: 7443 - DNA, 87 bp, synthetic construct
  misc_feature 1..87: note = engineered ribonucleic acid scaffold (ERS) sequence
  source 1..87: mol_type = other DNA
accagcaattctatctgattactctgttgctgtcaccagctactatgtagtatgggtaaagctccctcttcggagggagcatcagag

SEQ ID NO: 7444 - DNA, 87 bp, synthetic construct
  misc_feature 1..87: note = engineered ribonucleic acid scaffold (ERS) sequence
  source 1..87: mol_type = other DNA
accagcaattctatctgattactctgttgctgtcaccagcgattatgtcgtatgggtaaagctccctcttcggagggagcatcagag

SEQ ID NO: 7445 - DNA, 87 bp, synthetic construct
  misc_feature 1..87: note = engineered ribonucleic acid scaffold (ERS) sequence
  source 1..87: mol_type = other DNA
accagcaattctatctgattactctgttgctgtcaccagcgacgatgtcgtatgggtaaagctccctcttcggagggagcatcagag

SEQ ID NO: 7446 - DNA, 87 bp, synthetic construct
  misc_feature 1..87: note = engineered ribonucleic acid scaffold (ERS) sequence
  source 1..87: mol_type = other DNA
accagcaattctatctgattactctgttgctgtcaccagcgactctgtcgtatgggtaaagctccctcttcggagggagcatcagag

SEQ ID NO: 7447 - DNA, 87 bp, synthetic construct
  misc_feature 1..87: note = engineered ribonucleic acid scaffold (ERS) sequence
  source 1..87: mol_type = other DNA
accagcaattctatctgattactctgttgctgtcaccagcgactatgtcgtgtgggtaaagctccctcttcggagggagcatcagag

SEQ ID NO: 7448 - DNA, 88 bp, synthetic construct
  misc_feature 1..88: note = engineered ribonucleic acid scaffold (ERS) sequence
  source 1..88: mol_type = other DNA
accagcaattctatctgattactctgttgctgtcaccagcgactatgtcgtattgggtaaagctccctcttcggagggagcatcagag

SEQ ID NO: 7449 - DNA, 88 bp, synthetic construct
  misc_feature 1..88: note = engineered ribonucleic acid scaffold (ERS) sequence
  source 1..88: mol_type = other DNA
accagcaattctatctgattactctgttgctgtcaccagcgactatgtcgtatggagtaaagctccctcttcggagggagcatcagag

SEQ ID NO: 7450 - DNA, 88 bp, synthetic construct
  misc_feature 1..88: note = engineered ribonucleic acid scaffold (ERS) sequence
  source 1..88: mol_type = other DNA
accagcaattctatctgattactctgttgctgtcaccagcgactatgtcgtatggcgtaaagctccctcttcggagggagcatcagag

SEQ ID NO: 7451 - DNA, 88 bp, synthetic construct
  misc_feature 1..88: note = engineered ribonucleic acid scaffold (ERS) sequence
  source 1..88: mol_type = other DNA
accagcaattctatctgattactctgttgctgtcaccagcgactatgtcgtatggtgtaaagctccctcttcggagggagcatcagag

SEQ ID NO: 7452 - DNA, 88 bp, synthetic construct
  misc_feature 1..88: note = engineered ribonucleic acid scaffold (ERS) sequence
  source 1..88: mol_type = other DNA
accagcaattctatctgattactctgttgctgtcaccagcgactatgtcgtatgggctaaagctccctcttcggagggagcatcagag

SEQ ID NO: 7453 - DNA, 85 bp, synthetic construct
  misc_feature 1..85: note = engineered ribonucleic acid scaffold (ERS) sequence
  source 1..85: mol_type = other DNA
accagcaattctatctgattactctgttgctgtcaccagcgactatgtcgtatgggtagctccctcttcggagggagcatcagag

SEQ ID NO: 7454 - DNA, 87 bp, synthetic construct
  misc_feature 1..87: note = engineered ribonucleic acid scaffold (ERS) sequence
  source 1..87: mol_type = other DNA
accagcaattctatctgattactctgttgctgtcaccagcgactatgtcgtatgggtgaagctccctcttcggagggagcatcagag

SEQ ID NO: 7455 - DNA, 87 bp, synthetic construct
  misc_feature 1..87: note = engineered ribonucleic acid scaffold (ERS) sequence
  source 1..87: mol_type = other DNA
accagcaattctatctgattactctgttgctgtcaccagcgactatgtcgtatgggtagagctccctcttcggagggagcatcagag

SEQ ID NO: 7456 - DNA, 87 bp, synthetic construct
  misc_feature 1..87: note = engineered ribonucleic acid scaffold (ERS) sequence
  source 1..87: mol_type = other DNA
accgagacttctatctgattactctgggctcgacaccagcgactatgtcgtatgggtaaagctccctcttcggagggagcatcagag

SEQ ID NO: 7457 - DNA, 87 bp, synthetic construct
  misc_feature 1..87: note = engineered ribonucleic acid scaffold (ERS) sequence
  source 1..87: mol_type = other DNA
accgagacttctatctgattactctgggctcggcaccagcgactatgtcgtatgggtaaagctccctcttcggagggagcatcagag

SEQ ID NO: 7458 - DNA, 87 bp, synthetic construct
  misc_feature 1..87: note = engineered ribonucleic acid scaffold (ERS) sequence
  source 1..87: mol_type = other DNA
accgagacttctatctgattactctgggctcgtgaccagcgactatgtcgtatggctaaagctccctcttcggagggagcatcagag

SEQ ID NO: 7459 - DNA, 88 bp, synthetic construct
  misc_feature 1..88: note = engineered ribonucleic acid scaffold (ERS) sequence
  source 1..88: mol_type = other DNA
accgagacttctatctgattactctgggctcgtgaccagcgactatgtcgtatgggctaaagctccctcttcggagggagcatcagag

SEQ ID NO: 7460 - DNA, 87 bp, synthetic construct
  misc_feature 1..87: note = engineered ribonucleic acid scaffold (ERS) sequence
  source 1..87: mol_type = other DNA
accgagacttctatctgattactctgggctcgtgaccagcgactatgtcgtatgggtaaagctccctcttcggagggagcatcagag

SEQ ID NO: 7461 - DNA, 87 bp, synthetic construct
  misc_feature 1..87: note = engineered ribonucleic acid scaffold (ERS) sequence
  source 1..87: mol_type = other DNA
accgagacttctatctgattactctgggctcgtccccagcgactatgtcgtatgggtaaagctccctcttcggagggagcatcagag

SEQ ID NO: 7462 - DNA, 88 bp, synthetic construct
  misc_feature 1..88: note = engineered ribonucleic acid scaffold (ERS) sequence
  source 1..88: mol_type = other DNA
accgagacttctatctgattactctgggctcgtcgccagcgactatgtcgtatggcgtaaagctccctcttcggagggagcatcagag

SEQ ID NO: 7463 - DNA, 87 bp, synthetic construct
  misc_feature 1..87: note = engineered ribonucleic acid scaffold (ERS) sequence
  source 1..87: mol_type = other DNA
accgagacttctatctgattactctgggctcgtcgccagcgactatgtcgtatgggtaaagctccctcttcggagggagcatcagag

SEQ ID NO: 7464 - DNA, 87 bp, synthetic construct
  misc_feature 1..87: note = engineered ribonucleic acid scaffold (ERS) sequence
  source 1..87: mol_type = other DNA
accgagacttctatctgattactctgggctcgtctccagcgactatgtcgtatgggtaaagctccctcttcggagggagcatcagag

SEQ ID NO: 7465 - DNA, 87 bp, synthetic construct
  misc_feature 1..87: note = engineered ribonucleic acid scaffold (ERS) sequence
  source 1..87: mol_type = other DNA
accgagacttctatctgattactctgggctcgtcacctgcgactatgtcgtaagggtaaagctccctcttcggagggagcatcagag

SEQ ID NO: 7466 - DNA, 87 bp, synthetic construct
  misc_feature 1..87: note = engineered ribonucleic acid scaffold (ERS) sequence
  source 1..87: mol_type = other DNA
accgagacttctatctgattactctgggctcgtcaccagagactatgtcttatgggtaaagctccctcttcggagggagcatcagag

SEQ ID NO: 7467 - DNA, 87 bp, synthetic construct
  misc_feature 1..87: note = engineered ribonucleic acid scaffold (ERS) sequence
  source 1..87: mol_type = other DNA
accgagacttctatctgattactctgggctcgtcaccagggactatgtcctatgggtaaagctccctcttcggagggagcatcagag

SEQ ID NO: 7468 - DNA, 88 bp, synthetic construct
  misc_feature 1..88: note = engineered ribonucleic acid scaffold (ERS) sequence
  source 1..88: mol_type = other DNA
accgagacttctatctgattactctgggctcgtcaccaggcactatgtgctattgggtaaagctccctcttcggagggagcatcagag

SEQ ID NO: 7469 - DNA, 87 bp, synthetic construct
  misc_feature 1..87: note = engineered ribonucleic acid scaffold (ERS) sequence
  source 1..87: mol_type = other DNA
accgagacttctatctgattactctgggctcgtcaccagccactatgtggtatgggtaaagctccctcttcggagggagcatcagag

SEQ ID NO: 7470 - DNA, 87 bp, synthetic construct
  misc_feature 1..87: note = engineered ribonucleic acid scaffold (ERS) sequence
  source 1..87: mol_type = other DNA
accgagacttctatctgattactctgggctcgtcaccagctactatgtagtatgggtaaagctccctcttcggagggagcatcagag

SEQ ID NO: 7471 - DNA, 87 bp, synthetic construct
  misc_feature 1..87: note = engineered ribonucleic acid scaffold (ERS) sequence
  source 1..87: mol_type = other DNA
accgagacttctatctgattactctgggctcgtcaccagcgattatgtcgtatgggtaaagctccctcttcggagggagcatcagag

SEQ ID NO: 7472 - DNA, 87 bp, synthetic construct
  misc_feature 1..87: note = engineered ribonucleic acid scaffold (ERS) sequence
  source 1..87: mol_type = other DNA
accgagacttctatctgattactctgggctcgtcaccagcgacgatgtcgtatgggtaaagctccctcttcggagggagcatcagag

SEQ ID NO: 7473 - DNA, 87 bp, synthetic construct
  misc_feature 1..87: note = engineered ribonucleic acid scaffold (ERS) sequence
  source 1..87: mol_type = other DNA
accgagacttctatctgattactctgggctcgtcaccagcgactctgtcgtatgggtaaagctccctcttcggagggagcatcagag

SEQ ID NO: 7474 - DNA, 87 bp, synthetic construct
  misc_feature 1..87: note = engineered ribonucleic acid scaffold (ERS) sequence
  source 1..87: mol_type = other DNA
accgagacttctatctgattactctgggctcgtcaccagcgactatgtcgtgtgggtaaagctccctcttcggagggagcatcagag

SEQ ID NO: 7475 - DNA, 88 bp, synthetic construct
  misc_feature 1..88: note = engineered ribonucleic acid scaffold (ERS) sequence
  source 1..88: mol_type = other DNA
accgagacttctatctgattactctgggctcgtcaccagcgactatgtcgtattgggtaaagctccctcttcggagggagcatcagag

SEQ ID NO: 7476 - DNA, 88 bp, synthetic construct
  misc_feature 1..88: note = engineered ribonucleic acid scaffold (ERS) sequence
  source 1..88: mol_type = other DNA
accgagacttctatctgattactctgggctcgtcaccagcgactatgtcgtatggagtaaagctccctcttcggagggagcatcagag

SEQ ID NO: 7477 - DNA, 88 bp, synthetic construct
  misc_feature 1..88: note = engineered ribonucleic acid scaffold (ERS) sequence
  source 1..88: mol_type = other DNA
accgagacttctatctgattactctgggctcgtcaccagcgactatgtcgtatggcgtaaagctccctcttcggagggagcatcagag

SEQ ID NO: 7478 - DNA, 88 bp, synthetic construct
  misc_feature 1..88: note = engineered ribonucleic acid scaffold (ERS) sequence
  source 1..88: mol_type = other DNA
accgagacttctatctgattactctgggctcgtcaccagcgactatgtcgtatggtgtaaagctccctcttcggagggagcatcagag

SEQ ID NO: 7479 - DNA, 88 bp, synthetic construct
  misc_feature 1..88: note = engineered ribonucleic acid scaffold (ERS) sequence
  source 1..88: mol_type = other DNA
accgagacttctatctgattactctgggctcgtcaccagcgactatgtcgtatgggctaaagctccctcttcggagggagcatcagag

SEQ ID NO: 7480 - DNA, 85 bp, synthetic construct
  misc_feature 1..85: note = engineered ribonucleic acid scaffold (ERS) sequence
  source 1..85: mol_type = other DNA
accgagacttctatctgattactctgggctcgtcaccagcgactatgtcgtatgggtagctccctcttcggagggagcatcagag

SEQ ID NO: 7481 - DNA, 87 bp, synthetic construct
  misc_feature 1..87: note = engineered ribonucleic acid scaffold (ERS) sequence
  source 1..87: mol_type = other DNA
accgagacttctatctgattactctgggctcgtcaccagcgactatgtcgtatgggtgaagctccctcttcggagggagcatcagag

SEQ ID NO: 7482 - DNA, 87 bp, synthetic construct
  misc_feature 1..87: note = engineered ribonucleic acid scaffold (ERS) sequence
  source 1..87: mol_type = other DNA
accgagacttctatctgattactctgggctcgtcaccagcgactatgtcgtatgggtagagctccctcttcggagggagcatcagag

SEQ ID NO: 7483 - DNA, 87 bp, synthetic construct
  misc_feature 1..87: note = engineered ribonucleic acid scaffold (ERS) sequence
  source 1..87: mol_type = other DNA
acctgtagttctatctgattactctgctacagacaccagcgactatgtcgtatgggtaaagctccctcttcggagggagcatcagag

SEQ ID NO: 7484 - DNA, 87 bp, synthetic construct
  misc_feature 1..87: note = engineered ribonucleic acid scaffold (ERS) sequence
  source 1..87: mol_type = other DNA
acctgtagttctatctgattactctgctacaggcaccagcgactatgtcgtatgggtaaagctccctcttcggagggagcatcagag

SEQ ID NO: 7485 - DNA, 87 bp, synthetic construct
  misc_feature 1..87: note = engineered ribonucleic acid scaffold (ERS) sequence
  source 1..87: mol_type = other DNA
acctgtagttctatctgattactctgctacagtgaccagcgactatgtcgtatggctaaagctccctcttcggagggagcatcagag

SEQ ID NO: 7486 - DNA, 88 bp, synthetic construct
  misc_feature 1..88: note = engineered ribonucleic acid scaffold (ERS) sequence
  source 1..88: mol_type = other DNA
acctgtagttctatctgattactctgctacagtgaccagcgactatgtcgtatgggctaaagctccctcttcggagggagcatcagag

SEQ ID NO: 7487 - DNA, 87 bp, synthetic construct
  misc_feature 1..87: note = engineered ribonucleic acid scaffold (ERS) sequence
  source 1..87: mol_type = other DNA
acctgtagttctatctgattactctgctacagtgaccagcgactatgtcgtatgggtaaagctccctcttcggagggagcatcagag

SEQ ID NO: 7488 - DNA, 87 bp, synthetic construct
  misc_feature 1..87: note = engineered ribonucleic acid scaffold (ERS) sequence
  source 1..87: mol_type = other DNA
acctgtagttctatctgattactctgctacagtccccagcgactatgtcgtatgggtaaagctccctcttcggagggagcatcagag

SEQ ID NO: 7489 - DNA, 88 bp, synthetic construct
  misc_feature 1..88: note = engineered ribonucleic acid scaffold (ERS) sequence
  source 1..88: mol_type = other DNA
acctgtagttctatctgattactctgctacagtcgccagcgactatgtcgtatggcgtaaagctccctcttcggagggagcatcagag

SEQ ID NO: 7490 - DNA, 87 bp, synthetic construct
  misc_feature 1..87: note = engineered ribonucleic acid scaffold (ERS) sequence
  source 1..87: mol_type = other DNA
acctgtagttctatctgattactctgctacagtcgccagcgactatgtcgtatgggtaaagctccctcttcggagggagcatcagag

SEQ ID NO: 7491 - DNA, 87 bp, synthetic construct
  misc_feature 1..87: note = engineered ribonucleic acid scaffold (ERS) sequence
  source 1..87: mol_type = other DNA
acctgtagttctatctgattactctgctacagtctccagcgactatgtcgtatgggtaaagctccctcttcggagggagcatcagag

SEQ ID NO: 7492 - DNA, 87 bp, synthetic construct
  misc_feature 1..87: note = engineered ribonucleic acid scaffold (ERS) sequence
  source 1..87: mol_type = other DNA
acctgtagttctatctgattactctgctacagtcacctgcgactatgtcgtaagggtaaagctccctcttcggagggagcatcagag

SEQ ID NO: 7493 - DNA, 87 bp, synthetic construct
  misc_feature 1..87: note = engineered ribonucleic acid scaffold (ERS) sequence
  source 1..87: mol_type = other DNA
acctgtagttctatctgattactctgctacagtcaccagagactatgtcttatgggtaaagctccctcttcggagggagcatcagag

SEQ ID NO: 7494 - DNA, 87 bp, synthetic construct
  misc_feature 1..87: note = engineered ribonucleic acid scaffold (ERS) sequence
  source 1..87: mol_type = other DNA
acctgtagttctatctgattactctgctacagtcaccagggactatgtcctatgggtaaagctccctcttcggagggagcatcagag

SEQ ID NO: 7495 - DNA, 88 bp, synthetic construct
  misc_feature 1..88: note = engineered ribonucleic acid scaffold (ERS) sequence
  source 1..88: mol_type = other DNA
acctgtagttctatctgattactctgctacagtcaccaggcactatgtgctattgggtaaagctccctcttcggagggagcatcagag

SEQ ID NO: 7496 - DNA, 87 bp, synthetic construct
  misc_feature 1..87: note = engineered ribonucleic acid scaffold (ERS) sequence
  source 1..87: mol_type = other DNA
acctgtagttctatctgattactctgctacagtcaccagccactatgtggtatgggtaaagctccctcttcggagggagcatcagag

SEQ ID NO: 7497 - DNA, 87 bp, synthetic construct
  misc_feature 1..87: note = engineered ribonucleic acid scaffold (ERS) sequence
  source 1..87: mol_type = other DNA
acctgtagttctatctgattactctgctacagtcaccagctactatgtagtatgggtaaagctccctcttcggagggagcatcagag

SEQ ID NO: 7498 - DNA, 87 bp, synthetic construct
  misc_feature 1..87: note = engineered ribonucleic acid scaffold (ERS) sequence
  source 1..87: mol_type = other DNA
acctgtagttctatctgattactctgctacagtcaccagcgattatgtcgtatgggtaaagctccctcttcggagggagcatcagag

SEQ ID NO: 7499 - DNA, 87 bp, synthetic construct
  misc_feature 1..87: note = engineered ribonucleic acid scaffold (ERS) sequence
  source 1..87: mol_type = other DNA
acctgtagttctatctgattactctgctacagtcaccagcgacgatgtcgtatgggtaaagctccctcttcggagggagcatcagag

SEQ ID NO: 7500 - DNA, 87 bp, synthetic construct
  misc_feature 1..87: note = engineered ribonucleic acid scaffold (ERS) sequence
  source 1..87: mol_type = other DNA
acctgtagttctatctgattactctgctacagtcaccagcgactctgtcgtatgggtaaagctccctcttcggagggagcatcagag

SEQ ID NO: 7501 - DNA, 87 bp, synthetic construct
  misc_feature 1..87: note = engineered ribonucleic acid scaffold (ERS) sequence
  source 1..87: mol_type = other DNA
acctgtagttctatctgattactctgctacagtcaccagcgactatgtcgtgtgggtaaagctccctcttcggagggagcatcagag

SEQ ID NO: 7502 - DNA, 88 bp, synthetic construct
  misc_feature 1..88: note = engineered ribonucleic acid scaffold (ERS) sequence
  source 1..88: mol_type = other DNA
acctgtagttctatctgattactctgctacagtcaccagcgactatgtcgtattgggtaaagctccctcttcggagggagcatcagag

SEQ ID NO: 7503 - DNA, 88 bp, synthetic construct
  misc_feature 1..88: note = engineered ribonucleic acid scaffold (ERS) sequence
  source 1..88: mol_type = other DNA
acctgtagttctatctgattactctgctacagtcaccagcgactatgtcgtatggagtaaagctccctcttcggagggagcatcagag

SEQ ID NO: 7504 - DNA, 88 bp, synthetic construct
  misc_feature 1..88: note = engineered ribonucleic acid scaffold (ERS) sequence
  source 1..88: mol_type = other DNA
acctgtagttctatctgattactctgctacagtcaccagcgactatgtcgtatggcgtaaagctccctcttcggagggagcatcagag

SEQ ID NO: 7505 - DNA, 88 bp, synthetic construct
  misc_feature 1..88: note = engineered ribonucleic acid scaffold (ERS) sequence
  source 1..88: mol_type = other DNA
acctgtagttctatctgattactctgctacagtcaccagcgactatgtcgtatggtgtaaagctccctcttcggagggagcatcagag

SEQ ID NO: 7506 - DNA, 88 bp, synthetic construct
  misc_feature 1..88: note = engineered ribonucleic acid scaffold (ERS) sequence
  source 1..88: mol_type = other DNA
acctgtagttctatctgattactctgctacagtcaccagcgactatgtcgtatgggctaaagctccctcttcggagggagcatcagag

SEQ ID NO: 7507 - DNA, 85 bp, synthetic construct
  misc_feature 1..85: note = engineered ribonucleic acid scaffold (ERS) sequence
  source 1..85: mol_type = other DNA
acctgtagttctatctgattactctgctacagtcaccagcgactatgtcgtatgggtagctccctcttcggagggagcatcagag

SEQ ID NO: 7508 - DNA, 87 bp, synthetic construct
  misc_feature 1..87: note = engineered ribonucleic acid scaffold (ERS) sequence
  source 1..87: mol_type = other DNA
acctgtagttctatctgattactctgctacagtcaccagcgactatgtcgtatgggtgaagctccctcttcggagggagcatcagag

SEQ ID NO: 7509 - DNA, 87 bp, synthetic construct
  misc_feature 1..87: note = engineered ribonucleic acid scaffold (ERS) sequence
  source 1..87: mol_type = other DNA
acctgtagttctatctgattactctgctacagtcaccagcgactatgtcgtatgggtagagctccctcttcggagggagcatcagag

SEQ ID NO: 7510 - DNA, 87 bp, synthetic construct
  misc_feature 1..87: note = engineered ribonucleic acid scaffold (ERS) sequence
  source 1..87: mol_type = other DNA
acgagcacttctatctgattactctggggctcacaccagcgactatgtcgtatgggtaaagctccctcttcggagggagcatcagag

SEQ ID NO: 7511 - DNA, 87 bp, synthetic construct
  misc_feature 1..87: note = engineered ribonucleic acid scaffold (ERS) sequence
  source 1..87: mol_type = other DNA
acgagcacttctatctgattactctggggctcgcaccagcgactatgtcgtatgggtaaagctccctcttcggagggagcatcagag

SEQ ID NO: 7512 - DNA, 87 bp, synthetic construct
  misc_feature 1..87: note = engineered ribonucleic acid scaffold (ERS) sequence
  source 1..87: mol_type = other DNA
acgagcacttctatctgattactctggggctctgaccagcgactatgtcgtatggctaaagctccctcttcggagggagcatcagag

SEQ ID NO: 7513 - DNA, 88 bp, synthetic construct
  misc_feature 1..88: note = engineered ribonucleic acid scaffold (ERS) sequence
  source 1..88: mol_type = other DNA
acgagcacttctatctgattactctggggctctgaccagcgactatgtcgtatgggctaaagctccctcttcggagggagcatcagag

SEQ ID NO: 7514 - DNA, 87 bp, synthetic construct
  misc_feature 1..87: note = engineered ribonucleic acid scaffold (ERS) sequence
  source 1..87: mol_type = other DNA
acgagcacttctatctgattactctggggctctgaccagcgactatgtcgtatgggtaaagctccctcttcggagggagcatcagag

SEQ ID NO: 7515 - DNA, 87 bp, synthetic construct
  misc_feature 1..87: note = engineered ribonucleic acid scaffold (ERS) sequence
  source 1..87: mol_type = other DNA
acgagcacttctatctgattactctggggctctccccagcgactatgtcgtatgggtaaagctccctcttcggagggagcatcagag

SEQ ID NO: 7516 - DNA, 88 bp, synthetic construct
  misc_feature 1..88: note = engineered ribonucleic acid scaffold (ERS) sequence
  source 1..88: mol_type = other DNA
acgagcacttctatctgattactctggggctctcgccagcgactatgtcgtatggcgtaaagctccctcttcggagggagcatcagag

SEQ ID NO: 7517 - DNA, 87 bp, synthetic construct
  misc_feature 1..87: note = engineered ribonucleic acid scaffold (ERS) sequence
  source 1..87: mol_type = other DNA
acgagcacttctatctgattactctggggctctcgccagcgactatgtcgtatgggtaaagctccctcttcggagggagcatcagag

SEQ ID NO: 7518 - DNA, 87 bp, synthetic construct
  misc_feature 1..87: note = engineered ribonucleic acid scaffold (ERS) sequence
  source 1..87: mol_type = other DNA
acgagcacttctatctgattactctggggctctctccagcgactatgtcgtatgggtaaagctccctcttcggagggagcatcagag

SEQ ID NO: 7519 - DNA, 87 bp, synthetic construct
  misc_feature 1..87: note = engineered ribonucleic acid scaffold (ERS) sequence
  source 1..87: mol_type = other DNA
acgagcacttctatctgattactctggggctctcacctgcgactatgtcgtaagggtaaagctccctcttcggagggagcatcagag

SEQ ID NO: 7520 - DNA, 87 bp, synthetic construct
  misc_feature 1..87: note = engineered ribonucleic acid scaffold (ERS) sequence
  source 1..87: mol_type = other DNA
acgagcacttctatctgattactctggggctctcaccagagactatgtcttatgggtaaagctccctcttcggagggagcatcagag

SEQ ID NO: 7521 - DNA, 87 bp, synthetic construct
  misc_feature 1..87: note = engineered ribonucleic acid scaffold (ERS) sequence
  source 1..87: mol_type = other DNA
acgagcacttctatctgattactctggggctctcaccagggactatgtcctatgggtaaagctccctcttcggagggagcatcagag

SEQ ID NO: 7522 - DNA, 88 bp, synthetic construct
  misc_feature 1..88: note = engineered ribonucleic acid scaffold (ERS) sequence
  source 1..88: mol_type = other DNA
acgagcacttctatctgattactctggggctctcaccaggcactatgtgctattgggtaaagctccctcttcggagggagcatcagag

SEQ ID NO: 7523 - DNA, 87 bp, synthetic construct
  misc_feature 1..87: note = engineered ribonucleic acid scaffold (ERS) sequence
  source 1..87: mol_type = other DNA
acgagcacttctatctgattactctggggctctcaccagccactatgtggtatgggtaaagctccctcttcggagggagcatcagag

SEQ ID NO: 7524 - DNA, 87 bp, synthetic construct
  misc_feature 1..87: note = engineered ribonucleic acid scaffold (ERS) sequence
  source 1..87: mol_type = other DNA
acgagcacttctatctgattactctggggctctcaccagctactatgtagtatgggtaaagctccctcttcggagggagcatcagag

SEQ ID NO: 7525 - DNA, 87 bp, synthetic construct
  misc_feature 1..87: note = engineered ribonucleic acid scaffold (ERS) sequence
  source 1..87: mol_type = other DNA
acgagcacttctatctgattactctggggctctcaccagcgattatgtcgtatgggtaaagctccctcttcggagggagcatcagag

SEQ ID NO: 7526 - DNA, 87 bp, synthetic construct
  misc_feature 1..87: note = engineered ribonucleic acid scaffold (ERS) sequence
  source 1..87: mol_type = other DNA
acgagcacttctatctgattactctggggctctcaccagcgacgatgtcgtatgggtaaagctccctcttcggagggagcatcagag

SEQ ID NO: 7527 - DNA, 87 bp, synthetic construct
  misc_feature 1..87: note = engineered ribonucleic acid scaffold (ERS) sequence
  source 1..87: mol_type = other DNA
acgagcacttctatctgattactctggggctctcaccagcgactctgtcgtatgggtaaagctccctcttcggagggagcatcagag

SEQ ID NO: 7528 - DNA, 87 bp, synthetic construct
  misc_feature 1..87: note = engineered ribonucleic acid scaffold (ERS) sequence
  source 1..87: mol_type = other DNA
acgagcacttctatctgattactctggggctctcaccagcgactatgtcgtgtgggtaaagctccctcttcggagggagcatcagag

SEQ ID NO: 7529 - DNA, 88 bp, synthetic construct
  misc_feature 1..88: note = engineered ribonucleic acid scaffold (ERS) sequence
  source 1..88: mol_type = other DNA
acgagcacttctatctgattactctggggctctcaccagcgactatgtcgtattgggtaaagctccctcttcggagggagcatcagag

SEQ ID NO: 7530 - DNA, 88 bp, synthetic construct
  misc_feature 1..88: note = engineered ribonucleic acid scaffold (ERS) sequence
  source 1..88: mol_type = other DNA
acgagcacttctatctgattactctggggctctcaccagcgactatgtcgtatggagtaaagctccctcttcggagggagcatcagag

SEQ ID NO: 7531 - DNA, 88 bp, synthetic construct
  misc_feature 1..88: note = engineered ribonucleic acid scaffold (ERS) sequence
  source 1..88: mol_type = other DNA
acgagcacttctatctgattactctggggctctcaccagcgactatgtcgtatggcgtaaagctccctcttcggagggagcatcagag

SEQ ID NO: 7532 - DNA, 88 bp, synthetic construct
  misc_feature 1..88: note = engineered ribonucleic acid scaffold (ERS) sequence
  source 1..88: mol_type = other DNA
acgagcacttctatctgattactctggggctctcaccagcgactatgtcgtatggtgtaaagctccctcttcggagggagcatcagag

SEQ ID NO: 7533 - DNA, 88 bp, synthetic construct
  misc_feature 1..88: note = engineered ribonucleic acid scaffold (ERS) sequence
  source 1..88: mol_type = other DNA
acgagcacttctatctgattactctggggctctcaccagcgactatgtcgtatgggctaaagctccctcttcggagggagcatcagag

SEQ ID NO: 7534 - DNA, 85 bp, synthetic construct
  misc_feature 1..85: note = engineered ribonucleic acid scaffold (ERS) sequence
  source 1..85: mol_type = other DNA
acgagcacttctatctgattactctggggctctcaccagcgactatgtcgtatgggtagctccctcttcggagggagcatcagag

SEQ ID NO: 7535 - DNA, 87 bp, synthetic construct
  misc_feature 1..87: note = engineered ribonucleic acid scaffold (ERS) sequence
  source 1..87: mol_type = other DNA
acgagcacttctatctgattactctggggctctcaccagcgactatgtcgtatgggtgaagctccctcttcggagggagcatcagag

SEQ ID NO: 7536 - DNA, 87 bp, synthetic construct
  misc_feature 1..87: note = engineered ribonucleic acid scaffold (ERS) sequence
  source 1..87: mol_type = other DNA
acgagcacttctatctgattactctggggctctcaccagcgactatgtcgtatgggtagagctccctcttcggagggagcatcagag

SEQ ID NO: 7537 - DNA, 87 bp, synthetic construct
  misc_feature 1..87: note = engineered ribonucleic acid scaffold (ERS) sequence
  source 1..87: mol_type = other DNA
acgaggtgttctatctgattactctgcacctcacaccagcgactatgtcgtatgggtaaagctccctcttcggagggagcatcagag

SEQ ID NO: 7538 - DNA, 87 bp, synthetic construct
  misc_feature 1..87: note = engineered ribonucleic acid scaffold (ERS) sequence
  source 1..87: mol_type = other DNA
acgaggtgttctatctgattactctgcacctcgcaccagcgactatgtcgtatgggtaaagctccctcttcggagggagcatcagag

SEQ ID NO: 7539 - DNA, 87 bp, synthetic construct
  misc_feature 1..87: note = engineered ribonucleic acid scaffold (ERS) sequence
  source 1..87: mol_type = other DNA
acgaggtgttctatctgattactctgcacctctgaccagcgactatgtcgtatggctaaagctccctcttcggagggagcatcagag

SEQ ID NO: 7540 - DNA, 88 bp, synthetic construct
  misc_feature 1..88: note = engineered ribonucleic acid scaffold (ERS) sequence
  source 1..88: mol_type = other DNA
acgaggtgttctatctgattactctgcacctctgaccagcgactatgtcgtatgggctaaagctccctcttcggagggagcatcagag

SEQ ID NO: 7541 - DNA, 87 bp, synthetic construct
  misc_feature 1..87: note = engineered ribonucleic acid scaffold (ERS) sequence
  source 1..87: mol_type = other DNA
acgaggtgttctatctgattactctgcacctctgaccagcgactatgtcgtatgggtaaagctccctcttcggagggagcatcagag

SEQ ID NO: 7542 - DNA, 87 bp, synthetic construct
  misc_feature 1..87: note = engineered ribonucleic acid scaffold (ERS) sequence
  source 1..87: mol_type = other DNA
acgaggtgttctatctgattactctgcacctctccccagcgactatgtcgtatgggtaaagctccctcttcggagggagcatcagag

SEQ ID NO: 7543 - DNA, 88 bp, synthetic construct
  misc_feature 1..88: note = engineered ribonucleic acid scaffold (ERS) sequence
  source 1..88: mol_type = other DNA
acgaggtgttctatctgattactctgcacctctcgccagcgactatgtcgtatggcgtaaagctccctcttcggagggagcatcagag

SEQ ID NO: 7544 - DNA, 87 bp, synthetic construct
  misc_feature 1..87: note = engineered ribonucleic acid scaffold (ERS) sequence
  source 1..87: mol_type = other DNA
acgaggtgttctatctgattactctgcacctctcgccagcgactatgtcgtatgggtaaagctccctcttcggagggagcatcagag

SEQ ID NO: 7545 - DNA, 87 bp, synthetic construct
  misc_feature 1..87: note = engineered ribonucleic acid scaffold (ERS) sequence
  source 1..87: mol_type = other DNA
acgaggtgttctatctgattactctgcacctctctccagcgactatgtcgtatgggtaaagctccctcttcggagggagcatcagag

SEQ ID NO: 7546 - DNA, 87 bp, synthetic construct
  misc_feature 1..87: note = engineered ribonucleic acid scaffold (ERS) sequence
  source 1..87: mol_type = other DNA
acgaggtgttctatctgattactctgcacctctcacctgcgactatgtcgtaagggtaaagctccctcttcggagggagcatcagag

SEQ ID NO: 7547 - DNA, 87 bp, synthetic construct
  misc_feature 1..87: note = engineered ribonucleic acid scaffold (ERS) sequence
  source 1..87: mol_type = other DNA
acgaggtgttctatctgattactctgcacctctcaccagagactatgtcttatgggtaaagctccctcttcggagggagcatcagag

SEQ ID NO: 7548 - DNA, 87 bp, synthetic construct
  misc_feature 1..87: note = engineered ribonucleic acid scaffold (ERS) sequence
  source 1..87: mol_type = other DNA
acgaggtgttctatctgattactctgcacctctcaccagggactatgtcctatgggtaaagctccctcttcggagggagcatcagag

SEQ ID NO: 7549 - DNA, 88 bp, synthetic construct
  misc_feature 1..88: note = engineered ribonucleic acid scaffold (ERS) sequence
  source 1..88: mol_type = other DNA
acgaggtgttctatctgattactctgcacctctcaccaggcactatgtgctattgggtaaagctccctcttcggagggagcatcagag

SEQ ID NO: 7550 - DNA, 87 bp, synthetic construct
  misc_feature 1..87: note = engineered ribonucleic acid scaffold (ERS) sequence
  source 1..87: mol_type = other DNA
acgaggtgttctatctgattactctgcacctctcaccagccactatgtggtatgggtaaagctccctcttcggagggagcatcagag

SEQ ID NO: 7551 - DNA, 87 bp, synthetic construct
  misc_feature 1..87: note = engineered ribonucleic acid scaffold (ERS) sequence
  source 1..87: mol_type = other DNA
acgaggtgttctatctgattactctgcacctctcaccagctactatgtagtatgggtaaagctccctcttcggagggagcatcagag

SEQ ID NO: 7552 - DNA, 87 bp, synthetic construct
  misc_feature 1..87: note = engineered ribonucleic acid scaffold (ERS) sequence
  source 1..87: mol_type = other DNA
acgaggtgttctatctgattactctgcacctctcaccagcgattatgtcgtatgggtaaagctccctcttcggagggagcatcagag

SEQ ID NO: 7553 - DNA, 87 bp, synthetic construct
  misc_feature 1..87: note = engineered ribonucleic acid scaffold (ERS) sequence
  source 1..87: mol_type = other DNA
acgaggtgttctatctgattactctgcacctctcaccagcgacgatgtcgtatgggtaaagctccctcttcggagggagcatcagag

SEQ ID NO: 7554 - DNA, 87 bp, synthetic construct
  misc_feature 1..87: note = engineered ribonucleic acid scaffold (ERS) sequence
  source 1..87: mol_type = other DNA
acgaggtgttctatctgattactctgcacctctcaccagcgactctgtcgtatgggtaaagctccctcttcggagggagcatcagag

SEQ ID NO: 7555 - DNA, 87 bp, synthetic construct
  misc_feature 1..87: note = engineered ribonucleic acid scaffold (ERS) sequence
  source 1..87: mol_type = other DNA
acgaggtgttctatctgattactctgcacctctcaccagcgactatgtcgtgtgggtaaagctccctcttcggagggagcatcagag

SEQ ID NO: 7556 - DNA, 88 bp, synthetic construct
  misc_feature 1..88: note = engineered ribonucleic acid scaffold (ERS) sequence
  source 1..88: mol_type = other DNA
acgaggtgttctatctgattactctgcacctctcaccagcgactatgtcgtattgggtaaagctccctcttcggagggagcatcagag

SEQ ID NO: 7557 - DNA, 88 bp, synthetic construct
  misc_feature 1..88: note = engineered ribonucleic acid scaffold (ERS) sequence
  source 1..88: mol_type = other DNA
acgaggtgttctatctgattactctgcacctctcaccagcgactatgtcgtatggagtaaagctccctcttcggagggagcatcagag

SEQ ID NO: 7558 - DNA, 88 bp, synthetic construct
  misc_feature 1..88: note = engineered ribonucleic acid scaffold (ERS) sequence
  source 1..88: mol_type = other DNA
acgaggtgttctatctgattactctgcacctctcaccagcgactatgtcgtatggcgtaaagctccctcttcggagggagcatcagag

SEQ ID NO: 7559 - DNA, 88 bp, synthetic construct
  misc_feature 1..88: note = engineered ribonucleic acid scaffold (ERS) sequence
  source 1..88: mol_type = other DNA
acgaggtgttctatctgattactctgcacctctcaccagcgactatgtcgtatggtgtaaagctccctcttcggagggagcatcagag

SEQ ID NO: 7560 - DNA, 88 bp, synthetic construct
  misc_feature 1..88: note = engineered ribonucleic acid scaffold (ERS) sequence
  source 1..88: mol_type = other DNA
acgaggtgttctatctgattactctgcacctctcaccagcgactatgtcgtatgggctaaagctccctcttcggagggagcatcagag

SEQ ID NO: 7561 - DNA, 85 bp, synthetic construct
  misc_feature 1..85: note = engineered ribonucleic acid scaffold (ERS) sequence
  source 1..85: mol_type = other DNA
acgaggtgttctatctgattactctgcacctctcaccagcgactatgtcgtatgggtagctccctcttcggagggagcatcagag

SEQ ID NO: 7562 - DNA, 87 bp, synthetic construct
  misc_feature 1..87: note = engineered ribonucleic acid scaffold (ERS) sequence
  source 1..87: mol_type = other DNA
acgaggtgttctatctgattactctgcacctctcaccagcgactatgtcgtatgggtgaagctccctcttcggagggagcatcagag

SEQ ID NO: 7563 - DNA, 87 bp, synthetic construct
  misc_feature 1..87: note = engineered ribonucleic acid scaffold (ERS) sequence
  source 1..87: mol_type = other DNA
acgaggtgttctatctgattactctgcacctctcaccagcgactatgtcgtatgggtagagctccctcttcggagggagcatcagag

SEQ ID NO: 7564 - DNA, 87 bp, synthetic construct
  misc_feature 1..87: note = engineered ribonucleic acid scaffold (ERS) sequence
  source 1..87: mol_type = other DNA
acgggactttctatctgattactctgagtcccacaccagcgactatgtcgtatgggtaaagctccctcttcggagggagcatcagag

SEQ ID NO: 7565 - DNA, 87 bp, synthetic construct
  misc_feature 1..87: note = engineered ribonucleic acid scaffold (ERS) sequence
  source 1..87: mol_type = other DNA
acgggactttctatctgattactctgagtcccgcaccagcgactatgtcgtatgggtaaagctccctcttcggagggagcatcagag

SEQ ID NO: 7566 - DNA, 87 bp, synthetic construct
  misc_feature 1..87: note = engineered ribonucleic acid scaffold (ERS) sequence
  source 1..87: mol_type = other DNA
acgggactttctatctgattactctgagtccctgaccagcgactatgtcgtatggctaaagctccctcttcggagggagcatcagag

SEQ ID NO: 7567 - DNA, 88 bp, synthetic construct
  misc_feature 1..88: note = engineered ribonucleic acid scaffold (ERS) sequence
  source 1..88: mol_type = other DNA
acgggactttctatctgattactctgagtccctgaccagcgactatgtcgtatgggctaaagctccctcttcggagggagcatcagag

SEQ ID NO: 7568 - DNA, 87 bp, synthetic construct
  misc_feature 1..87: note = engineered ribonucleic acid scaffold (ERS) sequence
  source 1..87: mol_type = other DNA
acgggactttctatctgattactctgagtccctgaccagcgactatgtcgtatgggtaaagctccctcttcggagggagcatcagag

SEQ ID NO: 7569 - DNA, 87 bp, synthetic construct
  misc_feature 1..87: note = engineered ribonucleic acid scaffold (ERS) sequence
  source 1..87: mol_type = other DNA
acgggactttctatctgattactctgagtccctccccagcgactatgtcgtatgggtaaagctccctcttcggagggagcatcagag

SEQ ID NO: 7570 - DNA, 88 bp, synthetic construct
  misc_feature 1..88: note = engineered ribonucleic acid scaffold (ERS) sequence
  source 1..88: mol_type = other DNA
acgggactttctatctgattactctgagtccctcgccagcgactatgtcgtatggcgtaaagctccctcttcggagggagcatcagag

SEQ ID NO: 7571 - DNA, 87 bp, synthetic construct
  misc_feature 1..87: note = engineered ribonucleic acid scaffold (ERS) sequence
  source 1..87: mol_type = other DNA
acgggactttctatctgattactctgagtccctcgccagcgactatgtcgtatgggtaaagctccctcttcggagggagcatcagag

SEQ ID NO: 7572 - DNA, 87 bp, synthetic construct
  misc_feature 1..87: note = engineered ribonucleic acid scaffold (ERS) sequence
  source 1..87: mol_type = other DNA
acgggactttctatctgattactctgagtccctctccagcgactatgtcgtatgggtaaagctccctcttcggagggagcatcagag

SEQ ID NO: 7573 - DNA, 87 bp, synthetic construct
  misc_feature 1..87: note = engineered ribonucleic acid scaffold (ERS) sequence
  source 1..87: mol_type = other DNA
acgggactttctatctgattactctgagtccctcacctgcgactatgtcgtaagggtaaagctccctcttcggagggagcatcagag

SEQ ID NO: 7574 - DNA, 87 bp, synthetic construct
  misc_feature 1..87: note = engineered ribonucleic acid scaffold (ERS) sequence
  source 1..87: mol_type = other DNA
acgggactttctatctgattactctgagtccctcaccagagactatgtcttatgggtaaagctccctcttcggagggagcatcagag

SEQ ID NO: 7575 - DNA, 87 bp, synthetic construct
  misc_feature 1..87: note = engineered ribonucleic acid scaffold (ERS) sequence
  source 1..87: mol_type = other DNA
acgggactttctatctgattactctgagtccctcaccagggactatgtcctatgggtaaagctccctcttcggagggagcatcagag

SEQ ID NO: 7576 - DNA, 88 bp, synthetic construct
  misc_feature 1..88: note = engineered ribonucleic acid scaffold (ERS) sequence
  source 1..88: mol_type = other DNA
acgggactttctatctgattactctgagtccctcaccaggcactatgtgctattgggtaaagctccctcttcggagggagcatcagag

SEQ ID NO: 7577 - DNA, 87 bp, synthetic construct
  misc_feature 1..87: note = engineered ribonucleic acid scaffold (ERS) sequence
  source 1..87: mol_type = other DNA
acgggactttctatctgattactctgagtccctcaccagccactatgtggtatgggtaaagctccctcttcggagggagcatcagag

SEQ ID NO: 7578 - DNA, 87 bp, synthetic construct
  misc_feature 1..87: note = engineered ribonucleic acid scaffold (ERS) sequence
  source 1..87: mol_type = other DNA
acgggactttctatctgattactctgagtccctcaccagctactatgtagtatgggtaaagctccctcttcggagggagcatcagag

SEQ ID NO: 7579 - DNA, 87 bp, synthetic construct
  misc_feature 1..87: note = engineered ribonucleic acid scaffold (ERS) sequence
  source 1..87: mol_type = other DNA
acgggactttctatctgattactctgagtccctcaccagcgattatgtcgtatgggtaaagctccctcttcggagggagcatcagag

SEQ ID NO: 7580 - DNA, 87 bp, synthetic construct
  misc_feature 1..87: note = engineered ribonucleic acid scaffold (ERS) sequence
  source 1..87: mol_type = other DNA
acgggactttctatctgattactctgagtccctcaccagcgacgatgtcgtatgggtaaagctccctcttcggagggagcatcagag

SEQ ID NO: 7581 - DNA, 87 bp, synthetic construct
  misc_feature 1..87: note = engineered ribonucleic acid scaffold (ERS) sequence
  source 1..87: mol_type = other DNA
acgggactttctatctgattactctgagtccctcaccagcgactctgtcgtatgggtaaagctccctcttcggagggagcatcagag

SEQ ID NO: 7582 - DNA, 87 bp, synthetic construct
  misc_feature 1..87: note = engineered ribonucleic acid scaffold (ERS) sequence
  source 1..87: mol_type = other DNA
acgggactttctatctgattactctgagtccctcaccagcgactatgtcgtgtgggtaaagctccctcttcggagggagcatcagag

SEQ ID NO: 7583 - DNA, 88 bp, synthetic construct
  misc_feature 1..88: note = engineered ribonucleic acid scaffold (ERS) sequence
  source 1..88: mol_type = other DNA
acgggactttctatctgattactctgagtccctcaccagcgactatgtcgtattgggtaaagctccctcttcggagggagcatcagag

SEQ ID NO: 7584 - DNA, 88 bp, synthetic construct
  misc_feature 1..88: note = engineered ribonucleic acid scaffold (ERS) sequence
  source 1..88: mol_type = other DNA
acgggactttctatctgattactctgagtccctcaccagcgactatgtcgtatggagtaaagctccctcttcggagggagcatcagag

SEQ ID NO: 7585 - DNA, 88 bp, synthetic construct
  misc_feature 1..88: note = engineered ribonucleic acid scaffold (ERS) sequence
  source 1..88: mol_type = other DNA
acgggactttctatctgattactctgagtccctcaccagcgactatgtcgtatggcgtaaagctccctcttcggagggagcatcagag

SEQ ID NO: 7586 - DNA, 88 bp, synthetic construct
  misc_feature 1..88: note = engineered ribonucleic acid scaffold (ERS) sequence
  source 1..88: mol_type = other DNA
acgggactttctatctgattactctgagtccctcaccagcgactatgtcgtatggtgtaaagctccctcttcggagggagcatcagag

SEQ ID NO: 7587 - DNA, 88 bp, synthetic construct
  misc_feature 1..88: note = engineered ribonucleic acid scaffold (ERS) sequence
  source 1..88: mol_type = other DNA
acgggactttctatctgattactctgagtccctcaccagcgactatgtcgtatgggctaaagctccctcttcggagggagcatcagag

SEQ ID NO: 7588 - DNA, 85 bp, synthetic construct
  misc_feature 1..85: note = engineered ribonucleic acid scaffold (ERS) sequence
  source 1..85: mol_type = other DNA
acgggactttctatctgattactctgagtccctcaccagcgactatgtcgtatgggtagctccctcttcggagggagcatcagag

SEQ ID NO: 7589 - DNA, 87 bp, synthetic construct
  misc_feature 1..87: note = engineered ribonucleic acid scaffold (ERS) sequence
  source 1..87: mol_type = other DNA
acgggactttctatctgattactctgagtccctcaccagcgactatgtcgtatgggtgaagctccctcttcggagggagcatcagag

SEQ ID NO: 7590 - DNA, 87 bp, synthetic construct
  misc_feature 1..87: note = engineered ribonucleic acid scaffold (ERS) sequence
  source 1..87: mol_type = other DNA
acgggactttctatctgattactctgagtccctcaccagcgactatgtcgtatgggtagagctccctcttcggagggagcatcagag

SEQ ID NO: 7591 - DNA, 87 bp, synthetic construct
  misc_feature 1..87: note = engineered ribonucleic acid scaffold (ERS) sequence
  source 1..87: mol_type = other DNA
acgggcaattctatctgattactctgttgcccacaccagcgactatgtcgtatgggtaaagctccctcttcggagggagcatcagag

SEQ ID NO: 7592 - DNA, 87 bp, synthetic construct
  misc_feature 1..87: note = engineered ribonucleic acid scaffold (ERS) sequence
  source 1..87: mol_type = other DNA
acgggcaattctatctgattactctgttgcccgcaccagcgactatgtcgtatgggtaaagctccctcttcggagggagcatcagag

SEQ ID NO: 7593 - DNA, 87 bp, synthetic construct
  misc_feature 1..87: note = engineered ribonucleic acid scaffold (ERS) sequence
  source 1..87: mol_type = other DNA
acgggcaattctatctgattactctgttgccctgaccagcgactatgtcgtatggctaaagctccctcttcggagggagcatcagag

SEQ ID NO: 7594 - DNA, 88 bp, synthetic construct
  misc_feature 1..88: note = engineered ribonucleic acid scaffold (ERS) sequence
  source 1..88: mol_type = other DNA
acgggcaattctatctgattactctgttgccctgaccagcgactatgtcgtatgggctaaagctccctcttcggagggagcatcagag

SEQ ID NO: 7595 - DNA, 87 bp, synthetic construct
  misc_feature 1..87: note = engineered ribonucleic acid scaffold (ERS) sequence
  source 1..87: mol_type = other DNA
acgggcaattctatctgattactctgttgccctgaccagcgactatgtcgtatgggtaaagctccctcttcggagggagcatcagag

SEQ ID NO: 7596 - DNA, 87 bp, synthetic construct
  misc_feature 1..87: note = engineered ribonucleic acid scaffold (ERS) sequence
  source 1..87: mol_type = other DNA
acgggcaattctatctgattactctgttgccctccccagcgactatgtcgtatgggtaaagctccctcttcggagggagcatcagag

SEQ ID NO: 7597 - DNA, 88 bp, synthetic construct
  misc_feature 1..88: note = engineered ribonucleic acid scaffold (ERS) sequence
  source 1..88: mol_type = other DNA
acgggcaattctatctgattactctgttgccctcgccagcgactatgtcgtatggcgtaaagctccctcttcggagggagcatcagag

SEQ ID NO: 7598 - DNA, 87 bp, synthetic construct
  misc_feature 1..87: note = engineered ribonucleic acid scaffold (ERS) sequence
  source 1..87: mol_type = other DNA
acgggcaattctatctgattactctgttgccctcgccagcgactatgtcgtatgggtaaagctccctcttcggagggagcatcagag

SEQ ID NO: 7599 - DNA, 87 bp, synthetic construct
  misc_feature 1..87: note = engineered ribonucleic acid scaffold (ERS) sequence
  source 1..87: mol_type = other DNA
acgggcaattctatctgattactctgttgccctctccagcgactatgtcgtatgggtaaagctccctcttcggagggagcatcagag

SEQ ID NO: 7600 - DNA, 87 bp, synthetic construct
  misc_feature 1..87: note = engineered ribonucleic acid scaffold (ERS) sequence
  source 1..87: mol_type = other DNA
acgggcaattctatctgattactctgttgccctcacctgcgactatgtcgtaagggtaaagctccctcttcggagggagcatcagag

SEQ ID NO: 7601 - DNA, 87 bp, synthetic construct
  misc_feature 1..87: note = engineered ribonucleic acid scaffold (ERS) sequence
  source 1..87: mol_type = other DNA
acgggcaattctatctgattactctgttgccctcaccagagactatgtcttatgggtaaagctccctcttcggagggagcatcagag

SEQ ID NO: 7602 - DNA, 87 bp, synthetic construct
  misc_feature 1..87: note = engineered ribonucleic acid scaffold (ERS) sequence
  source 1..87: mol_type = other DNA
acgggcaattctatctgattactctgttgccctcaccagggactatgtcctatgggtaaagctccctcttcggagggagcatcagag

SEQ ID NO: 7603 - DNA, 88 bp, synthetic construct
  misc_feature 1..88: note = engineered ribonucleic acid scaffold (ERS) sequence
  source 1..88: mol_type = other DNA
acgggcaattctatctgattactctgttgccctcaccaggcactatgtgctattgggtaaagctccctcttcggagggagcatcagag

SEQ ID NO: 7604 - DNA, 87 bp, synthetic construct
  misc_feature 1..87: note = engineered ribonucleic acid scaffold (ERS) sequence
  source 1..87: mol_type = other DNA
acgggcaattctatctgattactctgttgccctcaccagccactatgtggtatgggtaaagctccctcttcggagggagcatcagag

SEQ ID NO: 7605 - DNA, 87 bp, synthetic construct
  misc_feature 1..87: note = engineered ribonucleic acid scaffold (ERS) sequence
  source 1..87: mol_type = other DNA
acgggcaattctatctgattactctgttgccctcaccagctactatgtagtatgggtaaagctccctcttcggagggagcatcagag

SEQ ID NO: 7606 - DNA, 87 bp, synthetic construct
  misc_feature 1..87: note = engineered ribonucleic acid scaffold (ERS) sequence
  source 1..87: mol_type = other DNA
acgggcaattctatctgattactctgttgccctcaccagcgattatgtcgtatgggtaaagctccctcttcggagggagcatcagag

SEQ ID NO: 7607 - DNA, 87 bp, synthetic construct
  misc_feature 1..87: note = engineered ribonucleic acid scaffold (ERS) sequence
  source 1..87: mol_type = other DNA
acgggcaattctatctgattactctgttgccctcaccagcgacgatgtcgtatgggtaaagctccctcttcggagggagcatcagag

SEQ ID NO: 7608 - DNA, 87 bp, synthetic construct
  misc_feature 1..87: note = engineered ribonucleic acid scaffold (ERS) sequence
  source 1..87: mol_type = other DNA
acgggcaattctatctgattactctgttgccctcaccagcgactctgtcgtatgggtaaagctccctcttcggagggagcatcagag

SEQ ID NO: 7609 - DNA, 87 bp, synthetic construct
  misc_feature 1..87: note = engineered ribonucleic acid scaffold (ERS) sequence
  source 1..87: mol_type = other DNA
acgggcaattctatctgattactctgttgccctcaccagcgactatgtcgtgtgggtaaagctccctcttcggagggagcatcagag

SEQ ID NO: 7610 - DNA, 88 bp, synthetic construct
  misc_feature 1..88: note = engineered ribonucleic acid scaffold (ERS) sequence
  source 1..88: mol_type = other DNA
acgggcaattctatctgattactctgttgccctcaccagcgactatgtcgtattgggtaaagctccctcttcggagggagcatcagag

SEQ ID NO: 7611 - DNA, 88 bp, synthetic construct
  misc_feature 1..88: note = engineered ribonucleic acid scaffold (ERS) sequence
  source 1..88: mol_type = other DNA
acgggcaattctatctgattactctgttgccctcaccagcgactatgtcgtatggagtaaagctccctcttcggagggagcatcagag

SEQ ID NO: 7612 - DNA, 88 bp, synthetic construct
  misc_feature 1..88: note = engineered ribonucleic acid scaffold (ERS) sequence
  source 1..88: mol_type = other DNA
acgggcaattctatctgattactctgttgccctcaccagcgactatgtcgtatggcgtaaagctccctcttcggagggagcatcagag

SEQ ID NO: 7613 - DNA, 88 bp, synthetic construct
  misc_feature 1..88: note = engineered ribonucleic acid scaffold (ERS) sequence
  source 1..88: mol_type = other DNA
acgggcaattctatctgattactctgttgccctcaccagcgactatgtcgtatggtgtaaagctccctcttcggagggagcatcagag

SEQ ID NO: 7614 - DNA, 88 bp, synthetic construct
  misc_feature 1..88: note = engineered ribonucleic acid scaffold (ERS) sequence
  source 1..88: mol_type = other DNA
acgggcaattctatctgattactctgttgccctcaccagcgactatgtcgtatgggctaaagctccctcttcggagggagcatcagag

SEQ ID NO: 7615 - DNA, 85 bp, synthetic construct
  misc_feature 1..85: note = engineered ribonucleic acid scaffold (ERS) sequence
  source 1..85: mol_type = other DNA
acgggcaattctatctgattactctgttgccctcaccagcgactatgtcgtatgggtagctccctcttcggagggagcatcagag

SEQ ID NO: 7616 - DNA, 87 bp, synthetic construct
  misc_feature 1..87: note = engineered ribonucleic acid scaffold (ERS) sequence
  source 1..87: mol_type = other DNA
acgggcaattctatctgattactctgttgccctcaccagcgactatgtcgtatgggtgaagctccctcttcggagggagcatcagag

SEQ ID NO: 7617 - DNA, 87 bp, synthetic construct
  misc_feature 1..87: note = engineered ribonucleic acid scaffold (ERS) sequence
  source 1..87: mol_type = other DNA
acgggcaattctatctgattactctgttgccctcaccagcgactatgtcgtatgggtagagctccctcttcggagggagcatcagag

SEQ ID NO: 7618 - DNA, 87 bp, synthetic construct
  misc_feature 1..87: note = engineered ribonucleic acid scaffold (ERS) sequence
  source 1..87: mol_type = other DNA
actgtgcgttctatctgattactctgcgcacaacaccagcgactatgtcgtatgggtaaagctccctcttcggagggagcatcagag

SEQ ID NO: 7619 - DNA, 87 bp, synthetic construct
  misc_feature 1..87: note = engineered ribonucleic acid scaffold (ERS) sequence
  source 1..87: mol_type = other DNA
actgtgcgttctatctgattactctgcgcacagcaccagcgactatgtcgtatgggtaaagctccctcttcggagggagcatcagag

SEQ ID NO: 7620 - DNA, 87 bp, synthetic construct
  misc_feature 1..87: note = engineered ribonucleic acid scaffold (ERS) sequence
  source 1..87: mol_type = other DNA
actgtgcgttctatctgattactctgcgcacatgaccagcgactatgtcgtatggctaaagctccctcttcggagggagcatcagag

SEQ ID NO: 7621 - DNA, 88 bp, synthetic construct
  misc_feature 1..88: note = engineered ribonucleic acid scaffold (ERS) sequence
  source 1..88: mol_type = other DNA
actgtgcgttctatctgattactctgcgcacatgaccagcgactatgtcgtatgggctaaagctccctcttcggagggagcatcagag

SEQ ID NO: 7622 - DNA, 87 bp, synthetic construct
  misc_feature 1..87: note = engineered ribonucleic acid scaffold (ERS) sequence
  source 1..87: mol_type = other DNA
actgtgcgttctatctgattactctgcgcacatgaccagcgactatgtcgtatgggtaaagctccctcttcggagggagcatcagag

SEQ ID NO: 7623 - DNA, 87 bp, synthetic construct
  misc_feature 1..87: note = engineered ribonucleic acid scaffold (ERS) sequence
  source 1..87: mol_type = other DNA
actgtgcgttctatctgattactctgcgcacatccccagcgactatgtcgtatgggtaaagctccctcttcggagggagcatcagag

SEQ ID NO: 7624 - DNA, 88 bp, synthetic construct
  misc_feature 1..88: note = engineered ribonucleic acid scaffold (ERS) sequence
  source 1..88: mol_type = other DNA
actgtgcgttctatctgattactctgcgcacatcgccagcgactatgtcgtatggcgtaaagctccctcttcggagggagcatcagag

SEQ ID NO: 7625 - DNA, 87 bp, synthetic construct
  misc_feature 1..87: note = engineered ribonucleic acid scaffold (ERS) sequence
  source 1..87: mol_type = other DNA
actgtgcgttctatctgattactctgcgcacatcgccagcgactatgtcgtatgggtaaagctccctcttcggagggagcatcagag

SEQ ID NO: 7626 - DNA, 87 bp, synthetic construct
  misc_feature 1..87: note = engineered ribonucleic acid scaffold (ERS) sequence
  source 1..87: mol_type = other DNA
actgtgcgttctatctgattactctgcgcacatctccagcgactatgtcgtatgggtaaagctccctcttcggagggagcatcagag

SEQ ID NO: 7627 - DNA, 87 bp, synthetic construct
  misc_feature 1..87: note = engineered ribonucleic acid scaffold (ERS) sequence
  source 1..87: mol_type = other DNA
actgtgcgttctatctgattactctgcgcacatcacctgcgactatgtcgtaagggtaaagctccctcttcggagggagcatcagag

SEQ ID NO: 7628 - DNA, 87 bp, synthetic construct
  misc_feature 1..87: note = engineered ribonucleic acid scaffold (ERS) sequence
  source 1..87: mol_type = other DNA
actgtgcgttctatctgattactctgcgcacatcaccagagactatgtcttatgggtaaagctccctcttcggagggagcatcagag

SEQ ID NO: 7629 - DNA, 87 bp, synthetic construct
  misc_feature 1..87: note = engineered ribonucleic acid scaffold (ERS) sequence
  source 1..87: mol_type = other DNA
actgtgcgttctatctgattactctgcgcacatcaccagggactatgtcctatgggtaaagctccctcttcggagggagcatcagag

SEQ ID NO: 7630 - DNA, 88 bp, synthetic construct
  misc_feature 1..88: note = engineered ribonucleic acid scaffold (ERS) sequence
  source 1..88: mol_type = other DNA
actgtgcgttctatctgattactctgcgcacatcaccaggcactatgtgctattgggtaaagctccctcttcggagggagcatcagag

SEQ ID NO: 7631 - DNA, 87 bp, synthetic construct
  misc_feature 1..87: note = engineered ribonucleic acid scaffold (ERS) sequence
  source 1..87: mol_type = other DNA
actgtgcgttctatctgattactctgcgcacatcaccagccactatgtggtatgggtaaagctccctcttcggagggagcatcagag

SEQ ID NO: 7632 - DNA, 87 bp, synthetic construct
  misc_feature 1..87: note = engineered ribonucleic acid scaffold (ERS) sequence
  source 1..87: mol_type = other DNA
actgtgcgttctatctgattactctgcgcacatcaccagctactatgtagtatgggtaaagctccctcttcggagggagcatcagag

SEQ ID NO: 7633 - DNA, 87 bp, synthetic construct
  misc_feature 1..87: note = engineered ribonucleic acid scaffold (ERS) sequence
  source 1..87: mol_type = other DNA
actgtgcgttctatctgattactctgcgcacatcaccagcgattatgtcgtatgggtaaagctccctcttcggagggagcatcagag

SEQ ID NO: 7634 - DNA, 87 bp, synthetic construct
  misc_feature 1..87: note = engineered ribonucleic acid scaffold (ERS) sequence
  source 1..87: mol_type = other DNA
actgtgcgttctatctgattactctgcgcacatcaccagcgacgatgtcgtatgggtaaagctccctcttcggagggagcatcagag

SEQ ID NO: 7635 - DNA, 87 bp, synthetic construct
  misc_feature 1..87: note = engineered ribonucleic acid scaffold (ERS) sequence
  source 1..87: mol_type = other DNA
actgtgcgttctatctgattactctgcgcacatcaccagcgactctgtcgtatgggtaaagctccctcttcggagggagcatcagag

SEQ ID NO: 7636 - DNA, 87 bp, synthetic construct
  misc_feature 1..87: note = engineered ribonucleic acid scaffold (ERS) sequence
  source 1..87: mol_type = other DNA
actgtgcgttctatctgattactctgcgcacatcaccagcgactatgtcgtgtgggtaaagctccctcttcggagggagcatcagag

SEQ ID NO: 7637 - DNA, 88 bp, synthetic construct
  misc_feature 1..88: note = engineered ribonucleic acid scaffold (ERS) sequence
  source 1..88: mol_type = other DNA
actgtgcgttctatctgattactctgcgcacatcaccagcgactatgtcgtattgggtaaagctccctcttcggagggagcatcagag

SEQ ID NO: 7638 - DNA, 88 bp, synthetic construct
  misc_feature 1..88: note = engineered ribonucleic acid scaffold (ERS) sequence
  source 1..88: mol_type = other DNA
actgtgcgttctatctgattactctgcgcacatcaccagcgactatgtcgtatggagtaaagctccctcttcggagggagcatcagag

SEQ ID NO: 7639 - DNA, 88 bp, synthetic construct
  misc_feature 1..88: note = engineered ribonucleic acid scaffold (ERS) sequence
  source 1..88: mol_type = other DNA
actgtgcgttctatctgattactctgcgcacatcaccagcgactatgtcgtatggcgtaaagctccctcttcggagggagcatcagag

SEQ ID NO: 7640 - DNA, 88 bp, synthetic construct
  misc_feature 1..88: note = engineered ribonucleic acid scaffold (ERS) sequence
  source 1..88: mol_type = other DNA
actgtgcgttctatctgattactctgcgcacatcaccagcgactatgtcgtatggtgtaaagctccctcttcggagggagcatcagag

SEQ ID NO: 7641 - DNA, 88 bp, synthetic construct
  misc_feature 1..88: note = engineered ribonucleic acid scaffold (ERS) sequence
  source 1..88: mol_type = other DNA
actgtgcgttctatctgattactctgcgcacatcaccagcgactatgtcgtatgggctaaagctccctcttcggagggagcatcagag

SEQ ID NO: 7642 - DNA, 85 bp, synthetic construct
  misc_feature 1..85: note = engineered ribonucleic acid scaffold (ERS) sequence
  source 1..85: mol_type = other DNA
actgtgcgttctatctgattactctgcgcacatcaccagcgactatgtcgtatgggtagctccctcttcggagggagcatcagag

SEQ ID NO: 7643 - DNA, 87 bp, synthetic construct
  misc_feature 1..87: note = engineered ribonucleic acid scaffold (ERS) sequence
  source 1..87: mol_type = other DNA
actgtgcgttctatctgattactctgcgcacatcaccagcgactatgtcgtatgggtgaagctccctcttcggagggagcatcagag

SEQ ID NO: 7644 - DNA, 87 bp, synthetic construct
  misc_feature 1..87: note = engineered ribonucleic acid scaffold (ERS) sequence
  source 1..87: mol_type = other DNA
actgtgcgttctatctgattactctgcgcacatcaccagcgactatgtcgtatgggtagagctccctcttcggagggagcatcagag

SEQ ID NO: 7645 - DNA, 88 bp, synthetic construct
  misc_feature 1..88: note = engineered ribonucleic acid scaffold (ERS) sequence
  source 1..88: mol_type = other DNA
actggcgcttctatctgattactctgggcgccaacaccagcgactatgtcgtatgggtaaagctccctcttcggagggagcatcagag

SEQ ID NO: 7646 - DNA, 88 bp, synthetic construct
  misc_feature 1..88: note = engineered ribonucleic acid scaffold (ERS) sequence
  source 1..88: mol_type = other DNA
actggcgcttctatctgattactctgggcgccagcaccagcgactatgtcgtatgggtaaagctccctcttcggagggagcatcagag

SEQ ID NO: 7647 - DNA, 88 bp, synthetic construct
  misc_feature 1..88: note = engineered ribonucleic acid scaffold (ERS) sequence
  source 1..88: mol_type = other DNA
actggcgcttctatctgattactctgggcgccatgaccagcgactatgtcgtatggctaaagctccctcttcggagggagcatcagag

SEQ ID NO: 7648 - DNA, 89 bp, synthetic construct
  misc_feature 1..89: note = engineered ribonucleic acid scaffold (ERS) sequence
  source 1..89: mol_type = other DNA
actggcgcttctatctgattactctgggcgccatgaccagcgactatgtcgtatgggctaaagctccctcttcggagggagcatcagag

SEQ ID NO: 7649 - DNA, 88 bp, synthetic construct
  misc_feature 1..88: note = engineered ribonucleic acid scaffold (ERS) sequence
  source 1..88: mol_type = other DNA
actggcgcttctatctgattactctgggcgccatgaccagcgactatgtcgtatgggtaaagctccctcttcggagggagcatcagag

SEQ ID NO: 7650 - DNA, 88 bp, synthetic construct
  misc_feature 1..88: note = engineered ribonucleic acid scaffold (ERS) sequence
  source 1..88: mol_type = other DNA
actggcgcttctatctgattactctgggcgccatccccagcgactatgtcgtatgggtaaagctccctcttcggagggagcatcagag

SEQ ID NO: 7651 - DNA, 89 bp, synthetic construct
  misc_feature 1..89: note = engineered ribonucleic acid scaffold (ERS) sequence
  source 1..89: mol_type = other DNA
actggcgcttctatctgattactctgggcgccatcgccagcgactatgtcgtatggcgtaaagctccctcttcggagggagcatcagag

SEQ ID NO: 7652 - DNA, 88 bp, synthetic construct
  misc_feature 1..88: note = engineered ribonucleic acid scaffold (ERS) sequence
  source 1..88: mol_type = other DNA
actggcgcttctatctgattactctgggcgccatcgccagcgactatgtcgtatgggtaaagctccctcttcggagggagcatcagag

SEQ ID NO: 7653 - DNA, 88 bp, synthetic construct
  misc_feature 1..88: note = engineered ribonucleic acid scaffold (ERS) sequence
  source 1..88: mol_type = other DNA
actggcgcttctatctgattactctgggcgccatctccagcgactatgtcgtatgggtaaagctccctcttcggagggagcatcagag

SEQ ID NO: 7654 - DNA, 88 bp, synthetic construct
  misc_feature 1..88: note = engineered ribonucleic acid scaffold (ERS) sequence
  source 1..88: mol_type = other DNA
actggcgcttctatctgattactctgggcgccatcacctgcgactatgtcgtaagggtaaagctccctcttcggagggagcatcagag

SEQ ID NO: 7655 - DNA, 88 bp, synthetic construct
  misc_feature 1..88: note = engineered ribonucleic acid scaffold (ERS) sequence
  source 1..88: mol_type = other DNA
actggcgcttctatctgattactctgggcgccatcaccagagactatgtcttatgggtaaagctccctcttcggagggagcatcagag

SEQ ID NO: 7656 - DNA, 88 bp, synthetic construct
  misc_feature 1..88: note = engineered ribonucleic acid scaffold (ERS) sequence
  source 1..88: mol_type = other DNA
actggcgcttctatctgattactctgggcgccatcaccagggactatgtcctatgggtaaagctccctcttcggagggagcatcagag

SEQ ID NO: 7657 - DNA, 89 bp, synthetic construct
  misc_feature 1..89: note = engineered ribonucleic acid scaffold (ERS) sequence
  source 1..89: mol_type = other DNA
actggcgcttctatctgattactctgggcgccatcaccaggcactatgtgctattgggtaaagctccctcttcggagggagcatcagag

SEQ ID NO: 7658 - DNA, 88 bp, synthetic construct
  misc_feature 1..88: note = engineered ribonucleic acid scaffold (ERS) sequence
  source 1..88: mol_type = other DNA
actggcgcttctatctgattactctgggcgccatcaccagccactatgtggtatgggtaaagctccctcttcggagggagcatcagag

SEQ ID NO: 7659 - DNA, 88 bp, synthetic construct
  misc_feature 1..88: note = engineered ribonucleic acid scaffold (ERS) sequence
  source 1..88: mol_type = other DNA
actggcgcttctatctgattactctgggcgccatcaccagctactatgtagtatgggtaaagctccctcttcggagggagcatcagag

SEQ ID NO: 7660 - DNA, 88 bp, synthetic construct
  misc_feature 1..88: note = engineered ribonucleic acid scaffold (ERS) sequence
  source 1..88: mol_type = other DNA
actggcgcttctatctgattactctgggcgccatcaccagcgattatgtcgtatgggtaaagctccctcttcggagggagcatcagag

SEQ ID NO: 7661 - DNA, 88 bp, synthetic construct
  misc_feature 1..88: note = engineered ribonucleic acid scaffold (ERS) sequence
  source 1..88: mol_type = other DNA
actggcgcttctatctgattactctgggcgccatcaccagcgacgatgtcgtatgggtaaagctccctcttcggagggagcatcagag

SEQ ID NO: 7662 - DNA, 88 bp, synthetic construct
  misc_feature 1..88: note = engineered ribonucleic acid scaffold (ERS) sequence
  source 1..88: mol_type = other DNA
actggcgcttctatctgattactctgggcgccatcaccagcgactctgtcgtatgggtaaagctccctcttcggagggagcatcagag

SEQ ID NO: 7663 - DNA, 88 bp, synthetic construct
  misc_feature 1..88: note = engineered ribonucleic acid scaffold (ERS) sequence
  source 1..88: mol_type = other DNA
actggcgcttctatctgattactctgggcgccatcaccagcgactatgtcgtgtgggtaaagctccctcttcggagggagcatcagag

SEQ ID NO: 7664 - DNA, 89 bp, synthetic construct
  misc_feature 1..89: note = engineered ribonucleic acid scaffold (ERS) sequence
  source 1..89: mol_type = other DNA
actggcgcttctatctgattactctgggcgccatcaccagcgactatgtcgtattgggtaaagctccctcttcggagggagcatcagag

SEQ ID NO: 7665 - DNA, 89 bp, synthetic construct
  misc_feature 1..89: note = engineered ribonucleic acid scaffold (ERS) sequence
  source 1..89: mol_type = other DNA
actggcgcttctatctgattactctgggcgccatcaccagcgactatgtcgtatggagtaaagctccctcttcggagggagcatcagag

SEQ ID NO: 7666 - DNA, 89 bp, synthetic construct
  misc_feature 1..89: note = engineered ribonucleic acid scaffold (ERS) sequence
  source 1..89: mol_type = other DNA
actggcgcttctatctgattactctgggcgccatcaccagcgactatgtcgtatggcgtaaagctccctcttcggagggagcatcagag

SEQ ID NO: 7667 - DNA, 89 bp, synthetic construct
  misc_feature 1..89: note = engineered ribonucleic acid scaffold (ERS) sequence
  source 1..89: mol_type = other DNA
actggcgcttctatctgattactctgggcgccatcaccagcgactatgtcgtatggtgtaaagctccctcttcggagggagcatcagag

SEQ ID NO: 7668 - DNA, 89 bp, synthetic construct
  misc_feature 1..89: note = engineered ribonucleic acid scaffold (ERS) sequence
  source 1..89: mol_type = other DNA
actggcgcttctatctgattactctgggcgccatcaccagcgactatgtcgtatgggctaaagctccctcttcggagggagcatcagag

SEQ ID NO: 7669 - DNA, 86 bp, synthetic construct
  misc_feature 1..86: note = engineered ribonucleic acid scaffold (ERS) sequence
  source 1..86: mol_type = other DNA
actggcgcttctatctgattactctgggcgccatcaccagcgactatgtcgtatgggtagctccctcttcggagggagcatcagag

SEQ ID NO: 7670 - DNA, 88 bp, synthetic construct
  misc_feature 1..88: note = engineered ribonucleic acid scaffold (ERS) sequence
  source 1..88: mol_type = other DNA
actggcgcttctatctgattactctgggcgccatcaccagcgactatgtcgtatgggtgaagctccctcttcggagggagcatcagag

SEQ ID NO: 7671 - DNA, 88 bp, synthetic construct
  misc_feature 1..88: note = engineered ribonucleic acid scaffold (ERS) sequence
  source 1..88: mol_type = other DNA
actggcgcttctatctgattactctgggcgccatcaccagcgactatgtcgtatgggtagagctccctcttcggagggagcatcagag

SEQ ID NO: 7672 - DNA, 88 bp, synthetic construct
  misc_feature 1..88: note = engineered ribonucleic acid scaffold (ERS) sequence
  source 1..88: mol_type = other DNA
actggcgcttctatctgattactctgggagccaacaccagcgactatgtcgtatgggtaaagctccctcttcggagggagcatcagag

SEQ ID NO: 7673 - DNA, 88 bp, synthetic construct
  misc_feature 1..88: note = engineered ribonucleic acid scaffold (ERS) sequence
  source 1..88: mol_type = other DNA
actggcgcttctatctgattactctgggagccagcaccagcgactatgtcgtatgggtaaagctccctcttcggagggagcatcagag

SEQ ID NO: 7674 - DNA, 88 bp, synthetic construct
  misc_feature 1..88: note = engineered ribonucleic acid scaffold (ERS) sequence
  source 1..88: mol_type = other DNA
actggcgcttctatctgattactctgggagccatgaccagcgactatgtcgtatggctaaagctccctcttcggagggagcatcagag

SEQ ID NO: 7675 - DNA, 89 bp, synthetic construct
  misc_feature 1..89: note = engineered ribonucleic acid scaffold (ERS) sequence
  source 1..89: mol_type = other DNA
actggcgcttctatctgattactctgggagccatgaccagcgactatgtcgtatgggctaaagctccctcttcggagggagcatcagag

SEQ ID NO: 7676 - DNA, 88 bp, synthetic construct
  misc_feature 1..88: note = engineered ribonucleic acid scaffold (ERS) sequence
  source 1..88: mol_type = other DNA
actggcgcttctatctgattactctgggagccatgaccagcgactatgtcgtatgggtaaagctccctcttcggagggagcatcagag

SEQ ID NO: 7677 - DNA, 88 bp, synthetic construct
  misc_feature 1..88: note = engineered ribonucleic acid scaffold (ERS) sequence
  source 1..88: mol_type = other DNA
actggcgcttctatctgattactctgggagccatccccagcgactatgtcgtatgggtaaagctccctcttcggagggagcatcagag

SEQ ID NO: 7678 - DNA, 89 bp, synthetic construct
  misc_feature 1..89: note = engineered ribonucleic acid scaffold (ERS) sequence
  source 1..89: mol_type = other DNA
actggcgcttctatctgattactctgggagccatcgccagcgactatgtcgtatggcgtaaagctccctcttcggagggagcatcagag

SEQ ID NO: 7679 - DNA, 88 bp, synthetic construct
  misc_feature 1..88: note = engineered ribonucleic acid scaffold (ERS) sequence
  source 1..88: mol_type = other DNA
actggcgcttctatctgattactctgggagccatcgccagcgactatgtcgtatgggtaaagctccctcttcggagggagcatcagag

SEQ ID NO: 7680 - DNA, 88 bp, synthetic construct
  misc_feature 1..88: note = engineered ribonucleic acid scaffold (ERS) sequence
  source 1..88: mol_type = other DNA
actggcgcttctatctgattactctgggagccatctccagcgactatgtcgtatgggtaaagctccctcttcggagggagcatcagag

SEQ ID NO: 7681 - DNA, 88 bp, synthetic construct
  misc_feature 1..88: note = engineered ribonucleic acid scaffold (ERS) sequence
  source 1..88: mol_type = other DNA
actggcgcttctatctgattactctgggagccatcacctgcgactatgtcgtaagggtaaagctccctcttcggagggagcatcagag

SEQ ID NO: 7682 - DNA, 88 bp, synthetic construct
  misc_feature 1..88: note = engineered ribonucleic acid scaffold (ERS) sequence
  source 1..88: mol_type = other DNA
actggcgcttctatctgattactctgggagccatcaccagagactatgtcttatgggtaaagctccctcttcggagggagcatcagag

SEQ ID NO: 7683 - DNA, 88 bp, synthetic construct
  misc_feature 1..88: note = engineered ribonucleic acid scaffold (ERS) sequence
  source 1..88: mol_type = other DNA
actggcgcttctatctgattactctgggagccatcaccagggactatgtcctatgggtaaagctccctcttcggagggagcatcagag

SEQ ID NO: 7684 - DNA, 89 bp, synthetic construct
  misc_feature 1..89: note = engineered ribonucleic acid scaffold (ERS) sequence
  source 1..89: mol_type = other DNA
actggcgcttctatctgattactctgggagccatcaccaggcactatgtgctattgggtaaagctccctcttcggagggagcatcagag

SEQ ID NO: 7685 - DNA, 88 bp, synthetic construct
  misc_feature 1..88: note = engineered ribonucleic acid scaffold (ERS) sequence
  source 1..88: mol_type = other DNA
actggcgcttctatctgattactctgggagccatcaccagccactatgtggtatgggtaaagctccctcttcggagggagcatcagag

SEQ ID NO: 7686 - DNA, 88 bp, synthetic construct
  misc_feature 1..88: note = engineered ribonucleic acid scaffold (ERS) sequence
  source 1..88: mol_type = other DNA
actggcgcttctatctgattactctgggagccatcaccagctactatgtagtatgggtaaagctccctcttcggagggagcatcagag

SEQ ID NO: 7687 - DNA, 88 bp, synthetic construct
  misc_feature 1..88: note = engineered ribonucleic acid scaffold (ERS) sequence
  source 1..88: mol_type = other DNA
actggcgcttctatctgattactctgggagccatcaccagcgattatgtcgtatgggtaaagctccctcttcggagggagcatcagag

SEQ ID NO: 7688 - DNA, 88 bp, synthetic construct
  misc_feature 1..88: note = engineered ribonucleic acid scaffold (ERS) sequence
  source 1..88: mol_type = other DNA
actggcgcttctatctgattactctgggagccatcaccagcgacgatgtcgtatgggtaaagctccctcttcggagggagcatcagag

SEQ ID NO: 7689 - DNA, 88 bp, synthetic construct
  misc_feature 1..88: note = engineered ribonucleic acid scaffold (ERS) sequence
  source 1..88: mol_type = other DNA
actggcgcttctatctgattactctgggagccatcaccagcgactctgtcgtatgggtaaagctccctcttcggagggagcatcagag

SEQ ID NO: 7690 - DNA, 88 bp, synthetic construct
  misc_feature 1..88: note = engineered ribonucleic acid scaffold (ERS) sequence
  source 1..88: mol_type = other DNA
actggcgcttctatctgattactctgggagccatcaccagcgactatgtcgtgtgggtaaagctccctcttcggagggagcatcagag

SEQ ID NO: 7691 - DNA, 89 bp, synthetic construct
  misc_feature 1..89: note = engineered ribonucleic acid scaffold (ERS) sequence
  source 1..89: mol_type = other DNA
actggcgcttctatctgattactctgggagccatcaccagcgactatgtcgtattgggtaaagctccctcttcggagggagcatcagag

SEQ ID NO: 7692 - DNA, 89 bp, synthetic construct
  misc_feature 1..89: note = engineered ribonucleic acid scaffold (ERS) sequence
  source 1..89: mol_type = other DNA
actggcgcttctatctgattactctgggagccatcaccagcgactatgtcgtatggagtaaagctccctcttcggagggagcatcagag

SEQ ID NO: 7693 - DNA, 89 bp, synthetic construct
  misc_feature 1..89: note = engineered ribonucleic acid scaffold (ERS) sequence
  source 1..89: mol_type = other DNA
actggcgcttctatctgattactctgggagccatcaccagcgactatgtcgtatggcgtaaagctccctcttcggagggagcatcagag

SEQ ID NO: 7694 - DNA, 89 bp, synthetic construct
  misc_feature 1..89: note = engineered ribonucleic acid scaffold (ERS) sequence
  source 1..89: mol_type = other DNA
actggcgcttctatctgattactctgggagccatcaccagcgactatgtcgtatggtgtaaagctccctcttcggagggagcatcagag

SEQ ID NO: 7695 - DNA, 89 bp, synthetic construct
  misc_feature 1..89: note = engineered ribonucleic acid scaffold (ERS) sequence
  source 1..89: mol_type = other DNA
actggcgcttctatctgattactctgggagccatcaccagcgactatgtcgtatgggctaaagctccctcttcggagggagcatcagag

SEQ ID NO: 7696 - DNA, 86 bp, synthetic construct
  misc_feature 1..86: note = engineered ribonucleic acid scaffold (ERS) sequence
  source 1..86: mol_type = other DNA
actggcgcttctatctgattactctgggagccatcaccagcgactatgtcgtatgggtagctccctcttcggagggagcatcagag

SEQ ID NO: 7697 - DNA, 88 bp, synthetic construct
  misc_feature 1..88: note = engineered ribonucleic acid scaffold (ERS) sequence
  source 1..88: mol_type = other DNA
actggcgcttctatctgattactctgggagccatcaccagcgactatgtcgtatgggtgaagctccctcttcggagggagcatcagag

SEQ ID NO: 7698 - DNA, 88 bp, synthetic construct
  misc_feature 1..88: note = engineered ribonucleic acid scaffold (ERS) sequence
  source 1..88: mol_type = other DNA
actggcgcttctatctgattactctgggagccatcaccagcgactatgtcgtatgggtagagctccctcttcggagggagcatcagag

SEQ ID NO: 7699 - DNA, 88 bp, synthetic construct
  misc_feature 1..88: note = engineered ribonucleic acid scaffold (ERS) sequence
  source 1..88: mol_type = other DNA
actggcgcttctatctgattactctgtgagccaacaccagcgactatgtcgtatgggtaaagctccctcttcggagggagcatcagag

SEQ ID NO: 7700 - DNA, 88 bp, synthetic construct
  misc_feature 1..88: note = engineered ribonucleic acid scaffold (ERS) sequence
  source 1..88: mol_type = other DNA
actggcgcttctatctgattactctgtgagccagcaccagcgactatgtcgtatgggtaaagctccctcttcggagggagcatcagag

SEQ ID NO: 7701 - DNA, 88 bp, synthetic construct
  misc_feature 1..88: note = engineered ribonucleic acid scaffold (ERS) sequence
  source 1..88: mol_type = other DNA
actggcgcttctatctgattactctgtgagccatgaccagcgactatgtcgtatggctaaagctccctcttcggagggagcatcagag

SEQ ID NO: 7702 - DNA, 89 bp, synthetic construct
  misc_feature 1..89: note = engineered ribonucleic acid scaffold (ERS) sequence
  source 1..89: mol_type = other DNA
actggcgcttctatctgattactctgtgagccatgaccagcgactatgtcgtatgggctaaagctccctcttcggagggagcatcagag

SEQ ID NO: 7703 - DNA, 88 bp, synthetic construct
  misc_feature 1..88: note = engineered ribonucleic acid scaffold (ERS) sequence
  source 1..88: mol_type = other DNA
actggcgcttctatctgattactctgtgagccatgaccagcgactatgtcgtatgggtaaagctccctcttcggagggagcatcagag

SEQ ID NO: 7704 - DNA, 88 bp, synthetic construct
  misc_feature 1..88: note = engineered ribonucleic acid scaffold (ERS) sequence
  source 1..88: mol_type = other DNA
actggcgcttctatctgattactctgtgagccatccccagcgactatgtcgtatgggtaaagctccctcttcggagggagcatcagag

SEQ ID NO: 7705 - DNA, 89 bp, synthetic construct
  misc_feature 1..89: note = engineered ribonucleic acid scaffold (ERS) sequence
  source 1..89: mol_type = other DNA
actggcgcttctatctgattactctgtgagccatcgccagcgactatgtcgtatggcgtaaagctccctcttcggagggagcatcagag

SEQ ID NO: 7706 - DNA, 88 bp, synthetic construct
  misc_feature 1..88: note = engineered ribonucleic acid scaffold (ERS) sequence
  source 1..88: mol_type = other DNA
actggcgcttctatctgattactctgtgagccatcgccagcgactatgtcgtatgggtaaagctccctcttcggagggagcatcagag

SEQ ID NO: 7707 - DNA, 88 bp, synthetic construct
  misc_feature 1..88: note = engineered ribonucleic acid scaffold (ERS) sequence
  source 1..88: mol_type = other DNA
actggcgcttctatctgattactctgtgagccatctccagcgactatgtcgtatgggtaaagctccctcttcggagggagcatcagag

SEQ ID NO: 7708 - DNA, 88 bp, synthetic construct
  misc_feature 1..88: note = engineered ribonucleic acid scaffold (ERS) sequence
  source 1..88: mol_type = other DNA
actggcgcttctatctgattactctgtgagccatcacctgcgactatgtcgtaagggtaaagctccctcttcggagggagcatcagag

SEQ ID NO: 7709 - DNA, 88 bp, synthetic construct
  misc_feature 1..88: note = engineered ribonucleic acid scaffold (ERS) sequence
  source 1..88: mol_type = other DNA
actggcgcttctatctgattactctgtgagccatcaccagagactatgtcttatgggtaaagctccctcttcggagggagcatcagag

SEQ ID NO: 7710 - DNA, 88 bp, synthetic construct
  misc_feature 1..88: note = engineered ribonucleic acid scaffold (ERS) sequence
  source 1..88: mol_type = other DNA
actggcgcttctatctgattactctgtgagccatcaccagggactatgtcctatgggtaaagctccctcttcggagggagcatcagag

SEQ ID NO: 7711 - DNA, 89 bp, synthetic construct
  misc_feature 1..89: note = engineered ribonucleic acid scaffold (ERS) sequence
  source 1..89: mol_type = other DNA
actggcgcttctatctgattactctgtgagccatcaccaggcactatgtgctattgggtaaagctccctcttcggagggagcatcagag

SEQ ID NO: 7712 - DNA, 88 bp, synthetic construct
  misc_feature 1..88: note = engineered ribonucleic acid scaffold (ERS) sequence
  source 1..88: mol_type = other DNA
actggcgcttctatctgattactctgtgagccatcaccagccactatgtggtatgggtaaagctccctcttcggagggagcatcagag

SEQ ID NO: 7713 - DNA, 88 bp, synthetic construct
  misc_feature 1..88: note = engineered ribonucleic acid scaffold (ERS) sequence
  source 1..88: mol_type = other DNA
actggcgcttctatctgattactctgtgagccatcaccagctactatgtagtatgggtaaagctccctcttcggagggagcatcagag

SEQ ID NO: 7714 - DNA, 88 bp, synthetic construct
  misc_feature 1..88: note = engineered ribonucleic acid scaffold (ERS) sequence
  source 1..88: mol_type = other DNA
actggcgcttctatctgattactctgtgagccatcaccagcgattatgtcgtatgggtaaagctccctcttcggagggagcatcagag

SEQ ID NO: 7715 - DNA, 88 bp, synthetic construct
  misc_feature 1..88: note = engineered ribonucleic acid scaffold (ERS) sequence
  source 1..88: mol_type = other DNA
actggcgcttctatctgattactctgtgagccatcaccagcgacgatgtcgtatgggtaaagctccctcttcggagggagcatcagag

SEQ ID NO: 7716 - DNA, 88 bp, synthetic construct
  misc_feature 1..88: note = engineered ribonucleic acid scaffold (ERS) sequence
  source 1..88: mol_type = other DNA
actggcgcttctatctgattactctgtgagccatcaccagcgactctgtcgtatgggtaaagctccctcttcggagggagcatcagag

SEQ ID NO: 7717 - DNA, 88 bp, synthetic construct
  misc_feature 1..88: note = engineered ribonucleic acid scaffold (ERS) sequence
  source 1..88: mol_type = other DNA
actggcgcttctatctgattactctgtgagccatcaccagcgactatgtcgtgtgggtaaagctccctcttcggagggagcatcagag

SEQ ID NO: 7718 - DNA, 89 bp, synthetic construct
  misc_feature 1..89: note = engineered ribonucleic acid scaffold (ERS) sequence
  source 1..89: mol_type = other DNA
actggcgcttctatctgattactctgtgagccatcaccagcgactatgtcgtattgggtaaagctccctcttcggagggagcatcagag

SEQ ID NO: 7719 - DNA, 89 bp, synthetic construct
  misc_feature 1..89: note = engineered ribonucleic acid scaffold (ERS) sequence
  source 1..89: mol_type = other DNA
actggcgcttctatctgattactctgtgagccatcaccagcgactatgtcgtatggagtaaagctccctcttcggagggagcatcagag

SEQ ID NO: 7720 - DNA, 89 bp, synthetic construct
  misc_feature 1..89: note = engineered ribonucleic acid scaffold (ERS) sequence
  source 1..89: mol_type = other DNA
actggcgcttctatctgattactctgtgagccatcaccagcgactatgtcgtatggcgtaaagctccctcttcggagggagcatcagag

SEQ ID NO: 7721 - DNA, 89 bp, synthetic construct
  misc_feature 1..89: note = engineered ribonucleic acid scaffold (ERS) sequence
  source 1..89: mol_type = other DNA
actggcgcttctatctgattactctgtgagccatcaccagcgactatgtcgtatggtgtaaagctccctcttcggagggagcatcagag

SEQ ID NO: 7722 - DNA, 89 bp, synthetic construct
  misc_feature 1..89: note = engineered ribonucleic acid scaffold (ERS) sequence
  source 1..89: mol_type = other DNA
actggcgcttctatctgattactctgtgagccatcaccagcgactatgtcgtatgggctaaagctccctcttcggagggagcatcagag

SEQ ID NO: 7723 - DNA, 86 bp, synthetic construct
  misc_feature 1..86: note = engineered ribonucleic acid scaffold (ERS) sequence
  source 1..86: mol_type = other DNA
actggcgcttctatctgattactctgtgagccatcaccagcgactatgtcgtatgggtagctccctcttcggagggagcatcagag

SEQ ID NO: 7724 - DNA, 88 bp, synthetic construct
  misc_feature 1..88: note = engineered ribonucleic acid scaffold (ERS) sequence
  source 1..88: mol_type = other DNA
actggcgcttctatctgattactctgtgagccatcaccagcgactatgtcgtatgggtgaagctccctcttcggagggagcatcagag

SEQ ID NO: 7725 - DNA, 88 bp, synthetic construct
  misc_feature 1..88: note = engineered ribonucleic acid scaffold (ERS) sequence
  source 1..88: mol_type = other DNA
actggcgcttctatctgattactctgtgagccatcaccagcgactatgtcgtatgggtagagctccctcttcggagggagcatcagag

SEQ ID NO: 7726 - DNA, 89 bp, synthetic construct
  misc_feature 1..89: note = engineered ribonucleic acid scaffold (ERS) sequence
  source 1..89: mol_type = other DNA
actggcgcttctatctgattactctgaggagccaacaccagcgactatgtcgtatgggtaaagctccctcttcggagggagcatcagag

SEQ ID NO: 7727 - DNA, 89 bp, synthetic construct
  misc_feature 1..89: note = engineered ribonucleic acid scaffold (ERS) sequence
  source 1..89: mol_type = other DNA
actggcgcttctatctgattactctgaggagccagcaccagcgactatgtcgtatgggtaaagctccctcttcggagggagcatcagag

SEQ ID NO: 7728 - DNA, 89 bp, synthetic construct
  misc_feature 1..89: note = engineered ribonucleic acid scaffold (ERS) sequence
  source 1..89: mol_type = other DNA
actggcgcttctatctgattactctgaggagccatgaccagcgactatgtcgtatggctaaagctccctcttcggagggagcatcagag

SEQ ID NO: 7729 - DNA, 90 bp, synthetic construct
  misc_feature 1..90: note = engineered ribonucleic acid scaffold (ERS) sequence
  source 1..90: mol_type = other DNA
actggcgcttctatctgattactctgaggagccatgaccagcgactatgtcgtatgggctaaagctccctcttcggagggagcatcagag

SEQ ID NO: 7730 - DNA, 89 bp, synthetic construct
  misc_feature 1..89: note = engineered ribonucleic acid scaffold (ERS) sequence
  source 1..89: mol_type = other DNA
actggcgcttctatctgattactctgaggagccatgaccagcgactatgtcgtatgggtaaagctccctcttcggagggagcatcagag

SEQ ID NO: 7731 - DNA, 89 bp, synthetic construct
  misc_feature 1..89: note = engineered ribonucleic acid scaffold (ERS) sequence
  source 1..89: mol_type = other DNA
actggcgcttctatctgattactctgaggagccatccccagcgactatgtcgtatgggtaaagctccctcttcggagggagcatcagag

SEQ ID NO: 7732 - DNA, 90 bp, synthetic construct
  misc_feature 1..90: note = engineered ribonucleic acid scaffold (ERS) sequence
  source 1..90: mol_type = other DNA
actggcgcttctatctgattactctgaggagccatcgccagcgactatgtcgtatggcgtaaagctccctcttcggagggagcatcagag

SEQ ID NO: 7733 - DNA, 89 bp, synthetic construct
  misc_feature 1..89: note = engineered ribonucleic acid scaffold (ERS) sequence
  source 1..89: mol_type = other DNA
actggcgcttctatctgattactctgaggagccatcgccagcgactatgtcgtatgggtaaagctccctcttcggagggagcatcagag

SEQ ID NO: 7734 - DNA, 89 bp, synthetic construct
  misc_feature 1..89: note = engineered ribonucleic acid scaffold (ERS) sequence
  source 1..89: mol_type = other DNA
actggcgcttctatctgattactctgaggagccatctccagcgactatgtcgtatgggtaaagctccctcttcggagggagcatcagag

SEQ ID NO: 7735 - DNA, 89 bp, synthetic construct
  misc_feature 1..89: note = engineered ribonucleic acid scaffold (ERS) sequence
  source 1..89: mol_type = other DNA
actggcgcttctatctgattactctgaggagccatcacctgcgactatgtcgtaagggtaaagctccctcttcggagggagcatcagag

SEQ ID NO: 7736 - DNA, 89 bp, synthetic construct
  misc_feature 1..89: note = engineered ribonucleic acid scaffold (ERS) sequence
  source 1..89: mol_type = other DNA
actggcgcttctatctgattactctgaggagccatcaccagagactatgtcttatgggtaaagctccctcttcggagggagcatcagag

SEQ ID NO: 7737 - DNA, 89 bp, synthetic construct
  misc_feature 1..89: note = engineered ribonucleic acid scaffold (ERS) sequence
  source 1..89: mol_type = other DNA
actggcgcttctatctgattactctgaggagccatcaccagggactatgtcctatgggtaaagctccctcttcggagggagcatcagag

SEQ ID NO: 7738 - DNA, 90 bp, synthetic construct
  misc_feature 1..90: note = engineered ribonucleic acid scaffold (ERS) sequence
  source 1..90: mol_type = other DNA
actggcgcttctatctgattactctgaggagccatcaccaggcactatgtgctattgggtaaagctccctcttcggagggagcatcagag

SEQ ID NO: 7739 - DNA, 89 bp, synthetic construct
  misc_feature 1..89: note = engineered ribonucleic acid scaffold (ERS) sequence
  source 1..89: mol_type = other DNA
actggcgcttctatctgattactctgaggagccatcaccagccactatgtggtatgggtaaagctccctcttcggagggagcatcagag

SEQ ID NO: 7740 - DNA, 89 bp, synthetic construct
  misc_feature 1..89: note = engineered ribonucleic acid scaffold (ERS) sequence
  source 1..89: mol_type = other DNA
actggcgcttctatctgattactctgaggagccatcaccagctactatgtagtatgggtaaagctccctcttcggagggagcatcagag

SEQ ID NO: 7741 - DNA, 89 bp, synthetic construct
  misc_feature 1..89: note = engineered ribonucleic acid scaffold (ERS) sequence
  source 1..89: mol_type = other DNA
actggcgcttctatctgattactctgaggagccatcaccagcgattatgtcgtatgggtaaagctccctcttcggagggagcatcagag

SEQ ID NO: 7742 - DNA, 89 bp, synthetic construct
  misc_feature 1..89: note = engineered ribonucleic acid scaffold (ERS) sequence
  source 1..89: mol_type = other DNA
actggcgcttctatctgattactctgaggagccatcaccagcgacgatgtcgtatgggtaaagctccctcttcggagggagcatcagag

SEQ ID NO: 7743 - DNA, 89 bp, synthetic construct
  misc_feature 1..89: note = engineered ribonucleic acid scaffold (ERS) sequence
  source 1..89: mol_type = other DNA
actggcgcttctatctgattactctgaggagccatcaccagcgactctgtcgtatgggtaaagctccctcttcggagggagcatcagag

SEQ ID NO: 7744 - DNA, 89 bp, synthetic construct
  misc_feature 1..89: note = engineered ribonucleic acid scaffold (ERS) sequence
  source 1..89: mol_type = other DNA
actggcgcttctatctgattactctgaggagccatcaccagcgactatgtcgtgtgggtaaagctccctcttcggagggagcatcagag

SEQ ID NO: 7745 - DNA, 90 bp, synthetic construct
  misc_feature 1..90: note = engineered ribonucleic acid scaffold (ERS) sequence
  source 1..90: mol_type = other DNA
actggcgcttctatctgattactctgaggagccatcaccagcgactatgtcgtattgggtaaagctccctcttcggagggagcatcagag

SEQ ID NO: 7746 - DNA, 90 bp, synthetic construct
  misc_feature 1..90: note = engineered ribonucleic acid scaffold (ERS) sequence
  source 1..90: mol_type = other DNA
actggcgcttctatctgattactctgaggagccatcaccagcgactatgtcgtatggagtaaagctccctcttcggagggagcatcagag

SEQ ID NO: 7747 - DNA, 90 bp, synthetic construct
  misc_feature 1..90: note = engineered ribonucleic acid scaffold (ERS) sequence
  source 1..90: mol_type = other DNA
actggcgcttctatctgattactctgaggagccatcaccagcgactatgtcgtatggcgtaaagctccctcttcggagggagcatcagag

SEQ ID NO: 7748 - DNA, 90 bp, synthetic construct
  misc_feature 1..90: note = engineered ribonucleic acid scaffold (ERS) sequence
  source 1..90: mol_type = other DNA
actggcgcttctatctgattactctgaggagccatcaccagcgactatgtcgtatggtgtaaagctccctcttcggagggagcatcagag

SEQ ID NO: 7749 - DNA, 90 bp, synthetic construct
  misc_feature 1..90: note = engineered ribonucleic acid scaffold (ERS) sequence
  source 1..90: mol_type = other DNA
actggcgcttctatctgattactctgaggagccatcaccagcgactatgtcgtatgggctaaagctccctcttcggagggagcatcagag

SEQ ID NO: 7750 - DNA, 87 bp, synthetic construct
  misc_feature 1..87: note = engineered ribonucleic acid scaffold (ERS) sequence
  source 1..87: mol_type = other DNA
actggcgcttctatctgattactctgaggagccatcaccagcgactatgtcgtatgggtagctccctcttcggagggagcatcagag

SEQ ID NO: 7751 - DNA, 89 bp, synthetic construct
  misc_feature 1..89: note = engineered ribonucleic acid scaffold (ERS) sequence
  source 1..89: mol_type = other DNA
actggcgcttctatctgattactctgaggagccatcaccagcgactatgtcgtatgggtgaagctccctcttcggagggagcatcagag

SEQ ID NO: 7752 - DNA, 89 bp, synthetic construct
  misc_feature 1..89: note = engineered ribonucleic acid scaffold (ERS) sequence
  source 1..89: mol_type = other DNA
actggcgcttctatctgattactctgaggagccatcaccagcgactatgtcgtatgggtagagctccctcttcggagggagcatcagag

SEQ ID NO: 7753 - DNA, 88 bp, synthetic construct
  misc_feature 1..88: note = engineered ribonucleic acid scaffold (ERS) sequence
  source 1..88: mol_type = other DNA
actggcgcttctatctgattactctgatagccaacaccagcgactatgtcgtatgggtaaagctccctcttcggagggagcatcagag

SEQ ID NO: 7754 - DNA, 88 bp, synthetic construct
  misc_feature 1..88: note = engineered ribonucleic acid scaffold (ERS) sequence
  source 1..88: mol_type = other DNA
actggcgcttctatctgattactctgatagccagcaccagcgactatgtcgtatgggtaaagctccctcttcggagggagcatcagag

SEQ ID NO: 7755 - DNA, 88 bp, synthetic construct
  misc_feature 1..88: note = engineered ribonucleic acid scaffold (ERS) sequence
  source 1..88: mol_type = other DNA
actggcgcttctatctgattactctgatagccatgaccagcgactatgtcgtatggctaaagctccctcttcggagggagcatcagag

SEQ ID NO: 7756 - DNA, 89 bp, synthetic construct
  misc_feature 1..89: note = engineered ribonucleic acid scaffold (ERS) sequence
  source 1..89: mol_type = other DNA
actggcgcttctatctgattactctgatagccatgaccagcgactatgtcgtatgggctaaagctccctcttcggagggagcatcagag

SEQ ID NO: 7757 - DNA, 88 bp, synthetic construct
  misc_feature 1..88: note = engineered ribonucleic acid scaffold (ERS) sequence
  source 1..88: mol_type = other DNA
actggcgcttctatctgattactctgatagccatgaccagcgactatgtcgtatgggtaaagctccctcttcggagggagcatcagag

SEQ ID NO: 7758 - DNA, 88 bp, synthetic construct
  misc_feature 1..88: note = engineered ribonucleic acid scaffold (ERS) sequence
  source 1..88: mol_type = other DNA
actggcgcttctatctgattactctgatagccatccccagcgactatgtcgtatgggtaaagctccctcttcggagggagcatcagag

SEQ ID NO: 7759 - DNA, 89 bp, synthetic construct
  misc_feature 1..89: note = engineered ribonucleic acid scaffold (ERS) sequence
  source 1..89: mol_type = other DNA
actggcgcttctatctgattactctgatagccatcgccagcgactatgtcgtatggcgtaaagctccctcttcggagggagcatcagag

SEQ ID NO: 7760 - DNA, 88 bp, synthetic construct
  misc_feature 1..88: note = engineered ribonucleic acid scaffold (ERS) sequence
  source 1..88: mol_type = other DNA
actggcgcttctatctgattactctgatagccatcgccagcgactatgtcgtatgggtaaagctccctcttcggagggagcatcagag

SEQ ID NO: 7761 - DNA, 88 bp, synthetic construct
  misc_feature 1..88: note = engineered ribonucleic acid scaffold (ERS) sequence
  source 1..88: mol_type = other DNA
actggcgcttctatctgattactctgatagccatctccagcgactatgtcgtatgggtaaagctccctcttcggagggagcatcagag

SEQ ID NO: 7762 - DNA, 88 bp, synthetic construct
  misc_feature 1..88: note = engineered ribonucleic acid scaffold (ERS) sequence
  source 1..88: mol_type = other DNA
actggcgcttctatctgattactctgatagccatcacctgcgactatgtcgtaagggtaaagctccctcttcggagggagcatcagag

SEQ ID NO: 7763 - DNA, 88 bp, synthetic construct
  misc_feature 1..88: note = engineered ribonucleic acid scaffold (ERS) sequence
  source 1..88: mol_type = other DNA
actggcgcttctatctgattactctgatagccatcaccagagactatgtcttatgggtaaagctccctcttcggagggagcatcagag

SEQ ID NO: 7764 - DNA, 88 bp, synthetic construct
  misc_feature 1..88: note = engineered ribonucleic acid scaffold (ERS) sequence
  source 1..88: mol_type = other DNA
actggcgcttctatctgattactctgatagccatcaccagggactatgtcctatgggtaaagctccctcttcggagggagcatcagag

SEQ ID NO: 7765 - DNA, 89 bp, synthetic construct
  misc_feature 1..89: note = engineered ribonucleic acid scaffold (ERS) sequence
  source 1..89: mol_type = other DNA
actggcgcttctatctgattactctgatagccatcaccaggcactatgtgctattgggtaaagctccctcttcggagggagcatcagag

SEQ ID NO: 7766 - DNA, 88 bp, synthetic construct
  misc_feature 1..88: note = engineered ribonucleic acid scaffold (ERS) sequence
  source 1..88: mol_type = other DNA
actggcgcttctatctgattactctgatagccatcaccagccactatgtggtatgggtaaagctccctcttcggagggagcatcagag

SEQ ID NO: 7767 - DNA, 88 bp, synthetic construct
  misc_feature 1..88: note = engineered ribonucleic acid scaffold (ERS) sequence
  source 1..88: mol_type = other DNA
actggcgcttctatctgattactctgatagccatcaccagctactatgtagtatgggtaaagctccctcttcggagggagcatcagag

SEQ ID NO: 7768 - DNA, 88 bp, synthetic construct
  misc_feature 1..88: note = engineered ribonucleic acid scaffold (ERS) sequence
  source 1..88: mol_type = other DNA
actggcgcttctatctgattactctgatagccatcaccagcgattatgtcgtatgggtaaagctccctcttcggagggagcatcagag

SEQ ID NO: 7769 - DNA, 88 bp, synthetic construct
  misc_feature 1..88: note = engineered ribonucleic acid scaffold (ERS) sequence
  source 1..88: mol_type = other DNA
actggcgcttctatctgattactctgatagccatcaccagcgacgatgtcgtatgggtaaagctccctcttcggagggagcatcagag

SEQ ID NO: 7770 - DNA, 88 bp, synthetic construct
  misc_feature 1..88: note = engineered ribonucleic acid scaffold (ERS) sequence
  source 1..88: mol_type = other DNA
actggcgcttctatctgattactctgatagccatcaccagcgactctgtcgtatgggtaaagctccctcttcggagggagcatcagag

SEQ ID NO: 7771 - DNA, 88 bp, synthetic construct
  misc_feature 1..88: note = engineered ribonucleic acid scaffold (ERS) sequence
  source 1..88: mol_type = other DNA
actggcgcttctatctgattactctgatagccatcaccagcgactatgtcgtgtgggtaaagctccctcttcggagggagcatcagag

SEQ ID NO: 7772 - DNA, 89 bp, synthetic construct
  misc_feature 1..89: note = engineered ribonucleic acid scaffold (ERS) sequence
  source 1..89: mol_type = other DNA
actggcgcttctatctgattactctgatagccatcaccagcgactatgtcgtattgggtaaagctccctcttcggagggagcatcagag

SEQ ID NO: 7773 - DNA, 89 bp, synthetic construct
  misc_feature 1..89: note = engineered ribonucleic acid scaffold (ERS) sequence
  source 1..89: mol_type = other DNA
actggcgcttctatctgattactctgatagccatcaccagcgactatgtcgtatggagtaaagctccctcttcggagggagcatcagag

SEQ ID NO: 7774 - DNA, 89 bp, synthetic construct
  misc_feature 1..89: note = engineered ribonucleic acid scaffold (ERS) sequence
  source 1..89: mol_type = other DNA
actggcgcttctatctgattactctgatagccatcaccagcgactatgtcgtatggcgtaaagctccctcttcggagggagcatcagag

SEQ ID NO: 7775 - DNA, 89 bp, synthetic construct
  misc_feature 1..89: note = engineered ribonucleic acid scaffold (ERS) sequence
  source 1..89: mol_type = other DNA
actggcgcttctatctgattactctgatagccatcaccagcgactatgtcgtatggtgtaaagctccctcttcggagggagcatcagag

SEQ ID NO: 7776 - DNA, 89 bp, synthetic construct
  misc_feature 1..89: note = engineered ribonucleic acid scaffold (ERS) sequence
  source 1..89: mol_type = other DNA
actggcgcttctatctgattactctgatagccatcaccagcgactatgtcgtatgggctaaagctccctcttcggagggagcatcagag

SEQ ID NO: 7777 - DNA, 86 bp, synthetic construct
  misc_feature 1..86: note = engineered ribonucleic acid scaffold (ERS) sequence
  source 1..86: mol_type = other DNA
actggcgcttctatctgattactctgatagccatcaccagcgactatgtcgtatgggtagctccctcttcggagggagcatcagag

SEQ ID NO: 7778 - DNA, 88 bp, synthetic construct
  misc_feature 1..88: note = engineered ribonucleic acid scaffold (ERS) sequence
  source 1..88: mol_type = other DNA
actggcgcttctatctgattactctgatagccatcaccagcgactatgtcgtatgggtgaagctccctcttcggagggagcatcagag

SEQ ID NO: 7779 - DNA, 88 bp, synthetic construct
  misc_feature 1..88: note = engineered ribonucleic acid scaffold (ERS) sequence
  source 1..88: mol_type = other DNA
actggcgcttctatctgattactctgatagccatcaccagcgactatgtcgtatgggtagagctccctcttcggagggagcatcagag

SEQ ID NO: 7780 - DNA, 89 bp, synthetic construct
  misc_feature 1..89: note = engineered ribonucleic acid scaffold (ERS) sequence
  source 1..89: mol_type = other DNA
actggcgcttctatctgattactctgagctgccaacaccagcgactatgtcgtatgggtaaagctccctcttcggagggagcatcagag

SEQ ID NO: 7781 - DNA, 89 bp, synthetic construct
  misc_feature 1..89: note = engineered ribonucleic acid scaffold (ERS) sequence
  source 1..89: mol_type = other DNA
actggcgcttctatctgattactctgagctgccagcaccagcgactatgtcgtatgggtaaagctccctcttcggagggagcatcagag

SEQ ID NO: 7782 - DNA, 89 bp, synthetic construct
  misc_feature 1..89: note = engineered ribonucleic acid scaffold (ERS) sequence
  source 1..89: mol_type = other DNA
actggcgcttctatctgattactctgagctgccatgaccagcgactatgtcgtatggctaaagctccctcttcggagggagcatcagag

SEQ ID NO: 7783 - DNA, 90 bp, synthetic construct
  misc_feature 1..90: note = engineered ribonucleic acid scaffold (ERS) sequence
  source 1..90: mol_type = other DNA
actggcgcttctatctgattactctgagctgccatgaccagcgactatgtcgtatgggctaaagctccctcttcggagggagcatcagag

SEQ ID NO: 7784 - DNA, 89 bp, synthetic construct
  misc_feature 1..89: note = engineered ribonucleic acid scaffold (ERS) sequence
  source 1..89: mol_type = other DNA
actggcgcttctatctgattactctgagctgccatgaccagcgactatgtcgtatgggtaaagctccctcttcggagggagcatcagag

SEQ ID NO: 7785 - DNA, 89 bp, synthetic construct
  misc_feature 1..89: note = engineered ribonucleic acid scaffold (ERS) sequence
  source 1..89: mol_type = other DNA
actggcgcttctatctgattactctgagctgccatccccagcgactatgtcgtatgggtaaagctccctcttcggagggagcatcagag

SEQ ID NO: 7786 - DNA, 90 bp, synthetic construct
  misc_feature 1..90: note = engineered ribonucleic acid scaffold (ERS) sequence
  source 1..90: mol_type = other DNA
actggcgcttctatctgattactctgagctgccatcgccagcgactatgtcgtatggcgtaaagctccctcttcggagggagcatcagag

SEQ ID NO: 7787 - DNA, 89 bp, synthetic construct
  misc_feature 1..89: note = engineered ribonucleic acid scaffold (ERS) sequence
  source 1..89: mol_type = other DNA
actggcgcttctatctgattactctgagctgccatcgccagcgactatgtcgtatgggtaaagctccctcttcggagggagcatcagag

SEQ ID NO: 7788 - DNA, 89 bp, synthetic construct
  misc_feature 1..89: note = engineered ribonucleic acid scaffold (ERS) sequence
  source 1..89: mol_type = other DNA
actggcgcttctatctgattactctgagctgccatctccagcgactatgtcgtatgggtaaagctccctcttcggagggagcatcagag

SEQ ID NO: 7789 - DNA, 89 bp, synthetic construct
  misc_feature 1..89: note = engineered ribonucleic acid scaffold (ERS) sequence
  source 1..89: mol_type = other DNA
actggcgcttctatctgattactctgagctgccatcacctgcgactatgtcgtaagggtaaagctccctcttcggagggagcatcagag

SEQ ID NO: 7790 - DNA, 89 bp, synthetic construct
  misc_feature 1..89: note = engineered ribonucleic acid scaffold (ERS) sequence
  source 1..89: mol_type = other DNA
actggcgcttctatctgattactctgagctgccatcaccagagactatgtcttatgggtaaagctccctcttcggagggagcatcagag

SEQ ID NO: 7791 - DNA, 89 bp, synthetic construct
  misc_feature 1..89: note = engineered ribonucleic acid scaffold (ERS) sequence
  source 1..89: mol_type = other DNA
actggcgcttctatctgattactctgagctgccatcaccagggactatgtcctatgggtaaagctccctcttcggagggagcatcagag

SEQ ID NO: 7792 - DNA, 90 bp, synthetic construct
  misc_feature 1..90: note = engineered ribonucleic acid scaffold (ERS) sequence
  source 1..90: mol_type = other DNA
actggcgcttctatctgattactctgagctgccatcaccaggcactatgtgctattgggtaaagctccctcttcggagggagcatcagag

SEQ ID NO: 7793 - DNA, 89 bp, synthetic construct
  misc_feature 1..89: note = engineered ribonucleic acid scaffold (ERS) sequence
  source 1..89: mol_type = other DNA
actggcgcttctatctgattactctgagctgccatcaccagccactatgtggtatgggtaaagctccctcttcggagggagcatcagag

SEQ ID NO: 7794 - DNA, 89 bp, synthetic construct
  misc_feature 1..89: note = engineered ribonucleic acid scaffold (ERS) sequence
  source 1..89: mol_type = other DNA
actggcgcttctatctgattactctgagctgccatcaccagctactatgtagtatgggtaaagctccctcttcggagggagcatcagag

SEQ ID NO: 7795 - DNA, 89 bp, synthetic construct
  misc_feature 1..89: note = engineered ribonucleic acid scaffold (ERS) sequence
  source 1..89: mol_type = other DNA
actggcgcttctatctgattactctgagctgccatcaccagcgattatgtcgtatgggtaaagctccctcttcggagggagcatcagag

SEQ ID NO: 7796 - DNA, 89 bp, synthetic construct
  misc_feature 1..89: note = engineered ribonucleic acid scaffold (ERS) sequence
  source 1..89: mol_type = other DNA
actggcgcttctatctgattactctgagctgccatcaccagcgacgatgtcgtatgggtaaagctccctcttcggagggagcatcagag

SEQ ID NO: 7797 - DNA, 89 bp, synthetic construct
  misc_feature 1..89: note = engineered ribonucleic acid scaffold (ERS) sequence
  source 1..89: mol_type = other DNA
actggcgcttctatctgattactctgagctgccatcaccagcgactctgtcgtatgggtaaagctccctcttcggagggagcatcagag

SEQ ID NO: 7798 - DNA, 89 bp, synthetic construct
  misc_feature 1..89: note = engineered ribonucleic acid scaffold (ERS) sequence
  source 1..89: mol_type = other DNA
actggcgcttctatctgattactctgagctgccatcaccagcgactatgtcgtgtgggtaaagctccctcttcggagggagcatcagag

SEQ ID NO: 7799 - DNA, 90 bp, synthetic construct
  misc_feature 1..90: note = engineered ribonucleic acid scaffold (ERS) sequence
  source 1..90: mol_type = other DNA
actggcgcttctatctgattactctgagctgccatcaccagcgactatgtcgtattgggtaaagctccctcttcggagggagcatcagag

SEQ ID NO: 7800 - DNA, 90 bp, synthetic construct
  misc_feature 1..90: note = engineered ribonucleic acid scaffold (ERS) sequence
  source 1..90: mol_type = other DNA
actggcgcttctatctgattactctgagctgccatcaccagcgactatgtcgtatggagtaaagctccctcttcggagggagcatcagag

SEQ ID NO: 7801 - DNA, 90 bp, synthetic construct
  misc_feature 1..90: note = engineered ribonucleic acid scaffold (ERS) sequence
  source 1..90: mol_type = other DNA
actggcgcttctatctgattactctgagctgccatcaccagcgactatgtcgtatggcgtaaagctccctcttcggagggagcatcagag

SEQ ID NO: 7802 - DNA, 90 bp, synthetic construct
  misc_feature 1..90: note = engineered ribonucleic acid scaffold (ERS) sequence
  source 1..90: mol_type = other DNA
actggcgcttctatctgattactctgagctgccatcaccagcgactatgtcgtatggtgtaaagctccctcttcggagggagcatcagag

SEQ ID NO: 7803 - DNA, 90 bp, synthetic construct
  misc_feature 1..90: note = engineered ribonucleic acid scaffold (ERS) sequence
  source 1..90: mol_type = other DNA
actggcgcttctatctgattactctgagctgccatcaccagcgactatgtcgtatgggctaaagctccctcttcggagggagcatcagag

SEQ ID NO: 7804 - DNA, 87 bp, synthetic construct
  misc_feature 1..87: note = engineered ribonucleic acid scaffold (ERS) sequence
  source 1..87: mol_type = other DNA
actggcgcttctatctgattactctgagctgccatcaccagcgactatgtcgtatgggtagctccctcttcggagggagcatcagag

SEQ ID NO: 7805 - DNA, 89 bp, synthetic construct
  misc_feature 1..89: note = engineered ribonucleic acid scaffold (ERS) sequence
  source 1..89: mol_type = other DNA
actggcgcttctatctgattactctgagctgccatcaccagcgactatgtcgtatgggtgaagctccctcttcggagggagcatcagag

SEQ ID NO: 7806 - DNA, 89 bp, synthetic construct
  misc_feature 1..89: note = engineered ribonucleic acid scaffold (ERS) sequence
  source 1..89: mol_type = other DNA
actggcgcttctatctgattactctgagctgccatcaccagcgactatgtcgtatgggtagagctccctcttcggagggagcatcagag

SEQ ID NO: 7807 - DNA, 89 bp, synthetic construct
  misc_feature 1..89: note = engineered ribonucleic acid scaffold (ERS) sequence
  source 1..89: mol_type = other DNA
actggcacttctatctgattactctgagtagccaacaccagcgactatgtcgtatgggtaaagctccctcttcggagggagcatcagag

SEQ ID NO: 7808 - DNA, 89 bp, synthetic construct
  misc_feature 1..89: note = engineered ribonucleic acid scaffold (ERS) sequence
  source 1..89: mol_type = other DNA
actggcacttctatctgattactctgagtagccagcaccagcgactatgtcgtatgggtaaagctccctcttcggagggagcatcagag

SEQ ID NO: 7809 - DNA, 89 bp, synthetic construct
  misc_feature 1..89: note = engineered ribonucleic acid scaffold (ERS) sequence
  source 1..89: mol_type = other DNA
actggcacttctatctgattactctgagtagccatgaccagcgactatgtcgtatggctaaagctccctcttcggagggagcatcagag

SEQ ID NO: 7810 - DNA, 90 bp, synthetic construct
  misc_feature 1..90: note = engineered ribonucleic acid scaffold (ERS) sequence
  source 1..90: mol_type = other DNA
actggcacttctatctgattactctgagtagccatgaccagcgactatgtcgtatgggctaaagctccctcttcggagggagcatcagag

SEQ ID NO: 7811 - DNA, 89 bp, synthetic construct
  misc_feature 1..89: note = engineered ribonucleic acid scaffold (ERS) sequence
  source 1..89: mol_type = other DNA
actggcacttctatctgattactctgagtagccatgaccagcgactatgtcgtatgggtaaagctccctcttcggagggagcatcagag

SEQ ID NO: 7812 - DNA, 89 bp, synthetic construct
  misc_feature 1..89: note = engineered ribonucleic acid scaffold (ERS) sequence
  source 1..89: mol_type = other DNA
actggcacttctatctgattactctgagtagccatccccagcgactatgtcgtatgggtaaagctccctcttcggagggagcatcagag

SEQ ID NO: 7813 - DNA, 90 bp, synthetic construct
  misc_feature 1..90: note = engineered ribonucleic acid scaffold (ERS) sequence
  source 1..90: mol_type = other DNA
actggcacttctatctgattactctgagtagccatcgccagcgactatgtcgtatggcgtaaagctccctcttcggagggagcatcagag

SEQ ID NO: 7814 - DNA, 89 bp, synthetic construct
  misc_feature 1..89: note = engineered ribonucleic acid scaffold (ERS) sequence
  source 1..89: mol_type = other DNA
actggcacttctatctgattactctgagtagccatcgccagcgactatgtcgtatgggtaaagctccctcttcggagggagcatcagag

SEQ ID NO: 7815 - DNA, 89 bp, synthetic construct
  misc_feature 1..89: note = engineered ribonucleic acid scaffold (ERS) sequence
  source 1..89: mol_type = other DNA
actggcacttctatctgattactctgagtagccatctccagcgactatgtcgtatgggtaaagctccctcttcggagggagcatcagag

SEQ ID NO: 7816 - DNA, 89 bp, synthetic construct
  misc_feature 1..89: note = engineered ribonucleic acid scaffold (ERS) sequence
  source 1..89: mol_type = other DNA
actggcacttctatctgattactctgagtagccatcacctgcgactatgtcgtaagggtaaagctccctcttcggagggagcatcagag

SEQ ID NO: 7817 - DNA, 89 bp, synthetic construct
  misc_feature 1..89: note = engineered ribonucleic acid scaffold (ERS) sequence
  source 1..89: mol_type = other DNA
actggcacttctatctgattactctgagtagccatcaccagagactatgtcttatgggtaaagctccctcttcggagggagcatcagag

SEQ ID NO: 7818 - DNA, 89 bp, synthetic construct
  misc_feature 1..89: note = engineered ribonucleic acid scaffold (ERS) sequence
  source 1..89: mol_type = other DNA
actggcacttctatctgattactctgagtagccatcaccagggactatgtcctatgggtaaagctccctcttcggagggagcatcagag

SEQ ID NO: 7819 - DNA, 90 bp, synthetic construct
  misc_feature 1..90: note = engineered ribonucleic acid scaffold (ERS) sequence
  source 1..90: mol_type = other DNA
actggcacttctatctgattactctgagtagccatcaccaggcactatgtgctattgggtaaagctccctcttcggagggagcatcagag

SEQ ID NO: 7820 - DNA, 89 bp, synthetic construct
  misc_feature 1..89: note = engineered ribonucleic acid scaffold (ERS) sequence
  source 1..89: mol_type = other DNA
actggcacttctatctgattactctgagtagccatcaccagccactatgtggtatgggtaaagctccctcttcggagggagcatcagag

SEQ ID NO: 7821 - DNA, 89 bp, synthetic construct
  misc_feature 1..89: note = engineered ribonucleic acid scaffold (ERS) sequence
  source 1..89: mol_type = other DNA
actggcacttctatctgattactctgagtagccatcaccagctactatgtagtatgggtaaagctccctcttcggagggagcatcagag

SEQ ID NO: 7822 - DNA, 89 bp, synthetic construct
  misc_feature 1..89: note = engineered ribonucleic acid scaffold (ERS) sequence
  source 1..89: mol_type = other DNA
actggcacttctatctgattactctgagtagccatcaccagcgattatgtcgtatgggtaaagctccctcttcggagggagcatcagag

SEQ ID NO: 7823 - DNA, 89 bp, synthetic construct
  misc_feature 1..89: note = engineered ribonucleic acid scaffold (ERS) sequence
  source 1..89: mol_type = other DNA
actggcacttctatctgattactctgagtagccatcaccagcgacgatgtcgtatgggtaaagctccctcttcggagggagcatcagag

SEQ ID NO: 7824 - DNA, 89 bp, synthetic construct
  misc_feature 1..89: note = engineered ribonucleic acid scaffold (ERS) sequence
  source 1..89: mol_type = other DNA
actggcacttctatctgattactctgagtagccatcaccagcgactctgtcgtatgggtaaagctccctcttcggagggagcatcagag

SEQ ID NO: 7825 - DNA, 89 bp, synthetic construct
  misc_feature 1..89: note = engineered ribonucleic acid scaffold (ERS) sequence
  source 1..89: mol_type = other DNA
actggcacttctatctgattactctgagtagccatcaccagcgactatgtcgtgtgggtaaagctccctcttcggagggagcatcagag

SEQ ID NO: 7826 - DNA, 90 bp, synthetic construct
  misc_feature 1..90: note = engineered ribonucleic acid scaffold (ERS) sequence
  source 1..90: mol_type = other DNA
actggcacttctatctgattactctgagtagccatcaccagcgactatgtcgtattgggtaaagctccctcttcggagggagcatcagag

SEQ ID NO: 7827 - DNA, 90 bp, synthetic construct
  misc_feature 1..90: note = engineered ribonucleic acid scaffold (ERS) sequence
  source 1..90: mol_type = other DNA
actggcacttctatctgattactctgagtagccatcaccagcgactatgtcgtatggagtaaagctccctcttcggagggagcatcagag

SEQ ID NO: 7828 - DNA, 90 bp, synthetic construct
  misc_feature 1..90: note = engineered ribonucleic acid scaffold (ERS) sequence
  source 1..90: mol_type = other DNA
actggcacttctatctgattactctgagtagccatcaccagcgactatgtcgtatggcgtaaagctccctcttcggagggagcatcagag

SEQ ID NO: 7829 - DNA, 90 bp, synthetic construct
  misc_feature 1..90: note = engineered ribonucleic acid scaffold (ERS) sequence
  source 1..90: mol_type = other DNA
actggcacttctatctgattactctgagtagccatcaccagcgactatgtcgtatggtgtaaagctccctcttcggagggagcatcagag

SEQ ID NO: 7830 - DNA, 90 bp, synthetic construct
  misc_feature 1..90: note = engineered ribonucleic acid scaffold (ERS) sequence
  source 1..90: mol_type = other DNA
actggcacttctatctgattactctgagtagccatcaccagcgactatgtcgtatgggctaaagctccctcttcggagggagcatcagag

SEQ ID NO: 7831 - DNA, 87 bp, synthetic construct
  misc_feature 1..87: note = engineered ribonucleic acid scaffold (ERS) sequence
  source 1..87: mol_type = other DNA
actggcacttctatctgattactctgagtagccatcaccagcgactatgtcgtatgggtagctccctcttcggagggagcatcagag

SEQ ID NO: 7832 - DNA, 89 bp, synthetic construct
  misc_feature 1..89: note = engineered ribonucleic acid scaffold (ERS) sequence
  source 1..89: mol_type = other DNA
actggcacttctatctgattactctgagtagccatcaccagcgactatgtcgtatgggtgaagctccctcttcggagggagcatcagag

SEQ ID NO: 7833 - DNA, 89 bp, synthetic construct
  misc_feature 1..89: note = engineered ribonucleic acid scaffold (ERS) sequence
  source 1..89: mol_type = other DNA
actggcacttctatctgattactctgagtagccatcaccagcgactatgtcgtatgggtagagctccctcttcggagggagcatcagag

SEQ ID NO: 7834 - DNA, 89 bp, synthetic construct
  misc_feature 1..89: note = engineered ribonucleic acid scaffold (ERS) sequence
  source 1..89: mol_type = other DNA
actggcgcttctatctgattactctgagtagccaacaccagcgactatgtcgtatgggtaaagctccctcttcggagggagcatcagag

SEQ ID NO: 7835 - DNA, 89 bp, synthetic construct
  misc_feature 1..89: note = engineered ribonucleic acid scaffold (ERS) sequence
  source 1..89: mol_type = other DNA
actggcgcttctatctgattactctgagtagccagcaccagcgactatgtcgtatgggtaaagctccctcttcggagggagcatcagag

SEQ ID NO: 7836 - DNA, 89 bp, synthetic construct
  misc_feature 1..89: note = engineered ribonucleic acid scaffold (ERS) sequence
  source 1..89: mol_type = other DNA
actggcgcttctatctgattactctgagtagccatgaccagcgactatgtcgtatggctaaagctccctcttcggagggagcatcagag

SEQ ID NO: 7837 - DNA, 90 bp, synthetic construct
  misc_feature 1..90: note = engineered ribonucleic acid scaffold (ERS) sequence
  source 1..90: mol_type = other DNA
actggcgcttctatctgattactctgagtagccatgaccagcgactatgtcgtatgggctaaagctccctcttcggagggagcatcagag

SEQ ID NO: 7838 - DNA, 89 bp, synthetic construct
  misc_feature 1..89: note = engineered ribonucleic acid scaffold (ERS) sequence
  source 1..89: mol_type = other DNA
actggcgcttctatctgattactctgagtagccatgaccagcgactatgtcgtatgggtaaagctccctcttcggagggagcatcagag

SEQ ID NO: 7839 - DNA, 89 bp, synthetic construct
  misc_feature 1..89: note = engineered ribonucleic acid scaffold (ERS) sequence
  source 1..89: mol_type = other DNA
actggcgcttctatctgattactctgagtagccatccccagcgactatgtcgtatgggtaaagctccctcttcggagggagcatcagag

SEQ ID NO: 7840 - DNA, 90 bp, synthetic construct
  misc_feature 1..90: note = engineered ribonucleic acid scaffold (ERS) sequence
  source 1..90: mol_type = other DNA
actggcgcttctatctgattactctgagtagccatcgccagcgactatgtcgtatggcgtaaagctccctcttcggagggagcatcagag

SEQ ID NO: 7841 - DNA, 89 bp, synthetic construct
  misc_feature 1..89: note = engineered ribonucleic acid scaffold (ERS) sequence
  source 1..89: mol_type = other DNA
actggcgcttctatctgattactctgagtagccatcgccagcgactatgtcgtatgggtaaagctccctcttcggagggagcatcagag

SEQ ID NO: 7842 - DNA, 89 bp, synthetic construct
  misc_feature 1..89: note = engineered ribonucleic acid scaffold (ERS) sequence
  source 1..89: mol_type = other DNA
actggcgcttctatctgattactctgagtagccatctccagcgactatgtcgtatgggtaaagctccctcttcggagggagcatcagag

SEQ ID NO: 7843 - DNA, 89 bp, synthetic construct
  misc_feature 1..89: note = engineered ribonucleic acid scaffold (ERS) sequence
  source 1..89: mol_type = other DNA
actggcgcttctatctgattactctgagtagccatcacctgcgactatgtcgtaagggtaaagctccctcttcggagggagcatcagag

SEQ ID NO: 7844 - DNA, 89 bp, synthetic construct
  misc_feature 1..89: note = engineered ribonucleic acid scaffold (ERS) sequence
  source 1..89: mol_type = other DNA
actggcgcttctatctgattactctgagtagccatcaccagagactatgtcttatgggtaaagctccctcttcggagggagcatcagag

SEQ ID NO: 7845 - DNA, 89 bp, synthetic construct
  misc_feature 1..89: note = engineered ribonucleic acid scaffold (ERS) sequence
  source 1..89: mol_type = other DNA
actggcgcttctatctgattactctgagtagccatcaccagggactatgtcctatgggtaaagctccctcttcggagggagcatcagag

SEQ ID NO: 7846 - DNA, 90 bp, synthetic construct
  misc_feature 1..90: note = engineered ribonucleic acid scaffold (ERS) sequence
  source 1..90: mol_type = other DNA
actggcgcttctatctgattactctgagtagccatcaccaggcactatgtgctattgggtaaagctccctcttcggagggagcatcagag

SEQ ID NO: 7847 - DNA, 89 bp, synthetic construct
  misc_feature 1..89: note = engineered ribonucleic acid scaffold (ERS) sequence
  source 1..89: mol_type = other DNA
actggcgcttctatctgattactctgagtagccatcaccagccactatgtggtatgggtaaagctccctcttcggagggagcatcagag

SEQ ID NO: 7848 - DNA, 89 bp, synthetic construct
  misc_feature 1..89: note = engineered ribonucleic acid scaffold (ERS) sequence
  source 1..89: mol_type = other DNA
actggcgcttctatctgattactctgagtagccatcaccagctactatgtagtatgggtaaagctccctcttcggagggagcatcagag

SEQ ID NO: 7849 - DNA, 89 bp, synthetic construct
  misc_feature 1..89: note = engineered ribonucleic acid scaffold (ERS) sequence
  source 1..89: mol_type = other DNA
actggcgcttctatctgattactctgagtagccatcaccagcgattatgtcgtatgggtaaagctccctcttcggagggagcatcagag

SEQ ID NO: 7850 - DNA, 89 bp, synthetic construct
  misc_feature 1..89: note = engineered ribonucleic acid scaffold (ERS) sequence
  source 1..89: mol_type = other DNA
actggcgcttctatctgattactctgagtagccatcaccagcgacgatgtcgtatgggtaaagctccctcttcggagggagcatcagag

SEQ ID NO: 7851 - DNA, 89 bp, synthetic construct
  misc_feature 1..89: note = engineered ribonucleic acid scaffold (ERS) sequence
  source 1..89: mol_type = other DNA
actggcgcttctatctgattactctgagtagccatcaccagcgactctgtcgtatgggtaaagctccctcttcggagggagcatcagag

SEQ ID NO: 7852 - DNA, 89 bp, synthetic construct
  misc_feature 1..89: note = engineered ribonucleic acid scaffold (ERS) sequence
  source 1..89: mol_type = other DNA
actggcgcttctatctgattactctgagtagccatcaccagcgactatgtcgtgtgggtaaagctccctcttcggagggagcatcagag

SEQ ID NO: 7853 - DNA, 90 bp, synthetic construct
  misc_feature 1..90: note = engineered ribonucleic acid scaffold (ERS) sequence
  source 1..90: mol_type = other DNA
actggcgcttctatctgattactctgagtagccatcaccagcgactatgtcgtattgggtaaagctccctcttcggagggagcatcagag

SEQ ID NO: 7854 - DNA, 90 bp, synthetic construct
  misc_feature 1..90: note = engineered ribonucleic acid scaffold (ERS) sequence
  source 1..90: mol_type = other DNA
actggcgcttctatctgattactctgagtagccatcaccagcgactatgtcgtatggagtaaagctccctcttcggagggagcatcagag

SEQ ID NO: 7855 - DNA, 90 bp, synthetic construct
  misc_feature 1..90: note = engineered ribonucleic acid scaffold (ERS) sequence
  source 1..90: mol_type = other DNA
actggcgcttctatctgattactctgagtagccatcaccagcgactatgtcgtatggcgtaaagctccctcttcggagggagcatcagag

SEQ ID NO: 7856 - DNA, 90 bp, synthetic construct
  misc_feature 1..90: note = engineered ribonucleic acid scaffold (ERS) sequence
  source 1..90: mol_type = other DNA
actggcgcttctatctgattactctgagtagccatcaccagcgactatgtcgtatggtgtaaagctccctcttcggagggagcatcagag

SEQ ID NO: 7857 - DNA, 90 bp, synthetic construct
  misc_feature 1..90: note = engineered ribonucleic acid scaffold (ERS) sequence
  source 1..90: mol_type = other DNA
actggcgcttctatctgattactctgagtagccatcaccagcgactatgtcgtatgggctaaagctccctcttcggagggagcatcagag

SEQ ID NO: 7858 - DNA, 87 bp, synthetic construct
  misc_feature 1..87: note = engineered ribonucleic acid scaffold (ERS) sequence
  source 1..87: mol_type = other DNA
actggcgcttctatctgattactctgagtagccatcaccagcgactatgtcgtatgggtagctccctcttcggagggagcatcagag

SEQ ID NO: 7859 - DNA, 89 bp, synthetic construct
  misc_feature 1..89: note = engineered ribonucleic acid scaffold (ERS) sequence
  source 1..89: mol_type = other DNA
actggcgcttctatctgattactctgagtagccatcaccagcgactatgtcgtatgggtgaagctccctcttcggagggagcatcagag

SEQ ID NO: 7860 - DNA, 89 bp, synthetic construct
  misc_feature 1..89: note = engineered ribonucleic acid scaffold (ERS) sequence
  source 1..89: mol_type = other DNA
actggcgcttctatctgattactctgagtagccatcaccagcgactatgtcgtatgggtagagctccctcttcggagggagcatcagag

SEQ ID NO: 7861 - DNA, 88 bp, synthetic construct
  misc_feature 1..88: note = engineered ribonucleic acid scaffold (ERS) sequence
  source 1..88: mol_type = other DNA
actggcgcttctatctgattactctgagcaccaacaccagcgactatgtcgtatgggtaaagctccctcttcggagggagcatcagag

SEQ ID NO: 7862 - DNA, 88 bp, synthetic construct
  misc_feature 1..88: note = engineered ribonucleic acid scaffold (ERS) sequence
  source 1..88: mol_type = other DNA
actggcgcttctatctgattactctgagcaccagcaccagcgactatgtcgtatgggtaaagctccctcttcggagggagcatcagag

SEQ ID NO: 7863 - DNA, 88 bp, synthetic construct
  misc_feature 1..88: note = engineered ribonucleic acid scaffold (ERS) sequence
  source 1..88: mol_type = other DNA
actggcgcttctatctgattactctgagcaccatgaccagcgactatgtcgtatggctaaagctccctcttcggagggagcatcagag

SEQ ID NO: 7864 - DNA, 89 bp, synthetic construct
  misc_feature 1..89: note = engineered ribonucleic acid scaffold (ERS) sequence
  source 1..89: mol_type = other DNA
actggcgcttctatctgattactctgagcaccatgaccagcgactatgtcgtatgggctaaagctccctcttcggagggagcatcagag

SEQ ID NO: 7865 - DNA, 88 bp, synthetic construct
  misc_feature 1..88: note = engineered ribonucleic acid scaffold (ERS) sequence
  source 1..88: mol_type = other DNA
actggcgcttctatctgattactctgagcaccatgaccagcgactatgtcgtatgggtaaagctccctcttcggagggagcatcagag

SEQ ID NO: 7866 - DNA, 88 bp, synthetic construct
  misc_feature 1..88: note = engineered ribonucleic acid scaffold (ERS) sequence
  source 1..88: mol_type = other DNA
actggcgcttctatctgattactctgagcaccatccccagcgactatgtcgtatgggtaaagctccctcttcggagggagcatcagag

SEQ ID NO: 7867 - DNA, 89 bp, synthetic construct
  misc_feature 1..89: note = engineered ribonucleic acid scaffold (ERS) sequence
  source 1..89: mol_type = other DNA
actggcgcttctatctgattactctgagcaccatcgccagcgactatgtcgtatggcgtaaagctccctcttcggagggagcatcagag

SEQ ID NO: 7868 - DNA, 88 bp, synthetic construct
  misc_feature 1..88: note = engineered ribonucleic acid scaffold (ERS) sequence
  source 1..88: mol_type = other DNA
actggcgcttctatctgattactctgagcaccatcgccagcgactatgtcgtatgggtaaagctccctcttcggagggagcatcagag

SEQ ID NO: 7869 - DNA, 88 bp, synthetic construct
  misc_feature 1..88: note = engineered ribonucleic acid scaffold (ERS) sequence
  source 1..88: mol_type = other DNA
actggcgcttctatctgattactctgagcaccatctccagcgactatgtcgtatgggtaaagctccctcttcggagggagcatcagag

SEQ ID NO: 7870 - DNA, 88 bp, synthetic construct
  misc_feature 1..88: note = engineered ribonucleic acid scaffold (ERS) sequence
  source 1..88: mol_type = other DNA
actggcgcttctatctgattactctgagcaccatcacctgcgactatgtcgtaagggtaaagctccctcttcggagggagcatcagag

SEQ ID NO: 7871 - DNA, 88 bp, synthetic construct
  misc_feature 1..88: note = engineered ribonucleic acid scaffold (ERS) sequence
  source 1..88: mol_type = other DNA
actggcgcttctatctgattactctgagcaccatcaccagagactatgtcttatgggtaaagctccctcttcggagggagcatcagag

SEQ ID NO: 7872 - DNA, 88 bp, synthetic construct
  misc_feature 1..88: note = engineered ribonucleic acid scaffold (ERS) sequence
  source 1..88: mol_type = other DNA
actggcgcttctatctgattactctgagcaccatcaccagggactatgtcctatgggtaaagctccctcttcggagggagcatcagag

SEQ ID NO: 7873 - DNA, 89 bp, synthetic construct
  misc_feature 1..89: note = engineered ribonucleic acid scaffold (ERS) sequence
  source 1..89: mol_type = other DNA
actggcgcttctatctgattactctgagcaccatcaccaggcactatgtgctattgggtaaagctccctcttcggagggagcatcagag

SEQ ID NO: 7874 - DNA, 88 bp, synthetic construct
  misc_feature 1..88: note = engineered ribonucleic acid scaffold (ERS) sequence
  source 1..88: mol_type = other DNA
actggcgcttctatctgattactctgagcaccatcaccagccactatgtggtatgggtaaagctccctcttcggagggagcatcagag

SEQ ID NO: 7875 - DNA, 88 bp, synthetic construct
  misc_feature 1..88: note = engineered ribonucleic acid scaffold (ERS) sequence
  source 1..88: mol_type = other DNA
actggcgcttctatctgattactctgagcaccatcaccagctactatgtagtatgggtaaagctccctcttcggagggagcatcagag

SEQ ID NO: 7876 - DNA, 88 bp, synthetic construct
  misc_feature 1..88: note = engineered ribonucleic acid scaffold (ERS) sequence
  source 1..88: mol_type = other DNA
actggcgcttctatctgattactctgagcaccatcaccagcgattatgtcgtatgggtaaagctccctcttcggagggagcatcagag

SEQ ID NO: 7877 - DNA, 88 bp, synthetic construct
  misc_feature 1..88: note = engineered ribonucleic acid scaffold (ERS) sequence
  source 1..88: mol_type = other DNA
actggcgcttctatctgattactctgagcaccatcaccagcgacgatgtcgtatgggtaaagctccctcttcggagggagcatcagag

SEQ ID NO: 7878 - DNA, 88 bp, synthetic construct
  misc_feature 1..88: note = engineered ribonucleic acid scaffold (ERS) sequence
  source 1..88: mol_type = other DNA
actggcgcttctatctgattactctgagcaccatcaccagcgactctgtcgtatgggtaaagctccctcttcggagggagcatcagag

SEQ ID NO: 7879 - DNA, 88 bp, synthetic construct
  misc_feature 1..88: note = engineered ribonucleic acid scaffold (ERS) sequence
  source 1..88: mol_type = other DNA
actggcgcttctatctgattactctgagcaccatcaccagcgactatgtcgtgtgggtaaagctccctcttcggagggagcatcagag

SEQ ID NO: 7880 - DNA, 89 bp, synthetic construct
  misc_feature 1..89: note = engineered ribonucleic acid scaffold (ERS) sequence
  source 1..89: mol_type = other DNA
actggcgcttctatctgattactctgagcaccatcaccagcgactatgtcgtattgggtaaagctccctcttcggagggagcatcagag

SEQ ID NO: 7881 - DNA, 89 bp, synthetic construct
  misc_feature 1..89: note = engineered ribonucleic acid scaffold (ERS) sequence
  source 1..89: mol_type = other DNA
actggcgcttctatctgattactctgagcaccatcaccagcgactatgtcgtatggagtaaagctccctcttcggagggagcatcagag

SEQ ID NO: 7882 - DNA, 89 bp, synthetic construct
  misc_feature 1..89: note = engineered ribonucleic acid scaffold (ERS) sequence
  source 1..89: mol_type = other DNA
actggcgcttctatctgattactctgagcaccatcaccagcgactatgtcgtatggcgtaaagctccctcttcggagggagcatcagag

SEQ ID NO: 7883 - DNA, 89 bp, synthetic construct
  misc_feature 1..89: note = engineered ribonucleic acid scaffold (ERS) sequence
  source 1..89: mol_type = other DNA
actggcgcttctatctgattactctgagcaccatcaccagcgactatgtcgtatggtgtaaagctccctcttcggagggagcatcagag

SEQ ID NO: 7884 - DNA, 89 bp, synthetic construct
  misc_feature 1..89: note = engineered ribonucleic acid scaffold (ERS) sequence
  source 1..89: mol_type = other DNA
actggcgcttctatctgattactctgagcaccatcaccagcgactatgtcgtatgggctaaagctccctcttcggagggagcatcagag

SEQ ID NO: 7885 - DNA, 86 bp, synthetic construct
  misc_feature 1..86: note = engineered ribonucleic acid scaffold (ERS) sequence
  source 1..86: mol_type = other DNA
actggcgcttctatctgattactctgagcaccatcaccagcgactatgtcgtatgggtagctccctcttcggagggagcatcagag

SEQ ID NO: 7886 - DNA, 88 bp, synthetic construct
  misc_feature 1..88: note = engineered ribonucleic acid scaffold (ERS) sequence
  source 1..88: mol_type = other DNA
actggcgcttctatctgattactctgagcaccatcaccagcgactatgtcgtatgggtgaagctccctcttcggagggagcatcagag

SEQ ID NO: 7887 - DNA, 88 bp, synthetic construct
  misc_feature 1..88: note = engineered ribonucleic acid scaffold (ERS) sequence
  source 1..88: mol_type = other DNA
actggcgcttctatctgattactctgagcaccatcaccagcgactatgtcgtatgggtagagctccctcttcggagggagcatcagag

SEQ ID NO: 7888 - DNA, 88 bp, synthetic construct
  misc_feature 1..88: note = engineered ribonucleic acid scaffold (ERS) sequence
  source 1..88: mol_type = other DNA
actggcacttctatctgattactctgagcgccaacaccagcgactatgtcgtatgggtaaagctccctcttcggagggagcatcagag

SEQ ID NO: 7889 - DNA, 88 bp, synthetic construct
  misc_feature 1..88: note = engineered ribonucleic acid scaffold (ERS) sequence
  source 1..88: mol_type = other DNA
actggcacttctatctgattactctgagcgccagcaccagcgactatgtcgtatgggtaaagctccctcttcggagggagcatcagag

SEQ ID NO: 7890 - DNA, 88 bp, synthetic construct
  misc_feature 1..88: note = engineered ribonucleic acid scaffold (ERS) sequence
  source 1..88: mol_type = other DNA
actggcacttctatctgattactctgagcgccatgaccagcgactatgtcgtatggctaaagctccctcttcggagggagcatcagag

SEQ ID NO: 7891 - DNA, 89 bp, synthetic construct
  misc_feature 1..89: note = engineered ribonucleic acid scaffold (ERS) sequence
  source 1..89: mol_type = other DNA
actggcacttctatctgattactctgagcgccatgaccagcgactatgtcgtatgggctaaagctccctcttcggagggagcatcagag

SEQ ID NO: 7892 - DNA, 88 bp, synthetic construct
  misc_feature 1..88: note = engineered ribonucleic acid scaffold (ERS) sequence
  source 1..88: mol_type = other DNA
actggcacttctatctgattactctgagcgccatgaccagcgactatgtcgtatgggtaaagctccctcttcggagggagcatcagag

SEQ ID NO: 7893 - DNA, 88 bp, synthetic construct
  misc_feature 1..88: note = engineered ribonucleic acid scaffold (ERS) sequence
  source 1..88: mol_type = other DNA
actggcacttctatctgattactctgagcgccatccccagcgactatgtcgtatgggtaaagctccctcttcggagggagcatcagag

SEQ ID NO: 7894 - DNA, 89 bp, synthetic construct
  misc_feature 1..89: note = engineered ribonucleic acid scaffold (ERS) sequence
  source 1..89: mol_type = other DNA
actggcacttctatctgattactctgagcgccatcgccagcgactatgtcgtatggcgtaaagctccctcttcggagggagcatcagag

SEQ ID NO: 7895 - DNA, 88 bp, synthetic construct
  misc_feature 1..88: note = engineered ribonucleic acid scaffold (ERS) sequence
  source 1..88: mol_type = other DNA
actggcacttctatctgattactctgagcgccatcgccagcgactatgtcgtatgggtaaagctccctcttcggagggagcatcagag

SEQ ID NO: 7896 - DNA, 88 bp, synthetic construct
  misc_feature 1..88: note = engineered ribonucleic acid scaffold (ERS) sequence
  source 1..88: mol_type = other DNA
actggcacttctatctgattactctgagcgccatctccagcgactatgtcgtatgggtaaagctccctcttcggagggagcatcagag

SEQ ID NO: 7897 - DNA, 88 bp, synthetic construct
  misc_feature 1..88: note = engineered ribonucleic acid scaffold (ERS) sequence
  source 1..88: mol_type = other DNA
actggcacttctatctgattactctgagcgccatcacctgcgactatgtcgtaagggtaaagctccctcttcggagggagcatcagag

SEQ ID NO: 7898 - DNA, 88 bp, synthetic construct
  misc_feature 1..88: note = engineered ribonucleic acid scaffold (ERS) sequence
  source 1..88: mol_type = other DNA
actggcacttctatctgattactctgagcgccatcaccagagactatgtcttatgggtaaagctccctcttcggagggagcatcagag

SEQ ID NO: 7899 - DNA, 88 bp, synthetic construct
  misc_feature 1..88: note = engineered ribonucleic acid scaffold (ERS) sequence
  source 1..88: mol_type = other DNA
actggcacttctatctgattactctgagcgccatcaccagggactatgtcctatgggtaaagctccctcttcggagggagcatcagag

SEQ ID NO: 7900 - DNA, 89 bp, synthetic construct
  misc_feature 1..89: note = engineered ribonucleic acid scaffold (ERS) sequence
  source 1..89: mol_type = other DNA
actggcacttctatctgattactctgagcgccatcaccaggcactatgtgctattgggtaaagctccctcttcggagggagcatcagag

SEQ ID NO: 7901 - DNA, 88 bp, synthetic construct
  misc_feature 1..88: note = engineered ribonucleic acid scaffold (ERS) sequence
  source 1..88: mol_type = other DNA
actggcacttctatctgattactctgagcgccatcaccagccactatgtggtatgggtaaagctccctcttcggagggagcatcagag

SEQ ID NO: 7902 - DNA, 88 bp, synthetic construct
  misc_feature 1..88: note = engineered ribonucleic acid scaffold (ERS) sequence
  source 1..88: mol_type = other DNA
actggcacttctatctgattactctgagcgccatcaccagctactatgtagtatgggtaaagctccctcttcggagggagcatcagag

SEQ ID NO: 7903 - DNA, 88 bp, synthetic construct
  misc_feature 1..88: note = engineered ribonucleic acid scaffold (ERS) sequence
  source 1..88: mol_type = other DNA
actggcacttctatctgattactctgagcgccatcaccagcgattatgtcgtatgggtaaagctccctcttcggagggagcatcagag

SEQ ID NO: 7904 - DNA, 88 bp, synthetic construct
  misc_feature 1..88: note = engineered ribonucleic acid scaffold (ERS) sequence
  source 1..88: mol_type = other DNA
actggcacttctatctgattactctgagcgccatcaccagcgacgatgtcgtatgggtaaagctccctcttcggagggagcatcagag

SEQ ID NO: 7905 - DNA, 88 bp, synthetic construct
  misc_feature 1..88: note = engineered ribonucleic acid scaffold (ERS) sequence
  source 1..88: mol_type = other DNA
actggcacttctatctgattactctgagcgccatcaccagcgactctgtcgtatgggtaaagctccctcttcggagggagcatcagag

SEQ ID NO: 7906 - DNA, 88 bp, synthetic construct
  misc_feature 1..88: note = engineered ribonucleic acid scaffold (ERS) sequence
  source 1..88: mol_type = other DNA
actggcacttctatctgattactctgagcgccatcaccagcgactatgtcgtgtgggtaaagctccctcttcggagggagcatcagag

SEQ ID NO: 7907 - DNA, 89 bp, synthetic construct
  misc_feature 1..89: note = engineered ribonucleic acid scaffold (ERS) sequence
  source 1..89: mol_type = other DNA
actggcacttctatctgattactctgagcgccatcaccagcgactatgtcgtattgggtaaagctccctcttcggagggagcatcagag

SEQ ID NO: 7908 - DNA, 89 bp, synthetic construct
  misc_feature 1..89: note = engineered ribonucleic acid scaffold (ERS) sequence
  source 1..89: mol_type = other DNA
actggcacttctatctgattactctgagcgccatcaccagcgactatgtcgtatggagtaaagctccctcttcggagggagcatcagag

SEQ ID NO: 7909 - DNA, 89 bp, synthetic construct
  misc_feature 1..89: note = engineered ribonucleic acid scaffold (ERS) sequence
  source 1..89: mol_type = other DNA
actggcacttctatctgattactctgagcgccatcaccagcgactatgtcgtatggcgtaaagctccctcttcggagggagcatcagag

SEQ ID NO: 7910 - DNA, 89 bp, synthetic construct
  misc_feature 1..89: note = engineered ribonucleic acid scaffold (ERS) sequence
  source 1..89: mol_type = other DNA
actggcacttctatctgattactctgagcgccatcaccagcgactatgtcgtatggtgtaaagctccctcttcggagggagcatcagag

SEQ ID NO: 7911 - DNA, 89 bp, synthetic construct
  misc_feature 1..89: note = engineered ribonucleic acid scaffold (ERS) sequence
  source 1..89: mol_type = other DNA
actggcacttctatctgattactctgagcgccatcaccagcgactatgtcgtatgggctaaagctccctcttcggagggagcatcagag

SEQ ID NO: 7912 - DNA, 86 bp, synthetic construct
  misc_feature 1..86: note = engineered ribonucleic acid scaffold (ERS) sequence
  source 1..86: mol_type = other DNA
actggcacttctatctgattactctgagcgccatcaccagcgactatgtcgtatgggtagctccctcttcggagggagcatcagag

SEQ ID NO: 7913 - DNA, 88 bp, synthetic construct
  misc_feature 1..88: note = engineered ribonucleic acid scaffold (ERS) sequence
  source 1..88: mol_type = other DNA
actggcacttctatctgattactctgagcgccatcaccagcgactatgtcgtatgggtgaagctccctcttcggagggagcatcagag

SEQ ID NO: 7914 - DNA, 88 bp, synthetic construct
  misc_feature 1..88: note = engineered ribonucleic acid scaffold (ERS) sequence
  source 1..88: mol_type = other DNA
actggcacttctatctgattactctgagcgccatcaccagcgactatgtcgtatgggtagagctccctcttcggagggagcatcagag

SEQ ID NO: 7915 - DNA, 88 bp, synthetic construct
  misc_feature 1..88: note = engineered ribonucleic acid scaffold (ERS) sequence
  source 1..88: mol_type = other DNA
actggcgcttctatctgattactctgagggccaacaccagcgactatgtcgtatgggtaaagctccctcttcggagggagcatcagag

SEQ ID NO: 7916 - DNA, 88 bp, synthetic construct
  misc_feature 1..88: note = engineered ribonucleic acid scaffold (ERS) sequence
  source 1..88: mol_type = other DNA
actggcgcttctatctgattactctgagggccagcaccagcgactatgtcgtatgggtaaagctccctcttcggagggagcatcagag

SEQ ID NO: 7917 - DNA, 88 bp, synthetic construct
  misc_feature 1..88: note = engineered ribonucleic acid scaffold (ERS) sequence
  source 1..88: mol_type = other DNA
actggcgcttctatctgattactctgagggccatgaccagcgactatgtcgtatggctaaagctccctcttcggagggagcatcagag

SEQ ID NO: 7918 - DNA, 89 bp, synthetic construct
  misc_feature 1..89: note = engineered ribonucleic acid scaffold (ERS) sequence
  source 1..89: mol_type = other DNA
actggcgcttctatctgattactctgagggccatgaccagcgactatgtcgtatgggctaaagctccctcttcggagggagcatcagag

SEQ ID NO: 7919 - DNA, 88 bp, synthetic construct
  misc_feature 1..88: note = engineered ribonucleic acid scaffold (ERS) sequence
  source 1..88: mol_type = other DNA
actggcgcttctatctgattactctgagggccatgaccagcgactatgtcgtatgggtaaagctccctcttcggagggagcatcagag

SEQ ID NO: 7920 - DNA, 88 bp, synthetic construct
  misc_feature 1..88: note = engineered ribonucleic acid scaffold (ERS) sequence
  source 1..88: mol_type = other DNA
actggcgcttctatctgattactctgagggccatccccagcgactatgtcgtatgggtaaagctccctcttcggagggagcatcagag

SEQ ID NO: 7921 - DNA, 89 bp, synthetic construct
  misc_feature 1..89: note = engineered ribonucleic acid scaffold (ERS) sequence
  source 1..89: mol_type = other DNA
actggcgcttctatctgattactctgagggccatcgccagcgactatgtcgtatggcgtaaagctccctcttcggagggagcatcagag

SEQ ID NO: 7922 - DNA, 88 bp, synthetic construct
  misc_feature 1..88: note = engineered ribonucleic acid scaffold (ERS) sequence
  source 1..88: mol_type = other DNA
actggcgcttctatctgattactctgagggccatcgccagcgactatgtcgtatgggtaaagctccctcttcggagggagcatcagag

SEQ ID NO: 7923 - DNA, 88 bp, synthetic construct
  misc_feature 1..88: note = engineered ribonucleic acid scaffold (ERS) sequence
  source 1..88: mol_type = other DNA
actggcgcttctatctgattactctgagggccatctccagcgactatgtcgtatgggtaaagctccctcttcggagggagcatcagag

SEQ ID NO: 7924 - DNA, 88 bp, synthetic construct
  misc_feature 1..88: note = engineered ribonucleic acid scaffold (ERS) sequence
  source 1..88: mol_type = other DNA
actggcgcttctatctgattactctgagggccatcacctgcgactatgtcgtaagggtaaagctccctcttcggagggagcatcagag

SEQ ID NO: 7925 - DNA, 88 bp, synthetic construct
  misc_feature 1..88: note = engineered ribonucleic acid scaffold (ERS) sequence
  source 1..88: mol_type = other DNA
actggcgcttctatctgattactctgagggccatcaccagagactatgtcttatgggtaaagctccctcttcggagggagcatcagag

SEQ ID NO: 7926 - DNA, 88 bp, synthetic construct
  misc_feature 1..88: note = engineered ribonucleic acid scaffold (ERS) sequence
  source 1..88: mol_type = other DNA
actggcgcttctatctgattactctgagggccatcaccagggactatgtcctatgggtaaagctccctcttcggagggagcatcagag

SEQ ID NO: 7927 - DNA, 89 bp, synthetic construct
  misc_feature 1..89: note = engineered ribonucleic acid scaffold (ERS) sequence
  source 1..89: mol_type = other DNA
actggcgcttctatctgattactctgagggccatcaccaggcactatgtgctattgggtaaagctccctcttcggagggagcatcagag

SEQ ID NO: 7928 - DNA, 88 bp, synthetic construct
  misc_feature 1..88: note = engineered ribonucleic acid scaffold (ERS) sequence
  source 1..88: mol_type = other DNA
actggcgcttctatctgattactctgagggccatcaccagccactatgtggtatgggtaaagctccctcttcggagggagcatcagag

SEQ ID NO: 7929 - DNA, 88 bp, synthetic construct
  misc_feature 1..88: note = engineered ribonucleic acid scaffold (ERS) sequence
  source 1..88: mol_type = other DNA
actggcgcttctatctgattactctgagggccatcaccagctactatgtagtatgggtaaagctccctcttcggagggagcatcagag

SEQ ID NO: 7930 - DNA, 88 bp, synthetic construct
  misc_feature 1..88: note = engineered ribonucleic acid scaffold (ERS) sequence
  source 1..88: mol_type = other DNA
actggcgcttctatctgattactctgagggccatcaccagcgattatgtcgtatgggtaaagctccctcttcggagggagcatcagag

SEQ ID NO: 7931 - DNA, 88 bp, synthetic construct
  misc_feature 1..88: note = engineered ribonucleic acid scaffold (ERS) sequence
  source 1..88: mol_type = other DNA
actggcgcttctatctgattactctgagggccatcaccagcgacgatgtcgtatgggtaaagctccctcttcggagggagcatcagag

SEQ ID NO: 7932 - DNA, 88 bp, synthetic construct
  misc_feature 1..88: note = engineered ribonucleic acid scaffold (ERS) sequence
  source 1..88: mol_type = other DNA
actggcgcttctatctgattactctgagggccatcaccagcgactctgtcgtatgggtaaagctccctcttcggagggagcatcagag

SEQ ID NO: 7933 - DNA, 88 bp, synthetic construct
  misc_feature 1..88: note = engineered ribonucleic acid scaffold (ERS) sequence
  source 1..88: mol_type = other DNA
actggcgcttctatctgattactctgagggccatcaccagcgactatgtcgtgtgggtaaagctccctcttcggagggagcatcagag

SEQ ID NO: 7934 - DNA, 89 bp, synthetic construct
  misc_feature 1..89: note = engineered ribonucleic acid scaffold (ERS) sequence
  source 1..89: mol_type = other DNA
actggcgcttctatctgattactctgagggccatcaccagcgactatgtcgtattgggtaaagctccctcttcggagggagcatcagag

SEQ ID NO: 7935 - DNA, 89 bp, synthetic construct
  misc_feature 1..89: note = engineered ribonucleic acid scaffold (ERS) sequence
  source 1..89: mol_type = other DNA
actggcgcttctatctgattactctgagggccatcaccagcgactatgtcgtatggagtaaagctccctcttcggagggagcatcagag

SEQ ID NO: 7936 - DNA, 89 bp, synthetic construct
  misc_feature 1..89: note = engineered ribonucleic acid scaffold (ERS) sequence
  source 1..89: mol_type = other DNA
actggcgcttctatctgattactctgagggccatcaccagcgactatgtcgtatggcgtaaagctccctcttcggagggagcatcagag

SEQ ID NO: 7937 - DNA, 89 bp, synthetic construct
  misc_feature 1..89: note = engineered ribonucleic acid scaffold (ERS) sequence
  source 1..89: mol_type = other DNA
actggcgcttctatctgattactctgagggccatcaccagcgactatgtcgtatggtgtaaagctccctcttcggagggagcatcagag

SEQ ID NO: 7938 - DNA, 89 bp, synthetic construct
  misc_feature 1..89: note = engineered ribonucleic acid scaffold (ERS) sequence
  source 1..89: mol_type = other DNA
actggcgcttctatctgattactctgagggccatcaccagcgactatgtcgtatgggctaaagctccctcttcggagggagcatcagag

SEQ ID NO: 7939 - DNA, 86 bp, synthetic construct
  misc_feature 1..86: note = engineered ribonucleic acid scaffold (ERS) sequence
  source 1..86: mol_type = other DNA
actggcgcttctatctgattactctgagggccatcaccagcgactatgtcgtatgggtagctccctcttcggagggagcatcagag

SEQ ID NO: 7940 - DNA, 88 bp, synthetic construct
  misc_feature 1..88: note = engineered ribonucleic acid scaffold (ERS) sequence
  source 1..88: mol_type = other DNA
actggcgcttctatctgattactctgagggccatcaccagcgactatgtcgtatgggtgaagctccctcttcggagggagcatcagag

SEQ ID NO: 7941 - DNA, 88 bp, synthetic construct
  misc_feature 1..88: note = engineered ribonucleic acid scaffold (ERS) sequence
  source 1..88: mol_type = other DNA
actggcgcttctatctgattactctgagggccatcaccagcgactatgtcgtatgggtagagctccctcttcggagggagcatcagag

SEQ ID NO: 7942 - DNA, 88 bp, synthetic construct
  misc_feature 1..88: note = engineered ribonucleic acid scaffold (ERS) sequence
  source 1..88: mol_type = other DNA
actggcgcttctatctgattactctgagtgccgacaccagcgactatgtcgtatgggtaaagctccctcttcggagggagcatcagag

SEQ ID NO: 7943 - DNA, 88 bp, synthetic construct
  misc_feature 1..88: note = engineered ribonucleic acid scaffold (ERS) sequence
  source 1..88: mol_type = other DNA
actggcgcttctatctgattactctgagtgccggcaccagcgactatgtcgtatgggtaaagctccctcttcggagggagcatcagag

SEQ ID NO: 7944 - DNA, 88 bp, synthetic construct
  misc_feature 1..88: note = engineered ribonucleic acid scaffold (ERS) sequence
  source 1..88: mol_type = other DNA
actggcgcttctatctgattactctgagtgccgtgaccagcgactatgtcgtatggctaaagctccctcttcggagggagcatcagag

SEQ ID NO: 7945 - DNA, 89 bp, synthetic construct
  misc_feature 1..89: note = engineered ribonucleic acid scaffold (ERS) sequence
  source 1..89: mol_type = other DNA
actggcgcttctatctgattactctgagtgccgtgaccagcgactatgtcgtatgggctaaagctccctcttcggagggagcatcagag

SEQ ID NO: 7946 - DNA, 88 bp, synthetic construct
  misc_feature 1..88: note = engineered ribonucleic acid scaffold (ERS) sequence
  source 1..88: mol_type = other DNA
actggcgcttctatctgattactctgagtgccgtgaccagcgactatgtcgtatgggtaaagctccctcttcggagggagcatcagag

SEQ ID NO: 7947 - DNA, 88 bp, synthetic construct
  misc_feature 1..88: note = engineered ribonucleic acid scaffold (ERS) sequence
  source 1..88: mol_type = other DNA
actggcgcttctatctgattactctgagtgccgtccccagcgactatgtcgtatgggtaaagctccctcttcggagggagcatcagag

SEQ ID NO: 7948 - DNA, 89 bp, synthetic construct
  misc_feature 1..89: note = engineered ribonucleic acid scaffold (ERS) sequence
  source 1..89: mol_type = other DNA
actggcgcttctatctgattactctgagtgccgtcgccagcgactatgtcgtatggcgtaaagctccctcttcggagggagcatcagag

SEQ ID NO: 7949 - DNA, 88 bp, synthetic construct
  misc_feature 1..88: note = engineered ribonucleic acid scaffold (ERS) sequence
  source 1..88: mol_type = other DNA
actggcgcttctatctgattactctgagtgccgtcgccagcgactatgtcgtatgggtaaagctccctcttcggagggagcatcagag

SEQ ID NO: 7950 - DNA, 88 bp, synthetic construct
  misc_feature 1..88: note = engineered ribonucleic acid scaffold (ERS) sequence
  source 1..88: mol_type = other DNA
actggcgcttctatctgattactctgagtgccgtctccagcgactatgtcgtatgggtaaagctccctcttcggagggagcatcagag

SEQ ID NO: 7951 - DNA, 88 bp, synthetic construct
  misc_feature 1..88: note = engineered ribonucleic acid scaffold (ERS) sequence
  source 1..88: mol_type = other DNA
actggcgcttctatctgattactctgagtgccgtcacctgcgactatgtcgtaagggtaaagctccctcttcggagggagcatcagag

SEQ ID NO: 7952 - DNA, 88 bp, synthetic construct
  misc_feature 1..88: note = engineered ribonucleic acid scaffold (ERS) sequence
  source 1..88: mol_type = other DNA
actggcgcttctatctgattactctgagtgccgtcaccagagactatgtcttatgggtaaagctccctcttcggagggagcatcagag

SEQ ID NO: 7953 - DNA, 88 bp, synthetic construct
  misc_feature 1..88: note = engineered ribonucleic acid scaffold (ERS) sequence
  source 1..88: mol_type = other DNA
actggcgcttctatctgattactctgagtgccgtcaccagggactatgtcctatgggtaaagctccctcttcggagggagcatcagag

SEQ ID NO: 7954 - DNA, 89 bp, synthetic construct
  misc_feature 1..89: note = engineered ribonucleic acid scaffold (ERS) sequence
  source 1..89: mol_type = other DNA
actggcgcttctatctgattactctgagtgccgtcaccaggcactatgtgctattgggtaaagctccctcttcggagggagcatcagag

SEQ ID NO: 7955 - DNA, 88 bp, synthetic construct
  misc_feature 1..88: note = engineered ribonucleic acid scaffold (ERS) sequence
  source 1..88: mol_type = other DNA
actggcgcttctatctgattactctgagtgccgtcaccagccactatgtggtatgggtaaagctccctcttcggagggagcatcagag

SEQ ID NO: 7956 - DNA, 88 bp, synthetic construct
  misc_feature 1..88: note = engineered ribonucleic acid scaffold (ERS) sequence
  source 1..88: mol_type = other DNA
actggcgcttctatctgattactctgagtgccgtcaccagctactatgtagtatgggtaaagctccctcttcggagggagcatcagag

SEQ ID NO: 7957 - DNA, 88 bp, synthetic construct
  misc_feature 1..88: note = engineered ribonucleic acid scaffold (ERS) sequence
  source 1..88: mol_type = other DNA
actggcgcttctatctgattactctgagtgccgtcaccagcgattatgtcgtatgggtaaagctccctcttcggagggagcatcagag

SEQ ID NO: 7958 - DNA, 88 bp, synthetic construct
  misc_feature 1..88: note = engineered ribonucleic acid scaffold (ERS) sequence
  source 1..88: mol_type = other DNA
actggcgcttctatctgattactctgagtgccgtcaccagcgacgatgtcgtatgggtaaagctccctcttcggagggagcatcagag

SEQ ID NO: 7959 - DNA, 88 bp, synthetic construct
  misc_feature 1..88: note = engineered ribonucleic acid scaffold (ERS) sequence
  source 1..88: mol_type = other DNA
actggcgcttctatctgattactctgagtgccgtcaccagcgactctgtcgtatgggtaaagctccctcttcggagggagcatcagag

SEQ ID NO: 7960 - DNA, 88 bp, synthetic construct
  misc_feature 1..88: note = engineered ribonucleic acid scaffold (ERS) sequence
  source 1..88: mol_type = other DNA
actggcgcttctatctgattactctgagtgccgtcaccagcgactatgtcgtgtgggtaaagctccctcttcggagggagcatcagag

SEQ ID NO: 7961 - DNA, 89 bp, synthetic construct
  misc_feature 1..89: note = engineered ribonucleic acid scaffold (ERS) sequence
  source 1..89: mol_type = other DNA
actggcgcttctatctgattactctgagtgccgtcaccagcgactatgtcgtattgggtaaagctccctcttcggagggagcatcagag

SEQ ID NO: 7962 - DNA, 89 bp, synthetic construct
  misc_feature 1..89: note = engineered ribonucleic acid scaffold (ERS) sequence
  source 1..89: mol_type = other DNA
actggcgcttctatctgattactctgagtgccgtcaccagcgactatgtcgtatggagtaaagctccctcttcggagggagcatcagag

SEQ ID NO: 7963 - DNA, 89 bp, synthetic construct
  misc_feature 1..89: note = engineered ribonucleic acid scaffold (ERS) sequence
  source 1..89: mol_type = other DNA
actggcgcttctatctgattactctgagtgccgtcaccagcgactatgtcgtatggcgtaaagctccctcttcggagggagcatcagag

SEQ ID NO: 7964 - DNA, 89 bp, synthetic construct
  misc_feature 1..89: note = engineered ribonucleic acid scaffold (ERS) sequence
  source 1..89: mol_type = other DNA
actggcgcttctatctgattactctgagtgccgtcaccagcgactatgtcgtatggtgtaaagctccctcttcggagggagcatcagag

SEQ ID NO: 7965 - DNA, 89 bp, synthetic construct
  misc_feature 1..89: note = engineered ribonucleic acid scaffold (ERS) sequence
  source 1..89: mol_type = other DNA
actggcgcttctatctgattactctgagtgccgtcaccagcgactatgtcgtatgggctaaagctccctcttcggagggagcatcagag

SEQ ID NO: 7966 - DNA, 86 bp, synthetic construct
  misc_feature 1..86: note = engineered ribonucleic acid scaffold (ERS) sequence
  source 1..86: mol_type = other DNA
actggcgcttctatctgattactctgagtgccgtcaccagcgactatgtcgtatgggtagctccctcttcggagggagcatcagag

SEQ ID NO: 7967 - DNA, 88 bp, synthetic construct
  misc_feature 1..88: note = engineered ribonucleic acid scaffold (ERS) sequence
  source 1..88: mol_type = other DNA
actggcgcttctatctgattactctgagtgccgtcaccagcgactatgtcgtatgggtgaagctccctcttcggagggagcatcagag

SEQ ID NO: 7968 - DNA, 88 bp, synthetic construct
  misc_feature 1..88: note = engineered ribonucleic acid scaffold (ERS) sequence
  source 1..88: mol_type = other DNA
actggcgcttctatctgattactctgagtgccgtcaccagcgactatgtcgtatgggtagagctccctcttcggagggagcatcagag

SEQ ID NO: 7969 - DNA, 88 bp, synthetic construct
  misc_feature 1..88: note = engineered ribonucleic acid scaffold (ERS) sequence
  source 1..88: mol_type = other DNA
actggcacttctatctgattactctgagtgccaacaccagcgactatgtcgtatgggtaaagctccctcttcggagggagcatcagag

SEQ ID NO: 7970 - DNA, 88 bp, synthetic construct
  misc_feature 1..88: note = engineered ribonucleic acid scaffold (ERS) sequence
  source 1..88: mol_type = other DNA
actggcacttctatctgattactctgagtgccagcaccagcgactatgtcgtatgggtaaagctccctcttcggagggagcatcagag

SEQ ID NO: 7971 - DNA, 88 bp, synthetic construct
  misc_feature 1..88: note = engineered ribonucleic acid scaffold (ERS) sequence
  source 1..88: mol_type = other DNA
actggcacttctatctgattactctgagtgccatgaccagcgactatgtcgtatggctaaagctccctcttcggagggagcatcagag

SEQ ID NO: 7972 - DNA, 89 bp, synthetic construct
  misc_feature 1..89: note = engineered ribonucleic acid scaffold (ERS) sequence
  source 1..89: mol_type = other DNA
actggcacttctatctgattactctgagtgccatgaccagcgactatgtcgtatgggctaaagctccctcttcggagggagcatcagag

SEQ ID NO: 7973 - DNA, 88 bp, synthetic construct
  misc_feature 1..88: note = engineered ribonucleic acid scaffold (ERS) sequence
  source 1..88: mol_type = other DNA
actggcacttctatctgattactctgagtgccatgaccagcgactatgtcgtatgggtaaagctccctcttcggagggagcatcagag

SEQ ID NO: 7974 - DNA, 88 bp, synthetic construct
  misc_feature 1..88: note = engineered ribonucleic acid scaffold (ERS) sequence
  source 1..88: mol_type = other DNA
actggcacttctatctgattactctgagtgccatccccagcgactatgtcgtatgggtaaagctccctcttcggagggagcatcagag

SEQ ID NO: 7975 - DNA, 89 bp, synthetic construct
  misc_feature 1..89: note = engineered ribonucleic acid scaffold (ERS) sequence
  source 1..89: mol_type = other DNA
actggcacttctatctgattactctgagtgccatcgccagcgactatgtcgtatggcgtaaagctccctcttcggagggagcatcagag

SEQ ID NO: 7976 - DNA, 88 bp, synthetic construct
  misc_feature 1..88: note = engineered ribonucleic acid scaffold (ERS) sequence
  source 1..88: mol_type = other DNA
actggcacttctatctgattactctgagtgccatcgccagcgactatgtcgtatgggtaaagctccctcttcggagggagcatcagag

SEQ ID NO: 7977 - DNA, 88 bp, synthetic construct
  misc_feature 1..88: note = engineered ribonucleic acid scaffold (ERS) sequence
  source 1..88: mol_type = other DNA
actggcacttctatctgattactctgagtgccatctccagcgactatgtcgtatgggtaaagctccctcttcggagggagcatcagag

SEQ ID NO: 7978 - DNA, 88 bp, synthetic construct
  misc_feature 1..88: note = engineered ribonucleic acid scaffold (ERS) sequence
  source 1..88: mol_type = other DNA
actggcacttctatctgattactctgagtgccatcacctgcgactatgtcgtaagggtaaagctccctcttcggagggagcatcagag

SEQ ID NO: 7979 - DNA, 88 bp, synthetic construct
  misc_feature 1..88: note = engineered ribonucleic acid scaffold (ERS) sequence
  source 1..88: mol_type = other DNA
actggcacttctatctgattactctgagtgccatcaccagagactatgtcttatgggtaaagctccctcttcggagggagcatcagag

SEQ ID NO: 7980 - DNA, 88 bp, synthetic construct
  misc_feature 1..88: note = engineered ribonucleic acid scaffold (ERS) sequence
  source 1..88: mol_type = other DNA
actggcacttctatctgattactctgagtgccatcaccagggactatgtcctatgggtaaagctccctcttcggagggagcatcagag

SEQ ID NO: 7981 - DNA, 89 bp, synthetic construct
  misc_feature 1..89: note = engineered ribonucleic acid scaffold (ERS) sequence
  source 1..89: mol_type = other DNA
actggcacttctatctgattactctgagtgccatcaccaggcactatgtgctattgggtaaagctccctcttcggagggagcatcagag

SEQ ID NO: 7982 - DNA, 88 bp, synthetic construct
  misc_feature 1..88: note = engineered ribonucleic acid scaffold (ERS) sequence
  source 1..88: mol_type = other DNA
actggcacttctatctgattactctgagtgccatcaccagccactatgtggtatgggtaaagctccctcttcggagggagcatcagag

SEQ ID NO: 7983 - DNA, 88 bp, synthetic construct
  misc_feature 1..88: note = engineered ribonucleic acid scaffold (ERS) sequence
  source 1..88: mol_type = other DNA
actggcacttctatctgattactctgagtgccatcaccagctactatgtagtatgggtaaagctccctcttcggagggagcatcagag

SEQ ID NO: 7984 - DNA, 88 bp, synthetic construct
  misc_feature 1..88: note = engineered ribonucleic acid scaffold (ERS) sequence
  source 1..88: mol_type = other DNA
actggcacttctatctgattactctgagtgccatcaccagcgattatgtcgtatgggtaaagctccctcttcggagggagcatcagag

SEQ ID NO: 7985 - DNA, 88 bp, synthetic construct
  misc_feature 1..88: note = engineered ribonucleic acid scaffold (ERS) sequence
  source 1..88: mol_type = other DNA
actggcacttctatctgattactctgagtgccatcaccagcgacgatgtcgtatgggtaaagctccctcttcggagggagcatcagag

SEQ ID NO: 7986 - DNA, 88 bp, synthetic construct
  misc_feature 1..88: note = engineered ribonucleic acid scaffold (ERS) sequence
  source 1..88: mol_type = other DNA
actggcacttctatctgattactctgagtgccatcaccagcgactctgtcgtatgggtaaagctccctcttcggagggagcatcagag

SEQ ID NO: 7987 - DNA, 88 bp, synthetic construct
  misc_feature 1..88: note = engineered ribonucleic acid scaffold (ERS) sequence
  source 1..88: mol_type = other DNA
actggcacttctatctgattactctgagtgccatcaccagcgactatgtcgtgtgggtaaagctccctcttcggagggagcatcagag

SEQ ID NO: 7988 - DNA, 89 bp, synthetic construct
  misc_feature 1..89: note = engineered ribonucleic acid scaffold (ERS) sequence
  source 1..89: mol_type = other DNA
actggcacttctatctgattactctgagtgccatcaccagcgactatgtcgtattgggtaaagctccctcttcggagggagcatcagag

SEQ ID NO: 7989 - DNA, 89 bp, synthetic construct
  misc_feature 1..89: note = engineered ribonucleic acid scaffold (ERS) sequence
  source 1..89: mol_type = other DNA
actggcacttctatctgattactctgagtgccatcaccagcgactatgtcgtatggagtaaagctccctcttcggagggagcatcagag

SEQ ID NO: 7990 - DNA, 89 bp, synthetic construct
  misc_feature 1..89: note = engineered ribonucleic acid scaffold (ERS) sequence
  source 1..89: mol_type = other DNA
actggcacttctatctgattactctgagtgccatcaccagcgactatgtcgtatggcgtaaagctccctcttcggagggagcatcagag

SEQ ID NO: 7991 - DNA, 89 bp, synthetic construct
  misc_feature 1..89: note = engineered ribonucleic acid scaffold (ERS) sequence
  source 1..89: mol_type = other DNA
actggcacttctatctgattactctgagtgccatcaccagcgactatgtcgtatggtgtaaagctccctcttcggagggagcatcagag

SEQ ID NO: 7992 - DNA, 89 bp, synthetic construct
  misc_feature 1..89: note = engineered ribonucleic acid scaffold (ERS) sequence
  source 1..89: mol_type = other DNA
actggcacttctatctgattactctgagtgccatcaccagcgactatgtcgtatgggctaaagctccctcttcggagggagcatcagag

SEQ ID NO: 7993 - DNA, 86 bp, synthetic construct
  misc_feature 1..86: note = engineered ribonucleic acid scaffold (ERS) sequence
  source 1..86: mol_type = other DNA
actggcacttctatctgattactctgagtgccatcaccagcgactatgtcgtatgggtagctccctcttcggagggagcatcagag

SEQ ID NO: 7994 - DNA, 88 bp, synthetic construct
  misc_feature 1..88: note = engineered ribonucleic acid scaffold (ERS) sequence
  source 1..88: mol_type = other DNA
actggcacttctatctgattactctgagtgccatcaccagcgactatgtcgtatgggtgaagctccctcttcggagggagcatcagag

SEQ ID NO: 7995 - DNA, 88 bp, synthetic construct
  misc_feature 1..88: note = engineered ribonucleic acid scaffold (ERS) sequence
  source 1..88: mol_type = other DNA
actggcacttctatctgattactctgagtgccatcaccagcgactatgtcgtatgggtagagctccctcttcggagggagcatcagag

SEQ ID NO: 7996 - DNA, 88 bp, synthetic construct
  misc_feature 1..88: note = engineered ribonucleic acid scaffold (ERS) sequence
  source 1..88: mol_type = other DNA
actggcgcttctatctgattactctgagaaccaacaccagcgactatgtcgtatgggtaaagctccctcttcggagggagcatcagag

SEQ ID NO: 7997 - DNA, 88 bp, synthetic construct
  misc_feature 1..88: note = engineered ribonucleic acid scaffold (ERS) sequence
  source 1..88: mol_type = other DNA
actggcgcttctatctgattactctgagaaccagcaccagcgactatgtcgtatgggtaaagctccctcttcggagggagcatcagag

SEQ ID NO: 7998 - DNA, 88 bp, synthetic construct
  misc_feature 1..88: note = engineered ribonucleic acid scaffold (ERS) sequence
  source 1..88: mol_type = other DNA
actggcgcttctatctgattactctgagaaccatgaccagcgactatgtcgtatggctaaagctccctcttcggagggagcatcagag

SEQ ID NO: 7999 - DNA, 89 bp, synthetic construct
  misc_feature 1..89: note = engineered ribonucleic acid scaffold (ERS) sequence
  source 1..89: mol_type = other DNA
actggcgcttctatctgattactctgagaaccatgaccagcgactatgtcgtatgggctaaagctccctcttcggagggagcatcagag

SEQ ID NO: 8000 - DNA, 88 bp, synthetic construct
  misc_feature 1..88: note = engineered ribonucleic acid scaffold (ERS) sequence
  source 1..88: mol_type = other DNA
actggcgcttctatctgattactctgagaaccatgaccagcgactatgtcgtatgggtaaagctccctcttcggagggagcatcagag

SEQ ID NO: 8001 - DNA, 88 bp, synthetic construct
  misc_feature 1..88: note = engineered ribonucleic acid scaffold (ERS) sequence
  source 1..88: mol_type = other DNA
actggcgcttctatctgattactctgagaaccatccccagcgactatgtcgtatgggtaaagctccctcttcggagggagcatcagag

SEQ ID NO: 8002 - DNA, 89 bp, synthetic construct
  misc_feature 1..89: note = engineered ribonucleic acid scaffold (ERS) sequence
  source 1..89: mol_type = other DNA
actggcgcttctatctgattactctgagaaccatcgccagcgactatgtcgtatggcgtaaagctccctcttcggagggagcatcagag

SEQ ID NO: 8003 - DNA, 88 bp, synthetic construct
  misc_feature 1..88: note = engineered ribonucleic acid scaffold (ERS) sequence
  source 1..88: mol_type = other DNA
actggcgcttctatctgattactctgagaaccatcgccagcgactatgtcgtatgggtaaagctccctcttcggagggagcatcagag

SEQ ID NO: 8004 - DNA, 88 bp, synthetic construct
  misc_feature 1..88: note = engineered ribonucleic acid scaffold (ERS) sequence
  source 1..88: mol_type = other DNA
actggcgcttctatctgattactctgagaaccatctccagcgactatgtcgtatgggtaaagctccctcttcggagggagcatcagag

SEQ ID NO: 8005 - DNA, 88 bp, synthetic construct
  misc_feature 1..88: note = engineered ribonucleic acid scaffold (ERS) sequence
  source 1..88: mol_type = other DNA
actggcgcttctatctgattactctgagaaccatcacctgcgactatgtcgtaagggtaaagctccctcttcggagggagcatcagag

SEQ ID NO: 8006 - DNA, 88 bp, synthetic construct
  misc_feature 1..88: note = engineered ribonucleic acid scaffold (ERS) sequence
  source 1..88: mol_type = other DNA
actggcgcttctatctgattactctgagaaccatcaccagagactatgtcttatgggtaaagctccctcttcggagggagcatcagag

SEQ ID NO: 8007 - DNA, 88 bp, synthetic construct
  misc_feature 1..88: note = engineered ribonucleic acid scaffold (ERS) sequence
  source 1..88: mol_type = other DNA
actggcgcttctatctgattactctgagaaccatcaccagggactatgtcctatgggtaaagctccctcttcggagggagcatcagag

SEQ ID NO: 8008 - DNA, 89 bp, synthetic construct
  misc_feature 1..89: note = engineered ribonucleic acid scaffold (ERS) sequence
  source 1..89: mol_type = other DNA
actggcgcttctatctgattactctgagaaccatcaccaggcactatgtgctattgggtaaagctccctcttcggagggagcatcagag

SEQ ID NO: 8009 - DNA, 88 bp, synthetic construct
  misc_feature 1..88: note = engineered ribonucleic acid scaffold (ERS) sequence
  source 1..88: mol_type = other DNA
actggcgcttctatctgattactctgagaaccatcaccagccactatgtggtatgggtaaagctccctcttcggagggagcatcagag

SEQ ID NO: 8010 - DNA, 88 bp, synthetic construct
  misc_feature 1..88: note = engineered ribonucleic acid scaffold (ERS) sequence
  source 1..88: mol_type = other DNA
actggcgcttctatctgattactctgagaaccatcaccagctactatgtagtatgggtaaagctccctcttcggagggagcatcagag

SEQ ID NO: 8011 - DNA, 88 bp, synthetic construct
  misc_feature 1..88: note = engineered ribonucleic acid scaffold (ERS) sequence
  source 1..88: mol_type = other DNA
actggcgcttctatctgattactctgagaaccatcaccagcgattatgtcgtatgggtaaagctccctcttcggagggagcatcagag

SEQ ID NO: 8012 - DNA, 88 bp, synthetic construct
  misc_feature 1..88: note = engineered ribonucleic acid scaffold (ERS) sequence
  source 1..88: mol_type = other DNA
actggcgcttctatctgattactctgagaaccatcaccagcgacgatgtcgtatgggtaaagctccctcttcggagggagcatcagag

SEQ ID NO: 8013 - DNA, 88 bp, synthetic construct
  misc_feature 1..88: note = engineered ribonucleic acid scaffold (ERS) sequence
  source 1..88: mol_type = other DNA
actggcgcttctatctgattactctgagaaccatcaccagcgactctgtcgtatgggtaaagctccctcttcggagggagcatcagag

SEQ ID NO: 8014 - DNA, 88 bp, synthetic construct
  misc_feature 1..88: note = engineered ribonucleic acid scaffold (ERS) sequence
  source 1..88: mol_type = other DNA
actggcgcttctatctgattactctgagaaccatcaccagcgactatgtcgtgtgggtaaagctccctcttcggagggagcatcagag

SEQ ID NO: 8015 - DNA, 89 bp, synthetic construct
  misc_feature 1..89: note = engineered ribonucleic acid scaffold (ERS) sequence
  source 1..89: mol_type = other DNA
actggcgcttctatctgattactctgagaaccatcaccagcgactatgtcgtattgggtaaagctccctcttcggagggagcatcagag

SEQ ID NO: 8016 - DNA, 89 bp, synthetic construct
  misc_feature 1..89: note = engineered ribonucleic acid scaffold (ERS) sequence
  source 1..89: mol_type = other DNA
actggcgcttctatctgattactctgagaaccatcaccagcgactatgtcgtatggagtaaagctccctcttcggagggagcatcagag

SEQ ID NO: 8017 - DNA, 89 bp, synthetic construct
  misc_feature 1..89: note = engineered ribonucleic acid scaffold (ERS) sequence
  source 1..89: mol_type = other DNA
actggcgcttctatctgattactctgagaaccatcaccagcgactatgtcgtatggcgtaaagctccctcttcggagggagcatcagag

SEQ ID NO: 8018 - DNA, 89 bp, synthetic construct
  misc_feature 1..89: note = engineered ribonucleic acid scaffold (ERS) sequence
  source 1..89: mol_type = other DNA
actggcgcttctatctgattactctgagaaccatcaccagcgactatgtcgtatggtgtaaagctccctcttcggagggagcatcagag

SEQ ID NO: 8019 - DNA, 89 bp, synthetic construct
  misc_feature 1..89: note = engineered ribonucleic acid scaffold (ERS) sequence
  source 1..89: mol_type = other DNA
actggcgcttctatctgattactctgagaaccatcaccagcgactatgtcgtatgggctaaagctccctcttcggagggagcatcagag

SEQ ID NO: 8020 - DNA, 86 bp, synthetic construct
  misc_feature 1..86: note = engineered ribonucleic acid scaffold (ERS) sequence
  source 1..86: mol_type = other DNA
actggcgcttctatctgattactctgagaaccatcaccagcgactatgtcgtatgggtagctccctcttcggagggagcatcagag

SEQ ID NO: 8021 - DNA, 88 bp, synthetic construct
  misc_feature 1..88: note = engineered ribonucleic acid scaffold (ERS) sequence
  source 1..88: mol_type = other DNA
actggcgcttctatctgattactctgagaaccatcaccagcgactatgtcgtatgggtgaagctccctcttcggagggagcatcagag

SEQ ID NO: 8022 - DNA, 88 bp, synthetic construct
  misc_feature 1..88: note = engineered ribonucleic acid scaffold (ERS) sequence
  source 1..88: mol_type = other DNA
actggcgcttctatctgattactctgagaaccatcaccagcgactatgtcgtatgggtagagctccctcttcggagggagcatcagag

SEQ ID NO: 8023 - DNA, 88 bp, synthetic construct
  misc_feature 1..88: note = engineered ribonucleic acid scaffold (ERS) sequence
  source 1..88: mol_type = other DNA
actggcgcttctatctgattactctgagagccgacaccagcgactatgtcgtatgggtaaagctccctcttcggagggagcatcagag

SEQ ID NO: 8024 - DNA, 88 bp, synthetic construct
  misc_feature 1..88: note = engineered ribonucleic acid scaffold (ERS) sequence
  source 1..88: mol_type = other DNA
actggcgcttctatctgattactctgagagccggcaccagcgactatgtcgtatgggtaaagctccctcttcggagggagcatcagag

SEQ ID NO: 8025 - DNA, 88 bp, synthetic construct
  misc_feature 1..88: note = engineered ribonucleic acid scaffold (ERS) sequence
  source 1..88: mol_type = other DNA
actggcgcttctatctgattactctgagagccgtgaccagcgactatgtcgtatggctaaagctccctcttcggagggagcatcagag

SEQ ID NO: 8026 - DNA, 89 bp, synthetic construct
  misc_feature 1..89: note = engineered ribonucleic acid scaffold (ERS) sequence
  source 1..89: mol_type = other DNA
actggcgcttctatctgattactctgagagccgtgaccagcgactatgtcgtatgggctaaagctccctcttcggagggagcatcagag

SEQ ID NO: 8027 - DNA, 88 bp, synthetic construct
  misc_feature 1..88: note = engineered ribonucleic acid scaffold (ERS) sequence
  source 1..88: mol_type = other DNA
actggcgcttctatctgattactctgagagccgtgaccagcgactatgtcgtatgggtaaagctccctcttcggagggagcatcagag

SEQ ID NO: 8028 - DNA, 88 bp, synthetic construct
  misc_feature 1..88: note = engineered ribonucleic acid scaffold (ERS) sequence
  source 1..88: mol_type = other DNA
actggcgcttctatctgattactctgagagccgtccccagcgactatgtcgtatgggtaaagctccctcttcggagggagcatcagag

SEQ ID NO: 8029 - DNA, 89 bp, synthetic construct
  misc_feature 1..89: note = engineered ribonucleic acid scaffold (ERS) sequence
  source 1..89: mol_type = other DNA
actggcgcttctatctgattactctgagagccgtcgccagcgactatgtcgtatggcgtaaagctccctcttcggagggagcatcagag

SEQ ID NO: 8030 - DNA, 88 bp, synthetic construct
  misc_feature 1..88: note = engineered ribonucleic acid scaffold (ERS) sequence
  source 1..88: mol_type = other DNA
actggcgcttctatctgattactctgagagccgtcgccagcgactatgtcgtatgggtaaagctccctcttcggagggagcatcagag

SEQ ID NO: 8031 - DNA, 88 bp, synthetic construct
  misc_feature 1..88: note = engineered ribonucleic acid scaffold (ERS) sequence
  source 1..88: mol_type = other DNA
actggcgcttctatctgattactctgagagccgtctccagcgactatgtcgtatgggtaaagctccctcttcggagggagcatcagag

SEQ ID NO: 8032 - DNA, 88 bp, synthetic construct
  misc_feature 1..88: note = engineered ribonucleic acid scaffold (ERS) sequence
  source 1..88: mol_type = other DNA
actggcgcttctatctgattactctgagagccgtcacctgcgactatgtcgtaagggtaaagctccctcttcggagggagcatcagag

SEQ ID NO: 8033 - DNA, 88 bp, synthetic construct
  misc_feature 1..88: note = engineered ribonucleic acid scaffold (ERS) sequence
  source 1..88: mol_type = other DNA
actggcgcttctatctgattactctgagagccgtcaccagagactatgtcttatgggtaaagctccctcttcggagggagcatcagag

SEQ ID NO: 8034 - DNA, 88 bp, synthetic construct
  misc_feature 1..88: note = engineered ribonucleic acid scaffold (ERS) sequence
  source 1..88: mol_type = other DNA
actggcgcttctatctgattactctgagagccgtcaccagggactatgtcctatgggtaaagctccctcttcggagggagcatcagag

SEQ ID NO: 8035 - DNA, 89 bp, synthetic construct
  misc_feature 1..89: note = engineered ribonucleic acid scaffold (ERS) sequence
  source 1..89: mol_type = other DNA
actggcgcttctatctgattactctgagagccgtcaccaggcactatgtgctattgggtaaagctccctcttcggagggagcatcagag

SEQ ID NO: 8036 - DNA, 88 bp, synthetic construct
  misc_feature 1..88: note = engineered ribonucleic acid scaffold (ERS) sequence
  source 1..88: mol_type = other DNA
actggcgcttctatctgattactctgagagccgtcaccagccactatgtggtatgggtaaagctccctcttcggagggagcatcagag

SEQ ID NO: 8037 - DNA, 88 bp, synthetic construct
  misc_feature 1..88: note = engineered ribonucleic acid scaffold (ERS) sequence
  source 1..88: mol_type = other DNA
actggcgcttctatctgattactctgagagccgtcaccagctactatgtagtatgggtaaagctccctcttcggagggagcatcagag

SEQ ID NO: 8038 - DNA, 88 bp, synthetic construct
  misc_feature 1..88: note = engineered ribonucleic acid scaffold (ERS) sequence
  source 1..88: mol_type = other DNA
actggcgcttctatctgattactctgagagccgtcaccagcgattatgtcgtatgggtaaagctccctcttcggagggagcatcagag

SEQ ID NO: 8039 - DNA, 88 bp, synthetic construct
  misc_feature 1..88: note = engineered ribonucleic acid scaffold (ERS) sequence
  source 1..88: mol_type = other DNA
actggcgcttctatctgattactctgagagccgtcaccagcgacgatgtcgtatgggtaaagctccctcttcggagggagcatcagag

SEQ ID NO: 8040 - DNA, 88 bp, synthetic construct
  misc_feature 1..88: note = engineered ribonucleic acid scaffold (ERS) sequence
  source 1..88: mol_type = other DNA
actggcgcttctatctgattactctgagagccgtcaccagcgactctgtcgtatgggtaaagctccctcttcggagggagcatcagag

SEQ ID NO: 8041 - DNA, 88 bp, synthetic construct
  misc_feature 1..88: note = engineered ribonucleic acid scaffold (ERS) sequence
  source 1..88: mol_type = other DNA
actggcgcttctatctgattactctgagagccgtcaccagcgactatgtcgtgtgggtaaagctccctcttcggagggagcatcagag

SEQ ID NO: 8042 - DNA, 89 bp, synthetic construct
  misc_feature 1..89: note = engineered ribonucleic acid scaffold (ERS) sequence
  source 1..89: mol_type = other DNA
actggcgcttctatctgattactctgagagccgtcaccagcgactatgtcgtattgggtaaagctccctcttcggagggagcatcagag

SEQ ID NO: 8043 - DNA, 89 bp, synthetic construct
  misc_feature 1..89: note = engineered ribonucleic acid scaffold (ERS) sequence
  source 1..89: mol_type = other DNA
actggcgcttctatctgattactctgagagccgtcaccagcgactatgtcgtatggagtaaagctccctcttcggagggagcatcagag

SEQ ID NO: 8044 - DNA, 89 bp, synthetic construct
  misc_feature 1..89: note = engineered ribonucleic acid scaffold (ERS) sequence
  source 1..89: mol_type = other DNA
actggcgcttctatctgattactctgagagccgtcaccagcgactatgtcgtatggcgtaaagctccctcttcggagggagcatcagag

SEQ ID NO: 8045 - DNA, 89 bp, synthetic construct
  misc_feature 1..89: note = engineered ribonucleic acid scaffold (ERS) sequence
  source 1..89: mol_type = other DNA
actggcgcttctatctgattactctgagagccgtcaccagcgactatgtcgtatggtgtaaagctccctcttcggagggagcatcagag

SEQ ID NO: 8046 - DNA, 89 bp, synthetic construct
  misc_feature 1..89: note = engineered ribonucleic acid scaffold (ERS) sequence
  source 1..89: mol_type = other DNA
actggcgcttctatctgattactctgagagccgtcaccagcgactatgtcgtatgggctaaagctccctcttcggagggagcatcagag

SEQ ID NO: 8047 - DNA, 86 bp, synthetic construct
  misc_feature 1..86: note = engineered ribonucleic acid scaffold (ERS) sequence
  source 1..86: mol_type = other DNA
actggcgcttctatctgattactctgagagccgtcaccagcgactatgtcgtatgggtagctccctcttcggagggagcatcagag

SEQ ID NO: 8048 - DNA, 88 bp, synthetic construct
  misc_feature 1..88: note = engineered ribonucleic acid scaffold (ERS) sequence
  source 1..88: mol_type = other DNA
actggcgcttctatctgattactctgagagccgtcaccagcgactatgtcgtatgggtgaagctccctcttcggagggagcatcagag

SEQ ID NO: 8049 - DNA, 88 bp, synthetic construct
  misc_feature 1..88: note = engineered ribonucleic acid scaffold (ERS) sequence
  source 1..88: mol_type = other DNA
actggcgcttctatctgattactctgagagccgtcaccagcgactatgtcgtatgggtagagctccctcttcggagggagcatcagag

SEQ ID NO: 8050 - DNA, 88 bp, synthetic construct
  misc_feature 1..88: note = engineered ribonucleic acid scaffold (ERS) sequence
  source 1..88: mol_type = other DNA
actggcgcttctatctgattactctgagagcctacaccagcgactatgtcgtatgggtaaagctccctcttcggagggagcatcagag

SEQ ID NO: 8051 - DNA, 88 bp, synthetic construct
  misc_feature 1..88: note = engineered ribonucleic acid scaffold (ERS) sequence
  source 1..88: mol_type = other DNA
actggcgcttctatctgattactctgagagcctgcaccagcgactatgtcgtatgggtaaagctccctcttcggagggagcatcagag

SEQ ID NO: 8052 - DNA, 88 bp, synthetic construct
  misc_feature 1..88: note = engineered ribonucleic acid scaffold (ERS) sequence
  source 1..88: mol_type = other DNA
actggcgcttctatctgattactctgagagccttgaccagcgactatgtcgtatggctaaagctccctcttcggagggagcatcagag

SEQ ID NO: 8053 - DNA, 89 bp, synthetic construct
  misc_feature 1..89: note = engineered ribonucleic acid scaffold (ERS) sequence
  source 1..89: mol_type = other DNA
actggcgcttctatctgattactctgagagccttgaccagcgactatgtcgtatgggctaaagctccctcttcggagggagcatcagag

SEQ ID NO: 8054 - DNA, 88 bp, synthetic construct
  misc_feature 1..88: note = engineered ribonucleic acid scaffold (ERS) sequence
  source 1..88: mol_type = other DNA
actggcgcttctatctgattactctgagagccttgaccagcgactatgtcgtatgggtaaagctccctcttcggagggagcatcagag

SEQ ID NO: 8055 - DNA, 88 bp, synthetic construct
  misc_feature 1..88: note = engineered ribonucleic acid scaffold (ERS) sequence
  source 1..88: mol_type = other DNA
actggcgcttctatctgattactctgagagccttccccagcgactatgtcgtatgggtaaagctccctcttcggagggagcatcagag

SEQ ID NO: 8056 - DNA, 89 bp, synthetic construct
  misc_feature 1..89: note = engineered ribonucleic acid scaffold (ERS) sequence
  source 1..89: mol_type = other DNA
actggcgcttctatctgattactctgagagccttcgccagcgactatgtcgtatggcgtaaagctccctcttcggagggagcatcagag

SEQ ID NO: 8057 - DNA, 88 bp, synthetic construct
  misc_feature 1..88: note = engineered ribonucleic acid scaffold (ERS) sequence
  source 1..88: mol_type = other DNA
actggcgcttctatctgattactctgagagccttcgccagcgactatgtcgtatgggtaaagctccctcttcggagggagcatcagag

SEQ ID NO: 8058 - DNA, 88 bp, synthetic construct
  misc_feature 1..88: note = engineered ribonucleic acid scaffold (ERS) sequence
  source 1..88: mol_type = other DNA
actggcgcttctatctgattactctgagagccttctccagcgactatgtcgtatgggtaaagctccctcttcggagggagcatcagag

SEQ ID NO: 8059 - DNA, 88 bp, synthetic construct
  misc_feature 1..88: note = engineered ribonucleic acid scaffold (ERS) sequence
  source 1..88: mol_type = other DNA
actggcgcttctatctgattactctgagagccttcacctgcgactatgtcgtaagggtaaagctccctcttcggagggagcatcagag

SEQ ID NO: 8060 - DNA, 88 bp, synthetic construct
  misc_feature 1..88: note = engineered ribonucleic acid scaffold (ERS) sequence
  source 1..88: mol_type = other DNA
actggcgcttctatctgattactctgagagccttcaccagagactatgtcttatgggtaaagctccctcttcggagggagcatcagag

SEQ ID NO: 8061 - DNA, 88 bp, synthetic construct
  misc_feature 1..88: note = engineered ribonucleic acid scaffold (ERS) sequence
  source 1..88: mol_type = other DNA
actggcgcttctatctgattactctgagagccttcaccagggactatgtcctatgggtaaagctccctcttcggagggagcatcagag

SEQ ID NO: 8062 - DNA, 89 bp, synthetic construct
  misc_feature 1..89: note = engineered ribonucleic acid scaffold (ERS) sequence
  source 1..89: mol_type = other DNA
actggcgcttctatctgattactctgagagccttcaccaggcactatgtgctattgggtaaagctccctcttcggagggagcatcagag

SEQ ID NO: 8063 - DNA, 88 bp, synthetic construct
  misc_feature 1..88: note = engineered ribonucleic acid scaffold (ERS) sequence
  source 1..88: mol_type = other DNA
actggcgcttctatctgattactctgagagccttcaccagccactatgtggtatgggtaaagctccctcttcggagggagcatcagag

SEQ ID NO: 8064 - DNA, 88 bp, synthetic construct
  misc_feature 1..88: note = engineered ribonucleic acid scaffold (ERS) sequence
  source 1..88: mol_type = other DNA
actggcgcttctatctgattactctgagagccttcaccagctactatgtagtatgggtaaagctccctcttcggagggagcatcagag

SEQ ID NO: 8065 - DNA, 88 bp, synthetic construct
  misc_feature 1..88: note = engineered ribonucleic acid scaffold (ERS) sequence
  source 1..88: mol_type = other DNA
actggcgcttctatctgattactctgagagccttcaccagcgattatgtcgtatgggtaaagctccctcttcggagggagcatcagag

SEQ ID NO: 8066 - DNA, 88 bp, synthetic construct
  misc_feature 1..88: note = engineered ribonucleic acid scaffold (ERS) sequence
  source 1..88: mol_type = other DNA
actggcgcttctatctgattactctgagagccttcaccagcgacgatgtcgtatgggtaaagctccctcttcggagggagcatcagag

SEQ ID NO: 8067 - DNA, 88 bp, synthetic construct
  misc_feature 1..88: note = engineered ribonucleic acid scaffold (ERS) sequence
  source 1..88: mol_type = other DNA
actggcgcttctatctgattactctgagagccttcaccagcgactctgtcgtatgggtaaagctccctcttcggagggagcatcagag

SEQ ID NO: 8068 - DNA, 88 bp, synthetic construct
  misc_feature 1..88: note = engineered ribonucleic acid scaffold (ERS) sequence
  source 1..88: mol_type = other DNA
actggcgcttctatctgattactctgagagccttcaccagcgactatgtcgtgtgggtaaagctccctcttcggagggagcatcagag

SEQ ID NO: 8069 - DNA, 89 bp, synthetic construct
  misc_feature 1..89: note = engineered ribonucleic acid scaffold (ERS) sequence
  source 1..89: mol_type = other DNA
actggcgcttctatctgattactctgagagccttcaccagcgactatgtcgtattgggtaaagctccctcttcggagggagcatcagag

SEQ ID NO: 8070 - DNA, 89 bp, synthetic construct
  misc_feature 1..89: note = engineered ribonucleic acid scaffold (ERS) sequence
  source 1..89: mol_type = other DNA
actggcgcttctatctgattactctgagagccttcaccagcgactatgtcgtatggagtaaagctccctcttcggagggagcatcagag

SEQ ID NO: 8071 - DNA, 89 bp, synthetic construct
  misc_feature 1..89: note = engineered ribonucleic acid scaffold (ERS) sequence
  source 1..89: mol_type = other DNA
actggcgcttctatctgattactctgagagccttcaccagcgactatgtcgtatggcgtaaagctccctcttcggagggagcatcagag

SEQ ID NO: 8072 - DNA, 89 bp, synthetic construct
  misc_feature 1..89: note = engineered ribonucleic acid scaffold (ERS) sequence
  source 1..89: mol_type = other DNA
actggcgcttctatctgattactctgagagccttcaccagcgactatgtcgtatggtgtaaagctccctcttcggagggagcatcagag

SEQ ID NO: 8073 - DNA, 89 bp, synthetic construct
  misc_feature 1..89: note = engineered ribonucleic acid scaffold (ERS) sequence
  source 1..89: mol_type = other DNA
actggcgcttctatctgattactctgagagccttcaccagcgactatgtcgtatgggctaaagctccctcttcggagggagcatcagag

SEQ ID NO: 8074 - DNA, 86 bp, synthetic construct
  misc_feature 1..86: note = engineered ribonucleic acid scaffold (ERS) sequence
  source 1..86: mol_type = other DNA
actggcgcttctatctgattactctgagagccttcaccagcgactatgtcgtatgggtagctccctcttcggagggagcatcagag

SEQ ID NO: 8075 - DNA, 88 bp, synthetic construct
  misc_feature 1..88: note = engineered ribonucleic acid scaffold (ERS) sequence
  source 1..88: mol_type = other DNA
actggcgcttctatctgattactctgagagccttcaccagcgactatgtcgtatgggtgaagctccctcttcggagggagcatcagag

SEQ ID NO: 8076 - DNA, 88 bp, synthetic construct
  misc_feature 1..88: note = engineered ribonucleic acid scaffold (ERS) sequence
  source 1..88: mol_type = other DNA
actggcgcttctatctgattactctgagagccttcaccagcgactatgtcgtatgggtagagctccctcttcggagggagcatcagag

SEQ ID NO: 8077 - DNA, 88 bp, synthetic construct
  misc_feature 1..88: note = engineered ribonucleic acid scaffold (ERS) sequence
  source 1..88: mol_type = other DNA
actggggcttctatctgattactctgagacccaacaccagcgactatgtcgtatgggtaaagctccctcttcggagggagcatcagag

SEQ ID NO: 8078 - DNA, 88 bp, synthetic construct
  misc_feature 1..88: note = engineered ribonucleic acid scaffold (ERS) sequence
  source 1..88: mol_type = other DNA
actggggcttctatctgattactctgagacccagcaccagcgactatgtcgtatgggtaaagctccctcttcggagggagcatcagag

SEQ ID NO: 8079 - DNA, 88 bp, synthetic construct
  misc_feature 1..88: note = engineered ribonucleic acid scaffold (ERS) sequence
  source 1..88: mol_type = other DNA
actggggcttctatctgattactctgagacccatgaccagcgactatgtcgtatggctaaagctccctcttcggagggagcatcagag

SEQ ID NO: 8080 - DNA, 89 bp, synthetic construct
  misc_feature 1..89: note = engineered ribonucleic acid scaffold (ERS) sequence
  source 1..89: mol_type = other DNA
actggggcttctatctgattactctgagacccatgaccagcgactatgtcgtatgggctaaagctccctcttcggagggagcatcagag

SEQ ID NO: 8081 - DNA, 88 bp, synthetic construct
  misc_feature 1..88: note = engineered ribonucleic acid scaffold (ERS) sequence
  source 1..88: mol_type = other DNA
actggggcttctatctgattactctgagacccatgaccagcgactatgtcgtatgggtaaagctccctcttcggagggagcatcagag

SEQ ID NO: 8082 - DNA, 88 bp, synthetic construct
  misc_feature 1..88: note = engineered ribonucleic acid scaffold (ERS) sequence
  source 1..88: mol_type = other DNA
actggggcttctatctgattactctgagacccatccccagcgactatgtcgtatgggtaaagctccctcttcggagggagcatcagag

SEQ ID NO: 8083 - DNA, 89 bp, synthetic construct
  misc_feature 1..89: note = engineered ribonucleic acid scaffold (ERS) sequence
  source 1..89: mol_type = other DNA
actggggcttctatctgattactctgagacccatcgccagcgactatgtcgtatggcgtaaagctccctcttcggagggagcatcagag

SEQ ID NO: 8084 - DNA, 88 bp, synthetic construct
  misc_feature 1..88: note = engineered ribonucleic acid scaffold (ERS) sequence
  source 1..88: mol_type = other DNA
actggggcttctatctgattactctgagacccatcgccagcgactatgtcgtatgggtaaagctccctcttcggagggagcatcagag

SEQ ID NO: 8085 - DNA, 88 bp, synthetic construct
  misc_feature 1..88: note = engineered ribonucleic acid scaffold (ERS) sequence
  source 1..88: mol_type = other DNA
actggggcttctatctgattactctgagacccatctccagcgactatgtcgtatgggtaaagctccctcttcggagggagcatcagag

SEQ ID NO: 8086 - DNA, 88 bp, synthetic construct
  misc_feature 1..88: note = engineered ribonucleic acid scaffold (ERS) sequence
  source 1..88: mol_type = other DNA
actggggcttctatctgattactctgagacccatcacctgcgactatgtcgtaagggtaaagctccctcttcggagggagcatcagag

SEQ ID NO: 8087 - DNA, 88 bp, synthetic construct
  misc_feature 1..88: note = engineered ribonucleic acid scaffold (ERS) sequence
  source 1..88: mol_type = other DNA
actggggcttctatctgattactctgagacccatcaccagagactatgtcttatgggtaaagctccctcttcggagggagcatcagag

SEQ ID NO: 8088 - DNA, 88 bp, synthetic construct
  misc_feature 1..88: note = engineered ribonucleic acid scaffold (ERS) sequence
  source 1..88: mol_type = other DNA
actggggcttctatctgattactctgagacccatcaccagggactatgtcctatgggtaaagctccctcttcggagggagcatcagag

SEQ ID NO: 8089 - DNA, 89 bp, synthetic construct
  misc_feature 1..89: note = engineered ribonucleic acid scaffold (ERS) sequence
  source 1..89: mol_type = other DNA
actggggcttctatctgattactctgagacccatcaccaggcactatgtgctattgggtaaagctccctcttcggagggagcatcagag

SEQ ID NO: 8090 - DNA, 88 bp, synthetic construct
  misc_feature 1..88: note = engineered ribonucleic acid scaffold (ERS) sequence
  source 1..88: mol_type = other DNA
actggggcttctatctgattactctgagacccatcaccagccactatgtggtatgggtaaagctccctcttcggagggagcatcagag

SEQ ID NO: 8091 - DNA, 88 bp, synthetic construct
  misc_feature 1..88: note = engineered ribonucleic acid scaffold (ERS) sequence
  source 1..88: mol_type = other DNA
actggggcttctatctgattactctgagacccatcaccagctactatgtagtatgggtaaagctccctcttcggagggagcatcagag

SEQ ID NO: 8092 - DNA, 88 bp, synthetic construct
  misc_feature 1..88: note = engineered ribonucleic acid scaffold (ERS) sequence
  source 1..88: mol_type = other DNA
actggggcttctatctgattactctgagacccatcaccagcgattatgtcgtatgggtaaagctccctcttcggagggagcatcagag

SEQ ID NO: 8093 - DNA, 88 bp, synthetic construct
  misc_feature 1..88: note = engineered ribonucleic acid scaffold (ERS) sequence
  source 1..88: mol_type = other DNA
actggggcttctatctgattactctgagacccatcaccagcgacgatgtcgtatgggtaaagctccctcttcggagggagcatcagag

SEQ ID NO: 8094 - DNA, 88 bp, synthetic construct
  misc_feature 1..88: note = engineered ribonucleic acid scaffold (ERS) sequence
  source 1..88: mol_type = other DNA
actggggcttctatctgattactctgagacccatcaccagcgactctgtcgtatgggtaaagctccctcttcggagggagcatcagag

SEQ ID NO: 8095 - DNA, 88 bp, synthetic construct
  misc_feature 1..88: note = engineered ribonucleic acid scaffold (ERS) sequence
  source 1..88: mol_type = other DNA
actggggcttctatctgattactctgagacccatcaccagcgactatgtcgtgtgggtaaagctccctcttcggagggagcatcagag

SEQ ID NO: 8096 - DNA, 89 bp, synthetic construct
  misc_feature 1..89: note = engineered ribonucleic acid scaffold (ERS) sequence
  source 1..89: mol_type = other DNA
actggggcttctatctgattactctgagacccatcaccagcgactatgtcgtattgggtaaagctccctcttcggagggagcatcagag

SEQ ID NO: 8097 - DNA, 89 bp, synthetic construct
  misc_feature 1..89: note = engineered ribonucleic acid scaffold (ERS) sequence
  source 1..89: mol_type = other DNA
actggggcttctatctgattactctgagacccatcaccagcgactatgtcgtatggagtaaagctccctcttcggagggagcatcagag

SEQ ID NO: 8098 - DNA, 89 bp, synthetic construct
  misc_feature 1..89: note = engineered ribonucleic acid scaffold (ERS) sequence
  source 1..89: mol_type = other DNA
actggggcttctatctgattactctgagacccatcaccagcgactatgtcgtatggcgtaaagctccctcttcggagggagcatcagag

SEQ ID NO: 8099 - DNA, 89 bp, synthetic construct
  misc_feature 1..89: note = engineered ribonucleic acid scaffold (ERS) sequence
  source 1..89: mol_type = other DNA
actggggcttctatctgattactctgagacccatcaccagcgactatgtcgtatggtgtaaagctccctcttcggagggagcatcagag

SEQ ID NO: 8100 - DNA, 89 bp, synthetic construct
  misc_feature 1..89: note = engineered ribonucleic acid scaffold (ERS) sequence
  source 1..89: mol_type = other DNA
actggggcttctatctgattactctgagacccatcaccagcgactatgtcgtatgggctaaagctccctcttcggagggagcatcagag

SEQ ID NO: 8101 - DNA, 86 bp, synthetic construct
  misc_feature 1..86: note = engineered ribonucleic acid scaffold (ERS) sequence
  source 1..86: mol_type = other DNA
actggggcttctatctgattactctgagacccatcaccagcgactatgtcgtatgggtagctccctcttcggagggagcatcagag

SEQ ID NO: 8102 - DNA, 88 bp, synthetic construct
  misc_feature 1..88: note = engineered ribonucleic acid scaffold (ERS) sequence
  source 1..88: mol_type = other DNA
actggggcttctatctgattactctgagacccatcaccagcgactatgtcgtatgggtgaagctccctcttcggagggagcatcagag

SEQ ID NO: 8103 - DNA, 88 bp, synthetic construct
  misc_feature 1..88: note = engineered ribonucleic acid scaffold (ERS) sequence
  source 1..88: mol_type = other DNA
actggggcttctatctgattactctgagacccatcaccagcgactatgtcgtatgggtagagctccctcttcggagggagcatcagag

SEQ ID NO: 8104 - DNA, 88 bp, synthetic construct
  misc_feature 1..88: note = engineered ribonucleic acid scaffold (ERS) sequence
  source 1..88: mol_type = other DNA
actggtgcttctatctgattactctgagagccaacaccagcgactatgtcgtatgggtaaagctccctcttcggagggagcatcagag

SEQ ID NO: 8105 - DNA, 88 bp, synthetic construct
  misc_feature 1..88: note = engineered ribonucleic acid scaffold (ERS) sequence
  source 1..88: mol_type = other DNA
actggtgcttctatctgattactctgagagccagcaccagcgactatgtcgtatgggtaaagctccctcttcggagggagcatcagag

SEQ ID NO: 8106 - DNA, 88 bp, synthetic construct
  misc_feature 1..88: note = engineered ribonucleic acid scaffold (ERS) sequence
  source 1..88: mol_type = other DNA
actggtgcttctatctgattactctgagagccatgaccagcgactatgtcgtatggctaaagctccctcttcggagggagcatcagag

SEQ ID NO: 8107 - DNA, 89 bp, synthetic construct
  misc_feature 1..89: note = engineered ribonucleic acid scaffold (ERS) sequence
  source 1..89: mol_type = other DNA
actggtgcttctatctgattactctgagagccatgaccagcgactatgtcgtatgggctaaagctccctcttcggagggagcatcagag

SEQ ID NO: 8108 - DNA, 88 bp, synthetic construct
  misc_feature 1..88: note = engineered ribonucleic acid scaffold (ERS) sequence
  source 1..88: mol_type = other DNA
actggtgcttctatctgattactctgagagccatgaccagcgactatgtcgtatgggtaaagctccctcttcggagggagcatcagag

SEQ ID NO: 8109 - DNA, 88 bp, synthetic construct
  misc_feature 1..88: note = engineered ribonucleic acid scaffold (ERS) sequence
  source 1..88: mol_type = other DNA
actggtgcttctatctgattactctgagagccatccccagcgactatgtcgtatgggtaaagctccctcttcggagggagcatcagag

SEQ ID NO: 8110 - DNA, 89 bp, synthetic construct
  misc_feature 1..89: note = engineered ribonucleic acid scaffold (ERS) sequence
  source 1..89: mol_type = other DNA
actggtgcttctatctgattactctgagagccatcgccagcgactatgtcgtatggcgtaaagctccctcttcggagggagcatcagag

SEQ ID NO: 8111 - DNA, 88 bp, synthetic construct
  misc_feature 1..88: note = engineered ribonucleic acid scaffold (ERS) sequence
  source 1..88: mol_type = other DNA
actggtgcttctatctgattactctgagagccatcgccagcgactatgtcgtatgggtaaagctccctcttcggagggagcatcagag

SEQ ID NO: 8112 - DNA, 88 bp, synthetic construct
  misc_feature 1..88: note = engineered ribonucleic acid scaffold (ERS) sequence
  source 1..88: mol_type = other DNA
actggtgcttctatctgattactctgagagccatctccagcgactatgtcgtatgggtaaagctccctcttcggagggagcatcagag

SEQ ID NO: 8113 - DNA, 88 bp, synthetic construct
  misc_feature 1..88: note = engineered ribonucleic acid scaffold (ERS) sequence
  source 1..88: mol_type = other DNA
actggtgcttctatctgattactctgagagccatcacctgcgactatgtcgtaagggtaaagctccctcttcggagggagcatcagag

SEQ ID NO: 8114 - DNA, 88 bp, synthetic construct
  misc_feature 1..88: note = engineered ribonucleic acid scaffold (ERS) sequence
  source 1..88: mol_type = other DNA
actggtgcttctatctgattactctgagagccatcaccagagactatgtcttatgggtaaagctccctcttcggagggagcatcagag

SEQ ID NO: 8115 - DNA, 88 bp, synthetic construct
  misc_feature 1..88: note = engineered ribonucleic acid scaffold (ERS) sequence
  source 1..88: mol_type = other DNA
actggtgcttctatctgattactctgagagccatcaccagggactatgtcctatgggtaaagctccctcttcggagggagcatcagag

SEQ ID NO: 8116 - DNA, 89 bp, synthetic construct
  misc_feature 1..89: note = engineered ribonucleic acid scaffold (ERS) sequence
  source 1..89: mol_type = other DNA
actggtgcttctatctgattactctgagagccatcaccaggcactatgtgctattgggtaaagctccctcttcggagggagcatcagag

SEQ ID NO: 8117 - DNA, 88 bp, synthetic construct
  misc_feature 1..88: note = engineered ribonucleic acid scaffold (ERS) sequence
  source 1..88: mol_type = other DNA
actggtgcttctatctgattactctgagagccatcaccagccactatgtggtatgggtaaagctccctcttcggagggagcatcagag

SEQ ID NO: 8118 - DNA, 88 bp, synthetic construct
  misc_feature 1..88: note = engineered ribonucleic acid scaffold (ERS) sequence
  source 1..88: mol_type = other DNA
actggtgcttctatctgattactctgagagccatcaccagctactatgtagtatgggtaaagctccctcttcggagggagcatcagag

SEQ ID NO: 8119 - DNA, 88 bp, synthetic construct
  misc_feature 1..88: note = engineered ribonucleic acid scaffold (ERS) sequence
  source 1..88: mol_type = other DNA
actggtgcttctatctgattactctgagagccatcaccagcgattatgtcgtatgggtaaagctccctcttcggagggagcatcagag

SEQ ID NO: 8120 - DNA, 88 bp, synthetic construct
  misc_feature 1..88: note = engineered ribonucleic acid scaffold (ERS) sequence
  source 1..88: mol_type = other DNA
actggtgcttctatctgattactctgagagccatcaccagcgacgatgtcgtatgggtaaagctccctcttcggagggagcatcagag

SEQ ID NO: 8121 - DNA, 88 bp, synthetic construct
  misc_feature 1..88: note = engineered ribonucleic acid scaffold (ERS) sequence
  source 1..88: mol_type = other DNA
actggtgcttctatctgattactctgagagccatcaccagcgactctgtcgtatgggtaaagctccctcttcggagggagcatcagag

SEQ ID NO: 8122 - DNA, 88 bp, synthetic construct
  misc_feature 1..88: note = engineered ribonucleic acid scaffold (ERS) sequence
  source 1..88: mol_type = other DNA
actggtgcttctatctgattactctgagagccatcaccagcgactatgtcgtgtgggtaaagctccctcttcggagggagcatcagag

SEQ ID NO: 8123 - DNA, 89 bp, synthetic construct
  misc_feature 1..89: note = engineered ribonucleic acid scaffold (ERS) sequence
  source 1..89: mol_type = other DNA
actggtgcttctatctgattactctgagagccatcaccagcgactatgtcgtattgggtaaagctccctcttcggagggagcatcagag

SEQ ID NO: 8124 - DNA, 89 bp, synthetic construct
  misc_feature 1..89: note = engineered ribonucleic acid scaffold (ERS) sequence
  source 1..89: mol_type = other DNA
actggtgcttctatctgattactctgagagccatcaccagcgactatgtcgtatggagtaaagctccctcttcggagggagcatcagag

SEQ ID NO: 8125 - DNA, 89 bp, synthetic construct
  misc_feature 1..89: note = engineered ribonucleic acid scaffold (ERS) sequence
  source 1..89: mol_type = other DNA
actggtgcttctatctgattactctgagagccatcaccagcgactatgtcgtatggcgtaaagctccctcttcggagggagcatcagag

SEQ ID NO: 8126 - DNA, 89 bp, synthetic construct
  misc_feature 1..89: note = engineered ribonucleic acid scaffold (ERS) sequence
  source 1..89: mol_type = other DNA
actggtgcttctatctgattactctgagagccatcaccagcgactatgtcgtatggtgtaaagctccctcttcggagggagcatcagag

SEQ ID NO: 8127 - DNA, 89 bp, synthetic construct
  misc_feature 1..89: note = engineered ribonucleic acid scaffold (ERS) sequence
  source 1..89: mol_type = other DNA
actggtgcttctatctgattactctgagagccatcaccagcgactatgtcgtatgggctaaagctccctcttcggagggagcatcagag

SEQ ID NO: 8128 - DNA, 86 bp, synthetic construct
  misc_feature 1..86: note = engineered ribonucleic acid scaffold (ERS) sequence
  source 1..86: mol_type = other DNA
actggtgcttctatctgattactctgagagccatcaccagcgactatgtcgtatgggtagctccctcttcggagggagcatcagag

SEQ ID NO: 8129 - DNA, 88 bp, synthetic construct
  misc_feature 1..88: note = engineered ribonucleic acid scaffold (ERS) sequence
  source 1..88: mol_type = other DNA
actggtgcttctatctgattactctgagagccatcaccagcgactatgtcgtatgggtgaagctccctcttcggagggagcatcagag

SEQ ID NO: 8130 - DNA, 88 bp, synthetic construct
  misc_feature 1..88: note = engineered ribonucleic acid scaffold (ERS) sequence
  source 1..88: mol_type = other DNA
actggtgcttctatctgattactctgagagccatcaccagcgactatgtcgtatgggtagagctccctcttcggagggagcatcagag

SEQ ID NO: 8131 - DNA, 88 bp, synthetic construct
  misc_feature 1..88: note = engineered ribonucleic acid scaffold (ERS) sequence
  source 1..88: mol_type = other DNA
actgggccttctatctgattactctgaggcccaacaccagcgactatgtcgtatgggtaaagctccctcttcggagggagcatcagag

SEQ ID NO: 8132 - DNA, 88 bp, synthetic construct
  misc_feature 1..88: note = engineered ribonucleic acid scaffold (ERS) sequence
  source 1..88: mol_type = other DNA
actgggccttctatctgattactctgaggcccagcaccagcgactatgtcgtatgggtaaagctccctcttcggagggagcatcagag

SEQ ID NO: 8133 - DNA, 88 bp, synthetic construct
  misc_feature 1..88: note = engineered ribonucleic acid scaffold (ERS) sequence
  source 1..88: mol_type = other DNA
actgggccttctatctgattactctgaggcccatgaccagcgactatgtcgtatggctaaagctccctcttcggagggagcatcagag

SEQ ID NO: 8134 - DNA, 89 bp, synthetic construct
  misc_feature 1..89: note = engineered ribonucleic acid scaffold (ERS) sequence
  source 1..89: mol_type = other DNA
actgggccttctatctgattactctgaggcccatgaccagcgactatgtcgtatgggctaaagctccctcttcggagggagcatcagag

SEQ ID NO: 8135 - DNA, 88 bp, synthetic construct
  misc_feature 1..88: note = engineered ribonucleic acid scaffold (ERS) sequence
  source 1..88: mol_type = other DNA
actgggccttctatctgattactctgaggcccatgaccagcgactatgtcgtatgggtaaagctccctcttcggagggagcatcagag

SEQ ID NO: 8136 - DNA, 88 bp, synthetic construct
  misc_feature 1..88: note = engineered ribonucleic acid scaffold (ERS) sequence
  source 1..88: mol_type = other DNA
actgggccttctatctgattactctgaggcccatccccagcgactatgtcgtatgggtaaagctccctcttcggagggagcatcagag

SEQ ID NO: 8137 - DNA, 89 bp, synthetic construct
  misc_feature 1..89: note = engineered ribonucleic acid scaffold (ERS) sequence
  source 1..89: mol_type = other DNA
actgggccttctatctgattactctgaggcccatcgccagcgactatgtcgtatggcgtaaagctccctcttcggagggagcatcagag

SEQ ID NO: 8138 - DNA, 88 bp, synthetic construct
  misc_feature 1..88: note = engineered ribonucleic acid scaffold (ERS) sequence
  source 1..88: mol_type = other DNA
actgggccttctatctgattactctgaggcccatcgccagcgactatgtcgtatgggtaaagctccctcttcggagggagcatcagag

SEQ ID NO: 8139 - DNA, 88 bp, synthetic construct
  misc_feature 1..88: note = engineered ribonucleic acid scaffold (ERS) sequence
  source 1..88: mol_type = other DNA
actgggccttctatctgattactctgaggcccatctccagcgactatgtcgtatgggtaaagctccctcttcggagggagcatcagag

SEQ ID NO: 8140 - DNA, 88 bp, synthetic construct
  misc_feature 1..88: note = engineered ribonucleic acid scaffold (ERS) sequence
  source 1..88: mol_type = other DNA
actgggccttctatctgattactctgaggcccatcacctgcgactatgtcgtaagggtaaagctccctcttcggagggagcatcagag

SEQ ID NO: 8141 - DNA, 88 bp, synthetic construct
  misc_feature 1..88: note = engineered ribonucleic acid scaffold (ERS) sequence
  source 1..88: mol_type = other DNA
actgggccttctatctgattactctgaggcccatcaccagagactatgtcttatgggtaaagctccctcttcggagggagcatcagag

SEQ ID NO: 8142 - DNA, 88 bp, synthetic construct
  misc_feature 1..88: note = engineered ribonucleic acid scaffold (ERS) sequence
  source 1..88: mol_type = other DNA
actgggccttctatctgattactctgaggcccatcaccagggactatgtcctatgggtaaagctccctcttcggagggagcatcagag

SEQ ID NO: 8143 - DNA, 89 bp, synthetic construct
  misc_feature 1..89: note = engineered ribonucleic acid scaffold (ERS) sequence
  source 1..89: mol_type = other DNA
actgggccttctatctgattactctgaggcccatcaccaggcactatgtgctattgggtaaagctccctcttcggagggagcatcagag

SEQ ID NO: 8144 - DNA, 88 bp, synthetic construct
  misc_feature 1..88: note = engineered ribonucleic acid scaffold (ERS) sequence
  source 1..88: mol_type = other DNA
actgggccttctatctgattactctgaggcccatcaccagccactatgtggtatgggtaaagctccctcttcggagggagcatcagag

SEQ ID NO: 8145 - DNA, 88 bp, synthetic construct
  misc_feature 1..88: note = engineered ribonucleic acid scaffold (ERS) sequence
  source 1..88: mol_type = other DNA
actgggccttctatctgattactctgaggcccatcaccagctactatgtagtatgggtaaagctccctcttcggagggagcatcagag

SEQ ID NO: 8146 - DNA, 88 bp, synthetic construct
  misc_feature 1..88: note = engineered ribonucleic acid scaffold (ERS) sequence
  source 1..88: mol_type = other DNA
actgggccttctatctgattactctgaggcccatcaccagcgattatgtcgtatgggtaaagctccctcttcggagggagcatcagag

SEQ ID NO: 8147 - DNA, 88 bp, synthetic construct
  misc_feature 1..88: note = engineered ribonucleic acid scaffold (ERS) sequence
  source 1..88: mol_type = other DNA
actgggccttctatctgattactctgaggcccatcaccagcgacgatgtcgtatgggtaaagctccctcttcggagggagcatcagag

SEQ ID NO: 8148 - DNA, 88 bp, synthetic construct
  misc_feature 1..88: note = engineered ribonucleic acid scaffold (ERS) sequence
  source 1..88: mol_type = other DNA
actgggccttctatctgattactctgaggcccatcaccagcgactctgtcgtatgggtaaagctccctcttcggagggagcatcagag

SEQ ID NO: 8149 - DNA, 88 bp, synthetic construct
  misc_feature 1..88: note = engineered ribonucleic acid scaffold (ERS) sequence
  source 1..88: mol_type = other DNA
actgggccttctatctgattactctgaggcccatcaccagcgactatgtcgtgtgggtaaagctccctcttcggagggagcatcagag

SEQ ID NO: 8150 - DNA, 89 bp, synthetic construct
  misc_feature 1..89: note = engineered ribonucleic acid scaffold (ERS) sequence
  source 1..89: mol_type = other DNA
actgggccttctatctgattactctgaggcccatcaccagcgactatgtcgtattgggtaaagctccctcttcggagggagcatcagag

SEQ ID NO: 8151 - DNA, 89 bp, synthetic construct
  misc_feature 1..89: note = engineered ribonucleic acid scaffold (ERS) sequence
  source 1..89: mol_type = other DNA
actgggccttctatctgattactctgaggcccatcaccagcgactatgtcgtatggagtaaagctccctcttcggagggagcatcagag

SEQ ID NO: 8152 - DNA, 89 bp, synthetic construct
  misc_feature 1..89: note = engineered ribonucleic acid scaffold (ERS) sequence
  source 1..89: mol_type = other DNA
actgggccttctatctgattactctgaggcccatcaccagcgactatgtcgtatggcgtaaagctccctcttcggagggagcatcagag

SEQ ID NO: 8153 - DNA, 89 bp, synthetic construct
  misc_feature 1..89: note = engineered ribonucleic acid scaffold (ERS) sequence
  source 1..89: mol_type = other DNA
actgggccttctatctgattactctgaggcccatcaccagcgactatgtcgtatggtgtaaagctccctcttcggagggagcatcagag

SEQ ID NO: 8154 - DNA, 89 bp, synthetic construct
  misc_feature 1..89: note = engineered ribonucleic acid scaffold (ERS) sequence
  source 1..89: mol_type = other DNA
actgggccttctatctgattactctgaggcccatcaccagcgactatgtcgtatgggctaaagctccctcttcggagggagcatcagag

SEQ ID NO: 8155 - DNA, 86 bp, synthetic construct
  misc_feature 1..86: note = engineered ribonucleic acid scaffold (ERS) sequence
  source 1..86: mol_type = other DNA
actgggccttctatctgattactctgaggcccatcaccagcgactatgtcgtatgggtagctccctcttcggagggagcatcagag

SEQ ID NO: 8156 - DNA, 88 bp, synthetic construct
  misc_feature 1..88: note = engineered ribonucleic acid scaffold (ERS) sequence
  source 1..88: mol_type = other DNA
actgggccttctatctgattactctgaggcccatcaccagcgactatgtcgtatgggtgaagctccctcttcggagggagcatcagag

SEQ ID NO: 8157 - DNA, 88 bp, synthetic construct
  misc_feature 1..88: note = engineered ribonucleic acid scaffold (ERS) sequence
  source 1..88: mol_type = other DNA
actgggccttctatctgattactctgaggcccatcaccagcgactatgtcgtatgggtagagctccctcttcggagggagcatcagag

SEQ ID NO: 8158 - DNA, 89 bp, synthetic construct
  misc_feature 1..89: note = engineered ribonucleic acid scaffold (ERS) sequence
  source 1..89: mol_type = other DNA
actggcccttctatctgattactctgaggagccaacaccagcgactatgtcgtatgggtaaagctccctcttcggagggagcatcagag

SEQ ID NO: 8159 - DNA, 89 bp, synthetic construct
  misc_feature 1..89: note = engineered ribonucleic acid scaffold (ERS) sequence
  source 1..89: mol_type = other DNA
actggcccttctatctgattactctgaggagccagcaccagcgactatgtcgtatgggtaaagctccctcttcggagggagcatcagag

SEQ ID NO: 8160 - DNA, 89 bp, synthetic construct
  misc_feature 1..89: note = engineered ribonucleic acid scaffold (ERS) sequence
  source 1..89: mol_type = other DNA
actggcccttctatctgattactctgaggagccatgaccagcgactatgtcgtatggctaaagctccctcttcggagggagcatcagag

SEQ ID NO: 8161 - DNA, 90 bp, synthetic construct
  misc_feature 1..90: note = engineered ribonucleic acid scaffold (ERS) sequence
  source 1..90: mol_type = other DNA
actggcccttctatctgattactctgaggagccatgaccagcgactatgtcgtatgggctaaagctccctcttcggagggagcatcagag

SEQ ID NO: 8162 - DNA, 89 bp, synthetic construct
  misc_feature 1..89: note = engineered ribonucleic acid scaffold (ERS) sequence
  source 1..89: mol_type = other DNA
actggcccttctatctgattactctgaggagccatgaccagcgactatgtcgtatgggtaaagctccctcttcggagggagcatcagag

SEQ ID NO: 8163 - DNA, 89 bp, synthetic construct
  misc_feature 1..89: note = engineered ribonucleic acid scaffold (ERS) sequence
  source 1..89: mol_type = other DNA
actggcccttctatctgattactctgaggagccatccccagcgactatgtcgtatgggtaaagctccctcttcggagggagcatcagag

SEQ ID NO: 8164 - DNA, 90 bp, synthetic construct
  misc_feature 1..90: note = engineered ribonucleic acid scaffold (ERS) sequence
  source 1..90: mol_type = other DNA
actggcccttctatctgattactctgaggagccatcgccagcgactatgtcgtatggcgtaaagctccctcttcggagggagcatcagag

SEQ ID NO: 8165 - DNA, 89 bp, synthetic construct
  misc_feature 1..89: note = engineered ribonucleic acid scaffold (ERS) sequence
  source 1..89: mol_type = other DNA
actggcccttctatctgattactctgaggagccatcgccagcgactatgtcgtatgggtaaagctccctcttcggagggagcatcagag

SEQ ID NO: 8166 - DNA, 89 bp, synthetic construct
  misc_feature 1..89: note = engineered ribonucleic acid scaffold (ERS) sequence
  source 1..89: mol_type = other DNA
actggcccttctatctgattactctgaggagccatctccagcgactatgtcgtatgggtaaagctccctcttcggagggagcatcagag

SEQ ID NO: 8167 - DNA, 89 bp, synthetic construct
  misc_feature 1..89: note = engineered ribonucleic acid scaffold (ERS) sequence
  source 1..89: mol_type = other DNA
actggcccttctatctgattactctgaggagccatcacctgcgactatgtcgtaagggtaaagctccctcttcggagggagcatcagag

SEQ ID NO: 8168 - DNA, 89 bp, synthetic construct
  misc_feature 1..89: note = engineered ribonucleic acid scaffold (ERS) sequence
  source 1..89: mol_type = other DNA
actggcccttctatctgattactctgaggagccatcaccagagactatgtcttatgggtaaagctccctcttcggagggagcatcagag

SEQ ID NO: 8169 - DNA, 89 bp, synthetic construct
  misc_feature 1..89: note = engineered ribonucleic acid scaffold (ERS) sequence
  source 1..89: mol_type = other DNA
actggcccttctatctgattactctgaggagccatcaccagggactatgtcctatgggtaaagctccctcttcggagggagcatcagag

SEQ ID NO: 8170 - DNA, 90 bp, synthetic construct
  misc_feature 1..90: note = engineered ribonucleic acid scaffold (ERS) sequence
  source 1..90: mol_type = other DNA
actggcccttctatctgattactctgaggagccatcaccaggcactatgtgctattgggtaaagctccctcttcggagggagcatcagag

SEQ ID NO: 8171 - DNA, 89 bp, synthetic construct
  misc_feature 1..89: note = engineered ribonucleic acid scaffold (ERS) sequence
  source 1..89: mol_type = other DNA
actggcccttctatctgattactctgaggagccatcaccagccactatgtggtatgggtaaagctccctcttcggagggagcatcagag

SEQ ID NO: 8172 - DNA, 89 bp, synthetic construct
  misc_feature 1..89: note = engineered ribonucleic acid scaffold (ERS) sequence
  source 1..89: mol_type = other DNA
actggcccttctatctgattactctgaggagccatcaccagctactatgtagtatgggtaaagctccctcttcggagggagcatcagag

SEQ ID NO: 8173 - DNA, 89 bp, synthetic construct
  misc_feature 1..89: note = engineered ribonucleic acid scaffold (ERS) sequence
  source 1..89: mol_type = other DNA
actggcccttctatctgattactctgaggagccatcaccagcgattatgtcgtatgggtaaagctccctcttcggagggagcatcagag

SEQ ID NO: 8174 - DNA, 89 bp, synthetic construct
  misc_feature 1..89: note = engineered ribonucleic acid scaffold (ERS) sequence
  source 1..89: mol_type = other DNA
actggcccttctatctgattactctgaggagccatcaccagcgacgatgtcgtatgggtaaagctccctcttcggagggagcatcagag

SEQ ID NO: 8175 - DNA, 89 bp, synthetic construct
  misc_feature 1..89: note = engineered ribonucleic acid scaffold (ERS) sequence
  source 1..89: mol_type = other DNA
actggcccttctatctgattactctgaggagccatcaccagcgactctgtcgtatgggtaaagctccctcttcggagggagcatcagag

SEQ ID NO: 8176 - DNA, 89 bp, synthetic construct
  misc_feature 1..89: note = engineered ribonucleic acid scaffold (ERS) sequence
  source 1..89: mol_type = other DNA
actggcccttctatctgattactctgaggagccatcaccagcgactatgtcgtgtgggtaaagctccctcttcggagggagcatcagag

SEQ ID NO: 8177 - DNA, 90 bp, synthetic construct
  misc_feature 1..90: note = engineered ribonucleic acid scaffold (ERS) sequence
  source 1..90: mol_type = other DNA
actggcccttctatctgattactctgaggagccatcaccagcgactatgtcgtattgggtaaagctccctcttcggagggagcatcagag

SEQ ID NO: 8178 - DNA, 90 bp, synthetic construct
  misc_feature 1..90: note = engineered ribonucleic acid scaffold (ERS) sequence
  source 1..90: mol_type = other DNA
actggcccttctatctgattactctgaggagccatcaccagcgactatgtcgtatggagtaaagctccctcttcggagggagcatcagag

SEQ ID NO: 8179 - DNA, 90 bp, synthetic construct
  misc_feature 1..90: note = engineered ribonucleic acid scaffold (ERS) sequence
  source 1..90: mol_type = other DNA
actggcccttctatctgattactctgaggagccatcaccagcgactatgtcgtatggcgtaaagctccctcttcggagggagcatcagag

SEQ ID NO: 8180 - DNA, 90 bp, synthetic construct
  misc_feature 1..90: note = engineered ribonucleic acid scaffold (ERS) sequence
  source 1..90: mol_type = other DNA
actggcccttctatctgattactctgaggagccatcaccagcgactatgtcgtatggtgtaaagctccctcttcggagggagcatcagag

SEQ ID NO: 8181 - DNA, 90 bp, synthetic construct
  misc_feature 1..90: note = engineered ribonucleic acid scaffold (ERS) sequence
  source 1..90: mol_type = other DNA
actggcccttctatctgattactctgaggagccatcaccagcgactatgtcgtatgggctaaagctccctcttcggagggagcatcagag

SEQ ID NO: 8182 - DNA, 87 bp, synthetic construct
  misc_feature 1..87: note = engineered ribonucleic acid scaffold (ERS) sequence
  source 1..87: mol_type = other DNA
actggcccttctatctgattactctgaggagccatcaccagcgactatgtcgtatgggtagctccctcttcggagggagcatcagag

SEQ ID NO: 8183 - DNA, 89 bp, synthetic construct
  misc_feature 1..89: note = engineered ribonucleic acid scaffold (ERS) sequence
  source 1..89: mol_type = other DNA
actggcccttctatctgattactctgaggagccatcaccagcgactatgtcgtatgggtgaagctccctcttcggagggagcatcagag

SEQ ID NO: 8184 - DNA, 89 bp, synthetic construct
  misc_feature 1..89: note = engineered ribonucleic acid scaffold (ERS) sequence
  source 1..89: mol_type = other DNA
actggcccttctatctgattactctgaggagccatcaccagcgactatgtcgtatgggtagagctccctcttcggagggagcatcagag

SEQ ID NO: 8185 - DNA, 88 bp, synthetic construct
  misc_feature 1..88: note = engineered ribonucleic acid scaffold (ERS) sequence
  source 1..88: mol_type = other DNA
actggcccttctatctgattactctgagggccaacaccagcgactatgtcgtatgggtaaagctccctcttcggagggagcatcagag

SEQ ID NO: 8186 - DNA, 88 bp, synthetic construct
  misc_feature 1..88: note = engineered ribonucleic acid scaffold (ERS) sequence
  source 1..88: mol_type = other DNA
actggcccttctatctgattactctgagggccagcaccagcgactatgtcgtatgggtaaagctccctcttcggagggagcatcagag

SEQ ID NO: 8187 - DNA, 88 bp, synthetic construct
  misc_feature 1..88: note = engineered ribonucleic acid scaffold (ERS) sequence
  source 1..88: mol_type = other DNA
actggcccttctatctgattactctgagggccatgaccagcgactatgtcgtatggctaaagctccctcttcggagggagcatcagag

SEQ ID NO: 8188 - DNA, 89 bp, synthetic construct
  misc_feature 1..89: note = engineered ribonucleic acid scaffold (ERS) sequence
  source 1..89: mol_type = other DNA
actggcccttctatctgattactctgagggccatgaccagcgactatgtcgtatgggctaaagctccctcttcggagggagcatcagag

SEQ ID NO: 8189 - DNA, 88 bp, synthetic construct
  misc_feature 1..88: note = engineered ribonucleic acid scaffold (ERS) sequence
  source 1..88: mol_type = other DNA
actggcccttctatctgattactctgagggccatgaccagcgactatgtcgtatgggtaaagctccctcttcggagggagcatcagag

SEQ ID NO: 8190 - DNA, 88 bp, synthetic construct
  misc_feature 1..88: note = engineered ribonucleic acid scaffold (ERS) sequence
  source 1..88: mol_type = other DNA
actggcccttctatctgattactctgagggccatccccagcgactatgtcgtatgggtaaagctccctcttcggagggagcatcagag

SEQ ID NO: 8191 - DNA, 89 bp, synthetic construct
  misc_feature 1..89: note = engineered ribonucleic acid scaffold (ERS) sequence
  source 1..89: mol_type = other DNA
actggcccttctatctgattactctgagggccatcgccagcgactatgtcgtatggcgtaaagctccctcttcggagggagcatcagag

SEQ ID NO: 8192 - DNA, 88 bp, synthetic construct
  misc_feature 1..88: note = engineered ribonucleic acid scaffold (ERS) sequence
  source 1..88: mol_type = other DNA
actggcccttctatctgattactctgagggccatcgccagcgactatgtcgtatgggtaaagctccctcttcggagggagcatcagag

SEQ ID NO: 8193 - DNA, 88 bp, synthetic construct
  misc_feature 1..88: note = engineered ribonucleic acid scaffold (ERS) sequence
  source 1..88: mol_type = other DNA
actggcccttctatctgattactctgagggccatctccagcgactatgtcgtatgggtaaagctccctcttcggagggagcatcagag

SEQ ID NO: 8194 - DNA, 88 bp, synthetic construct
  misc_feature 1..88: note = engineered ribonucleic acid scaffold (ERS) sequence
  source 1..88: mol_type = other DNA
actggcccttctatctgattactctgagggccatcacctgcgactatgtcgtaagggtaaagctccctcttcggagggagcatcagag

SEQ ID NO: 8195 - DNA, 88 bp, synthetic construct
  misc_feature 1..88: note = engineered ribonucleic acid scaffold (ERS) sequence
  source 1..88: mol_type = other DNA
actggcccttctatctgattactctgagggccatcaccagagactatgtcttatgggtaaagctccctcttcggagggagcatcagag

SEQ ID NO: 8196 - DNA, 88 bp, synthetic construct
  misc_feature 1..88: note = engineered ribonucleic acid scaffold (ERS) sequence
  source 1..88: mol_type = other DNA
actggcccttctatctgattactctgagggccatcaccagggactatgtcctatgggtaaagctccctcttcggagggagcatcagag

SEQ ID NO: 8197 - DNA, 89 bp, synthetic construct
  misc_feature 1..89: note = engineered ribonucleic acid scaffold (ERS) sequence
  source 1..89: mol_type = other DNA
actggcccttctatctgattactctgagggccatcaccaggcactatgtgctattgggtaaagctccctcttcggagggagcatcagag

SEQ ID NO: 8198 - DNA, 88 bp, synthetic construct
  misc_feature 1..88: note = engineered ribonucleic acid scaffold (ERS) sequence
  source 1..88: mol_type = other DNA
actggcccttctatctgattactctgagggccatcaccagccactatgtggtatgggtaaagctccctcttcggagggagcatcagag

SEQ ID NO: 8199 - DNA, 88 bp, synthetic construct
  misc_feature 1..88: note = engineered ribonucleic acid scaffold (ERS) sequence
  source 1..88: mol_type = other DNA
actggcccttctatctgattactctgagggccatcaccagctactatgtagtatgggtaaagctccctcttcggagggagcatcagag

SEQ ID NO: 8200 - DNA, 88 bp, synthetic construct
  misc_feature 1..88: note = engineered ribonucleic acid scaffold (ERS) sequence
  source 1..88: mol_type = other DNA
actggcccttctatctgattactctgagggccatcaccagcgattatgtcgtatgggtaaagctccctcttcggagggagcatcagag

SEQ ID NO: 8201 - DNA, 88 bp, synthetic construct
  misc_feature 1..88: note = engineered ribonucleic acid scaffold (ERS) sequence
  source 1..88: mol_type = other DNA
actggcccttctatctgattactctgagggccatcaccagcgacgatgtcgtatgggtaaagctccctcttcggagggagcatcagag

SEQ ID NO: 8202 - DNA, 88 bp, synthetic construct
  misc_feature 1..88: note = engineered ribonucleic acid scaffold (ERS) sequence
  source 1..88: mol_type = other DNA
actggcccttctatctgattactctgagggccatcaccagcgactctgtcgtatgggtaaagctccctcttcggagggagcatcagag

SEQ ID NO: 8203 - DNA, 88 bp, synthetic construct
  misc_feature 1..88: note = engineered ribonucleic acid scaffold (ERS) sequence
  source 1..88: mol_type = other DNA
actggcccttctatctgattactctgagggccatcaccagcgactatgtcgtgtgggtaaagctccctcttcggagggagcatcagag

SEQ ID NO: 8204 - DNA, 89 bp, synthetic construct
  misc_feature 1..89: note = engineered ribonucleic acid scaffold (ERS) sequence
  source 1..89: mol_type = other DNA
actggcccttctatctgattactctgagggccatcaccagcgactatgtcgtattgggtaaagctccctcttcggagggagcatcagag

SEQ ID NO: 8205 - DNA, 89 bp, synthetic construct
  misc_feature 1..89: note = engineered ribonucleic acid scaffold (ERS) sequence
  source 1..89: mol_type = other DNA
actggcccttctatctgattactctgagggccatcaccagcgactatgtcgtatggagtaaagctccctcttcggagggagcatcagag

SEQ ID NO: 8206 - DNA, 89 bp, synthetic construct
  misc_feature 1..89: note = engineered ribonucleic acid scaffold (ERS) sequence
  source 1..89: mol_type = other DNA
actggcccttctatctgattactctgagggccatcaccagcgactatgtcgtatggcgtaaagctccctcttcggagggagcatcagag

SEQ ID NO: 8207 - DNA, 89 bp, synthetic construct
  misc_feature 1..89: note = engineered ribonucleic acid scaffold (ERS) sequence
  source 1..89: mol_type = other DNA
actggcccttctatctgattactctgagggccatcaccagcgactatgtcgtatggtgtaaagctccctcttcggagggagcatcagag

SEQ ID NO: 8208 - DNA, 89 bp, synthetic construct
  misc_feature 1..89: note = engineered ribonucleic acid scaffold (ERS) sequence
  source 1..89: mol_type = other DNA
actggcccttctatctgattactctgagggccatcaccagcgactatgtcgtatgggctaaagctccctcttcggagggagcatcagag

SEQ ID NO: 8209 - DNA, 86 bp, synthetic construct
  misc_feature 1..86: note = engineered ribonucleic acid scaffold (ERS) sequence
  source 1..86: mol_type = other DNA
actggcccttctatctgattactctgagggccatcaccagcgactatgtcgtatgggtagctccctcttcggagggagcatcagag

SEQ ID NO: 8210 - DNA, 88 bp, synthetic construct
  misc_feature 1..88: note = engineered ribonucleic acid scaffold (ERS) sequence
  source 1..88: mol_type = other DNA
actggcccttctatctgattactctgagggccatcaccagcgactatgtcgtatgggtgaagctccctcttcggagggagcatcagag

SEQ ID NO: 8211 - DNA, 88 bp, synthetic construct
  misc_feature 1..88: note = engineered ribonucleic acid scaffold (ERS) sequence
  source 1..88: mol_type = other DNA
actggcccttctatctgattactctgagggccatcaccagcgactatgtcgtatgggtagagctccctcttcggagggagcatcagag

SEQ ID NO: 8212 - DNA, 88 bp, synthetic construct
  misc_feature 1..88: note = engineered ribonucleic acid scaffold (ERS) sequence
  source 1..88: mol_type = other DNA
actggcccttctatctgattactctgagtgccaacaccagcgactatgtcgtatgggtaaagctccctcttcggagggagcatcagag

SEQ ID NO: 8213 - DNA, 88 bp, synthetic construct
  misc_feature 1..88: note = engineered ribonucleic acid scaffold (ERS) sequence
  source 1..88: mol_type = other DNA
actggcccttctatctgattactctgagtgccagcaccagcgactatgtcgtatgggtaaagctccctcttcggagggagcatcagag

SEQ ID NO: 8214 - DNA, 88 bp, synthetic construct
  misc_feature 1..88: note = engineered ribonucleic acid scaffold (ERS) sequence
  source 1..88: mol_type = other DNA
actggcccttctatctgattactctgagtgccatgaccagcgactatgtcgtatggctaaagctccctcttcggagggagcatcagag

SEQ ID NO: 8215 - DNA, 89 bp, synthetic construct
  misc_feature 1..89: note = engineered ribonucleic acid scaffold (ERS) sequence
  source 1..89: mol_type = other DNA
actggcccttctatctgattactctgagtgccatgaccagcgactatgtcgtatgggctaaagctccctcttcggagggagcatcagag

SEQ ID NO: 8216 - DNA, 88 bp, synthetic construct
  misc_feature 1..88: note = engineered ribonucleic acid scaffold (ERS) sequence
  source 1..88: mol_type = other DNA
actggcccttctatctgattactctgagtgccatgaccagcgactatgtcgtatgggtaaagctccctcttcggagggagcatcagag

SEQ ID NO: 8217 - DNA, 88 bp, synthetic construct
  misc_feature 1..88: note = engineered ribonucleic acid scaffold (ERS) sequence
  source 1..88: mol_type = other DNA
actggcccttctatctgattactctgagtgccatccccagcgactatgtcgtatgggtaaagctccctcttcggagggagcatcagag

SEQ ID NO: 8218 - DNA, 89 bp, synthetic construct
  misc_feature 1..89: note = engineered ribonucleic acid scaffold (ERS) sequence
  source 1..89: mol_type = other DNA
actggcccttctatctgattactctgagtgccatcgccagcgactatgtcgtatggcgtaaagctccctcttcggagggagcatcagag

SEQ ID NO: 8219 - DNA, 88 bp, synthetic construct
  misc_feature 1..88: note = engineered ribonucleic acid scaffold (ERS) sequence
  source 1..88: mol_type = other DNA
actggcccttctatctgattactctgagtgccatcgccagcgactatgtcgtatgggtaaagctccctcttcggagggagcatcagag

SEQ ID NO: 8220 - DNA, 88 bp, synthetic construct
  misc_feature 1..88: note = engineered ribonucleic acid scaffold (ERS) sequence
  source 1..88: mol_type = other DNA
actggcccttctatctgattactctgagtgccatctccagcgactatgtcgtatgggtaaagctccctcttcggagggagcatcagag

SEQ ID NO: 8221 - DNA, 88 bp, synthetic construct
  misc_feature 1..88: note = engineered ribonucleic acid scaffold (ERS) sequence
  source 1..88: mol_type = other DNA
actggcccttctatctgattactctgagtgccatcacctgcgactatgtcgtaagggtaaagctccctcttcggagggagcatcagag

SEQ ID NO: 8222 - DNA, 88 bp, synthetic construct
  misc_feature 1..88: note = engineered ribonucleic acid scaffold (ERS) sequence
  source 1..88: mol_type = other DNA
actggcccttctatctgattactctgagtgccatcaccagagactatgtcttatgggtaaagctccctcttcggagggagcatcagag

SEQ ID NO: 8223 - DNA, 88 bp, synthetic construct
  misc_feature 1..88: note = engineered ribonucleic acid scaffold (ERS) sequence
  source 1..88: mol_type = other DNA
actggcccttctatctgattactctgagtgccatcaccagggactatgtcctatgggtaaagctccctcttcggagggagcatcagag

SEQ ID NO: 8224 - DNA, 89 bp, synthetic construct
  misc_feature 1..89: note = engineered ribonucleic acid scaffold (ERS) sequence
  source 1..89: mol_type = other DNA
actggcccttctatctgattactctgagtgccatcaccaggcactatgtgctattgggtaaagctccctcttcggagggagcatcagag

SEQ ID NO: 8225 - DNA, 88 bp, synthetic construct
  misc_feature 1..88: note = engineered ribonucleic acid scaffold (ERS) sequence
  source 1..88: mol_type = other DNA
actggcccttctatctgattactctgagtgccatcaccagccactatgtggtatgggtaaagctccctcttcggagggagcatcagag

SEQ ID NO: 8226 - DNA, 88 bp, synthetic construct
  misc_feature 1..88: note = engineered ribonucleic acid scaffold (ERS) sequence
  source 1..88: mol_type = other DNA
actggcccttctatctgattactctgagtgccatcaccagctactatgtagtatgggtaaagctccctcttcggagggagcatcagag

SEQ ID NO: 8227 - DNA, 88 bp, synthetic construct
  misc_feature 1..88: note = engineered ribonucleic acid scaffold (ERS) sequence
  source 1..88: mol_type = other DNA
actggcccttctatctgattactctgagtgccatcaccagcgattatgtcgtatgggtaaagctccctcttcggagggagcatcagag

SEQ ID NO: 8228 - DNA, 88 bp, synthetic construct
  misc_feature 1..88: note = engineered ribonucleic acid scaffold (ERS) sequence
  source 1..88: mol_type = other DNA
actggcccttctatctgattactctgagtgccatcaccagcgacgatgtcgtatgggtaaagctccctcttcggagggagcatcagag

SEQ ID NO: 8229 - DNA, 88 bp, synthetic construct
  misc_feature 1..88: note = engineered ribonucleic acid scaffold (ERS) sequence
  source 1..88: mol_type = other DNA
actggcccttctatctgattactctgagtgccatcaccagcgactctgtcgtatgggtaaagctccctcttcggagggagcatcagag

SEQ ID NO: 8230 - DNA, 88 bp, synthetic construct
  misc_feature 1..88: note = engineered ribonucleic acid scaffold (ERS) sequence
  source 1..88: mol_type = other DNA
actggcccttctatctgattactctgagtgccatcaccagcgactatgtcgtgtgggtaaagctccctcttcggagggagcatcagag

SEQ ID NO: 8231 - DNA, 89 bp, synthetic construct
  misc_feature 1..89: note = engineered ribonucleic acid scaffold (ERS) sequence
  source 1..89: mol_type = other DNA
actggcccttctatctgattactctgagtgccatcaccagcgactatgtcgtattgggtaaagctccctcttcggagggagcatcagag

SEQ ID NO: 8232 - DNA, 89 bp, synthetic construct
  misc_feature 1..89: note = engineered ribonucleic acid scaffold (ERS) sequence
  source 1..89: mol_type = other DNA
actggcccttctatctgattactctgagtgccatcaccagcgactatgtcgtatggagtaaagctccctcttcggagggagcatcagag

SEQ ID NO: 8233 - DNA, 89 bp, synthetic construct
  misc_feature 1..89: note = engineered ribonucleic acid scaffold (ERS) sequence
  source 1..89: mol_type = other DNA
actggcccttctatctgattactctgagtgccatcaccagcgactatgtcgtatggcgtaaagctccctcttcggagggagcatcagag

SEQ ID NO: 8234 - DNA, 89 bp, synthetic construct
  misc_feature 1..89: note = engineered ribonucleic acid scaffold (ERS) sequence
  source 1..89: mol_type = other DNA
actggcccttctatctgattactctgagtgccatcaccagcgactatgtcgtatggtgtaaagctccctcttcggagggagcatcagag

SEQ ID NO: 8235 - DNA, 89 bp, synthetic construct
  misc_feature 1..89: note = engineered ribonucleic acid scaffold (ERS) sequence
  source 1..89: mol_type = other DNA
actggcccttctatctgattactctgagtgccatcaccagcgactatgtcgtatgggctaaagctccctcttcggagggagcatcagag

SEQ ID NO: 8236 - DNA, 86 bp, synthetic construct
  misc_feature 1..86: note = engineered ribonucleic acid scaffold (ERS) sequence
  source 1..86: mol_type = other DNA
actggcccttctatctgattactctgagtgccatcaccagcgactatgtcgtatgggtagctccctcttcggagggagcatcagag

SEQ ID NO: 8237 - DNA, 88 bp, synthetic construct
  misc_feature 1..88: note = engineered ribonucleic acid scaffold (ERS) sequence
  source 1..88: mol_type = other DNA
actggcccttctatctgattactctgagtgccatcaccagcgactatgtcgtatgggtgaagctccctcttcggagggagcatcagag

SEQ ID NO: 8238 - DNA, 88 bp, synthetic construct
  misc_feature 1..88: note = engineered ribonucleic acid scaffold (ERS) sequence
  source 1..88: mol_type = other DNA
actggcccttctatctgattactctgagtgccatcaccagcgactatgtcgtatgggtagagctccctcttcggagggagcatcagag

SEQ ID NO: 8239 - DNA, 88 bp, synthetic construct
  misc_feature 1..88: note = engineered ribonucleic acid scaffold (ERS) sequence
  source 1..88: mol_type = other DNA
actggcccttctatctgattactctgagagccaacaccagcgactatgtcgtatgggtaaagctccctcttcggagggagcatcagag

SEQ ID NO: 8240 - DNA, 88 bp, synthetic construct
  misc_feature 1..88: note = engineered ribonucleic acid scaffold (ERS) sequence
  source 1..88: mol_type = other DNA
actggcccttctatctgattactctgagagccagcaccagcgactatgtcgtatgggtaaagctccctcttcggagggagcatcagag

SEQ ID NO: 8241 - DNA, 88 bp, synthetic construct
  misc_feature 1..88: note = engineered ribonucleic acid scaffold (ERS) sequence
  source 1..88: mol_type = other DNA
actggcccttctatctgattactctgagagccatgaccagcgactatgtcgtatggctaaagctccctcttcggagggagcatcagag

SEQ ID NO: 8242 - DNA, 89 bp, synthetic construct
  misc_feature 1..89: note = engineered ribonucleic acid scaffold (ERS) sequence
  source 1..89: mol_type = other DNA
actggcccttctatctgattactctgagagccatgaccagcgactatgtcgtatgggctaaagctccctcttcggagggagcatcagag

SEQ ID NO: 8243 - DNA, 88 bp, synthetic construct
  misc_feature 1..88: note = engineered ribonucleic acid scaffold (ERS) sequence
  source 1..88: mol_type = other DNA
actggcccttctatctgattactctgagagccatgaccagcgactatgtcgtatgggtaaagctccctcttcggagggagcatcagag

SEQ ID NO: 8244 - DNA, 88 bp, synthetic construct
  misc_feature 1..88: note = engineered ribonucleic acid scaffold (ERS) sequence
  source 1..88: mol_type = other DNA
actggcccttctatctgattactctgagagccatccccagcgactatgtcgtatgggtaaagctccctcttcggagggagcatcagag

SEQ ID NO: 8245 - DNA, 89 bp, synthetic construct
  misc_feature 1..89: note = engineered ribonucleic acid scaffold (ERS) sequence
  source 1..89: mol_type = other DNA
actggcccttctatctgattactctgagagccatcgccagcgactatgtcgtatggcgtaaagctccctcttcggagggagcatcagag

SEQ ID NO: 8246 - DNA, 88 bp, synthetic construct
  misc_feature 1..88: note = engineered ribonucleic acid scaffold (ERS) sequence
  source 1..88: mol_type = other DNA
actggcccttctatctgattactctgagagccatcgccagcgactatgtcgtatgggtaaagctccctcttcggagggagcatcagag

SEQ ID NO: 8247 - DNA, 88 bp, synthetic construct
  misc_feature 1..88: note = engineered ribonucleic acid scaffold (ERS) sequence
  source 1..88: mol_type = other DNA
actggcccttctatctgattactctgagagccatctccagcgactatgtcgtatgggtaaagctccctcttcggagggagcatcagag

SEQ ID NO: 8248 - DNA, 88 bp, synthetic construct
  misc_feature 1..88: note = engineered ribonucleic acid scaffold (ERS) sequence
  source 1..88: mol_type = other DNA
actggcccttctatctgattactctgagagccatcacctgcgactatgtcgtaagggtaaagctccctcttcggagggagcatcagag

SEQ ID NO: 8249 - DNA, 88 bp, synthetic construct
  misc_feature 1..88: note = engineered ribonucleic acid scaffold (ERS) sequence
  source 1..88: mol_type = other DNA
actggcccttctatctgattactctgagagccatcaccagagactatgtcttatgggtaaagctccctcttcggagggagcatcagag

SEQ ID NO: 8250 - DNA, 88 bp, synthetic construct
  misc_feature 1..88: note = engineered ribonucleic acid scaffold (ERS) sequence
  source 1..88: mol_type = other DNA
actggcccttctatctgattactctgagagccatcaccagggactatgtcctatgggtaaagctccctcttcggagggagcatcagag

SEQ ID NO: 8251 - DNA, 89 bp, synthetic construct
  misc_feature 1..89: note = engineered ribonucleic acid scaffold (ERS) sequence
  source 1..89: mol_type = other DNA
actggcccttctatctgattactctgagagccatcaccaggcactatgtgctattgggtaaagctccctcttcggagggagcatcagag

SEQ ID NO: 8252 - DNA, 88 bp, synthetic construct
  misc_feature 1..88: note = engineered ribonucleic acid scaffold (ERS) sequence
  source 1..88: mol_type = other DNA
actggcccttctatctgattactctgagagccatcaccagccactatgtggtatgggtaaagctccctcttcggagggagcatcagag

SEQ ID NO: 8253 - DNA, 88 bp, synthetic construct
  misc_feature 1..88: note = engineered ribonucleic acid scaffold (ERS) sequence
  source 1..88: mol_type = other DNA
actggcccttctatctgattactctgagagccatcaccagctactatgtagtatgggtaaagctccctcttcggagggagcatcagag

SEQ ID NO: 8254 - DNA, 88 bp, synthetic construct
  misc_feature 1..88: note = engineered ribonucleic acid scaffold (ERS) sequence
  source 1..88: mol_type = other DNA
actggcccttctatctgattactctgagagccatcaccagcgattatgtcgtatgggtaaagctccctcttcggagggagcatcagag

SEQ ID NO: 8255 - DNA, 88 bp, synthetic construct
  misc_feature 1..88: note = engineered ribonucleic acid scaffold (ERS) sequence
  source 1..88: mol_type = other DNA
actggcccttctatctgattactctgagagccatcaccagcgacgatgtcgtatgggtaaagctccctcttcggagggagcatcagag

SEQ ID NO: 8256 - DNA, 88 bp, synthetic construct
  misc_feature 1..88: note = engineered ribonucleic acid scaffold (ERS) sequence
  source 1..88: mol_type = other DNA
actggcccttctatctgattactctgagagccatcaccagcgactctgtcgtatgggtaaagctccctcttcggagggagcatcagag

SEQ ID NO: 8257 - DNA, 88 bp, synthetic construct
  misc_feature 1..88: note = engineered ribonucleic acid scaffold (ERS) sequence
  source 1..88: mol_type = other DNA
actggcccttctatctgattactctgagagccatcaccagcgactatgtcgtgtgggtaaagctccctcttcggagggagcatcagag

SEQ ID NO: 8258 - DNA, 89 bp, synthetic construct
  misc_feature 1..89: note = engineered ribonucleic acid scaffold (ERS) sequence
  source 1..89: mol_type = other DNA
actggcccttctatctgattactctgagagccatcaccagcgactatgtcgtattgggtaaagctccctcttcggagggagcatcagag

SEQ ID NO: 8259 - DNA, 89 bp, synthetic construct
  misc_feature 1..89: note = engineered ribonucleic acid scaffold (ERS) sequence
  source 1..89: mol_type = other DNA
actggcccttctatctgattactctgagagccatcaccagcgactatgtcgtatggagtaaagctccctcttcggagggagcatcagag

SEQ ID NO: 8260 - DNA, 89 bp, synthetic construct
  misc_feature 1..89: note = engineered ribonucleic acid scaffold (ERS) sequence
  source 1..89: mol_type = other DNA
actggcccttctatctgattactctgagagccatcaccagcgactatgtcgtatggcgtaaagctccctcttcggagggagcatcagag

SEQ ID NO: 8261 - DNA, 89 bp, synthetic construct
  misc_feature 1..89: note = engineered ribonucleic acid scaffold (ERS) sequence
  source 1..89: mol_type = other DNA
actggcccttctatctgattactctgagagccatcaccagcgactatgtcgtatggtgtaaagctccctcttcggagggagcatcagag

SEQ ID NO: 8262 - DNA, 89 bp, synthetic construct
  misc_feature 1..89: note = engineered ribonucleic acid scaffold (ERS) sequence
  source 1..89: mol_type = other DNA
actggcccttctatctgattactctgagagccatcaccagcgactatgtcgtatgggctaaagctccctcttcggagggagcatcagag

SEQ ID NO: 8263 - DNA, 86 bp, synthetic construct
  misc_feature 1..86: note = engineered ribonucleic acid scaffold (ERS) sequence
  source 1..86: mol_type = other DNA
actggcccttctatctgattactctgagagccatcaccagcgactatgtcgtatgggtagctccctcttcggagggagcatcagag

SEQ ID NO: 8264 - DNA, 88 bp, synthetic construct
  misc_feature 1..88: note = engineered ribonucleic acid scaffold (ERS) sequence
  source 1..88: mol_type = other DNA
actggcccttctatctgattactctgagagccatcaccagcgactatgtcgtatgggtgaagctccctcttcggagggagcatcagag

SEQ ID NO: 8265 - DNA, 88 bp, synthetic construct
  misc_feature 1..88: note = engineered ribonucleic acid scaffold (ERS) sequence
  source 1..88: mol_type = other DNA
actggcccttctatctgattactctgagagccatcaccagcgactatgtcgtatgggtagagctccctcttcggagggagcatcagag

SEQ ID NO: 8266 - DNA, 89 bp, synthetic construct
  misc_feature 1..89: note = engineered ribonucleic acid scaffold (ERS) sequence
  source 1..89: mol_type = other DNA
actggcgcttctatctgattactctgagcagccaacaccagcgactatgtcgtatgggtaaagctccctcttcggagggagcatcagag

SEQ ID NO: 8267 - DNA, 89 bp, synthetic construct
  misc_feature 1..89: note = engineered ribonucleic acid scaffold (ERS) sequence
  source 1..89: mol_type = other DNA
actggcgcttctatctgattactctgagcagccagcaccagcgactatgtcgtatgggtaaagctccctcttcggagggagcatcagag

SEQ ID NO: 8268 - DNA, 89 bp, synthetic construct
  misc_feature 1..89: note = engineered ribonucleic acid scaffold (ERS) sequence
  source 1..89: mol_type = other DNA
actggcgcttctatctgattactctgagcagccatgaccagcgactatgtcgtatggctaaagctccctcttcggagggagcatcagag

SEQ ID NO: 8269 - DNA, 90 bp, synthetic construct
  misc_feature 1..90: note = engineered ribonucleic acid scaffold (ERS) sequence
  source 1..90: mol_type = other DNA
actggcgcttctatctgattactctgagcagccatgaccagcgactatgtcgtatgggctaaagctccctcttcggagggagcatcagag

SEQ ID NO: 8270 - DNA, 89 bp, synthetic construct
  misc_feature 1..89: note = engineered ribonucleic acid scaffold (ERS) sequence
  source 1..89: mol_type = other DNA
actggcgcttctatctgattactctgagcagccatgaccagcgactatgtcgtatgggtaaagctccctcttcggagggagcatcagag

SEQ ID NO: 8271 - DNA, 89 bp, synthetic construct
  misc_feature 1..89: note = engineered ribonucleic acid scaffold (ERS) sequence
  source 1..89: mol_type = other DNA
actggcgcttctatctgattactctgagcagccatccccagcgactatgtcgtatgggtaaagctccctcttcggagggagcatcagag

SEQ ID NO: 8272 - DNA, 90 bp, synthetic construct
  misc_feature 1..90: note = engineered ribonucleic acid scaffold (ERS) sequence
  source 1..90: mol_type = other DNA
actggcgcttctatctgattactctgagcagccatcgccagcgactatgtcgtatggcgtaaagctccctcttcggagggagcatcagag

SEQ ID NO: 8273 - DNA, 89 bp, synthetic construct
  misc_feature 1..89: note = engineered ribonucleic acid scaffold (ERS) sequence
  source 1..89: mol_type = other DNA
actggcgcttctatctgattactctgagcagccatcgccagcgactatgtcgtatgggtaaagctccctcttcggagggagcatcagag

SEQ ID NO: 8274 - DNA, 89 bp, synthetic construct
  misc_feature 1..89: note = engineered ribonucleic acid scaffold (ERS) sequence
  source 1..89: mol_type = other DNA
actggcgcttctatctgattactctgagcagccatctccagcgactatgtcgtatgggtaaagctccctcttcggagggagcatcagag

SEQ ID NO: 8275 - DNA, 89 bp, synthetic construct
  misc_feature 1..89: note = engineered ribonucleic acid scaffold (ERS) sequence
  source 1..89: mol_type = other DNA
actggcgcttctatctgattactctgagcagccatcacctgcgactatgtcgtaagggtaaagctccctcttcggagggagcatcagag

SEQ ID NO: 8276 - DNA, 89 bp, synthetic construct
  misc_feature 1..89: note = engineered ribonucleic acid scaffold (ERS) sequence
  source 1..89: mol_type = other DNA
actggcgcttctatctgattactctgagcagccatcaccagagactatgtcttatgggtaaagctccctcttcggagggagcatcagag

SEQ ID NO: 8277 - DNA, 89 bp, synthetic construct
  misc_feature 1..89: note = engineered ribonucleic acid scaffold (ERS) sequence
  source 1..89: mol_type = other DNA
actggcgcttctatctgattactctgagcagccatcaccagggactatgtcctatgggtaaagctccctcttcggagggagcatcagag

SEQ ID NO: 8278 - DNA, 90 bp, synthetic construct
  misc_feature 1..90: note = engineered ribonucleic acid scaffold (ERS) sequence
  source 1..90: mol_type = other DNA
actggcgcttctatctgattactctgagcagccatcaccaggcactatgtgctattgggtaaagctccctcttcggagggagcatcagag

SEQ ID NO: 8279 - DNA, 89 bp, synthetic construct
  misc_feature 1..89: note = engineered ribonucleic acid scaffold (ERS) sequence
  source 1..89: mol_type = other DNA
actggcgcttctatctgattactctgagcagccatcaccagccactatgtggtatgggtaaagctccctcttcggagggagcatcagag

SEQ ID NO: 8280 - DNA, 89 bp, synthetic construct
  misc_feature 1..89: note = engineered ribonucleic acid scaffold (ERS) sequence
  source 1..89: mol_type = other DNA
actggcgcttctatctgattactctgagcagccatcaccagctactatgtagtatgggtaaagctccctcttcggagggagcatcagag

SEQ ID NO: 8281 - DNA, 89 bp, synthetic construct
  misc_feature 1..89: note = engineered ribonucleic acid scaffold (ERS) sequence
  source 1..89: mol_type = other DNA
actggcgcttctatctgattactctgagcagccatcaccagcgattatgtcgtatgggtaaagctccctcttcggagggagcatcagag

SEQ ID NO: 8282 - DNA, 89 bp, synthetic construct
  misc_feature 1..89: note = engineered ribonucleic acid scaffold (ERS) sequence
  source 1..89: mol_type = other DNA
actggcgcttctatctgattactctgagcagccatcaccagcgacgatgtcgtatgggtaaagctccctcttcggagggagcatcagag

SEQ ID NO: 8283 - DNA, 89 bp, synthetic construct
  misc_feature 1..89: note = engineered ribonucleic acid scaffold (ERS) sequence
  source 1..89: mol_type = other DNA
actggcgcttctatctgattactctgagcagccatcaccagcgactctgtcgtatgggtaaagctccctcttcggagggagcatcagag

SEQ ID NO: 8284 - DNA, 89 bp, synthetic construct
  misc_feature 1..89: note = engineered ribonucleic acid scaffold (ERS) sequence
  source 1..89: mol_type = other DNA
actggcgcttctatctgattactctgagcagccatcaccagcgactatgtcgtgtgggtaaagctccctcttcggagggagcatcagag

SEQ ID NO: 8285 - DNA, 90 bp, synthetic construct
  misc_feature 1..90: note = engineered ribonucleic acid scaffold (ERS) sequence
  source 1..90: mol_type = other DNA
actggcgcttctatctgattactctgagcagccatcaccagcgactatgtcgtattgggtaaagctccctcttcggagggagcatcagag

SEQ ID NO: 8286 - DNA, 90 bp, synthetic construct
  misc_feature 1..90: note = engineered ribonucleic acid scaffold (ERS) sequence
  source 1..90: mol_type = other DNA
actggcgcttctatctgattactctgagcagccatcaccagcgactatgtcgtatggagtaaagctccctcttcggagggagcatcagag

SEQ ID NO: 8287 - DNA, 90 bp, synthetic construct
  misc_feature 1..90: note = engineered ribonucleic acid scaffold (ERS) sequence
  source 1..90: mol_type = other DNA
actggcgcttctatctgattactctgagcagccatcaccagcgactatgtcgtatggcgtaaagctccctcttcggagggagcatcagag

SEQ ID NO: 8288 - DNA, 90 bp, synthetic construct
  misc_feature 1..90: note = engineered ribonucleic acid scaffold (ERS) sequence
  source 1..90: mol_type = other DNA
actggcgcttctatctgattactctgagcagccatcaccagcgactatgtcgtatggtgtaaagctccctcttcggagggagcatcagag

SEQ ID NO: 8289 - DNA, 90 bp, synthetic construct
  misc_feature 1..90: note = engineered ribonucleic acid scaffold (ERS) sequence
  source 1..90: mol_type = other DNA
actggcgcttctatctgattactctgagcagccatcaccagcgactatgtcgtatgggctaaagctccctcttcggagggagcatcagag

SEQ ID NO: 8290 - DNA, 87 bp, synthetic construct
  misc_feature 1..87: note = engineered ribonucleic acid scaffold (ERS) sequence
  source 1..87: mol_type = other DNA
actggcgcttctatctgattactctgagcagccatcaccagcgactatgtcgtatgggtagctccctcttcggagggagcatcagag

SEQ ID NO: 8291 - DNA, 89 bp, synthetic construct
  misc_feature 1..89: note = engineered ribonucleic acid scaffold (ERS) sequence
  source 1..89: mol_type = other DNA
actggcgcttctatctgattactctgagcagccatcaccagcgactatgtcgtatgggtgaagctccctcttcggagggagcatcagag

SEQ ID NO: 8292 - DNA, 89 bp, synthetic construct
  misc_feature 1..89: note = engineered ribonucleic acid scaffold (ERS) sequence
  source 1..89: mol_type = other DNA
actggcgcttctatctgattactctgagcagccatcaccagcgactatgtcgtatgggtagagctccctcttcggagggagcatcagag

SEQ ID NO: 8293 - DNA, 88 bp, synthetic construct
  misc_feature 1..88: note = engineered ribonucleic acid scaffold (ERS) sequence
  source 1..88: mol_type = other DNA
actggcgcttctatctgattactctgagtgccaacaccagcgactatgtcgtatgggtaaagctccctcttcggagggagcatcagag

SEQ ID NO: 8294 - DNA, 88 bp, synthetic construct
  misc_feature 1..88: note = engineered ribonucleic acid scaffold (ERS) sequence
  source 1..88: mol_type = other DNA
actggcgcttctatctgattactctgagtgccagcaccagcgactatgtcgtatgggtaaagctccctcttcggagggagcatcagag

SEQ ID NO: 8295 - DNA, 88 bp, synthetic construct
  misc_feature 1..88: note = engineered ribonucleic acid scaffold (ERS) sequence
  source 1..88: mol_type = other DNA
actggcgcttctatctgattactctgagtgccatgaccagcgactatgtcgtatggctaaagctccctcttcggagggagcatcagag

SEQ ID NO: 8296 - DNA, 89 bp, synthetic construct
  misc_feature 1..89: note = engineered ribonucleic acid scaffold (ERS) sequence
  source 1..89: mol_type = other DNA
actggcgcttctatctgattactctgagtgccatgaccagcgactatgtcgtatgggctaaagctccctcttcggagggagcatcagag

SEQ ID NO: 8297 - DNA, 88 bp, synthetic construct
  misc_feature 1..88: note = engineered ribonucleic acid scaffold (ERS) sequence
  source 1..88: mol_type = other DNA
actggcgcttctatctgattactctgagtgccatgaccagcgactatgtcgtatgggtaaagctccctcttcggagggagcatcagag

SEQ ID NO: 8298 - DNA, 88 bp, synthetic construct
  misc_feature 1..88: note = engineered ribonucleic acid scaffold (ERS) sequence
  source 1..88: mol_type = other DNA
actggcgcttctatctgattactctgagtgccatccccagcgactatgtcgtatgggtaaagctccctcttcggagggagcatcagag

SEQ ID NO: 8299 - DNA, 89 bp, synthetic construct
  misc_feature 1..89: note = engineered ribonucleic acid scaffold (ERS) sequence
  source 1..89: mol_type = other DNA
actggcgcttctatctgattactctgagtgccatcgccagcgactatgtcgtatggcgtaaagctccctcttcggagggagcatcagag

SEQ ID NO: 8300 - DNA, 88 bp, synthetic construct
  misc_feature 1..88: note = engineered ribonucleic acid scaffold (ERS) sequence
  source 1..88: mol_type = other DNA
actggcgcttctatctgattactctgagtgccatcgccagcgactatgtcgtatgggtaaagctccctcttcggagggagcatcagag

SEQ ID NO: 8301 - DNA, 88 bp, synthetic construct
  misc_feature 1..88: note = engineered ribonucleic acid scaffold (ERS) sequence
  source 1..88: mol_type = other DNA
actggcgcttctatctgattactctgagtgccatctccagcgactatgtcgtatgggtaaagctccctcttcggagggagcatcagag

SEQ ID NO: 8302 - DNA, 88 bp, synthetic construct
  misc_feature 1..88: note = engineered ribonucleic acid scaffold (ERS) sequence
  source 1..88: mol_type = other DNA
actggcgcttctatctgattactctgagtgccatcacctgcgactatgtcgtaagggtaaagctccctcttcggagggagcatcagag

SEQ ID NO: 8303 - DNA, 88 bp, synthetic construct
  misc_feature 1..88: note = engineered ribonucleic acid scaffold (ERS) sequence
  source 1..88: mol_type = other DNA
actggcgcttctatctgattactctgagtgccatcaccagagactatgtcttatgggtaaagctccctcttcggagggagcatcagag

SEQ ID NO: 8304 - DNA, 88 bp, synthetic construct
  misc_feature 1..88: note = engineered ribonucleic acid scaffold (ERS) sequence
  source 1..88: mol_type = other DNA
actggcgcttctatctgattactctgagtgccatcaccagggactatgtcctatgggtaaagctccctcttcggagggagcatcagag

SEQ ID NO: 8305 - DNA, 89 bp, synthetic construct
  misc_feature 1..89: note = engineered ribonucleic acid scaffold (ERS) sequence
  source 1..89: mol_type = other DNA
actggcgcttctatctgattactctgagtgccatcaccaggcactatgtgctattgggtaaagctccctcttcggagggagcatcagag

SEQ ID NO: 8306 - DNA, 88 bp, synthetic construct
  misc_feature 1..88: note = engineered ribonucleic acid scaffold (ERS) sequence
  source 1..88: mol_type = other DNA
actggcgcttctatctgattactctgagtgccatcaccagccactatgtggtatgggtaaagctccctcttcggagggagcatcagag

SEQ ID NO: 8307 - DNA, 88 bp, synthetic construct
  misc_feature 1..88: note = engineered ribonucleic acid scaffold (ERS) sequence
  source 1..88: mol_type = other DNA
actggcgcttctatctgattactctgagtgccatcaccagctactatgtagtatgggtaaagctccctcttcggagggagcatcagag

SEQ ID NO: 8308 - DNA, 88 bp, synthetic construct
  misc_feature 1..88: note = engineered ribonucleic acid scaffold (ERS) sequence
  source 1..88: mol_type = other DNA
actggcgcttctatctgattactctgagtgccatcaccagcgattatgtcgtatgggtaaagctccctcttcggagggagcatcagag

SEQ ID NO: 8309 - DNA, 88 bp, synthetic construct
  misc_feature 1..88: note = engineered ribonucleic acid scaffold (ERS) sequence
  source 1..88: mol_type = other DNA
actggcgcttctatctgattactctgagtgccatcaccagcgacgatgtcgtatgggtaaagctccctcttcggagggagcatcagag

SEQ ID NO: 8310 - DNA, 88 bp, synthetic construct
  misc_feature 1..88: note = engineered ribonucleic acid scaffold (ERS) sequence
  source 1..88: mol_type = other DNA
actggcgcttctatctgattactctgagtgccatcaccagcgactctgtcgtatgggtaaagctccctcttcggagggagcatcagag

SEQ ID NO: 8311 - DNA, 88 bp, synthetic construct
  misc_feature 1..88: note = engineered ribonucleic acid scaffold (ERS) sequence
  source 1..88: mol_type = other DNA
actggcgcttctatctgattactctgagtgccatcaccagcgactatgtcgtgtgggtaaagctccctcttcggagggagcatcagag

SEQ ID NO: 8312 - DNA, 89 bp, synthetic construct
  misc_feature 1..89: note = engineered ribonucleic acid scaffold (ERS) sequence
  source 1..89: mol_type = other DNA
actggcgcttctatctgattactctgagtgccatcaccagcgactatgtcgtattgggtaaagctccctcttcggagggagcatcagag

SEQ ID NO: 8313 - DNA, 89 bp, synthetic construct
  misc_feature 1..89: note = engineered ribonucleic acid scaffold (ERS) sequence
  source 1..89: mol_type = other DNA
actggcgcttctatctgattactctgagtgccatcaccagcgactatgtcgtatggagtaaagctccctcttcggagggagcatcagag

SEQ ID NO: 8314 - DNA, 89 bp, synthetic construct
  misc_feature 1..89: note = engineered ribonucleic acid scaffold (ERS) sequence
  source 1..89: mol_type = other DNA
actggcgcttctatctgattactctgagtgccatcaccagcgactatgtcgtatggcgtaaagctccctcttcggagggagcatcagag

SEQ ID NO: 8315 - DNA, 89 bp, synthetic construct
  misc_feature 1..89: note = engineered ribonucleic acid scaffold (ERS) sequence
  source 1..89: mol_type = other DNA
actggcgcttctatctgattactctgagtgccatcaccagcgactatgtcgtatggtgtaaagctccctcttcggagggagcatcagag

SEQ ID NO: 8316 - DNA, 89 bp, synthetic construct
  misc_feature 1..89: note = engineered ribonucleic acid scaffold (ERS) sequence
  source 1..89: mol_type = other DNA
actggcgcttctatctgattactctgagtgccatcaccagcgactatgtcgtatgggctaaagctccctcttcggagggagcatcagag

SEQ ID NO: 8317 - DNA, 86 bp, synthetic construct
  misc_feature 1..86: note = engineered ribonucleic acid scaffold (ERS) sequence
  source 1..86: mol_type = other DNA
actggcgcttctatctgattactctgagtgccatcaccagcgactatgtcgtatgggtagctccctcttcggagggagcatcagag

SEQ ID NO: 8318 - DNA, 88 bp, synthetic construct
  misc_feature 1..88: note = engineered ribonucleic acid scaffold (ERS) sequence
  source 1..88: mol_type = other DNA
actggcgcttctatctgattactctgagtgccatcaccagcgactatgtcgtatgggtgaagctccctcttcggagggagcatcagag

SEQ ID NO: 8319 - DNA, 88 bp, synthetic construct
  misc_feature 1..88: note = engineered ribonucleic acid scaffold (ERS) sequence
  source 1..88: mol_type = other DNA
actggcgcttctatctgattactctgagtgccatcaccagcgactatgtcgtatgggtagagctccctcttcggagggagcatcagag

SEQ ID NO: 8320 - DNA, 88 bp, synthetic construct
  misc_feature 1..88: note = engineered ribonucleic acid scaffold (ERS) sequence
  source 1..88: mol_type = other DNA
actggcgcttctatctgattactctgagagccaacaccagcgactatgtcgtatgggtaaagctccctcttcggagggagcatcagag

SEQ ID NO: 8321 - DNA, 88 bp, synthetic construct
  misc_feature 1..88: note = engineered ribonucleic acid scaffold (ERS) sequence
  source 1..88: mol_type = other DNA
actggcgcttctatctgattactctgagagccagcaccagcgactatgtcgtatgggtaaagctccctcttcggagggagcatcagag

SEQ ID NO: 8322 - DNA, 88 bp, synthetic construct
  misc_feature 1..88: note = engineered ribonucleic acid scaffold (ERS) sequence
  source 1..88: mol_type = other DNA
actggcgcttctatctgattactctgagagccatgaccagcgactatgtcgtatggctaaagctccctcttcggagggagcatcagag

SEQ ID NO: 8323 - DNA, 89 bp, synthetic construct
  misc_feature 1..89: note = engineered ribonucleic acid scaffold (ERS) sequence
  source 1..89: mol_type = other DNA
actggcgcttctatctgattactctgagagccatgaccagcgactatgtcgtatgggctaaagctccctcttcggagggagcatcagag

SEQ ID NO: 8324 - DNA, 88 bp, synthetic construct
  misc_feature 1..88: note = engineered ribonucleic acid scaffold (ERS) sequence
  source 1..88: mol_type = other DNA
actggcgcttctatctgattactctgagagccatgaccagcgactatgtcgtatgggtaaagctccctcttcggagggagcatcagag

SEQ ID NO: 8325 - DNA, 88 bp, synthetic construct
  misc_feature 1..88: note = engineered ribonucleic acid scaffold (ERS) sequence
  source 1..88: mol_type = other DNA
actggcgcttctatctgattactctgagagccatccccagcgactatgtcgtatgggtaaagctccctcttcggagggagcatcagag

SEQ ID NO: 8326 - DNA, 89 bp, synthetic construct
  misc_feature 1..89: note = engineered ribonucleic acid scaffold (ERS) sequence
  source 1..89: mol_type = other DNA
actggcgcttctatctgattactctgagagccatcgccagcgactatgtcgtatggcgtaaagctccctcttcggagggagcatcagag

SEQ ID NO: 8327 - DNA, 88 bp, synthetic construct
  misc_feature 1..88: note = engineered ribonucleic acid scaffold (ERS) sequence
  source 1..88: mol_type = other DNA
actggcgcttctatctgattactctgagagccatcgccagcgactatgtcgtatgggtaaagctccctcttcggagggagcatcagag

SEQ ID NO: 8328 - DNA, 88 bp, synthetic construct
  misc_feature 1..88: note = engineered ribonucleic acid scaffold (ERS) sequence
  source 1..88: mol_type = other DNA
actggcgcttctatctgattactctgagagccatctccagcgactatgtcgtatgggtaaagctccctcttcggagggagcatcagag

SEQ ID NO: 8329 - DNA, 88 bp, synthetic construct
  misc_feature 1..88: note = engineered ribonucleic acid scaffold (ERS) sequence
  source 1..88: mol_type = other DNA
actggcgcttctatctgattactctgagagccatcacctgcgactatgtcgtaagggtaaagctccctcttcggagggagcatcagag

SEQ ID NO: 8330 - DNA, 88 bp, synthetic construct
  misc_feature 1..88: note = engineered ribonucleic acid scaffold (ERS) sequence
  source 1..88: mol_type = other DNA
actggcgcttctatctgattactctgagagccatcaccagagactatgtcttatgggtaaagctccctcttcggagggagcatcagag

SEQ ID NO: 8331 - DNA, 88 bp, synthetic construct
  misc_feature 1..88: note = engineered ribonucleic acid scaffold (ERS) sequence
  source 1..88: mol_type = other DNA
actggcgcttctatctgattactctgagagccatcaccagggactatgtcctatgggtaaagctccctcttcggagggagcatcagag

SEQ ID NO: 8332 - DNA, 89 bp, synthetic construct
  misc_feature 1..89: note = engineered ribonucleic acid scaffold (ERS) sequence
  source 1..89: mol_type = other DNA
actggcgcttctatctgattactctgagagccatcaccaggcactatgtgctattgggtaaagctccctcttcggagggagcatcagag

SEQ ID NO: 8333 - DNA, 88 bp, synthetic construct
  misc_feature 1..88: note = engineered ribonucleic acid scaffold (ERS) sequence
  source 1..88: mol_type = other DNA
actggcgcttctatctgattactctgagagccatcaccagccactatgtggtatgggtaaagctccctcttcggagggagcatcagag

SEQ ID NO: 8334 - DNA, 88 bp, synthetic construct
  misc_feature 1..88: note = engineered ribonucleic acid scaffold (ERS) sequence
  source 1..88: mol_type = other DNA
actggcgcttctatctgattactctgagagccatcaccagctactatgtagtatgggtaaagctccctcttcggagggagcatcagag

SEQ ID NO: 8335 - DNA, 88 bp, synthetic construct
  misc_feature 1..88: note = engineered ribonucleic acid scaffold (ERS) sequence
  source 1..88: mol_type = other DNA
actggcgcttctatctgattactctgagagccatcaccagcgattatgtcgtatgggtaaagctccctcttcggagggagcatcagag

SEQ ID NO: 8336 - DNA, 88 bp, synthetic construct
  misc_feature 1..88: note = engineered ribonucleic acid scaffold (ERS) sequence
  source 1..88: mol_type = other DNA
actggcgcttctatctgattactctgagagccatcaccagcgacgatgtcgtatgggtaaagctccctcttcggagggagcatcagag

SEQ ID NO: 8337 - DNA, 88 bp, synthetic construct
  misc_feature 1..88: note = engineered ribonucleic acid scaffold (ERS) sequence
  source 1..88: mol_type = other DNA
actggcgcttctatctgattactctgagagccatcaccagcgactctgtcgtatgggtaaagctccctcttcggagggagcatcagag

SEQ ID NO: 8338 - DNA, 88 bp, synthetic construct
  misc_feature 1..88: note = engineered ribonucleic acid scaffold (ERS) sequence
  source 1..88: mol_type = other DNA
actggcgcttctatctgattactctgagagccatcaccagcgactatgtcgtgtgggtaaagctccctcttcggagggagcatcagag

SEQ ID NO: 8339 - DNA, 89 bp, synthetic construct
  misc_feature 1..89: note = engineered ribonucleic acid scaffold (ERS) sequence
  source 1..89: mol_type = other DNA
actggcgcttctatctgattactctgagagccatcaccagcgactatgtcgtattgggtaaagctccctcttcggagggagcatcagag

SEQ ID NO: 8340 - DNA, 89 bp, synthetic construct
  misc_feature 1..89: note = engineered ribonucleic acid scaffold (ERS) sequence
  source 1..89: mol_type = other DNA
actggcgcttctatctgattactctgagagccatcaccagcgactatgtcgtatggagtaaagctccctcttcggagggagcatcagag

SEQ ID NO: 8341 - DNA, 89 bp, synthetic construct
  misc_feature 1..89: note = engineered ribonucleic acid scaffold (ERS) sequence
  source 1..89: mol_type = other DNA
actggcgcttctatctgattactctgagagccatcaccagcgactatgtcgtatggcgtaaagctccctcttcggagggagcatcagag

SEQ ID NO: 8342 - DNA, 89 bp, synthetic construct
  misc_feature 1..89: note = engineered ribonucleic acid scaffold (ERS) sequence
  source 1..89: mol_type = other DNA
actggcgcttctatctgattactctgagagccatcaccagcgactatgtcgtatggtgtaaagctccctcttcggagggagcatcagag

SEQ ID NO: 8343 - DNA, 89 bp, synthetic construct
  misc_feature 1..89: note = engineered ribonucleic acid scaffold (ERS) sequence
  source 1..89: mol_type = other DNA
actggcgcttctatctgattactctgagagccatcaccagcgactatgtcgtatgggctaaagctccctcttcggagggagcatcagag

SEQ ID NO: 8344 - DNA, 86 bp, synthetic construct
  misc_feature 1..86: note = engineered ribonucleic acid scaffold (ERS) sequence
  source 1..86: mol_type = other DNA
actggcgcttctatctgattactctgagagccatcaccagcgactatgtcgtatgggtagctccctcttcggagggagcatcagag

SEQ ID NO: 8345 - DNA, 88 bp, synthetic construct
  misc_feature 1..88: note = engineered ribonucleic acid scaffold (ERS) sequence
  source 1..88: mol_type = other DNA
actggcgcttctatctgattactctgagagccatcaccagcgactatgtcgtatgggtgaagctccctcttcggagggagcatcagag

SEQ ID NO: 8346 - DNA, 88 bp, synthetic construct
  misc_feature 1..88: note = engineered ribonucleic acid scaffold (ERS) sequence
  source 1..88: mol_type = other DNA
actggcgcttctatctgattactctgagagccatcaccagcgactatgtcgtatgggtagagctccctcttcggagggagcatcagag

SEQ ID NO: 8347 - DNA, 88 bp, synthetic construct
  misc_feature 1..88: note = engineered ribonucleic acid scaffold (ERS) sequence
  source 1..88: mol_type = other DNA
actggctcttctatctgattactctgagcgccaacaccagcgactatgtcgtatgggtaaagctccctcttcggagggagcatcagag

SEQ ID NO: 8348 - DNA, 88 bp, synthetic construct
  misc_feature 1..88: note = engineered ribonucleic acid scaffold (ERS) sequence
  source 1..88: mol_type = other DNA
actggctcttctatctgattactctgagcgccagcaccagcgactatgtcgtatgggtaaagctccctcttcggagggagcatcagag

SEQ ID NO: 8349 - DNA, 88 bp, synthetic construct
  misc_feature 1..88: note = engineered ribonucleic acid scaffold (ERS) sequence
  source 1..88: mol_type = other DNA
actggctcttctatctgattactctgagcgccatgaccagcgactatgtcgtatggctaaagctccctcttcggagggagcatcagag

SEQ ID NO: 8350 - DNA, 89 bp, synthetic construct
  misc_feature 1..89: note = engineered ribonucleic acid scaffold (ERS) sequence
  source 1..89: mol_type = other DNA
actggctcttctatctgattactctgagcgccatgaccagcgactatgtcgtatgggctaaagctccctcttcggagggagcatcagag

SEQ ID NO: 8351 - DNA, 88 bp, synthetic construct
  misc_feature 1..88: note = engineered ribonucleic acid scaffold (ERS) sequence
  source 1..88: mol_type = other DNA
actggctcttctatctgattactctgagcgccatgaccagcgactatgtcgtatgggtaaagctccctcttcggagggagcatcagag

SEQ ID NO: 8352 - DNA, 88 bp, synthetic construct
  misc_feature 1..88: note = engineered ribonucleic acid scaffold (ERS) sequence
  source 1..88: mol_type = other DNA
actggctcttctatctgattactctgagcgccatccccagcgactatgtcgtatgggtaaagctccctcttcggagggagcatcagag

SEQ ID NO: 8353 - DNA, 89 bp, synthetic construct
  misc_feature 1..89: note = engineered ribonucleic acid scaffold (ERS) sequence
  source 1..89: mol_type = other DNA
actggctcttctatctgattactctgagcgccatcgccagcgactatgtcgtatggcgtaaagctccctcttcggagggagcatcagag

SEQ ID NO: 8354 - DNA, 88 bp, synthetic construct
  misc_feature 1..88: note = engineered ribonucleic acid scaffold (ERS) sequence
  source 1..88: mol_type = other DNA
actggctcttctatctgattactctgagcgccatcgccagcgactatgtcgtatgggtaaagctccctcttcggagggagcatcagag

SEQ ID NO: 8355 - DNA, 88 bp, synthetic construct
  misc_feature 1..88: note = engineered ribonucleic acid scaffold (ERS) sequence
  source 1..88: mol_type = other DNA
actggctcttctatctgattactctgagcgccatctccagcgactatgtcgtatgggtaaagctccctcttcggagggagcatcagag

SEQ ID NO: 8356 - DNA, 88 bp, synthetic construct
  misc_feature 1..88: note = engineered ribonucleic acid scaffold (ERS) sequence
  source 1..88: mol_type = other DNA
actggctcttctatctgattactctgagcgccatcacctgcgactatgtcgtaagggtaaagctccctcttcggagggagcatcagag

SEQ ID NO: 8357 - DNA, 88 bp, synthetic construct
  misc_feature 1..88: note = engineered ribonucleic acid scaffold (ERS) sequence
  source 1..88: mol_type = other DNA
actggctcttctatctgattactctgagcgccatcaccagagactatgtcttatgggtaaagctccctcttcggagggagcatcagag

SEQ ID NO: 8358 - DNA, 88 bp, synthetic construct
  misc_feature 1..88: note = engineered ribonucleic acid scaffold (ERS) sequence
  source 1..88: mol_type = other DNA
actggctcttctatctgattactctgagcgccatcaccagggactatgtcctatgggtaaagctccctcttcggagggagcatcagag

SEQ ID NO: 8359 - DNA, 89 bp, synthetic construct
  misc_feature 1..89: note = engineered ribonucleic acid scaffold (ERS) sequence
  source 1..89: mol_type = other DNA
actggctcttctatctgattactctgagcgccatcaccaggcactatgtgctattgggtaaagctccctcttcggagggagcatcagag

SEQ ID NO: 8360 - DNA, 88 bp, synthetic construct
  misc_feature 1..88: note = engineered ribonucleic acid scaffold (ERS) sequence
  source 1..88: mol_type = other DNA
actggctcttctatctgattactctgagcgccatcaccagccactatgtggtatgggtaaagctccctcttcggagggagcatcagag

SEQ ID NO: 8361 - DNA, 88 bp, synthetic construct
  misc_feature 1..88: note = engineered ribonucleic acid scaffold (ERS) sequence
  source 1..88: mol_type = other DNA
actggctcttctatctgattactctgagcgccatcaccagctactatgtagtatgggtaaagctccctcttcggagggagcatcagag

SEQ ID NO: 8362 - DNA, 88 bp, synthetic construct
  misc_feature 1..88: note = engineered ribonucleic acid scaffold (ERS) sequence
  source 1..88: mol_type = other DNA
actggctcttctatctgattactctgagcgccatcaccagcgattatgtcgtatgggtaaagctccctcttcggagggagcatcagag

SEQ ID NO: 8363 - DNA, 88 bp, synthetic construct
  misc_feature 1..88: note = engineered ribonucleic acid scaffold (ERS) sequence
  source 1..88: mol_type = other DNA
actggctcttctatctgattactctgagcgccatcaccagcgacgatgtcgtatgggtaaagctccctcttcggagggagcatcagag

SEQ ID NO: 8364 - DNA, 88 bp, synthetic construct
  misc_feature 1..88: note = engineered ribonucleic acid scaffold (ERS) sequence
  source 1..88: mol_type = other DNA
actggctcttctatctgattactctgagcgccatcaccagcgactctgtcgtatgggtaaagctccctcttcggagggagcatcagag

SEQ ID NO: 8365 - DNA, 88 bp, synthetic construct
  misc_feature 1..88: note = engineered ribonucleic acid scaffold (ERS) sequence
  source 1..88: mol_type = other DNA
actggctcttctatctgattactctgagcgccatcaccagcgactatgtcgtgtgggtaaagctccctcttcggagggagcatcagag

SEQ ID NO: 8366 - DNA, 89 bp, synthetic construct
  misc_feature 1..89: note = engineered ribonucleic acid scaffold (ERS) sequence
  source 1..89: mol_type = other DNA
actggctcttctatctgattactctgagcgccatcaccagcgactatgtcgtattgggtaaagctccctcttcggagggagcatcagag

SEQ ID NO: 8367 - DNA, 89 bp, synthetic construct
  misc_feature 1..89: note = engineered ribonucleic acid scaffold (ERS) sequence
  source 1..89: mol_type = other DNA
actggctcttctatctgattactctgagcgccatcaccagcgactatgtcgtatggagtaaagctccctcttcggagggagcatcagag

SEQ ID NO: 8368 - DNA, 89 bp, synthetic construct
  misc_feature 1..89: note = engineered ribonucleic acid scaffold (ERS) sequence
  source 1..89: mol_type = other DNA
actggctcttctatctgattactctgagcgccatcaccagcgactatgtcgtatggcgtaaagctccctcttcggagggagcatcagag

SEQ ID NO: 8369 - DNA, 89 bp, synthetic construct
  misc_feature 1..89: note = engineered ribonucleic acid scaffold (ERS) sequence
  source 1..89: mol_type = other DNA
actggctcttctatctgattactctgagcgccatcaccagcgactatgtcgtatggtgtaaagctccctcttcggagggagcatcagag

SEQ ID NO: 8370 - DNA, 89 bp, synthetic construct
  misc_feature 1..89: note = engineered ribonucleic acid scaffold (ERS) sequence
  source 1..89: mol_type = other DNA
actggctcttctatctgattactctgagcgccatcaccagcgactatgtcgtatgggctaaagctccctcttcggagggagcatcagag

SEQ ID NO: 8371 - DNA, 86 bp, synthetic construct
  misc_feature 1..86: note = engineered ribonucleic acid scaffold (ERS) sequence
  source 1..86: mol_type = other DNA
actggctcttctatctgattactctgagcgccatcaccagcgactatgtcgtatgggtagctccctcttcggagggagcatcagag

SEQ ID NO: 8372 - DNA, 88 bp, synthetic construct
  misc_feature 1..88: note = engineered ribonucleic acid scaffold (ERS) sequence
  source 1..88: mol_type = other DNA
actggctcttctatctgattactctgagcgccatcaccagcgactatgtcgtatgggtgaagctccctcttcggagggagcatcagag

SEQ ID NO: 8373 - DNA, 88 bp, synthetic construct
  misc_feature 1..88: note = engineered ribonucleic acid scaffold (ERS) sequence
  source 1..88: mol_type = other DNA
actggctcttctatctgattactctgagcgccatcaccagcgactatgtcgtatgggtagagctccctcttcggagggagcatcagag

SEQ ID NO: 8374 - DNA, 88 bp, synthetic construct
  misc_feature 1..88: note = engineered ribonucleic acid scaffold (ERS) sequence
  source 1..88: mol_type = other DNA
actggctcttctatctgattactctgagggccaacaccagcgactatgtcgtatgggtaaagctccctcttcggagggagcatcagag

SEQ ID NO: 8375 - DNA, 88 bp, synthetic construct
  misc_feature 1..88: note = engineered ribonucleic acid scaffold (ERS) sequence
  source 1..88: mol_type = other DNA
actggctcttctatctgattactctgagggccagcaccagcgactatgtcgtatgggtaaagctccctcttcggagggagcatcagag

SEQ ID NO: 8376 - DNA, 88 bp, synthetic construct
  misc_feature 1..88: note = engineered ribonucleic acid scaffold (ERS) sequence
  source 1..88: mol_type = other DNA
actggctcttctatctgattactctgagggccatgaccagcgactatgtcgtatggctaaagctccctcttcggagggagcatcagag

SEQ ID NO: 8377 - DNA, 89 bp, synthetic construct
  misc_feature 1..89: note = engineered ribonucleic acid scaffold (ERS) sequence
  source 1..89: mol_type = other DNA
actggctcttctatctgattactctgagggccatgaccagcgactatgtcgtatgggctaaagctccctcttcggagggagcatcagag

SEQ ID NO: 8378 - DNA, 88 bp, synthetic construct
  misc_feature 1..88: note = engineered ribonucleic acid scaffold (ERS) sequence
  source 1..88: mol_type = other DNA
actggctcttctatctgattactctgagggccatgaccagcgactatgtcgtatgggtaaagctccctcttcggagggagcatcagag

SEQ ID NO: 8379 - DNA, 88 bp, synthetic construct
  misc_feature 1..88: note = engineered ribonucleic acid scaffold (ERS) sequence
  source 1..88: mol_type = other DNA
actggctcttctatctgattactctgagggccatccccagcgactatgtcgtatgggtaaagctccctcttcggagggagcatcagag

SEQ ID NO: 8380 - DNA, 89 bp, synthetic construct
  misc_feature 1..89: note = engineered ribonucleic acid scaffold (ERS) sequence
  source 1..89: mol_type = other DNA
actggctcttctatctgattactctgagggccatcgccagcgactatgtcgtatggcgtaaagctccctcttcggagggagcatcagag

SEQ ID NO: 8381 - DNA, 88 bp, synthetic construct
  misc_feature 1..88: note = engineered ribonucleic acid scaffold (ERS) sequence
  source 1..88: mol_type = other DNA
actggctcttctatctgattactctgagggccatcgccagcgactatgtcgtatgggtaaagctccctcttcggagggagcatcagag

SEQ ID NO: 8382 - DNA, 88 bp, synthetic construct
  misc_feature 1..88: note = engineered ribonucleic acid scaffold (ERS) sequence
  source 1..88: mol_type = other DNA
actggctcttctatctgattactctgagggccatctccagcgactatgtcgtatgggtaaagctccctcttcggagggagcatcagag

SEQ ID NO: 8383 - DNA, 88 bp, synthetic construct
  misc_feature 1..88: note = engineered ribonucleic acid scaffold (ERS) sequence
  source 1..88: mol_type = other DNA
actggctcttctatctgattactctgagggccatcacctgcgactatgtcgtaagggtaaagctccctcttcggagggagcatcagag

SEQ ID NO: 8384 - DNA, 88 bp, synthetic construct
  misc_feature 1..88: note = engineered ribonucleic acid scaffold (ERS) sequence
  source 1..88: mol_type = other DNA
actggctcttctatctgattactctgagggccatcaccagagactatgtcttatgggtaaagctccctcttcggagggagcatcagag

SEQ ID NO: 8385 - DNA, 88 bp, synthetic construct
  misc_feature 1..88: note = engineered ribonucleic acid scaffold (ERS) sequence
  source 1..88: mol_type = other DNA
actggctcttctatctgattactctgagggccatcaccagggactatgtcctatgggtaaagctccctcttcggagggagcatcagag

SEQ ID NO: 8386 - DNA, 89 bp, synthetic construct
  misc_feature 1..89: note = engineered ribonucleic acid scaffold (ERS) sequence
  source 1..89: mol_type = other DNA
actggctcttctatctgattactctgagggccatcaccaggcactatgtgctattgggtaaagctccctcttcggagggagcatcagag

SEQ ID NO: 8387 - DNA, 88 bp, synthetic construct
  misc_feature 1..88: note = engineered ribonucleic acid scaffold (ERS) sequence
  source 1..88: mol_type = other DNA
actggctcttctatctgattactctgagggccatcaccagccactatgtggtatgggtaaagctccctcttcggagggagcatcagag

SEQ ID NO: 8388 - DNA, 88 bp, synthetic construct
  misc_feature 1..88: note = engineered ribonucleic acid scaffold (ERS) sequence
  source 1..88: mol_type = other DNA
actggctcttctatctgattactctgagggccatcaccagctactatgtagtatgggtaaagctccctcttcggagggagcatcagag

SEQ ID NO: 8389 - DNA, 88 bp, synthetic construct
  misc_feature 1..88: note = engineered ribonucleic acid scaffold (ERS) sequence
  source 1..88: mol_type = other DNA
actggctcttctatctgattactctgagggccatcaccagcgattatgtcgtatgggtaaagctccctcttcggagggagcatcagag

SEQ ID NO: 8390 - DNA, 88 bp, synthetic construct
  misc_feature 1..88: note = engineered ribonucleic acid scaffold (ERS) sequence
  source 1..88: mol_type = other DNA
actggctcttctatctgattactctgagggccatcaccagcgacgatgtcgtatgggtaaagctccctcttcggagggagcatcagag

SEQ ID NO: 8391 - DNA, 88 bp, synthetic construct
  misc_feature 1..88: note = engineered ribonucleic acid scaffold (ERS) sequence
  source 1..88: mol_type = other DNA
actggctcttctatctgattactctgagggccatcaccagcgactctgtcgtatgggtaaagctccctcttcggagggagcatcagag

SEQ ID NO: 8392 - DNA, 88 bp, synthetic construct
  misc_feature 1..88: note = engineered ribonucleic acid scaffold (ERS) sequence
  source 1..88: mol_type = other DNA
actggctcttctatctgattactctgagggccatcaccagcgactatgtcgtgtgggtaaagctccctcttcggagggagcatcagag

SEQ ID NO: 8393 - DNA, 89 bp, synthetic construct
  misc_feature 1..89: note = engineered ribonucleic acid scaffold (ERS) sequence
  source 1..89: mol_type = other DNA
actggctcttctatctgattactctgagggccatcaccagcgactatgtcgtattgggtaaagctccctcttcggagggagcatcagag

SEQ ID NO: 8394 - DNA, 89 bp, synthetic construct
  misc_feature 1..89: note = engineered ribonucleic acid scaffold (ERS) sequence
  source 1..89: mol_type = other DNA
actggctcttctatctgattactctgagggccatcaccagcgactatgtcgtatggagtaaagctccctcttcggagggagcatcagag

SEQ ID NO: 8395 - DNA, 89 bp, synthetic construct
  misc_feature 1..89: note = engineered ribonucleic acid scaffold (ERS) sequence
  source 1..89: mol_type = other DNA
actggctcttctatctgattactctgagggccatcaccagcgactatgtcgtatggcgtaaagctccctcttcggagggagcatcagag

SEQ ID NO: 8396 - DNA, 89 bp, synthetic construct
  misc_feature 1..89: note = engineered ribonucleic acid scaffold (ERS) sequence
  source 1..89: mol_type = other DNA
actggctcttctatctgattactctgagggccatcaccagcgactatgtcgtatggtgtaaagctccctcttcggagggagcatcagag

SEQ ID NO: 8397 - DNA, 89 bp, synthetic construct
  misc_feature 1..89: note = engineered ribonucleic acid scaffold (ERS) sequence
  source 1..89: mol_type = other DNA
actggctcttctatctgattactctgagggccatcaccagcgactatgtcgtatgggctaaagctccctcttcggagggagcatcagag

SEQ ID NO: 8398 - DNA, 86 bp, synthetic construct
  misc_feature 1..86: note = engineered ribonucleic acid scaffold (ERS) sequence
  source 1..86: mol_type = other DNA
actggctcttctatctgattactctgagggccatcaccagcgactatgtcgtatgggtagctccctcttcggagggagcatcagag

SEQ ID NO: 8399 - DNA, 88 bp, synthetic construct
  misc_feature 1..88: note = engineered ribonucleic acid scaffold (ERS) sequence
  source 1..88: mol_type = other DNA
actggctcttctatctgattactctgagggccatcaccagcgactatgtcgtatgggtgaagctccctcttcggagggagcatcagag

SEQ ID NO: 8400 - DNA, 88 bp, synthetic construct
  misc_feature 1..88: note = engineered ribonucleic acid scaffold (ERS) sequence
  source 1..88: mol_type = other DNA
actggctcttctatctgattactctgagggccatcaccagcgactatgtcgtatgggtagagctccctcttcggagggagcatcagag

SEQ ID NO: 8401 - DNA, 88 bp, synthetic construct
  misc_feature 1..88: note = engineered ribonucleic acid scaffold (ERS) sequence
  source 1..88: mol_type = other DNA
actggctcttctatctgattactctgagtgccaacaccagcgactatgtcgtatgggtaaagctccctcttcggagggagcatcagag

SEQ ID NO: 8402 - DNA, 88 bp, synthetic construct
  misc_feature 1..88: note = engineered ribonucleic acid scaffold (ERS) sequence
  source 1..88: mol_type = other DNA
actggctcttctatctgattactctgagtgccagcaccagcgactatgtcgtatgggtaaagctccctcttcggagggagcatcagag

SEQ ID NO: 8403 - DNA, 88 bp, synthetic construct
  misc_feature 1..88: note = engineered ribonucleic acid scaffold (ERS) sequence
  source 1..88: mol_type = other DNA
actggctcttctatctgattactctgagtgccatgaccagcgactatgtcgtatggctaaagctccctcttcggagggagcatcagag

SEQ ID NO: 8404 - DNA, 89 bp, synthetic construct
  misc_feature 1..89: note = engineered ribonucleic acid scaffold (ERS) sequence
  source 1..89: mol_type = other DNA
actggctcttctatctgattactctgagtgccatgaccagcgactatgtcgtatgggctaaagctccctcttcggagggagcatcagag

SEQ ID NO: 8405 - DNA, 88 bp, synthetic construct
  misc_feature 1..88: note = engineered ribonucleic acid scaffold (ERS) sequence
  source 1..88: mol_type = other DNA
actggctcttctatctgattactctgagtgccatgaccagcgactatgtcgtatgggtaaagctccctcttcggagggagcatcagag

SEQ ID NO: 8406 - DNA, 88 bp, synthetic construct
  misc_feature 1..88: note = engineered ribonucleic acid scaffold (ERS) sequence
  source 1..88: mol_type = other DNA
actggctcttctatctgattactctgagtgccatccccagcgactatgtcgtatgggtaaagctccctcttcggagggagcatcagag

SEQ ID NO: 8407 - DNA, 89 bp, synthetic construct
  misc_feature 1..89: note = engineered ribonucleic acid scaffold (ERS) sequence
  source 1..89: mol_type = other DNA
actggctcttctatctgattactctgagtgccatcgccagcgactatgtcgtatggcgtaaagctccctcttcggagggagcatcagag

SEQ ID NO: 8408 - DNA, 88 bp, synthetic construct
  misc_feature 1..88: note = engineered ribonucleic acid scaffold (ERS) sequence
  source 1..88: mol_type = other DNA
actggctcttctatctgattactctgagtgccatcgccagcgactatgtcgtatgggtaaagctccctcttcggagggagcatcagag

SEQ ID NO: 8409 - DNA, 88 bp, synthetic construct
  misc_feature 1..88: note = engineered ribonucleic acid scaffold (ERS) sequence
  source 1..88: mol_type = other DNA
actggctcttctatctgattactctgagtgccatctccagcgactatgtcgtatgggtaaagctccctcttcggagggagcatcagag

SEQ ID NO: 8410 - DNA, 88 bp, synthetic construct
  misc_feature 1..88: note = engineered ribonucleic acid scaffold (ERS) sequence
  source 1..88: mol_type = other DNA
actggctcttctatctgattactctgagtgccatcacctgcgactatgtcgtaagggtaaagctccctcttcggagggagcatcagag

SEQ ID NO: 8411 - DNA, 88 bp, synthetic construct
  misc_feature 1..88: note = engineered ribonucleic acid scaffold (ERS) sequence
  source 1..88: mol_type = other DNA
actggctcttctatctgattactctgagtgccatcaccagagactatgtcttatgggtaaagctccctcttcggagggagcatcagag

SEQ ID NO: 8412 - DNA, 88 bp, synthetic construct
  misc_feature 1..88: note = engineered ribonucleic acid scaffold (ERS) sequence
  source 1..88: mol_type = other DNA
actggctcttctatctgattactctgagtgccatcaccagggactatgtcctatgggtaaagctccctcttcggagggagcatcagag

SEQ ID NO: 8413 - DNA, 89 bp, synthetic construct
  misc_feature 1..89: note = engineered ribonucleic acid scaffold (ERS) sequence
  source 1..89: mol_type = other DNA
actggctcttctatctgattactctgagtgccatcaccaggcactatgtgctattgggtaaagctccctcttcggagggagcatcagag

SEQ ID NO: 8414 - DNA, 88 bp, synthetic construct
  misc_feature 1..88: note = engineered ribonucleic acid scaffold (ERS) sequence
  source 1..88: mol_type = other DNA
actggctcttctatctgattactctgagtgccatcaccagccactatgtggtatgggtaaagctccctcttcggagggagcatcagag

SEQ ID NO: 8415 - DNA, 88 bp, synthetic construct
  misc_feature 1..88: note = engineered ribonucleic acid scaffold (ERS) sequence
  source 1..88: mol_type = other DNA
actggctcttctatctgattactctgagtgccatcaccagctactatgtagtatgggtaaagctccctcttcggagggagcatcagag

SEQ ID NO: 8416 - DNA, 88 bp, synthetic construct
  misc_feature 1..88: note = engineered ribonucleic acid scaffold (ERS) sequence
  source 1..88: mol_type = other DNA
actggctcttctatctgattactctgagtgccatcaccagcgattatgtcgtatgggtaaagctccctcttcggagggagcatcagag

SEQ ID NO: 8417 - DNA, 88 bp, synthetic construct
  misc_feature 1..88: note = engineered ribonucleic acid scaffold (ERS) sequence
  source 1..88: mol_type = other DNA
actggctcttctatctgattactctgagtgccatcaccagcgacgatgtcgtatgggtaaagctccctcttcggagggagcatcagag

SEQ ID NO: 8418 - DNA, 88 bp, synthetic construct
  misc_feature 1..88: note = engineered ribonucleic acid scaffold (ERS) sequence
  source 1..88: mol_type = other DNA
actggctcttctatctgattactctgagtgccatcaccagcgactctgtcgtatgggtaaagctccctcttcggagggagcatcagag

SEQ ID NO: 8419 - DNA, 88 bp, synthetic construct
  misc_feature 1..88: note = engineered ribonucleic acid scaffold (ERS) sequence
  source 1..88: mol_type = other DNA
actggctcttctatctgattactctgagtgccatcaccagcgactatgtcgtgtgggtaaagctccctcttcggagggagcatcagag

SEQ ID NO: 8420 - DNA, 89 bp, synthetic construct
  misc_feature 1..89: note = engineered ribonucleic acid scaffold (ERS) sequence
  source 1..89: mol_type = other DNA
actggctcttctatctgattactctgagtgccatcaccagcgactatgtcgtattgggtaaagctccctcttcggagggagcatcagag

SEQ ID NO: 8421 - DNA, 89 bp, synthetic construct
  misc_feature 1..89: note = engineered ribonucleic acid scaffold (ERS) sequence
  source 1..89: mol_type = other DNA
actggctcttctatctgattactctgagtgccatcaccagcgactatgtcgtatggagtaaagctccctcttcggagggagcatcagag

SEQ ID NO: 8422 - DNA, 89 bp, synthetic construct
  misc_feature 1..89: note = engineered ribonucleic acid scaffold (ERS) sequence
  source 1..89: mol_type = other DNA
actggctcttctatctgattactctgagtgccatcaccagcgactatgtcgtatggcgtaaagctccctcttcggagggagcatcagag

SEQ ID NO: 8423 - DNA, 89 bp, synthetic construct
  misc_feature 1..89: note = engineered ribonucleic acid scaffold (ERS) sequence
  source 1..89: mol_type = other DNA
actggctcttctatctgattactctgagtgccatcaccagcgactatgtcgtatggtgtaaagctccctcttcggagggagcatcagag

SEQ ID NO: 8424 - DNA, 89 bp, synthetic construct
  misc_feature 1..89: note = engineered ribonucleic acid scaffold (ERS) sequence
  source 1..89: mol_type = other DNA
actggctcttctatctgattactctgagtgccatcaccagcgactatgtcgtatgggctaaagctccctcttcggagggagcatcagag

SEQ ID NO: 8425 - DNA, 86 bp, synthetic construct
  misc_feature 1..86: note = engineered ribonucleic acid scaffold (ERS) sequence
  source 1..86: mol_type = other DNA
actggctcttctatctgattactctgagtgccatcaccagcgactatgtcgtatgggtagctccctcttcggagggagcatcagag

SEQ ID NO: 8426 - DNA, 88 bp, synthetic construct
  misc_feature 1..88: note = engineered ribonucleic acid scaffold (ERS) sequence
  source 1..88: mol_type = other DNA
actggctcttctatctgattactctgagtgccatcaccagcgactatgtcgtatgggtgaagctccctcttcggagggagcatcagag

SEQ ID NO: 8427 - DNA, 88 bp, synthetic construct
  misc_feature 1..88: note = engineered ribonucleic acid scaffold (ERS) sequence
  source 1..88: mol_type = other DNA
actggctcttctatctgattactctgagtgccatcaccagcgactatgtcgtatgggtagagctccctcttcggagggagcatcagag

SEQ ID NO: 8428 - DNA, 88 bp, synthetic construct
  misc_feature 1..88: note = engineered ribonucleic acid scaffold (ERS) sequence
  source 1..88: mol_type = other DNA
actggctcttctatctgattactctgagagccaacaccagcgactatgtcgtatgggtaaagctccctcttcggagggagcatcagag

SEQ ID NO: 8429 - DNA, 88 bp, synthetic construct
  misc_feature 1..88: note = engineered ribonucleic acid scaffold (ERS) sequence
  source 1..88: mol_type = other DNA
actggctcttctatctgattactctgagagccagcaccagcgactatgtcgtatgggtaaagctccctcttcggagggagcatcagag

SEQ ID NO: 8430 - DNA, 88 bp, synthetic construct
  misc_feature 1..88: note = engineered ribonucleic acid scaffold (ERS) sequence
  source 1..88: mol_type = other DNA
actggctcttctatctgattactctgagagccatgaccagcgactatgtcgtatggctaaagctccctcttcggagggagcatcagag

SEQ ID NO: 8431 - DNA, 89 bp, synthetic construct
  misc_feature 1..89: note = engineered ribonucleic acid scaffold (ERS) sequence
  source 1..89: mol_type = other DNA
actggctcttctatctgattactctgagagccatgaccagcgactatgtcgtatgggctaaagctccctcttcggagggagcatcagag

SEQ ID NO: 8432 - DNA, 88 bp, synthetic construct
  misc_feature 1..88: note = engineered ribonucleic acid scaffold (ERS) sequence
  source 1..88: mol_type = other DNA
actggctcttctatctgattactctgagagccatgaccagcgactatgtcgtatgggtaaagctccctcttcggagggagcatcagag

SEQ ID NO: 8433 - DNA, 88 bp, synthetic construct
  misc_feature 1..88: note = engineered ribonucleic acid scaffold (ERS) sequence
  source 1..88: mol_type = other DNA
actggctcttctatctgattactctgagagccatccccagcgactatgtcgtatgggtaaagctccctcttcggagggagcatcagag

SEQ ID NO: 8434 - DNA, 89 bp, synthetic construct
  misc_feature 1..89: note = engineered ribonucleic acid scaffold (ERS) sequence
  source 1..89: mol_type = other DNA
actggctcttctatctgattactctgagagccatcgccagcgactatgtcgtatggcgtaaagctccctcttcggagggagcatcagag

SEQ ID NO: 8435 - DNA, 88 bp, synthetic construct
  misc_feature 1..88: note = engineered ribonucleic acid scaffold (ERS) sequence
  source 1..88: mol_type = other DNA
actggctcttctatctgattactctgagagccatcgccagcgactatgtcgtatgggtaaagctccctcttcggagggagcatcagag

SEQ ID NO: 8436 - DNA, 88 bp, synthetic construct
  misc_feature 1..88: note = engineered ribonucleic acid scaffold (ERS) sequence
  source 1..88: mol_type = other DNA
actggctcttctatctgattactctgagagccatctccagcgactatgtcgtatgggtaaagctccctcttcggagggagcatcagag

SEQ ID NO: 8437 - DNA, 88 bp, synthetic construct
  misc_feature 1..88: note = engineered ribonucleic acid scaffold (ERS) sequence
  source 1..88: mol_type = other DNA
actggctcttctatctgattactctgagagccatcacctgcgactatgtcgtaagggtaaagctccctcttcggagggagcatcagag

SEQ ID NO: 8438 - DNA, 88 bp, synthetic construct
  misc_feature 1..88: note = engineered ribonucleic acid scaffold (ERS) sequence
  source 1..88: mol_type = other DNA
actggctcttctatctgattactctgagagccatcaccagagactatgtcttatgggtaaagctccctcttcggagggagcatcagag

SEQ ID NO: 8439 - DNA, 88 bp, synthetic construct
  misc_feature 1..88: note = engineered ribonucleic acid scaffold (ERS) sequence
  source 1..88: mol_type = other DNA
actggctcttctatctgattactctgagagccatcaccagggactatgtcctatgggtaaagctccctcttcggagggagcatcagag

SEQ ID NO: 8440 - DNA, 89 bp, synthetic construct
  misc_feature 1..89: note = engineered ribonucleic acid scaffold (ERS) sequence
  source 1..89: mol_type = other DNA
actggctcttctatctgattactctgagagccatcaccaggcactatgtgctattgggtaaagctccctcttcggagggagcatcagag

SEQ ID NO: 8441 - DNA, 88 bp, synthetic construct
  misc_feature 1..88: note = engineered ribonucleic acid scaffold (ERS) sequence
  source 1..88: mol_type = other DNA
actggctcttctatctgattactctgagagccatcaccagccactatgtggtatgggtaaagctccctcttcggagggagcatcagag

SEQ ID NO: 8442 - DNA, 88 bp, synthetic construct
  misc_feature 1..88: note = engineered ribonucleic acid scaffold (ERS) sequence
  source 1..88: mol_type = other DNA
actggctcttctatctgattactctgagagccatcaccagctactatgtagtatgggtaaagctccctcttcggagggagcatcagag

SEQ ID NO: 8443 - DNA, 88 bp, synthetic construct
  misc_feature 1..88: note = engineered ribonucleic acid scaffold (ERS) sequence
  source 1..88: mol_type = other DNA
actggctcttctatctgattactctgagagccatcaccagcgattatgtcgtatgggtaaagctccctcttcggagggagcatcagag

SEQ ID NO: 8444 - DNA, 88 bp, synthetic construct
  misc_feature 1..88: note = engineered ribonucleic acid scaffold (ERS) sequence
  source 1..88: mol_type = other DNA
actggctcttctatctgattactctgagagccatcaccagcgacgatgtcgtatgggtaaagctccctcttcggagggagcatcagag

SEQ ID NO: 8445 - DNA, 88 bp, synthetic construct
  misc_feature 1..88: note = engineered ribonucleic acid scaffold (ERS) sequence
  source 1..88: mol_type = other DNA
actggctcttctatctgattactctgagagccatcaccagcgactctgtcgtatgggtaaagctccctcttcggagggagcatcagag

SEQ ID NO: 8446 - DNA, 88 bp, synthetic construct
  misc_feature 1..88: note = engineered ribonucleic acid scaffold (ERS) sequence
  source 1..88: mol_type = other DNA
actggctcttctatctgattactctgagagccatcaccagcgactatgtcgtgtgggtaaagctccctcttcggagggagcatcagag

SEQ ID NO: 8447 - DNA, 89 bp, synthetic construct
  misc_feature 1..89: note = engineered ribonucleic acid scaffold (ERS) sequence
  source 1..89: mol_type = other DNA
actggctcttctatctgattactctgagagccatcaccagcgactatgtcgtattgggtaaagctccctcttcggagggagcatcagag

SEQ ID NO: 8448 - DNA, 89 bp, synthetic construct
  misc_feature 1..89: note = engineered ribonucleic acid scaffold (ERS) sequence
  source 1..89: mol_type = other DNA
actggctcttctatctgattactctgagagccatcaccagcgactatgtcgtatggagtaaagctccctcttcggagggagcatcagag

SEQ ID NO: 8449 - DNA, 89 bp, synthetic construct
  misc_feature 1..89: note = engineered ribonucleic acid scaffold (ERS) sequence
  source 1..89: mol_type = other DNA
actggctcttctatctgattactctgagagccatcaccagcgactatgtcgtatggcgtaaagctccctcttcggagggagcatcagag

SEQ ID NO: 8450 - DNA, 89 bp, synthetic construct
  misc_feature 1..89: note = engineered ribonucleic acid scaffold (ERS) sequence
  source 1..89: mol_type = other DNA
actggctcttctatctgattactctgagagccatcaccagcgactatgtcgtatggtgtaaagctccctcttcggagggagcatcagag

SEQ ID NO: 8451 - DNA, 89 bp, synthetic construct
  misc_feature 1..89: note = engineered ribonucleic acid scaffold (ERS) sequence
  source 1..89: mol_type = other DNA
actggctcttctatctgattactctgagagccatcaccagcgactatgtcgtatgggctaaagctccctcttcggagggagcatcagag

SEQ ID NO: 8452 - DNA, 86 bp, synthetic construct
  misc_feature 1..86: note = engineered ribonucleic acid scaffold (ERS) sequence
  source 1..86: mol_type = other DNA
actggctcttctatctgattactctgagagccatcaccagcgactatgtcgtatgggtagctccctcttcggagggagcatcagag

SEQ ID NO: 8453 - DNA, 88 bp, synthetic construct
  misc_feature 1..88: note = engineered ribonucleic acid scaffold (ERS) sequence
  source 1..88: mol_type = other DNA
actggctcttctatctgattactctgagagccatcaccagcgactatgtcgtatgggtgaagctccctcttcggagggagcatcagag

SEQ ID NO: 8454 - DNA, 88 bp, synthetic construct
  misc_feature 1..88: note = engineered ribonucleic acid scaffold (ERS) sequence
  source 1..88: mol_type = other DNA
actggctcttctatctgattactctgagagccatcaccagcgactatgtcgtatgggtagagctccctcttcggagggagcatcagag

SEQ ID NO: 8455 - DNA, 88 bp, synthetic construct
  misc_feature 1..88: note = engineered ribonucleic acid scaffold (ERS) sequence
  source 1..88: mol_type = other DNA
actggcggttctatctgattactctgagcgccaacaccagcgactatgtcgtatgggtaaagctccctcttcggagggagcatcagag

SEQ ID NO: 8456 - DNA, 88 bp, synthetic construct
  misc_feature 1..88: note = engineered ribonucleic acid scaffold (ERS) sequence
  source 1..88: mol_type = other DNA
actggcggttctatctgattactctgagcgccagcaccagcgactatgtcgtatgggtaaagctccctcttcggagggagcatcagag

SEQ ID NO: 8457 - DNA, 88 bp, synthetic construct
  misc_feature 1..88: note = engineered ribonucleic acid scaffold (ERS) sequence
  source 1..88: mol_type = other DNA
actggcggttctatctgattactctgagcgccatgaccagcgactatgtcgtatggctaaagctccctcttcggagggagcatcagag

SEQ ID NO: 8458 - DNA, 89 bp, synthetic construct
  misc_feature 1..89: note = engineered ribonucleic acid scaffold (ERS) sequence
  source 1..89: mol_type = other DNA
actggcggttctatctgattactctgagcgccatgaccagcgactatgtcgtatgggctaaagctccctcttcggagggagcatcagag

SEQ ID NO: 8459 - DNA, 88 bp, synthetic construct
  misc_feature 1..88: note = engineered ribonucleic acid scaffold (ERS) sequence
  source 1..88: mol_type = other DNA
actggcggttctatctgattactctgagcgccatgaccagcgactatgtcgtatgggtaaagctccctcttcggagggagcatcagag

SEQ ID NO: 8460 - DNA, 88 bp, synthetic construct
  misc_feature 1..88: note = engineered ribonucleic acid scaffold (ERS) sequence
  source 1..88: mol_type = other DNA
actggcggttctatctgattactctgagcgccatccccagcgactatgtcgtatgggtaaagctccctcttcggagggagcatcagag

SEQ ID NO: 8461 - DNA, 89 bp, synthetic construct
  misc_feature 1..89: note = engineered ribonucleic acid scaffold (ERS) sequence
  source 1..89: mol_type = other DNA
actggcggttctatctgattactctgagcgccatcgccagcgactatgtcgtatggcgtaaagctccctcttcggagggagcatcagag

SEQ ID NO: 8462 - DNA, 88 bp, synthetic construct
  misc_feature 1..88: note = engineered ribonucleic acid scaffold (ERS) sequence
  source 1..88: mol_type = other DNA
actggcggttctatctgattactctgagcgccatcgccagcgactatgtcgtatgggtaaagctccctcttcggagggagcatcagag

SEQ ID NO: 8463 - DNA, 88 bp, synthetic construct
  misc_feature 1..88: note = engineered ribonucleic acid scaffold (ERS) sequence
  source 1..88: mol_type = other DNA
actggcggttctatctgattactctgagcgccatctccagcgactatgtcgtatgggtaaagctccctcttcggagggagcatcagag

SEQ ID NO: 8464 - DNA, 88 bp, synthetic construct
  misc_feature 1..88: note = engineered ribonucleic acid scaffold (ERS) sequence
  source 1..88: mol_type = other DNA
actggcggttctatctgattactctgagcgccatcacctgcgactatgtcgtaagggtaaagctccctcttcggagggagcatcagag

SEQ ID NO: 8465 - DNA, 88 bp, synthetic construct
  misc_feature 1..88: note = engineered ribonucleic acid scaffold (ERS) sequence
  source 1..88: mol_type = other DNA
actggcggttctatctgattactctgagcgccatcaccagagactatgtcttatgggtaaagctccctcttcggagggagcatcagag

SEQ ID NO: 8466 - DNA, 88 bp, synthetic construct
  misc_feature 1..88: note = engineered ribonucleic acid scaffold (ERS) sequence
  source 1..88: mol_type = other DNA
actggcggttctatctgattactctgagcgccatcaccagggactatgtcctatgggtaaagctccctcttcggagggagcatcagag

SEQ ID NO: 8467 - DNA, 89 bp, synthetic construct
  misc_feature 1..89: note = engineered ribonucleic acid scaffold (ERS) sequence
  source 1..89: mol_type = other DNA
actggcggttctatctgattactctgagcgccatcaccaggcactatgtgctattgggtaaagctccctcttcggagggagcatcagag

SEQ ID NO: 8468 - DNA, 88 bp, synthetic construct
  misc_feature 1..88: note = engineered ribonucleic acid scaffold (ERS) sequence
  source 1..88: mol_type = other DNA
actggcggttctatctgattactctgagcgccatcaccagccactatgtggtatgggtaaagctccctcttcggagggagcatcagag

SEQ ID NO: 8469 - DNA, 88 bp, synthetic construct
  misc_feature 1..88: note = engineered ribonucleic acid scaffold (ERS) sequence
  source 1..88: mol_type = other DNA
actggcggttctatctgattactctgagcgccatcaccagctactatgtagtatgggtaaagctccctcttcggagggagcatcagag

SEQ ID NO: 8470 - DNA, 88 bp, synthetic construct
  misc_feature 1..88: note = engineered ribonucleic acid scaffold (ERS) sequence
  source 1..88: mol_type = other DNA
actggcggttctatctgattactctgagcgccatcaccagcgattatgtcgtatgggtaaagctccctcttcggagggagcatcagag

SEQ ID NO: 8471 - DNA, 88 bp, synthetic construct
  misc_feature 1..88: note = engineered ribonucleic acid scaffold (ERS) sequence
  source 1..88: mol_type = other DNA
actggcggttctatctgattactctgagcgccatcaccagcgacgatgtcgtatgggtaaagctccctcttcggagggagcatcagag

SEQ ID NO: 8472 - DNA, 88 bp, synthetic construct
  misc_feature 1..88: note = engineered ribonucleic acid scaffold (ERS) sequence
  source 1..88: mol_type = other DNA
actggcggttctatctgattactctgagcgccatcaccagcgactctgtcgtatgggtaaagctccctcttcggagggagcatcagag

SEQ ID NO: 8473 - DNA, 88 bp, synthetic construct
  misc_feature 1..88: note = engineered ribonucleic acid scaffold (ERS) sequence
  source 1..88: mol_type = other DNA
actggcggttctatctgattactctgagcgccatcaccagcgactatgtcgtgtgggtaaagctccctcttcggagggagcatcagag

SEQ ID NO: 8474 - DNA, 89 bp, synthetic construct
  misc_feature 1..89: note = engineered ribonucleic acid scaffold (ERS) sequence
  source 1..89: mol_type = other DNA
actggcggttctatctgattactctgagcgccatcaccagcgactatgtcgtattgggtaaagctccctcttcggagggagcatcagag

SEQ ID NO: 8475 - DNA, 89 bp, synthetic construct
  misc_feature 1..89: note = engineered ribonucleic acid scaffold (ERS) sequence
  source 1..89: mol_type = other DNA
actggcggttctatctgattactctgagcgccatcaccagcgactatgtcgtatggagtaaagctccctcttcggagggagcatcagag

SEQ ID NO: 8476 - DNA, 89 bp, synthetic construct
  misc_feature 1..89: note = engineered ribonucleic acid scaffold (ERS) sequence
  source 1..89: mol_type = other DNA
actggcggttctatctgattactctgagcgccatcaccagcgactatgtcgtatggcgtaaagctccctcttcggagggagcatcagag

SEQ ID NO: 8477 - DNA, 89 bp, synthetic construct
  misc_feature 1..89: note = engineered ribonucleic acid scaffold (ERS) sequence
  source 1..89: mol_type = other DNA
actggcggttctatctgattactctgagcgccatcaccagcgactatgtcgtatggtgtaaagctccctcttcggagggagcatcagag

SEQ ID NO: 8478 - DNA, 89 bp, synthetic construct
  misc_feature 1..89: note = engineered ribonucleic acid scaffold (ERS) sequence
  source 1..89: mol_type = other DNA
actggcggttctatctgattactctgagcgccatcaccagcgactatgtcgtatgggctaaagctccctcttcggagggagcatcagag

SEQ ID NO: 8479 - DNA, 86 bp, synthetic construct
  misc_feature 1..86: note = engineered ribonucleic acid scaffold (ERS) sequence
  source 1..86: mol_type = other DNA
actggcggttctatctgattactctgagcgccatcaccagcgactatgtcgtatgggtagctccctcttcggagggagcatcagag

SEQ ID NO: 8480 - DNA, 88 bp, synthetic construct
  misc_feature 1..88: note = engineered ribonucleic acid scaffold (ERS) sequence
  source 1..88: mol_type = other DNA
actggcggttctatctgattactctgagcgccatcaccagcgactatgtcgtatgggtgaagctccctcttcggagggagcatcagag

SEQ ID NO: 8481 - DNA, 88 bp, synthetic construct
  misc_feature 1..88: note = engineered ribonucleic acid scaffold (ERS) sequence
  source 1..88: mol_type = other DNA
actggcggttctatctgattactctgagcgccatcaccagcgactatgtcgtatgggtagagctccctcttcggagggagcatcagag

SEQ ID NO: 8482 - DNA, 88 bp, synthetic construct
  misc_feature 1..88: note = engineered ribonucleic acid scaffold (ERS) sequence
  source 1..88: mol_type = other DNA
actggcggttctatctgattactctgagagccaacaccagcgactatgtcgtatgggtaaagctccctcttcggagggagcatcagag

SEQ ID NO: 8483 - DNA, 88 bp, synthetic construct
  misc_feature 1..88: note = engineered ribonucleic acid scaffold (ERS) sequence
  source 1..88: mol_type = other DNA
actggcggttctatctgattactctgagagccagcaccagcgactatgtcgtatgggtaaagctccctcttcggagggagcatcagag

SEQ ID NO: 8484 - DNA, 88 bp, synthetic construct
  misc_feature 1..88: note = engineered ribonucleic acid scaffold (ERS) sequence
  source 1..88: mol_type = other DNA
actggcggttctatctgattactctgagagccatgaccagcgactatgtcgtatggctaaagctccctcttcggagggagcatcagag

SEQ ID NO: 8485 - DNA, 89 bp, synthetic construct
  misc_feature 1..89: note = engineered ribonucleic acid scaffold (ERS) sequence
  source 1..89: mol_type = other DNA
actggcggttctatctgattactctgagagccatgaccagcgactatgtcgtatgggctaaagctccctcttcggagggagcatcagag

SEQ ID NO: 8486 - DNA, 88 bp, synthetic construct
  misc_feature 1..88: note = engineered ribonucleic acid scaffold (ERS) sequence
  source 1..88: mol_type = other DNA
actggcggttctatctgattactctgagagccatgaccagcgactatgtcgtatgggtaaagctccctcttcggagggagcatcagag

SEQ ID NO: 8487 - DNA, 88 bp, synthetic construct
  misc_feature 1..88: note = engineered ribonucleic acid scaffold (ERS) sequence
  source 1..88: mol_type = other DNA
actggcggttctatctgattactctgagagccatccccagcgactatgtcgtatgggtaaagctccctcttcggagggagcatcagag

SEQ ID NO: 8488 - DNA, 89 bp, synthetic construct
  misc_feature 1..89: note = engineered ribonucleic acid scaffold (ERS) sequence
  source 1..89: mol_type = other DNA
actggcggttctatctgattactctgagagccatcgccagcgactatgtcgtatggcgtaaagctccctcttcggagggagcatcagag

SEQ ID NO: 8489 - DNA, 88 bp, synthetic construct
  misc_feature 1..88: note = engineered ribonucleic acid scaffold (ERS) sequence
  source 1..88: mol_type = other DNA
actggcggttctatctgattactctgagagccatcgccagcgactatgtcgtatgggtaaagctccctcttcggagggagcatcagag

SEQ ID NO: 8490 - DNA, 88 bp, synthetic construct
  misc_feature 1..88: note = engineered ribonucleic acid scaffold (ERS) sequence
  source 1..88: mol_type = other DNA
actggcggttctatctgattactctgagagccatctccagcgactatgtcgtatgggtaaagctccctcttcggagggagcatcagag

SEQ ID NO: 8491 - DNA, 88 bp, synthetic construct
  misc_feature 1..88: note = engineered ribonucleic acid scaffold (ERS) sequence
  source 1..88: mol_type = other DNA
actggcggttctatctgattactctgagagccatcacctgcgactatgtcgtaagggtaaagctccctcttcggagggagcatcagag

SEQ ID NO: 8492 - DNA, 88 bp, synthetic construct
  misc_feature 1..88: note = engineered ribonucleic acid scaffold (ERS) sequence
  source 1..88: mol_type = other DNA
actggcggttctatctgattactctgagagccatcaccagagactatgtcttatgggtaaagctccctcttcggagggagcatcagag

SEQ ID NO: 8493 - DNA, 88 bp, synthetic construct
  misc_feature 1..88: note = engineered ribonucleic acid scaffold (ERS) sequence
  source 1..88: mol_type = other DNA
actggcggttctatctgattactctgagagccatcaccagggactatgtcctatgggtaaagctccctcttcggagggagcatcagag

SEQ ID NO: 8494 - DNA, 89 bp, synthetic construct
  misc_feature 1..89: note = engineered ribonucleic acid scaffold (ERS) sequence
  source 1..89: mol_type = other DNA
actggcggttctatctgattactctgagagccatcaccaggcactatgtgctattgggtaaagctccctcttcggagggagcatcagag

SEQ ID NO: 8495 - DNA, 88 bp, synthetic construct
  misc_feature 1..88: note = engineered ribonucleic acid scaffold (ERS) sequence
  source 1..88: mol_type = other DNA
actggcggttctatctgattactctgagagccatcaccagccactatgtggtatgggtaaagctccctcttcggagggagcatcagag

SEQ ID NO: 8496 - DNA, 88 bp, synthetic construct
  misc_feature 1..88: note = engineered ribonucleic acid scaffold (ERS) sequence
  source 1..88: mol_type = other DNA
actggcggttctatctgattactctgagagccatcaccagctactatgtagtatgggtaaagctccctcttcggagggagcatcagag

SEQ ID NO: 8497 - DNA, 88 bp, synthetic construct
  misc_feature 1..88: note = engineered ribonucleic acid scaffold (ERS) sequence
  source 1..88: mol_type = other DNA
actggcggttctatctgattactctgagagccatcaccagcgattatgtcgtatgggtaaagctccctcttcggagggagcatcagag

SEQ ID NO: 8498 - DNA, 88 bp, synthetic construct
  misc_feature 1..88: note = engineered ribonucleic acid scaffold (ERS) sequence
  source 1..88: mol_type = other DNA
actggcggttctatctgattactctgagagccatcaccagcgacgatgtcgtatgggtaaagctccctcttcggagggagcatcagag

SEQ ID NO: 8499 - DNA, 88 bp, synthetic construct
  misc_feature 1..88: note = engineered ribonucleic acid scaffold (ERS) sequence
  source 1..88: mol_type = other DNA
actggcggttctatctgattactctgagagccatcaccagcgactctgtcgtatgggtaaagctccctcttcggagggagcatcagag

SEQ ID NO: 8500 - DNA, 88 bp, synthetic construct
  misc_feature 1..88: note = engineered ribonucleic acid scaffold (ERS) sequence
  source 1..88: mol_type = other DNA
actggcggttctatctgattactctgagagccatcaccagcgactatgtcgtgtgggtaaagctccctcttcggagggagcatcagag

SEQ ID NO: 8501 - DNA, 89 bp, synthetic construct
  misc_feature 1..89: note = engineered ribonucleic acid scaffold (ERS) sequence
  source 1..89: mol_type = other DNA
actggcggttctatctgattactctgagagccatcaccagcgactatgtcgtattgggtaaagctccctcttcggagggagcatcagag

SEQ ID NO: 8502 - DNA, 89 bp, synthetic construct
  misc_feature 1..89: note = engineered ribonucleic acid scaffold (ERS) sequence
  source 1..89: mol_type = other DNA
actggcggttctatctgattactctgagagccatcaccagcgactatgtcgtatggagtaaagctccctcttcggagggagcatcagag

SEQ ID NO: 8503 - DNA, 89 bp, synthetic construct
  misc_feature 1..89: note = engineered ribonucleic acid scaffold (ERS) sequence
  source 1..89: mol_type = other DNA
actggcggttctatctgattactctgagagccatcaccagcgactatgtcgtatggcgtaaagctccctcttcggagggagcatcagag

SEQ ID NO: 8504 - DNA, 89 bp, synthetic construct
  misc_feature 1..89: note = engineered ribonucleic acid scaffold (ERS) sequence
  source 1..89: mol_type = other DNA
actggcggttctatctgattactctgagagccatcaccagcgactatgtcgtatggtgtaaagctccctcttcggagggagcatcagag

SEQ ID NO: 8505 - DNA, 89 bp, synthetic construct
  misc_feature 1..89: note = engineered ribonucleic acid scaffold (ERS) sequence
  source 1..89: mol_type = other DNA
actggcggttctatctgattactctgagagccatcaccagcgactatgtcgtatgggctaaagctccctcttcggagggagcatcagag

SEQ ID NO: 8506 - DNA, 86 bp, synthetic construct
  misc_feature 1..86: note = engineered ribonucleic acid scaffold (ERS) sequence
  source 1..86: mol_type = other DNA
actggcggttctatctgattactctgagagccatcaccagcgactatgtcgtatgggtagctccctcttcggagggagcatcagag

SEQ ID NO: 8507 - DNA, 88 bp, synthetic construct
  misc_feature 1..88: note = engineered ribonucleic acid scaffold (ERS) sequence
  source 1..88: mol_type = other DNA
actggcggttctatctgattactctgagagccatcaccagcgactatgtcgtatgggtgaagctccctcttcggagggagcatcagag

SEQ ID NO: 8508 - DNA, 88 bp, synthetic construct
  misc_feature 1..88: note = engineered ribonucleic acid scaffold (ERS) sequence
  source 1..88: mol_type = other DNA
actggcggttctatctgattactctgagagccatcaccagcgactatgtcgtatgggtagagctccctcttcggagggagcatcagag

SEQ ID NO: 8509 - DNA, 88 bp, synthetic construct
  misc_feature 1..88: note = engineered ribonucleic acid scaffold (ERS) sequence
  source 1..88: mol_type = other DNA
acacacggttctatctgattactctcccgtgttcaccagcgactatgtcgtagtgggtaaagctccctcttcggagggagcatcagac

SEQ ID NO: 8510 - DNA, 88 bp, synthetic construct
  misc_feature 1..88: note = engineered ribonucleic acid scaffold (ERS) sequence
  source 1..88: mol_type = other DNA
acacacggttctatctgattactttgccgtgttcaccagcgactatgtcgtagtgggtaaagctccctcttcggagggagcatcagag

SEQ ID NO: 8511 - DNA, 88 bp, synthetic construct
  misc_feature 1..88: note = engineered ribonucleic acid scaffold (ERS) sequence
  source 1..88: mol_type = other DNA
acacacggttctatctgattactttgccgtgttcaccagcgactatgtcgtagtgggtaaagctccctcttcggagggagcatcaaag

SEQ ID NO: 8512 - DNA, 88 bp, synthetic construct
  misc_feature 1..88: note = engineered ribonucleic acid scaffold (ERS) sequence
  source 1..88: mol_type = other DNA
acacacggttctatctgattagtctcccgtgttcaccagcgactatgtcgtagtgggtaaagctccctcttcggagggagcatgagac

SEQ ID NO: 8513 - DNA, 88 bp, synthetic construct
  misc_feature 1..88: note = engineered ribonucleic acid scaffold (ERS) sequence
  source 1..88: mol_type = other DNA
acacacggttctatctgattagtctgccgtgttcaccagcgactatgtcgtagtgggtaaagctccctcttcggagggagcatcagac

SEQ ID NO: 8514 - DNA, 88 bp, synthetic construct
  misc_feature 1..88: note = engineered ribonucleic acid scaffold (ERS) sequence
  source 1..88: mol_type = other DNA
acacacggttctatctgattactctcccgtgttcaccagcgactatgtcgtagtgggtaaagctccctcttcggagggagcatgagag

SEQ ID NO: 8515 - DNA, 88 bp, synthetic construct
  misc_feature 1..88: note = engineered ribonucleic acid scaffold (ERS) sequence
  source 1..88: mol_type = other DNA
acacacggtcccatctgattaccccgccgtgttcaccagcgactatgtcgtagtgggtaaagctccctcttcggagggagcatcgggg

SEQ ID NO: 8516 - DNA, 88 bp, synthetic construct
  misc_feature 1..88: note = engineered ribonucleic acid scaffold (ERS) sequence
  source 1..88: mol_type = other DNA
acacacggtcctatctgattactccgccgtgttcaccagcgactatgtcgtagtgggtaaagctccctcttcggagggagcatcggag

SEQ ID NO: 8517 - DNA, 88 bp, synthetic construct
  misc_feature 1..88: note = engineered ribonucleic acid scaffold (ERS) sequence
  source 1..88: mol_type = other DNA
acacacggtgggatctgattaccccgccgtgttcaccagcgactatgtcgtagtgggtaaagctccctcttcggagggagcatcgggg

SEQ ID NO: 8518 - DNA, 88 bp, synthetic construct
  misc_feature 1..88: note = engineered ribonucleic acid scaffold (ERS) sequence
  source 1..88: mol_type = other DNA
acacacggtggtatctgattactccgccgtgttcaccagcgactatgtcgtagtgggtaaagctccctcttcggagggagcatcggag

SEQ ID NO: 8519 - DNA, 88 bp, synthetic construct
  misc_feature 1..88: note = engineered ribonucleic acid scaffold (ERS) sequence
  source 1..88: mol_type = other DNA
acacacggttccatctgattaccctgccgtgttcaccagcgactatgtcgtagtgggtaaagctccctcttcggagggagcatcaggg

SEQ ID NO: 8520 - DNA, 88 bp, synthetic construct
  misc_feature 1..88: note = engineered ribonucleic acid scaffold (ERS) sequence
  source 1..88: mol_type = other DNA
acacacggttggatctgattaccctgccgtgttcaccagcgactatgtcgtagtgggtaaagctccctcttcggagggagcatcaggg

SEQ ID NO: 8521 - DNA, 88 bp, synthetic construct
  misc_feature 1..88: note = engineered ribonucleic acid scaffold (ERS) sequence
  source 1..88: mol_type = other DNA
acacacggttgtatctgattactctgccgtgttcaccagcgactatgtcgtagtgggtaaagctccctcttcggagggagcatcagag

SEQ ID NO: 8522 - DNA, 88 bp, synthetic construct
  misc_feature 1..88: note = engineered ribonucleic acid scaffold (ERS) sequence
  source 1..88: mol_type = other DNA
acacacggttttatctgattactttgccgtgttcaccagcgactatgtcgtagtgggtaaagctccctcttcggagggagcatcagag

SEQ ID NO: 8523 - DNA, 88 bp, synthetic construct
  misc_feature 1..88: note = engineered ribonucleic acid scaffold (ERS) sequence
  source 1..88: mol_type = other DNA
acacacggttttatctgattactctgccgtgttcaccagcgactatgtcgtagtgggtaaagctccctcttcggagggagcatcagag

SEQ ID NO: 8524 - DNA, 88 bp, synthetic construct
  misc_feature 1..88: note = engineered ribonucleic acid scaffold (ERS) sequence
  source 1..88: mol_type = other DNA
acacacggttttatctgattactctgccgtgttcaccagcgactatgtcgtagtgggtaaagctccctcttcggagggagcatcaaag

SEQ ID NO: 8525 - DNA, 88 bp, synthetic construct
  misc_feature 1..88: note = engineered ribonucleic acid scaffold (ERS) sequence
  source 1..88: mol_type = other DNA
acacacggttctatctgattactctgccgtgttcaccagcgactatgtcgtagtgggtaaagctccctcttcggagggagcctcagag

SEQ ID NO: 8526 - DNA, 88 bp, synthetic construct
  misc_feature 1..88: note = engineered ribonucleic acid scaffold (ERS) sequence
  source 1..88: mol_type = other DNA
acacacggttctatctgattactctgccgtgttcaccagcgactatgtcgtagtgggtaaagctccctcttcggagggagcgtcagag

SEQ ID NO: 8527 - DNA, 88 bp, synthetic construct
  misc_feature 1..88: note = engineered ribonucleic acid scaffold (ERS) sequence
  source 1..88: mol_type = other DNA
acacacggttctatctgattactctgccgtgttcaccagcgactatgtcgtagtgggtaaagctccctcttcggagggagcatcaaag

SEQ ID NO: 8528 - DNA, 88 bp, synthetic construct
  misc_feature 1..88: note = engineered ribonucleic acid scaffold (ERS) sequence
  source 1..88: mol_type = other DNA
acactggtttctatctgattactctcaccagttcaccagcgactatgtcgtagtgggtaaagctccctcttcggagggagcatcagac

SEQ ID NO: 8529 - DNA, 88 bp, synthetic construct
  misc_feature 1..88: note = engineered ribonucleic acid scaffold (ERS) sequence
  source 1..88: mol_type = other DNA
acactggtttctatctgattactttgaccagttcaccagcgactatgtcgtagtgggtaaagctccctcttcggagggagcatcagag

SEQ ID NO: 8530 - DNA, 88 bp, synthetic construct
  misc_feature 1..88: note = engineered ribonucleic acid scaffold (ERS) sequence
  source 1..88: mol_type = other DNA
acactggtttctatctgattactttgaccagttcaccagcgactatgtcgtagtgggtaaagctccctcttcggagggagcatcaaag

SEQ ID NO: 8531 - DNA, 88 bp, synthetic construct
  misc_feature 1..88: note = engineered ribonucleic acid scaffold (ERS) sequence
  source 1..88: mol_type = other DNA
acactggtttctatctgattagtctcaccagttcaccagcgactatgtcgtagtgggtaaagctccctcttcggagggagcatgagac

SEQ ID NO: 8532 - DNA, 88 bp, synthetic construct
  misc_feature 1..88: note = engineered ribonucleic acid scaffold (ERS) sequence
  source 1..88: mol_type = other DNA
acactggtttctatctgattagtctgaccagttcaccagcgactatgtcgtagtgggtaaagctccctcttcggagggagcatcagac

SEQ ID NO: 8533 - DNA, 88 bp, synthetic construct
  misc_feature 1..88: note = engineered ribonucleic acid scaffold (ERS) sequence
  source 1..88: mol_type = other DNA
acactggtttctatctgattactctcaccagttcaccagcgactatgtcgtagtgggtaaagctccctcttcggagggagcatgagag

SEQ ID NO: 8534 - DNA, 88 bp, synthetic construct
  misc_feature 1..88: note = engineered ribonucleic acid scaffold (ERS) sequence
  source 1..88: mol_type = other DNA
acactggttcccatctgattaccccgaccagttcaccagcgactatgtcgtagtgggtaaagctccctcttcggagggagcatcgggg

SEQ ID NO: 8535 - DNA, 88 bp, synthetic construct
  misc_feature 1..88: note = engineered ribonucleic acid scaffold (ERS) sequence
  source 1..88: mol_type = other DNA
acactggttcctatctgattactccgaccagttcaccagcgactatgtcgtagtgggtaaagctccctcttcggagggagcatcggag

SEQ ID NO: 8536 - DNA, 88 bp, synthetic construct
  misc_feature 1..88: note = engineered ribonucleic acid scaffold (ERS) sequence
  source 1..88: mol_type = other DNA
acactggttgggatctgattaccccgaccagttcaccagcgactatgtcgtagtgggtaaagctccctcttcggagggagcatcgggg

SEQ ID NO: 8537 - DNA, 88 bp, synthetic construct
  misc_feature 1..88: note = engineered ribonucleic acid scaffold (ERS) sequence
  source 1..88: mol_type = other DNA
acactggttggtatctgattactccgaccagttcaccagcgactatgtcgtagtgggtaaagctccctcttcggagggagcatcggag

SEQ ID NO: 8538 - DNA, 88 bp, synthetic construct
  misc_feature 1..88: note = engineered ribonucleic acid scaffold (ERS) sequence
  source 1..88: mol_type = other DNA
acactggtttccatctgattaccctgaccagttcaccagcgactatgtcgtagtgggtaaagctccctcttcggagggagcatcaggg

SEQ ID NO: 8539 - DNA, 88 bp, synthetic construct
  misc_feature 1..88: note = engineered ribonucleic acid scaffold (ERS) sequence
  source 1..88: mol_type = other DNA
acactggtttggatctgattaccctgaccagttcaccagcgactatgtcgtagtgggtaaagctccctcttcggagggagcatcaggg

SEQ ID NO: 8540 - DNA, 88 bp, synthetic construct
  misc_feature 1..88: note = engineered ribonucleic acid scaffold (ERS) sequence
  source 1..88: mol_type = other DNA
acactggtttgtatctgattactctgaccagttcaccagcgactatgtcgtagtgggtaaagctccctcttcggagggagcatcagag

SEQ ID NO: 8541 - DNA, 88 bp, synthetic construct
  misc_feature 1..88: note = engineered ribonucleic acid scaffold (ERS) sequence
  source 1..88: mol_type = other DNA
acactggtttttatctgattactttgaccagttcaccagcgactatgtcgtagtgggtaaagctccctcttcggagggagcatcagag

SEQ ID NO: 8542 - DNA, 88 bp, synthetic construct
  misc_feature 1..88: note = engineered ribonucleic acid scaffold (ERS) sequence
  source 1..88: mol_type = other DNA
acactggtttttatctgattactctgaccagttcaccagcgactatgtcgtagtgggtaaagctccctcttcggagggagcatcagag

SEQ ID NO: 8543 - DNA, 88 bp, synthetic construct
  misc_feature 1..88: note = engineered ribonucleic acid scaffold (ERS) sequence
  source 1..88: mol_type = other DNA
acactggtttttatctgattactctgaccagttcaccagcgactatgtcgtagtgggtaaagctccctcttcggagggagcatcaaag

SEQ ID NO: 8544 - DNA, 88 bp, synthetic construct
  misc_feature 1..88: note = engineered ribonucleic acid scaffold (ERS) sequence
  source 1..88: mol_type = other DNA
acactggtttctatctgattactctgaccagttcaccagcgactatgtcgtagtgggtaaagctccctcttcggagggagcctcagag

SEQ ID NO: 8545 - DNA, 88 bp, synthetic construct
  misc_feature 1..88: note = engineered ribonucleic acid scaffold (ERS) sequence
  source 1..88: mol_type = other DNA
acactggtttctatctgattactctgaccagttcaccagcgactatgtcgtagtgggtaaagctccctcttcggagggagcgtcagag

SEQ ID NO: 8546 - DNA, 88 bp, synthetic construct
  misc_feature 1..88: note = engineered ribonucleic acid scaffold (ERS) sequence
  source 1..88: mol_type = other DNA
acactggtttctatctgattactctgaccagttcaccagcgactatgtcgtagtgggtaaagctccctcttcggagggagcatcaaag

SEQ ID NO: 8547 - DNA, 88 bp, synthetic construct
  misc_feature 1..88: note = engineered ribonucleic acid scaffold (ERS) sequence
  source 1..88: mol_type = other DNA
acaggccgttctatctgattactctccggccttcaccagcgactatgtcgtagtgggtaaagctccctcttcggagggagcatcagac

SEQ ID NO: 8548 - DNA, 88 bp, synthetic construct
  misc_feature 1..88: note = engineered ribonucleic acid scaffold (ERS) sequence
  source 1..88: mol_type = other DNA
acaggccgttctatctgattactttgcggccttcaccagcgactatgtcgtagtgggtaaagctccctcttcggagggagcatcagag

SEQ ID NO: 8549 - DNA, 88 bp, synthetic construct
  misc_feature 1..88: note = engineered ribonucleic acid scaffold (ERS) sequence
  source 1..88: mol_type = other DNA
acaggccgttctatctgattactttgcggccttcaccagcgactatgtcgtagtgggtaaagctccctcttcggagggagcatcaaag

SEQ ID NO: 8550 - DNA, 88 bp, synthetic construct
  misc_feature 1..88: note = engineered ribonucleic acid scaffold (ERS) sequence
  source 1..88: mol_type = other DNA
acaggccgttctatctgattagtctccggccttcaccagcgactatgtcgtagtgggtaaagctccctcttcggagggagcatgagac

SEQ ID NO: 8551 - DNA, 88 bp, synthetic construct
  misc_feature 1..88: note = engineered ribonucleic acid scaffold (ERS) sequence
  source 1..88: mol_type = other DNA
acaggccgttctatctgattagtctgcggccttcaccagcgactatgtcgtagtgggtaaagctccctcttcggagggagcatcagac

SEQ ID NO: 8552 - DNA, 88 bp, synthetic construct
  misc_feature 1..88: note = engineered ribonucleic acid scaffold (ERS) sequence
  source 1..88: mol_type = other DNA
acaggccgttctatctgattactctccggccttcaccagcgactatgtcgtagtgggtaaagctccctcttcggagggagcatgagag

SEQ ID NO: 8553 - DNA, 88 bp, synthetic construct
  misc_feature 1..88: note = engineered ribonucleic acid scaffold (ERS) sequence
  source 1..88: mol_type = other DNA
acaggccgtcccatctgattaccccgcggccttcaccagcgactatgtcgtagtgggtaaagctccctcttcggagggagcatcgggg

SEQ ID NO: 8554 - DNA, 88 bp, synthetic construct
  misc_feature 1..88: note = engineered ribonucleic acid scaffold (ERS) sequence
  source 1..88: mol_type = other DNA
acaggccgtcctatctgattactccgcggccttcaccagcgactatgtcgtagtgggtaaagctccctcttcggagggagcatcggag

SEQ ID NO: 8555 - DNA, 88 bp, synthetic construct
  misc_feature 1..88: note = engineered ribonucleic acid scaffold (ERS) sequence
  source 1..88: mol_type = other DNA
acaggccgtgggatctgattaccccgcggccttcaccagcgactatgtcgtagtgggtaaagctccctcttcggagggagcatcgggg

SEQ ID NO: 8556 - DNA, 88 bp, synthetic construct
  misc_feature 1..88: note = engineered ribonucleic acid scaffold (ERS) sequence
  source 1..88: mol_type = other DNA
acaggccgtggtatctgattactccgcggccttcaccagcgactatgtcgtagtgggtaaagctccctcttcggagggagcatcggag

SEQ ID NO: 8557 - DNA, 88 bp, synthetic construct
  misc_feature 1..88: note = engineered ribonucleic acid scaffold (ERS) sequence
  source 1..88: mol_type = other DNA
acaggccgttccatctgattaccctgcggccttcaccagcgactatgtcgtagtgggtaaagctccctcttcggagggagcatcaggg

SEQ ID NO: 8558 - DNA, 88 bp, synthetic construct
  misc_feature 1..88: note = engineered ribonucleic acid scaffold (ERS) sequence
  source 1..88: mol_type = other DNA
acaggccgttggatctgattaccctgcggccttcaccagcgactatgtcgtagtgggtaaagctccctcttcggagggagcatcaggg

SEQ ID NO: 8559 - DNA, 88 bp, synthetic construct
  misc_feature 1..88: note = engineered ribonucleic acid scaffold (ERS) sequence
  source 1..88: mol_type = other DNA
acaggccgttgtatctgattactctgcggccttcaccagcgactatgtcgtagtgggtaaagctccctcttcggagggagcatcagag

SEQ ID NO: 8560 - DNA, 88 bp, synthetic construct
  misc_feature 1..88: note = engineered ribonucleic acid scaffold (ERS) sequence
  source 1..88: mol_type = other DNA
acaggccgttttatctgattactttgcggccttcaccagcgactatgtcgtagtgggtaaagctccctcttcggagggagcatcagag

SEQ ID NO: 8561 - DNA, 88 bp, synthetic construct
  misc_feature 1..88: note = engineered ribonucleic acid scaffold (ERS) sequence
  source 1..88: mol_type = other DNA
acaggccgttttatctgattactctgcggccttcaccagcgactatgtcgtagtgggtaaagctccctcttcggagggagcatcagag

SEQ ID NO: 8562 - DNA, 88 bp, synthetic construct
  misc_feature 1..88: note = engineered ribonucleic acid scaffold (ERS) sequence
  source 1..88: mol_type = other DNA
acaggccgttttatctgattactctgcggccttcaccagcgactatgtcgtagtgggtaaagctccctcttcggagggagcatcaaag

SEQ ID NO: 8563 - DNA, 88 bp, synthetic construct
  misc_feature 1..88: note = engineered ribonucleic acid scaffold (ERS) sequence
  source 1..88: mol_type = other DNA
acaggccgttctatctgattactctgcggccttcaccagcgactatgtcgtagtgggtaaagctccctcttcggagggagcctcagag

SEQ ID NO: 8564 - DNA, 88 bp, synthetic construct
  misc_feature 1..88: note = engineered ribonucleic acid scaffold (ERS) sequence
  source 1..88: mol_type = other DNA
acaggccgttctatctgattactctgcggccttcaccagcgactatgtcgtagtgggtaaagctccctcttcggagggagcgtcagag

SEQ ID NO: 8565 - DNA, 88 bp, synthetic construct
  misc_feature 1..88: note = engineered ribonucleic acid scaffold (ERS) sequence
  source 1..88: mol_type = other DNA
acaggccgttctatctgattactctgcggccttcaccagcgactatgtcgtagtgggtaaagctccctcttcggagggagcatcaaag

SEQ ID NO: 8566 - DNA, 88 bp, synthetic construct
  misc_feature 1..88: note = engineered ribonucleic acid scaffold (ERS) sequence
  source 1..88: mol_type = other DNA
acaggtccttctatctgattactctcggaccttcaccagcgactatgtcgtagtgggtaaagctccctcttcggagggagcatcagac

SEQ ID NO: 8567 - DNA, 88 bp, synthetic construct
  misc_feature 1..88: note = engineered ribonucleic acid scaffold (ERS) sequence
  source 1..88: mol_type = other DNA
acaggtccttctatctgattactttgggaccttcaccagcgactatgtcgtagtgggtaaagctccctcttcggagggagcatcagag

SEQ ID NO: 8568 - DNA, 88 bp, synthetic construct
  misc_feature 1..88: note = engineered ribonucleic acid scaffold (ERS) sequence
  source 1..88: mol_type = other DNA
acaggtccttctatctgattactttgggaccttcaccagcgactatgtcgtagtgggtaaagctccctcttcggagggagcatcaaag

SEQ ID NO: 8569 - DNA, 88 bp, synthetic construct
  misc_feature 1..88: note = engineered ribonucleic acid scaffold (ERS) sequence
  source 1..88: mol_type = other DNA
acaggtccttctatctgattagtctcggaccttcaccagcgactatgtcgtagtgggtaaagctccctcttcggagggagcatgagac

SEQ ID NO: 8570 - DNA, 88 bp, synthetic construct
  misc_feature 1..88: note = engineered ribonucleic acid scaffold (ERS) sequence
  source 1..88: mol_type = other DNA
acaggtccttctatctgattagtctgggaccttcaccagcgactatgtcgtagtgggtaaagctccctcttcggagggagcatcagac

SEQ ID NO: 8571 - DNA, 88 bp, synthetic construct
  misc_feature 1..88: note = engineered ribonucleic acid scaffold (ERS) sequence
  source 1..88: mol_type = other DNA
acaggtccttctatctgattactctcggaccttcaccagcgactatgtcgtagtgggtaaagctccctcttcggagggagcatgagag

SEQ ID NO: 8572 - DNA, 88 bp, synthetic construct
  misc_feature 1..88: note = engineered ribonucleic acid scaffold (ERS) sequence
  source 1..88: mol_type = other DNA
acaggtcctcccatctgattaccccgggaccttcaccagcgactatgtcgtagtgggtaaagctccctcttcggagggagcatcgggg

SEQ ID NO: 8573 - DNA, 88 bp, synthetic construct
  misc_feature 1..88: note = engineered ribonucleic acid scaffold (ERS) sequence
  source 1..88: mol_type = other DNA
acaggtcctcctatctgattactccgggaccttcaccagcgactatgtcgtagtgggtaaagctccctcttcggagggagcatcggag

SEQ ID NO: 8574 - DNA, 88 bp, synthetic construct
  misc_feature 1..88: note = engineered ribonucleic acid scaffold (ERS) sequence
  source 1..88: mol_type = other DNA
acaggtcctgggatctgattaccccgggaccttcaccagcgactatgtcgtagtgggtaaagctccctcttcggagggagcatcgggg

SEQ ID NO: 8575 - DNA, 88 bp, synthetic construct
  misc_feature 1..88: note = engineered ribonucleic acid scaffold (ERS) sequence
  source 1..88: mol_type = other DNA
acaggtcctggtatctgattactccgggaccttcaccagcgactatgtcgtagtgggtaaagctccctcttcggagggagcatcggag

SEQ ID NO: 8576 - DNA, 88 bp, synthetic construct
  misc_feature 1..88: note = engineered ribonucleic acid scaffold (ERS) sequence
  source 1..88: mol_type = other DNA
acaggtccttccatctgattaccctgggaccttcaccagcgactatgtcgtagtgggtaaagctccctcttcggagggagcatcaggg

SEQ ID NO: 8577 - DNA, 88 bp, synthetic construct
  misc_feature 1..88: note = engineered ribonucleic acid scaffold (ERS) sequence
  source 1..88: mol_type = other DNA
acaggtccttggatctgattaccctgggaccttcaccagcgactatgtcgtagtgggtaaagctccctcttcggagggagcatcaggg

SEQ ID NO: 8578 - DNA, 88 bp, synthetic construct
  misc_feature 1..88: note = engineered ribonucleic acid scaffold (ERS) sequence
  source 1..88: mol_type = other DNA
acaggtccttgtatctgattactctgggaccttcaccagcgactatgtcgtagtgggtaaagctccctcttcggagggagcatcagag

SEQ ID NO: 8579 - DNA, 88 bp, synthetic construct
  misc_feature 1..88: note = engineered ribonucleic acid scaffold (ERS) sequence
  source 1..88: mol_type = other DNA
acaggtccttttatctgattactttgggaccttcaccagcgactatgtcgtagtgggtaaagctccctcttcggagggagcatcagag

SEQ ID NO: 8580 - DNA, 88 bp, synthetic construct
  misc_feature 1..88: note = engineered ribonucleic acid scaffold (ERS) sequence
  source 1..88: mol_type = other DNA
acaggtccttttatctgattactctgggaccttcaccagcgactatgtcgtagtgggtaaagctccctcttcggagggagcatcagag

SEQ ID NO: 8581 - DNA, 88 bp, synthetic construct
  misc_feature 1..88: note = engineered ribonucleic acid scaffold (ERS) sequence
  source 1..88: mol_type = other DNA
acaggtccttttatctgattactctgggaccttcaccagcgactatgtcgtagtgggtaaagctccctcttcggagggagcatcaaag

SEQ ID NO: 8582 - DNA, 88 bp, synthetic construct
  misc_feature 1..88: note = engineered ribonucleic acid scaffold (ERS) sequence
  source 1..88: mol_type = other DNA
acaggtccttctatctgattactctgggaccttcaccagcgactatgtcgtagtgggtaaagctccctcttcggagggagcctcagag

SEQ ID NO: 8583 - DNA, 88 bp, synthetic construct
  misc_feature 1..88: note = engineered ribonucleic acid scaffold (ERS) sequence
  source 1..88: mol_type = other DNA
acaggtccttctatctgattactctgggaccttcaccagcgactatgtcgtagtgggtaaagctccctcttcggagggagcgtcagag

SEQ ID NO: 8584 - DNA, 88 bp, synthetic construct
  misc_feature 1..88: note = engineered ribonucleic acid scaffold (ERS) sequence
  source 1..88: mol_type = other DNA
acaggtccttctatctgattactctgggaccttcaccagcgactatgtcgtagtgggtaaagctccctcttcggagggagcatcaaag

SEQ ID NO: 8585 - DNA, 88 bp, synthetic construct
  misc_feature 1..88: note = engineered ribonucleic acid scaffold (ERS) sequence
  source 1..88: mol_type = other DNA
accagcaattctatctgattactctcttgctgtcaccagcgactatgtcgtagtgggtaaagctccctcttcggagggagcatcagac

SEQ ID NO: 8586 - DNA, 88 bp, synthetic construct
  misc_feature 1..88: note = engineered ribonucleic acid scaffold (ERS) sequence
  source 1..88: mol_type = other DNA
accagcaattctatctgattactttgttgctgtcaccagcgactatgtcgtagtgggtaaagctccctcttcggagggagcatcagag

SEQ ID NO: 8587 - DNA, 88 bp, synthetic construct
  misc_feature 1..88: note = engineered ribonucleic acid scaffold (ERS) sequence
  source 1..88: mol_type = other DNA
accagcaattctatctgattactttgttgctgtcaccagcgactatgtcgtagtgggtaaagctccctcttcggagggagcatcaaag

SEQ ID NO: 8588 - DNA, 88 bp, synthetic construct
  misc_feature 1..88: note = engineered ribonucleic acid scaffold (ERS) sequence
  source 1..88: mol_type = other DNA
accagcaattctatctgattagtctcttgctgtcaccagcgactatgtcgtagtgggtaaagctccctcttcggagggagcatgagac

SEQ ID NO: 8589 - DNA, 88 bp, synthetic construct
  misc_feature 1..88: note = engineered ribonucleic acid scaffold (ERS) sequence
  source 1..88: mol_type = other DNA
accagcaattctatctgattagtctgttgctgtcaccagcgactatgtcgtagtgggtaaagctccctcttcggagggagcatcagac

SEQ ID NO: 8590 - DNA, 88 bp, synthetic construct
  misc_feature 1..88: note = engineered ribonucleic acid scaffold (ERS) sequence
  source 1..88: mol_type = other DNA
accagcaattctatctgattactctcttgctgtcaccagcgactatgtcgtagtgggtaaagctccctcttcggagggagcatgagag

SEQ ID NO: 8591 - DNA, 88 bp, synthetic construct
  misc_feature 1..88: note = engineered ribonucleic acid scaffold (ERS) sequence
  source 1..88: mol_type = other DNA
accagcaatcccatctgattaccccgttgctgtcaccagcgactatgtcgtagtgggtaaagctccctcttcggagggagcatcgggg

SEQ ID NO: 8592 - DNA, 88 bp, synthetic construct
  misc_feature 1..88: note = engineered ribonucleic acid scaffold (ERS) sequence
  source 1..88: mol_type = other DNA
accagcaatcctatctgattactccgttgctgtcaccagcgactatgtcgtagtgggtaaagctccctcttcggagggagcatcggag

SEQ ID NO: 8593 - DNA, 88 bp, synthetic construct
  misc_feature 1..88: note = engineered ribonucleic acid scaffold (ERS) sequence
  source 1..88: mol_type = other DNA
accagcaatgggatctgattaccccgttgctgtcaccagcgactatgtcgtagtgggtaaagctccctcttcggagggagcatcgggg

SEQ ID NO: 8594 - DNA, 88 bp, synthetic construct
  misc_feature 1..88: note = engineered ribonucleic acid scaffold (ERS) sequence
  source 1..88: mol_type = other DNA
accagcaatggtatctgattactccgttgctgtcaccagcgactatgtcgtagtgggtaaagctccctcttcggagggagcatcggag

SEQ ID NO: 8595 - DNA, 88 bp, synthetic construct
  misc_feature 1..88: note = engineered ribonucleic acid scaffold (ERS) sequence
  source 1..88: mol_type = other DNA
accagcaattccatctgattaccctgttgctgtcaccagcgactatgtcgtagtgggtaaagctccctcttcggagggagcatcaggg

SEQ ID NO: 8596 - DNA, 88 bp, synthetic construct
  misc_feature 1..88: note = engineered ribonucleic acid scaffold (ERS) sequence
  source 1..88: mol_type = other DNA
accagcaattggatctgattaccctgttgctgtcaccagcgactatgtcgtagtgggtaaagctccctcttcggagggagcatcaggg

SEQ ID NO: 8597 - DNA, 88 bp, synthetic construct
  misc_feature 1..88: note = engineered ribonucleic acid scaffold (ERS) sequence
  source 1..88: mol_type = other DNA
accagcaattgtatctgattactctgttgctgtcaccagcgactatgtcgtagtgggtaaagctccctcttcggagggagcatcagag

SEQ ID NO: 8598 - DNA, 88 bp, synthetic construct
  misc_feature 1..88: note = engineered ribonucleic acid scaffold (ERS) sequence
  source 1..88: mol_type = other DNA
accagcaattttatctgattactttgttgctgtcaccagcgactatgtcgtagtgggtaaagctccctcttcggagggagcatcagag

SEQ ID NO: 8599 - DNA, 88 bp, synthetic construct
  misc_feature 1..88: note = engineered ribonucleic acid scaffold (ERS) sequence
  source 1..88: mol_type = other DNA
accagcaattttatctgattactctgttgctgtcaccagcgactatgtcgtagtgggtaaagctccctcttcggagggagcatcagag

SEQ ID NO: 8600 - DNA, 88 bp, synthetic construct
  misc_feature 1..88: note = engineered ribonucleic acid scaffold (ERS) sequence
  source 1..88: mol_type = other DNA
accagcaattttatctgattactctgttgctgtcaccagcgactatgtcgtagtgggtaaagctccctcttcggagggagcatcaaag

SEQ ID NO: 8601 - DNA, 88 bp, synthetic construct
  misc_feature 1..88: note = engineered ribonucleic acid scaffold (ERS) sequence
  source 1..88: mol_type = other DNA
accagcaattctatctgattactctgttgctgtcaccagcgactatgtcgtagtgggtaaagctccctcttcggagggagcctcagag

SEQ ID NO: 8602 - DNA, 88 bp, synthetic construct
  misc_feature 1..88: note = engineered ribonucleic acid scaffold (ERS) sequence
  source 1..88: mol_type = other DNA
accagcaattctatctgattactctgttgctgtcaccagcgactatgtcgtagtgggtaaagctccctcttcggagggagcgtcagag

SEQ ID NO: 8603 - DNA, 88 bp, synthetic construct
  misc_feature 1..88: note = engineered ribonucleic acid scaffold (ERS) sequence
  source 1..88: mol_type = other DNA
accagcaattctatctgattactctgttgctgtcaccagcgactatgtcgtagtgggtaaagctccctcttcggagggagcatcaaag

SEQ ID NO: 8604 - DNA, 88 bp, synthetic construct
  misc_feature 1..88: note = engineered ribonucleic acid scaffold (ERS) sequence
  source 1..88: mol_type = other DNA
accgagacttctatctgattactctcggctcgtcaccagcgactatgtcgtagtgggtaaagctccctcttcggagggagcatcagac

SEQ ID NO: 8605 - DNA, 88 bp, synthetic construct
  misc_feature 1..88: note = engineered ribonucleic acid scaffold (ERS) sequence
  source 1..88: mol_type = other DNA
accgagacttctatctgattactttgggctcgtcaccagcgactatgtcgtagtgggtaaagctccctcttcggagggagcatcagag

SEQ ID NO: 8606 - DNA, 88 bp, synthetic construct
  misc_feature 1..88: note = engineered ribonucleic acid scaffold (ERS) sequence
  source 1..88: mol_type = other DNA
accgagacttctatctgattactttgggctcgtcaccagcgactatgtcgtagtgggtaaagctccctcttcggagggagcatcaaag

SEQ ID NO: 8607 - DNA, 88 bp, synthetic construct
  misc_feature 1..88: note = engineered ribonucleic acid scaffold (ERS) sequence
  source 1..88: mol_type = other DNA
accgagacttctatctgattagtctcggctcgtcaccagcgactatgtcgtagtgggtaaagctccctcttcggagggagcatgagac

SEQ ID NO: 8608 - DNA, 88 bp, synthetic construct
  misc_feature 1..88: note = engineered ribonucleic acid scaffold (ERS) sequence
  source 1..88: mol_type = other DNA
accgagacttctatctgattagtctgggctcgtcaccagcgactatgtcgtagtgggtaaagctccctcttcggagggagcatcagac

SEQ ID NO: 8609 - DNA, 88 bp, synthetic construct
  misc_feature 1..88: note = engineered ribonucleic acid scaffold (ERS) sequence
  source 1..88: mol_type = other DNA
accgagacttctatctgattactctcggctcgtcaccagcgactatgtcgtagtgggtaaagctccctcttcggagggagcatgagag

SEQ ID NO: 8610 - DNA, 88 bp, synthetic construct
  misc_feature 1..88: note = engineered ribonucleic acid scaffold (ERS) sequence
  source 1..88: mol_type = other DNA
accgagactcccatctgattaccccgggctcgtcaccagcgactatgtcgtagtgggtaaagctccctcttcggagggagcatcgggg

SEQ ID NO: 8611 - DNA, 88 bp, synthetic construct
  misc_feature 1..88: note = engineered ribonucleic acid scaffold (ERS) sequence
  source 1..88: mol_type = other DNA
accgagactcctatctgattactccgggctcgtcaccagcgactatgtcgtagtgggtaaagctccctcttcggagggagcatcggag

SEQ ID NO: 8612 - DNA, 88 bp, synthetic construct
  misc_feature 1..88: note = engineered ribonucleic acid scaffold (ERS) sequence
  source 1..88: mol_type = other DNA
accgagactgggatctgattaccccgggctcgtcaccagcgactatgtcgtagtgggtaaagctccctcttcggagggagcatcgggg

SEQ ID NO: 8613 - DNA, 88 bp, synthetic construct
  misc_feature 1..88: note = engineered ribonucleic acid scaffold (ERS) sequence
  source 1..88: mol_type = other DNA
accgagactggtatctgattactccgggctcgtcaccagcgactatgtcgtagtgggtaaagctccctcttcggagggagcatcggag

SEQ ID NO: 8614 - DNA, 88 bp, synthetic construct
  misc_feature 1..88: note = engineered ribonucleic acid scaffold (ERS) sequence
  source 1..88: mol_type = other DNA
accgagacttccatctgattaccctgggctcgtcaccagcgactatgtcgtagtgggtaaagctccctcttcggagggagcatcaggg

SEQ ID NO: 8615 - DNA, 88 bp, synthetic construct
  misc_feature 1..88: note = engineered ribonucleic acid scaffold (ERS) sequence
  source 1..88: mol_type = other DNA
accgagacttggatctgattaccctgggctcgtcaccagcgactatgtcgtagtgggtaaagctccctcttcggagggagcatcaggg

SEQ ID NO: 8616 - DNA, 88 bp, synthetic construct
  misc_feature 1..88: note = engineered ribonucleic acid scaffold (ERS) sequence
  source 1..88: mol_type = other DNA
accgagacttgtatctgattactctgggctcgtcaccagcgactatgtcgtagtgggtaaagctccctcttcggagggagcatcagag

SEQ ID NO: 8617 - DNA, 88 bp, synthetic construct
  misc_feature 1..88: note = engineered ribonucleic acid scaffold (ERS) sequence
  source 1..88: mol_type = other DNA
accgagacttttatctgattactttgggctcgtcaccagcgactatgtcgtagtgggtaaagctccctcttcggagggagcatcagag

SEQ ID NO: 8618 - DNA, 88 bp, synthetic construct
  misc_feature 1..88: note = engineered ribonucleic acid scaffold (ERS) sequence
  source 1..88: mol_type = other DNA
accgagacttttatctgattactctgggctcgtcaccagcgactatgtcgtagtgggtaaagctccctcttcggagggagcatcagag

SEQ ID NO: 8619 - DNA, 88 bp, synthetic construct
  misc_feature 1..88: note = engineered ribonucleic acid scaffold (ERS) sequence
  source 1..88: mol_type = other DNA
accgagacttttatctgattactctgggctcgtcaccagcgactatgtcgtagtgggtaaagctccctcttcggagggagcatcaaag

SEQ ID NO: 8620 - DNA, 88 bp, synthetic construct
  misc_feature 1..88: note = engineered ribonucleic acid scaffold (ERS) sequence
  source 1..88: mol_type = other DNA
accgagacttctatctgattactctgggctcgtcaccagcgactatgtcgtagtgggtaaagctccctcttcggagggagcctcagag

SEQ ID NO: 8621 - DNA, 88 bp, synthetic construct
  misc_feature 1..88: note = engineered ribonucleic acid scaffold (ERS) sequence
  source 1..88: mol_type = other DNA
accgagacttctatctgattactctgggctcgtcaccagcgactatgtcgtagtgggtaaagctccctcttcggagggagcgtcagag

SEQ ID NO: 8622 - DNA, 88 bp, synthetic construct
  misc_feature 1..88: note = engineered ribonucleic acid scaffold (ERS) sequence
  source 1..88: mol_type = other DNA
accgagacttctatctgattactctgggctcgtcaccagcgactatgtcgtagtgggtaaagctccctcttcggagggagcatcaaag

SEQ ID NO: 8623 - DNA, 88 bp, synthetic construct
  misc_feature 1..88: note = engineered ribonucleic acid scaffold (ERS) sequence
  source 1..88: mol_type = other DNA
acctgtagttctatctgattactctcctacagtcaccagcgactatgtcgtagtgggtaaagctccctcttcggagggagcatcagac

SEQ ID NO: 8624 - DNA, 88 bp, synthetic construct
  misc_feature 1..88: note = engineered ribonucleic acid scaffold (ERS) sequence
  source 1..88: mol_type = other DNA
acctgtagttctatctgattactttgctacagtcaccagcgactatgtcgtagtgggtaaagctccctcttcggagggagcatcagag

SEQ ID NO: 8625 - DNA, 88 bp, synthetic construct
  misc_feature 1..88: note = engineered ribonucleic acid scaffold (ERS) sequence
  source 1..88: mol_type = other DNA
acctgtagttctatctgattactttgctacagtcaccagcgactatgtcgtagtgggtaaagctccctcttcggagggagcatcaaag

SEQ ID NO: 8626 - DNA, 88 bp, synthetic construct
  misc_feature 1..88: note = engineered ribonucleic acid scaffold (ERS) sequence
  source 1..88: mol_type = other DNA
acctgtagttctatctgattagtctcctacagtcaccagcgactatgtcgtagtgggtaaagctccctcttcggagggagcatgagac

SEQ ID NO: 8627 - DNA, 88 bp, synthetic construct
  misc_feature 1..88: note = engineered ribonucleic acid scaffold (ERS) sequence
  source 1..88: mol_type = other DNA
acctgtagttctatctgattagtctgctacagtcaccagcgactatgtcgtagtgggtaaagctccctcttcggagggagcatcagac

SEQ ID NO: 8628 - DNA, 88 bp, synthetic construct
  misc_feature 1..88: note = engineered ribonucleic acid scaffold (ERS) sequence
  source 1..88: mol_type = other DNA
acctgtagttctatctgattactctcctacagtcaccagcgactatgtcgtagtgggtaaagctccctcttcggagggagcatgagag

SEQ ID NO: 8629 - DNA, 88 bp, synthetic construct
  misc_feature 1..88: note = engineered ribonucleic acid scaffold (ERS) sequence
  source 1..88: mol_type = other DNA
acctgtagtcccatctgattaccccgctacagtcaccagcgactatgtcgtagtgggtaaagctccctcttcggagggagcatcgggg

SEQ ID NO: 8630 - DNA, 88 bp, synthetic construct
  misc_feature 1..88: note = engineered ribonucleic acid scaffold (ERS) sequence
  source 1..88: mol_type = other DNA
acctgtagtcctatctgattactccgctacagtcaccagcgactatgtcgtagtgggtaaagctccctcttcggagggagcatcggag

SEQ ID NO: 8631 - DNA, 88 bp, synthetic construct
  misc_feature 1..88: note = engineered ribonucleic acid scaffold (ERS) sequence
  source 1..88: mol_type = other DNA
acctgtagtgggatctgattaccccgctacagtcaccagcgactatgtcgtagtgggtaaagctccctcttcggagggagcatcgggg

SEQ ID NO: 8632 - DNA, 88 bp, synthetic construct
  misc_feature 1..88: note = engineered ribonucleic acid scaffold (ERS) sequence
  source 1..88: mol_type = other DNA
acctgtagtggtatctgattactccgctacagtcaccagcgactatgtcgtagtgggtaaagctccctcttcggagggagcatcggag

SEQ ID NO: 8633 - DNA, 88 bp, synthetic construct
  misc_feature 1..88: note = engineered ribonucleic acid scaffold (ERS) sequence
  source 1..88: mol_type = other DNA
acctgtagttccatctgattaccctgctacagtcaccagcgactatgtcgtagtgggtaaagctccctcttcggagggagcatcaggg

SEQ ID NO: 8634 - DNA, 88 bp, synthetic construct
  misc_feature 1..88: note = engineered ribonucleic acid scaffold (ERS) sequence
  source 1..88: mol_type = other DNA
acctgtagttggatctgattaccctgctacagtcaccagcgactatgtcgtagtgggtaaagctccctcttcggagggagcatcaggg

SEQ ID NO: 8635 - DNA, 88 bp, synthetic construct
  misc_feature 1..88: note = engineered ribonucleic acid scaffold (ERS) sequence
  source 1..88: mol_type = other DNA
acctgtagttgtatctgattactctgctacagtcaccagcgactatgtcgtagtgggtaaagctccctcttcggagggagcatcagag

SEQ ID NO: 8636 - DNA, 88 bp, synthetic construct
  misc_feature 1..88: note = engineered ribonucleic acid scaffold (ERS) sequence
  source 1..88: mol_type = other DNA
acctgtagttttatctgattactttgctacagtcaccagcgactatgtcgtagtgggtaaagctccctcttcggagggagcatcagag

SEQ ID NO: 8637 - DNA, 88 bp, synthetic construct
  misc_feature 1..88: note = engineered ribonucleic acid scaffold (ERS) sequence
  source 1..88: mol_type = other DNA
acctgtagttttatctgattactctgctacagtcaccagcgactatgtcgtagtgggtaaagctccctcttcggagggagcatcagag

SEQ ID NO: 8638 - DNA, 88 bp, synthetic construct
  misc_feature 1..88: note = engineered ribonucleic acid scaffold (ERS) sequence
  source 1..88: mol_type = other DNA
acctgtagttttatctgattactctgctacagtcaccagcgactatgtcgtagtgggtaaagctccctcttcggagggagcatcaaag

SEQ ID NO: 8639 - DNA, 88 bp, synthetic construct
  misc_feature 1..88: note = engineered ribonucleic acid scaffold (ERS) sequence
  source 1..88: mol_type = other DNA
acctgtagttctatctgattactctgctacagtcaccagcgactatgtcgtagtgggtaaagctccctcttcggagggagcctcagag

SEQ ID NO: 8640 - DNA, 88 bp, synthetic construct
  misc_feature 1..88: note = engineered ribonucleic acid scaffold (ERS) sequence
  source 1..88: mol_type = other DNA
acctgtagttctatctgattactctgctacagtcaccagcgactatgtcgtagtgggtaaagctccctcttcggagggagcgtcagag

SEQ ID NO: 8641 - DNA, 88 bp, synthetic construct
  misc_feature 1..88: note = engineered ribonucleic acid scaffold (ERS) sequence
  source 1..88: mol_type = other DNA
acctgtagttctatctgattactctgctacagtcaccagcgactatgtcgtagtgggtaaagctccctcttcggagggagcatcaaag

SEQ ID NO: 8642 - DNA, 88 bp, synthetic construct
  misc_feature 1..88: note = engineered ribonucleic acid scaffold (ERS) sequence
  source 1..88: mol_type = other DNA
acgagcacttctatctgattactctcgggctctcaccagcgactatgtcgtagtgggtaaagctccctcttcggagggagcatcagac

SEQ ID NO: 8643 - DNA, 88 bp, synthetic construct
  misc_feature 1..88: note = engineered ribonucleic acid scaffold (ERS) sequence
  source 1..88: mol_type = other DNA
acgagcacttctatctgattactttggggctctcaccagcgactatgtcgtagtgggtaaagctccctcttcggagggagcatcagag

SEQ ID NO: 8644 - DNA, 88 bp, synthetic construct
  misc_feature 1..88: note = engineered ribonucleic acid scaffold (ERS) sequence
  source 1..88: mol_type = other DNA
acgagcacttctatctgattactttggggctctcaccagcgactatgtcgtagtgggtaaagctccctcttcggagggagcatcaaag

SEQ ID NO: 8645 - DNA, 88 bp, synthetic construct
  misc_feature 1..88: note = engineered ribonucleic acid scaffold (ERS) sequence
  source 1..88: mol_type = other DNA
acgagcacttctatctgattagtctcgggctctcaccagcgactatgtcgtagtgggtaaagctccctcttcggagggagcatgagac

SEQ ID NO: 8646 - DNA, 88 bp, synthetic construct
  misc_feature 1..88: note = engineered ribonucleic acid scaffold (ERS) sequence
  source 1..88: mol_type = other DNA
acgagcacttctatctgattagtctggggctctcaccagcgactatgtcgtagtgggtaaagctccctcttcggagggagcatcagac

SEQ ID NO: 8647 - DNA, 88 bp, synthetic construct
  misc_feature 1..88: note = engineered ribonucleic acid scaffold (ERS) sequence
  source 1..88: mol_type = other DNA
acgagcacttctatctgattactctcgggctctcaccagcgactatgtcgtagtgggtaaagctccctcttcggagggagcatgagag

SEQ ID NO: 8648 - DNA, 88 bp, synthetic construct
  misc_feature 1..88: note = engineered ribonucleic acid scaffold (ERS) sequence
  source 1..88: mol_type = other DNA
acgagcactcccatctgattaccccggggctctcaccagcgactatgtcgtagtgggtaaagctccctcttcggagggagcatcgggg

SEQ ID NO: 8649 - DNA, 88 bp, synthetic construct
  misc_feature 1..88: note = engineered ribonucleic acid scaffold (ERS) sequence
  source 1..88: mol_type = other DNA
acgagcactcctatctgattactccggggctctcaccagcgactatgtcgtagtgggtaaagctccctcttcggagggagcatcggag

SEQ ID NO: 8650 - DNA, 88 bp, synthetic construct
  misc_feature 1..88: note = engineered ribonucleic acid scaffold (ERS) sequence
  source 1..88: mol_type = other DNA
acgagcactgggatctgattaccccggggctctcaccagcgactatgtcgtagtgggtaaagctccctcttcggagggagcatcgggg

SEQ ID NO: 8651 - DNA, 88 bp, synthetic construct
  misc_feature 1..88: note = engineered ribonucleic acid scaffold (ERS) sequence
  source 1..88: mol_type = other DNA
acgagcactggtatctgattactccggggctctcaccagcgactatgtcgtagtgggtaaagctccctcttcggagggagcatcggag

SEQ ID NO: 8652 - DNA, 88 bp, synthetic construct
  misc_feature 1..88: note = engineered ribonucleic acid scaffold (ERS) sequence
  source 1..88: mol_type = other DNA
acgagcacttccatctgattaccctggggctctcaccagcgactatgtcgtagtgggtaaagctccctcttcggagggagcatcaggg

SEQ ID NO: 8653 - DNA, 88 bp, synthetic construct
  misc_feature 1..88: note = engineered ribonucleic acid scaffold (ERS) sequence
  source 1..88: mol_type = other DNA
acgagcacttggatctgattaccctggggctctcaccagcgactatgtcgtagtgggtaaagctccctcttcggagggagcatcaggg

SEQ ID NO: 8654 - DNA, 88 bp, synthetic construct
  misc_feature 1..88: note = engineered ribonucleic acid scaffold (ERS) sequence
  source 1..88: mol_type = other DNA
acgagcacttgtatctgattactctggggctctcaccagcgactatgtcgtagtgggtaaagctccctcttcggagggagcatcagag

SEQ ID NO: 8655 - DNA, 88 bp, synthetic construct
  misc_feature 1..88: note = engineered ribonucleic acid scaffold (ERS) sequence
  source 1..88: mol_type = other DNA
acgagcacttttatctgattactttggggctctcaccagcgactatgtcgtagtgggtaaagctccctcttcggagggagcatcagag

SEQ ID NO: 8656 - DNA, 88 bp, synthetic construct
  misc_feature 1..88: note = engineered ribonucleic acid scaffold (ERS) sequence
  source 1..88: mol_type = other DNA
acgagcacttttatctgattactctggggctctcaccagcgactatgtcgtagtgggtaaagctccctcttcggagggagcatcagag

SEQ ID NO: 8657 - DNA, 88 bp, synthetic construct
  misc_feature 1..88: note = engineered ribonucleic acid scaffold (ERS) sequence
  source 1..88: mol_type = other DNA
acgagcacttttatctgattactctggggctctcaccagcgactatgtcgtagtgggtaaagctccctcttcggagggagcatcaaag

SEQ ID NO: 8658 - DNA, 88 bp, synthetic construct
  misc_feature 1..88: note = engineered ribonucleic acid scaffold (ERS) sequence
  source 1..88: mol_type = other DNA
acgagcacttctatctgattactctggggctctcaccagcgactatgtcgtagtgggtaaagctccctcttcggagggagcctcagag

SEQ ID NO: 8659 - DNA, 88 bp, synthetic construct
  misc_feature 1..88: note = engineered ribonucleic acid scaffold (ERS) sequence
  source 1..88: mol_type = other DNA
acgagcacttctatctgattactctggggctctcaccagcgactatgtcgtagtgggtaaagctccctcttcggagggagcgtcagag

SEQ ID NO: 8660 - DNA, 88 bp, synthetic construct
  misc_feature 1..88: note = engineered ribonucleic acid scaffold (ERS) sequence
  source 1..88: mol_type = other DNA
acgagcacttctatctgattactctggggctctcaccagcgactatgtcgtagtgggtaaagctccctcttcggagggagcatcaaag

SEQ ID NO: 8661 - DNA, 88 bp, synthetic construct
  misc_feature 1..88: note = engineered ribonucleic acid scaffold (ERS) sequence
  source 1..88: mol_type = other DNA
acgaggtgttctatctgattactctccacctctcaccagcgactatgtcgtagtgggtaaagctccctcttcggagggagcatcagac

SEQ ID NO: 8662 - DNA, 88 bp, synthetic construct
  misc_feature 1..88: note = engineered ribonucleic acid scaffold (ERS) sequence
  source 1..88: mol_type = other DNA
acgaggtgttctatctgattactttgcacctctcaccagcgactatgtcgtagtgggtaaagctccctcttcggagggagcatcagag

SEQ ID NO: 8663 - DNA, 88 bp, synthetic construct
  misc_feature 1..88: note = engineered ribonucleic acid scaffold (ERS) sequence
  source 1..88: mol_type = other DNA
acgaggtgttctatctgattactttgcacctctcaccagcgactatgtcgtagtgggtaaagctccctcttcggagggagcatcaaag

SEQ ID NO: 8664 - DNA, 88 bp, synthetic construct
  misc_feature 1..88: note = engineered ribonucleic acid scaffold (ERS) sequence
  source 1..88: mol_type = other DNA
acgaggtgttctatctgattagtctccacctctcaccagcgactatgtcgtagtgggtaaagctccctcttcggagggagcatgagac

SEQ ID NO: 8665 - DNA, 88 bp, synthetic construct
  misc_feature 1..88: note = engineered ribonucleic acid scaffold (ERS) sequence
  source 1..88: mol_type = other DNA
acgaggtgttctatctgattagtctgcacctctcaccagcgactatgtcgtagtgggtaaagctccctcttcggagggagcatcagac

SEQ ID NO: 8666 - DNA, 88 bp, synthetic construct
  misc_feature 1..88: note = engineered ribonucleic acid scaffold (ERS) sequence
  source 1..88: mol_type = other DNA
acgaggtgttctatctgattactctccacctctcaccagcgactatgtcgtagtgggtaaagctccctcttcggagggagcatgagag

SEQ ID NO: 8667 - DNA, 88 bp, synthetic construct
  misc_feature 1..88: note = engineered ribonucleic acid scaffold (ERS) sequence
  source 1..88: mol_type = other DNA
acgaggtgtcccatctgattaccccgcacctctcaccagcgactatgtcgtagtgggtaaagctccctcttcggagggagcatcgggg

SEQ ID NO: 8668 - DNA, 88 bp, synthetic construct
  misc_feature 1..88: note = engineered ribonucleic acid scaffold (ERS) sequence
  source 1..88: mol_type = other DNA
acgaggtgtcctatctgattactccgcacctctcaccagcgactatgtcgtagtgggtaaagctccctcttcggagggagcatcggag

SEQ ID NO: 8669 - DNA, 88 bp, synthetic construct
  misc_feature 1..88: note = engineered ribonucleic acid scaffold (ERS) sequence
  source 1..88: mol_type = other DNA
acgaggtgtgggatctgattaccccgcacctctcaccagcgactatgtcgtagtgggtaaagctccctcttcggagggagcatcgggg

SEQ ID NO: 8670 - DNA, 88 bp, synthetic construct
  misc_feature 1..88: note = engineered ribonucleic acid scaffold (ERS) sequence
  source 1..88: mol_type = other DNA
acgaggtgtggtatctgattactccgcacctctcaccagcgactatgtcgtagtgggtaaagctccctcttcggagggagcatcggag

SEQ ID NO: 8671 - DNA, 88 bp, synthetic construct
  misc_feature 1..88: note = engineered ribonucleic acid scaffold (ERS) sequence
  source 1..88: mol_type = other DNA
acgaggtgttccatctgattaccctgcacctctcaccagcgactatgtcgtagtgggtaaagctccctcttcggagggagcatcaggg

SEQ ID NO: 8672 - DNA, 88 bp, synthetic construct
  misc_feature 1..88: note = engineered ribonucleic acid scaffold (ERS) sequence
  source 1..88: mol_type = other DNA
acgaggtgttggatctgattaccctgcacctctcaccagcgactatgtcgtagtgggtaaagctccctcttcggagggagcatcaggg

SEQ ID NO: 8673 - DNA, 88 bp, synthetic construct
  misc_feature 1..88: note = engineered ribonucleic acid scaffold (ERS) sequence
  source 1..88: mol_type = other DNA
acgaggtgttgtatctgattactctgcacctctcaccagcgactatgtcgtagtgggtaaagctccctcttcggagggagcatcagag

SEQ ID NO: 8674 - DNA, 88 bp, synthetic construct
  misc_feature 1..88: note = engineered ribonucleic acid scaffold (ERS) sequence
  source 1..88: mol_type = other DNA
acgaggtgttttatctgattactttgcacctctcaccagcgactatgtcgtagtgggtaaagctccctcttcggagggagcatcagag

SEQ ID NO: 8675 - DNA, 88 bp, synthetic construct
  misc_feature 1..88: note = engineered ribonucleic acid scaffold (ERS) sequence
  source 1..88: mol_type = other DNA
acgaggtgttttatctgattactctgcacctctcaccagcgactatgtcgtagtgggtaaagctccctcttcggagggagcatcagag

SEQ ID NO: 8676 - DNA, 88 bp, synthetic construct
  misc_feature 1..88: note = engineered ribonucleic acid scaffold (ERS) sequence
  source 1..88: mol_type = other DNA
acgaggtgttttatctgattactctgcacctctcaccagcgactatgtcgtagtgggtaaagctccctcttcggagggagcatcaaag

SEQ ID NO: 8677 - DNA, 88 bp, synthetic construct
  misc_feature 1..88: note = engineered ribonucleic acid scaffold (ERS) sequence
  source 1..88: mol_type = other DNA
acgaggtgttctatctgattactctgcacctctcaccagcgactatgtcgtagtgggtaaagctccctcttcggagggagcctcagag

SEQ ID NO: 8678 - DNA, 88 bp, synthetic construct
  misc_feature 1..88: note = engineered ribonucleic acid scaffold (ERS) sequence
  source 1..88: mol_type = other DNA
acgaggtgttctatctgattactctgcacctctcaccagcgactatgtcgtagtgggtaaagctccctcttcggagggagcgtcagag

SEQ ID NO: 8679 - DNA, 88 bp, synthetic construct
  misc_feature 1..88: note = engineered ribonucleic acid scaffold (ERS) sequence
  source 1..88: mol_type = other DNA
acgaggtgttctatctgattactctgcacctctcaccagcgactatgtcgtagtgggtaaagctccctcttcggagggagcatcaaag

SEQ ID NO: 8680 - DNA, 88 bp, synthetic construct
  misc_feature 1..88: note = engineered ribonucleic acid scaffold (ERS) sequence
  source 1..88: mol_type = other DNA
acgggactttctatctgattactctcagtccctcaccagcgactatgtcgtagtgggtaaagctccctcttcggagggagcatcagac

SEQ ID NO: 8681 - DNA, 88 bp, synthetic construct
  misc_feature 1..88: note = engineered ribonucleic acid scaffold (ERS) sequence
  source 1..88: mol_type = other DNA
acgggactttctatctgattactttgagtccctcaccagcgactatgtcgtagtgggtaaagctccctcttcggagggagcatcagag

SEQ ID NO: 8682 - DNA, 88 bp, synthetic construct
  misc_feature 1..88: note = engineered ribonucleic acid scaffold (ERS) sequence
  source 1..88: mol_type = other DNA
acgggactttctatctgattactttgagtccctcaccagcgactatgtcgtagtgggtaaagctccctcttcggagggagcatcaaag

SEQ ID NO: 8683 - DNA, 88 bp, synthetic construct
  misc_feature 1..88: note = engineered ribonucleic acid scaffold (ERS) sequence
  source 1..88: mol_type = other DNA
acgggactttctatctgattagtctcagtccctcaccagcgactatgtcgtagtgggtaaagctccctcttcggagggagcatgagac

SEQ ID NO: 8684 - DNA, 88 bp, synthetic construct
  misc_feature 1..88: note = engineered ribonucleic acid scaffold (ERS) sequence
  source 1..88: mol_type = other DNA
acgggactttctatctgattagtctgagtccctcaccagcgactatgtcgtagtgggtaaagctccctcttcggagggagcatcagac

SEQ ID NO: 8685 - DNA, 88 bp, synthetic construct
  misc_feature 1..88: note = engineered ribonucleic acid scaffold (ERS) sequence
  source 1..88: mol_type = other DNA
acgggactttctatctgattactctcagtccctcaccagcgactatgtcgtagtgggtaaagctccctcttcggagggagcatgagag

SEQ ID NO: 8686 - DNA, 88 bp, synthetic construct
  misc_feature 1..88: note = engineered ribonucleic acid scaffold (ERS) sequence
  source 1..88: mol_type = other DNA
acgggacttcccatctgattaccccgagtccctcaccagcgactatgtcgtagtgggtaaagctccctcttcggagggagcatcgggg

SEQ ID NO: 8687 - DNA, 88 bp, synthetic construct
  misc_feature 1..88: note = engineered ribonucleic acid scaffold (ERS) sequence
  source 1..88: mol_type = other DNA
acgggacttcctatctgattactccgagtccctcaccagcgactatgtcgtagtgggtaaagctccctcttcggagggagcatcggag

SEQ ID NO: 8688 - DNA, 88 bp, synthetic construct
  misc_feature 1..88: note = engineered ribonucleic acid scaffold (ERS) sequence
  source 1..88: mol_type = other DNA
acgggacttgggatctgattaccccgagtccctcaccagcgactatgtcgtagtgggtaaagctccctcttcggagggagcatcgggg

SEQ ID NO: 8689 - DNA, 88 bp, synthetic construct
  misc_feature 1..88: note = engineered ribonucleic acid scaffold (ERS) sequence
  source 1..88: mol_type = other DNA
acgggacttggtatctgattactccgagtccctcaccagcgactatgtcgtagtgggtaaagctccctcttcggagggagcatcggag

SEQ ID NO: 8690 - DNA, 88 bp, synthetic construct
  misc_feature 1..88: note = engineered ribonucleic acid scaffold (ERS) sequence
  source 1..88: mol_type = other DNA
acgggactttccatctgattaccctgagtccctcaccagcgactatgtcgtagtgggtaaagctccctcttcggagggagcatcaggg

SEQ ID NO: 8691 - DNA, 88 bp, synthetic construct
  misc_feature 1..88: note = engineered ribonucleic acid scaffold (ERS) sequence
  source 1..88: mol_type = other DNA
acgggactttggatctgattaccctgagtccctcaccagcgactatgtcgtagtgggtaaagctccctcttcggagggagcatcaggg

SEQ ID NO: 8692 - DNA, 88 bp, synthetic construct
  misc_feature 1..88: note = engineered ribonucleic acid scaffold (ERS) sequence
  source 1..88: mol_type = other DNA
acgggactttgtatctgattactctgagtccctcaccagcgactatgtcgtagtgggtaaagctccctcttcggagggagcatcagag

SEQ ID NO: 8693 - DNA, 88 bp, synthetic construct
  misc_feature 1..88: note = engineered ribonucleic acid scaffold (ERS) sequence
  source 1..88: mol_type = other DNA
acgggactttttatctgattactttgagtccctcaccagcgactatgtcgtagtgggtaaagctccctcttcggagggagcatcagag

SEQ ID NO: 8694 - DNA, 88 bp, synthetic construct
  misc_feature 1..88: note = engineered ribonucleic acid scaffold (ERS) sequence
  source 1..88: mol_type = other DNA
acgggactttttatctgattactctgagtccctcaccagcgactatgtcgtagtgggtaaagctccctcttcggagggagcatcagag

SEQ ID NO: 8695 - DNA, 88 bp, synthetic construct
  misc_feature 1..88: note = engineered ribonucleic acid scaffold (ERS) sequence
  source 1..88: mol_type = other DNA
acgggactttttatctgattactctgagtccctcaccagcgactatgtcgtagtgggtaaagctccctcttcggagggagcatcaaag

SEQ ID NO: 8696 - DNA, 88 bp, synthetic construct
  misc_feature 1..88: note = engineered ribonucleic acid scaffold (ERS) sequence
  source 1..88: mol_type = other DNA
acgggactttctatctgattactctgagtccctcaccagcgactatgtcgtagtgggtaaagctccctcttcggagggagcctcagag

SEQ ID NO: 8697 - DNA, 88 bp, synthetic construct
  misc_feature 1..88: note = engineered ribonucleic acid scaffold (ERS) sequence
  source 1..88: mol_type = other DNA
acgggactttctatctgattactctgagtccctcaccagcgactatgtcgtagtgggtaaagctccctcttcggagggagcgtcagag

SEQ ID NO: 8698 - DNA, 88 bp, synthetic construct
  misc_feature 1..88: note = engineered ribonucleic acid scaffold (ERS) sequence
  source 1..88: mol_type = other DNA
acgggactttctatctgattactctgagtccctcaccagcgactatgtcgtagtgggtaaagctccctcttcggagggagcatcaaag

SEQ ID NO: 8699 - DNA, 88 bp, synthetic construct
  misc_feature 1..88: note = engineered ribonucleic acid scaffold (ERS) sequence
  source 1..88: mol_type = other DNA
acgggcaattctatctgattactctcttgccctcaccagcgactatgtcgtagtgggtaaagctccctcttcggagggagcatcagac

SEQ ID NO: 8700 - DNA, 88 bp, synthetic construct
  misc_feature 1..88: note = engineered ribonucleic acid scaffold (ERS) sequence
  source 1..88: mol_type = other DNA
acgggcaattctatctgattactttgttgccctcaccagcgactatgtcgtagtgggtaaagctccctcttcggagggagcatcagag

SEQ ID NO: 8701 - DNA, 88 bp, synthetic construct
  misc_feature 1..88: note = engineered ribonucleic acid scaffold (ERS) sequence
  source 1..88: mol_type = other DNA
acgggcaattctatctgattactttgttgccctcaccagcgactatgtcgtagtgggtaaagctccctcttcggagggagcatcaaag

SEQ ID NO: 8702 - DNA, 88 bp, synthetic construct
  misc_feature 1..88: note = engineered ribonucleic acid scaffold (ERS) sequence
  source 1..88: mol_type = other DNA
acgggcaattctatctgattagtctcttgccctcaccagcgactatgtcgtagtgggtaaagctccctcttcggagggagcatgagac

SEQ ID NO: 8703 - DNA, 88 bp, synthetic construct
  misc_feature 1..88: note = engineered ribonucleic acid scaffold (ERS) sequence
  source 1..88: mol_type = other DNA
acgggcaattctatctgattagtctgttgccctcaccagcgactatgtcgtagtgggtaaagctccctcttcggagggagcatcagac

SEQ ID NO: 8704 - DNA, 88 bp, synthetic construct
  misc_feature 1..88: note = engineered ribonucleic acid scaffold (ERS) sequence
  source 1..88: mol_type = other DNA
acgggcaattctatctgattactctcttgccctcaccagcgactatgtcgtagtgggtaaagctccctcttcggagggagcatgagag

SEQ ID NO: 8705 - DNA, 88 bp, synthetic construct
  misc_feature 1..88: note = engineered ribonucleic acid scaffold (ERS) sequence
  source 1..88: mol_type = other DNA
acgggcaatcccatctgattaccccgttgccctcaccagcgactatgtcgtagtgggtaaagctccctcttcggagggagcatcgggg

SEQ ID NO: 8706 - DNA, 88 bp, synthetic construct
  misc_feature 1..88: note = engineered ribonucleic acid scaffold (ERS) sequence
  source 1..88: mol_type = other DNA
acgggcaatcctatctgattactccgttgccctcaccagcgactatgtcgtagtgggtaaagctccctcttcggagggagcatcggag

SEQ ID NO: 8707 - DNA, 88 bp, synthetic construct
  misc_feature 1..88: note = engineered ribonucleic acid scaffold (ERS) sequence
  source 1..88: mol_type = other DNA
acgggcaatgggatctgattaccccgttgccctcaccagcgactatgtcgtagtgggtaaagctccctcttcggagggagcatcgggg

SEQ ID NO: 8708 - DNA, 88 bp, synthetic construct
  misc_feature 1..88: note = engineered ribonucleic acid scaffold (ERS) sequence
  source 1..88: mol_type = other DNA
acgggcaatggtatctgattactccgttgccctcaccagcgactatgtcgtagtgggtaaagctccctcttcggagggagcatcggag

SEQ ID NO: 8709 - DNA, 88 bp, synthetic construct
  misc_feature 1..88: note = engineered ribonucleic acid scaffold (ERS) sequence
  source 1..88: mol_type = other DNA
acgggcaattccatctgattaccctgttgccctcaccagcgactatgtcgtagtgggtaaagctccctcttcggagggagcatcaggg

SEQ ID NO: 8710 - DNA, 88 bp, synthetic construct
  misc_feature 1..88: note = engineered ribonucleic acid scaffold (ERS) sequence
  source 1..88: mol_type = other DNA
acgggcaattggatctgattaccctgttgccctcaccagcgactatgtcgtagtgggtaaagctccctcttcggagggagcatcaggg

SEQ ID NO: 8711 - DNA, 88 bp, synthetic construct
  misc_feature 1..88: note = engineered ribonucleic acid scaffold (ERS) sequence
  source 1..88: mol_type = other DNA
acgggcaattgtatctgattactctgttgccctcaccagcgactatgtcgtagtgggtaaagctccctcttcggagggagcatcagag

SEQ ID NO: 8712 - DNA, 88 bp, synthetic construct
  misc_feature 1..88: note = engineered ribonucleic acid scaffold (ERS) sequence
  source 1..88: mol_type = other DNA
acgggcaattttatctgattactttgttgccctcaccagcgactatgtcgtagtgggtaaagctccctcttcggagggagcatcagag

SEQ ID NO: 8713 - DNA, 88 bp, synthetic construct
  misc_feature 1..88: note = engineered ribonucleic acid scaffold (ERS) sequence
  source 1..88: mol_type = other DNA
acgggcaattttatctgattactctgttgccctcaccagcgactatgtcgtagtgggtaaagctccctcttcggagggagcatcagag

SEQ ID NO: 8714 - DNA, 88 bp, synthetic construct
  misc_feature 1..88: note = engineered ribonucleic acid scaffold (ERS) sequence
  source 1..88: mol_type = other DNA
acgggcaattttatctgattactctgttgccctcaccagcgactatgtcgtagtgggtaaagctccctcttcggagggagcatcaaag

SEQ ID NO: 8715 - DNA, 88 bp, synthetic construct
  misc_feature 1..88: note = engineered ribonucleic acid scaffold (ERS) sequence
  source 1..88: mol_type = other DNA
acgggcaattctatctgattactctgttgccctcaccagcgactatgtcgtagtgggtaaagctccctcttcggagggagcctcagag

SEQ ID NO: 8716 - DNA, 88 bp, synthetic construct
  misc_feature 1..88: note = engineered ribonucleic acid scaffold (ERS) sequence
  source 1..88: mol_type = other DNA
acgggcaattctatctgattactctgttgccctcaccagcgactatgtcgtagtgggtaaagctccctcttcggagggagcgtcagag

SEQ ID NO: 8717 - DNA, 88 bp, synthetic construct
  misc_feature 1..88: note = engineered ribonucleic acid scaffold (ERS) sequence
  source 1..88: mol_type = other DNA
acgggcaattctatctgattactctgttgccctcaccagcgactatgtcgtagtgggtaaagctccctcttcggagggagcatcaaag

SEQ ID NO: 8718 - DNA, 88 bp, synthetic construct
  misc_feature 1..88: note = engineered ribonucleic acid scaffold (ERS) sequence
  source 1..88: mol_type = other DNA
actgtgcgttctatctgattactctccgcacatcaccagcgactatgtcgtagtgggtaaagctccctcttcggagggagcatcagac

SEQ ID NO: 8719 - DNA, 88 bp, synthetic construct
  misc_feature 1..88: note = engineered ribonucleic acid scaffold (ERS) sequence
  source 1..88: mol_type = other DNA
actgtgcgttctatctgattactttgcgcacatcaccagcgactatgtcgtagtgggtaaagctccctcttcggagggagcatcagag

SEQ ID NO: 8720 - DNA, 88 bp, synthetic construct
  misc_feature 1..88: note = engineered ribonucleic acid scaffold (ERS) sequence
  source 1..88: mol_type = other DNA
actgtgcgttctatctgattactttgcgcacatcaccagcgactatgtcgtagtgggtaaagctccctcttcggagggagcatcaaag

SEQ ID NO: 8721 - DNA, 88 bp, synthetic construct
  misc_feature 1..88: note = engineered ribonucleic acid scaffold (ERS) sequence
  source 1..88: mol_type = other DNA
actgtgcgttctatctgattagtctccgcacatcaccagcgactatgtcgtagtgggtaaagctccctcttcggagggagcatgagac

SEQ ID NO: 8722 - DNA, 88 bp, synthetic construct
  misc_feature 1..88: note = engineered ribonucleic acid scaffold (ERS) sequence
  source 1..88: mol_type = other DNA
actgtgcgttctatctgattagtctgcgcacatcaccagcgactatgtcgtagtgggtaaagctccctcttcggagggagcatcagac

SEQ ID NO: 8723 - DNA, 88 bp, synthetic construct
  misc_feature 1..88: note = engineered ribonucleic acid scaffold (ERS) sequence
  source 1..88: mol_type = other DNA
actgtgcgttctatctgattactctccgcacatcaccagcgactatgtcgtagtgggtaaagctccctcttcggagggagcatgagag

SEQ ID NO: 8724 - DNA, 88 bp, synthetic construct
  misc_feature 1..88: note = engineered ribonucleic acid scaffold (ERS) sequence
  source 1..88: mol_type = other DNA
actgtgcgtcccatctgattaccccgcgcacatcaccagcgactatgtcgtagtgggtaaagctccctcttcggagggagcatcgggg

SEQ ID NO: 8725 - DNA, 88 bp, synthetic construct
  misc_feature 1..88: note = engineered ribonucleic acid scaffold (ERS) sequence
  source 1..88: mol_type = other DNA
actgtgcgtcctatctgattactccgcgcacatcaccagcgactatgtcgtagtgggtaaagctccctcttcggagggagcatcggag

SEQ ID NO: 8726 - DNA, 88 bp, synthetic construct
  misc_feature 1..88: note = engineered ribonucleic acid scaffold (ERS) sequence
  source 1..88: mol_type = other DNA
actgtgcgtgggatctgattaccccgcgcacatcaccagcgactatgtcgtagtgggtaaagctccctcttcggagggagcatcgggg

SEQ ID NO: 8727 - DNA, 88 bp, synthetic construct
  misc_feature 1..88: note = engineered ribonucleic acid scaffold (ERS) sequence
  source 1..88: mol_type = other DNA
actgtgcgtggtatctgattactccgcgcacatcaccagcgactatgtcgtagtgggtaaagctccctcttcggagggagcatcggag

SEQ ID NO: 8728 - DNA, 88 bp, synthetic construct
  misc_feature 1..88: note = engineered ribonucleic acid scaffold (ERS) sequence
  source 1..88: mol_type = other DNA
actgtgcgttccatctgattaccctgcgcacatcaccagcgactatgtcgtagtgggtaaagctccctcttcggagggagcatcaggg

SEQ ID NO: 8729 - DNA, 88 bp, synthetic construct
  misc_feature 1..88: note = engineered ribonucleic acid scaffold (ERS) sequence
  source 1..88: mol_type = other DNA
actgtgcgttggatctgattaccctgcgcacatcaccagcgactatgtcgtagtgggtaaagctccctcttcggagggagcatcaggg

SEQ ID NO: 8730 - DNA, 88 bp, synthetic construct
  misc_feature 1..88: note = engineered ribonucleic acid scaffold (ERS) sequence
  source 1..88: mol_type = other DNA
actgtgcgttgtatctgattactctgcgcacatcaccagcgactatgtcgtagtgggtaaagctccctcttcggagggagcatcagag

SEQ ID NO: 8731 - DNA, 88 bp, synthetic construct
  misc_feature 1..88: note = engineered ribonucleic acid scaffold (ERS) sequence
  source 1..88: mol_type = other DNA
actgtgcgttttatctgattactttgcgcacatcaccagcgactatgtcgtagtgggtaaagctccctcttcggagggagcatcagag

SEQ ID NO: 8732 - DNA, 88 bp, synthetic construct
  misc_feature 1..88: note = engineered ribonucleic acid scaffold (ERS) sequence
  source 1..88: mol_type = other DNA
actgtgcgttttatctgattactctgcgcacatcaccagcgactatgtcgtagtgggtaaagctccctcttcggagggagcatcagag

SEQ ID NO: 8733 - DNA, 88 bp, synthetic construct
  misc_feature 1..88: note = engineered ribonucleic acid scaffold (ERS) sequence
  source 1..88: mol_type = other DNA
actgtgcgttttatctgattactctgcgcacatcaccagcgactatgtcgtagtgggtaaagctccctcttcggagggagcatcaaag

SEQ ID NO: 8734 - DNA, 88 bp, synthetic construct
  misc_feature 1..88: note = engineered ribonucleic acid scaffold (ERS) sequence
  source 1..88: mol_type = other DNA
actgtgcgttctatctgattactctgcgcacatcaccagcgactatgtcgtagtgggtaaagctccctcttcggagggagcctcagag

SEQ ID NO: 8735 - DNA, 88 bp, synthetic construct
  misc_feature 1..88: note = engineered ribonucleic acid scaffold (ERS) sequence
  source 1..88: mol_type = other DNA
actgtgcgttctatctgattactctgcgcacatcaccagcgactatgtcgtagtgggtaaagctccctcttcggagggagcgtcagag

SEQ ID NO: 8736 - DNA, 88 bp, synthetic construct
  misc_feature 1..88: note = engineered ribonucleic acid scaffold (ERS) sequence
  source 1..88: mol_type = other DNA
actgtgcgttctatctgattactctgcgcacatcaccagcgactatgtcgtagtgggtaaagctccctcttcggagggagcatcaaag

SEQ ID NO: 8737 - DNA, 89 bp, synthetic construct
  misc_feature 1..89: note = engineered ribonucleic acid scaffold (ERS) sequence
  source 1..89: mol_type = other DNA
actggcgcttctatctgattactctcggcgccatcaccagcgactatgtcgtagtgggtaaagctccctcttcggagggagcatcagac

SEQ ID NO: 8738 - DNA, 89 bp, synthetic construct
  misc_feature 1..89: note = engineered ribonucleic acid scaffold (ERS) sequence
  source 1..89: mol_type = other DNA
actggcgcttctatctgattactttgggcgccatcaccagcgactatgtcgtagtgggtaaagctccctcttcggagggagcatcagag

SEQ ID NO: 8739 - DNA, 89 bp, synthetic construct
  misc_feature 1..89: note = engineered ribonucleic acid scaffold (ERS) sequence
  source 1..89: mol_type = other DNA
actggcgcttctatctgattactttgggcgccatcaccagcgactatgtcgtagtgggtaaagctccctcttcggagggagcatcaaag

SEQ ID NO: 8740 - DNA, 89 bp, synthetic construct
  misc_feature 1..89: note = engineered ribonucleic acid scaffold (ERS) sequence
  source 1..89: mol_type = other DNA
actggcgcttctatctgattagtctcggcgccatcaccagcgactatgtcgtagtgggtaaagctccctcttcggagggagcatgagac

SEQ ID NO: 8741 - DNA, 89 bp, synthetic construct
  misc_feature 1..89: note = engineered ribonucleic acid scaffold (ERS) sequence
  source 1..89: mol_type = other DNA
actggcgcttctatctgattagtctgggcgccatcaccagcgactatgtcgtagtgggtaaagctccctcttcggagggagcatcagac

SEQ ID NO: 8742 - DNA, 89 bp, synthetic construct
  misc_feature 1..89: note = engineered ribonucleic acid scaffold (ERS) sequence
  source 1..89: mol_type = other DNA
actggcgcttctatctgattactctcggcgccatcaccagcgactatgtcgtagtgggtaaagctccctcttcggagggagcatgagag

SEQ ID NO: 8743 - DNA, 89 bp, synthetic construct
  misc_feature 1..89: note = engineered ribonucleic acid scaffold (ERS) sequence
  source 1..89: mol_type = other DNA
actggcgctcccatctgattaccccgggcgccatcaccagcgactatgtcgtagtgggtaaagctccctcttcggagggagcatcgggg

SEQ ID NO: 8744 - DNA, 89 bp, synthetic construct
  misc_feature 1..89: note = engineered ribonucleic acid scaffold (ERS) sequence
  source 1..89: mol_type = other DNA
actggcgctcctatctgattactccgggcgccatcaccagcgactatgtcgtagtgggtaaagctccctcttcggagggagcatcggag

SEQ ID NO: 8745 - DNA, 89 bp, synthetic construct
  misc_feature 1..89: note = engineered ribonucleic acid scaffold (ERS) sequence
  source 1..89: mol_type = other DNA
actggcgctgggatctgattaccccgggcgccatcaccagcgactatgtcgtagtgggtaaagctccctcttcggagggagcatcgggg

SEQ ID NO: 8746 - DNA, 89 bp, synthetic construct
  misc_feature 1..89: note = engineered ribonucleic acid scaffold (ERS) sequence
  source 1..89: mol_type = other DNA
actggcgctggtatctgattactccgggcgccatcaccagcgactatgtcgtagtgggtaaagctccctcttcggagggagcatcggag

SEQ ID NO: 8747 - DNA, 89 bp, synthetic construct
  misc_feature 1..89: note = engineered ribonucleic acid scaffold (ERS) sequence
  source 1..89: mol_type = other DNA
actggcgcttccatctgattaccctgggcgccatcaccagcgactatgtcgtagtgggtaaagctccctcttcggagggagcatcaggg

SEQ ID NO: 8748 - DNA, 89 bp, synthetic construct
  misc_feature 1..89: note = engineered ribonucleic acid scaffold (ERS) sequence
  source 1..89: mol_type = other DNA
actggcgcttggatctgattaccctgggcgccatcaccagcgactatgtcgtagtgggtaaagctccctcttcggagggagcatcaggg

SEQ ID NO: 8749 - DNA, 89 bp, synthetic construct
  misc_feature 1..89: note = engineered ribonucleic acid scaffold (ERS) sequence
  source 1..89: mol_type = other DNA
actggcgcttgtatctgattactctgggcgccatcaccagcgactatgtcgtagtgggtaaagctccctcttcggagggagcatcagag

SEQ ID NO: 8750 - DNA, 89 bp, synthetic construct
  misc_feature 1..89: note = engineered ribonucleic acid scaffold (ERS) sequence
  source 1..89: mol_type = other DNA
actggcgcttttatctgattactttgggcgccatcaccagcgactatgtcgtagtgggtaaagctccctcttcggagggagcatcagag

SEQ ID NO: 8751 - DNA, 89 bp, synthetic construct
  misc_feature 1..89: note = engineered ribonucleic acid scaffold (ERS) sequence
  source 1..89: mol_type = other DNA
actggcgcttttatctgattactctgggcgccatcaccagcgactatgtcgtagtgggtaaagctccctcttcggagggagcatcagag

SEQ ID NO: 8752 - DNA, 89 bp, synthetic construct
  misc_feature 1..89: note = engineered ribonucleic acid scaffold (ERS) sequence
  source 1..89: mol_type = other DNA
actggcgcttttatctgattactctgggcgccatcaccagcgactatgtcgtagtgggtaaagctccctcttcggagggagcatcaaag

SEQ ID NO: 8753 - DNA, 89 bp, synthetic construct
  misc_feature 1..89: note = engineered ribonucleic acid scaffold (ERS) sequence
  source 1..89: mol_type = other DNA
actggcgcttctatctgattactctgggcgccatcaccagcgactatgtcgtagtgggtaaagctccctcttcggagggagcctcagag

SEQ ID NO: 8754 - DNA, 89 bp, synthetic construct
  misc_feature 1..89: note = engineered ribonucleic acid scaffold (ERS) sequence
  source 1..89: mol_type = other DNA
actggcgcttctatctgattactctgggcgccatcaccagcgactatgtcgtagtgggtaaagctccctcttcggagggagcgtcagag

SEQ ID NO: 8755 - DNA, 89 bp, synthetic construct
  misc_feature 1..89: note = engineered ribonucleic acid scaffold (ERS) sequence
  source 1..89: mol_type = other DNA
actggcgcttctatctgattactctgggcgccatcaccagcgactatgtcgtagtgggtaaagctccctcttcggagggagcatcaaag

SEQ ID NO: 8756 - DNA, 89 bp, synthetic construct
  misc_feature 1..89: note = engineered ribonucleic acid scaffold (ERS) sequence
  source 1..89: mol_type = other DNA
actggcgcttctatctgattactctcggagccatcaccagcgactatgtcgtagtgggtaaagctccctcttcggagggagcatcagac

SEQ ID NO: 8757 - DNA, 89 bp, synthetic construct
  misc_feature 1..89: note = engineered ribonucleic acid scaffold (ERS) sequence
  source 1..89: mol_type = other DNA
actggcgcttctatctgattactttgggagccatcaccagcgactatgtcgtagtgggtaaagctccctcttcggagggagcatcagag

SEQ ID NO: 8758 - DNA, 89 bp, synthetic construct
  misc_feature 1..89: note = engineered ribonucleic acid scaffold (ERS) sequence
  source 1..89: mol_type = other DNA
actggcgcttctatctgattactttgggagccatcaccagcgactatgtcgtagtgggtaaagctccctcttcggagggagcatcaaag

SEQ ID NO: 8759 - DNA, 89 bp, synthetic construct
  misc_feature 1..89: note = engineered ribonucleic acid scaffold (ERS) sequence
  source 1..89: mol_type = other DNA
actggcgcttctatctgattagtctcggagccatcaccagcgactatgtcgtagtgggtaaagctccctcttcggagggagcatgagac

SEQ ID NO: 8760 - DNA, 89 bp, synthetic construct
  misc_feature 1..89: note = engineered ribonucleic acid scaffold (ERS) sequence
  source 1..89: mol_type = other DNA
actggcgcttctatctgattagtctgggagccatcaccagcgactatgtcgtagtgggtaaagctccctcttcggagggagcatcagac

SEQ ID NO: 8761 - DNA, 89 bp, synthetic construct
  misc_feature 1..89: note = engineered ribonucleic acid scaffold (ERS) sequence
  source 1..89: mol_type = other DNA
actggcgcttctatctgattactctcggagccatcaccagcgactatgtcgtagtgggtaaagctccctcttcggagggagcatgagag

SEQ ID NO: 8762 - DNA, 89 bp, synthetic construct
  misc_feature 1..89: note = engineered ribonucleic acid scaffold (ERS) sequence
  source 1..89: mol_type = other DNA
actggcgctcccatctgattaccccgggagccatcaccagcgactatgtcgtagtgggtaaagctccctcttcggagggagcatcgggg

SEQ ID NO: 8763 - DNA, 89 bp, synthetic construct
  misc_feature 1..89: note = engineered ribonucleic acid scaffold (ERS) sequence
  source 1..89: mol_type = other DNA
actggcgctcctatctgattactccgggagccatcaccagcgactatgtcgtagtgggtaaagctccctcttcggagggagcatcggag

SEQ ID NO: 8764 - DNA, 89 bp, synthetic construct
  misc_feature 1..89: note = engineered ribonucleic acid scaffold (ERS) sequence
  source 1..89: mol_type = other DNA
actggcgctgggatctgattaccccgggagccatcaccagcgactatgtcgtagtgggtaaagctccctcttcggagggagcatcgggg

SEQ ID NO: 8765 - DNA, 89 bp, synthetic construct
  misc_feature 1..89: note = engineered ribonucleic acid scaffold (ERS) sequence
  source 1..89: mol_type = other DNA
actggcgctggtatctgattactccgggagccatcaccagcgactatgtcgtagtgggtaaagctccctcttcggagggagcatcggag

SEQ ID NO: 8766 - DNA, 89 bp, synthetic construct
  misc_feature 1..89: note = engineered ribonucleic acid scaffold (ERS) sequence
  source 1..89: mol_type = other DNA
actggcgcttccatctgattaccctgggagccatcaccagcgactatgtcgtagtgggtaaagctccctcttcggagggagcatcaggg

SEQ ID NO: 8767 - DNA, 89 bp, synthetic construct
  misc_feature 1..89: note = engineered ribonucleic acid scaffold (ERS) sequence
  source 1..89: mol_type = other DNA
actggcgcttggatctgattaccctgggagccatcaccagcgactatgtcgtagtgggtaaagctccctcttcggagggagcatcaggg

SEQ ID NO: 8768 - DNA, 89 bp, synthetic construct
  misc_feature 1..89: note = engineered ribonucleic acid scaffold (ERS) sequence
  source 1..89: mol_type = other DNA
actggcgcttgtatctgattactctgggagccatcaccagcgactatgtcgtagtgggtaaagctccctcttcggagggagcatcagag

SEQ ID NO: 8769 - DNA, 89 bp, synthetic construct
  misc_feature 1..89: note = engineered ribonucleic acid scaffold (ERS) sequence
  source 1..89: mol_type = other DNA
actggcgcttttatctgattactttgggagccatcaccagcgactatgtcgtagtgggtaaagctccctcttcggagggagcatcagag

SEQ ID NO: 8770 - DNA, 89 bp, synthetic construct
  misc_feature 1..89: note = engineered ribonucleic acid scaffold (ERS) sequence
  source 1..89: mol_type = other DNA
actggcgcttttatctgattactctgggagccatcaccagcgactatgtcgtagtgggtaaagctccctcttcggagggagcatcagag

SEQ ID NO: 8771 - DNA, 89 bp, synthetic construct
  misc_feature 1..89: note = engineered ribonucleic acid scaffold (ERS) sequence
  source 1..89: mol_type = other DNA
actggcgcttttatctgattactctgggagccatcaccagcgactatgtcgtagtgggtaaagctccctcttcggagggagcatcaaag

SEQ ID NO: 8772 - DNA, 89 bp, synthetic construct
  misc_feature 1..89: note = engineered ribonucleic acid scaffold (ERS) sequence
  source 1..89: mol_type = other DNA
actggcgcttctatctgattactctgggagccatcaccagcgactatgtcgtagtgggtaaagctccctcttcggagggagcctcagag

SEQ ID NO: 8773 - DNA, 89 bp, synthetic construct
  misc_feature 1..89: note = engineered ribonucleic acid scaffold (ERS) sequence
  source 1..89: mol_type = other DNA
actggcgcttctatctgattactctgggagccatcaccagcgactatgtcgtagtgggtaaagctccctcttcggagggagcgtcagag

SEQ ID NO: 8774 - DNA, 89 bp, synthetic construct
  misc_feature 1..89: note = engineered ribonucleic acid scaffold (ERS) sequence
  source 1..89: mol_type = other DNA
actggcgcttctatctgattactctgggagccatcaccagcgactatgtcgtagtgggtaaagctccctcttcggagggagcatcaaag

SEQ ID NO: 8775 - DNA, 89 bp, synthetic construct
  misc_feature 1..89: note = engineered ribonucleic acid scaffold (ERS) sequence
  source 1..89: mol_type = other DNA
actggcgcttctatctgattactctctgagccatcaccagcgactatgtcgtagtgggtaaagctccctcttcggagggagcatcagac

SEQ ID NO: 8776 - DNA, 89 bp, synthetic construct
  misc_feature 1..89: note = engineered ribonucleic acid scaffold (ERS) sequence
  source 1..89: mol_type = other DNA
actggcgcttctatctgattactttgtgagccatcaccagcgactatgtcgtagtgggtaaagctccctcttcggagggagcatcagag

SEQ ID NO: 8777 - DNA, 89 bp, synthetic construct
  misc_feature 1..89: note = engineered ribonucleic acid scaffold (ERS) sequence
  source 1..89: mol_type = other DNA
actggcgcttctatctgattactttgtgagccatcaccagcgactatgtcgtagtgggtaaagctccctcttcggagggagcatcaaag

SEQ ID NO: 8778 - DNA, 89 bp, synthetic construct
  misc_feature 1..89: note = engineered ribonucleic acid scaffold (ERS) sequence
  source 1..89: mol_type = other DNA
actggcgcttctatctgattagtctctgagccatcaccagcgactatgtcgtagtgggtaaagctccctcttcggagggagcatgagac

SEQ ID NO: 8779 - DNA, 89 bp, synthetic construct
  misc_feature 1..89: note = engineered ribonucleic acid scaffold (ERS) sequence
  source 1..89: mol_type = other DNA
actggcgcttctatctgattagtctgtgagccatcaccagcgactatgtcgtagtgggtaaagctccctcttcggagggagcatcagac

SEQ ID NO: 8780 - DNA, 89 bp, synthetic construct
  misc_feature 1..89: note = engineered ribonucleic acid scaffold (ERS) sequence
  source 1..89: mol_type = other DNA
actggcgcttctatctgattactctctgagccatcaccagcgactatgtcgtagtgggtaaagctccctcttcggagggagcatgagag

SEQ ID NO: 8781 - DNA, 89 bp, synthetic construct
  misc_feature 1..89: note = engineered ribonucleic acid scaffold (ERS) sequence
  source 1..89: mol_type = other DNA
actggcgctcccatctgattaccccgtgagccatcaccagcgactatgtcgtagtgggtaaagctccctcttcggagggagcatcgggg

SEQ ID NO: 8782 - DNA, 89 bp, synthetic construct
  misc_feature 1..89: note = engineered ribonucleic acid scaffold (ERS) sequence
  source 1..89: mol_type = other DNA
actggcgctcctatctgattactccgtgagccatcaccagcgactatgtcgtagtgggtaaagctccctcttcggagggagcatcggag

SEQ ID NO: 8783 - DNA, 89 bp, synthetic construct
  misc_feature 1..89: note = engineered ribonucleic acid scaffold (ERS) sequence
  source 1..89: mol_type = other DNA
actggcgctgggatctgattaccccgtgagccatcaccagcgactatgtcgtagtgggtaaagctccctcttcggagggagcatcgggg

SEQ ID NO: 8784 - DNA, 89 bp, synthetic construct
  misc_feature 1..89: note = engineered ribonucleic acid scaffold (ERS) sequence
  source 1..89: mol_type = other DNA
actggcgctggtatctgattactccgtgagccatcaccagcgactatgtcgtagtgggtaaagctccctcttcggagggagcatcggag

SEQ ID NO: 8785 - DNA, 89 bp, synthetic construct
  misc_feature 1..89: note = engineered ribonucleic acid scaffold (ERS) sequence
  source 1..89: mol_type = other DNA
actggcgcttccatctgattaccctgtgagccatcaccagcgactatgtcgtagtgggtaaagctccctcttcggagggagcatcaggg

SEQ ID NO: 8786 - DNA, 89 bp, synthetic construct
  misc_feature 1..89: note = engineered ribonucleic acid scaffold (ERS) sequence
  source 1..89: mol_type = other DNA
actggcgcttggatctgattaccctgtgagccatcaccagcgactatgtcgtagtgggtaaagctccctcttcggagggagcatcaggg

SEQ ID NO: 8787 - DNA, 89 bp, synthetic construct
  misc_feature 1..89: note = engineered ribonucleic acid scaffold (ERS) sequence
  source 1..89: mol_type = other DNA
actggcgcttgtatctgattactctgtgagccatcaccagcgactatgtcgtagtgggtaaagctccctcttcggagggagcatcagag

SEQ ID NO: 8788 - DNA, 89 bp, synthetic construct
  misc_feature 1..89: note = engineered ribonucleic acid scaffold (ERS) sequence
  source 1..89: mol_type = other DNA
actggcgcttttatctgattactttgtgagccatcaccagcgactatgtcgtagtgggtaaagctccctcttcggagggagcatcagag

SEQ ID NO: 8789 - DNA, 89 bp, synthetic construct
  misc_feature 1..89: note = engineered ribonucleic acid scaffold (ERS) sequence
  source 1..89: mol_type = other DNA
actggcgcttttatctgattactctgtgagccatcaccagcgactatgtcgtagtgggtaaagctccctcttcggagggagcatcagag

SEQ ID NO: 8790 - DNA, 89 bp, synthetic construct
  misc_feature 1..89: note = engineered ribonucleic acid scaffold (ERS) sequence
  source 1..89: mol_type = other DNA
actggcgcttttatctgattactctgtgagccatcaccagcgactatgtcgtagtgggtaaagctccctcttcggagggagcatcaaag

SEQ ID NO: 8791 - DNA, 89 bp, synthetic construct
  misc_feature 1..89: note = engineered ribonucleic acid scaffold (ERS) sequence
  source 1..89: mol_type = other DNA
actggcgcttctatctgattactctgtgagccatcaccagcgactatgtcgtagtgggtaaagctccctcttcggagggagcctcagag

SEQ ID NO: 8792 - DNA, 89 bp, synthetic construct
  misc_feature 1..89: note = engineered ribonucleic acid scaffold (ERS) sequence
  source 1..89: mol_type = other DNA
actggcgcttctatctgattactctgtgagccatcaccagcgactatgtcgtagtgggtaaagctccctcttcggagggagcgtcagag

SEQ ID NO: 8793 - DNA, 89 bp, synthetic construct
  misc_feature 1..89: note = engineered ribonucleic acid scaffold (ERS) sequence
  source 1..89: mol_type = other DNA
actggcgcttctatctgattactctgtgagccatcaccagcgactatgtcgtagtgggtaaagctccctcttcggagggagcatcaaag

SEQ ID NO: 8794 - DNA, 90 bp, synthetic construct
  misc_feature 1..90: note = engineered ribonucleic acid scaffold (ERS) sequence
  source 1..90: mol_type = other DNA
actggcgcttctatctgattactctcaggagccatcaccagcgactatgtcgtagtgggtaaagctccctcttcggagggagcatcagac

SEQ ID NO: 8795 - DNA, 90 bp, synthetic construct
  misc_feature 1..90: note = engineered ribonucleic acid scaffold (ERS) sequence
  source 1..90: mol_type = other DNA
actggcgcttctatctgattactttgaggagccatcaccagcgactatgtcgtagtgggtaaagctccctcttcggagggagcatcagag

SEQ ID NO: 8796 - DNA, 90 bp, synthetic construct
  misc_feature 1..90: note = engineered ribonucleic acid scaffold (ERS) sequence
  source 1..90: mol_type = other DNA
actggcgcttctatctgattactttgaggagccatcaccagcgactatgtcgtagtgggtaaagctccctcttcggagggagcatcaaag

SEQ ID NO: 8797 - DNA, 90 bp, synthetic construct
  misc_feature 1..90: note = engineered ribonucleic acid scaffold (ERS) sequence
  source 1..90: mol_type = other DNA
actggcgcttctatctgattagtctcaggagccatcaccagcgactatgtcgtagtgggtaaagctccctcttcggagggagcatgagac

SEQ ID NO: 8798 - DNA, 90 bp, synthetic construct
  misc_feature 1..90: note = engineered ribonucleic acid scaffold (ERS) sequence
  source 1..90: mol_type = other DNA
actggcgcttctatctgattagtctgaggagccatcaccagcgactatgtcgtagtgggtaaagctccctcttcggagggagcatcagac

SEQ ID NO: 8799 - DNA, 90 bp, synthetic construct
  misc_feature 1..90: note = engineered ribonucleic acid scaffold (ERS) sequence
  source 1..90: mol_type = other DNA
actggcgcttctatctgattactctcaggagccatcaccagcgactatgtcgtagtgggtaaagctccctcttcggagggagcatgagag

SEQ ID NO: 8800 - DNA, 90 bp, synthetic construct
  misc_feature 1..90: note = engineered ribonucleic acid scaffold (ERS) sequence
  source 1..90: mol_type = other DNA
actggcgctcccatctgattaccccgaggagccatcaccagcgactatgtcgtagtgggtaaagctccctcttcggagggagcatcgggg

SEQ ID NO: 8801 - DNA, 90 bp, synthetic construct
  misc_feature 1..90: note = engineered ribonucleic acid scaffold (ERS) sequence
  source 1..90: mol_type = other DNA
actggcgctcctatctgattactccgaggagccatcaccagcgactatgtcgtagtgggtaaagctccctcttcggagggagcatcggag

SEQ ID NO: 8802 - DNA, 90 bp, synthetic construct
  misc_feature 1..90: note = engineered ribonucleic acid scaffold (ERS) sequence
  source 1..90: mol_type = other DNA
actggcgctgggatctgattaccccgaggagccatcaccagcgactatgtcgtagtgggtaaagctccctcttcggagggagcatcgggg

SEQ ID NO: 8803 - DNA, 90 bp, synthetic construct
  misc_feature 1..90: note = engineered ribonucleic acid scaffold (ERS) sequence
  source 1..90: mol_type = other DNA
actggcgctggtatctgattactccgaggagccatcaccagcgactatgtcgtagtgggtaaagctccctcttcggagggagcatcggag

SEQ ID NO: 8804 - DNA, 90 bp, synthetic construct
  misc_feature 1..90: note = engineered ribonucleic acid scaffold (ERS) sequence
  source 1..90: mol_type = other DNA
actggcgcttccatctgattaccctgaggagccatcaccagcgactatgtcgtagtgggtaaagctccctcttcggagggagcatcaggg

SEQ ID NO: 8805 - DNA, 90 bp, synthetic construct
  misc_feature 1..90: note = engineered ribonucleic acid scaffold (ERS) sequence
  source 1..90: mol_type = other DNA
actggcgcttggatctgattaccctgaggagccatcaccagcgactatgtcgtagtgggtaaagctccctcttcggagggagcatcaggg

SEQ ID NO: 8806 - DNA, 90 bp, synthetic construct
  misc_feature 1..90: note = engineered ribonucleic acid scaffold (ERS) sequence
  source 1..90: mol_type = other DNA
actggcgcttgtatctgattactctgaggagccatcaccagcgactatgtcgtagtgggtaaagctccctcttcggagggagcatcagag

SEQ ID NO: 8807 - DNA, 90 bp, synthetic construct
  misc_feature 1..90: note = engineered ribonucleic acid scaffold (ERS) sequence
  source 1..90: mol_type = other DNA
actggcgcttttatctgattactttgaggagccatcaccagcgactatgtcgtagtgggtaaagctccctcttcggagggagcatcagag

SEQ ID NO: 8808 - DNA, 90 bp, synthetic construct
  misc_feature 1..90: note = engineered ribonucleic acid scaffold (ERS) sequence
  source 1..90: mol_type = other DNA
actggcgcttttatctgattactctgaggagccatcaccagcgactatgtcgtagtgggtaaagctccctcttcggagggagcatcagag

SEQ ID NO: 8809 - DNA, 90 bp, synthetic construct
  misc_feature 1..90: note = engineered ribonucleic acid scaffold (ERS) sequence
  source 1..90: mol_type = other DNA
actggcgcttttatctgattactctgaggagccatcaccagcgactatgtcgtagtgggtaaagctccctcttcggagggagcatcaaag

SEQ ID NO: 8810 - DNA, 90 bp, synthetic construct
  misc_feature 1..90: note = engineered ribonucleic acid scaffold (ERS) sequence
  source 1..90: mol_type = other DNA
actggcgcttctatctgattactctgaggagccatcaccagcgactatgtcgtagtgggtaaagctccctcttcggagggagcctcagag

SEQ ID NO: 8811 - DNA, 90 bp, synthetic construct
  misc_feature 1..90: note = engineered ribonucleic acid scaffold (ERS) sequence
  source 1..90: mol_type = other DNA
actggcgcttctatctgattactctgaggagccatcaccagcgactatgtcgtagtgggtaaagctccctcttcggagggagcgtcagag

SEQ ID NO: 8812 - DNA, 90 bp, synthetic construct
  misc_feature 1..90: note = engineered ribonucleic acid scaffold (ERS) sequence
  source 1..90: mol_type = other DNA
actggcgcttctatctgattactctgaggagccatcaccagcgactatgtcgtagtgggtaaagctccctcttcggagggagcatcaaag

SEQ ID NO: 8813 - DNA, 89 bp, synthetic construct
  misc_feature 1..89: note = engineered ribonucleic acid scaffold (ERS) sequence
  source 1..89: mol_type = other DNA
actggcgcttctatctgattactctcatagccatcaccagcgactatgtcgtagtgggtaaagctccctcttcggagggagcatcagac

SEQ ID NO: 8814 - DNA, 89 bp, synthetic construct
  misc_feature 1..89: note = engineered ribonucleic acid scaffold (ERS) sequence
  source 1..89: mol_type = other DNA
actggcgcttctatctgattactttgatagccatcaccagcgactatgtcgtagtgggtaaagctccctcttcggagggagcatcagag

SEQ ID NO: 8815 - DNA, 89 bp, synthetic construct
  misc_feature 1..89: note = engineered ribonucleic acid scaffold (ERS) sequence
  source 1..89: mol_type = other DNA
actggcgcttctatctgattactttgatagccatcaccagcgactatgtcgtagtgggtaaagctccctcttcggagggagcatcaaag

SEQ ID NO: 8816 - DNA, 89 bp, synthetic construct
  misc_feature 1..89: note = engineered ribonucleic acid scaffold (ERS) sequence
  source 1..89: mol_type = other DNA
actggcgcttctatctgattagtctcatagccatcaccagcgactatgtcgtagtgggtaaagctccctcttcggagggagcatgagac

SEQ ID NO: 8817 - DNA, 89 bp, synthetic construct
  misc_feature 1..89: note = engineered ribonucleic acid scaffold (ERS) sequence
  source 1..89: mol_type = other DNA
actggcgcttctatctgattagtctgatagccatcaccagcgactatgtcgtagtgggtaaagctccctcttcggagggagcatcagac

SEQ ID NO: 8818 - DNA, 89 bp, synthetic construct
  misc_feature 1..89: note = engineered ribonucleic acid scaffold (ERS) sequence
  source 1..89: mol_type = other DNA
actggcgcttctatctgattactctcatagccatcaccagcgactatgtcgtagtgggtaaagctccctcttcggagggagcatgagag

SEQ ID NO: 8819 - DNA, 89 bp, synthetic construct
  misc_feature 1..89: note = engineered ribonucleic acid scaffold (ERS) sequence
  source 1..89: mol_type = other DNA
actggcgctcccatctgattaccccgatagccatcaccagcgactatgtcgtagtgggtaaagctccctcttcggagggagcatcgggg

SEQ ID NO: 8820 - DNA, 89 bp, synthetic construct
  misc_feature 1..89: note = engineered ribonucleic acid scaffold (ERS) sequence
  source 1..89: mol_type = other DNA
actggcgctcctatctgattactccgatagccatcaccagcgactatgtcgtagtgggtaaagctccctcttcggagggagcatcggag

SEQ ID NO: 8821 - DNA, 89 bp, synthetic construct
  misc_feature 1..89: note = engineered ribonucleic acid scaffold (ERS) sequence
  source 1..89: mol_type = other DNA
actggcgctgggatctgattaccccgatagccatcaccagcgactatgtcgtagtgggtaaagctccctcttcggagggagcatcgggg

SEQ ID NO: 8822 - DNA, 89 bp, synthetic construct
  misc_feature 1..89: note = engineered ribonucleic acid scaffold (ERS) sequence
  source 1..89: mol_type = other DNA
actggcgctggtatctgattactccgatagccatcaccagcgactatgtcgtagtgggtaaagctccctcttcggagggagcatcggag

SEQ ID NO: 8823 - DNA, 89 bp, synthetic construct
  misc_feature 1..89: note = engineered ribonucleic acid scaffold (ERS) sequence
  source 1..89: mol_type = other DNA
actggcgcttccatctgattaccctgatagccatcaccagcgactatgtcgtagtgggtaaagctccctcttcggagggagcatcaggg

SEQ ID NO: 8824 - DNA, 89 bp, synthetic construct
  misc_feature 1..89: note = engineered ribonucleic acid scaffold (ERS) sequence
  source 1..89: mol_type = other DNA
actggcgcttggatctgattaccctgatagccatcaccagcgactatgtcgtagtgggtaaagctccctcttcggagggagcatcaggg

SEQ ID NO: 8825 - DNA, 89 bp, synthetic construct
  misc_feature 1..89: note = engineered ribonucleic acid scaffold (ERS) sequence
  source 1..89: mol_type = other DNA
actggcgcttgtatctgattactctgatagccatcaccagcgactatgtcgtagtgggtaaagctccctcttcggagggagcatcagag

SEQ ID NO: 8826 - DNA, 89 bp, synthetic construct
  misc_feature 1..89: note = engineered ribonucleic acid scaffold (ERS) sequence
  source 1..89: mol_type = other DNA
actggcgcttttatctgattactttgatagccatcaccagcgactatgtcgtagtgggtaaagctccctcttcggagggagcatcagag

SEQ ID NO: 8827 - DNA, 89 bp, synthetic construct
  misc_feature 1..89: note = engineered ribonucleic acid scaffold (ERS) sequence
  source 1..89: mol_type = other DNA
actggcgcttttatctgattactctgatagccatcaccagcgactatgtcgtagtgggtaaagctccctcttcggagggagcatcagag

SEQ ID NO: 8828 - DNA, 89 bp, synthetic construct
  misc_feature 1..89: note = engineered ribonucleic acid scaffold (ERS) sequence
  source 1..89: mol_type = other DNA
actggcgcttttatctgattactctgatagccatcaccagcgactatgtcgtagtgggtaaagctccctcttcggagggagcatcaaag

SEQ ID NO: 8829 - DNA, 89 bp, synthetic construct
  misc_feature 1..89: note = engineered ribonucleic acid scaffold (ERS) sequence
  source 1..89: mol_type = other DNA
actggcgcttctatctgattactctgatagccatcaccagcgactatgtcgtagtgggtaaagctccctcttcggagggagcctcagag

SEQ ID NO: 8830 - DNA, 89 bp, synthetic construct
  misc_feature 1..89: note = engineered ribonucleic acid scaffold (ERS) sequence
  source 1..89: mol_type = other DNA
actggcgcttctatctgattactctgatagccatcaccagcgactatgtcgtagtgggtaaagctccctcttcggagggagcgtcagag

SEQ ID NO: 8831 - DNA, 89 bp, synthetic construct
  misc_feature 1..89: note = engineered ribonucleic acid scaffold (ERS) sequence
  source 1..89: mol_type = other DNA
actggcgcttctatctgattactctgatagccatcaccagcgactatgtcgtagtgggtaaagctccctcttcggagggagcatcaaag

SEQ ID NO: 8832 - DNA, 90 bp, synthetic construct
  misc_feature 1..90: note = engineered ribonucleic acid scaffold (ERS) sequence
  source 1..90: mol_type = other DNA
actggcgcttctatctgattactctcagctgccatcaccagcgactatgtcgtagtgggtaaagctccctcttcggagggagcatcagac

SEQ ID NO: 8833 - DNA, 90 bp, synthetic construct
  misc_feature 1..90: note = engineered ribonucleic acid scaffold (ERS) sequence
  source 1..90: mol_type = other DNA
actggcgcttctatctgattactttgagctgccatcaccagcgactatgtcgtagtgggtaaagctccctcttcggagggagcatcagag

SEQ ID NO: 8834 - DNA, 90 bp, synthetic construct
  misc_feature 1..90: note = engineered ribonucleic acid scaffold (ERS) sequence
  source 1..90: mol_type = other DNA
actggcgcttctatctgattactttgagctgccatcaccagcgactatgtcgtagtgggtaaagctccctcttcggagggagcatcaaag

SEQ ID NO: 8835 - DNA, 90 bp, synthetic construct
  misc_feature 1..90: note = engineered ribonucleic acid scaffold (ERS) sequence
  source 1..90: mol_type = other DNA
actggcgcttctatctgattagtctcagctgccatcaccagcgactatgtcgtagtgggtaaagctccctcttcggagggagcatgagac

SEQ ID NO: 8836 - DNA, 90 bp, synthetic construct
  misc_feature 1..90: note = engineered ribonucleic acid scaffold (ERS) sequence
  source 1..90: mol_type = other DNA
actggcgcttctatctgattagtctgagctgccatcaccagcgactatgtcgtagtgggtaaagctccctcttcggagggagcatcagac

SEQ ID NO: 8837 - DNA, 90 bp, synthetic construct
  misc_feature 1..90: note = engineered ribonucleic acid scaffold (ERS) sequence
  source 1..90: mol_type = other DNA
actggcgcttctatctgattactctcagctgccatcaccagcgactatgtcgtagtgggtaaagctccctcttcggagggagcatgagag

SEQ ID NO: 8838 - DNA, 90 bp, synthetic construct
  misc_feature 1..90: note = engineered ribonucleic acid scaffold (ERS) sequence
  source 1..90: mol_type = other DNA
actggcgctcccatctgattaccccgagctgccatcaccagcgactatgtcgtagtgggtaaagctccctcttcggagggagcatcgggg

SEQ ID NO: 8839 - DNA, 90 bp, synthetic construct
  misc_feature 1..90: note = engineered ribonucleic acid scaffold (ERS) sequence
  source 1..90: mol_type = other DNA
actggcgctcctatctgattactccgagctgccatcaccagcgactatgtcgtagtgggtaaagctccctcttcggagggagcatcggag

SEQ ID NO: 8840 - DNA, 90 bp, synthetic construct
  misc_feature 1..90: note = engineered ribonucleic acid scaffold (ERS) sequence
  source 1..90: mol_type = other DNA
actggcgctgggatctgattaccccgagctgccatcaccagcgactatgtcgtagtgggtaaagctccctcttcggagggagcatcgggg

SEQ ID NO: 8841 - DNA, 90 bp, synthetic construct
  misc_feature 1..90: note = engineered ribonucleic acid scaffold (ERS) sequence
  source 1..90: mol_type = other DNA
actggcgctggtatctgattactccgagctgccatcaccagcgactatgtcgtagtgggtaaagctccctcttcggagggagcatcggag

SEQ ID NO: 8842 - DNA, 90 bp, synthetic construct
  misc_feature 1..90: note = engineered ribonucleic acid scaffold (ERS) sequence
  source 1..90: mol_type = other DNA
actggcgcttccatctgattaccctgagctgccatcaccagcgactatgtcgtagtgggtaaagctccctcttcggagggagcatcaggg

SEQ ID NO: 8843 - DNA, 90 bp, synthetic construct
  misc_feature 1..90: note = engineered ribonucleic acid scaffold (ERS) sequence
  source 1..90: mol_type = other DNA
actggcgcttggatctgattaccctgagctgccatcaccagcgactatgtcgtagtgggtaaagctccctcttcggagggagcatcaggg

SEQ ID NO: 8844 - DNA, 90 bp, synthetic construct
  misc_feature 1..90: note = engineered ribonucleic acid scaffold (ERS) sequence
  source 1..90: mol_type = other DNA
actggcgcttgtatctgattactctgagctgccatcaccagcgactatgtcgtagtgggtaaagctccctcttcggagggagcatcagag

SEQ ID NO: 8845 - DNA, 90 bp, synthetic construct
  misc_feature 1..90: note = engineered ribonucleic acid scaffold (ERS) sequence
  source 1..90: mol_type = other DNA
actggcgcttttatctgattactttgagctgccatcaccagcgactatgtcgtagtgggtaaagctccctcttcggagggagcatcagag

SEQ ID NO: 8846 - DNA, 90 bp, synthetic construct
  misc_feature 1..90: note = engineered ribonucleic acid scaffold (ERS) sequence
  source 1..90: mol_type = other DNA
actggcgcttttatctgattactctgagctgccatcaccagcgactatgtcgtagtgggtaaagctccctcttcggagggagcatcagag

SEQ ID NO: 8847 - DNA, 90 bp, synthetic construct
  misc_feature 1..90: note = engineered ribonucleic acid scaffold (ERS) sequence
  source 1..90: mol_type = other DNA
actggcgcttttatctgattactctgagctgccatcaccagcgactatgtcgtagtgggtaaagctccctcttcggagggagcatcaaag

SEQ ID NO: 8848 - DNA, 90 bp, synthetic construct
  misc_feature 1..90: note = engineered ribonucleic acid scaffold (ERS) sequence
  source 1..90: mol_type = other DNA
actggcgcttctatctgattactctgagctgccatcaccagcgactatgtcgtagtgggtaaagctccctcttcggagggagcctcagag

SEQ ID NO: 8849 - DNA, 90 bp, synthetic construct
  misc_feature 1..90: note = engineered ribonucleic acid scaffold (ERS) sequence
  source 1..90: mol_type = other DNA
actggcgcttctatctgattactctgagctgccatcaccagcgactatgtcgtagtgggtaaagctccctcttcggagggagcgtcagag

SEQ ID NO: 8850 - DNA, 90 bp, synthetic construct
  misc_feature 1..90: note = engineered ribonucleic acid scaffold (ERS) sequence
  source 1..90: mol_type = other DNA
actggcgcttctatctgattactctgagctgccatcaccagcgactatgtcgtagtgggtaaagctccctcttcggagggagcatcaaag

SEQ ID NO: 8851 - DNA, 90 bp, synthetic construct
  misc_feature 1..90: note = engineered ribonucleic acid scaffold (ERS) sequence
  source 1..90: mol_type = other DNA
actggcacttctatctgattactctcagtagccatcaccagcgactatgtcgtagtgggtaaagctccctcttcggagggagcatcagac

SEQ ID NO: 8852 - DNA, 90 bp, synthetic construct
  misc_feature 1..90: note = engineered ribonucleic acid scaffold (ERS) sequence
  source 1..90: mol_type = other DNA
actggcacttctatctgattactttgagtagccatcaccagcgactatgtcgtagtgggtaaagctccctcttcggagggagcatcagag

SEQ ID NO: 8853 - DNA, 90 bp, synthetic construct
  misc_feature 1..90: note = engineered ribonucleic acid scaffold (ERS) sequence
  source 1..90: mol_type = other DNA
actggcacttctatctgattactttgagtagccatcaccagcgactatgtcgtagtgggtaaagctccctcttcggagggagcatcaaag

SEQ ID NO: 8854 - DNA, 90 bp, synthetic construct
  misc_feature 1..90: note = engineered ribonucleic acid scaffold (ERS) sequence
  source 1..90: mol_type = other DNA
actggcacttctatctgattagtctcagtagccatcaccagcgactatgtcgtagtgggtaaagctccctcttcggagggagcatgagac

SEQ ID NO: 8855 - DNA, 90 bp, synthetic construct
  misc_feature 1..90: note = engineered ribonucleic acid scaffold (ERS) sequence
  source 1..90: mol_type = other DNA
actggcacttctatctgattagtctgagtagccatcaccagcgactatgtcgtagtgggtaaagctccctcttcggagggagcatcagac

SEQ ID NO: 8856 - DNA, 90 bp, synthetic construct
  misc_feature 1..90: note = engineered ribonucleic acid scaffold (ERS) sequence
  source 1..90: mol_type = other DNA
actggcacttctatctgattactctcagtagccatcaccagcgactatgtcgtagtgggtaaagctccctcttcggagggagcatgagag

SEQ ID NO: 8857 - DNA, 90 bp, synthetic construct
  misc_feature 1..90: note = engineered ribonucleic acid scaffold (ERS) sequence
  source 1..90: mol_type = other DNA
actggcgcttctatctgattactctcagtagccatcaccagcgactatgtcgtagtgggtaaagctccctcttcggagggagcatcagac

SEQ ID NO: 8858 - DNA, 90 bp, synthetic construct
  misc_feature 1..90: note = engineered ribonucleic acid scaffold (ERS) sequence
  source 1..90: mol_type = other DNA
actggcgcttctatctgattactttgagtagccatcaccagcgactatgtcgtagtgggtaaagctccctcttcggagggagcatcagag

SEQ ID NO: 8859 - DNA, 90 bp, synthetic construct
  misc_feature 1..90: note = engineered ribonucleic acid scaffold (ERS) sequence
  source 1..90: mol_type = other DNA
actggcgcttctatctgattactttgagtagccatcaccagcgactatgtcgtagtgggtaaagctccctcttcggagggagcatcaaag

SEQ ID NO: 8860 - DNA, 90 bp, synthetic construct
  misc_feature 1..90: note = engineered ribonucleic acid scaffold (ERS) sequence
  source 1..90: mol_type = other DNA
actggcgcttctatctgattagtctcagtagccatcaccagcgactatgtcgtagtgggtaaagctccctcttcggagggagcatgagac

SEQ ID NO: 8861 - DNA, 90 bp, synthetic construct
  misc_feature 1..90: note = engineered ribonucleic acid scaffold (ERS) sequence
  source 1..90: mol_type = other DNA
actggcgcttctatctgattagtctgagtagccatcaccagcgactatgtcgtagtgggtaaagctccctcttcggagggagcatcagac

SEQ ID NO: 8862 - DNA, 90 bp, synthetic construct
  misc_feature 1..90: note = engineered ribonucleic acid scaffold (ERS) sequence
  source 1..90: mol_type = other DNA
actggcgcttctatctgattactctcagtagccatcaccagcgactatgtcgtagtgggtaaagctccctcttcggagggagcatgagag

SEQ ID NO: 8863 - DNA, 90 bp, synthetic construct
  misc_feature 1..90: note = engineered ribonucleic acid scaffold (ERS) sequence
  source 1..90: mol_type = other DNA
actggcgctcccatctgattaccccgagtagccatcaccagcgactatgtcgtagtgggtaaagctccctcttcggagggagcatcgggg

SEQ ID NO: 8864 - DNA, 90 bp, synthetic construct
  misc_feature 1..90: note = engineered ribonucleic acid scaffold (ERS) sequence
  source 1..90: mol_type = other DNA
actggcgctcctatctgattactccgagtagccatcaccagcgactatgtcgtagtgggtaaagctccctcttcggagggagcatcggag

SEQ ID NO: 8865 - DNA, 90 bp, synthetic construct
  misc_feature 1..90: note = engineered ribonucleic acid scaffold (ERS) sequence
  source 1..90: mol_type = other DNA
actggcgctgggatctgattaccccgagtagccatcaccagcgactatgtcgtagtgggtaaagctccctcttcggagggagcatcgggg

SEQ ID NO: 8866 - DNA, 90 bp, synthetic construct
  misc_feature 1..90: note = engineered ribonucleic acid scaffold (ERS) sequence
  source 1..90: mol_type = other DNA
actggcgctggtatctgattactccgagtagccatcaccagcgactatgtcgtagtgggtaaagctccctcttcggagggagcatcggag

SEQ ID NO: 8867 - DNA, 90 bp, synthetic construct
  misc_feature 1..90: note = engineered ribonucleic acid scaffold (ERS) sequence
  source 1..90: mol_type = other DNA
actggcgcttccatctgattaccctgagtagccatcaccagcgactatgtcgtagtgggtaaagctccctcttcggagggagcatcaggg

SEQ ID NO: 8868 - DNA, 90 bp, synthetic construct
  misc_feature 1..90: note = engineered ribonucleic acid scaffold (ERS) sequence
  source 1..90: mol_type = other DNA
actggcgcttggatctgattaccctgagtagccatcaccagcgactatgtcgtagtgggtaaagctccctcttcggagggagcatcaggg

SEQ ID NO: 8869 - DNA, 90 bp, synthetic construct
  misc_feature 1..90: note = engineered ribonucleic acid scaffold (ERS) sequence
  source 1..90: mol_type = other DNA
actggcgcttgtatctgattactctgagtagccatcaccagcgactatgtcgtagtgggtaaagctccctcttcggagggagcatcagag

SEQ ID NO: 8870 - DNA, 90 bp, synthetic construct
  misc_feature 1..90: note = engineered ribonucleic acid scaffold (ERS) sequence
  source 1..90: mol_type = other DNA
actggcgcttttatctgattactttgagtagccatcaccagcgactatgtcgtagtgggtaaagctccctcttcggagggagcatcagag

SEQ ID NO: 8871 - DNA, 90 bp, synthetic construct
  misc_feature 1..90: note = engineered ribonucleic acid scaffold (ERS) sequence
  source 1..90: mol_type = other DNA
actggcgcttttatctgattactctgagtagccatcaccagcgactatgtcgtagtgggtaaagctccctcttcggagggagcatcagag

SEQ ID NO: 8872 - DNA, 90 bp, synthetic construct
  misc_feature 1..90: note = engineered ribonucleic acid scaffold (ERS) sequence
  source 1..90: mol_type = other DNA
actggcgcttttatctgattactctgagtagccatcaccagcgactatgtcgtagtgggtaaagctccctcttcggagggagcatcaaag

SEQ ID NO: 8873 - DNA, 90 bp, synthetic construct
  misc_feature 1..90: note = engineered ribonucleic acid scaffold (ERS) sequence
  source 1..90: mol_type = other DNA
actggcgcttctatctgattactctgagtagccatcaccagcgactatgtcgtagtgggtaaagctccctcttcggagggagcctcagag

SEQ ID NO: 8874 - DNA, 90 bp, synthetic construct
  misc_feature 1..90: note = engineered ribonucleic acid scaffold (ERS) sequence
  source 1..90: mol_type = other DNA
actggcgcttctatctgattactctgagtagccatcaccagcgactatgtcgtagtgggtaaagctccctcttcggagggagcgtcagag

SEQ ID NO: 8875 - DNA, 90 bp, synthetic construct
  misc_feature 1..90: note = engineered ribonucleic acid scaffold (ERS) sequence
  source 1..90: mol_type = other DNA
actggcgcttctatctgattactctgagtagccatcaccagcgactatgtcgtagtgggtaaagctccctcttcggagggagcatcaaag

SEQ ID NO: 8876 - DNA, 90 bp, synthetic construct
  misc_feature 1..90: note = engineered ribonucleic acid scaffold (ERS) sequence
  source 1..90: mol_type = other DNA
actggcactcccatctgattaccccgagtagccatcaccagcgactatgtcgtagtgggtaaagctccctcttcggagggagcatcgggg

SEQ ID NO: 8877 - DNA, 90 bp, synthetic construct
  misc_feature 1..90: note = engineered ribonucleic acid scaffold (ERS) sequence
  source 1..90: mol_type = other DNA
actggcactcctatctgattactccgagtagccatcaccagcgactatgtcgtagtgggtaaagctccctcttcggagggagcatcggag

SEQ ID NO: 8878 - DNA, 90 bp, synthetic construct
  misc_feature 1..90: note = engineered ribonucleic acid scaffold (ERS) sequence
  source 1..90: mol_type = other DNA
actggcactgggatctgattaccccgagtagccatcaccagcgactatgtcgtagtgggtaaagctccctcttcggagggagcatcgggg

SEQ ID NO: 8879 - DNA, 90 bp, synthetic construct
  misc_feature 1..90: note = engineered ribonucleic acid scaffold (ERS) sequence
  source 1..90: mol_type = other DNA
actggcactggtatctgattactccgagtagccatcaccagcgactatgtcgtagtgggtaaagctccctcttcggagggagcatcggag

SEQ ID NO: 8880 - DNA, 90 bp, synthetic construct
  misc_feature 1..90: note = engineered ribonucleic acid scaffold (ERS) sequence
  source 1..90: mol_type = other DNA
actggcacttccatctgattaccctgagtagccatcaccagcgactatgtcgtagtgggtaaagctccctcttcggagggagcatcaggg

SEQ ID NO: 8881 - DNA, 90 bp, synthetic construct
  misc_feature 1..90: note = engineered ribonucleic acid scaffold (ERS) sequence
  source 1..90: mol_type = other DNA
actggcacttggatctgattaccctgagtagccatcaccagcgactatgtcgtagtgggtaaagctccctcttcggagggagcatcaggg

SEQ ID NO: 8882 - DNA, 90 bp, synthetic construct
  misc_feature 1..90: note = engineered ribonucleic acid scaffold (ERS) sequence
  source 1..90: mol_type = other DNA
actggcacttgtatctgattactctgagtagccatcaccagcgactatgtcgtagtgggtaaagctccctcttcggagggagcatcagag

SEQ ID NO: 8883 - DNA, 90 bp, synthetic construct
  misc_feature 1..90: note = engineered ribonucleic acid scaffold (ERS) sequence
  source 1..90: mol_type = other DNA
actggcacttttatctgattactttgagtagccatcaccagcgactatgtcgtagtgggtaaagctccctcttcggagggagcatcagag

SEQ ID NO: 8884 - DNA, 90 bp, synthetic construct
  misc_feature 1..90: note = engineered ribonucleic acid scaffold (ERS) sequence
  source 1..90: mol_type = other DNA
actggcacttttatctgattactctgagtagccatcaccagcgactatgtcgtagtgggtaaagctccctcttcggagggagcatcagag

SEQ ID NO: 8885 - DNA, 90 bp, synthetic construct
  misc_feature 1..90: note = engineered ribonucleic acid scaffold (ERS) sequence
  source 1..90: mol_type = other DNA
actggcacttttatctgattactctgagtagccatcaccagcgactatgtcgtagtgggtaaagctccctcttcggagggagcatcaaag

SEQ ID NO: 8886 - DNA, 90 bp, synthetic construct
  misc_feature 1..90: note = engineered ribonucleic acid scaffold (ERS) sequence
  source 1..90: mol_type = other DNA
actggcacttctatctgattactctgagtagccatcaccagcgactatgtcgtagtgggtaaagctccctcttcggagggagcctcagag

SEQ ID NO: 8887 - DNA, 90 bp, synthetic construct
  misc_feature 1..90: note = engineered ribonucleic acid scaffold (ERS) sequence
  source 1..90: mol_type = other DNA
actggcacttctatctgattactctgagtagccatcaccagcgactatgtcgtagtgggtaaagctccctcttcggagggagcgtcagag

SEQ ID NO: 8888 - DNA, 90 bp, synthetic construct
  misc_feature 1..90: note = engineered ribonucleic acid scaffold (ERS) sequence
  source 1..90: mol_type = other DNA
actggcacttctatctgattactctgagtagccatcaccagcgactatgtcgtagtgggtaaagctccctcttcggagggagcatcaaag

SEQ ID NO: 8889 - DNA, 89 bp, synthetic construct
  misc_feature 1..89: note = engineered ribonucleic acid scaffold (ERS) sequence
  source 1..89: mol_type = other DNA
actggcacttctatctgattactctcagcgccatcaccagcgactatgtcgtagtgggtaaagctccctcttcggagggagcatcagac

SEQ ID NO: 8890 - DNA, 89 bp, synthetic construct
  misc_feature 1..89: note = engineered ribonucleic acid scaffold (ERS) sequence
  source 1..89: mol_type = other DNA
actggcacttctatctgattactttgagcgccatcaccagcgactatgtcgtagtgggtaaagctccctcttcggagggagcatcagag

SEQ ID NO: 8891 - DNA, 89 bp, synthetic construct
  misc_feature 1..89: note = engineered ribonucleic acid scaffold (ERS) sequence
  source 1..89: mol_type = other DNA
actggcacttctatctgattactttgagcgccatcaccagcgactatgtcgtagtgggtaaagctccctcttcggagggagcatcaaag

SEQ ID NO: 8892 - DNA, 89 bp, synthetic construct
  misc_feature 1..89: note = engineered ribonucleic acid scaffold (ERS) sequence
  source 1..89: mol_type = other DNA
actggcacttctatctgattagtctcagcgccatcaccagcgactatgtcgtagtgggtaaagctccctcttcggagggagcatgagac

SEQ ID NO: 8893 - DNA, 89 bp, synthetic construct
  misc_feature 1..89: note = engineered ribonucleic acid scaffold (ERS) sequence
  source 1..89: mol_type = other DNA
actggcacttctatctgattagtctgagcgccatcaccagcgactatgtcgtagtgggtaaagctccctcttcggagggagcatcagac

SEQ ID NO: 8894 - DNA, 89 bp, synthetic construct
  misc_feature 1..89: note = engineered ribonucleic acid scaffold (ERS) sequence
  source 1..89: mol_type = other DNA
actggcacttctatctgattactctcagcgccatcaccagcgactatgtcgtagtgggtaaagctccctcttcggagggagcatgagag

SEQ ID NO: 8895 - DNA, 89 bp, synthetic construct
  misc_feature 1..89: note = engineered ribonucleic acid scaffold (ERS) sequence
  source 1..89: mol_type = other DNA
actggcgcttctatctgattactctcagcaccatcaccagcgactatgtcgtagtgggtaaagctccctcttcggagggagcatcagac

SEQ ID NO: 8896 - DNA, 89 bp, synthetic construct
  misc_feature 1..89: note = engineered ribonucleic acid scaffold (ERS) sequence
  source 1..89: mol_type = other DNA
actggcgcttctatctgattactttgagcaccatcaccagcgactatgtcgtagtgggtaaagctccctcttcggagggagcatcagag

SEQ ID NO: 8897 - DNA, 89 bp, synthetic construct
  misc_feature 1..89: note = engineered ribonucleic acid scaffold (ERS) sequence
  source 1..89: mol_type = other DNA
actggcgcttctatctgattactttgagcaccatcaccagcgactatgtcgtagtgggtaaagctccctcttcggagggagcatcaaag

SEQ ID NO: 8898 - DNA, 89 bp, synthetic construct
  misc_feature 1..89: note = engineered ribonucleic acid scaffold (ERS) sequence
  source 1..89: mol_type = other DNA
actggcgcttctatctgattagtctcagcaccatcaccagcgactatgtcgtagtgggtaaagctccctcttcggagggagcatgagac

SEQ ID NO: 8899 - DNA, 89 bp, synthetic construct
  misc_feature 1..89: note = engineered ribonucleic acid scaffold (ERS) sequence
  source 1..89: mol_type = other DNA
actggcgcttctatctgattagtctgagcaccatcaccagcgactatgtcgtagtgggtaaagctccctcttcggagggagcatcagac

SEQ ID NO: 8900 - DNA, 89 bp, synthetic construct
  misc_feature 1..89: note = engineered ribonucleic acid scaffold (ERS) sequence
  source 1..89: mol_type = other DNA
actggcgcttctatctgattactctcagcaccatcaccagcgactatgtcgtagtgggtaaagctccctcttcggagggagcatgagag

SEQ ID NO: 8901 - DNA, 89 bp, synthetic construct
  misc_feature 1..89: note = engineered ribonucleic acid scaffold (ERS) sequence
  source 1..89: mol_type = other DNA
actggcgctcccatctgattaccccgagcaccatcaccagcgactatgtcgtagtgggtaaagctccctcttcggagggagcatcgggg

SEQ ID NO: 8902 - DNA, 89 bp, synthetic construct
  misc_feature 1..89: note = engineered ribonucleic acid scaffold (ERS) sequence
  source 1..89: mol_type = other DNA
actggcgctcctatctgattactccgagcaccatcaccagcgactatgtcgtagtgggtaaagctccctcttcggagggagcatcggag

SEQ ID NO: 8903 - DNA, 89 bp, synthetic construct
  misc_feature 1..89: note = engineered ribonucleic acid scaffold (ERS) sequence
  source 1..89: mol_type = other DNA
actggcgctgggatctgattaccccgagcaccatcaccagcgactatgtcgtagtgggtaaagctccctcttcggagggagcatcgggg

SEQ ID NO: 8904 - DNA, 89 bp, synthetic construct
  misc_feature 1..89: note = engineered ribonucleic acid scaffold (ERS) sequence
  source 1..89: mol_type = other DNA
actggcgctggtatctgattactccgagcaccatcaccagcgactatgtcgtagtgggtaaagctccctcttcggagggagcatcggag

SEQ ID NO: 8905 - DNA, 89 bp, synthetic construct
  misc_feature 1..89: note = engineered ribonucleic acid scaffold (ERS) sequence
  source 1..89: mol_type = other DNA
actggcgcttccatctgattaccctgagcaccatcaccagcgactatgtcgtagtgggtaaagctccctcttcggagggagcatcaggg

SEQ ID NO: 8906 - DNA, 89 bp, synthetic construct
  misc_feature 1..89: note = engineered ribonucleic acid scaffold (ERS) sequence
  source 1..89: mol_type = other DNA
actggcgcttggatctgattaccctgagcaccatcaccagcgactatgtcgtagtgggtaaagctccctcttcggagggagcatcaggg

SEQ ID NO: 8907 - DNA, 89 bp, synthetic construct
  misc_feature 1..89: note = engineered ribonucleic acid scaffold (ERS) sequence
  source 1..89: mol_type = other DNA
actggcgcttgtatctgattactctgagcaccatcaccagcgactatgtcgtagtgggtaaagctccctcttcggagggagcatcagag

SEQ ID NO: 8908 - DNA, 89 bp, synthetic construct
  misc_feature 1..89: note = engineered ribonucleic acid scaffold (ERS) sequence
  source 1..89: mol_type = other DNA
actggcgcttttatctgattactttgagcaccatcaccagcgactatgtcgtagtgggtaaagctccctcttcggagggagcatcagag

SEQ ID NO: 8909 - DNA, 89 bp, synthetic construct
  misc_feature 1..89: note = engineered ribonucleic acid scaffold (ERS) sequence
  source 1..89: mol_type = other DNA
actggcgcttttatctgattactctgagcaccatcaccagcgactatgtcgtagtgggtaaagctccctcttcggagggagcatcagag

SEQ ID NO: 8910 - DNA, 89 bp, synthetic construct
  misc_feature 1..89: note = engineered ribonucleic acid scaffold (ERS) sequence
  source 1..89: mol_type = other DNA
actggcgcttttatctgattactctgagcaccatcaccagcgactatgtcgtagtgggtaaagctccctcttcggagggagcatcaaag

SEQ ID NO: 8911 - DNA, 89 bp, synthetic construct
  misc_feature 1..89: note = engineered ribonucleic acid scaffold (ERS) sequence
  source 1..89: mol_type = other DNA
actggcgcttctatctgattactctgagcaccatcaccagcgactatgtcgtagtgggtaaagctccctcttcggagggagcctcagag

SEQ ID NO: 8912 - DNA, 89 bp, synthetic construct
  misc_feature 1..89: note = engineered ribonucleic acid scaffold (ERS) sequence
  source 1..89: mol_type = other DNA
actggcgcttctatctgattactctgagcaccatcaccagcgactatgtcgtagtgggtaaagctccctcttcggagggagcgtcagag

SEQ ID NO: 8913 - DNA, 89 bp, synthetic construct
  misc_feature 1..89: note = engineered ribonucleic acid scaffold (ERS) sequence
  source 1..89: mol_type = other DNA
actggcgcttctatctgattactctgagcaccatcaccagcgactatgtcgtagtgggtaaagctccctcttcggagggagcatcaaag

SEQ ID NO: 8914 - DNA, 89 bp, synthetic construct
  misc_feature 1..89: note = engineered ribonucleic acid scaffold (ERS) sequence
  source 1..89: mol_type = other DNA
actggcactcccatctgattaccccgagcgccatcaccagcgactatgtcgtagtgggtaaagctccctcttcggagggagcatcgggg

SEQ ID NO: 8915 - DNA, 89 bp, synthetic construct
  misc_feature 1..89: note = engineered ribonucleic acid scaffold (ERS) sequence
  source 1..89: mol_type = other DNA
actggcactcctatctgattactccgagcgccatcaccagcgactatgtcgtagtgggtaaagctccctcttcggagggagcatcggag

SEQ ID NO: 8916 - DNA, 89 bp, synthetic construct
  misc_feature 1..89: note = engineered ribonucleic acid scaffold (ERS) sequence
  source 1..89: mol_type = other DNA
actggcactgggatctgattaccccgagcgccatcaccagcgactatgtcgtagtgggtaaagctccctcttcggagggagcatcgggg

SEQ ID NO: 8917 - DNA, 89 bp, synthetic construct
  misc_feature 1..89: note = engineered ribonucleic acid scaffold (ERS) sequence
  source 1..89: mol_type = other DNA
actggcactggtatctgattactccgagcgccatcaccagcgactatgtcgtagtgggtaaagctccctcttcggagggagcatcggag

SEQ ID NO: 8918 - DNA, 89 bp, synthetic construct
  misc_feature 1..89: note = engineered ribonucleic acid scaffold (ERS) sequence
  source 1..89: mol_type = other DNA
actggcacttccatctgattaccctgagcgccatcaccagcgactatgtcgtagtgggtaaagctccctcttcggagggagcatcaggg

SEQ ID NO: 8919 - DNA, 89 bp, synthetic construct
  misc_feature 1..89: note = engineered ribonucleic acid scaffold (ERS) sequence
  source 1..89: mol_type = other DNA
actggcacttggatctgattaccctgagcgccatcaccagcgactatgtcgtagtgggtaaagctccctcttcggagggagcatcaggg

SEQ ID NO: 8920 - DNA, 89 bp, synthetic construct
  misc_feature 1..89: note = engineered ribonucleic acid scaffold (ERS) sequence
  source 1..89: mol_type = other DNA
actggcacttgtatctgattactctgagcgccatcaccagcgactatgtcgtagtgggtaaagctccctcttcggagggagcatcagag

SEQ ID NO: 8921 - DNA, 89 bp, synthetic construct
  misc_feature 1..89: note = engineered ribonucleic acid scaffold (ERS) sequence
  source 1..89: mol_type = other DNA
actggcacttttatctgattactttgagcgccatcaccagcgactatgtcgtagtgggtaaagctccctcttcggagggagcatcagag

SEQ ID NO: 8922 - DNA, 89 bp, synthetic construct
  misc_feature 1..89: note = engineered ribonucleic acid scaffold (ERS) sequence
  source 1..89: mol_type = other DNA
actggcacttttatctgattactctgagcgccatcaccagcgactatgtcgtagtgggtaaagctccctcttcggagggagcatcagag

SEQ ID NO: 8923 - DNA, 89 bp, synthetic construct
  misc_feature 1..89: note = engineered ribonucleic acid scaffold (ERS) sequence
  source 1..89: mol_type = other DNA
actggcacttttatctgattactctgagcgccatcaccagcgactatgtcgtagtgggtaaagctccctcttcggagggagcatcaaag

SEQ ID NO: 8924 - DNA, 89 bp, synthetic construct
  misc_feature 1..89: note = engineered ribonucleic acid scaffold (ERS) sequence
  source 1..89: mol_type = other DNA
actggcacttctatctgattactctgagcgccatcaccagcgactatgtcgtagtgggtaaagctccctcttcggagggagcctcagag

SEQ ID NO: 8925 - DNA, 89 bp, synthetic construct
  misc_feature 1..89: note = engineered ribonucleic acid scaffold (ERS) sequence
  source 1..89: mol_type = other DNA
actggcacttctatctgattactctgagcgccatcaccagcgactatgtcgtagtgggtaaagctccctcttcggagggagcgtcagag

SEQ ID NO: 8926 - DNA, 89 bp, synthetic construct
  misc_feature 1..89: note = engineered ribonucleic acid scaffold (ERS) sequence
  source 1..89: mol_type = other DNA
actggcacttctatctgattactctgagcgccatcaccagcgactatgtcgtagtgggtaaagctccctcttcggagggagcatcaaag

SEQ ID NO: 8927 - DNA, 89 bp, synthetic construct
  misc_feature 1..89: note = engineered ribonucleic acid scaffold (ERS) sequence
  source 1..89: mol_type = other DNA
actggcgcttctatctgattactctcagggccatcaccagcgactatgtcgtagtgggtaaagctccctcttcggagggagcatcagac

SEQ ID NO: 8928 - DNA, 89 bp, synthetic construct
  misc_feature 1..89: note = engineered ribonucleic acid scaffold (ERS) sequence
  source 1..89: mol_type = other DNA
actggcgcttctatctgattactttgagggccatcaccagcgactatgtcgtagtgggtaaagctccctcttcggagggagcatcagag

SEQ ID NO: 8929 - DNA, 89 bp, synthetic construct
  misc_feature 1..89: note = engineered ribonucleic acid scaffold (ERS) sequence
  source 1..89: mol_type = other DNA
actggcgcttctatctgattactttgagggccatcaccagcgactatgtcgtagtgggtaaagctccctcttcggagggagcatcaaag

SEQ ID NO: 8930 - DNA, 89 bp, synthetic construct
  misc_feature 1..89: note = engineered ribonucleic acid scaffold (ERS) sequence
  source 1..89: mol_type = other DNA
actggcgcttctatctgattagtctcagggccatcaccagcgactatgtcgtagtgggtaaagctccctcttcggagggagcatgagac

SEQ ID NO: 8931 - DNA, 89 bp, synthetic construct
  misc_feature 1..89: note = engineered ribonucleic acid scaffold (ERS) sequence
  source 1..89: mol_type = other DNA
actggcgcttctatctgattagtctgagggccatcaccagcgactatgtcgtagtgggtaaagctccctcttcggagggagcatcagac

SEQ ID NO: 8932 - DNA, 89 bp, synthetic construct
  misc_feature 1..89: note = engineered ribonucleic acid scaffold (ERS) sequence
  source 1..89: mol_type = other DNA
actggcgcttctatctgattactctcagggccatcaccagcgactatgtcgtagtgggtaaagctccctcttcggagggagcatgagag

SEQ ID NO: 8933 - DNA, 89 bp, synthetic construct
  misc_feature 1..89: note = engineered ribonucleic acid scaffold (ERS) sequence
  source 1..89: mol_type = other DNA
actggcgctcccatctgattaccccgagggccatcaccagcgactatgtcgtagtgggtaaagctccctcttcggagggagcatcgggg

SEQ ID NO: 8934 - DNA, 89 bp, synthetic construct
  misc_feature 1..89: note = engineered ribonucleic acid scaffold (ERS) sequence
  source 1..89: mol_type = other DNA
actggcgctcctatctgattactccgagggccatcaccagcgactatgtcgtagtgggtaaagctccctcttcggagggagcatcggag

SEQ ID NO: 8935 - DNA, 89 bp, synthetic construct
  misc_feature 1..89: note = engineered ribonucleic acid scaffold (ERS) sequence
  source 1..89: mol_type = other DNA
actggcgctgggatctgattaccccgagggccatcaccagcgactatgtcgtagtgggtaaagctccctcttcggagggagcatcgggg

SEQ ID NO: 8936 - DNA, 89 bp, synthetic construct
  misc_feature 1..89: note = engineered ribonucleic acid scaffold (ERS) sequence
  source 1..89: mol_type = other DNA
actggcgctggtatctgattactccgagggccatcaccagcgactatgtcgtagtgggtaaagctccctcttcggagggagcatcggag

SEQ ID NO: 8937 - DNA, 89 bp, synthetic construct
  misc_feature 1..89: note = engineered ribonucleic acid scaffold (ERS) sequence
  source 1..89: mol_type = other DNA
actggcgcttccatctgattaccctgagggccatcaccagcgactatgtcgtagtgggtaaagctccctcttcggagggagcatcaggg

SEQ ID NO: 8938 - DNA, 89 bp, synthetic construct
  misc_feature 1..89: note = engineered ribonucleic acid scaffold (ERS) sequence
  source 1..89: mol_type = other DNA
actggcgcttggatctgattaccctgagggccatcaccagcgactatgtcgtagtgggtaaagctccctcttcggagggagcatcaggg

SEQ ID NO: 8939 - DNA, 89 bp, synthetic construct
  misc_feature 1..89: note = engineered ribonucleic acid scaffold (ERS) sequence
  source 1..89: mol_type = other DNA
actggcgcttgtatctgattactctgagggccatcaccagcgactatgtcgtagtgggtaaagctccctcttcggagggagcatcagag

SEQ ID NO: 8940 - DNA, 89 bp, synthetic construct
  misc_feature 1..89: note = engineered ribonucleic acid scaffold (ERS) sequence
  source 1..89: mol_type = other DNA
actggcgcttttatctgattactttgagggccatcaccagcgactatgtcgtagtgggtaaagctccctcttcggagggagcatcagag

SEQ ID NO: 8941 - DNA, 89 bp, synthetic construct
  misc_feature 1..89: note = engineered ribonucleic acid scaffold (ERS) sequence
  source 1..89: mol_type = other DNA
actggcgcttttatctgattactctgagggccatcaccagcgactatgtcgtagtgggtaaagctccctcttcggagggagcatcagag

SEQ ID NO: 8942 - DNA, 89 bp, synthetic construct
  misc_feature 1..89: note = engineered ribonucleic acid scaffold (ERS) sequence
  source 1..89: mol_type = other DNA
actggcgcttttatctgattactctgagggccatcaccagcgactatgtcgtagtgggtaaagctccctcttcggagggagcatcaaag

SEQ ID NO: 8943 - DNA, 89 bp, synthetic construct
  misc_feature 1..89: note = engineered ribonucleic acid scaffold (ERS) sequence
  source 1..89: mol_type = other DNA
actggcgcttctatctgattactctgagggccatcaccagcgactatgtcgtagtgggtaaagctccctcttcggagggagcctcagag

SEQ ID NO: 8944 - DNA, 89 bp, synthetic construct
  misc_feature 1..89: note = engineered ribonucleic acid scaffold (ERS) sequence
  source 1..89: mol_type = other DNA
actggcgcttctatctgattactctgagggccatcaccagcgactatgtcgtagtgggtaaagctccctcttcggagggagcgtcagag

SEQ ID NO: 8945 - DNA, 89 bp, synthetic construct
  misc_feature 1..89: note = engineered ribonucleic acid scaffold (ERS) sequence
  source 1..89: mol_type = other DNA
actggcgcttctatctgattactctgagggccatcaccagcgactatgtcgtagtgggtaaagctccctcttcggagggagcatcaaag

SEQ ID NO: 8946 - DNA, 89 bp, synthetic construct
  misc_feature 1..89: note = engineered ribonucleic acid scaffold (ERS) sequence
  source 1..89: mol_type = other DNA
actggcacttctatctgattactctcagtgccatcaccagcgactatgtcgtagtgggtaaagctccctcttcggagggagcatcagac

SEQ ID NO: 8947 - DNA, 89 bp, synthetic construct
  misc_feature 1..89: note = engineered ribonucleic acid scaffold (ERS) sequence
  source 1..89: mol_type = other DNA
actggcacttctatctgattactttgagtgccatcaccagcgactatgtcgtagtgggtaaagctccctcttcggagggagcatcagag

SEQ ID NO: 8948 - DNA, 89 bp, synthetic construct
  misc_feature 1..89: note = engineered ribonucleic acid scaffold (ERS) sequence
  source 1..89: mol_type = other DNA
actggcacttctatctgattactttgagtgccatcaccagcgactatgtcgtagtgggtaaagctccctcttcggagggagcatcaaag

SEQ ID NO: 8949 - DNA, 89 bp, synthetic construct
  misc_feature 1..89: note = engineered ribonucleic acid scaffold (ERS) sequence
  source 1..89: mol_type = other DNA
actggcacttctatctgattagtctcagtgccatcaccagcgactatgtcgtagtgggtaaagctccctcttcggagggagcatgagac

SEQ ID NO: 8950 - DNA, 89 bp, synthetic construct
  misc_feature 1..89: note = engineered ribonucleic acid scaffold (ERS) sequence
  source 1..89: mol_type = other DNA
actggcacttctatctgattagtctgagtgccatcaccagcgactatgtcgtagtgggtaaagctccctcttcggagggagcatcagac

SEQ ID NO: 8951 - DNA, 89 bp, synthetic construct
  misc_feature 1..89: note = engineered ribonucleic acid scaffold (ERS) sequence
  source 1..89: mol_type = other DNA
actggcacttctatctgattactctcagtgccatcaccagcgactatgtcgtagtgggtaaagctccctcttcggagggagcatgagag

SEQ ID NO: 8952 - DNA, 89 bp, synthetic construct
  misc_feature 1..89: note = engineered ribonucleic acid scaffold (ERS) sequence
  source 1..89: mol_type = other DNA
actggcgcttctatctgattactctcagtgccgtcaccagcgactatgtcgtagtgggtaaagctccctcttcggagggagcatcagac

SEQ ID NO: 8953 - DNA, 89 bp, synthetic construct
  misc_feature 1..89: note = engineered ribonucleic acid scaffold (ERS) sequence
  source 1..89: mol_type = other DNA
actggcgcttctatctgattactttgagtgccgtcaccagcgactatgtcgtagtgggtaaagctccctcttcggagggagcatcagag

SEQ ID NO: 8954 - DNA, 89 bp, synthetic construct
  misc_feature 1..89: note = engineered ribonucleic acid scaffold (ERS) sequence
  source 1..89: mol_type = other DNA
actggcgcttctatctgattactttgagtgccgtcaccagcgactatgtcgtagtgggtaaagctccctcttcggagggagcatcaaag

SEQ ID NO: 8955 - DNA, 89 bp, synthetic construct
  misc_feature 1..89: note = engineered ribonucleic acid scaffold (ERS) sequence
  source 1..89: mol_type = other DNA
actggcgcttctatctgattagtctcagtgccgtcaccagcgactatgtcgtagtgggtaaagctccctcttcggagggagcatgagac

SEQ ID NO: 8956 - DNA, 89 bp, synthetic construct
  misc_feature 1..89: note = engineered ribonucleic acid scaffold (ERS) sequence
  source 1..89: mol_type = other DNA
actggcgcttctatctgattagtctgagtgccgtcaccagcgactatgtcgtagtgggtaaagctccctcttcggagggagcatcagac

SEQ ID NO: 8957 - DNA, 89 bp, synthetic construct
  misc_feature 1..89: note = engineered ribonucleic acid scaffold (ERS) sequence
  source 1..89: mol_type = other DNA
actggcgcttctatctgattactctcagtgccgtcaccagcgactatgtcgtagtgggtaaagctccctcttcggagggagcatgagag

SEQ ID NO: 8958 - DNA, 89 bp, synthetic construct
  misc_feature 1..89: note = engineered ribonucleic acid scaffold (ERS) sequence
  source 1..89: mol_type = other DNA
actggcgctcccatctgattaccccgagtgccgtcaccagcgactatgtcgtagtgggtaaagctccctcttcggagggagcatcgggg

SEQ ID NO: 8959 - DNA, 89 bp, synthetic construct
  misc_feature 1..89: note = engineered ribonucleic acid scaffold (ERS) sequence
  source 1..89: mol_type = other DNA
actggcgctcctatctgattactccgagtgccgtcaccagcgactatgtcgtagtgggtaaagctccctcttcggagggagcatcggag

SEQ ID NO: 8960 - DNA, 89 bp, synthetic construct
  misc_feature 1..89: note = engineered ribonucleic acid scaffold (ERS) sequence
  source 1..89: mol_type = other DNA
actggcgctgggatctgattaccccgagtgccgtcaccagcgactatgtcgtagtgggtaaagctccctcttcggagggagcatcgggg

SEQ ID NO: 8961 - DNA, 89 bp, synthetic construct
  misc_feature 1..89: note = engineered ribonucleic acid scaffold (ERS) sequence
  source 1..89: mol_type = other DNA
actggcgctggtatctgattactccgagtgccgtcaccagcgactatgtcgtagtgggtaaagctccctcttcggagggagcatcggag

SEQ ID NO: 8962 - DNA, 89 bp, synthetic construct
  misc_feature 1..89: note = engineered ribonucleic acid scaffold (ERS) sequence
  source 1..89: mol_type = other DNA
actggcgcttccatctgattaccctgagtgccgtcaccagcgactatgtcgtagtgggtaaagctccctcttcggagggagcatcaggg

SEQ ID NO: 8963 - DNA, 89 bp, synthetic construct
  misc_feature 1..89: note = engineered ribonucleic acid scaffold (ERS) sequence
  source 1..89: mol_type = other DNA
actggcgcttggatctgattaccctgagtgccgtcaccagcgactatgtcgtagtgggtaaagctccctcttcggagggagcatcaggg

SEQ ID NO: 8964 - DNA, 89 bp, synthetic construct
  misc_feature 1..89: note = engineered ribonucleic acid scaffold (ERS) sequence
  source 1..89: mol_type = other DNA
actggcgcttgtatctgattactctgagtgccgtcaccagcgactatgtcgtagtgggtaaagctccctcttcggagggagcatcagag

SEQ ID NO: 8965 - DNA, 89 bp, synthetic construct
  misc_feature 1..89: note = engineered ribonucleic acid scaffold (ERS) sequence
  source 1..89: mol_type = other DNA
actggcgcttttatctgattactttgagtgccgtcaccagcgactatgtcgtagtgggtaaagctccctcttcggagggagcatcagag

SEQ ID NO: 8966 - DNA, 89 bp, synthetic construct
  misc_feature 1..89: note = engineered ribonucleic acid scaffold (ERS) sequence
  source 1..89: mol_type = other DNA
actggcgcttttatctgattactctgagtgccgtcaccagcgactatgtcgtagtgggtaaagctccctcttcggagggagcatcagag

SEQ ID NO: 8967 - DNA, 89 bp, synthetic construct
  misc_feature 1..89: note = engineered ribonucleic acid scaffold (ERS) sequence
  source 1..89: mol_type = other DNA
actggcgcttttatctgattactctgagtgccgtcaccagcgactatgtcgtagtgggtaaagctccctcttcggagggagcatcaaag

SEQ ID NO: 8968 - DNA, 89 bp, synthetic construct
  misc_feature 1..89: note = engineered ribonucleic acid scaffold (ERS) sequence
  source 1..89: mol_type = other DNA
actggcgcttctatctgattactctgagtgccgtcaccagcgactatgtcgtagtgggtaaagctccctcttcggagggagcctcagag

SEQ ID NO: 8969 - DNA, 89 bp, synthetic construct
  misc_feature 1..89: note = engineered ribonucleic acid scaffold (ERS) sequence
  source 1..89: mol_type = other DNA
actggcgcttctatctgattactctgagtgccgtcaccagcgactatgtcgtagtgggtaaagctccctcttcggagggagcgtcagag

SEQ ID NO: 8970 - DNA, 89 bp, synthetic construct
  misc_feature 1..89: note = engineered ribonucleic acid scaffold (ERS) sequence
  source 1..89: mol_type = other DNA
actggcgcttctatctgattactctgagtgccgtcaccagcgactatgtcgtagtgggtaaagctccctcttcggagggagcatcaaag

SEQ ID NO: 8971 - DNA, 89 bp, synthetic construct
  misc_feature 1..89: note = engineered ribonucleic acid scaffold (ERS) sequence
  source 1..89: mol_type = other DNA
actggcactcccatctgattaccccgagtgccatcaccagcgactatgtcgtagtgggtaaagctccctcttcggagggagcatcgggg

SEQ ID NO: 8972 - DNA, 89 bp, synthetic construct
  misc_feature 1..89: note = engineered ribonucleic acid scaffold (ERS) sequence
  source 1..89: mol_type = other DNA
actggcactcctatctgattactccgagtgccatcaccagcgactatgtcgtagtgggtaaagctccctcttcggagggagcatcggag

SEQ ID NO: 8973 - DNA, 89 bp, synthetic construct
  misc_feature 1..89: note = engineered ribonucleic acid scaffold (ERS) sequence
  source 1..89: mol_type = other DNA
actggcactgggatctgattaccccgagtgccatcaccagcgactatgtcgtagtgggtaaagctccctcttcggagggagcatcgggg

SEQ ID NO: 8974 - DNA, 89 bp, synthetic construct
  misc_feature 1..89: note = engineered ribonucleic acid scaffold (ERS) sequence
  source 1..89: mol_type = other DNA
actggcactggtatctgattactccgagtgccatcaccagcgactatgtcgtagtgggtaaagctccctcttcggagggagcatcggag

SEQ ID NO: 8975 - DNA, 89 bp, synthetic construct
  misc_feature 1..89: note = engineered ribonucleic acid scaffold (ERS) sequence
  source 1..89: mol_type = other DNA
actggcacttccatctgattaccctgagtgccatcaccagcgactatgtcgtagtgggtaaagctccctcttcggagggagcatcaggg

SEQ ID NO: 8976 - DNA, 89 bp, synthetic construct
  misc_feature 1..89: note = engineered ribonucleic acid scaffold (ERS) sequence
  source 1..89: mol_type = other DNA
actggcacttggatctgattaccctgagtgccatcaccagcgactatgtcgtagtgggtaaagctccctcttcggagggagcatcaggg

SEQ ID NO: 8977 - DNA, 89 bp, synthetic construct
  misc_feature 1..89: note = engineered ribonucleic acid scaffold (ERS) sequence
  source 1..89: mol_type = other DNA
actggcacttgtatctgattactctgagtgccatcaccagcgactatgtcgtagtgggtaaagctccctcttcggagggagcatcagag

SEQ ID NO: 8978 - DNA, 89 bp, synthetic construct
  misc_feature 1..89: note = engineered ribonucleic acid scaffold (ERS) sequence
  source 1..89: mol_type = other DNA
actggcacttttatctgattactttgagtgccatcaccagcgactatgtcgtagtgggtaaagctccctcttcggagggagcatcagag

SEQ ID NO: 8979 - DNA, 89 bp, synthetic construct
  misc_feature 1..89: note = engineered ribonucleic acid scaffold (ERS) sequence
  source 1..89: mol_type = other DNA
actggcacttttatctgattactctgagtgccatcaccagcgactatgtcgtagtgggtaaagctccctcttcggagggagcatcagag

SEQ ID NO: 8980 - DNA, 89 bp, synthetic construct
  misc_feature 1..89: note = engineered ribonucleic acid scaffold (ERS) sequence
  source 1..89: mol_type = other DNA
actggcacttttatctgattactctgagtgccatcaccagcgactatgtcgtagtgggtaaagctccctcttcggagggagcatcaaag

SEQ ID NO: 8981 - DNA, 89 bp, synthetic construct
  misc_feature 1..89: note = engineered ribonucleic acid scaffold (ERS) sequence
  source 1..89: mol_type = other DNA
actggcacttctatctgattactctgagtgccatcaccagcgactatgtcgtagtgggtaaagctccctcttcggagggagcctcagag

SEQ ID NO: 8982 - DNA, 89 bp, synthetic construct
  misc_feature 1..89: note = engineered ribonucleic acid scaffold (ERS) sequence
  source 1..89: mol_type = other DNA
actggcacttctatctgattactctgagtgccatcaccagcgactatgtcgtagtgggtaaagctccctcttcggagggagcgtcagag

SEQ ID NO: 8983 - DNA, 89 bp, synthetic construct
  misc_feature 1..89: note = engineered ribonucleic acid scaffold (ERS) sequence
  source 1..89: mol_type = other DNA
actggcacttctatctgattactctgagtgccatcaccagcgactatgtcgtagtgggtaaagctccctcttcggagggagcatcaaag

SEQ ID NO: 8984 - DNA, 89 bp, synthetic construct
  misc_feature 1..89: note = engineered ribonucleic acid scaffold (ERS) sequence
  source 1..89: mol_type = other DNA
actggcgcttctatctgattactctcagaaccatcaccagcgactatgtcgtagtgggtaaagctccctcttcggagggagcatcagac

SEQ ID NO: 8985 - DNA, 89 bp, synthetic construct
  misc_feature 1..89: note = engineered ribonucleic acid scaffold (ERS) sequence
  source 1..89: mol_type = other DNA
actggcgcttctatctgattactttgagaaccatcaccagcgactatgtcgtagtgggtaaagctccctcttcggagggagcatcagag

SEQ ID NO: 8986 - DNA, 89 bp, synthetic construct
  misc_feature 1..89: note = engineered ribonucleic acid scaffold (ERS) sequence
  source 1..89: mol_type = other DNA
actggcgcttctatctgattactttgagaaccatcaccagcgactatgtcgtagtgggtaaagctccctcttcggagggagcatcaaag

SEQ ID NO: 8987 - DNA, 89 bp, synthetic construct
  misc_feature 1..89: note = engineered ribonucleic acid scaffold (ERS) sequence
  source 1..89: mol_type = other DNA
actggcgcttctatctgattagtctcagaaccatcaccagcgactatgtcgtagtgggtaaagctccctcttcggagggagcatgagac

SEQ ID NO: 8988 - DNA, 89 bp, synthetic construct
  misc_feature 1..89: note = engineered ribonucleic acid scaffold (ERS) sequence
  source 1..89: mol_type = other DNA
actggcgcttctatctgattagtctgagaaccatcaccagcgactatgtcgtagtgggtaaagctccctcttcggagggagcatcagac

SEQ ID NO: 8989 - DNA, 89 bp, synthetic construct
  misc_feature 1..89: note = engineered ribonucleic acid scaffold (ERS) sequence
  source 1..89: mol_type = other DNA
actggcgcttctatctgattactctcagaaccatcaccagcgactatgtcgtagtgggtaaagctccctcttcggagggagcatgagag

SEQ ID NO: 8990 - DNA, 89 bp, synthetic construct
  misc_feature 1..89: note = engineered ribonucleic acid scaffold (ERS) sequence
  source 1..89: mol_type = other DNA
actggcgctcccatctgattaccccgagaaccatcaccagcgactatgtcgtagtgggtaaagctccctcttcggagggagcatcgggg

SEQ ID NO: 8991 - DNA, 89 bp, synthetic construct
  misc_feature 1..89: note = engineered ribonucleic acid scaffold (ERS) sequence
  source 1..89: mol_type = other DNA
actggcgctcctatctgattactccgagaaccatcaccagcgactatgtcgtagtgggtaaagctccctcttcggagggagcatcggag

SEQ ID NO: 8992 - DNA, 89 bp, synthetic construct
  misc_feature 1..89: note = engineered ribonucleic acid scaffold (ERS) sequence
  source 1..89: mol_type = other DNA
actggcgctgggatctgattaccccgagaaccatcaccagcgactatgtcgtagtgggtaaagctccctcttcggagggagcatcgggg

SEQ ID NO: 8993 - DNA, 89 bp, synthetic construct
  misc_feature 1..89: note = engineered ribonucleic acid scaffold (ERS) sequence
  source 1..89: mol_type = other DNA
actggcgctggtatctgattactccgagaaccatcaccagcgactatgtcgtagtgggtaaagctccctcttcggagggagcatcggag

SEQ ID NO: 8994 - DNA, 89 bp, synthetic construct
  misc_feature 1..89: note = engineered ribonucleic acid scaffold (ERS) sequence
  source 1..89: mol_type = other DNA
actggcgcttccatctgattaccctgagaaccatcaccagcgactatgtcgtagtgggtaaagctccctcttcggagggagcatcaggg

SEQ ID NO: 8995 - DNA, 89 bp, synthetic construct
  misc_feature 1..89: note = engineered ribonucleic acid scaffold (ERS) sequence
  source 1..89: mol_type = other DNA
actggcgcttggatctgattaccctgagaaccatcaccagcgactatgtcgtagtgggtaaagctccctcttcggagggagcatcaggg

SEQ ID NO: 8996 - DNA, 89 bp, synthetic construct
  misc_feature 1..89: note = engineered ribonucleic acid scaffold (ERS) sequence
  source 1..89: mol_type = other DNA
actggcgcttgtatctgattactctgagaaccatcaccagcgactatgtcgtagtgggtaaagctccctcttcggagggagcatcagag

SEQ ID NO: 8997 - DNA, 89 bp, synthetic construct
  misc_feature 1..89: note = engineered ribonucleic acid scaffold (ERS) sequence
  source 1..89: mol_type = other DNA
actggcgcttttatctgattactttgagaaccatcaccagcgactatgtcgtagtgggtaaagctccctcttcggagggagcatcagag

SEQ ID NO: 8998 - DNA, 89 bp, synthetic construct
  misc_feature 1..89: note = engineered ribonucleic acid scaffold (ERS) sequence
  source 1..89: mol_type = other DNA
actggcgcttttatctgattactctgagaaccatcaccagcgactatgtcgtagtgggtaaagctccctcttcggagggagcatcagag

SEQ ID NO: 8999 - DNA, 89 bp, synthetic construct
  misc_feature 1..89: note = engineered ribonucleic acid scaffold (ERS) sequence
  source 1..89: mol_type = other DNA
actggcgcttttatctgattactctgagaaccatcaccagcgactatgtcgtagtgggtaaagctccctcttcggagggagcatcaaag

SEQ ID NO: 9000 - DNA, 89 bp, synthetic construct
  misc_feature 1..89: note = engineered ribonucleic acid scaffold (ERS) sequence
  source 1..89: mol_type = other DNA
actggcgcttctatctgattactctgagaaccatcaccagcgactatgtcgtagtgggtaaagctccctcttcggagggagcctcagag

SEQ ID NO: 9001 - DNA, 89 bp, synthetic construct
  misc_feature 1..89: note = engineered ribonucleic acid scaffold (ERS) sequence
  source 1..89: mol_type = other DNA
actggcgcttctatctgattactctgagaaccatcaccagcgactatgtcgtagtgggtaaagctccctcttcggagggagcgtcagag

SEQ ID NO: 9002 - DNA, 89 bp, synthetic construct
  misc_feature 1..89: note = engineered ribonucleic acid scaffold (ERS) sequence
  source 1..89: mol_type = other DNA
actggcgcttctatctgattactctgagaaccatcaccagcgactatgtcgtagtgggtaaagctccctcttcggagggagcatcaaag

SEQ ID NO: 9003 - DNA, 89 bp, synthetic construct
  misc_feature 1..89: note = engineered ribonucleic acid scaffold (ERS) sequence
  source 1..89: mol_type = other DNA
actggcgcttctatctgattactctcagagccgtcaccagcgactatgtcgtagtgggtaaagctccctcttcggagggagcatcagac

SEQ ID NO: 9004 - DNA, 89 bp, synthetic construct
  misc_feature 1..89: note = engineered ribonucleic acid scaffold (ERS) sequence
  source 1..89: mol_type = other DNA
actggcgcttctatctgattactttgagagccgtcaccagcgactatgtcgtagtgggtaaagctccctcttcggagggagcatcagag

SEQ ID NO: 9005 - DNA, 89 bp, synthetic construct
  misc_feature 1..89: note = engineered ribonucleic acid scaffold (ERS) sequence
  source 1..89: mol_type = other DNA
actggcgcttctatctgattactttgagagccgtcaccagcgactatgtcgtagtgggtaaagctccctcttcggagggagcatcaaag

SEQ ID NO: 9006 - DNA, 89 bp, synthetic construct
  misc_feature 1..89: note = engineered ribonucleic acid scaffold (ERS) sequence
  source 1..89: mol_type = other DNA
actggcgcttctatctgattagtctcagagccgtcaccagcgactatgtcgtagtgggtaaagctccctcttcggagggagcatgagac

SEQ ID NO: 9007 - DNA, 89 bp, synthetic construct
  misc_feature 1..89: note = engineered ribonucleic acid scaffold (ERS) sequence
  source 1..89: mol_type = other DNA
actggcgcttctatctgattagtctgagagccgtcaccagcgactatgtcgtagtgggtaaagctccctcttcggagggagcatcagac

SEQ ID NO: 9008 - DNA, 89 bp, synthetic construct
  misc_feature 1..89: note = engineered ribonucleic acid scaffold (ERS) sequence
  source 1..89: mol_type = other DNA
actggcgcttctatctgattactctcagagccgtcaccagcgactatgtcgtagtgggtaaagctccctcttcggagggagcatgagag

SEQ ID NO: 9009 - DNA, 89 bp, synthetic construct
  misc_feature 1..89: note = engineered ribonucleic acid scaffold (ERS) sequence
  source 1..89: mol_type = other DNA
actggcgctcccatctgattaccccgagagccgtcaccagcgactatgtcgtagtgggtaaagctccctcttcggagggagcatcgggg

SEQ ID NO: 9010 - DNA, 89 bp, synthetic construct
  misc_feature 1..89: note = engineered ribonucleic acid scaffold (ERS) sequence
  source 1..89: mol_type = other DNA
actggcgctcctatctgattactccgagagccgtcaccagcgactatgtcgtagtgggtaaagctccctcttcggagggagcatcggag

SEQ ID NO: 9011 - DNA, 89 bp, synthetic construct
  misc_feature 1..89: note = engineered ribonucleic acid scaffold (ERS) sequence
  source 1..89: mol_type = other DNA
actggcgctgggatctgattaccccgagagccgtcaccagcgactatgtcgtagtgggtaaagctccctcttcggagggagcatcgggg

SEQ ID NO: 9012 - DNA, 89 bp, synthetic construct
  misc_feature 1..89: note = engineered ribonucleic acid scaffold (ERS) sequence
  source 1..89: mol_type = other DNA
actggcgctggtatctgattactccgagagccgtcaccagcgactatgtcgtagtgggtaaagctccctcttcggagggagcatcggag

SEQ ID NO: 9013 - DNA, 89 bp, synthetic construct
  misc_feature 1..89: note = engineered ribonucleic acid scaffold (ERS) sequence
  source 1..89: mol_type = other DNA
actggcgcttccatctgattaccctgagagccgtcaccagcgactatgtcgtagtgggtaaagctccctcttcggagggagcatcaggg

SEQ ID NO: 9014 - DNA, 89 bp, synthetic construct
  misc_feature 1..89: note = engineered ribonucleic acid scaffold (ERS) sequence
  source 1..89: mol_type = other DNA
actggcgcttggatctgattaccctgagagccgtcaccagcgactatgtcgtagtgggtaaagctccctcttcggagggagcatcaggg

SEQ ID NO: 9015 - DNA, 89 bp, synthetic construct
  misc_feature 1..89: note = engineered ribonucleic acid scaffold (ERS) sequence
  source 1..89: mol_type = other DNA
actggcgcttgtatctgattactctgagagccgtcaccagcgactatgtcgtagtgggtaaagctccctcttcggagggagcatcagag

SEQ ID NO: 9016 - DNA, 89 bp, synthetic construct
  misc_feature 1..89: note = engineered ribonucleic acid scaffold (ERS) sequence
  source 1..89: mol_type = other DNA
actggcgcttttatctgattactttgagagccgtcaccagcgactatgtcgtagtgggtaaagctccctcttcggagggagcatcagag

SEQ ID NO: 9017 - DNA, 89 bp, synthetic construct
  misc_feature 1..89: note = engineered ribonucleic acid scaffold (ERS) sequence
  source 1..89: mol_type = other DNA
actggcgcttttatctgattactctgagagccgtcaccagcgactatgtcgtagtgggtaaagctccctcttcggagggagcatcagag

SEQ ID NO: 9018 - DNA, 89 bp, synthetic construct
  misc_feature 1..89: note = engineered ribonucleic acid scaffold (ERS) sequence
  source 1..89: mol_type = other DNA
actggcgcttttatctgattactctgagagccgtcaccagcgactatgtcgtagtgggtaaagctccctcttcggagggagcatcaaag

SEQ ID NO: 9019 - DNA, 89 bp, synthetic construct
  misc_feature 1..89: note = engineered ribonucleic acid scaffold (ERS) sequence
  source 1..89: mol_type = other DNA
actggcgcttctatctgattactctgagagccgtcaccagcgactatgtcgtagtgggtaaagctccctcttcggagggagcctcagag

SEQ ID NO: 9020 - DNA, 89 bp, synthetic construct
  misc_feature 1..89: note = engineered ribonucleic acid scaffold (ERS) sequence
  source 1..89: mol_type = other DNA
actggcgcttctatctgattactctgagagccgtcaccagcgactatgtcgtagtgggtaaagctccctcttcggagggagcgtcagag

SEQ ID NO: 9021 - DNA, 89 bp, synthetic construct
  misc_feature 1..89: note = engineered ribonucleic acid scaffold (ERS) sequence
  source 1..89: mol_type = other DNA
actggcgcttctatctgattactctgagagccgtcaccagcgactatgtcgtagtgggtaaagctccctcttcggagggagcatcaaag

SEQ ID NO: 9022 - DNA, 89 bp, synthetic construct
  misc_feature 1..89: note = engineered ribonucleic acid scaffold (ERS) sequence
  source 1..89: mol_type = other DNA
actggcgcttctatctgattactctcagagccttcaccagcgactatgtcgtagtgggtaaagctccctcttcggagggagcatcagac

SEQ ID NO: 9023 - DNA, 89 bp, synthetic construct
  misc_feature 1..89: note = engineered ribonucleic acid scaffold (ERS) sequence
  source 1..89: mol_type = other DNA
actggcgcttctatctgattactttgagagccttcaccagcgactatgtcgtagtgggtaaagctccctcttcggagggagcatcagag

SEQ ID NO: 9024 - DNA, 89 bp, synthetic construct
  misc_feature 1..89: note = engineered ribonucleic acid scaffold (ERS) sequence
  source 1..89: mol_type = other DNA
actggcgcttctatctgattactttgagagccttcaccagcgactatgtcgtagtgggtaaagctccctcttcggagggagcatcaaag

SEQ ID NO: 9025 - DNA, 89 bp, synthetic construct
  misc_feature 1..89: note = engineered ribonucleic acid scaffold (ERS) sequence
  source 1..89: mol_type = other DNA
actggcgcttctatctgattagtctcagagccttcaccagcgactatgtcgtagtgggtaaagctccctcttcggagggagcatgagac

SEQ ID NO: 9026 - DNA, 89 bp, synthetic construct
  misc_feature 1..89: note = engineered ribonucleic acid scaffold (ERS) sequence
  source 1..89: mol_type = other DNA
actggcgcttctatctgattagtctgagagccttcaccagcgactatgtcgtagtgggtaaagctccctcttcggagggagcatcagac

SEQ ID NO: 9027 - DNA, 89 bp, synthetic construct
  misc_feature 1..89: note = engineered ribonucleic acid scaffold (ERS) sequence
  source 1..89: mol_type = other DNA
actggcgcttctatctgattactctcagagccttcaccagcgactatgtcgtagtgggtaaagctccctcttcggagggagcatgagag

SEQ ID NO: 9028 - DNA, 89 bp, synthetic construct
  misc_feature 1..89: note = engineered ribonucleic acid scaffold (ERS) sequence
  source 1..89: mol_type = other DNA
actggcgctcccatctgattaccccgagagccttcaccagcgactatgtcgtagtgggtaaagctccctcttcggagggagcatcgggg

SEQ ID NO: 9029 - DNA, 89 bp, synthetic construct
  misc_feature 1..89: note = engineered ribonucleic acid scaffold (ERS) sequence
  source 1..89: mol_type = other DNA
actggcgctcctatctgattactccgagagccttcaccagcgactatgtcgtagtgggtaaagctccctcttcggagggagcatcggag

SEQ ID NO: 9030 - DNA, 89 bp, synthetic construct
  misc_feature 1..89: note = engineered ribonucleic acid scaffold (ERS) sequence
  source 1..89: mol_type = other DNA
actggcgctgggatctgattaccccgagagccttcaccagcgactatgtcgtagtgggtaaagctccctcttcggagggagcatcgggg

SEQ ID NO: 9031 - DNA, 89 bp, synthetic construct
  misc_feature 1..89: note = engineered ribonucleic acid scaffold (ERS) sequence
  source 1..89: mol_type = other DNA
actggcgctggtatctgattactccgagagccttcaccagcgactatgtcgtagtgggtaaagctccctcttcggagggagcatcggag

SEQ ID NO: 9032 - DNA, 89 bp, synthetic construct
  misc_feature 1..89: note = engineered ribonucleic acid scaffold (ERS) sequence
  source 1..89: mol_type = other DNA
actggcgcttccatctgattaccctgagagccttcaccagcgactatgtcgtagtgggtaaagctccctcttcggagggagcatcaggg

SEQ ID NO: 9033 - DNA, 89 bp, synthetic construct
  misc_feature 1..89: note = engineered ribonucleic acid scaffold (ERS) sequence
  source 1..89: mol_type = other DNA
actggcgcttggatctgattaccctgagagccttcaccagcgactatgtcgtagtgggtaaagctccctcttcggagggagcatcaggg

SEQ ID NO: 9034 - DNA, 89 bp, synthetic construct
  misc_feature 1..89: note = engineered ribonucleic acid scaffold (ERS) sequence
  source 1..89: mol_type = other DNA
actggcgcttgtatctgattactctgagagccttcaccagcgactatgtcgtagtgggtaaagctccctcttcggagggagcatcagag

SEQ ID NO: 9035 - DNA, 89 bp, synthetic construct
  misc_feature 1..89: note = engineered ribonucleic acid scaffold (ERS) sequence
  source 1..89: mol_type = other DNA
actggcgcttttatctgattactttgagagccttcaccagcgactatgtcgtagtgggtaaagctccctcttcggagggagcatcagag

SEQ ID NO: 9036 - DNA, 89 bp, synthetic construct
  misc_feature 1..89: note = engineered ribonucleic acid scaffold (ERS) sequence
  source 1..89: mol_type = other DNA
actggcgcttttatctgattactctgagagccttcaccagcgactatgtcgtagtgggtaaagctccctcttcggagggagcatcagag

SEQ ID NO: 9037 - DNA, 89 bp, synthetic construct
  misc_feature 1..89: note = engineered ribonucleic acid scaffold (ERS) sequence
  source 1..89: mol_type = other DNA
actggcgcttttatctgattactctgagagccttcaccagcgactatgtcgtagtgggtaaagctccctcttcggagggagcatcaaag

SEQ ID NO: 9038 - DNA, 89 bp, synthetic construct
  misc_feature 1..89: note = engineered ribonucleic acid scaffold (ERS) sequence
  source 1..89: mol_type = other DNA
actggcgcttctatctgattactctgagagccttcaccagcgactatgtcgtagtgggtaaagctccctcttcggagggagcctcagag

SEQ ID NO: 9039 - DNA, 89 bp, synthetic construct
  misc_feature 1..89: note = engineered ribonucleic acid scaffold (ERS) sequence
  source 1..89: mol_type = other DNA
actggcgcttctatctgattactctgagagccttcaccagcgactatgtcgtagtgggtaaagctccctcttcggagggagcgtcagag

SEQ ID NO: 9040 - DNA, 89 bp, synthetic construct
  misc_feature 1..89: note = engineered ribonucleic acid scaffold (ERS) sequence
  source 1..89: mol_type = other DNA
actggcgcttctatctgattactctgagagccttcaccagcgactatgtcgtagtgggtaaagctccctcttcggagggagcatcaaag

SEQ ID NO: 9041 - DNA, 89 bp, synthetic construct
  misc_feature 1..89: note = engineered ribonucleic acid scaffold (ERS) sequence
  source 1..89: mol_type = other DNA
actggggcttctatctgattactctcagacccatcaccagcgactatgtcgtagtgggtaaagctccctcttcggagggagcatcagac

SEQ ID NO: 9042 - DNA, 89 bp, synthetic construct
  misc_feature 1..89: note = engineered ribonucleic acid scaffold (ERS) sequence
  source 1..89: mol_type = other DNA
actggggcttctatctgattactttgagacccatcaccagcgactatgtcgtagtgggtaaagctccctcttcggagggagcatcagag

SEQ ID NO: 9043 - DNA, 89 bp, synthetic construct
  misc_feature 1..89: note = engineered ribonucleic acid scaffold (ERS) sequence
  source 1..89: mol_type = other DNA
actggggcttctatctgattactttgagacccatcaccagcgactatgtcgtagtgggtaaagctccctcttcggagggagcatcaaag

SEQ ID NO: 9044 - DNA, 89 bp, synthetic construct
  misc_feature 1..89: note = engineered ribonucleic acid scaffold (ERS) sequence
  source 1..89: mol_type = other DNA
actggggcttctatctgattagtctcagacccatcaccagcgactatgtcgtagtgggtaaagctccctcttcggagggagcatgagac

SEQ ID NO: 9045 - DNA, 89 bp, synthetic construct
  misc_feature 1..89: note = engineered ribonucleic acid scaffold (ERS) sequence
  source 1..89: mol_type = other DNA
actggggcttctatctgattagtctgagacccatcaccagcgactatgtcgtagtgggtaaagctccctcttcggagggagcatcagac

SEQ ID NO: 9046 - DNA, 89 bp, synthetic construct
  misc_feature 1..89: note = engineered ribonucleic acid scaffold (ERS) sequence
  source 1..89: mol_type = other DNA
actggggcttctatctgattactctcagacccatcaccagcgactatgtcgtagtgggtaaagctccctcttcggagggagcatgagag

SEQ ID NO: 9047 - DNA, 89 bp, synthetic construct
  misc_feature 1..89: note = engineered ribonucleic acid scaffold (ERS) sequence
  source 1..89: mol_type = other DNA
actggggctcccatctgattaccccgagacccatcaccagcgactatgtcgtagtgggtaaagctccctcttcggagggagcatcgggg

SEQ ID NO: 9048 - DNA, 89 bp, synthetic construct
  misc_feature 1..89: note = engineered ribonucleic acid scaffold (ERS) sequence
  source 1..89: mol_type = other DNA
actggggctcctatctgattactccgagacccatcaccagcgactatgtcgtagtgggtaaagctccctcttcggagggagcatcggag

SEQ ID NO: 9049 - DNA, 89 bp, synthetic construct
  misc_feature 1..89: note = engineered ribonucleic acid scaffold (ERS) sequence
  source 1..89: mol_type = other DNA
actggggctgggatctgattaccccgagacccatcaccagcgactatgtcgtagtgggtaaagctccctcttcggagggagcatcgggg

SEQ ID NO: 9050 - DNA, 89 bp, synthetic construct
  misc_feature 1..89: note = engineered ribonucleic acid scaffold (ERS) sequence
  source 1..89: mol_type = other DNA
actggggctggtatctgattactccgagacccatcaccagcgactatgtcgtagtgggtaaagctccctcttcggagggagcatcggag

SEQ ID NO: 9051 - DNA, 89 bp, synthetic construct
  misc_feature 1..89: note = engineered ribonucleic acid scaffold (ERS) sequence
  source 1..89: mol_type = other DNA
actggggcttccatctgattaccctgagacccatcaccagcgactatgtcgtagtgggtaaagctccctcttcggagggagcatcaggg

SEQ ID NO: 9052 - DNA, 89 bp, synthetic construct
  misc_feature 1..89: note = engineered ribonucleic acid scaffold (ERS) sequence
  source 1..89: mol_type = other DNA
actggggcttggatctgattaccctgagacccatcaccagcgactatgtcgtagtgggtaaagctccctcttcggagggagcatcaggg

SEQ ID NO: 9053 - DNA, 89 bp, synthetic construct
  misc_feature 1..89: note = engineered ribonucleic acid scaffold (ERS) sequence
  source 1..89: mol_type = other DNA
actggggcttgtatctgattactctgagacccatcaccagcgactatgtcgtagtgggtaaagctccctcttcggagggagcatcagag

SEQ ID NO: 9054 - DNA, 89 bp, synthetic construct
  misc_feature 1..89: note = engineered ribonucleic acid scaffold (ERS) sequence
  source 1..89: mol_type = other DNA
actggggcttttatctgattactttgagacccatcaccagcgactatgtcgtagtgggtaaagctccctcttcggagggagcatcagag

SEQ ID NO: 9055 - DNA, 89 bp, synthetic construct
  misc_feature 1..89: note = engineered ribonucleic acid scaffold (ERS) sequence
  source 1..89: mol_type = other DNA
actggggcttttatctgattactctgagacccatcaccagcgactatgtcgtagtgggtaaagctccctcttcggagggagcatcagag

SEQ ID NO: 9056 - DNA, 89 bp, synthetic construct
  misc_feature 1..89: note = engineered ribonucleic acid scaffold (ERS) sequence
  source 1..89: mol_type = other DNA
actggggcttttatctgattactctgagacccatcaccagcgactatgtcgtagtgggtaaagctccctcttcggagggagcatcaaag

SEQ ID NO: 9057 - DNA, 89 bp, synthetic construct
  misc_feature 1..89: note = engineered ribonucleic acid scaffold (ERS) sequence
  source 1..89: mol_type = other DNA
actggggcttctatctgattactctgagacccatcaccagcgactatgtcgtagtgggtaaagctccctcttcggagggagcctcagag

SEQ ID NO: 9058 - DNA, 89 bp, synthetic construct
  misc_feature 1..89: note = engineered ribonucleic acid scaffold (ERS) sequence
  source 1..89: mol_type = other DNA
actggggcttctatctgattactctgagacccatcaccagcgactatgtcgtagtgggtaaagctccctcttcggagggagcgtcagag

SEQ ID NO: 9059 - DNA, 89 bp, synthetic construct
  misc_feature 1..89: note = engineered ribonucleic acid scaffold (ERS) sequence
  source 1..89: mol_type = other DNA
actggggcttctatctgattactctgagacccatcaccagcgactatgtcgtagtgggtaaagctccctcttcggagggagcatcaaag

SEQ ID NO: 9060 - DNA, 89 bp, synthetic construct
  misc_feature 1..89: note = engineered ribonucleic acid scaffold (ERS) sequence
  source 1..89: mol_type = other DNA
actggtgcttctatctgattactctcagagccatcaccagcgactatgtcgtagtgggtaaagctccctcttcggagggagcatcagac

SEQ ID NO: 9061 - DNA, 89 bp, synthetic construct
  misc_feature 1..89: note = engineered ribonucleic acid scaffold (ERS) sequence
  source 1..89: mol_type = other DNA
actggtgcttctatctgattactttgagagccatcaccagcgactatgtcgtagtgggtaaagctccctcttcggagggagcatcagag

SEQ ID NO: 9062 - DNA, 89 bp, synthetic construct
  misc_feature 1..89: note = engineered ribonucleic acid scaffold (ERS) sequence
  source 1..89: mol_type = other DNA
actggtgcttctatctgattactttgagagccatcaccagcgactatgtcgtagtgggtaaagctccctcttcggagggagcatcaaag

SEQ ID NO: 9063 - DNA, 89 bp, synthetic construct
  misc_feature 1..89: note = engineered ribonucleic acid scaffold (ERS) sequence
  source 1..89: mol_type = other DNA
actggtgcttctatctgattagtctcagagccatcaccagcgactatgtcgtagtgggtaaagctccctcttcggagggagcatgagac

SEQ ID NO: 9064 - DNA, 89 bp, synthetic construct
  misc_feature 1..89: note = engineered ribonucleic acid scaffold (ERS) sequence
  source 1..89: mol_type = other DNA
actggtgcttctatctgattagtctgagagccatcaccagcgactatgtcgtagtgggtaaagctccctcttcggagggagcatcagac

SEQ ID NO: 9065 - DNA, 89 bp, synthetic construct
  misc_feature 1..89: note = engineered ribonucleic acid scaffold (ERS) sequence
  source 1..89: mol_type = other DNA
actggtgcttctatctgattactctcagagccatcaccagcgactatgtcgtagtgggtaaagctccctcttcggagggagcatgagag

SEQ ID NO: 9066 - DNA, 89 bp, synthetic construct
  misc_feature 1..89: note = engineered ribonucleic acid scaffold (ERS) sequence
  source 1..89: mol_type = other DNA
actggtgctcccatctgattaccccgagagccatcaccagcgactatgtcgtagtgggtaaagctccctcttcggagggagcatcgggg

SEQ ID NO: 9067 - DNA, 89 bp, synthetic construct
  misc_feature 1..89: note = engineered ribonucleic acid scaffold (ERS) sequence
  source 1..89: mol_type = other DNA
actggtgctcctatctgattactccgagagccatcaccagcgactatgtcgtagtgggtaaagctccctcttcggagggagcatcggag

SEQ ID NO: 9068 - DNA, 89 bp, synthetic construct
  misc_feature 1..89: note = engineered ribonucleic acid scaffold (ERS) sequence
  source 1..89: mol_type = other DNA
actggtgctgggatctgattaccccgagagccatcaccagcgactatgtcgtagtgggtaaagctccctcttcggagggagcatcgggg

SEQ ID NO: 9069 - DNA, 89 bp, synthetic construct
  misc_feature 1..89: note = engineered ribonucleic acid scaffold (ERS) sequence
  source 1..89: mol_type = other DNA
actggtgctggtatctgattactccgagagccatcaccagcgactatgtcgtagtgggtaaagctccctcttcggagggagcatcggag

SEQ ID NO: 9070 - DNA, 89 bp, synthetic construct
  misc_feature 1..89: note = engineered ribonucleic acid scaffold (ERS) sequence
  source 1..89: mol_type = other DNA
actggtgcttccatctgattaccctgagagccatcaccagcgactatgtcgtagtgggtaaagctccctcttcggagggagcatcaggg

SEQ ID NO: 9071 - DNA, 89 bp, synthetic construct
  misc_feature 1..89: note = engineered ribonucleic acid scaffold (ERS) sequence
  source 1..89: mol_type = other DNA
actggtgcttggatctgattaccctgagagccatcaccagcgactatgtcgtagtgggtaaagctccctcttcggagggagcatcaggg

SEQ ID NO: 9072 - DNA, 89 bp, synthetic construct
  misc_feature 1..89: note = engineered ribonucleic acid scaffold (ERS) sequence
  source 1..89: mol_type = other DNA
actggtgcttgtatctgattactctgagagccatcaccagcgactatgtcgtagtgggtaaagctccctcttcggagggagcatcagag

SEQ ID NO: 9073 - DNA, 89 bp, synthetic construct
  misc_feature 1..89: note = engineered ribonucleic acid scaffold (ERS) sequence
  source 1..89: mol_type = other DNA
actggtgcttttatctgattactttgagagccatcaccagcgactatgtcgtagtgggtaaagctccctcttcggagggagcatcagag

SEQ ID NO: 9074 - DNA, 89 bp, synthetic construct
  misc_feature 1..89: note = engineered ribonucleic acid scaffold (ERS) sequence
  source 1..89: mol_type = other DNA
actggtgcttttatctgattactctgagagccatcaccagcgactatgtcgtagtgggtaaagctccctcttcggagggagcatcagag

SEQ ID NO: 9075 - DNA, 89 bp, synthetic construct
  misc_feature 1..89: note = engineered ribonucleic acid scaffold (ERS) sequence
  source 1..89: mol_type = other DNA
actggtgcttttatctgattactctgagagccatcaccagcgactatgtcgtagtgggtaaagctccctcttcggagggagcatcaaag

SEQ ID NO: 9076 - DNA, 89 bp, synthetic construct
  misc_feature 1..89: note = engineered ribonucleic acid scaffold (ERS) sequence
  source 1..89: mol_type = other DNA
actggtgcttctatctgattactctgagagccatcaccagcgactatgtcgtagtgggtaaagctccctcttcggagggagcctcagag

SEQ ID NO: 9077 - DNA, 89 bp, synthetic construct
  misc_feature 1..89: note = engineered ribonucleic acid scaffold (ERS) sequence
  source 1..89: mol_type = other DNA
actggtgcttctatctgattactctgagagccatcaccagcgactatgtcgtagtgggtaaagctccctcttcggagggagcgtcagag

SEQ ID NO: 9078 - DNA, 89 bp, synthetic construct
  misc_feature 1..89: note = engineered ribonucleic acid scaffold (ERS) sequence
  source 1..89: mol_type = other DNA
actggtgcttctatctgattactctgagagccatcaccagcgactatgtcgtagtgggtaaagctccctcttcggagggagcatcaaag

SEQ ID NO: 9079 - DNA, 89 bp, synthetic construct
  misc_feature 1..89: note = engineered ribonucleic acid scaffold (ERS) sequence
  source 1..89: mol_type = other DNA
actgggccttctatctgattactctcaggcccatcaccagcgactatgtcgtagtgggtaaagctccctcttcggagggagcatcagac

SEQ ID NO: 9080 - DNA, 89 bp, synthetic construct
  misc_feature 1..89: note = engineered ribonucleic acid scaffold (ERS) sequence
  source 1..89: mol_type = other DNA
actgggccttctatctgattactttgaggcccatcaccagcgactatgtcgtagtgggtaaagctccctcttcggagggagcatcagag

SEQ ID NO: 9081 - DNA, 89 bp, synthetic construct
  misc_feature 1..89: note = engineered ribonucleic acid scaffold (ERS) sequence
  source 1..89: mol_type = other DNA
actgggccttctatctgattactttgaggcccatcaccagcgactatgtcgtagtgggtaaagctccctcttcggagggagcatcaaag

SEQ ID NO: 9082 - DNA, 89 bp, synthetic construct
  misc_feature 1..89: note = engineered ribonucleic acid scaffold (ERS) sequence
  source 1..89: mol_type = other DNA
actgggccttctatctgattagtctcaggcccatcaccagcgactatgtcgtagtgggtaaagctccctcttcggagggagcatgagac

SEQ ID NO: 9083 - DNA, 89 bp, synthetic construct
  misc_feature 1..89: note = engineered ribonucleic acid scaffold (ERS) sequence
  source 1..89: mol_type = other DNA
actgggccttctatctgattagtctgaggcccatcaccagcgactatgtcgtagtgggtaaagctccctcttcggagggagcatcagac

SEQ ID NO: 9084 - DNA, 89 bp, synthetic construct
  misc_feature 1..89: note = engineered ribonucleic acid scaffold (ERS) sequence
  source 1..89: mol_type = other DNA
actgggccttctatctgattactctcaggcccatcaccagcgactatgtcgtagtgggtaaagctccctcttcggagggagcatgagag

SEQ ID NO: 9085 - DNA, 89 bp, synthetic construct
  misc_feature 1..89: note = engineered ribonucleic acid scaffold (ERS) sequence
  source 1..89: mol_type = other DNA
actgggcctcccatctgattaccccgaggcccatcaccagcgactatgtcgtagtgggtaaagctccctcttcggagggagcatcgggg

SEQ ID NO: 9086 - DNA, 89 bp, synthetic construct
  misc_feature 1..89: note = engineered ribonucleic acid scaffold (ERS) sequence
  source 1..89: mol_type = other DNA
actgggcctcctatctgattactccgaggcccatcaccagcgactatgtcgtagtgggtaaagctccctcttcggagggagcatcggag

SEQ ID NO: 9087 - DNA, 89 bp, synthetic construct
  misc_feature 1..89: note = engineered ribonucleic acid scaffold (ERS) sequence
  source 1..89: mol_type = other DNA
actgggcctgggatctgattaccccgaggcccatcaccagcgactatgtcgtagtgggtaaagctccctcttcggagggagcatcgggg

SEQ ID NO: 9088 - DNA, 89 bp, synthetic construct
  misc_feature 1..89: note = engineered ribonucleic acid scaffold (ERS) sequence
  source 1..89: mol_type = other DNA
actgggcctggtatctgattactccgaggcccatcaccagcgactatgtcgtagtgggtaaagctccctcttcggagggagcatcggag

SEQ ID NO: 9089 - DNA, 89 bp, synthetic construct
  misc_feature 1..89: note = engineered ribonucleic acid scaffold (ERS) sequence
  source 1..89: mol_type = other DNA
actgggccttccatctgattaccctgaggcccatcaccagcgactatgtcgtagtgggtaaagctccctcttcggagggagcatcaggg

SEQ ID NO: 9090 - DNA, 89 bp, synthetic construct
  misc_feature 1..89: note = engineered ribonucleic acid scaffold (ERS) sequence
  source 1..89: mol_type = other DNA
actgggccttggatctgattaccctgaggcccatcaccagcgactatgtcgtagtgggtaaagctccctcttcggagggagcatcaggg

SEQ ID NO: 9091 - DNA, 89 bp, synthetic construct
  misc_feature 1..89: note = engineered ribonucleic acid scaffold (ERS) sequence
  source 1..89: mol_type = other DNA
actgggccttgtatctgattactctgaggcccatcaccagcgactatgtcgtagtgggtaaagctccctcttcggagggagcatcagag

SEQ ID NO: 9092 - DNA, 89 bp, synthetic construct
  misc_feature 1..89: note = engineered ribonucleic acid scaffold (ERS) sequence
  source 1..89: mol_type = other DNA
actgggccttttatctgattactttgaggcccatcaccagcgactatgtcgtagtgggtaaagctccctcttcggagggagcatcagag

SEQ ID NO: 9093 - DNA, 89 bp, synthetic construct
  misc_feature 1..89: note = engineered ribonucleic acid scaffold (ERS) sequence
  source 1..89: mol_type = other DNA
actgggccttttatctgattactctgaggcccatcaccagcgactatgtcgtagtgggtaaagctccctcttcggagggagcatcagag

SEQ ID NO: 9094 - DNA, 89 bp, synthetic construct
  misc_feature 1..89: note = engineered ribonucleic acid scaffold (ERS) sequence
  source 1..89: mol_type = other DNA
actgggccttttatctgattactctgaggcccatcaccagcgactatgtcgtagtgggtaaagctccctcttcggagggagcatcaaag

SEQ ID NO: 9095 - DNA, 89 bp, synthetic construct
  misc_feature 1..89: note = engineered ribonucleic acid scaffold (ERS) sequence
  source 1..89: mol_type = other DNA
actgggccttctatctgattactctgaggcccatcaccagcgactatgtcgtagtgggtaaagctccctcttcggagggagcctcagag

SEQ ID NO: 9096 - DNA, 89 bp, synthetic construct
  misc_feature 1..89: note = engineered ribonucleic acid scaffold (ERS) sequence
  source 1..89: mol_type = other DNA
actgggccttctatctgattactctgaggcccatcaccagcgactatgtcgtagtgggtaaagctccctcttcggagggagcgtcagag

SEQ ID NO: 9097 - DNA, 89 bp, synthetic construct
  misc_feature 1..89: note = engineered ribonucleic acid scaffold (ERS) sequence
  source 1..89: mol_type = other DNA
actgggccttctatctgattactctgaggcccatcaccagcgactatgtcgtagtgggtaaagctccctcttcggagggagcatcaaag

SEQ ID NO: 9098 - DNA, 89 bp, synthetic construct
  misc_feature 1..89: note = engineered ribonucleic acid scaffold (ERS) sequence
  source 1..89: mol_type = other DNA
actggcccttctatctgattactctcagagccatcaccagcgactatgtcgtagtgggtaaagctccctcttcggagggagcatcagac

SEQ ID NO: 9099 - DNA, 89 bp, synthetic construct
  misc_feature 1..89: note = engineered ribonucleic acid scaffold (ERS) sequence
  source 1..89: mol_type = other DNA
actggcccttctatctgattactttgagagccatcaccagcgactatgtcgtagtgggtaaagctccctcttcggagggagcatcagag

SEQ ID NO: 9100 - DNA, 89 bp, synthetic construct
  misc_feature 1..89: note = engineered ribonucleic acid scaffold (ERS) sequence
  source 1..89: mol_type = other DNA
actggcccttctatctgattactttgagagccatcaccagcgactatgtcgtagtgggtaaagctccctcttcggagggagcatcaaag

SEQ ID NO: 9101 - DNA, 89 bp, synthetic construct
  misc_feature 1..89: note = engineered ribonucleic acid scaffold (ERS) sequence
  source 1..89: mol_type = other DNA
actggcccttctatctgattagtctcagagccatcaccagcgactatgtcgtagtgggtaaagctccctcttcggagggagcatgagac

SEQ ID NO: 9102 - DNA, 89 bp, synthetic construct
  misc_feature 1..89: note = engineered ribonucleic acid scaffold (ERS) sequence
  source 1..89: mol_type = other DNA
actggcccttctatctgattagtctgagagccatcaccagcgactatgtcgtagtgggtaaagctccctcttcggagggagcatcagac

SEQ ID NO: 9103 - DNA, 89 bp, synthetic construct
  misc_feature 1..89: note = engineered ribonucleic acid scaffold (ERS) sequence
  source 1..89: mol_type = other DNA
actggcccttctatctgattactctcagagccatcaccagcgactatgtcgtagtgggtaaagctccctcttcggagggagcatgagag

SEQ ID NO: 9104 - DNA, 90 bp, synthetic construct
  misc_feature 1..90: note = engineered ribonucleic acid scaffold (ERS) sequence
  source 1..90: mol_type = other DNA
actggcccttctatctgattactctcaggagccatcaccagcgactatgtcgtagtgggtaaagctccctcttcggagggagcatcagac

SEQ ID NO: 9105 - DNA, 90 bp, synthetic construct
  misc_feature 1..90: note = engineered ribonucleic acid scaffold (ERS) sequence
  source 1..90: mol_type = other DNA
actggcccttctatctgattactttgaggagccatcaccagcgactatgtcgtagtgggtaaagctccctcttcggagggagcatcagag

SEQ ID NO: 9106 - DNA, 90 bp, synthetic construct
  misc_feature 1..90: note = engineered ribonucleic acid scaffold (ERS) sequence
  source 1..90: mol_type = other DNA
actggcccttctatctgattactttgaggagccatcaccagcgactatgtcgtagtgggtaaagctccctcttcggagggagcatcaaag

SEQ ID NO: 9107 - DNA, 90 bp, synthetic construct
  misc_feature 1..90: note = engineered ribonucleic acid scaffold (ERS) sequence
  source 1..90: mol_type = other DNA
actggcccttctatctgattagtctcaggagccatcaccagcgactatgtcgtagtgggtaaagctccctcttcggagggagcatgagac

SEQ ID NO: 9108 - DNA, 90 bp, synthetic construct
  misc_feature 1..90: note = engineered ribonucleic acid scaffold (ERS) sequence
  source 1..90: mol_type = other DNA
actggcccttctatctgattagtctgaggagccatcaccagcgactatgtcgtagtgggtaaagctccctcttcggagggagcatcagac

SEQ ID NO: 9109 - DNA, 90 bp, synthetic construct
  misc_feature 1..90: note = engineered ribonucleic acid scaffold (ERS) sequence
  source 1..90: mol_type = other DNA
actggcccttctatctgattactctcaggagccatcaccagcgactatgtcgtagtgggtaaagctccctcttcggagggagcatgagag

SEQ ID NO: 9110 - DNA, 90 bp, synthetic construct
  misc_feature 1..90: note = engineered ribonucleic acid scaffold (ERS) sequence
  source 1..90: mol_type = other DNA
actggccctcccatctgattaccccgaggagccatcaccagcgactatgtcgtagtgggtaaagctccctcttcggagggagcatcgggg

SEQ ID NO: 9111 - DNA, 90 bp, synthetic construct
  misc_feature 1..90: note = engineered ribonucleic acid scaffold (ERS) sequence
  source 1..90: mol_type = other DNA
actggccctcctatctgattactccgaggagccatcaccagcgactatgtcgtagtgggtaaagctccctcttcggagggagcatcggag

SEQ ID NO: 9112 - DNA, 90 bp, synthetic construct
  misc_feature 1..90: note = engineered ribonucleic acid scaffold (ERS) sequence
  source 1..90: mol_type = other DNA
actggccctgggatctgattaccccgaggagccatcaccagcgactatgtcgtagtgggtaaagctccctcttcggagggagcatcgggg

SEQ ID NO: 9113 - DNA, 90 bp, synthetic construct
  misc_feature 1..90: note = engineered ribonucleic acid scaffold (ERS) sequence
  source 1..90: mol_type = other DNA
actggccctggtatctgattactccgaggagccatcaccagcgactatgtcgtagtgggtaaagctccctcttcggagggagcatcggag

SEQ ID NO: 9114 - DNA, 90 bp, synthetic construct
  misc_feature 1..90: note = engineered ribonucleic acid scaffold (ERS) sequence
  source 1..90: mol_type = other DNA
actggcccttccatctgattaccctgaggagccatcaccagcgactatgtcgtagtgggtaaagctccctcttcggagggagcatcaggg

SEQ ID NO: 9115 - DNA, 90 bp, synthetic construct
  misc_feature 1..90: note = engineered ribonucleic acid scaffold (ERS) sequence
  source 1..90: mol_type = other DNA
actggcccttggatctgattaccctgaggagccatcaccagcgactatgtcgtagtgggtaaagctccctcttcggagggagcatcaggg

SEQ ID NO: 9116 - DNA, 90 bp, synthetic construct
  misc_feature 1..90: note = engineered ribonucleic acid scaffold (ERS) sequence
  source 1..90: mol_type = other DNA
actggcccttgtatctgattactctgaggagccatcaccagcgactatgtcgtagtgggtaaagctccctcttcggagggagcatcagag

SEQ ID NO: 9117 - DNA, 90 bp, synthetic construct
  misc_feature 1..90: note = engineered ribonucleic acid scaffold (ERS) sequence
  source 1..90: mol_type = other DNA
actggcccttttatctgattactttgaggagccatcaccagcgactatgtcgtagtgggtaaagctccctcttcggagggagcatcagag

SEQ ID NO: 9118 - DNA, 90 bp, synthetic construct
  misc_feature 1..90: note = engineered ribonucleic acid scaffold (ERS) sequence
  source 1..90: mol_type = other DNA
actggcccttttatctgattactctgaggagccatcaccagcgactatgtcgtagtgggtaaagctccctcttcggagggagcatcagag

SEQ ID NO: 9119 - DNA, 90 bp, synthetic construct
  misc_feature 1..90: note = engineered ribonucleic acid scaffold (ERS) sequence
  source 1..90: mol_type = other DNA
actggcccttttatctgattactctgaggagccatcaccagcgactatgtcgtagtgggtaaagctccctcttcggagggagcatcaaag

SEQ ID NO: 9120 - DNA, 90 bp, synthetic construct
  misc_feature 1..90: note = engineered ribonucleic acid scaffold (ERS) sequence
  source 1..90: mol_type = other DNA
actggcccttctatctgattactctgaggagccatcaccagcgactatgtcgtagtgggtaaagctccctcttcggagggagcctcagag

SEQ ID NO: 9121 - DNA, 90 bp, synthetic construct
  misc_feature 1..90: note = engineered ribonucleic acid scaffold (ERS) sequence
  source 1..90: mol_type = other DNA
actggcccttctatctgattactctgaggagccatcaccagcgactatgtcgtagtgggtaaagctccctcttcggagggagcgtcagag

SEQ ID NO: 9122 - DNA, 90 bp, synthetic construct
  misc_feature 1..90: note = engineered ribonucleic acid scaffold (ERS) sequence
  source 1..90: mol_type = other DNA
actggcccttctatctgattactctgaggagccatcaccagcgactatgtcgtagtgggtaaagctccctcttcggagggagcatcaaag

SEQ ID NO: 9123 - DNA, 89 bp, synthetic construct
  misc_feature 1..89: note = engineered ribonucleic acid scaffold (ERS) sequence
  source 1..89: mol_type = other DNA
actggcccttctatctgattactctcagggccatcaccagcgactatgtcgtagtgggtaaagctccctcttcggagggagcatcagac

SEQ ID NO: 9124 - DNA, 89 bp, synthetic construct
  misc_feature 1..89: note = engineered ribonucleic acid scaffold (ERS) sequence
  source 1..89: mol_type = other DNA
actggcccttctatctgattactttgagggccatcaccagcgactatgtcgtagtgggtaaagctccctcttcggagggagcatcagag

SEQ ID NO: 9125 - DNA, 89 bp, synthetic construct
  misc_feature 1..89: note = engineered ribonucleic acid scaffold (ERS) sequence
  source 1..89: mol_type = other DNA
actggcccttctatctgattactttgagggccatcaccagcgactatgtcgtagtgggtaaagctccctcttcggagggagcatcaaag

SEQ ID NO: 9126 - DNA, 89 bp, synthetic construct
  misc_feature 1..89: note = engineered ribonucleic acid scaffold (ERS) sequence
  source 1..89: mol_type = other DNA
actggcccttctatctgattagtctcagggccatcaccagcgactatgtcgtagtgggtaaagctccctcttcggagggagcatgagac

SEQ ID NO: 9127 - DNA, 89 bp, synthetic construct
  misc_feature 1..89: note = engineered ribonucleic acid scaffold (ERS) sequence
  source 1..89: mol_type = other DNA
actggcccttctatctgattagtctgagggccatcaccagcgactatgtcgtagtgggtaaagctccctcttcggagggagcatcagac

SEQ ID NO: 9128 - DNA, 89 bp, synthetic construct
  misc_feature 1..89: note = engineered ribonucleic acid scaffold (ERS) sequence
  source 1..89: mol_type = other DNA
actggcccttctatctgattactctcagggccatcaccagcgactatgtcgtagtgggtaaagctccctcttcggagggagcatgagag

SEQ ID NO: 9129 - DNA, 89 bp, synthetic construct
  misc_feature 1..89: note = engineered ribonucleic acid scaffold (ERS) sequence
  source 1..89: mol_type = other DNA
actggccctcccatctgattaccccgagggccatcaccagcgactatgtcgtagtgggtaaagctccctcttcggagggagcatcgggg

SEQ ID NO: 9130 - DNA, 89 bp, synthetic construct
  misc_feature 1..89: note = engineered ribonucleic acid scaffold (ERS) sequence
  source 1..89: mol_type = other DNA
actggccctcctatctgattactccgagggccatcaccagcgactatgtcgtagtgggtaaagctccctcttcggagggagcatcggag

SEQ ID NO: 9131 - DNA, 89 bp, synthetic construct
  misc_feature 1..89: note = engineered ribonucleic acid scaffold (ERS) sequence
  source 1..89: mol_type = other DNA
actggccctgggatctgattaccccgagggccatcaccagcgactatgtcgtagtgggtaaagctccctcttcggagggagcatcgggg

SEQ ID NO: 9132 - DNA, 89 bp, synthetic construct
  misc_feature 1..89: note = engineered ribonucleic acid scaffold (ERS) sequence
  source 1..89: mol_type = other DNA
actggccctggtatctgattactccgagggccatcaccagcgactatgtcgtagtgggtaaagctccctcttcggagggagcatcggag

SEQ ID NO: 9133 - DNA, 89 bp, synthetic construct
  misc_feature 1..89: note = engineered ribonucleic acid scaffold (ERS) sequence
  source 1..89: mol_type = other DNA
actggcccttccatctgattaccctgagggccatcaccagcgactatgtcgtagtgggtaaagctccctcttcggagggagcatcaggg

SEQ ID NO: 9134 - DNA, 89 bp, synthetic construct
  misc_feature 1..89: note = engineered ribonucleic acid scaffold (ERS) sequence
  source 1..89: mol_type = other DNA
actggcccttggatctgattaccctgagggccatcaccagcgactatgtcgtagtgggtaaagctccctcttcggagggagcatcaggg

SEQ ID NO: 9135 - DNA, 89 bp, synthetic construct
  misc_feature 1..89: note = engineered ribonucleic acid scaffold (ERS) sequence
  source 1..89: mol_type = other DNA
actggcccttgtatctgattactctgagggccatcaccagcgactatgtcgtagtgggtaaagctccctcttcggagggagcatcagag

SEQ ID NO: 9136 - DNA, 89 bp, synthetic construct
  misc_feature 1..89: note = engineered ribonucleic acid scaffold (ERS) sequence
  source 1..89: mol_type = other DNA
actggcccttttatctgattactttgagggccatcaccagcgactatgtcgtagtgggtaaagctccctcttcggagggagcatcagag

SEQ ID NO: 9137 - DNA, 89 bp, synthetic construct
  misc_feature 1..89: note = engineered ribonucleic acid scaffold (ERS) sequence
  source 1..89: mol_type = other DNA
actggcccttttatctgattactctgagggccatcaccagcgactatgtcgtagtgggtaaagctccctcttcggagggagcatcagag

SEQ ID NO: 9138 - DNA, 89 bp, synthetic construct
  misc_feature 1..89: note = engineered ribonucleic acid scaffold (ERS) sequence
  source 1..89: mol_type = other DNA
actggcccttttatctgattactctgagggccatcaccagcgactatgtcgtagtgggtaaagctccctcttcggagggagcatcaaag

SEQ ID NO: 9139 - DNA, 89 bp, synthetic construct
  misc_feature 1..89: note = engineered ribonucleic acid scaffold (ERS) sequence
  source 1..89: mol_type = other DNA
actggcccttctatctgattactctgagggccatcaccagcgactatgtcgtagtgggtaaagctccctcttcggagggagcctcagag

SEQ ID NO: 9140 - DNA, 89 bp, synthetic construct
  misc_feature 1..89: note = engineered ribonucleic acid scaffold (ERS) sequence
  source 1..89: mol_type = other DNA
actggcccttctatctgattactctgagggccatcaccagcgactatgtcgtagtgggtaaagctccctcttcggagggagcgtcagag

SEQ ID NO: 9141 - DNA, 89 bp, synthetic construct
  misc_feature 1..89: note = engineered ribonucleic acid scaffold (ERS) sequence
  source 1..89: mol_type = other DNA
actggcccttctatctgattactctgagggccatcaccagcgactatgtcgtagtgggtaaagctccctcttcggagggagcatcaaag

SEQ ID NO: 9142 - DNA, 89 bp, synthetic construct
  misc_feature 1..89: note = engineered ribonucleic acid scaffold (ERS) sequence
  source 1..89: mol_type = other DNA
actggcccttctatctgattactctcagtgccatcaccagcgactatgtcgtagtgggtaaagctccctcttcggagggagcatcagac

SEQ ID NO: 9143 - DNA, 89 bp, synthetic construct
  misc_feature 1..89: note = engineered ribonucleic acid scaffold (ERS) sequence
  source 1..89: mol_type = other DNA
actggcccttctatctgattactttgagtgccatcaccagcgactatgtcgtagtgggtaaagctccctcttcggagggagcatcagag

SEQ ID NO: 9144 - DNA, 89 bp, synthetic construct
  misc_feature 1..89: note = engineered ribonucleic acid scaffold (ERS) sequence
  source 1..89: mol_type = other DNA
actggcccttctatctgattactttgagtgccatcaccagcgactatgtcgtagtgggtaaagctccctcttcggagggagcatcaaag

SEQ ID NO: 9145 - DNA, 89 bp, synthetic construct
  misc_feature 1..89: note = engineered ribonucleic acid scaffold (ERS) sequence
  source 1..89: mol_type = other DNA
actggcccttctatctgattagtctcagtgccatcaccagcgactatgtcgtagtgggtaaagctccctcttcggagggagcatgagac

SEQ ID NO: 9146 - DNA, 89 bp, synthetic construct
  misc_feature 1..89: note = engineered ribonucleic acid scaffold (ERS) sequence
  source 1..89: mol_type = other DNA
actggcccttctatctgattagtctgagtgccatcaccagcgactatgtcgtagtgggtaaagctccctcttcggagggagcatcagac

SEQ ID NO: 9147 - DNA, 89 bp, synthetic construct
  misc_feature 1..89: note = engineered ribonucleic acid scaffold (ERS) sequence
  source 1..89: mol_type = other DNA
actggcccttctatctgattactctcagtgccatcaccagcgactatgtcgtagtgggtaaagctccctcttcggagggagcatgagag

SEQ ID NO: 9148 - DNA, 89 bp, synthetic construct
  misc_feature 1..89: note = engineered ribonucleic acid scaffold (ERS) sequence
  source 1..89: mol_type = other DNA
actggccctcccatctgattaccccgagtgccatcaccagcgactatgtcgtagtgggtaaagctccctcttcggagggagcatcgggg

SEQ ID NO: 9149 - DNA, 89 bp, synthetic construct
  misc_feature 1..89: note = engineered ribonucleic acid scaffold (ERS) sequence
  source 1..89: mol_type = other DNA
actggccctcctatctgattactccgagtgccatcaccagcgactatgtcgtagtgggtaaagctccctcttcggagggagcatcggag

SEQ ID NO: 9150 - DNA, 89 bp, synthetic construct
  misc_feature 1..89: note = engineered ribonucleic acid scaffold (ERS) sequence
  source 1..89: mol_type = other DNA
actggccctgggatctgattaccccgagtgccatcaccagcgactatgtcgtagtgggtaaagctccctcttcggagggagcatcgggg

SEQ ID NO: 9151 - DNA, 89 bp, synthetic construct
  misc_feature 1..89: note = engineered ribonucleic acid scaffold (ERS) sequence
  source 1..89: mol_type = other DNA
actggccctggtatctgattactccgagtgccatcaccagcgactatgtcgtagtgggtaaagctccctcttcggagggagcatcggag

SEQ ID NO: 9152 - DNA, 89 bp, synthetic construct
  misc_feature 1..89: note = engineered ribonucleic acid scaffold (ERS) sequence
  source 1..89: mol_type = other DNA
actggcccttccatctgattaccctgagtgccatcaccagcgactatgtcgtagtgggtaaagctccctcttcggagggagcatcaggg

SEQ ID NO: 9153 - DNA, 89 bp, synthetic construct
  misc_feature 1..89: note = engineered ribonucleic acid scaffold (ERS) sequence
  source 1..89: mol_type = other DNA
actggcccttggatctgattaccctgagtgccatcaccagcgactatgtcgtagtgggtaaagctccctcttcggagggagcatcaggg

SEQ ID NO: 9154 - DNA, 89 bp, synthetic construct
  misc_feature 1..89: note = engineered ribonucleic acid scaffold (ERS) sequence
  source 1..89: mol_type = other DNA
actggcccttgtatctgattactctgagtgccatcaccagcgactatgtcgtagtgggtaaagctccctcttcggagggagcatcagag

SEQ ID NO: 9155 - DNA, 89 bp, synthetic construct
  misc_feature 1..89: note = engineered ribonucleic acid scaffold (ERS) sequence
  source 1..89: mol_type = other DNA
actggcccttttatctgattactttgagtgccatcaccagcgactatgtcgtagtgggtaaagctccctcttcggagggagcatcagag

SEQ ID NO: 9156 - DNA, 89 bp, synthetic construct
  misc_feature 1..89: note = engineered ribonucleic acid scaffold (ERS) sequence
  source 1..89: mol_type = other DNA
actggcccttttatctgattactctgagtgccatcaccagcgactatgtcgtagtgggtaaagctccctcttcggagggagcatcagag

SEQ ID NO: 9157 - DNA, 89 bp, synthetic construct
  misc_feature 1..89: note = engineered ribonucleic acid scaffold (ERS) sequence
  source 1..89: mol_type = other DNA
actggcccttttatctgattactctgagtgccatcaccagcgactatgtcgtagtgggtaaagctccctcttcggagggagcatcaaag

SEQ ID NO: 9158 - DNA, 89 bp, synthetic construct
  misc_feature 1..89: note = engineered ribonucleic acid scaffold (ERS) sequence
  source 1..89: mol_type = other DNA
actggcccttctatctgattactctgagtgccatcaccagcgactatgtcgtagtgggtaaagctccctcttcggagggagcctcagag

SEQ ID NO: 9159 - DNA, 89 bp, synthetic construct
  misc_feature 1..89: note = engineered ribonucleic acid scaffold (ERS) sequence
  source 1..89: mol_type = other DNA
actggcccttctatctgattactctgagtgccatcaccagcgactatgtcgtagtgggtaaagctccctcttcggagggagcgtcagag

SEQ ID NO: 9160 - DNA, 89 bp, synthetic construct
  misc_feature 1..89: note = engineered ribonucleic acid scaffold (ERS) sequence
  source 1..89: mol_type = other DNA
actggcccttctatctgattactctgagtgccatcaccagcgactatgtcgtagtgggtaaagctccctcttcggagggagcatcaaag

SEQ ID NO: 9161 - DNA, 89 bp, synthetic construct
  misc_feature 1..89: note = engineered ribonucleic acid scaffold (ERS) sequence
  source 1..89: mol_type = other DNA
actggccctcccatctgattaccccgagagccatcaccagcgactatgtcgtagtgggtaaagctccctcttcggagggagcatcgggg

SEQ ID NO: 9162 - DNA, 89 bp, synthetic construct
  misc_feature 1..89: note = engineered ribonucleic acid scaffold (ERS) sequence
  source 1..89: mol_type = other DNA
actggccctcctatctgattactccgagagccatcaccagcgactatgtcgtagtgggtaaagctccctcttcggagggagcatcggag

SEQ ID NO: 9163 - DNA, 89 bp, synthetic construct
  misc_feature 1..89: note = engineered ribonucleic acid scaffold (ERS) sequence
  source 1..89: mol_type = other DNA
actggccctgggatctgattaccccgagagccatcaccagcgactatgtcgtagtgggtaaagctccctcttcggagggagcatcgggg

SEQ ID NO: 9164 - DNA, 89 bp, synthetic construct
  misc_feature 1..89: note = engineered ribonucleic acid scaffold (ERS) sequence
  source 1..89: mol_type = other DNA
actggccctggtatctgattactccgagagccatcaccagcgactatgtcgtagtgggtaaagctccctcttcggagggagcatcggag

SEQ ID NO: 9165 - DNA, 89 bp, synthetic construct
  misc_feature 1..89: note = engineered ribonucleic acid scaffold (ERS) sequence
  source 1..89: mol_type = other DNA
actggcccttccatctgattaccctgagagccatcaccagcgactatgtcgtagtgggtaaagctccctcttcggagggagcatcaggg

SEQ ID NO: 9166 - DNA, 89 bp, synthetic construct
  misc_feature 1..89: note = engineered ribonucleic acid scaffold (ERS) sequence
  source 1..89: mol_type = other DNA
actggcccttggatctgattaccctgagagccatcaccagcgactatgtcgtagtgggtaaagctccctcttcggagggagcatcaggg

SEQ ID NO: 9167 - DNA, 89 bp, synthetic construct
  misc_feature 1..89: note = engineered ribonucleic acid scaffold (ERS) sequence
  source 1..89: mol_type = other DNA
actggcccttgtatctgattactctgagagccatcaccagcgactatgtcgtagtgggtaaagctccctcttcggagggagcatcagag

SEQ ID NO: 9168 - DNA, 89 bp, synthetic construct
  misc_feature 1..89: note = engineered ribonucleic acid scaffold (ERS) sequence
  source 1..89: mol_type = other DNA
actggcccttttatctgattactttgagagccatcaccagcgactatgtcgtagtgggtaaagctccctcttcggagggagcatcagag

SEQ ID NO: 9169 - DNA, 89 bp, synthetic construct
  misc_feature 1..89: note = engineered ribonucleic acid scaffold (ERS) sequence
  source 1..89: mol_type = other DNA
actggcccttttatctgattactctgagagccatcaccagcgactatgtcgtagtgggtaaagctccctcttcggagggagcatcagag

SEQ ID NO: 9170 - DNA, 89 bp, synthetic construct
  misc_feature 1..89: note = engineered ribonucleic acid scaffold (ERS) sequence
  source 1..89: mol_type = other DNA
actggcccttttatctgattactctgagagccatcaccagcgactatgtcgtagtgggtaaagctccctcttcggagggagcatcaaag

SEQ ID NO: 9171 - DNA, 89 bp, synthetic construct
  misc_feature 1..89: note = engineered ribonucleic acid scaffold (ERS) sequence
  source 1..89: mol_type = other DNA
actggcccttctatctgattactctgagagccatcaccagcgactatgtcgtagtgggtaaagctccctcttcggagggagcctcagag

SEQ ID NO: 9172 - DNA, 89 bp, synthetic construct
  misc_feature 1..89: note = engineered ribonucleic acid scaffold (ERS) sequence
  source 1..89: mol_type = other DNA
actggcccttctatctgattactctgagagccatcaccagcgactatgtcgtagtgggtaaagctccctcttcggagggagcgtcagag

SEQ ID NO: 9173 - DNA, 89 bp, synthetic construct
  misc_feature 1..89: note = engineered ribonucleic acid scaffold (ERS) sequence
  source 1..89: mol_type = other DNA
actggcccttctatctgattactctgagagccatcaccagcgactatgtcgtagtgggtaaagctccctcttcggagggagcatcaaag

SEQ ID NO: 9174 - DNA, 89 bp, synthetic construct
  misc_feature 1..89: note = engineered ribonucleic acid scaffold (ERS) sequence
  source 1..89: mol_type = other DNA
actggcgcttctatctgattactctcagagccatcaccagcgactatgtcgtagtgggtaaagctccctcttcggagggagcatcagac

SEQ ID NO: 9175 - DNA, 89 bp, synthetic construct
  misc_feature 1..89: note = engineered ribonucleic acid scaffold (ERS) sequence
  source 1..89: mol_type = other DNA
actggcgcttctatctgattactttgagagccatcaccagcgactatgtcgtagtgggtaaagctccctcttcggagggagcatcagag

SEQ ID NO: 9176 - DNA, 89 bp, synthetic construct
  misc_feature 1..89: note = engineered ribonucleic acid scaffold (ERS) sequence
  source 1..89: mol_type = other DNA
actggcgcttctatctgattactttgagagccatcaccagcgactatgtcgtagtgggtaaagctccctcttcggagggagcatcaaag

SEQ ID NO: 9177 - DNA, 89 bp, synthetic construct
  misc_feature 1..89: note = engineered ribonucleic acid scaffold (ERS) sequence
  source 1..89: mol_type = other DNA
actggcgcttctatctgattagtctcagagccatcaccagcgactatgtcgtagtgggtaaagctccctcttcggagggagcatgagac

SEQ ID NO: 9178 - DNA, 89 bp, synthetic construct
  misc_feature 1..89: note = engineered ribonucleic acid scaffold (ERS) sequence
  source 1..89: mol_type = other DNA
actggcgcttctatctgattagtctgagagccatcaccagcgactatgtcgtagtgggtaaagctccctcttcggagggagcatcagac

SEQ ID NO: 9179 - DNA, 89 bp, synthetic construct
  misc_feature 1..89: note = engineered ribonucleic acid scaffold (ERS) sequence
  source 1..89: mol_type = other DNA
actggcgcttctatctgattactctcagagccatcaccagcgactatgtcgtagtgggtaaagctccctcttcggagggagcatgagag

SEQ ID NO: 9180 - DNA, 90 bp, synthetic construct
  misc_feature 1..90: note = engineered ribonucleic acid scaffold (ERS) sequence
  source 1..90: mol_type = other DNA
actggcgcttctatctgattactctcagcagccatcaccagcgactatgtcgtagtgggtaaagctccctcttcggagggagcatcagac

SEQ ID NO: 9181 - DNA, 90 bp, synthetic construct
  misc_feature 1..90: note = engineered ribonucleic acid scaffold (ERS) sequence
  source 1..90: mol_type = other DNA
actggcgcttctatctgattactttgagcagccatcaccagcgactatgtcgtagtgggtaaagctccctcttcggagggagcatcagag

SEQ ID NO: 9182 - DNA, 90 bp, synthetic construct
  misc_feature 1..90: note = engineered ribonucleic acid scaffold (ERS) sequence
  source 1..90: mol_type = other DNA
actggcgcttctatctgattactttgagcagccatcaccagcgactatgtcgtagtgggtaaagctccctcttcggagggagcatcaaag

SEQ ID NO: 9183 - DNA, 90 bp, synthetic construct
  misc_feature 1..90: note = engineered ribonucleic acid scaffold (ERS) sequence
  source 1..90: mol_type = other DNA
actggcgcttctatctgattagtctcagcagccatcaccagcgactatgtcgtagtgggtaaagctccctcttcggagggagcatgagac

SEQ ID NO: 9184 - DNA, 90 bp, synthetic construct
  misc_feature 1..90: note = engineered ribonucleic acid scaffold (ERS) sequence
  source 1..90: mol_type = other DNA
actggcgcttctatctgattagtctgagcagccatcaccagcgactatgtcgtagtgggtaaagctccctcttcggagggagcatcagac

SEQ ID NO: 9185 - DNA, 90 bp, synthetic construct
  misc_feature 1..90: note = engineered ribonucleic acid scaffold (ERS) sequence
  source 1..90: mol_type = other DNA
actggcgcttctatctgattactctcagcagccatcaccagcgactatgtcgtagtgggtaaagctccctcttcggagggagcatgagag

SEQ ID NO: 9186 - DNA, 90 bp, synthetic construct
  misc_feature 1..90: note = engineered ribonucleic acid scaffold (ERS) sequence
  source 1..90: mol_type = other DNA
actggcgctcccatctgattaccccgagcagccatcaccagcgactatgtcgtagtgggtaaagctccctcttcggagggagcatcgggg

SEQ ID NO: 9187 - DNA, 90 bp, synthetic construct
  misc_feature 1..90: note = engineered ribonucleic acid scaffold (ERS) sequence
  source 1..90: mol_type = other DNA
actggcgctcctatctgattactccgagcagccatcaccagcgactatgtcgtagtgggtaaagctccctcttcggagggagcatcggag

SEQ ID NO: 9188 - DNA, 90 bp, synthetic construct
  misc_feature 1..90: note = engineered ribonucleic acid scaffold (ERS) sequence
  source 1..90: mol_type = other DNA
actggcgctgggatctgattaccccgagcagccatcaccagcgactatgtcgtagtgggtaaagctccctcttcggagggagcatcgggg

SEQ ID NO: 9189 - DNA, 90 bp, synthetic construct
  misc_feature 1..90: note = engineered ribonucleic acid scaffold (ERS) sequence
  source 1..90: mol_type = other DNA
actggcgctggtatctgattactccgagcagccatcaccagcgactatgtcgtagtgggtaaagctccctcttcggagggagcatcggag

SEQ ID NO: 9190 - DNA, 90 bp, synthetic construct
  misc_feature 1..90: note = engineered ribonucleic acid scaffold (ERS) sequence
  source 1..90: mol_type = other DNA
actggcgcttccatctgattaccctgagcagccatcaccagcgactatgtcgtagtgggtaaagctccctcttcggagggagcatcaggg

SEQ ID NO: 9191 - DNA, 90 bp, synthetic construct
  misc_feature 1..90: note = engineered ribonucleic acid scaffold (ERS) sequence
  source 1..90: mol_type = other DNA
actggcgcttggatctgattaccctgagcagccatcaccagcgactatgtcgtagtgggtaaagctccctcttcggagggagcatcaggg

SEQ ID NO: 9192 - DNA, 90 bp, synthetic construct
  misc_feature 1..90: note = engineered ribonucleic acid scaffold (ERS) sequence
  source 1..90: mol_type = other DNA
actggcgcttgtatctgattactctgagcagccatcaccagcgactatgtcgtagtgggtaaagctccctcttcggagggagcatcagag

SEQ ID NO: 9193 - DNA, 90 bp, synthetic construct
  misc_feature 1..90: note = engineered ribonucleic acid scaffold (ERS) sequence
  source 1..90: mol_type = other DNA
actggcgcttttatctgattactttgagcagccatcaccagcgactatgtcgtagtgggtaaagctccctcttcggagggagcatcagag

SEQ ID NO: 9194 - DNA, 90 bp, synthetic construct
  misc_feature 1..90: note = engineered ribonucleic acid scaffold (ERS) sequence
  source 1..90: mol_type = other DNA
actggcgcttttatctgattactctgagcagccatcaccagcgactatgtcgtagtgggtaaagctccctcttcggagggagcatcagag

SEQ ID NO: 9195 - DNA, 90 bp, synthetic construct
  misc_feature 1..90: note = engineered ribonucleic acid scaffold (ERS) sequence
  source 1..90: mol_type = other DNA
actggcgcttttatctgattactctgagcagccatcaccagcgactatgtcgtagtgggtaaagctccctcttcggagggagcatcaaag

SEQ ID NO: 9196 - DNA, 90 bp, synthetic construct
  misc_feature 1..90: note = engineered ribonucleic acid scaffold (ERS) sequence
  source 1..90: mol_type = other DNA
actggcgcttctatctgattactctgagcagccatcaccagcgactatgtcgtagtgggtaaagctccctcttcggagggagcctcagag

SEQ ID NO: 9197 - DNA, 90 bp, synthetic construct
  misc_feature 1..90: note = engineered ribonucleic acid scaffold (ERS) sequence
  source 1..90: mol_type = other DNA
actggcgcttctatctgattactctgagcagccatcaccagcgactatgtcgtagtgggtaaagctccctcttcggagggagcgtcagag

SEQ ID NO: 9198 - DNA, 90 bp, synthetic construct
  misc_feature 1..90: note = engineered ribonucleic acid scaffold (ERS) sequence
  source 1..90: mol_type = other DNA
actggcgcttctatctgattactctgagcagccatcaccagcgactatgtcgtagtgggtaaagctccctcttcggagggagcatcaaag

SEQ ID NO: 9199 - DNA, 89 bp, synthetic construct
  misc_feature 1..89: note = engineered ribonucleic acid scaffold (ERS) sequence
  source 1..89: mol_type = other DNA
actggcgcttctatctgattactctcagtgccatcaccagcgactatgtcgtagtgggtaaagctccctcttcggagggagcatcagac

SEQ ID NO: 9200 - DNA, 89 bp, synthetic construct
  misc_feature 1..89: note = engineered ribonucleic acid scaffold (ERS) sequence
  source 1..89: mol_type = other DNA
actggcgcttctatctgattactttgagtgccatcaccagcgactatgtcgtagtgggtaaagctccctcttcggagggagcatcagag

SEQ ID NO: 9201 - DNA, 89 bp, synthetic construct
  misc_feature 1..89: note = engineered ribonucleic acid scaffold (ERS) sequence
  source 1..89: mol_type = other DNA
actggcgcttctatctgattactttgagtgccatcaccagcgactatgtcgtagtgggtaaagctccctcttcggagggagcatcaaag

SEQ ID NO: 9202 - DNA, 89 bp, synthetic construct
  misc_feature 1..89: note = engineered ribonucleic acid scaffold (ERS) sequence
  source 1..89: mol_type = other DNA
actggcgcttctatctgattagtctcagtgccatcaccagcgactatgtcgtagtgggtaaagctccctcttcggagggagcatgagac

SEQ ID NO: 9203 - DNA, 89 bp, synthetic construct
  misc_feature 1..89: note = engineered ribonucleic acid scaffold (ERS) sequence
  source 1..89: mol_type = other DNA
actggcgcttctatctgattagtctgagtgccatcaccagcgactatgtcgtagtgggtaaagctccctcttcggagggagcatcagac

SEQ ID NO: 9204 - DNA, 89 bp, synthetic construct
  misc_feature 1..89: note = engineered ribonucleic acid scaffold (ERS) sequence
  source 1..89: mol_type = other DNA
actggcgcttctatctgattactctcagtgccatcaccagcgactatgtcgtagtgggtaaagctccctcttcggagggagcatgagag

SEQ ID NO: 9205 - DNA, 89 bp, synthetic construct
  misc_feature 1..89: note = engineered ribonucleic acid scaffold (ERS) sequence
  source 1..89: mol_type = other DNA
actggcgctcccatctgattaccccgagtgccatcaccagcgactatgtcgtagtgggtaaagctccctcttcggagggagcatcgggg

SEQ ID NO: 9206 - DNA, 89 bp, synthetic construct
  misc_feature 1..89: note = engineered ribonucleic acid scaffold (ERS) sequence
  source 1..89: mol_type = other DNA
actggcgctcctatctgattactccgagtgccatcaccagcgactatgtcgtagtgggtaaagctccctcttcggagggagcatcggag

SEQ ID NO: 9207 - DNA, 89 bp, synthetic construct
  misc_feature 1..89: note = engineered ribonucleic acid scaffold (ERS) sequence
  source 1..89: mol_type = other DNA
actggcgctgggatctgattaccccgagtgccatcaccagcgactatgtcgtagtgggtaaagctccctcttcggagggagcatcgggg

SEQ ID NO: 9208 - DNA, 89 bp, synthetic construct
  misc_feature 1..89: note = engineered ribonucleic acid scaffold (ERS) sequence
  source 1..89: mol_type = other DNA
actggcgctggtatctgattactccgagtgccatcaccagcgactatgtcgtagtgggtaaagctccctcttcggagggagcatcggag

SEQ ID NO: 9209 - DNA, 89 bp, synthetic construct
  misc_feature 1..89: note = engineered ribonucleic acid scaffold (ERS) sequence
  source 1..89: mol_type = other DNA
actggcgcttccatctgattaccctgagtgccatcaccagcgactatgtcgtagtgggtaaagctccctcttcggagggagcatcaggg

SEQ ID NO: 9210 - DNA, 89 bp, synthetic construct
  misc_feature 1..89: note = engineered ribonucleic acid scaffold (ERS) sequence
  source 1..89: mol_type = other DNA
actggcgcttggatctgattaccctgagtgccatcaccagcgactatgtcgtagtgggtaaagctccctcttcggagggagcatcaggg

SEQ ID NO: 9211 - DNA, 89 bp, synthetic construct
  misc_feature 1..89: note = engineered ribonucleic acid scaffold (ERS) sequence
  source 1..89: mol_type = other DNA
actggcgcttgtatctgattactctgagtgccatcaccagcgactatgtcgtagtgggtaaagctccctcttcggagggagcatcagag

SEQ ID NO: 9212 - DNA, 89 bp, synthetic construct
  misc_feature 1..89: note = engineered ribonucleic acid scaffold (ERS) sequence
  source 1..89: mol_type = other DNA
actggcgcttttatctgattactttgagtgccatcaccagcgactatgtcgtagtgggtaaagctccctcttcggagggagcatcagag

SEQ ID NO: 9213 - DNA, 89 bp, synthetic construct
  misc_feature 1..89: note = engineered ribonucleic acid scaffold (ERS) sequence
  source 1..89: mol_type = other DNA
actggcgcttttatctgattactctgagtgccatcaccagcgactatgtcgtagtgggtaaagctccctcttcggagggagcatcagag

SEQ ID NO: 9214 - DNA, 89 bp, synthetic construct
  misc_feature 1..89: note = engineered ribonucleic acid scaffold (ERS) sequence
  source 1..89: mol_type = other DNA
actggcgcttttatctgattactctgagtgccatcaccagcgactatgtcgtagtgggtaaagctccctcttcggagggagcatcaaag

SEQ ID NO: 9215 - DNA, 89 bp, synthetic construct
  misc_feature 1..89: note = engineered ribonucleic acid scaffold (ERS) sequence
  source 1..89: mol_type = other DNA
actggcgcttctatctgattactctgagtgccatcaccagcgactatgtcgtagtgggtaaagctccctcttcggagggagcctcagag

SEQ ID NO: 9216 - DNA, 89 bp, synthetic construct
  misc_feature 1..89: note = engineered ribonucleic acid scaffold (ERS) sequence
  source 1..89: mol_type = other DNA
actggcgcttctatctgattactctgagtgccatcaccagcgactatgtcgtagtgggtaaagctccctcttcggagggagcgtcagag

SEQ ID NO: 9217 - DNA, 89 bp, synthetic construct
  misc_feature 1..89: note = engineered ribonucleic acid scaffold (ERS) sequence
  source 1..89: mol_type = other DNA
actggcgcttctatctgattactctgagtgccatcaccagcgactatgtcgtagtgggtaaagctccctcttcggagggagcatcaaag

SEQ ID NO: 9218 - DNA, 89 bp, synthetic construct
  misc_feature 1..89: note = engineered ribonucleic acid scaffold (ERS) sequence
  source 1..89: mol_type = other DNA
actggcgctcccatctgattaccccgagagccatcaccagcgactatgtcgtagtgggtaaagctccctcttcggagggagcatcgggg

SEQ ID NO: 9219 - DNA, 89 bp, synthetic construct
  misc_feature 1..89: note = engineered ribonucleic acid scaffold (ERS) sequence
  source 1..89: mol_type = other DNA
actggcgctcctatctgattactccgagagccatcaccagcgactatgtcgtagtgggtaaagctccctcttcggagggagcatcggag

SEQ ID NO: 9220 - DNA, 89 bp, synthetic construct
  misc_feature 1..89: note = engineered ribonucleic acid scaffold (ERS) sequence
  source 1..89: mol_type = other DNA
actggcgctgggatctgattaccccgagagccatcaccagcgactatgtcgtagtgggtaaagctccctcttcggagggagcatcgggg

SEQ ID NO: 9221 - DNA, 89 bp, synthetic construct
  misc_feature 1..89: note = engineered ribonucleic acid scaffold (ERS) sequence
  source 1..89: mol_type = other DNA
actggcgctggtatctgattactccgagagccatcaccagcgactatgtcgtagtgggtaaagctccctcttcggagggagcatcggag

SEQ ID NO: 9222 - DNA, 89 bp, synthetic construct
  misc_feature 1..89: note = engineered ribonucleic acid scaffold (ERS) sequence
  source 1..89: mol_type = other DNA
actggcgcttccatctgattaccctgagagccatcaccagcgactatgtcgtagtgggtaaagctccctcttcggagggagcatcaggg

SEQ ID NO: 9223 - DNA, 89 bp, synthetic construct
  misc_feature 1..89: note = engineered ribonucleic acid scaffold (ERS) sequence
  source 1..89: mol_type = other DNA
actggcgcttggatctgattaccctgagagccatcaccagcgactatgtcgtagtgggtaaagctccctcttcggagggagcatcaggg

SEQ ID NO: 9224 - DNA, 89 bp, synthetic construct
  misc_feature 1..89: note = engineered ribonucleic acid scaffold (ERS) sequence
  source 1..89: mol_type = other DNA
actggcgcttgtatctgattactctgagagccatcaccagcgactatgtcgtagtgggtaaagctccctcttcggagggagcatcagag

SEQ ID NO: 9225 - DNA, 89 bp, synthetic construct
  misc_feature 1..89: note = engineered ribonucleic acid scaffold (ERS) sequence
  source 1..89: mol_type = other DNA
actggcgcttttatctgattactttgagagccatcaccagcgactatgtcgtagtgggtaaagctccctcttcggagggagcatcagag

SEQ ID NO: 9226 - DNA, 89 bp, synthetic construct
  misc_feature 1..89: note = engineered ribonucleic acid scaffold (ERS) sequence
  source 1..89: mol_type = other DNA
actggcgcttttatctgattactctgagagccatcaccagcgactatgtcgtagtgggtaaagctccctcttcggagggagcatcagag

SEQ ID NO: 9227 - DNA, 89 bp, synthetic construct
  misc_feature 1..89: note = engineered ribonucleic acid scaffold (ERS) sequence
  source 1..89: mol_type = other DNA
actggcgcttttatctgattactctgagagccatcaccagcgactatgtcgtagtgggtaaagctccctcttcggagggagcatcaaag

SEQ ID NO: 9228 - DNA, 89 bp, synthetic construct
  misc_feature 1..89: note = engineered ribonucleic acid scaffold (ERS) sequence
  source 1..89: mol_type = other DNA
actggcgcttctatctgattactctgagagccatcaccagcgactatgtcgtagtgggtaaagctccctcttcggagggagcctcagag

SEQ ID NO: 9229 - DNA, 89 bp, synthetic construct
  misc_feature 1..89: note = engineered ribonucleic acid scaffold (ERS) sequence
  source 1..89: mol_type = other DNA
actggcgcttctatctgattactctgagagccatcaccagcgactatgtcgtagtgggtaaagctccctcttcggagggagcgtcagag

SEQ ID NO: 9230 - DNA, 89 bp, synthetic construct
  misc_feature 1..89: note = engineered ribonucleic acid scaffold (ERS) sequence
  source 1..89: mol_type = other DNA
actggcgcttctatctgattactctgagagccatcaccagcgactatgtcgtagtgggtaaagctccctcttcggagggagcatcaaag

SEQ ID NO: 9231 - DNA, 89 bp, synthetic construct
  misc_feature 1..89: note = engineered ribonucleic acid scaffold (ERS) sequence
  source 1..89: mol_type = other DNA
actggctcttctatctgattactctcagagccatcaccagcgactatgtcgtagtgggtaaagctccctcttcggagggagcatcagac

SEQ ID NO: 9232 - DNA, 89 bp, synthetic construct
  misc_feature 1..89: note = engineered ribonucleic acid scaffold (ERS) sequence
  source 1..89: mol_type = other DNA
actggctcttctatctgattactttgagagccatcaccagcgactatgtcgtagtgggtaaagctccctcttcggagggagcatcagag

SEQ ID NO: 9233 - DNA, 89 bp, synthetic construct
  misc_feature 1..89: note = engineered ribonucleic acid scaffold (ERS) sequence
  source 1..89: mol_type = other DNA
actggctcttctatctgattactttgagagccatcaccagcgactatgtcgtagtgggtaaagctccctcttcggagggagcatcaaag

SEQ ID NO: 9234 - DNA, 89 bp, synthetic construct
  misc_feature 1..89: note = engineered ribonucleic acid scaffold (ERS) sequence
  source 1..89: mol_type = other DNA
actggctcttctatctgattagtctcagagccatcaccagcgactatgtcgtagtgggtaaagctccctcttcggagggagcatgagac

SEQ ID NO: 9235 - DNA, 89 bp, synthetic construct
  misc_feature 1..89: note = engineered ribonucleic acid scaffold (ERS) sequence
  source 1..89: mol_type = other DNA
actggctcttctatctgattagtctgagagccatcaccagcgactatgtcgtagtgggtaaagctccctcttcggagggagcatcagac

SEQ ID NO: 9236 - DNA, 89 bp, synthetic construct
  misc_feature 1..89: note = engineered ribonucleic acid scaffold (ERS) sequence
  source 1..89: mol_type = other DNA
actggctcttctatctgattactctcagagccatcaccagcgactatgtcgtagtgggtaaagctccctcttcggagggagcatgagag

SEQ ID NO: 9237 - DNA, 89 bp, synthetic construct
  misc_feature 1..89: note = engineered ribonucleic acid scaffold (ERS) sequence
  source 1..89: mol_type = other DNA
actggctcttctatctgattactctcagcgccatcaccagcgactatgtcgtagtgggtaaagctccctcttcggagggagcatcagac

SEQ ID NO: 9238 - DNA, 89 bp, synthetic construct
  misc_feature 1..89: note = engineered ribonucleic acid scaffold (ERS) sequence
  source 1..89: mol_type = other DNA
actggctcttctatctgattactttgagcgccatcaccagcgactatgtcgtagtgggtaaagctccctcttcggagggagcatcagag

SEQ ID NO: 9239 - DNA, 89 bp, synthetic construct
  misc_feature 1..89: note = engineered ribonucleic acid scaffold (ERS) sequence
  source 1..89: mol_type = other DNA
actggctcttctatctgattactttgagcgccatcaccagcgactatgtcgtagtgggtaaagctccctcttcggagggagcatcaaag

SEQ ID NO: 9240 - DNA, 89 bp, synthetic construct
  misc_feature 1..89: note = engineered ribonucleic acid scaffold (ERS) sequence
  source 1..89: mol_type = other DNA
actggctcttctatctgattagtctcagcgccatcaccagcgactatgtcgtagtgggtaaagctccctcttcggagggagcatgagac

SEQ ID NO: 9241 - DNA, 89 bp, synthetic construct
  misc_feature 1..89: note = engineered ribonucleic acid scaffold (ERS) sequence
  source 1..89: mol_type = other DNA
actggctcttctatctgattagtctgagcgccatcaccagcgactatgtcgtagtgggtaaagctccctcttcggagggagcatcagac

SEQ ID NO: 9242 - DNA, 89 bp, synthetic construct
  misc_feature 1..89: note = engineered ribonucleic acid scaffold (ERS) sequence
  source 1..89: mol_type = other DNA
actggctcttctatctgattactctcagcgccatcaccagcgactatgtcgtagtgggtaaagctccctcttcggagggagcatgagag

SEQ ID NO: 9243 - DNA, 89 bp, synthetic construct
  misc_feature 1..89: note = engineered ribonucleic acid scaffold (ERS) sequence
  source 1..89: mol_type = other DNA
actggctctcccatctgattaccccgagcgccatcaccagcgactatgtcgtagtgggtaaagctccctcttcggagggagcatcgggg

SEQ ID NO: 9244 - DNA, 89 bp, synthetic construct
  misc_feature 1..89: note = engineered ribonucleic acid scaffold (ERS) sequence
  source 1..89: mol_type = other DNA
actggctctcctatctgattactccgagcgccatcaccagcgactatgtcgtagtgggtaaagctccctcttcggagggagcatcggag

SEQ ID NO: 9245 - DNA, 89 bp, synthetic construct
  misc_feature 1..89: note = engineered ribonucleic acid scaffold (ERS) sequence
  source 1..89: mol_type = other DNA
actggctctgggatctgattaccccgagcgccatcaccagcgactatgtcgtagtgggtaaagctccctcttcggagggagcatcgggg

SEQ ID NO: 9246 - DNA, 89 bp, synthetic construct
  misc_feature 1..89: note = engineered ribonucleic acid scaffold (ERS) sequence
  source 1..89: mol_type = other DNA
actggctctggtatctgattactccgagcgccatcaccagcgactatgtcgtagtgggtaaagctccctcttcggagggagcatcggag

SEQ ID NO: 9247 - DNA, 89 bp, synthetic construct
  misc_feature 1..89: note = engineered ribonucleic acid scaffold (ERS) sequence
  source 1..89: mol_type = other DNA
actggctcttccatctgattaccctgagcgccatcaccagcgactatgtcgtagtgggtaaagctccctcttcggagggagcatcaggg

SEQ ID NO: 9248 - DNA, 89 bp, synthetic construct
  misc_feature 1..89: note = engineered ribonucleic acid scaffold (ERS) sequence
  source 1..89: mol_type = other DNA
actggctcttggatctgattaccctgagcgccatcaccagcgactatgtcgtagtgggtaaagctccctcttcggagggagcatcaggg

SEQ ID NO: 9249 - DNA, 89 bp, synthetic construct
  misc_feature 1..89: note = engineered ribonucleic acid scaffold (ERS) sequence
  source 1..89: mol_type = other DNA
actggctcttgtatctgattactctgagcgccatcaccagcgactatgtcgtagtgggtaaagctccctcttcggagggagcatcagag

SEQ ID NO: 9250 - DNA, 89 bp, synthetic construct
  misc_feature 1..89: note = engineered ribonucleic acid scaffold (ERS) sequence
  source 1..89: mol_type = other DNA
actggctcttttatctgattactttgagcgccatcaccagcgactatgtcgtagtgggtaaagctccctcttcggagggagcatcagag

SEQ ID NO: 9251 - DNA, 89 bp, synthetic construct
  misc_feature 1..89: note = engineered ribonucleic acid scaffold (ERS) sequence
  source 1..89: mol_type = other DNA
actggctcttttatctgattactctgagcgccatcaccagcgactatgtcgtagtgggtaaagctccctcttcggagggagcatcagag

SEQ ID NO: 9252 - DNA, 89 bp, synthetic construct
  misc_feature 1..89: note = engineered ribonucleic acid scaffold (ERS) sequence
  source 1..89: mol_type = other DNA
actggctcttttatctgattactctgagcgccatcaccagcgactatgtcgtagtgggtaaagctccctcttcggagggagcatcaaag

SEQ ID NO: 9253 - DNA, 89 bp, synthetic construct
  misc_feature 1..89: note = engineered ribonucleic acid scaffold (ERS) sequence
  source 1..89: mol_type = other DNA
actggctcttctatctgattactctgagcgccatcaccagcgactatgtcgtagtgggtaaagctccctcttcggagggagcctcagag

SEQ ID NO: 9254 - DNA, 89 bp, synthetic construct
  misc_feature 1..89: note = engineered ribonucleic acid scaffold (ERS) sequence
  source 1..89: mol_type = other DNA
actggctcttctatctgattactctgagcgccatcaccagcgactatgtcgtagtgggtaaagctccctcttcggagggagcgtcagag

SEQ ID NO: 9255 - DNA, 89 bp, synthetic construct
  misc_feature 1..89: note = engineered ribonucleic acid scaffold (ERS) sequence
  source 1..89: mol_type = other DNA
actggctcttctatctgattactctgagcgccatcaccagcgactatgtcgtagtgggtaaagctccctcttcggagggagcatcaaag

SEQ ID NO: 9256 - DNA, 89 bp, synthetic construct
  misc_feature 1..89: note = engineered ribonucleic acid scaffold (ERS) sequence
  source 1..89: mol_type = other DNA
actggctcttctatctgattactctcagggccatcaccagcgactatgtcgtagtgggtaaagctccctcttcggagggagcatcagac

SEQ ID NO: 9257 - DNA, 89 bp, synthetic construct
  misc_feature 1..89: note = engineered ribonucleic acid scaffold (ERS) sequence
  source 1..89: mol_type = other DNA
actggctcttctatctgattactttgagggccatcaccagcgactatgtcgtagtgggtaaagctccctcttcggagggagcatcagag

SEQ ID NO: 9258 - DNA, 89 bp, synthetic construct
  misc_feature 1..89: note = engineered ribonucleic acid scaffold (ERS) sequence
  source 1..89: mol_type = other DNA
actggctcttctatctgattactttgagggccatcaccagcgactatgtcgtagtgggtaaagctccctcttcggagggagcatcaaag

SEQ ID NO: 9259 - DNA, 89 bp, synthetic construct
  misc_feature 1..89: note = engineered ribonucleic acid scaffold (ERS) sequence
  source 1..89: mol_type = other DNA
actggctcttctatctgattagtctcagggccatcaccagcgactatgtcgtagtgggtaaagctccctcttcggagggagcatgagac

SEQ ID NO: 9260 - DNA, 89 bp, synthetic construct
  misc_feature 1..89: note = engineered ribonucleic acid scaffold (ERS) sequence
  source 1..89: mol_type = other DNA
actggctcttctatctgattagtctgagggccatcaccagcgactatgtcgtagtgggtaaagctccctcttcggagggagcatcagac

SEQ ID NO: 9261 - DNA, 89 bp, synthetic construct
  misc_feature 1..89: note = engineered ribonucleic acid scaffold (ERS) sequence
  source 1..89: mol_type = other DNA
actggctcttctatctgattactctcagggccatcaccagcgactatgtcgtagtgggtaaagctccctcttcggagggagcatgagag

SEQ ID NO: 9262 - DNA, 89 bp, synthetic construct
  misc_feature 1..89: note = engineered ribonucleic acid scaffold (ERS) sequence
  source 1..89: mol_type = other DNA
actggctctcccatctgattaccccgagggccatcaccagcgactatgtcgtagtgggtaaagctccctcttcggagggagcatcgggg

SEQ ID NO: 9263 - DNA, 89 bp, synthetic construct
  misc_feature 1..89: note = engineered ribonucleic acid scaffold (ERS) sequence
  source 1..89: mol_type = other DNA
actggctctcctatctgattactccgagggccatcaccagcgactatgtcgtagtgggtaaagctccctcttcggagggagcatcggag

SEQ ID NO: 9264 - DNA, 89 bp, synthetic construct
  misc_feature 1..89: note = engineered ribonucleic acid scaffold (ERS) sequence
  source 1..89: mol_type = other DNA
actggctctgggatctgattaccccgagggccatcaccagcgactatgtcgtagtgggtaaagctccctcttcggagggagcatcgggg

SEQ ID NO: 9265 - DNA, 89 bp, synthetic construct
  misc_feature 1..89: note = engineered ribonucleic acid scaffold (ERS) sequence
  source 1..89: mol_type = other DNA
actggctctggtatctgattactccgagggccatcaccagcgactatgtcgtagtgggtaaagctccctcttcggagggagcatcggag

SEQ ID NO: 9266 - DNA, 89 bp, synthetic construct
  misc_feature 1..89: note = engineered ribonucleic acid scaffold (ERS) sequence
  source 1..89: mol_type = other DNA
actggctcttccatctgattaccctgagggccatcaccagcgactatgtcgtagtgggtaaagctccctcttcggagggagcatcaggg

SEQ ID NO: 9267 - DNA, 89 bp, synthetic construct
  misc_feature 1..89: note = engineered ribonucleic acid scaffold (ERS) sequence
  source 1..89: mol_type = other DNA
actggctcttggatctgattaccctgagggccatcaccagcgactatgtcgtagtgggtaaagctccctcttcggagggagcatcaggg

SEQ ID NO: 9268 - DNA, 89 bp, synthetic construct
  misc_feature 1..89: note = engineered ribonucleic acid scaffold (ERS) sequence
  source 1..89: mol_type = other DNA
actggctcttgtatctgattactctgagggccatcaccagcgactatgtcgtagtgggtaaagctccctcttcggagggagcatcagag

SEQ ID NO: 9269 - DNA, 89 bp, synthetic construct
  misc_feature 1..89: note = engineered ribonucleic acid scaffold (ERS) sequence
  source 1..89: mol_type = other DNA
actggctcttttatctgattactttgagggccatcaccagcgactatgtcgtagtgggtaaagctccctcttcggagggagcatcagag

SEQ ID NO: 9270 - DNA, 89 bp, synthetic construct
  misc_feature 1..89: note = engineered ribonucleic acid scaffold (ERS) sequence
  source 1..89: mol_type = other DNA
actggctcttttatctgattactctgagggccatcaccagcgactatgtcgtagtgggtaaagctccctcttcggagggagcatcagag

SEQ ID NO: 9271 - DNA, 89 bp, synthetic construct
  misc_feature 1..89: note = engineered ribonucleic acid scaffold (ERS) sequence
  source 1..89: mol_type = other DNA
actggctcttttatctgattactctgagggccatcaccagcgactatgtcgtagtgggtaaagctccctcttcggagggagcatcaaag

SEQ ID NO: 9272 - DNA, 89 bp, synthetic construct
  misc_feature 1..89: note = engineered ribonucleic acid scaffold (ERS) sequence
  source 1..89: mol_type = other DNA
actggctcttctatctgattactctgagggccatcaccagcgactatgtcgtagtgggtaaagctccctcttcggagggagcctcagag

SEQ ID NO: 9273 - DNA, 89 bp, synthetic construct
  misc_feature 1..89: note = engineered ribonucleic acid scaffold (ERS) sequence
  source 1..89: mol_type = other DNA
actggctcttctatctgattactctgagggccatcaccagcgactatgtcgtagtgggtaaagctccctcttcggagggagcgtcagag

SEQ ID NO: 9274 - DNA, 89 bp, synthetic construct
  misc_feature 1..89: note = engineered ribonucleic acid scaffold (ERS) sequence
  source 1..89: mol_type = other DNA
actggctcttctatctgattactctgagggccatcaccagcgactatgtcgtagtgggtaaagctccctcttcggagggagcatcaaag

SEQ ID NO: 9275 - DNA, 89 bp, synthetic construct
  misc_feature 1..89: note = engineered ribonucleic acid scaffold (ERS) sequence
  source 1..89: mol_type = other DNA
actggctcttctatctgattactctcagtgccatcaccagcgactatgtcgtagtgggtaaagctccctcttcggagggagcatcagac

SEQ ID NO: 9276 - DNA, 89 bp, synthetic construct
  misc_feature 1..89: note = engineered ribonucleic acid scaffold (ERS) sequence
  source 1..89: mol_type = other DNA
actggctcttctatctgattactttgagtgccatcaccagcgactatgtcgtagtgggtaaagctccctcttcggagggagcatcagag

SEQ ID NO: 9277 - DNA, 89 bp, synthetic construct
  misc_feature 1..89: note = engineered ribonucleic acid scaffold (ERS) sequence
  source 1..89: mol_type = other DNA
actggctcttctatctgattactttgagtgccatcaccagcgactatgtcgtagtgggtaaagctccctcttcggagggagcatcaaag

SEQ ID NO: 9278 - DNA, 89 bp, synthetic construct
  misc_feature 1..89: note = engineered ribonucleic acid scaffold (ERS) sequence
  source 1..89: mol_type = other DNA
actggctcttctatctgattagtctcagtgccatcaccagcgactatgtcgtagtgggtaaagctccctcttcggagggagcatgagac

SEQ ID NO: 9279 - DNA, 89 bp, synthetic construct
  misc_feature 1..89: note = engineered ribonucleic acid scaffold (ERS) sequence
  source 1..89: mol_type = other DNA
actggctcttctatctgattagtctgagtgccatcaccagcgactatgtcgtagtgggtaaagctccctcttcggagggagcatcagac

SEQ ID NO: 9280 - DNA, 89 bp, synthetic construct
  misc_feature 1..89: note = engineered ribonucleic acid scaffold (ERS) sequence
  source 1..89: mol_type = other DNA
actggctcttctatctgattactctcagtgccatcaccagcgactatgtcgtagtgggtaaagctccctcttcggagggagcatgagag

SEQ ID NO: 9281 - DNA, 89 bp, synthetic construct
  misc_feature 1..89: note = engineered ribonucleic acid scaffold (ERS) sequence
  source 1..89: mol_type = other DNA
actggctctcccatctgattaccccgagtgccatcaccagcgactatgtcgtagtgggtaaagctccctcttcggagggagcatcgggg

SEQ ID NO: 9282 - DNA, 89 bp, synthetic construct
  misc_feature 1..89: note = engineered ribonucleic acid scaffold (ERS) sequence
  source 1..89: mol_type = other DNA
actggctctcctatctgattactccgagtgccatcaccagcgactatgtcgtagtgggtaaagctccctcttcggagggagcatcggag

SEQ ID NO: 9283 - DNA, 89 bp, synthetic construct
  misc_feature 1..89: note = engineered ribonucleic acid scaffold (ERS) sequence
  source 1..89: mol_type = other DNA
actggctctgggatctgattaccccgagtgccatcaccagcgactatgtcgtagtgggtaaagctccctcttcggagggagcatcgggg

SEQ ID NO: 9284 - DNA, 89 bp, synthetic construct
  misc_feature 1..89: note = engineered ribonucleic acid scaffold (ERS) sequence
  source 1..89: mol_type = other DNA
actggctctggtatctgattactccgagtgccatcaccagcgactatgtcgtagtgggtaaagctccctcttcggagggagcatcggag

SEQ ID NO: 9285 - DNA, 89 bp, synthetic construct
  misc_feature 1..89: note = engineered ribonucleic acid scaffold (ERS) sequence
  source 1..89: mol_type = other DNA
actggctcttccatctgattaccctgagtgccatcaccagcgactatgtcgtagtgggtaaagctccctcttcggagggagcatcaggg

SEQ ID NO: 9286 - DNA, 89 bp, synthetic construct
  misc_feature 1..89: note = engineered ribonucleic acid scaffold (ERS) sequence
  source 1..89: mol_type = other DNA
actggctcttggatctgattaccctgagtgccatcaccagcgactatgtcgtagtgggtaaagctccctcttcggagggagcatcaggg

SEQ ID NO: 9287 - DNA, 89 bp, synthetic construct
  misc_feature 1..89: note = engineered ribonucleic acid scaffold (ERS) sequence
  source 1..89: mol_type = other DNA
actggctcttgtatctgattactctgagtgccatcaccagcgactatgtcgtagtgggtaaagctccctcttcggagggagcatcagag

SEQ ID NO: 9288 - DNA, 89 bp, synthetic construct
  misc_feature 1..89: note = engineered ribonucleic acid scaffold (ERS) sequence
  source 1..89: mol_type = other DNA
actggctcttttatctgattactttgagtgccatcaccagcgactatgtcgtagtgggtaaagctccctcttcggagggagcatcagag

SEQ ID NO: 9289 - DNA, 89 bp, synthetic construct
  misc_feature 1..89: note = engineered ribonucleic acid scaffold (ERS) sequence
  source 1..89: mol_type = other DNA
actggctcttttatctgattactctgagtgccatcaccagcgactatgtcgtagtgggtaaagctccctcttcggagggagcatcagag

SEQ ID NO: 9290 - DNA, 89 bp, synthetic construct
  misc_feature 1..89: note = engineered ribonucleic acid scaffold (ERS) sequence
  source 1..89: mol_type = other DNA
actggctcttttatctgattactctgagtgccatcaccagcgactatgtcgtagtgggtaaagctccctcttcggagggagcatcaaag

SEQ ID NO: 9291 - DNA, 89 bp, synthetic construct
  misc_feature 1..89: note = engineered ribonucleic acid scaffold (ERS) sequence
  source 1..89: mol_type = other DNA
actggctcttctatctgattactctgagtgccatcaccagcgactatgtcgtagtgggtaaagctccctcttcggagggagcctcagag

SEQ ID NO: 9292 - DNA, 89 bp, synthetic construct
  misc_feature 1..89: note = engineered ribonucleic acid scaffold (ERS) sequence
  source 1..89: mol_type = other DNA
actggctcttctatctgattactctgagtgccatcaccagcgactatgtcgtagtgggtaaagctccctcttcggagggagcgtcagag

SEQ ID NO: 9293 - DNA, 89 bp, synthetic construct
  misc_feature 1..89: note = engineered ribonucleic acid scaffold (ERS) sequence
  source 1..89: mol_type = other DNA
actggctcttctatctgattactctgagtgccatcaccagcgactatgtcgtagtgggtaaagctccctcttcggagggagcatcaaag

SEQ ID NO: 9294 - DNA, 89 bp, synthetic construct
  misc_feature 1..89: note = engineered ribonucleic acid scaffold (ERS) sequence
  source 1..89: mol_type = other DNA
actggctctcccatctgattaccccgagagccatcaccagcgactatgtcgtagtgggtaaagctccctcttcggagggagcatcgggg

SEQ ID NO: 9295 - DNA, 89 bp, synthetic construct
  misc_feature 1..89: note = engineered ribonucleic acid scaffold (ERS) sequence
  source 1..89: mol_type = other DNA
actggctctcctatctgattactccgagagccatcaccagcgactatgtcgtagtgggtaaagctccctcttcggagggagcatcggag

SEQ ID NO: 9296 - DNA, 89 bp, synthetic construct
  misc_feature 1..89: note = engineered ribonucleic acid scaffold (ERS) sequence
  source 1..89: mol_type = other DNA
actggctctgggatctgattaccccgagagccatcaccagcgactatgtcgtagtgggtaaagctccctcttcggagggagcatcgggg

SEQ ID NO: 9297 - DNA, 89 bp, synthetic construct
  misc_feature 1..89: note = engineered ribonucleic acid scaffold (ERS) sequence
  source 1..89: mol_type = other DNA
actggctctggtatctgattactccgagagccatcaccagcgactatgtcgtagtgggtaaagctccctcttcggagggagcatcggag

SEQ ID NO: 9298 - DNA, 89 bp, synthetic construct
  misc_feature 1..89: note = engineered ribonucleic acid scaffold (ERS) sequence
  source 1..89: mol_type = other DNA
actggctcttccatctgattaccctgagagccatcaccagcgactatgtcgtagtgggtaaagctccctcttcggagggagcatcaggg

SEQ ID NO: 9299 - DNA, 89 bp, synthetic construct
  misc_feature 1..89: note = engineered ribonucleic acid scaffold (ERS) sequence
  source 1..89: mol_type = other DNA
actggctcttggatctgattaccctgagagccatcaccagcgactatgtcgtagtgggtaaagctccctcttcggagggagcatcaggg

SEQ ID NO: 9300 - DNA, 89 bp, synthetic construct
  misc_feature 1..89: note = engineered ribonucleic acid scaffold (ERS) sequence
  source 1..89: mol_type = other DNA
actggctcttgtatctgattactctgagagccatcaccagcgactatgtcgtagtgggtaaagctccctcttcggagggagcatcagag

SEQ ID NO: 9301 - DNA, 89 bp, synthetic construct
  misc_feature 1..89: note = engineered ribonucleic acid scaffold (ERS) sequence
  source 1..89: mol_type = other DNA
actggctcttttatctgattactttgagagccatcaccagcgactatgtcgtagtgggtaaagctccctcttcggagggagcatcagag

SEQ ID NO: 9302 - DNA, 89 bp, synthetic construct
  misc_feature 1..89: note = engineered ribonucleic acid scaffold (ERS) sequence
  source 1..89: mol_type = other DNA
actggctcttttatctgattactctgagagccatcaccagcgactatgtcgtagtgggtaaagctccctcttcggagggagcatcagag

SEQ ID NO: 9303 - DNA, 89 bp, synthetic construct
  misc_feature 1..89: note = engineered ribonucleic acid scaffold (ERS) sequence
  source 1..89: mol_type = other DNA
actggctcttttatctgattactctgagagccatcaccagcgactatgtcgtagtgggtaaagctccctcttcggagggagcatcaaag

SEQ ID NO: 9304 - DNA, 89 bp, synthetic construct
  misc_feature 1..89: note = engineered ribonucleic acid scaffold (ERS) sequence
  source 1..89: mol_type = other DNA
actggctcttctatctgattactctgagagccatcaccagcgactatgtcgtagtgggtaaagctccctcttcggagggagcctcagag

SEQ ID NO: 9305 - DNA, 89 bp, synthetic construct
  misc_feature 1..89: note = engineered ribonucleic acid scaffold (ERS) sequence
  source 1..89: mol_type = other DNA
actggctcttctatctgattactctgagagccatcaccagcgactatgtcgtagtgggtaaagctccctcttcggagggagcgtcagag

SEQ ID NO: 9306 - DNA, 89 bp, synthetic construct
  misc_feature 1..89: note = engineered ribonucleic acid scaffold (ERS) sequence
  source 1..89: mol_type = other DNA
actggctcttctatctgattactctgagagccatcaccagcgactatgtcgtagtgggtaaagctccctcttcggagggagcatcaaag

SEQ ID NO: 9307 - DNA, 89 bp, synthetic construct
  misc_feature 1..89: note = engineered ribonucleic acid scaffold (ERS) sequence
  source 1..89: mol_type = other DNA
actggcggttctatctgattactctcagcgccatcaccagcgactatgtcgtagtgggtaaagctccctcttcggagggagcatcagac

SEQ ID NO: 9308 - DNA, 89 bp, synthetic construct
  misc_feature 1..89: note = engineered ribonucleic acid scaffold (ERS) sequence
  source 1..89: mol_type = other DNA
actggcggttctatctgattactttgagcgccatcaccagcgactatgtcgtagtgggtaaagctccctcttcggagggagcatcagag

SEQ ID NO: 9309 - DNA, 89 bp, synthetic construct
  misc_feature 1..89: note = engineered ribonucleic acid scaffold (ERS) sequence
  source 1..89: mol_type = other DNA
actggcggttctatctgattactttgagcgccatcaccagcgactatgtcgtagtgggtaaagctccctcttcggagggagcatcaaag

SEQ ID NO: 9310 - DNA, 89 bp, synthetic construct
  misc_feature 1..89: note = engineered ribonucleic acid scaffold (ERS) sequence
  source 1..89: mol_type = other DNA
actggcggttctatctgattagtctcagcgccatcaccagcgactatgtcgtagtgggtaaagctccctcttcggagggagcatgagac

SEQ ID NO: 9311 - DNA, 89 bp, synthetic construct
  misc_feature 1..89: note = engineered ribonucleic acid scaffold (ERS) sequence
  source 1..89: mol_type = other DNA
actggcggttctatctgattagtctgagcgccatcaccagcgactatgtcgtagtgggtaaagctccctcttcggagggagcatcagac

SEQ ID NO: 9312 - DNA, 89 bp, synthetic construct
  misc_feature 1..89: note = engineered ribonucleic acid scaffold (ERS) sequence
  source 1..89: mol_type = other DNA
actggcggttctatctgattactctcagcgccatcaccagcgactatgtcgtagtgggtaaagctccctcttcggagggagcatgagag

SEQ ID NO: 9313 - DNA, 89 bp, synthetic construct
  misc_feature 1..89: note = engineered ribonucleic acid scaffold (ERS) sequence
  source 1..89: mol_type = other DNA
actggcggtcccatctgattaccccgagcgccatcaccagcgactatgtcgtagtgggtaaagctccctcttcggagggagcatcgggg

SEQ ID NO: 9314 - DNA, 89 bp, synthetic construct
  misc_feature 1..89: note = engineered ribonucleic acid scaffold (ERS) sequence
  source 1..89: mol_type = other DNA
actggcggtcctatctgattactccgagcgccatcaccagcgactatgtcgtagtgggtaaagctccctcttcggagggagcatcggag

SEQ ID NO: 9315 - DNA, 89 bp, synthetic construct
  misc_feature 1..89: note = engineered ribonucleic acid scaffold (ERS) sequence
  source 1..89: mol_type = other DNA
actggcggtgggatctgattaccccgagcgccatcaccagcgactatgtcgtagtgggtaaagctccctcttcggagggagcatcgggg

SEQ ID NO: 9316 - DNA, 89 bp, synthetic construct
  misc_feature 1..89: note = engineered ribonucleic acid scaffold (ERS) sequence
  source 1..89: mol_type = other DNA
actggcggtggtatctgattactccgagcgccatcaccagcgactatgtcgtagtgggtaaagctccctcttcggagggagcatcggag

SEQ ID NO: 9317 - DNA, 89 bp, synthetic construct
  misc_feature 1..89: note = engineered ribonucleic acid scaffold (ERS) sequence
  source 1..89: mol_type = other DNA
actggcggttccatctgattaccctgagcgccatcaccagcgactatgtcgtagtgggtaaagctccctcttcggagggagcatcaggg

SEQ ID NO: 9318 - DNA, 89 bp, synthetic construct
  misc_feature 1..89: note = engineered ribonucleic acid scaffold (ERS) sequence
  source 1..89: mol_type = other DNA
actggcggttggatctgattaccctgagcgccatcaccagcgactatgtcgtagtgggtaaagctccctcttcggagggagcatcaggg

SEQ ID NO: 9319 - DNA, 89 bp, synthetic construct
  misc_feature 1..89: note = engineered ribonucleic acid scaffold (ERS) sequence
  source 1..89: mol_type = other DNA
actggcggttgtatctgattactctgagcgccatcaccagcgactatgtcgtagtgggtaaagctccctcttcggagggagcatcagag

SEQ ID NO: 9320 - DNA, 89 bp, synthetic construct
  misc_feature 1..89: note = engineered ribonucleic acid scaffold (ERS) sequence
  source 1..89: mol_type = other DNA
actggcggttttatctgattactttgagcgccatcaccagcgactatgtcgtagtgggtaaagctccctcttcggagggagcatcagag

SEQ ID NO: 9321 - DNA, 89 bp, synthetic construct
  misc_feature 1..89: note = engineered ribonucleic acid scaffold (ERS) sequence
  source 1..89: mol_type = other DNA
actggcggttttatctgattactctgagcgccatcaccagcgactatgtcgtagtgggtaaagctccctcttcggagggagcatcagag

SEQ ID NO: 9322 - DNA, 89 bp, synthetic construct
  misc_feature 1..89: note = engineered ribonucleic acid scaffold (ERS) sequence
  source 1..89: mol_type = other DNA
actggcggttttatctgattactctgagcgccatcaccagcgactatgtcgtagtgggtaaagctccctcttcggagggagcatcaaag

SEQ ID NO: 9323 - DNA, 89 bp, synthetic construct
  misc_feature 1..89: note = engineered ribonucleic acid scaffold (ERS) sequence
  source 1..89: mol_type = other DNA
actggcggttctatctgattactctgagcgccatcaccagcgactatgtcgtagtgggtaaagctccctcttcggagggagcctcagag

SEQ ID NO: 9324 - DNA, 89 bp, synthetic construct
  misc_feature 1..89: note = engineered ribonucleic acid scaffold (ERS) sequence
  source 1..89: mol_type = other DNA
actggcggttctatctgattactctgagcgccatcaccagcgactatgtcgtagtgggtaaagctccctcttcggagggagcgtcagag

SEQ ID NO: 9325 - DNA, 89 bp, synthetic construct
  misc_feature 1..89: note = engineered ribonucleic acid scaffold (ERS) sequence
  source 1..89: mol_type = other DNA
actggcggttctatctgattactctgagcgccatcaccagcgactatgtcgtagtgggtaaagctccctcttcggagggagcatcaaag

SEQ ID NO: 9326 - DNA, 89 bp, synthetic construct
  misc_feature 1..89: note = engineered ribonucleic acid scaffold (ERS) sequence
  source 1..89: mol_type = other DNA
actggcggttctatctgattactctcagagccatcaccagcgactatgtcgtagtgggtaaagctccctcttcggagggagcatcagac

SEQ ID NO: 9327 - DNA, 89 bp, synthetic construct
  misc_feature 1..89: note = engineered ribonucleic acid scaffold (ERS) sequence
  source 1..89: mol_type = other DNA
actggcggttctatctgattactttgagagccatcaccagcgactatgtcgtagtgggtaaagctccctcttcggagggagcatcagag

SEQ ID NO: 9328 - DNA, 89 bp, synthetic construct
  misc_feature 1..89: note = engineered ribonucleic acid scaffold (ERS) sequence
  source 1..89: mol_type = other DNA
actggcggttctatctgattactttgagagccatcaccagcgactatgtcgtagtgggtaaagctccctcttcggagggagcatcaaag

SEQ ID NO: 9329 - DNA, 89 bp, synthetic construct
  misc_feature 1..89: note = engineered ribonucleic acid scaffold (ERS) sequence
  source 1..89: mol_type = other DNA
actggcggttctatctgattagtctcagagccatcaccagcgactatgtcgtagtgggtaaagctccctcttcggagggagcatgagac

SEQ ID NO: 9330 - DNA, 89 bp, synthetic construct
  misc_feature 1..89: note = engineered ribonucleic acid scaffold (ERS) sequence
  source 1..89: mol_type = other DNA
actggcggttctatctgattagtctgagagccatcaccagcgactatgtcgtagtgggtaaagctccctcttcggagggagcatcagac

SEQ ID NO: 9331 - DNA, 89 bp, synthetic construct
  misc_feature 1..89: note = engineered ribonucleic acid scaffold (ERS) sequence
  source 1..89: mol_type = other DNA
actggcggttctatctgattactctcagagccatcaccagcgactatgtcgtagtgggtaaagctccctcttcggagggagcatgagag

SEQ ID NO: 9332 - DNA, 89 bp, synthetic construct
  misc_feature 1..89: note = engineered ribonucleic acid scaffold (ERS) sequence
  source 1..89: mol_type = other DNA
actggcggtcccatctgattaccccgagagccatcaccagcgactatgtcgtagtgggtaaagctccctcttcggagggagcatcgggg

SEQ ID NO: 9333 - DNA, 89 bp, synthetic construct
  misc_feature 1..89: note = engineered ribonucleic acid scaffold (ERS) sequence
  source 1..89: mol_type = other DNA
actggcggtcctatctgattactccgagagccatcaccagcgactatgtcgtagtgggtaaagctccctcttcggagggagcatcggag

SEQ ID NO: 9334 - DNA, 89 bp, synthetic construct
  misc_feature 1..89: note = engineered ribonucleic acid scaffold (ERS) sequence
  source 1..89: mol_type = other DNA
actggcggtgggatctgattaccccgagagccatcaccagcgactatgtcgtagtgggtaaagctccctcttcggagggagcatcgggg

SEQ ID NO: 9335 - DNA, 89 bp, synthetic construct
  misc_feature 1..89: note = engineered ribonucleic acid scaffold (ERS) sequence
  source 1..89: mol_type = other DNA
actggcggtggtatctgattactccgagagccatcaccagcgactatgtcgtagtgggtaaagctccctcttcggagggagcatcggag

SEQ ID NO: 9336 - DNA, 89 bp, synthetic construct
  misc_feature 1..89: note = engineered ribonucleic acid scaffold (ERS) sequence
  source 1..89: mol_type = other DNA
actggcggttccatctgattaccctgagagccatcaccagcgactatgtcgtagtgggtaaagctccctcttcggagggagcatcaggg

SEQ ID NO: 9337 - DNA, 89 bp, synthetic construct
  misc_feature 1..89: note = engineered ribonucleic acid scaffold (ERS) sequence
  source 1..89: mol_type = other DNA
actggcggttggatctgattaccctgagagccatcaccagcgactatgtcgtagtgggtaaagctccctcttcggagggagcatcaggg

SEQ ID NO: 9338 - DNA, 89 bp, synthetic construct
  misc_feature 1..89: note = engineered ribonucleic acid scaffold (ERS) sequence
  source 1..89: mol_type = other DNA
actggcggttgtatctgattactctgagagccatcaccagcgactatgtcgtagtgggtaaagctccctcttcggagggagcatcagag

SEQ ID NO: 9339 - DNA, 89 bp, synthetic construct
  misc_feature 1..89: note = engineered ribonucleic acid scaffold (ERS) sequence
  source 1..89: mol_type = other DNA
actggcggttttatctgattactttgagagccatcaccagcgactatgtcgtagtgggtaaagctccctcttcggagggagcatcagag

SEQ ID NO: 9340 - DNA, 89 bp, synthetic construct
  misc_feature 1..89: note = engineered ribonucleic acid scaffold (ERS) sequence
  source 1..89: mol_type = other DNA
actggcggttttatctgattactctgagagccatcaccagcgactatgtcgtagtgggtaaagctccctcttcggagggagcatcagag

SEQ ID NO: 9341 - DNA, 89 bp, synthetic construct
  misc_feature 1..89: note = engineered ribonucleic acid scaffold (ERS) sequence
  source 1..89: mol_type = other DNA
actggcggttttatctgattactctgagagccatcaccagcgactatgtcgtagtgggtaaagctccctcttcggagggagcatcaaag

SEQ ID NO: 9342 - DNA, 89 bp, synthetic construct
  misc_feature 1..89: note = engineered ribonucleic acid scaffold (ERS) sequence
  source 1..89: mol_type = other DNA
actggcggttctatctgattactctgagagccatcaccagcgactatgtcgtagtgggtaaagctccctcttcggagggagcctcagag

SEQ ID NO: 9343 - DNA, 89 bp, synthetic construct
  misc_feature 1..89: note = engineered ribonucleic acid scaffold (ERS) sequence
  source 1..89: mol_type = other DNA
actggcggttctatctgattactctgagagccatcaccagcgactatgtcgtagtgggtaaagctccctcttcggagggagcgtcagag

SEQ ID NO: 9344 - DNA, 89 bp, synthetic construct
  misc_feature 1..89: note = engineered ribonucleic acid scaffold (ERS) sequence
  source 1..89: mol_type = other DNA
actggcggttctatctgattactctgagagccatcaccagcgactatgtcgtagtgggtaaagctccctcttcggagggagcatcaaag

SEQ ID NO: 9345 - DNA, 90 bp, synthetic construct
  misc_feature 1..90: note = engineered ribonucleic acid scaffold (ERS) sequence
  source 1..90: mol_type = other DNA
acacacggttctatatctgattactctgccgtgttcaccagcgactatgtcgtagtgggtaaagctccctcttcggagggagcatcagag

SEQ ID NO: 9346 - DNA, 89 bp, synthetic construct
  misc_feature 1..89: note = engineered ribonucleic acid scaffold (ERS) sequence
  source 1..89: mol_type = other DNA
acacacggttctaatctgattactctgccgtgttcaccagcgactatgtcgtagtgggtaaagctccctcttcggagggagcatcagag

SEQ ID NO: 9347 - DNA, 87 bp, synthetic construct
  misc_feature 1..87: note = engineered ribonucleic acid scaffold (ERS) sequence
  source 1..87: mol_type = other DNA
acacacggttctactgattactctgccgtgttcaccagcgactatgtcgtagtgggtaaagctccctcttcggagggagcatcagag

SEQ ID NO: 9348 - DNA, 88 bp, synthetic construct
  misc_feature 1..88: note = engineered ribonucleic acid scaffold (ERS) sequence
  source 1..88: mol_type = other DNA
acacacggttctaactgattactctgccgtgttcaccagcgactatgtcgtagtgggtaaagctccctcttcggagggagcatcagag

SEQ ID NO: 9349 - DNA, 88 bp, synthetic construct
  misc_feature 1..88: note = engineered ribonucleic acid scaffold (ERS) sequence
  source 1..88: mol_type = other DNA
acacacggttctacctgattactctgccgtgttcaccagcgactatgtcgtagtgggtaaagctccctcttcggagggagcatcagag

SEQ ID NO: 9350 - DNA, 88 bp, synthetic construct
  misc_feature 1..88: note = engineered ribonucleic acid scaffold (ERS) sequence
  source 1..88: mol_type = other DNA
acacacggttctagctgattactctgccgtgttcaccagcgactatgtcgtagtgggtaaagctccctcttcggagggagcatcagag

SEQ ID NO: 9351 - DNA, 90 bp, synthetic construct
  misc_feature 1..90: note = engineered ribonucleic acid scaffold (ERS) sequence
  source 1..90: mol_type = other DNA
acacacggttctattactgattactctgccgtgttcaccagcgactatgtcgtagtgggtaaagctccctcttcggagggagcatcagag

SEQ ID NO: 9352 - DNA, 88 bp, synthetic construct
  misc_feature 1..88: note = engineered ribonucleic acid scaffold (ERS) sequence
  source 1..88: mol_type = other DNA
acacacggttctatatgattactctgccgtgttcaccagcgactatgtcgtagtgggtaaagctccctcttcggagggagcatcagag

SEQ ID NO: 9353 - DNA, 88 bp, synthetic construct
  misc_feature 1..88: note = engineered ribonucleic acid scaffold (ERS) sequence
  source 1..88: mol_type = other DNA
acacacggttctatgtgattactctgccgtgttcaccagcgactatgtcgtagtgggtaaagctccctcttcggagggagcatcagag

SEQ ID NO: 9354 - DNA, 88 bp, synthetic construct
  misc_feature 1..88: note = engineered ribonucleic acid scaffold (ERS) sequence
  source 1..88: mol_type = other DNA
acacacggttctatttgattactctgccgtgttcaccagcgactatgtcgtagtgggtaaagctccctcttcggagggagcatcagag

SEQ ID NO: 9355 - DNA, 89 bp, synthetic construct
  misc_feature 1..89: note = engineered ribonucleic acid scaffold (ERS) sequence
  source 1..89: mol_type = other DNA
acacacggttctatcttgattactctgccgtgttcaccagcgactatgtcgtagtgggtaaagctccctcttcggagggagcatcagag

SEQ ID NO: 9356 - DNA, 88 bp, synthetic construct
  misc_feature 1..88: note = engineered ribonucleic acid scaffold (ERS) sequence
  source 1..88: mol_type = other DNA
acacacggttctatcagattactctgccgtgttcaccagcgactatgtcgtagtgggtaaagctccctcttcggagggagcatcagag

SEQ ID NO: 9357 - DNA, 88 bp, synthetic construct
  misc_feature 1..88: note = engineered ribonucleic acid scaffold (ERS) sequence
  source 1..88: mol_type = other DNA
acacacggttctatcggattactctgccgtgttcaccagcgactatgtcgtagtgggtaaagctccctcttcggagggagcatcagag

SEQ ID NO: 9358 - DNA, 89 bp, synthetic construct
  misc_feature 1..89: note = engineered ribonucleic acid scaffold (ERS) sequence
  source 1..89: mol_type = other DNA
acacacggttctatctgaattactctgccgtgttcaccagcgactatgtcgtagtgggtaaagctccctcttcggagggagcatcagag

SEQ ID NO: 9359 - DNA, 89 bp, synthetic construct
  misc_feature 1..89: note = engineered ribonucleic acid scaffold (ERS) sequence
  source 1..89: mol_type = other DNA
acacacggttctatctgtattactctgccgtgttcaccagcgactatgtcgtagtgggtaaagctccctcttcggagggagcatcagag

SEQ ID NO: 9360 - DNA, 88 bp, synthetic construct
  misc_feature 1..88: note = engineered ribonucleic acid scaffold (ERS) sequence
  source 1..88: mol_type = other DNA
acacacggttctatctggttactctgccgtgttcaccagcgactatgtcgtagtgggtaaagctccctcttcggagggagcatcagag

SEQ ID NO: 9361 - DNA, 88 bp, synthetic construct
  misc_feature 1..88: note = engineered ribonucleic acid scaffold (ERS) sequence
  source 1..88: mol_type = other DNA
acacacggttctatctgtttactctgccgtgttcaccagcgactatgtcgtagtgggtaaagctccctcttcggagggagcatcagag

SEQ ID NO: 9362 - DNA, 89 bp, synthetic construct
  misc_feature 1..89: note = engineered ribonucleic acid scaffold (ERS) sequence
  source 1..89: mol_type = other DNA
acacacggttctatctgatttactctgccgtgttcaccagcgactatgtcgtagtgggtaaagctccctcttcggagggagcatcagag

SEQ ID NO: 9363 - DNA, 88 bp, synthetic construct
  misc_feature 1..88: note = engineered ribonucleic acid scaffold (ERS) sequence
  source 1..88: mol_type = other DNA
acacacggttctatctgattgctctgccgtgttcaccagcgactatgtcgtagtgggtaaagctccctcttcggagggagcatcagag

SEQ ID NO: 9364 - DNA, 90 bp, synthetic construct
  misc_feature 1..90: note = engineered ribonucleic acid scaffold (ERS) sequence
  source 1..90: mol_type = other DNA
acactggtttctatatctgattactctgaccagttcaccagcgactatgtcgtagtgggtaaagctccctcttcggagggagcatcagag

SEQ ID NO: 9365 - DNA, 89 bp, synthetic construct
  misc_feature 1..89: note = engineered ribonucleic acid scaffold (ERS) sequence
  source 1..89: mol_type = other DNA
acactggtttctaatctgattactctgaccagttcaccagcgactatgtcgtagtgggtaaagctccctcttcggagggagcatcagag

SEQ ID NO: 9366 - DNA, 87 bp, synthetic construct
  misc_feature 1..87: note = engineered ribonucleic acid scaffold (ERS) sequence
  source 1..87: mol_type = other DNA
acactggtttctactgattactctgaccagttcaccagcgactatgtcgtagtgggtaaagctccctcttcggagggagcatcagag

SEQ ID NO: 9367 - DNA, 88 bp, synthetic construct
  misc_feature 1..88: note = engineered ribonucleic acid scaffold (ERS) sequence
  source 1..88: mol_type = other DNA
acactggtttctaactgattactctgaccagttcaccagcgactatgtcgtagtgggtaaagctccctcttcggagggagcatcagag

SEQ ID NO: 9368 - DNA, 88 bp, synthetic construct
  misc_feature 1..88: note = engineered ribonucleic acid scaffold (ERS) sequence
  source 1..88: mol_type = other DNA
acactggtttctacctgattactctgaccagttcaccagcgactatgtcgtagtgggtaaagctccctcttcggagggagcatcagag

SEQ ID NO: 9369 - DNA, 88 bp, synthetic construct
  misc_feature 1..88: note = engineered ribonucleic acid scaffold (ERS) sequence
  source 1..88: mol_type = other DNA
acactggtttctagctgattactctgaccagttcaccagcgactatgtcgtagtgggtaaagctccctcttcggagggagcatcagag

SEQ ID NO: 9370 - DNA, 90 bp, synthetic construct
  misc_feature 1..90: note = engineered ribonucleic acid scaffold (ERS) sequence
  source 1..90: mol_type = other DNA
acactggtttctattactgattactctgaccagttcaccagcgactatgtcgtagtgggtaaagctccctcttcggagggagcatcagag

SEQ ID NO: 9371 - DNA, 88 bp, synthetic construct
  misc_feature 1..88: note = engineered ribonucleic acid scaffold (ERS) sequence
  source 1..88: mol_type = other DNA
acactggtttctatatgattactctgaccagttcaccagcgactatgtcgtagtgggtaaagctccctcttcggagggagcatcagag

SEQ ID NO: 9372 - DNA, 88 bp, synthetic construct
  misc_feature 1..88: note = engineered ribonucleic acid scaffold (ERS) sequence
  source 1..88: mol_type = other DNA
acactggtttctatgtgattactctgaccagttcaccagcgactatgtcgtagtgggtaaagctccctcttcggagggagcatcagag

SEQ ID NO: 9373 - DNA, 88 bp, synthetic construct
  misc_feature 1..88: note = engineered ribonucleic acid scaffold (ERS) sequence
  source 1..88: mol_type = other DNA
acactggtttctatttgattactctgaccagttcaccagcgactatgtcgtagtgggtaaagctccctcttcggagggagcatcagag

SEQ ID NO: 9374 - DNA, 89 bp, synthetic construct
  misc_feature 1..89: note = engineered ribonucleic acid scaffold (ERS) sequence
  source 1..89: mol_type = other DNA
acactggtttctatcttgattactctgaccagttcaccagcgactatgtcgtagtgggtaaagctccctcttcggagggagcatcagag

SEQ ID NO: 9375 - DNA, 88 bp, synthetic construct
  misc_feature 1..88: note = engineered ribonucleic acid scaffold (ERS) sequence
  source 1..88: mol_type = other DNA
acactggtttctatcagattactctgaccagttcaccagcgactatgtcgtagtgggtaaagctccctcttcggagggagcatcagag

SEQ ID NO: 9376 - DNA, 88 bp, synthetic construct
  misc_feature 1..88: note = engineered ribonucleic acid scaffold (ERS) sequence
  source 1..88: mol_type = other DNA
acactggtttctatcggattactctgaccagttcaccagcgactatgtcgtagtgggtaaagctccctcttcggagggagcatcagag

SEQ ID NO: 9377 - DNA, 89 bp, synthetic construct
  misc_feature 1..89: note = engineered ribonucleic acid scaffold (ERS) sequence
  source 1..89: mol_type = other DNA
acactggtttctatctgaattactctgaccagttcaccagcgactatgtcgtagtgggtaaagctccctcttcggagggagcatcagag

SEQ ID NO: 9378 - DNA, 89 bp, synthetic construct
  misc_feature 1..89: note = engineered ribonucleic acid scaffold (ERS) sequence
  source 1..89: mol_type = other DNA
acactggtttctatctgtattactctgaccagttcaccagcgactatgtcgtagtgggtaaagctccctcttcggagggagcatcagag

SEQ ID NO: 9379 - DNA, 88 bp, synthetic construct
  misc_feature 1..88: note = engineered ribonucleic acid scaffold (ERS) sequence
  source 1..88: mol_type = other DNA
acactggtttctatctggttactctgaccagttcaccagcgactatgtcgtagtgggtaaagctccctcttcggagggagcatcagag

SEQ ID NO: 9380 - DNA, 88 bp, synthetic construct
  misc_feature 1..88: note = engineered ribonucleic acid scaffold (ERS) sequence
  source 1..88: mol_type = other DNA
acactggtttctatctgtttactctgaccagttcaccagcgactatgtcgtagtgggtaaagctccctcttcggagggagcatcagag

SEQ ID NO: 9381 - DNA, 89 bp, synthetic construct
  misc_feature 1..89: note = engineered ribonucleic acid scaffold (ERS) sequence
  source 1..89: mol_type = other DNA
acactggtttctatctgatttactctgaccagttcaccagcgactatgtcgtagtgggtaaagctccctcttcggagggagcatcagag

SEQ ID NO: 9382 - DNA, 88 bp, synthetic construct
  misc_feature 1..88: note = engineered ribonucleic acid scaffold (ERS) sequence
  source 1..88: mol_type = other DNA
acactggtttctatctgattgctctgaccagttcaccagcgactatgtcgtagtgggtaaagctccctcttcggagggagcatcagag

SEQ ID NO: 9383 - DNA, 90 bp, synthetic construct
  misc_feature 1..90: note = engineered ribonucleic acid scaffold (ERS) sequence
  source 1..90: mol_type = other DNA
acaggccgttctatatctgattactctgcggccttcaccagcgactatgtcgtagtgggtaaagctccctcttcggagggagcatcagag

SEQ ID NO: 9384 - DNA, 89 bp, synthetic construct
  misc_feature 1..89: note = engineered ribonucleic acid scaffold (ERS) sequence
  source 1..89: mol_type = other DNA
acaggccgttctaatctgattactctgcggccttcaccagcgactatgtcgtagtgggtaaagctccctcttcggagggagcatcagag

SEQ ID NO: 9385 - DNA, 87 bp, synthetic construct
  misc_feature 1..87: note = engineered ribonucleic acid scaffold (ERS) sequence
  source 1..87: mol_type = other DNA
acaggccgttctactgattactctgcggccttcaccagcgactatgtcgtagtgggtaaagctccctcttcggagggagcatcagag

SEQ ID NO: 9386 - DNA, 88 bp, synthetic construct
  misc_feature 1..88: note = engineered ribonucleic acid scaffold (ERS) sequence
  source 1..88: mol_type = other DNA
acaggccgttctaactgattactctgcggccttcaccagcgactatgtcgtagtgggtaaagctccctcttcggagggagcatcagag

SEQ ID NO: 9387 - DNA, 88 bp, synthetic construct
  misc_feature 1..88: note = engineered ribonucleic acid scaffold (ERS) sequence
  source 1..88: mol_type = other DNA
acaggccgttctacctgattactctgcggccttcaccagcgactatgtcgtagtgggtaaagctccctcttcggagggagcatcagag

SEQ ID NO: 9388 - DNA, 88 bp, synthetic construct
  misc_feature 1..88: note = engineered ribonucleic acid scaffold (ERS) sequence
  source 1..88: mol_type = other DNA
acaggccgttctagctgattactctgcggccttcaccagcgactatgtcgtagtgggtaaagctccctcttcggagggagcatcagag

SEQ ID NO: 9389 - DNA, 90 bp, synthetic construct
  misc_feature 1..90: note = engineered ribonucleic acid scaffold (ERS) sequence
  source 1..90: mol_type = other DNA
acaggccgttctattactgattactctgcggccttcaccagcgactatgtcgtagtgggtaaagctccctcttcggagggagcatcagag

SEQ ID NO: 9390 - DNA, 88 bp, synthetic construct
  misc_feature 1..88: note = engineered ribonucleic acid scaffold (ERS) sequence
  source 1..88: mol_type = other DNA
acaggccgttctatatgattactctgcggccttcaccagcgactatgtcgtagtgggtaaagctccctcttcggagggagcatcagag

SEQ ID NO: 9391 - DNA, 88 bp, synthetic construct
  misc_feature 1..88: note = engineered ribonucleic acid scaffold (ERS) sequence
  source 1..88: mol_type = other DNA
acaggccgttctatgtgattactctgcggccttcaccagcgactatgtcgtagtgggtaaagctccctcttcggagggagcatcagag

SEQ ID NO: 9392 - DNA, 88 bp, synthetic construct
  misc_feature 1..88: note = engineered ribonucleic acid scaffold (ERS) sequence
  source 1..88: mol_type = other DNA
acaggccgttctatttgattactctgcggccttcaccagcgactatgtcgtagtgggtaaagctccctcttcggagggagcatcagag

SEQ ID NO: 9393 - DNA, 89 bp, synthetic construct
  misc_feature 1..89: note = engineered ribonucleic acid scaffold (ERS) sequence
  source 1..89: mol_type = other DNA
acaggccgttctatcttgattactctgcggccttcaccagcgactatgtcgtagtgggtaaagctccctcttcggagggagcatcagag

SEQ ID NO: 9394 - DNA, 88 bp, synthetic construct
  misc_feature 1..88: note = engineered ribonucleic acid scaffold (ERS) sequence
  source 1..88: mol_type = other DNA
acaggccgttctatcagattactctgcggccttcaccagcgactatgtcgtagtgggtaaagctccctcttcggagggagcatcagag

SEQ ID NO: 9395 - DNA, 88 bp, synthetic construct
  misc_feature 1..88: note = engineered ribonucleic acid scaffold (ERS) sequence
  source 1..88: mol_type = other DNA
acaggccgttctatcggattactctgcggccttcaccagcgactatgtcgtagtgggtaaagctccctcttcggagggagcatcagag

SEQ ID NO: 9396 - DNA, 89 bp, synthetic construct
  misc_feature 1..89: note = engineered ribonucleic acid scaffold (ERS) sequence
  source 1..89: mol_type = other DNA
acaggccgttctatctgaattactctgcggccttcaccagcgactatgtcgtagtgggtaaagctccctcttcggagggagcatcagag

SEQ ID NO: 9397 - DNA, 89 bp, synthetic construct
  misc_feature 1..89: note = engineered ribonucleic acid scaffold (ERS) sequence
  source 1..89: mol_type = other DNA
acaggccgttctatctgtattactctgcggccttcaccagcgactatgtcgtagtgggtaaagctccctcttcggagggagcatcagag

SEQ ID NO: 9398 - DNA, 88 bp, synthetic construct
  misc_feature 1..88: note = engineered ribonucleic acid scaffold (ERS) sequence
  source 1..88: mol_type = other DNA
acaggccgttctatctggttactctgcggccttcaccagcgactatgtcgtagtgggtaaagctccctcttcggagggagcatcagag

SEQ ID NO: 9399 - DNA, 88 bp, synthetic construct
  misc_feature 1..88: note = engineered ribonucleic acid scaffold (ERS) sequence
  source 1..88: mol_type = other DNA
acaggccgttctatctgtttactctgcggccttcaccagcgactatgtcgtagtgggtaaagctccctcttcggagggagcatcagag

SEQ ID NO: 9400 - DNA, 89 bp, synthetic construct
  misc_feature 1..89: note = engineered ribonucleic acid scaffold (ERS) sequence
  source 1..89: mol_type = other DNA
acaggccgttctatctgatttactctgcggccttcaccagcgactatgtcgtagtgggtaaagctccctcttcggagggagcatcagag

SEQ ID NO: 9401 - DNA, 88 bp, synthetic construct
  misc_feature 1..88: note = engineered ribonucleic acid scaffold (ERS) sequence
  source 1..88: mol_type = other DNA
acaggccgttctatctgattgctctgcggccttcaccagcgactatgtcgtagtgggtaaagctccctcttcggagggagcatcagag

SEQ ID NO: 9402 - DNA, 90 bp, synthetic construct
  misc_feature 1..90: note = engineered ribonucleic acid scaffold (ERS) sequence
  source 1..90: mol_type = other DNA
acaggtccttctatatctgattactctgggaccttcaccagcgactatgtcgtagtgggtaaagctccctcttcggagggagcatcagag

SEQ ID NO: 9403 - DNA, 89 bp, synthetic construct
  misc_feature 1..89: note = engineered ribonucleic acid scaffold (ERS) sequence
  source 1..89: mol_type = other DNA
acaggtccttctaatctgattactctgggaccttcaccagcgactatgtcgtagtgggtaaagctccctcttcggagggagcatcagag

SEQ ID NO: 9404 - DNA, 87 bp, synthetic construct
  misc_feature 1..87: note = engineered ribonucleic acid scaffold (ERS) sequence
  source 1..87: mol_type = other DNA
acaggtccttctactgattactctgggaccttcaccagcgactatgtcgtagtgggtaaagctccctcttcggagggagcatcagag

SEQ ID NO: 9405 - DNA, 88 bp, synthetic construct
  misc_feature 1..88: note = engineered ribonucleic acid scaffold (ERS) sequence
  source 1..88: mol_type = other DNA
acaggtccttctaactgattactctgggaccttcaccagcgactatgtcgtagtgggtaaagctccctcttcggagggagcatcagag

SEQ ID NO: 9406 - DNA, 88 bp, synthetic construct
  misc_feature 1..88: note = engineered ribonucleic acid scaffold (ERS) sequence
  source 1..88: mol_type = other DNA
acaggtccttctacctgattactctgggaccttcaccagcgactatgtcgtagtgggtaaagctccctcttcggagggagcatcagag

SEQ ID NO: 9407 - DNA, 88 bp, synthetic construct
  misc_feature 1..88: note = engineered ribonucleic acid scaffold (ERS) sequence
  source 1..88: mol_type = other DNA
acaggtccttctagctgattactctgggaccttcaccagcgactatgtcgtagtgggtaaagctccctcttcggagggagcatcagag

SEQ ID NO: 9408 - DNA, 90 bp, synthetic construct
  misc_feature 1..90: note = engineered ribonucleic acid scaffold (ERS) sequence
  source 1..90: mol_type = other DNA
acaggtccttctattactgattactctgggaccttcaccagcgactatgtcgtagtgggtaaagctccctcttcggagggagcatcagag

SEQ ID NO: 9409 - DNA, 88 bp, synthetic construct
  misc_feature 1..88: note = engineered ribonucleic acid scaffold (ERS) sequence
  source 1..88: mol_type = other DNA
acaggtccttctatatgattactctgggaccttcaccagcgactatgtcgtagtgggtaaagctccctcttcggagggagcatcagag

SEQ ID NO: 9410 - DNA, 88 bp, synthetic construct
  misc_feature 1..88: note = engineered ribonucleic acid scaffold (ERS) sequence
  source 1..88: mol_type = other DNA
acaggtccttctatgtgattactctgggaccttcaccagcgactatgtcgtagtgggtaaagctccctcttcggagggagcatcagag

SEQ ID NO: 9411 - DNA, 88 bp, synthetic construct
  misc_feature 1..88: note = engineered ribonucleic acid scaffold (ERS) sequence
  source 1..88: mol_type = other DNA
acaggtccttctatttgattactctgggaccttcaccagcgactatgtcgtagtgggtaaagctccctcttcggagggagcatcagag

SEQ ID NO: 9412 - DNA, 89 bp, synthetic construct
  misc_feature 1..89: note = engineered ribonucleic acid scaffold (ERS) sequence
  source 1..89: mol_type = other DNA
acaggtccttctatcttgattactctgggaccttcaccagcgactatgtcgtagtgggtaaagctccctcttcggagggagcatcagag

SEQ ID NO: 9413 - DNA, 88 bp, synthetic construct
  misc_feature 1..88: note = engineered ribonucleic acid scaffold (ERS) sequence
  source 1..88: mol_type = other DNA
acaggtccttctatcagattactctgggaccttcaccagcgactatgtcgtagtgggtaaagctccctcttcggagggagcatcagag

SEQ ID NO: 9414 - DNA, 88 bp, synthetic construct
  misc_feature 1..88: note = engineered ribonucleic acid scaffold (ERS) sequence
  source 1..88: mol_type = other DNA
acaggtccttctatcggattactctgggaccttcaccagcgactatgtcgtagtgggtaaagctccctcttcggagggagcatcagag

SEQ ID NO: 9415 - DNA, 89 bp, synthetic construct
  misc_feature 1..89: note = engineered ribonucleic acid scaffold (ERS) sequence
  source 1..89: mol_type = other DNA
acaggtccttctatctgaattactctgggaccttcaccagcgactatgtcgtagtgggtaaagctccctcttcggagggagcatcagag

SEQ ID NO: 9416 - DNA, 89 bp, synthetic construct
  misc_feature 1..89: note = engineered ribonucleic acid scaffold (ERS) sequence
  source 1..89: mol_type = other DNA
acaggtccttctatctgtattactctgggaccttcaccagcgactatgtcgtagtgggtaaagctccctcttcggagggagcatcagag

SEQ ID NO: 9417 - DNA, 88 bp, synthetic construct
  misc_feature 1..88: note = engineered ribonucleic acid scaffold (ERS) sequence
  source 1..88: mol_type = other DNA
acaggtccttctatctggttactctgggaccttcaccagcgactatgtcgtagtgggtaaagctccctcttcggagggagcatcagag

SEQ ID NO: 9418 - DNA, 88 bp, synthetic construct
  misc_feature 1..88: note = engineered ribonucleic acid scaffold (ERS) sequence
  source 1..88: mol_type = other DNA
acaggtccttctatctgtttactctgggaccttcaccagcgactatgtcgtagtgggtaaagctccctcttcggagggagcatcagag

SEQ ID NO: 9419 - DNA, 89 bp, synthetic construct
  misc_feature 1..89: note = engineered ribonucleic acid scaffold (ERS) sequence
  source 1..89: mol_type = other DNA
acaggtccttctatctgatttactctgggaccttcaccagcgactatgtcgtagtgggtaaagctccctcttcggagggagcatcagag

SEQ ID NO: 9420 - DNA, 88 bp, synthetic construct
  misc_feature 1..88: note = engineered ribonucleic acid scaffold (ERS) sequence
  source 1..88: mol_type = other DNA
acaggtccttctatctgattgctctgggaccttcaccagcgactatgtcgtagtgggtaaagctccctcttcggagggagcatcagag

SEQ ID NO: 9421 - DNA, 90 bp, synthetic construct
  misc_feature 1..90: note = engineered ribonucleic acid scaffold (ERS) sequence
  source 1..90: mol_type = other DNA
accagcaattctatatctgattactctgttgctgtcaccagcgactatgtcgtagtgggtaaagctccctcttcggagggagcatcagag

SEQ ID NO: 9422 - DNA, 89 bp, synthetic construct
  misc_feature 1..89: note = engineered ribonucleic acid scaffold (ERS) sequence
  source 1..89: mol_type = other DNA
accagcaattctaatctgattactctgttgctgtcaccagcgactatgtcgtagtgggtaaagctccctcttcggagggagcatcagag

SEQ ID NO: 9423 - DNA, 87 bp, synthetic construct
  misc_feature 1..87: note = engineered ribonucleic acid scaffold (ERS) sequence
  source 1..87: mol_type = other DNA
accagcaattctactgattactctgttgctgtcaccagcgactatgtcgtagtgggtaaagctccctcttcggagggagcatcagag

SEQ ID NO: 9424 - DNA, 88 bp, synthetic construct
  misc_feature 1..88: note = engineered ribonucleic acid scaffold (ERS) sequence
  source 1..88: mol_type = other DNA
accagcaattctaactgattactctgttgctgtcaccagcgactatgtcgtagtgggtaaagctccctcttcggagggagcatcagag

SEQ ID NO: 9425 - DNA, 88 bp, synthetic construct
  misc_feature 1..88: note = engineered ribonucleic acid scaffold (ERS) sequence
  source 1..88: mol_type = other DNA
accagcaattctacctgattactctgttgctgtcaccagcgactatgtcgtagtgggtaaagctccctcttcggagggagcatcagag

SEQ ID NO: 9426 - DNA, 88 bp, synthetic construct
  misc_feature 1..88: note = engineered ribonucleic acid scaffold (ERS) sequence
  source 1..88: mol_type = other DNA
accagcaattctagctgattactctgttgctgtcaccagcgactatgtcgtagtgggtaaagctccctcttcggagggagcatcagag

SEQ ID NO: 9427 - DNA, 90 bp, synthetic construct
  misc_feature 1..90: note = engineered ribonucleic acid scaffold (ERS) sequence
  source 1..90: mol_type = other DNA
accagcaattctattactgattactctgttgctgtcaccagcgactatgtcgtagtgggtaaagctccctcttcggagggagcatcagag

SEQ ID NO: 9428 - DNA, 88 bp, synthetic construct
  misc_feature 1..88: note = engineered ribonucleic acid scaffold (ERS) sequence
  source 1..88: mol_type = other DNA
accagcaattctatatgattactctgttgctgtcaccagcgactatgtcgtagtgggtaaagctccctcttcggagggagcatcagag

SEQ ID NO: 9429 - DNA, 88 bp, synthetic construct
  misc_feature 1..88: note = engineered ribonucleic acid scaffold (ERS) sequence
  source 1..88: mol_type = other DNA
accagcaattctatgtgattactctgttgctgtcaccagcgactatgtcgtagtgggtaaagctccctcttcggagggagcatcagag

SEQ ID NO: 9430 - DNA, 88 bp, synthetic construct
  misc_feature 1..88: note = engineered ribonucleic acid scaffold (ERS) sequence
  source 1..88: mol_type = other DNA
accagcaattctatttgattactctgttgctgtcaccagcgactatgtcgtagtgggtaaagctccctcttcggagggagcatcagag

SEQ ID NO: 9431 - DNA, 89 bp, synthetic construct
  misc_feature 1..89: note = engineered ribonucleic acid scaffold (ERS) sequence
  source 1..89: mol_type = other DNA
accagcaattctatcttgattactctgttgctgtcaccagcgactatgtcgtagtgggtaaagctccctcttcggagggagcatcagag

SEQ ID NO: 9432 - DNA, 88 bp, synthetic construct
  misc_feature 1..88: note = engineered ribonucleic acid scaffold (ERS) sequence
  source 1..88: mol_type = other DNA
accagcaattctatcagattactctgttgctgtcaccagcgactatgtcgtagtgggtaaagctccctcttcggagggagcatcagag

SEQ ID NO: 9433 - DNA, 88 bp, synthetic construct
  misc_feature 1..88: note = engineered ribonucleic acid scaffold (ERS) sequence
  source 1..88: mol_type = other DNA
accagcaattctatcggattactctgttgctgtcaccagcgactatgtcgtagtgggtaaagctccctcttcggagggagcatcagag

SEQ ID NO: 9434 - DNA, 89 bp, synthetic construct
  misc_feature 1..89: note = engineered ribonucleic acid scaffold (ERS) sequence
  source 1..89: mol_type = other DNA
accagcaattctatctgaattactctgttgctgtcaccagcgactatgtcgtagtgggtaaagctccctcttcggagggagcatcagag

SEQ ID NO: 9435 - DNA, 89 bp, synthetic construct
  misc_feature 1..89: note = engineered ribonucleic acid scaffold (ERS) sequence
  source 1..89: mol_type = other DNA
accagcaattctatctgtattactctgttgctgtcaccagcgactatgtcgtagtgggtaaagctccctcttcggagggagcatcagag

SEQ ID NO: 9436 - DNA, 88 bp, synthetic construct
  misc_feature 1..88: note = engineered ribonucleic acid scaffold (ERS) sequence
  source 1..88: mol_type = other DNA
accagcaattctatctggttactctgttgctgtcaccagcgactatgtcgtagtgggtaaagctccctcttcggagggagcatcagag

SEQ ID NO: 9437 - DNA, 88 bp, synthetic construct
  misc_feature 1..88: note = engineered ribonucleic acid scaffold (ERS) sequence
  source 1..88: mol_type = other DNA
accagcaattctatctgtttactctgttgctgtcaccagcgactatgtcgtagtgggtaaagctccctcttcggagggagcatcagag

SEQ ID NO: 9438 - DNA, 89 bp, synthetic construct
  misc_feature 1..89: note = engineered ribonucleic acid scaffold (ERS) sequence
  source 1..89: mol_type = other DNA
accagcaattctatctgatttactctgttgctgtcaccagcgactatgtcgtagtgggtaaagctccctcttcggagggagcatcagag

SEQ ID NO: 9439 - DNA, 88 bp, synthetic construct
  misc_feature 1..88: note = engineered ribonucleic acid scaffold (ERS) sequence
  source 1..88: mol_type = other DNA
accagcaattctatctgattgctctgttgctgtcaccagcgactatgtcgtagtgggtaaagctccctcttcggagggagcatcagag

SEQ ID NO: 9440 - DNA, 90 bp, synthetic construct
  misc_feature 1..90: note = engineered ribonucleic acid scaffold (ERS) sequence
  source 1..90: mol_type = other DNA
accgagacttctatatctgattactctgggctcgtcaccagcgactatgtcgtagtgggtaaagctccctcttcggagggagcatcagag

SEQ ID NO: 9441 - DNA, 89 bp, synthetic construct
  misc_feature 1..89: note = engineered ribonucleic acid scaffold (ERS) sequence
  source 1..89: mol_type = other DNA
accgagacttctaatctgattactctgggctcgtcaccagcgactatgtcgtagtgggtaaagctccctcttcggagggagcatcagag

SEQ ID NO: 9442 - DNA, 87 bp, synthetic construct
  misc_feature 1..87: note = engineered ribonucleic acid scaffold (ERS) sequence
  source 1..87: mol_type = other DNA
accgagacttctactgattactctgggctcgtcaccagcgactatgtcgtagtgggtaaagctccctcttcggagggagcatcagag

SEQ ID NO: 9443 - DNA, 88 bp, synthetic construct
  misc_feature 1..88: note = engineered ribonucleic acid scaffold (ERS) sequence
  source 1..88: mol_type = other DNA
accgagacttctaactgattactctgggctcgtcaccagcgactatgtcgtagtgggtaaagctccctcttcggagggagcatcagag

SEQ ID NO: 9444 - DNA, 88 bp, synthetic construct
  misc_feature 1..88: note = engineered ribonucleic acid scaffold (ERS) sequence
  source 1..88: mol_type = other DNA
accgagacttctacctgattactctgggctcgtcaccagcgactatgtcgtagtgggtaaagctccctcttcggagggagcatcagag

SEQ ID NO: 9445 - DNA, 88 bp, synthetic construct
  misc_feature 1..88: note = engineered ribonucleic acid scaffold (ERS) sequence
  source 1..88: mol_type = other DNA
accgagacttctagctgattactctgggctcgtcaccagcgactatgtcgtagtgggtaaagctccctcttcggagggagcatcagag

SEQ ID NO: 9446 - DNA, 90 bp, synthetic construct
  misc_feature 1..90: note = engineered ribonucleic acid scaffold (ERS) sequence
  source 1..90: mol_type = other DNA
accgagacttctattactgattactctgggctcgtcaccagcgactatgtcgtagtgggtaaagctccctcttcggagggagcatcagag

SEQ ID NO: 9447 - DNA, 88 bp, synthetic construct
  misc_feature 1..88: note = engineered ribonucleic acid scaffold (ERS) sequence
  source 1..88: mol_type = other DNA
accgagacttctatatgattactctgggctcgtcaccagcgactatgtcgtagtgggtaaagctccctcttcggagggagcatcagag

SEQ ID NO: 9448 - DNA, 88 bp, synthetic construct
  misc_feature 1..88: note = engineered ribonucleic acid scaffold (ERS) sequence
  source 1..88: mol_type = other DNA
accgagacttctatgtgattactctgggctcgtcaccagcgactatgtcgtagtgggtaaagctccctcttcggagggagcatcagag

SEQ ID NO: 9449 - DNA, 88 bp, synthetic construct
  misc_feature 1..88: note = engineered ribonucleic acid scaffold (ERS) sequence
  source 1..88: mol_type = other DNA
accgagacttctatttgattactctgggctcgtcaccagcgactatgtcgtagtgggtaaagctccctcttcggagggagcatcagag

SEQ ID NO: 9450 - DNA, 89 bp, synthetic construct
  misc_feature 1..89: note = engineered ribonucleic acid scaffold (ERS) sequence
  source 1..89: mol_type = other DNA
accgagacttctatcttgattactctgggctcgtcaccagcgactatgtcgtagtgggtaaagctccctcttcggagggagcatcagag

SEQ ID NO: 9451 - DNA, 88 bp, synthetic construct
  misc_feature 1..88: note = engineered ribonucleic acid scaffold (ERS) sequence
  source 1..88: mol_type = other DNA
accgagacttctatcagattactctgggctcgtcaccagcgactatgtcgtagtgggtaaagctccctcttcggagggagcatcagag

SEQ ID NO: 9452 - DNA, 88 bp, synthetic construct
  misc_feature 1..88: note = engineered ribonucleic acid scaffold (ERS) sequence
  source 1..88: mol_type = other DNA
accgagacttctatcggattactctgggctcgtcaccagcgactatgtcgtagtgggtaaagctccctcttcggagggagcatcagag

SEQ ID NO: 9453 - DNA, 89 bp, synthetic construct
  misc_feature 1..89: note = engineered ribonucleic acid scaffold (ERS) sequence
  source 1..89: mol_type = other DNA
accgagacttctatctgaattactctgggctcgtcaccagcgactatgtcgtagtgggtaaagctccctcttcggagggagcatcagag

SEQ ID NO: 9454 - DNA, 89 bp, synthetic construct
  misc_feature 1..89: note = engineered ribonucleic acid scaffold (ERS) sequence
  source 1..89: mol_type = other DNA
accgagacttctatctgtattactctgggctcgtcaccagcgactatgtcgtagtgggtaaagctccctcttcggagggagcatcagag

SEQ ID NO: 9455 - DNA, 88 bp, synthetic construct
  misc_feature 1..88: note = engineered ribonucleic acid scaffold (ERS) sequence
  source 1..88: mol_type = other DNA
accgagacttctatctggttactctgggctcgtcaccagcgactatgtcgtagtgggtaaagctccctcttcggagggagcatcagag

SEQ ID NO: 9456 - DNA, 88 bp, synthetic construct
  misc_feature 1..88: note = engineered ribonucleic acid scaffold (ERS) sequence
  source 1..88: mol_type = other DNA
accgagacttctatctgtttactctgggctcgtcaccagcgactatgtcgtagtgggtaaagctccctcttcggagggagcatcagag

SEQ ID NO: 9457 - DNA, 89 bp, synthetic construct
  misc_feature 1..89: note = engineered ribonucleic acid scaffold (ERS) sequence
  source 1..89: mol_type = other DNA
accgagacttctatctgatttactctgggctcgtcaccagcgactatgtcgtagtgggtaaagctccctcttcggagggagcatcagag

SEQ ID NO: 9458 - DNA, 88 bp, synthetic construct
  misc_feature 1..88: note = engineered ribonucleic acid scaffold (ERS) sequence
  source 1..88: mol_type = other DNA
accgagacttctatctgattgctctgggctcgtcaccagcgactatgtcgtagtgggtaaagctccctcttcggagggagcatcagag

SEQ ID NO: 9459 - DNA, 90 bp, synthetic construct
  misc_feature 1..90: note = engineered ribonucleic acid scaffold (ERS) sequence
  source 1..90: mol_type = other DNA
acctgtagttctatatctgattactctgctacagtcaccagcgactatgtcgtagtgggtaaagctccctcttcggagggagcatcagag

SEQ ID NO: 9460 - DNA, 89 bp, synthetic construct
  misc_feature 1..89: note = engineered ribonucleic acid scaffold (ERS) sequence
  source 1..89: mol_type = other DNA
acctgtagttctaatctgattactctgctacagtcaccagcgactatgtcgtagtgggtaaagctccctcttcggagggagcatcagag

SEQ ID NO: 9461 - DNA, 87 bp, synthetic construct
  misc_feature 1..87: note = engineered ribonucleic acid scaffold (ERS) sequence
  source 1..87: mol_type = other DNA
acctgtagttctactgattactctgctacagtcaccagcgactatgtcgtagtgggtaaagctccctcttcggagggagcatcagag

SEQ ID NO: 9462 - DNA, 88 bp, synthetic construct
  misc_feature 1..88: note = engineered ribonucleic acid scaffold (ERS) sequence
  source 1..88: mol_type = other DNA
acctgtagttctaactgattactctgctacagtcaccagcgactatgtcgtagtgggtaaagctccctcttcggagggagcatcagag

SEQ ID NO: 9463 - DNA, 88 bp, synthetic construct
  misc_feature 1..88: note = engineered ribonucleic acid scaffold (ERS) sequence
  source 1..88: mol_type = other DNA
acctgtagttctacctgattactctgctacagtcaccagcgactatgtcgtagtgggtaaagctccctcttcggagggagcatcagag

SEQ ID NO: 9464 - DNA, 88 bp, synthetic construct
  misc_feature 1..88: note = engineered ribonucleic acid scaffold (ERS) sequence
  source 1..88: mol_type = other DNA
acctgtagttctagctgattactctgctacagtcaccagcgactatgtcgtagtgggtaaagctccctcttcggagggagcatcagag

SEQ ID NO: 9465 - DNA, 90 bp, synthetic construct
  misc_feature 1..90: note = engineered ribonucleic acid scaffold (ERS) sequence
  source 1..90: mol_type = other DNA
acctgtagttctattactgattactctgctacagtcaccagcgactatgtcgtagtgggtaaagctccctcttcggagggagcatcagag

SEQ ID NO: 9466 - DNA, 88 bp, synthetic construct
  misc_feature 1..88: note = engineered ribonucleic acid scaffold (ERS) sequence
  source 1..88: mol_type = other DNA
acctgtagttctatatgattactctgctacagtcaccagcgactatgtcgtagtgggtaaagctccctcttcggagggagcatcagag

SEQ ID NO: 9467 - DNA, 88 bp, synthetic construct
  misc_feature 1..88: note = engineered ribonucleic acid scaffold (ERS) sequence
  source 1..88: mol_type = other DNA
acctgtagttctatgtgattactctgctacagtcaccagcgactatgtcgtagtgggtaaagctccctcttcggagggagcatcagag

SEQ ID NO: 9468 - DNA, 88 bp, synthetic construct
  misc_feature 1..88: note = engineered ribonucleic acid scaffold (ERS) sequence
  source 1..88: mol_type = other DNA
acctgtagttctatttgattactctgctacagtcaccagcgactatgtcgtagtgggtaaagctccctcttcggagggagcatcagag

SEQ ID NO: 9469 - DNA, 89 bp, synthetic construct
  misc_feature 1..89: note = engineered ribonucleic acid scaffold (ERS) sequence
  source 1..89: mol_type = other DNA
acctgtagttctatcttgattactctgctacagtcaccagcgactatgtcgtagtgggtaaagctccctcttcggagggagcatcagag

SEQ ID NO: 9470 - DNA, 88 bp, synthetic construct
  misc_feature 1..88: note = engineered ribonucleic acid scaffold (ERS) sequence
  source 1..88: mol_type = other DNA
acctgtagttctatcagattactctgctacagtcaccagcgactatgtcgtagtgggtaaagctccctcttcggagggagcatcagag

SEQ ID NO: 9471 - DNA, 88 bp, synthetic construct
  misc_feature 1..88: note = engineered ribonucleic acid scaffold (ERS) sequence
  source 1..88: mol_type = other DNA
acctgtagttctatcggattactctgctacagtcaccagcgactatgtcgtagtgggtaaagctccctcttcggagggagcatcagag

SEQ ID NO: 9472 - DNA, 89 bp, synthetic construct
  misc_feature 1..89: note = engineered ribonucleic acid scaffold (ERS) sequence
  source 1..89: mol_type = other DNA
acctgtagttctatctgaattactctgctacagtcaccagcgactatgtcgtagtgggtaaagctccctcttcggagggagcatcagag

SEQ ID NO: 9473 - DNA, 89 bp, synthetic construct
  misc_feature 1..89: note = engineered ribonucleic acid scaffold (ERS) sequence
  source 1..89: mol_type = other DNA
acctgtagttctatctgtattactctgctacagtcaccagcgactatgtcgtagtgggtaaagctccctcttcggagggagcatcagag

SEQ ID NO: 9474 - DNA, 88 bp, synthetic construct
  misc_feature 1..88: note = engineered ribonucleic acid scaffold (ERS) sequence
  source 1..88: mol_type = other DNA
acctgtagttctatctggttactctgctacagtcaccagcgactatgtcgtagtgggtaaagctccctcttcggagggagcatcagag

SEQ ID NO: 9475 - DNA, 88 bp, synthetic construct
  misc_feature 1..88: note = engineered ribonucleic acid scaffold (ERS) sequence
  source 1..88: mol_type = other DNA
acctgtagttctatctgtttactctgctacagtcaccagcgactatgtcgtagtgggtaaagctccctcttcggagggagcatcagag

SEQ ID NO: 9476 - DNA, 89 bp, synthetic construct
  misc_feature 1..89: note = engineered ribonucleic acid scaffold (ERS) sequence
  source 1..89: mol_type = other DNA
acctgtagttctatctgatttactctgctacagtcaccagcgactatgtcgtagtgggtaaagctccctcttcggagggagcatcagag

SEQ ID NO: 9477 - DNA, 88 bp, synthetic construct
  misc_feature 1..88: note = engineered ribonucleic acid scaffold (ERS) sequence
  source 1..88: mol_type = other DNA
acctgtagttctatctgattgctctgctacagtcaccagcgactatgtcgtagtgggtaaagctccctcttcggagggagcatcagag

SEQ ID NO: 9478 - DNA, 90 bp, synthetic construct
  misc_feature 1..90: note = engineered ribonucleic acid scaffold (ERS) sequence
  source 1..90: mol_type = other DNA
acgagcacttctatatctgattactctggggctctcaccagcgactatgtcgtagtgggtaaagctccctcttcggagggagcatcagag

SEQ ID NO: 9479 - DNA, 89 bp, synthetic construct
  misc_feature 1..89: note = engineered ribonucleic acid scaffold (ERS) sequence
  source 1..89: mol_type = other DNA
acgagcacttctaatctgattactctggggctctcaccagcgactatgtcgtagtgggtaaagctccctcttcggagggagcatcagag

SEQ ID NO: 9480 - DNA, 87 bp, synthetic construct
  misc_feature 1..87: note = engineered ribonucleic acid scaffold (ERS) sequence
  source 1..87: mol_type = other DNA
acgagcacttctactgattactctggggctctcaccagcgactatgtcgtagtgggtaaagctccctcttcggagggagcatcagag

SEQ ID NO: 9481 - DNA, 88 bp, synthetic construct
  misc_feature 1..88: note = engineered ribonucleic acid scaffold (ERS) sequence
  source 1..88: mol_type = other DNA
acgagcacttctaactgattactctggggctctcaccagcgactatgtcgtagtgggtaaagctccctcttcggagggagcatcagag

SEQ ID NO: 9482 - DNA, 88 bp, synthetic construct
  misc_feature 1..88: note = engineered ribonucleic acid scaffold (ERS) sequence
  source 1..88: mol_type = other DNA
acgagcacttctacctgattactctggggctctcaccagcgactatgtcgtagtgggtaaagctccctcttcggagggagcatcagag

SEQ ID NO: 9483 - DNA, 88 bp, synthetic construct
  misc_feature 1..88: note = engineered ribonucleic acid scaffold (ERS) sequence
  source 1..88: mol_type = other DNA
acgagcacttctagctgattactctggggctctcaccagcgactatgtcgtagtgggtaaagctccctcttcggagggagcatcagag

SEQ ID NO: 9484 - DNA, 90 bp, synthetic construct
  misc_feature 1..90: note = engineered ribonucleic acid scaffold (ERS) sequence
  source 1..90: mol_type = other DNA
acgagcacttctattactgattactctggggctctcaccagcgactatgtcgtagtgggtaaagctccctcttcggagggagcatcagag

SEQ ID NO: 9485 - DNA, 88 bp, synthetic construct
  misc_feature 1..88: note = engineered ribonucleic acid scaffold (ERS) sequence
  source 1..88: mol_type = other DNA
acgagcacttctatatgattactctggggctctcaccagcgactatgtcgtagtgggtaaagctccctcttcggagggagcatcagag

SEQ ID NO: 9486 - DNA, 88 bp, synthetic construct
  misc_feature 1..88: note = engineered ribonucleic acid scaffold (ERS) sequence
  source 1..88: mol_type = other DNA
acgagcacttctatgtgattactctggggctctcaccagcgactatgtcgtagtgggtaaagctccctcttcggagggagcatcagag

SEQ ID NO: 9487 - DNA, 88 bp, synthetic construct
  misc_feature 1..88: note = engineered ribonucleic acid scaffold (ERS) sequence
  source 1..88: mol_type = other DNA
acgagcacttctatttgattactctggggctctcaccagcgactatgtcgtagtgggtaaagctccctcttcggagggagcatcagag

SEQ ID NO: 9488 - DNA, 89 bp, synthetic construct
  misc_feature 1..89: note = engineered ribonucleic acid scaffold (ERS) sequence
  source 1..89: mol_type = other DNA
acgagcacttctatcttgattactctggggctctcaccagcgactatgtcgtagtgggtaaagctccctcttcggagggagcatcagag

SEQ ID NO: 9489 - DNA, 88 bp, synthetic construct
  misc_feature 1..88: note = engineered ribonucleic acid scaffold (ERS) sequence
  source 1..88: mol_type = other DNA
acgagcacttctatcagattactctggggctctcaccagcgactatgtcgtagtgggtaaagctccctcttcggagggagcatcagag

SEQ ID NO: 9490 - DNA, 88 bp, synthetic construct
  misc_feature 1..88: note = engineered ribonucleic acid scaffold (ERS) sequence
  source 1..88: mol_type = other DNA
acgagcacttctatcggattactctggggctctcaccagcgactatgtcgtagtgggtaaagctccctcttcggagggagcatcagag

SEQ ID NO: 9491 - DNA, 89 bp, synthetic construct
  misc_feature 1..89: note = engineered ribonucleic acid scaffold (ERS) sequence
  source 1..89: mol_type = other DNA
acgagcacttctatctgaattactctggggctctcaccagcgactatgtcgtagtgggtaaagctccctcttcggagggagcatcagag

SEQ ID NO: 9492 - DNA, 89 bp, synthetic construct
  misc_feature 1..89: note = engineered ribonucleic acid scaffold (ERS) sequence
  source 1..89: mol_type = other DNA
acgagcacttctatctgtattactctggggctctcaccagcgactatgtcgtagtgggtaaagctccctcttcggagggagcatcagag

SEQ ID NO: 9493 - DNA, 88 bp, synthetic construct
  misc_feature 1..88: note = engineered ribonucleic acid scaffold (ERS) sequence
  source 1..88: mol_type = other DNA
acgagcacttctatctggttactctggggctctcaccagcgactatgtcgtagtgggtaaagctccctcttcggagggagcatcagag

SEQ ID NO: 9494 - DNA, 88 bp, synthetic construct
  misc_feature 1..88: note = engineered ribonucleic acid scaffold (ERS) sequence
  source 1..88: mol_type = other DNA
acgagcacttctatctgtttactctggggctctcaccagcgactatgtcgtagtgggtaaagctccctcttcggagggagcatcagag

SEQ ID NO: 9495 - DNA, 89 bp, synthetic construct
  misc_feature 1..89: note = engineered ribonucleic acid scaffold (ERS) sequence
  source 1..89: mol_type = other DNA
acgagcacttctatctgatttactctggggctctcaccagcgactatgtcgtagtgggtaaagctccctcttcggagggagcatcagag

SEQ ID NO: 9496 - DNA, 88 bp, synthetic construct
  misc_feature 1..88: note = engineered ribonucleic acid scaffold (ERS) sequence
  source 1..88: mol_type = other DNA
acgagcacttctatctgattgctctggggctctcaccagcgactatgtcgtagtgggtaaagctccctcttcggagggagcatcagag

SEQ ID NO: 9497 - DNA, 90 bp, synthetic construct
  misc_feature 1..90: note = engineered ribonucleic acid scaffold (ERS) sequence
  source 1..90: mol_type = other DNA
acgaggtgttctatatctgattactctgcacctctcaccagcgactatgtcgtagtgggtaaagctccctcttcggagggagcatcagag

SEQ ID NO: 9498 - DNA, 89 bp, synthetic construct
  misc_feature 1..89: note = engineered ribonucleic acid scaffold (ERS) sequence
  source 1..89: mol_type = other DNA
acgaggtgttctaatctgattactctgcacctctcaccagcgactatgtcgtagtgggtaaagctccctcttcggagggagcatcagag

SEQ ID NO: 9499 - DNA, 87 bp, synthetic construct
  misc_feature 1..87: note = engineered ribonucleic acid scaffold (ERS) sequence
  source 1..87: mol_type = other DNA
acgaggtgttctactgattactctgcacctctcaccagcgactatgtcgtagtgggtaaagctccctcttcggagggagcatcagag

SEQ ID NO: 9500 - DNA, 88 bp, synthetic construct
  misc_feature 1..88: note = engineered ribonucleic acid scaffold (ERS) sequence
  source 1..88: mol_type = other DNA
acgaggtgttctaactgattactctgcacctctcaccagcgactatgtcgtagtgggtaaagctccctcttcggagggagcatcagag

SEQ ID NO: 9501 - DNA, 88 bp, synthetic construct
  misc_feature 1..88: note = engineered ribonucleic acid scaffold (ERS) sequence
  source 1..88: mol_type = other DNA
acgaggtgttctacctgattactctgcacctctcaccagcgactatgtcgtagtgggtaaagctccctcttcggagggagcatcagag

SEQ ID NO: 9502 - DNA, 88 bp, synthetic construct
  misc_feature 1..88: note = engineered ribonucleic acid scaffold (ERS) sequence
  source 1..88: mol_type = other DNA
acgaggtgttctagctgattactctgcacctctcaccagcgactatgtcgtagtgggtaaagctccctcttcggagggagcatcagag

SEQ ID NO: 9503 - DNA, 90 bp, synthetic construct
  misc_feature 1..90: note = engineered ribonucleic acid scaffold (ERS) sequence
  source 1..90: mol_type = other DNA
acgaggtgttctattactgattactctgcacctctcaccagcgactatgtcgtagtgggtaaagctccctcttcggagggagcatcagag

SEQ ID NO: 9504 - DNA, 88 bp, synthetic construct
  misc_feature 1..88: note = engineered ribonucleic acid scaffold (ERS) sequence
  source 1..88: mol_type = other DNA
acgaggtgttctatatgattactctgcacctctcaccagcgactatgtcgtagtgggtaaagctccctcttcggagggagcatcagag

SEQ ID NO: 9505 - DNA, 88 bp, synthetic construct
  misc_feature 1..88: note = engineered ribonucleic acid scaffold (ERS) sequence
  source 1..88: mol_type = other DNA
acgaggtgttctatgtgattactctgcacctctcaccagcgactatgtcgtagtgggtaaagctccctcttcggagggagcatcagag

SEQ ID NO: 9506 - DNA, 88 bp, synthetic construct
  misc_feature 1..88: note = engineered ribonucleic acid scaffold (ERS) sequence
  source 1..88: mol_type = other DNA
acgaggtgttctatttgattactctgcacctctcaccagcgactatgtcgtagtgggtaaagctccctcttcggagggagcatcagag

SEQ ID NO: 9507 - DNA, 89 bp, synthetic construct
  misc_feature 1..89: note = engineered ribonucleic acid scaffold (ERS) sequence
  source 1..89: mol_type = other DNA
acgaggtgttctatcttgattactctgcacctctcaccagcgactatgtcgtagtgggtaaagctccctcttcggagggagcatcagag

SEQ ID NO: 9508 - DNA, 88 bp, synthetic construct
  misc_feature 1..88: note = engineered ribonucleic acid scaffold (ERS) sequence
  source 1..88: mol_type = other DNA
acgaggtgttctatcagattactctgcacctctcaccagcgactatgtcgtagtgggtaaagctccctcttcggagggagcatcagag

SEQ ID NO: 9509 - DNA, 88 bp, synthetic construct
  misc_feature 1..88: note = engineered ribonucleic acid scaffold (ERS) sequence
  source 1..88: mol_type = other DNA
acgaggtgttctatcggattactctgcacctctcaccagcgactatgtcgtagtgggtaaagctccctcttcggagggagcatcagag

SEQ ID NO: 9510 - DNA, 89 bp, synthetic construct
  misc_feature 1..89: note = engineered ribonucleic acid scaffold (ERS) sequence
  source 1..89: mol_type = other DNA
acgaggtgttctatctgaattactctgcacctctcaccagcgactatgtcgtagtgggtaaagctccctcttcggagggagcatcagag

SEQ ID NO: 9511 - DNA, 89 bp, synthetic construct
  misc_feature 1..89: note = engineered ribonucleic acid scaffold (ERS) sequence
  source 1..89: mol_type = other DNA
acgaggtgttctatctgtattactctgcacctctcaccagcgactatgtcgtagtgggtaaagctccctcttcggagggagcatcagag

SEQ ID NO: 9512 - DNA, 88 bp, synthetic construct
  misc_feature 1..88: note = engineered ribonucleic acid scaffold (ERS) sequence
  source 1..88: mol_type = other DNA
acgaggtgttctatctggttactctgcacctctcaccagcgactatgtcgtagtgggtaaagctccctcttcggagggagcatcagag

SEQ ID NO: 9513 - DNA, 88 bp, synthetic construct
  misc_feature 1..88: note = engineered ribonucleic acid scaffold (ERS) sequence
  source 1..88: mol_type = other DNA
acgaggtgttctatctgtttactctgcacctctcaccagcgactatgtcgtagtgggtaaagctccctcttcggagggagcatcagag

SEQ ID NO: 9514 - DNA, 89 bp, synthetic construct
  misc_feature 1..89: note = engineered ribonucleic acid scaffold (ERS) sequence
  source 1..89: mol_type = other DNA
acgaggtgttctatctgatttactctgcacctctcaccagcgactatgtcgtagtgggtaaagctccctcttcggagggagcatcagag

SEQ ID NO: 9515 - DNA, 88 bp, synthetic construct
  misc_feature 1..88: note = engineered ribonucleic acid scaffold (ERS) sequence
  source 1..88: mol_type = other DNA
acgaggtgttctatctgattgctctgcacctctcaccagcgactatgtcgtagtgggtaaagctccctcttcggagggagcatcagag

SEQ ID NO: 9516 - DNA, 90 bp, synthetic construct
  misc_feature 1..90: note = engineered ribonucleic acid scaffold (ERS) sequence
  source 1..90: mol_type = other DNA
acgggactttctatatctgattactctgagtccctcaccagcgactatgtcgtagtgggtaaagctccctcttcggagggagcatcagag

SEQ ID NO: 9517 - DNA, 89 bp, synthetic construct
  misc_feature 1..89: note = engineered ribonucleic acid scaffold (ERS) sequence
  source 1..89: mol_type = other DNA
acgggactttctaatctgattactctgagtccctcaccagcgactatgtcgtagtgggtaaagctccctcttcggagggagcatcagag

SEQ ID NO: 9518 - DNA, 87 bp, synthetic construct
  misc_feature 1..87: note = engineered ribonucleic acid scaffold (ERS) sequence
  source 1..87: mol_type = other DNA
acgggactttctactgattactctgagtccctcaccagcgactatgtcgtagtgggtaaagctccctcttcggagggagcatcagag

SEQ ID NO: 9519 - DNA, 88 bp, synthetic construct
  misc_feature 1..88: note = engineered ribonucleic acid scaffold (ERS) sequence
  source 1..88: mol_type = other DNA
acgggactttctaactgattactctgagtccctcaccagcgactatgtcgtagtgggtaaagctccctcttcggagggagcatcagag

SEQ ID NO: 9520 - DNA, 88 bp, synthetic construct
  misc_feature 1..88: note = engineered ribonucleic acid scaffold (ERS) sequence
  source 1..88: mol_type = other DNA
acgggactttctacctgattactctgagtccctcaccagcgactatgtcgtagtgggtaaagctccctcttcggagggagcatcagag

SEQ ID NO: 9521 - DNA, 88 bp, synthetic construct
  misc_feature 1..88: note = engineered ribonucleic acid scaffold (ERS) sequence
  source 1..88: mol_type = other DNA
acgggactttctagctgattactctgagtccctcaccagcgactatgtcgtagtgggtaaagctccctcttcggagggagcatcagag

SEQ ID NO: 9522 - DNA, 90 bp, synthetic construct
  misc_feature 1..90: note = engineered ribonucleic acid scaffold (ERS) sequence
  source 1..90: mol_type = other DNA
acgggactttctattactgattactctgagtccctcaccagcgactatgtcgtagtgggtaaagctccctcttcggagggagcatcagag

SEQ ID NO: 9523 - DNA, 88 bp, synthetic construct
  misc_feature 1..88: note = engineered ribonucleic acid scaffold (ERS) sequence
  source 1..88: mol_type = other DNA
acgggactttctatatgattactctgagtccctcaccagcgactatgtcgtagtgggtaaagctccctcttcggagggagcatcagag

SEQ ID NO: 9524 - DNA, 88 bp, synthetic construct
  misc_feature 1..88: note = engineered ribonucleic acid scaffold (ERS) sequence
  source 1..88: mol_type = other DNA
acgggactttctatgtgattactctgagtccctcaccagcgactatgtcgtagtgggtaaagctccctcttcggagggagcatcagag

SEQ ID NO: 9525 - DNA, 88 bp, synthetic construct
  misc_feature 1..88: note = engineered ribonucleic acid scaffold (ERS) sequence
  source 1..88: mol_type = other DNA
acgggactttctatttgattactctgagtccctcaccagcgactatgtcgtagtgggtaaagctccctcttcggagggagcatcagag

SEQ ID NO: 9526 - DNA, 89 bp, synthetic construct
  misc_feature 1..89: note = engineered ribonucleic acid scaffold (ERS) sequence
  source 1..89: mol_type = other DNA
acgggactttctatcttgattactctgagtccctcaccagcgactatgtcgtagtgggtaaagctccctcttcggagggagcatcagag

SEQ ID NO: 9527 - DNA, 88 bp, synthetic construct
  misc_feature 1..88: note = engineered ribonucleic acid scaffold (ERS) sequence
  source 1..88: mol_type = other DNA
acgggactttctatcagattactctgagtccctcaccagcgactatgtcgtagtgggtaaagctccctcttcggagggagcatcagag

SEQ ID NO: 9528 - DNA, 88 bp, synthetic construct
  misc_feature 1..88: note = engineered ribonucleic acid scaffold (ERS) sequence
  source 1..88: mol_type = other DNA
acgggactttctatcggattactctgagtccctcaccagcgactatgtcgtagtgggtaaagctccctcttcggagggagcatcagag

SEQ ID NO: 9529 - DNA, 89 bp, synthetic construct
  misc_feature 1..89: note = engineered ribonucleic acid scaffold (ERS) sequence
  source 1..89: mol_type = other DNA
acgggactttctatctgaattactctgagtccctcaccagcgactatgtcgtagtgggtaaagctccctcttcggagggagcatcagag

SEQ ID NO: 9530 - DNA, 89 bp, synthetic construct
  misc_feature 1..89: note = engineered ribonucleic acid scaffold (ERS) sequence
  source 1..89: mol_type = other DNA
acgggactttctatctgtattactctgagtccctcaccagcgactatgtcgtagtgggtaaagctccctcttcggagggagcatcagag

SEQ ID NO: 9531 - DNA, 88 bp, synthetic construct
  misc_feature 1..88: note = engineered ribonucleic acid scaffold (ERS) sequence
  source 1..88: mol_type = other DNA
acgggactttctatctggttactctgagtccctcaccagcgactatgtcgtagtgggtaaagctccctcttcggagggagcatcagag

SEQ ID NO: 9532 - DNA, 88 bp, synthetic construct
  misc_feature 1..88: note = engineered ribonucleic acid scaffold (ERS) sequence
  source 1..88: mol_type = other DNA
acgggactttctatctgtttactctgagtccctcaccagcgactatgtcgtagtgggtaaagctccctcttcggagggagcatcagag

SEQ ID NO: 9533 - DNA, 89 bp, synthetic construct
  misc_feature 1..89: note = engineered ribonucleic acid scaffold (ERS) sequence
  source 1..89: mol_type = other DNA
acgggactttctatctgatttactctgagtccctcaccagcgactatgtcgtagtgggtaaagctccctcttcggagggagcatcagag

SEQ ID NO: 9534 - DNA, 88 bp, synthetic construct
  misc_feature 1..88: note = engineered ribonucleic acid scaffold (ERS) sequence
  source 1..88: mol_type = other DNA
acgggactttctatctgattgctctgagtccctcaccagcgactatgtcgtagtgggtaaagctccctcttcggagggagcatcagag

SEQ ID NO: 9535 - DNA, 90 bp, synthetic construct
  misc_feature 1..90: note = engineered ribonucleic acid scaffold (ERS) sequence
  source 1..90: mol_type = other DNA
acgggcaattctatatctgattactctgttgccctcaccagcgactatgtcgtagtgggtaaagctccctcttcggagggagcatcagag

SEQ ID NO: 9536 - DNA, 89 bp, synthetic construct
  misc_feature 1..89: note = engineered ribonucleic acid scaffold (ERS) sequence
  source 1..89: mol_type = other DNA
acgggcaattctaatctgattactctgttgccctcaccagcgactatgtcgtagtgggtaaagctccctcttcggagggagcatcagag

SEQ ID NO: 9537 - DNA, 87 bp, synthetic construct
  misc_feature 1..87: note = engineered ribonucleic acid scaffold (ERS) sequence
  source 1..87: mol_type = other DNA
acgggcaattctactgattactctgttgccctcaccagcgactatgtcgtagtgggtaaagctccctcttcggagggagcatcagag

SEQ ID NO: 9538 - DNA, 88 bp, synthetic construct
  misc_feature 1..88: note = engineered ribonucleic acid scaffold (ERS) sequence
  source 1..88: mol_type = other DNA
acgggcaattctaactgattactctgttgccctcaccagcgactatgtcgtagtgggtaaagctccctcttcggagggagcatcagag

SEQ ID NO: 9539 - DNA, 88 bp, synthetic construct
  misc_feature 1..88: note = engineered ribonucleic acid scaffold (ERS) sequence
  source 1..88: mol_type = other DNA
acgggcaattctacctgattactctgttgccctcaccagcgactatgtcgtagtgggtaaagctccctcttcggagggagcatcagag

SEQ ID NO: 9540 - DNA, 88 bp, synthetic construct
  misc_feature 1..88: note = engineered ribonucleic acid scaffold (ERS) sequence
  source 1..88: mol_type = other DNA
acgggcaattctagctgattactctgttgccctcaccagcgactatgtcgtagtgggtaaagctccctcttcggagggagcatcagag

SEQ ID NO: 9541 - DNA, 90 bp, synthetic construct
  misc_feature 1..90: note = engineered ribonucleic acid scaffold (ERS) sequence
  source 1..90: mol_type = other DNA
acgggcaattctattactgattactctgttgccctcaccagcgactatgtcgtagtgggtaaagctccctcttcggagggagcatcagag

SEQ ID NO: 9542 - DNA, 88 bp, synthetic construct
  misc_feature 1..88: note = engineered ribonucleic acid scaffold (ERS) sequence
  source 1..88: mol_type = other DNA
acgggcaattctatatgattactctgttgccctcaccagcgactatgtcgtagtgggtaaagctccctcttcggagggagcatcagag

SEQ ID NO: 9543 - DNA, 88 bp, synthetic construct
  misc_feature 1..88: note = engineered ribonucleic acid scaffold (ERS) sequence
  source 1..88: mol_type = other DNA
acgggcaattctatgtgattactctgttgccctcaccagcgactatgtcgtagtgggtaaagctccctcttcggagggagcatcagag

SEQ ID NO: 9544 - DNA, 88 bp, synthetic construct
  misc_feature 1..88: note = engineered ribonucleic acid scaffold (ERS) sequence
  source 1..88: mol_type = other DNA
acgggcaattctatttgattactctgttgccctcaccagcgactatgtcgtagtgggtaaagctccctcttcggagggagcatcagag

SEQ ID NO: 9545 - DNA, 89 bp, synthetic construct
  misc_feature 1..89: note = engineered ribonucleic acid scaffold (ERS) sequence
  source 1..89: mol_type = other DNA
acgggcaattctatcttgattactctgttgccctcaccagcgactatgtcgtagtgggtaaagctccctcttcggagggagcatcagag

SEQ ID NO: 9546 - DNA, 88 bp, synthetic construct
  misc_feature 1..88: note = engineered ribonucleic acid scaffold (ERS) sequence
  source 1..88: mol_type = other DNA
acgggcaattctatcagattactctgttgccctcaccagcgactatgtcgtagtgggtaaagctccctcttcggagggagcatcagag

SEQ ID NO: 9547 - DNA, 88 bp, synthetic construct
  misc_feature 1..88: note = engineered ribonucleic acid scaffold (ERS) sequence
  source 1..88: mol_type = other DNA
acgggcaattctatcggattactctgttgccctcaccagcgactatgtcgtagtgggtaaagctccctcttcggagggagcatcagag

SEQ ID NO: 9548 - DNA, 89 bp, synthetic construct
  misc_feature 1..89: note = engineered ribonucleic acid scaffold (ERS) sequence
  source 1..89: mol_type = other DNA
acgggcaattctatctgaattactctgttgccctcaccagcgactatgtcgtagtgggtaaagctccctcttcggagggagcatcagag

SEQ ID NO: 9549 - DNA, 89 bp, synthetic construct
  misc_feature 1..89: note = engineered ribonucleic acid scaffold (ERS) sequence
  source 1..89: mol_type = other DNA
acgggcaattctatctgtattactctgttgccctcaccagcgactatgtcgtagtgggtaaagctccctcttcggagggagcatcagag

SEQ ID NO: 9550 - DNA, 88 bp, synthetic construct
  misc_feature 1..88: note = engineered ribonucleic acid scaffold (ERS) sequence
  source 1..88: mol_type = other DNA
acgggcaattctatctggttactctgttgccctcaccagcgactatgtcgtagtgggtaaagctccctcttcggagggagcatcagag

SEQ ID NO: 9551 - DNA, 88 bp, synthetic construct
  misc_feature 1..88: note = engineered ribonucleic acid scaffold (ERS) sequence
  source 1..88: mol_type = other DNA
acgggcaattctatctgtttactctgttgccctcaccagcgactatgtcgtagtgggtaaagctccctcttcggagggagcatcagag

SEQ ID NO: 9552 - DNA, 89 bp, synthetic construct
  misc_feature 1..89: note = engineered ribonucleic acid scaffold (ERS) sequence
  source 1..89: mol_type = other DNA
acgggcaattctatctgatttactctgttgccctcaccagcgactatgtcgtagtgggtaaagctccctcttcggagggagcatcagag

SEQ ID NO: 9553 - DNA, 88 bp, synthetic construct
  misc_feature 1..88: note = engineered ribonucleic acid scaffold (ERS) sequence
  source 1..88: mol_type = other DNA
acgggcaattctatctgattgctctgttgccctcaccagcgactatgtcgtagtgggtaaagctccctcttcggagggagcatcagag

SEQ ID NO: 9554 - DNA, 90 bp, synthetic construct
  misc_feature 1..90: note = engineered ribonucleic acid scaffold (ERS) sequence
  source 1..90: mol_type = other DNA
actgtgcgttctatatctgattactctgcgcacatcaccagcgactatgtcgtagtgggtaaagctccctcttcggagggagcatcagag

SEQ ID NO: 9555 - DNA, 89 bp, synthetic construct
  misc_feature 1..89: note = engineered ribonucleic acid scaffold (ERS) sequence
  source 1..89: mol_type = other DNA
actgtgcgttctaatctgattactctgcgcacatcaccagcgactatgtcgtagtgggtaaagctccctcttcggagggagcatcagag

SEQ ID NO: 9556 - DNA, 87 bp, synthetic construct
  misc_feature 1..87: note = engineered ribonucleic acid scaffold (ERS) sequence
  source 1..87: mol_type = other DNA
actgtgcgttctactgattactctgcgcacatcaccagcgactatgtcgtagtgggtaaagctccctcttcggagggagcatcagag

SEQ ID NO: 9557 - DNA, 88 bp, synthetic construct
  misc_feature 1..88: note = engineered ribonucleic acid scaffold (ERS) sequence
  source 1..88: mol_type = other DNA
actgtgcgttctaactgattactctgcgcacatcaccagcgactatgtcgtagtgggtaaagctccctcttcggagggagcatcagag

SEQ ID NO: 9558 - DNA, 88 bp, synthetic construct
  misc_feature 1..88: note = engineered ribonucleic acid scaffold (ERS) sequence
  source 1..88: mol_type = other DNA
actgtgcgttctacctgattactctgcgcacatcaccagcgactatgtcgtagtgggtaaagctccctcttcggagggagcatcagag

SEQ ID NO: 9559 - DNA, 88 bp, synthetic construct
  misc_feature 1..88: note = engineered ribonucleic acid scaffold (ERS) sequence
  source 1..88: mol_type = other DNA
actgtgcgttctagctgattactctgcgcacatcaccagcgactatgtcgtagtgggtaaagctccctcttcggagggagcatcagag

SEQ ID NO: 9560 - DNA, 90 bp, synthetic construct
  misc_feature 1..90: note = engineered ribonucleic acid scaffold (ERS) sequence
  source 1..90: mol_type = other DNA
actgtgcgttctattactgattactctgcgcacatcaccagcgactatgtcgtagtgggtaaagctccctcttcggagggagcatcagag

SEQ ID NO: 9561 - DNA, 88 bp, synthetic construct
  misc_feature 1..88: note = engineered ribonucleic acid scaffold (ERS) sequence
  source 1..88: mol_type = other DNA
actgtgcgttctatatgattactctgcgcacatcaccagcgactatgtcgtagtgggtaaagctccctcttcggagggagcatcagag

SEQ ID NO: 9562 - DNA, 88 bp, synthetic construct
  misc_feature 1..88: note = engineered ribonucleic acid scaffold (ERS) sequence
  source 1..88: mol_type = other DNA
actgtgcgttctatgtgattactctgcgcacatcaccagcgactatgtcgtagtgggtaaagctccctcttcggagggagcatcagag

SEQ ID NO: 9563 - DNA, 88 bp, synthetic construct
  misc_feature 1..88: note = engineered ribonucleic acid scaffold (ERS) sequence
  source 1..88: mol_type = other DNA
actgtgcgttctatttgattactctgcgcacatcaccagcgactatgtcgtagtgggtaaagctccctcttcggagggagcatcagag

SEQ ID NO: 9564 - DNA, 89 bp, synthetic construct
  misc_feature 1..89: note = engineered ribonucleic acid scaffold (ERS) sequence
  source 1..89: mol_type = other DNA
actgtgcgttctatcttgattactctgcgcacatcaccagcgactatgtcgtagtgggtaaagctccctcttcggagggagcatcagag

SEQ ID NO: 9565 - DNA, 88 bp, synthetic construct
  misc_feature 1..88: note = engineered ribonucleic acid scaffold (ERS) sequence
  source 1..88: mol_type = other DNA
actgtgcgttctatcagattactctgcgcacatcaccagcgactatgtcgtagtgggtaaagctccctcttcggagggagcatcagag

SEQ ID NO: 9566 - DNA, 88 bp, synthetic construct
  misc_feature 1..88: note = engineered ribonucleic acid scaffold (ERS) sequence
  source 1..88: mol_type = other DNA
actgtgcgttctatcggattactctgcgcacatcaccagcgactatgtcgtagtgggtaaagctccctcttcggagggagcatcagag

SEQ ID NO: 9567 - DNA, 89 bp, synthetic construct
  misc_feature 1..89: note = engineered ribonucleic acid scaffold (ERS) sequence
  source 1..89: mol_type = other DNA
actgtgcgttctatctgaattactctgcgcacatcaccagcgactatgtcgtagtgggtaaagctccctcttcggagggagcatcagag

SEQ ID NO: 9568 - DNA, 89 bp, synthetic construct
  misc_feature 1..89: note = engineered ribonucleic acid scaffold (ERS) sequence
  source 1..89: mol_type = other DNA
actgtgcgttctatctgtattactctgcgcacatcaccagcgactatgtcgtagtgggtaaagctccctcttcggagggagcatcagag

SEQ ID NO: 9569 - DNA, 88 bp, synthetic construct
  misc_feature 1..88: note = engineered ribonucleic acid scaffold (ERS) sequence
  source 1..88: mol_type = other DNA
actgtgcgttctatctggttactctgcgcacatcaccagcgactatgtcgtagtgggtaaagctccctcttcggagggagcatcagag

SEQ ID NO: 9570 - DNA, 88 bp, synthetic construct
  misc_feature 1..88: note = engineered ribonucleic acid scaffold (ERS) sequence
  source 1..88: mol_type = other DNA
actgtgcgttctatctgtttactctgcgcacatcaccagcgactatgtcgtagtgggtaaagctccctcttcggagggagcatcagag

SEQ ID NO: 9571 - DNA, 89 bp, synthetic construct
  misc_feature 1..89: note = engineered ribonucleic acid scaffold (ERS) sequence
  source 1..89: mol_type = other DNA
actgtgcgttctatctgatttactctgcgcacatcaccagcgactatgtcgtagtgggtaaagctccctcttcggagggagcatcagag

SEQ ID NO: 9572 - DNA, 88 bp, synthetic construct
  misc_feature 1..88: note = engineered ribonucleic acid scaffold (ERS) sequence
  source 1..88: mol_type = other DNA
actgtgcgttctatctgattgctctgcgcacatcaccagcgactatgtcgtagtgggtaaagctccctcttcggagggagcatcagag

SEQ ID NO: 9573 - DNA, 91 bp, synthetic construct
  misc_feature 1..91: note = engineered ribonucleic acid scaffold (ERS) sequence
  source 1..91: mol_type = other DNA
actggcgcttctatatctgattactctgggcgccatcaccagcgactatgtcgtagtgggtaaagctccctcttcggagggagcatcagag

SEQ ID NO: 9574 - DNA, 90 bp, synthetic construct
  misc_feature 1..90: note = engineered ribonucleic acid scaffold (ERS) sequence
  source 1..90: mol_type = other DNA
actggcgcttctaatctgattactctgggcgccatcaccagcgactatgtcgtagtgggtaaagctccctcttcggagggagcatcagag

SEQ ID NO: 9575 - DNA, 88 bp, synthetic construct
  misc_feature 1..88: note = engineered ribonucleic acid scaffold (ERS) sequence
  source 1..88: mol_type = other DNA
actggcgcttctactgattactctgggcgccatcaccagcgactatgtcgtagtgggtaaagctccctcttcggagggagcatcagag

SEQ ID NO: 9576 - DNA, 89 bp, synthetic construct
  misc_feature 1..89: note = engineered ribonucleic acid scaffold (ERS) sequence
  source 1..89: mol_type = other DNA
actggcgcttctaactgattactctgggcgccatcaccagcgactatgtcgtagtgggtaaagctccctcttcggagggagcatcagag

SEQ ID NO: 9577 - DNA, 89 bp, synthetic construct
  misc_feature 1..89: note = engineered ribonucleic acid scaffold (ERS) sequence
  source 1..89: mol_type = other DNA
actggcgcttctacctgattactctgggcgccatcaccagcgactatgtcgtagtgggtaaagctccctcttcggagggagcatcagag

SEQ ID NO: 9578 - DNA, 89 bp, synthetic construct
  misc_feature 1..89: note = engineered ribonucleic acid scaffold (ERS) sequence
  source 1..89: mol_type = other DNA
actggcgcttctagctgattactctgggcgccatcaccagcgactatgtcgtagtgggtaaagctccctcttcggagggagcatcagag

SEQ ID NO: 9579 - DNA, 91 bp, synthetic construct
  misc_feature 1..91: note = engineered ribonucleic acid scaffold (ERS) sequence
  source 1..91: mol_type = other DNA
actggcgcttctattactgattactctgggcgccatcaccagcgactatgtcgtagtgggtaaagctccctcttcggagggagcatcagag

SEQ ID NO: 9580 - DNA, 89 bp, synthetic construct
  misc_feature 1..89: note = engineered ribonucleic acid scaffold (ERS) sequence
  source 1..89: mol_type = other DNA
actggcgcttctatatgattactctgggcgccatcaccagcgactatgtcgtagtgggtaaagctccctcttcggagggagcatcagag

SEQ ID NO: 9581 - DNA, 89 bp, synthetic construct
  misc_feature 1..89: note = engineered ribonucleic acid scaffold (ERS) sequence
  source 1..89: mol_type = other DNA
actggcgcttctatgtgattactctgggcgccatcaccagcgactatgtcgtagtgggtaaagctccctcttcggagggagcatcagag

SEQ ID NO: 9582 - DNA, 89 bp, synthetic construct
  misc_feature 1..89: note = engineered ribonucleic acid scaffold (ERS) sequence
  source 1..89: mol_type = other DNA
actggcgcttctatttgattactctgggcgccatcaccagcgactatgtcgtagtgggtaaagctccctcttcggagggagcatcagag

SEQ ID NO: 9583 - DNA, 90 bp, synthetic construct
  misc_feature 1..90: note = engineered ribonucleic acid scaffold (ERS) sequence
  source 1..90: mol_type = other DNA
actggcgcttctatcttgattactctgggcgccatcaccagcgactatgtcgtagtgggtaaagctccctcttcggagggagcatcagag

SEQ ID NO: 9584 - DNA, 89 bp, synthetic construct
  misc_feature 1..89: note = engineered ribonucleic acid scaffold (ERS) sequence
  source 1..89: mol_type = other DNA
actggcgcttctatcagattactctgggcgccatcaccagcgactatgtcgtagtgggtaaagctccctcttcggagggagcatcagag

SEQ ID NO: 9585 - DNA, 89 bp, synthetic construct
  misc_feature 1..89: note = engineered ribonucleic acid scaffold (ERS) sequence
  source 1..89: mol_type = other DNA
actggcgcttctatcggattactctgggcgccatcaccagcgactatgtcgtagtgggtaaagctccctcttcggagggagcatcagag

SEQ ID NO: 9586 - DNA, 90 bp, synthetic construct
  misc_feature 1..90: note = engineered ribonucleic acid scaffold (ERS) sequence
  source 1..90: mol_type = other DNA
actggcgcttctatctgaattactctgggcgccatcaccagcgactatgtcgtagtgggtaaagctccctcttcggagggagcatcagag

SEQ ID NO: 9587 - DNA, 90 bp, synthetic construct
  misc_feature 1..90: note = engineered ribonucleic acid scaffold (ERS) sequence
  source 1..90: mol_type = other DNA
actggcgcttctatctgtattactctgggcgccatcaccagcgactatgtcgtagtgggtaaagctccctcttcggagggagcatcagag

SEQ ID NO: 9588 - DNA, 89 bp, synthetic construct
  misc_feature 1..89: note = engineered ribonucleic acid scaffold (ERS) sequence
  source 1..89: mol_type = other DNA
actggcgcttctatctggttactctgggcgccatcaccagcgactatgtcgtagtgggtaaagctccctcttcggagggagcatcagag

SEQ ID NO: 9589 - DNA, 89 bp, synthetic construct
  misc_feature 1..89: note = engineered ribonucleic acid scaffold (ERS) sequence
  source 1..89: mol_type = other DNA
actggcgcttctatctgtttactctgggcgccatcaccagcgactatgtcgtagtgggtaaagctccctcttcggagggagcatcagag

SEQ ID NO: 9590 - DNA, 90 bp, synthetic construct
  misc_feature 1..90: note = engineered ribonucleic acid scaffold (ERS) sequence
  source 1..90: mol_type = other DNA
actggcgcttctatctgatttactctgggcgccatcaccagcgactatgtcgtagtgggtaaagctccctcttcggagggagcatcagag

SEQ ID NO: 9591 - DNA, 89 bp, synthetic construct
  misc_feature 1..89: note = engineered ribonucleic acid scaffold (ERS) sequence
  source 1..89: mol_type = other DNA
actggcgcttctatctgattgctctgggcgccatcaccagcgactatgtcgtagtgggtaaagctccctcttcggagggagcatcagag

SEQ ID NO: 9592 - DNA, 91 bp, synthetic construct
  misc_feature 1..91: note = engineered ribonucleic acid scaffold (ERS) sequence
  source 1..91: mol_type = other DNA
actggcgcttctatatctgattactctgggagccatcaccagcgactatgtcgtagtgggtaaagctccctcttcggagggagcatcagag

SEQ ID NO: 9593 - DNA, 90 bp, synthetic construct
  misc_feature 1..90: note = engineered ribonucleic acid scaffold (ERS) sequence
  source 1..90: mol_type = other DNA
actggcgcttctaatctgattactctgggagccatcaccagcgactatgtcgtagtgggtaaagctccctcttcggagggagcatcagag

SEQ ID NO: 9594 - DNA, 88 bp, synthetic construct
  misc_feature 1..88: note = engineered ribonucleic acid scaffold (ERS) sequence
  source 1..88: mol_type = other DNA
actggcgcttctactgattactctgggagccatcaccagcgactatgtcgtagtgggtaaagctccctcttcggagggagcatcagag

SEQ ID NO: 9595 - DNA, 89 bp, synthetic construct
  misc_feature 1..89: note = engineered ribonucleic acid scaffold (ERS) sequence
  source 1..89: mol_type = other DNA
actggcgcttctaactgattactctgggagccatcaccagcgactatgtcgtagtgggtaaagctccctcttcggagggagcatcagag

SEQ ID NO: 9596 - DNA, 89 bp, synthetic construct
  misc_feature 1..89: note = engineered ribonucleic acid scaffold (ERS) sequence
  source 1..89: mol_type = other DNA
actggcgcttctacctgattactctgggagccatcaccagcgactatgtcgtagtgggtaaagctccctcttcggagggagcatcagag

SEQ ID NO: 9597 - DNA, 89 bp, synthetic construct
  misc_feature 1..89: note = engineered ribonucleic acid scaffold (ERS) sequence
  source 1..89: mol_type = other DNA
actggcgcttctagctgattactctgggagccatcaccagcgactatgtcgtagtgggtaaagctccctcttcggagggagcatcagag

SEQ ID NO: 9598 - DNA, 91 bp, synthetic construct
  misc_feature 1..91: note = engineered ribonucleic acid scaffold (ERS) sequence
  source 1..91: mol_type = other DNA
actggcgcttctattactgattactctgggagccatcaccagcgactatgtcgtagtgggtaaagctccctcttcggagggagcatcagag

SEQ ID NO: 9599 - DNA, 89 bp, synthetic construct
  misc_feature 1..89: note = engineered ribonucleic acid scaffold (ERS) sequence
  source 1..89: mol_type = other DNA
actggcgcttctatatgattactctgggagccatcaccagcgactatgtcgtagtgggtaaagctccctcttcggagggagcatcagag

SEQ ID NO: 9600 - DNA, 89 bp, synthetic construct
  misc_feature 1..89: note = engineered ribonucleic acid scaffold (ERS) sequence
  source 1..89: mol_type = other DNA
actggcgcttctatgtgattactctgggagccatcaccagcgactatgtcgtagtgggtaaagctccctcttcggagggagcatcagag

SEQ ID NO: 9601 - DNA, 89 bp, synthetic construct
  misc_feature 1..89: note = engineered ribonucleic acid scaffold (ERS) sequence
  source 1..89: mol_type = other DNA
actggcgcttctatttgattactctgggagccatcaccagcgactatgtcgtagtgggtaaagctccctcttcggagggagcatcagag

SEQ ID NO: 9602 - DNA, 90 bp, synthetic construct
  misc_feature 1..90: note = engineered ribonucleic acid scaffold (ERS) sequence
  source 1..90: mol_type = other DNA
actggcgcttctatcttgattactctgggagccatcaccagcgactatgtcgtagtgggtaaagctccctcttcggagggagcatcagag

SEQ ID NO: 9603 - DNA, 89 bp, synthetic construct
  misc_feature 1..89: note = engineered ribonucleic acid scaffold (ERS) sequence
  source 1..89: mol_type = other DNA
actggcgcttctatcagattactctgggagccatcaccagcgactatgtcgtagtgggtaaagctccctcttcggagggagcatcagag

SEQ ID NO: 9604 - DNA, 89 bp, synthetic construct
  misc_feature 1..89: note = engineered ribonucleic acid scaffold (ERS) sequence
  source 1..89: mol_type = other DNA
actggcgcttctatcggattactctgggagccatcaccagcgactatgtcgtagtgggtaaagctccctcttcggagggagcatcagag

SEQ ID NO: 9605 - DNA, 90 bp, synthetic construct
  misc_feature 1..90: note = engineered ribonucleic acid scaffold (ERS) sequence
  source 1..90: mol_type = other DNA
actggcgcttctatctgaattactctgggagccatcaccagcgactatgtcgtagtgggtaaagctccctcttcggagggagcatcagag

SEQ ID NO: 9606 - DNA, 90 bp, synthetic construct
  misc_feature 1..90: note = engineered ribonucleic acid scaffold (ERS) sequence
  source 1..90: mol_type = other DNA
actggcgcttctatctgtattactctgggagccatcaccagcgactatgtcgtagtgggtaaagctccctcttcggagggagcatcagag

SEQ ID NO: 9607 - DNA, 89 bp, synthetic construct
  misc_feature 1..89: note = engineered ribonucleic acid scaffold (ERS) sequence
  source 1..89: mol_type = other DNA
actggcgcttctatctggttactctgggagccatcaccagcgactatgtcgtagtgggtaaagctccctcttcggagggagcatcagag

SEQ ID NO: 9608 - DNA, 89 bp, synthetic construct
  misc_feature 1..89: note = engineered ribonucleic acid scaffold (ERS) sequence
  source 1..89: mol_type = other DNA
actggcgcttctatctgtttactctgggagccatcaccagcgactatgtcgtagtgggtaaagctccctcttcggagggagcatcagag

SEQ ID NO: 9609 - DNA, 90 bp, synthetic construct
  misc_feature 1..90: note = engineered ribonucleic acid scaffold (ERS) sequence
  source 1..90: mol_type = other DNA
actggcgcttctatctgatttactctgggagccatcaccagcgactatgtcgtagtgggtaaagctccctcttcggagggagcatcagag

SEQ ID NO: 9610 - DNA, 89 bp, synthetic construct
  misc_feature 1..89: note = engineered ribonucleic acid scaffold (ERS) sequence
  source 1..89: mol_type = other DNA
actggcgcttctatctgattgctctgggagccatcaccagcgactatgtcgtagtgggtaaagctccctcttcggagggagcatcagag

SEQ ID NO: 9611 - DNA, 91 bp, synthetic construct
  misc_feature 1..91: note = engineered ribonucleic acid scaffold (ERS) sequence
  source 1..91: mol_type = other DNA
actggcgcttctatatctgattactctgtgagccatcaccagcgactatgtcgtagtgggtaaagctccctcttcggagggagcatcagag

SEQ ID NO: 9612 - DNA, 90 bp, synthetic construct
  misc_feature 1..90: note = engineered ribonucleic acid scaffold (ERS) sequence
  source 1..90: mol_type = other DNA
actggcgcttctaatctgattactctgtgagccatcaccagcgactatgtcgtagtgggtaaagctccctcttcggagggagcatcagag

SEQ ID NO: 9613 - DNA, 88 bp, synthetic construct
  misc_feature 1..88: note = engineered ribonucleic acid scaffold (ERS) sequence
  source 1..88: mol_type = other DNA
actggcgcttctactgattactctgtgagccatcaccagcgactatgtcgtagtgggtaaagctccctcttcggagggagcatcagag

SEQ ID NO: 9614 - DNA, 89 bp, synthetic construct
  misc_feature 1..89: note = engineered ribonucleic acid scaffold (ERS) sequence
  source 1..89: mol_type = other DNA
actggcgcttctaactgattactctgtgagccatcaccagcgactatgtcgtagtgggtaaagctccctcttcggagggagcatcagag

SEQ ID NO: 9615 - DNA, 89 bp, synthetic construct
  misc_feature 1..89: note = engineered ribonucleic acid scaffold (ERS) sequence
  source 1..89: mol_type = other DNA
actggcgcttctacctgattactctgtgagccatcaccagcgactatgtcgtagtgggtaaagctccctcttcggagggagcatcagag

SEQ ID NO: 9616 - DNA, 89 bp, synthetic construct
  misc_feature 1..89: note = engineered ribonucleic acid scaffold (ERS) sequence
  source 1..89: mol_type = other DNA
actggcgcttctagctgattactctgtgagccatcaccagcgactatgtcgtagtgggtaaagctccctcttcggagggagcatcagag

SEQ ID NO: 9617 - DNA, 91 bp, synthetic construct
  misc_feature 1..91: note = engineered ribonucleic acid scaffold (ERS) sequence
  source 1..91: mol_type = other DNA
actggcgcttctattactgattactctgtgagccatcaccagcgactatgtcgtagtgggtaaagctccctcttcggagggagcatcagag

SEQ ID NO: 9618 - DNA, 89 bp, synthetic construct
  misc_feature 1..89: note = engineered ribonucleic acid scaffold (ERS) sequence
  source 1..89: mol_type = other DNA
actggcgcttctatatgattactctgtgagccatcaccagcgactatgtcgtagtgggtaaagctccctcttcggagggagcatcagag

SEQ ID NO: 9619 - DNA, 89 bp, synthetic construct
  misc_feature 1..89: note = engineered ribonucleic acid scaffold (ERS) sequence
  source 1..89: mol_type = other DNA
actggcgcttctatgtgattactctgtgagccatcaccagcgactatgtcgtagtgggtaaagctccctcttcggagggagcatcagag

SEQ ID NO: 9620 - DNA, 89 bp, synthetic construct
  misc_feature 1..89: note = engineered ribonucleic acid scaffold (ERS) sequence
  source 1..89: mol_type = other DNA
actggcgcttctatttgattactctgtgagccatcaccagcgactatgtcgtagtgggtaaagctccctcttcggagggagcatcagag

SEQ ID NO: 9621 - DNA, 90 bp, synthetic construct
  misc_feature 1..90: note = engineered ribonucleic acid scaffold (ERS) sequence
  source 1..90: mol_type = other DNA
actggcgcttctatcttgattactctgtgagccatcaccagcgactatgtcgtagtgggtaaagctccctcttcggagggagcatcagag

SEQ ID NO: 9622 - DNA, 89 bp, synthetic construct
  misc_feature 1..89: note = engineered ribonucleic acid scaffold (ERS) sequence
  source 1..89: mol_type = other DNA
actggcgcttctatcagattactctgtgagccatcaccagcgactatgtcgtagtgggtaaagctccctcttcggagggagcatcagag

SEQ ID NO: 9623 - DNA, 89 bp, synthetic construct
  misc_feature 1..89: note = engineered ribonucleic acid scaffold (ERS) sequence
  source 1..89: mol_type = other DNA
actggcgcttctatcggattactctgtgagccatcaccagcgactatgtcgtagtgggtaaagctccctcttcggagggagcatcagag

SEQ ID NO: 9624 - DNA, 90 bp, synthetic construct
  misc_feature 1..90: note = engineered ribonucleic acid scaffold (ERS) sequence
  source 1..90: mol_type = other DNA
actggcgcttctatctgaattactctgtgagccatcaccagcgactatgtcgtagtgggtaaagctccctcttcggagggagcatcagag

SEQ ID NO: 9625 - DNA, 90 bp, synthetic construct
  misc_feature 1..90: note = engineered ribonucleic acid scaffold (ERS) sequence
  source 1..90: mol_type = other DNA
actggcgcttctatctgtattactctgtgagccatcaccagcgactatgtcgtagtgggtaaagctccctcttcggagggagcatcagag

SEQ ID NO: 9626 - DNA, 89 bp, synthetic construct
  misc_feature 1..89: note = engineered ribonucleic acid scaffold (ERS) sequence
  source 1..89: mol_type = other DNA
actggcgcttctatctggttactctgtgagccatcaccagcgactatgtcgtagtgggtaaagctccctcttcggagggagcatcagag

SEQ ID NO: 9627 - DNA, 89 bp, synthetic construct
  misc_feature 1..89: note = engineered ribonucleic acid scaffold (ERS) sequence
  source 1..89: mol_type = other DNA
actggcgcttctatctgtttactctgtgagccatcaccagcgactatgtcgtagtgggtaaagctccctcttcggagggagcatcagag

SEQ ID NO: 9628 - DNA, 90 bp, synthetic construct
  misc_feature 1..90: note = engineered ribonucleic acid scaffold (ERS) sequence
  source 1..90: mol_type = other DNA
actggcgcttctatctgatttactctgtgagccatcaccagcgactatgtcgtagtgggtaaagctccctcttcggagggagcatcagag

SEQ ID NO: 9629 - DNA, 89 bp, synthetic construct
  misc_feature 1..89: note = engineered ribonucleic acid scaffold (ERS) sequence
  source 1..89: mol_type = other DNA
actggcgcttctatctgattgctctgtgagccatcaccagcgactatgtcgtagtgggtaaagctccctcttcggagggagcatcagag

SEQ ID NO: 9630 - DNA, 92 bp, synthetic construct
  misc_feature 1..92: note = engineered ribonucleic acid scaffold (ERS) sequence
  source 1..92: mol_type = other DNA
actggcgcttctatatctgattactctgaggagccatcaccagcgactatgtcgtagtgggtaaagctccctcttcggagggagcatcagag

SEQ ID NO: 9631 - DNA, 91 bp, synthetic construct
  misc_feature 1..91: note = engineered ribonucleic acid scaffold (ERS) sequence
  source 1..91: mol_type = other DNA
actggcgcttctaatctgattactctgaggagccatcaccagcgactatgtcgtagtgggtaaagctccctcttcggagggagcatcagag

SEQ ID NO: 9632 - DNA, 89 bp, synthetic construct
  misc_feature 1..89: note = engineered ribonucleic acid scaffold (ERS) sequence
  source 1..89: mol_type = other DNA
actggcgcttctactgattactctgaggagccatcaccagcgactatgtcgtagtgggtaaagctccctcttcggagggagcatcagag

SEQ ID NO: 9633 - DNA, 90 bp, synthetic construct
  misc_feature 1..90: note = engineered ribonucleic acid scaffold (ERS) sequence
  source 1..90: mol_type = other DNA
actggcgcttctaactgattactctgaggagccatcaccagcgactatgtcgtagtgggtaaagctccctcttcggagggagcatcagag

SEQ ID NO: 9634 - DNA, 90 bp, synthetic construct
  misc_feature 1..90: note = engineered ribonucleic acid scaffold (ERS) sequence
  source 1..90: mol_type = other DNA
actggcgcttctacctgattactctgaggagccatcaccagcgactatgtcgtagtgggtaaagctccctcttcggagggagcatcagag

SEQ ID NO: 9635 - DNA, 90 bp, synthetic construct
  misc_feature 1..90: note = engineered ribonucleic acid scaffold (ERS) sequence
  source 1..90: mol_type = other DNA
actggcgcttctagctgattactctgaggagccatcaccagcgactatgtcgtagtgggtaaagctccctcttcggagggagcatcagag

SEQ ID NO: 9636 - DNA, 92 bp, synthetic construct
  misc_feature 1..92: note = engineered ribonucleic acid scaffold (ERS) sequence
  source 1..92: mol_type = other DNA
actggcgcttctattactgattactctgaggagccatcaccagcgactatgtcgtagtgggtaaagctccctcttcggagggagcatcagag

SEQ ID NO: 9637 - DNA, 90 bp, synthetic construct
  misc_feature 1..90: note = engineered ribonucleic acid scaffold (ERS) sequence
  source 1..90: mol_type = other DNA
actggcgcttctatatgattactctgaggagccatcaccagcgactatgtcgtagtgggtaaagctccctcttcggagggagcatcagag

SEQ ID NO: 9638 - DNA, 90 bp, synthetic construct
  misc_feature 1..90: note = engineered ribonucleic acid scaffold (ERS) sequence
  source 1..90: mol_type = other DNA
actggcgcttctatgtgattactctgaggagccatcaccagcgactatgtcgtagtgggtaaagctccctcttcggagggagcatcagag

SEQ ID NO: 9639 - DNA, 90 bp, synthetic construct
  misc_feature 1..90: note = engineered ribonucleic acid scaffold (ERS) sequence
  source 1..90: mol_type = other DNA
actggcgcttctatttgattactctgaggagccatcaccagcgactatgtcgtagtgggtaaagctccctcttcggagggagcatcagag

SEQ ID NO: 9640 - DNA, 91 bp, synthetic construct
  misc_feature 1..91: note = engineered ribonucleic acid scaffold (ERS) sequence
  source 1..91: mol_type = other DNA
actggcgcttctatcttgattactctgaggagccatcaccagcgactatgtcgtagtgggtaaagctccctcttcggagggagcatcagag

SEQ ID NO: 9641 - DNA, 90 bp, synthetic construct
  misc_feature 1..90: note = engineered ribonucleic acid scaffold (ERS) sequence
  source 1..90: mol_type = other DNA
actggcgcttctatcagattactctgaggagccatcaccagcgactatgtcgtagtgggtaaagctccctcttcggagggagcatcagag

SEQ ID NO: 9642 - DNA, 90 bp, synthetic construct
  misc_feature 1..90: note = engineered ribonucleic acid scaffold (ERS) sequence
  source 1..90: mol_type = other DNA
actggcgcttctatcggattactctgaggagccatcaccagcgactatgtcgtagtgggtaaagctccctcttcggagggagcatcagag

SEQ ID NO: 9643 - DNA, 91 bp, synthetic construct
  misc_feature 1..91: note = engineered ribonucleic acid scaffold (ERS) sequence
  source 1..91: mol_type = other DNA
actggcgcttctatctgaattactctgaggagccatcaccagcgactatgtcgtagtgggtaaagctccctcttcggagggagcatcagag

SEQ ID NO: 9644 - DNA, 91 bp, synthetic construct
  misc_feature 1..91: note = engineered ribonucleic acid scaffold (ERS) sequence
  source 1..91: mol_type = other DNA
actggcgcttctatctgtattactctgaggagccatcaccagcgactatgtcgtagtgggtaaagctccctcttcggagggagcatcagag

SEQ ID NO: 9645 - DNA, 90 bp, synthetic construct
  misc_feature 1..90: note = engineered ribonucleic acid scaffold (ERS) sequence
  source 1..90: mol_type = other DNA
actggcgcttctatctggttactctgaggagccatcaccagcgactatgtcgtagtgggtaaagctccctcttcggagggagcatcagag

SEQ ID NO: 9646 - DNA, 90 bp, synthetic construct
  misc_feature 1..90: note = engineered ribonucleic acid scaffold (ERS) sequence
  source 1..90: mol_type = other DNA
actggcgcttctatctgtttactctgaggagccatcaccagcgactatgtcgtagtgggtaaagctccctcttcggagggagcatcagag

SEQ ID NO: 9647 - DNA, 91 bp, synthetic construct
  misc_feature 1..91: note = engineered ribonucleic acid scaffold (ERS) sequence
  source 1..91: mol_type = other DNA
actggcgcttctatctgatttactctgaggagccatcaccagcgactatgtcgtagtgggtaaagctccctcttcggagggagcatcagag

SEQ ID NO: 9648 - DNA, 90 bp, synthetic construct
  misc_feature 1..90: note = engineered ribonucleic acid scaffold (ERS) sequence
  source 1..90: mol_type = other DNA
actggcgcttctatctgattgctctgaggagccatcaccagcgactatgtcgtagtgggtaaagctccctcttcggagggagcatcagag

SEQ ID NO: 9649 - DNA, 91 bp, synthetic construct
  misc_feature 1..91: note = engineered ribonucleic acid scaffold (ERS) sequence
  source 1..91: mol_type = other DNA
actggcgcttctatatctgattactctgatagccatcaccagcgactatgtcgtagtgggtaaagctccctcttcggagggagcatcagag

SEQ ID NO: 9650 - DNA, 90 bp, synthetic construct
  misc_feature 1..90: note = engineered ribonucleic acid scaffold (ERS) sequence
  source 1..90: mol_type = other DNA
actggcgcttctaatctgattactctgatagccatcaccagcgactatgtcgtagtgggtaaagctccctcttcggagggagcatcagag

SEQ ID NO: 9651 - DNA, 88 bp, synthetic construct
  misc_feature 1..88: note = engineered ribonucleic acid scaffold (ERS) sequence
  source 1..88: mol_type = other DNA
actggcgcttctactgattactctgatagccatcaccagcgactatgtcgtagtgggtaaagctccctcttcggagggagcatcagag

SEQ ID NO: 9652 - DNA, 89 bp, synthetic construct
  misc_feature 1..89: note = engineered ribonucleic acid scaffold (ERS) sequence
  source 1..89: mol_type = other DNA
actggcgcttctaactgattactctgatagccatcaccagcgactatgtcgtagtgggtaaagctccctcttcggagggagcatcagag

SEQ ID NO: 9653 - DNA, 89 bp, synthetic construct
  misc_feature 1..89: note = engineered ribonucleic acid scaffold (ERS) sequence
  source 1..89: mol_type = other DNA
actggcgcttctacctgattactctgatagccatcaccagcgactatgtcgtagtgggtaaagctccctcttcggagggagcatcagag

SEQ ID NO: 9654 - DNA, 89 bp, synthetic construct
  misc_feature 1..89: note = engineered ribonucleic acid scaffold (ERS) sequence
  source 1..89: mol_type = other DNA
actggcgcttctagctgattactctgatagccatcaccagcgactatgtcgtagtgggtaaagctccctcttcggagggagcatcagag

SEQ ID NO: 9655 - DNA, 91 bp, synthetic construct
  misc_feature 1..91: note = engineered ribonucleic acid scaffold (ERS) sequence
  source 1..91: mol_type = other DNA
actggcgcttctattactgattactctgatagccatcaccagcgactatgtcgtagtgggtaaagctccctcttcggagggagcatcagag

SEQ ID NO: 9656 - DNA, 89 bp, synthetic construct
  misc_feature 1..89: note = engineered ribonucleic acid scaffold (ERS) sequence
  source 1..89: mol_type = other DNA
actggcgcttctatatgattactctgatagccatcaccagcgactatgtcgtagtgggtaaagctccctcttcggagggagcatcagag

SEQ ID NO: 9657 - DNA, 89 bp, synthetic construct
  misc_feature 1..89: note = engineered ribonucleic acid scaffold (ERS) sequence
  source 1..89: mol_type = other DNA
actggcgcttctatgtgattactctgatagccatcaccagcgactatgtcgtagtgggtaaagctccctcttcggagggagcatcagag

SEQ ID NO: 9658 - DNA, 89 bp, synthetic construct
  misc_feature 1..89: note = engineered ribonucleic acid scaffold (ERS) sequence
  source 1..89: mol_type = other DNA
actggcgcttctatttgattactctgatagccatcaccagcgactatgtcgtagtgggtaaagctccctcttcggagggagcatcagag

SEQ ID NO: 9659 - DNA, 90 bp, synthetic construct
  misc_feature 1..90: note = engineered ribonucleic acid scaffold (ERS) sequence
  source 1..90: mol_type = other DNA
actggcgcttctatcttgattactctgatagccatcaccagcgactatgtcgtagtgggtaaagctccctcttcggagggagcatcagag

SEQ ID NO: 9660 - DNA, 89 bp, synthetic construct
  misc_feature 1..89: note = engineered ribonucleic acid scaffold (ERS) sequence
  source 1..89: mol_type = other DNA
actggcgcttctatcagattactctgatagccatcaccagcgactatgtcgtagtgggtaaagctccctcttcggagggagcatcagag

SEQ ID NO: 9661 - DNA, 89 bp, synthetic construct
  misc_feature 1..89: note = engineered ribonucleic acid scaffold (ERS) sequence
  source 1..89: mol_type = other DNA
actggcgcttctatcggattactctgatagccatcaccagcgactatgtcgtagtgggtaaagctccctcttcggagggagcatcagag

SEQ ID NO: 9662 - DNA, 90 bp, synthetic construct
  misc_feature 1..90: note = engineered ribonucleic acid scaffold (ERS) sequence
  source 1..90: mol_type = other DNA
actggcgcttctatctgaattactctgatagccatcaccagcgactatgtcgtagtgggtaaagctccctcttcggagggagcatcagag

SEQ ID NO: 9663 - DNA, 90 bp, synthetic construct
  misc_feature 1..90: note = engineered ribonucleic acid scaffold (ERS) sequence
  source 1..90: mol_type = other DNA
actggcgcttctatctgtattactctgatagccatcaccagcgactatgtcgtagtgggtaaagctccctcttcggagggagcatcagag

SEQ ID NO: 9664 - DNA, 89 bp, synthetic construct
  misc_feature 1..89: note = engineered ribonucleic acid scaffold (ERS) sequence
  source 1..89: mol_type = other DNA
actggcgcttctatctggttactctgatagccatcaccagcgactatgtcgtagtgggtaaagctccctcttcggagggagcatcagag

SEQ ID NO: 9665 - DNA, 89 bp, synthetic construct
  misc_feature 1..89: note = engineered ribonucleic acid scaffold (ERS) sequence
  source 1..89: mol_type = other DNA
actggcgcttctatctgtttactctgatagccatcaccagcgactatgtcgtagtgggtaaagctccctcttcggagggagcatcagag

SEQ ID NO: 9666 - DNA, 90 bp, synthetic construct
  misc_feature 1..90: note = engineered ribonucleic acid scaffold (ERS) sequence
  source 1..90: mol_type = other DNA
actggcgcttctatctgatttactctgatagccatcaccagcgactatgtcgtagtgggtaaagctccctcttcggagggagcatcagag

SEQ ID NO: 9667 - DNA, 89 bp, synthetic construct
  misc_feature 1..89: note = engineered ribonucleic acid scaffold (ERS) sequence
  source 1..89: mol_type = other DNA
actggcgcttctatctgattgctctgatagccatcaccagcgactatgtcgtagtgggtaaagctccctcttcggagggagcatcagag

SEQ ID NO: 9668 - DNA, 92 bp, synthetic construct
  misc_feature 1..92: note = engineered ribonucleic acid scaffold (ERS) sequence
  source 1..92: mol_type = other DNA
actggcgcttctatatctgattactctgagctgccatcaccagcgactatgtcgtagtgggtaaagctccctcttcggagggagcatcagag

SEQ ID NO: 9669 - DNA, 91 bp, synthetic construct
  misc_feature 1..91: note = engineered ribonucleic acid scaffold (ERS) sequence
  source 1..91: mol_type = other DNA
actggcgcttctaatctgattactctgagctgccatcaccagcgactatgtcgtagtgggtaaagctccctcttcggagggagcatcagag

SEQ ID NO: 9670 - DNA, 89 bp, synthetic construct
  misc_feature 1..89: note = engineered ribonucleic acid scaffold (ERS) sequence
  source 1..89: mol_type = other DNA
actggcgcttctactgattactctgagctgccatcaccagcgactatgtcgtagtgggtaaagctccctcttcggagggagcatcagag

SEQ ID NO: 9671 - DNA, 90 bp, synthetic construct
  misc_feature 1..90: note = engineered ribonucleic acid scaffold (ERS) sequence
  source 1..90: mol_type = other DNA
actggcgcttctaactgattactctgagctgccatcaccagcgactatgtcgtagtgggtaaagctccctcttcggagggagcatcagag

SEQ ID NO: 9672 - DNA, 90 bp, synthetic construct
  misc_feature 1..90: note = engineered ribonucleic acid scaffold (ERS) sequence
  source 1..90: mol_type = other DNA
actggcgcttctacctgattactctgagctgccatcaccagcgactatgtcgtagtgggtaaagctccctcttcggagggagcatcagag

SEQ ID NO: 9673 - DNA, 90 bp, synthetic construct
  misc_feature 1..90: note = engineered ribonucleic acid scaffold (ERS) sequence
  source 1..90: mol_type = other DNA
actggcgcttctagctgattactctgagctgccatcaccagcgactatgtcgtagtgggtaaagctccctcttcggagggagcatcagag

SEQ ID NO: 9674 - DNA, 92 bp, synthetic construct
  misc_feature 1..92: note = engineered ribonucleic acid scaffold (ERS) sequence
  source 1..92: mol_type = other DNA
actggcgcttctattactgattactctgagctgccatcaccagcgactatgtcgtagtgggtaaagctccctcttcggagggagcatcagag

SEQ ID NO: 9675 - DNA, 90 bp, synthetic construct
  misc_feature 1..90: note = engineered ribonucleic acid scaffold (ERS) sequence
  source 1..90: mol_type = other DNA
actggcgcttctatatgattactctgagctgccatcaccagcgactatgtcgtagtgggtaaagctccctcttcggagggagcatcagag

SEQ ID NO: 9676 - DNA, 90 bp, synthetic construct
  misc_feature 1..90: note = engineered ribonucleic acid scaffold (ERS) sequence
  source 1..90: mol_type = other DNA
actggcgcttctatgtgattactctgagctgccatcaccagcgactatgtcgtagtgggtaaagctccctcttcggagggagcatcagag

SEQ ID NO: 9677 - DNA, 90 bp, synthetic construct
  misc_feature 1..90: note = engineered ribonucleic acid scaffold (ERS) sequence
  source 1..90: mol_type = other DNA
actggcgcttctatttgattactctgagctgccatcaccagcgactatgtcgtagtgggtaaagctccctcttcggagggagcatcagag

SEQ ID NO: 9678 - DNA, 91 bp, synthetic construct
  misc_feature 1..91: note = engineered ribonucleic acid scaffold (ERS) sequence
  source 1..91: mol_type = other DNA
actggcgcttctatcttgattactctgagctgccatcaccagcgactatgtcgtagtgggtaaagctccctcttcggagggagcatcagag

SEQ ID NO: 9679 - DNA, 90 bp, synthetic construct
  misc_feature 1..90: note = engineered ribonucleic acid scaffold (ERS) sequence
  source 1..90: mol_type = other DNA
actggcgcttctatcagattactctgagctgccatcaccagcgactatgtcgtagtgggtaaagctccctcttcggagggagcatcagag

SEQ ID NO: 9680 - DNA, 90 bp, synthetic construct
  misc_feature 1..90: note = engineered ribonucleic acid scaffold (ERS) sequence
  source 1..90: mol_type = other DNA
actggcgcttctatcggattactctgagctgccatcaccagcgactatgtcgtagtgggtaaagctccctcttcggagggagcatcagag

SEQ ID NO: 9681 - DNA, 91 bp, synthetic construct
  misc_feature 1..91: note = engineered ribonucleic acid scaffold (ERS) sequence
  source 1..91: mol_type = other DNA
actggcgcttctatctgaattactctgagctgccatcaccagcgactatgtcgtagtgggtaaagctccctcttcggagggagcatcagag

SEQ ID NO: 9682 - DNA, 91 bp, synthetic construct
  misc_feature 1..91: note = engineered ribonucleic acid scaffold (ERS) sequence
  source 1..91: mol_type = other DNA
actggcgcttctatctgtattactctgagctgccatcaccagcgactatgtcgtagtgggtaaagctccctcttcggagggagcatcagag

SEQ ID NO: 9683 - DNA, 90 bp, synthetic construct
  misc_feature 1..90: note = engineered ribonucleic acid scaffold (ERS) sequence
  source 1..90: mol_type = other DNA
actggcgcttctatctggttactctgagctgccatcaccagcgactatgtcgtagtgggtaaagctccctcttcggagggagcatcagag

SEQ ID NO: 9684 - DNA, 90 bp, synthetic construct
  misc_feature 1..90: note = engineered ribonucleic acid scaffold (ERS) sequence
  source 1..90: mol_type = other DNA
actggcgcttctatctgtttactctgagctgccatcaccagcgactatgtcgtagtgggtaaagctccctcttcggagggagcatcagag

SEQ ID NO: 9685 - DNA, 91 bp, synthetic construct
  misc_feature 1..91: note = engineered ribonucleic acid scaffold (ERS) sequence
  source 1..91: mol_type = other DNA
actggcgcttctatctgatttactctgagctgccatcaccagcgactatgtcgtagtgggtaaagctccctcttcggagggagcatcagag

SEQ ID NO: 9686 - DNA, 90 bp, synthetic construct
  misc_feature 1..90: note = engineered ribonucleic acid scaffold (ERS) sequence
  source 1..90: mol_type = other DNA
actggcgcttctatctgattgctctgagctgccatcaccagcgactatgtcgtagtgggtaaagctccctcttcggagggagcatcagag

SEQ ID NO: 9687 - DNA, 92 bp, synthetic construct
  misc_feature 1..92: note = engineered ribonucleic acid scaffold (ERS) sequence
  source 1..92: mol_type = other DNA
actggcacttctatatctgattactctgagtagccatcaccagcgactatgtcgtagtgggtaaagctccctcttcggagggagcatcagag

SEQ ID NO: 9688 - DNA, 91 bp, synthetic construct
  misc_feature 1..91: note = engineered ribonucleic acid scaffold (ERS) sequence
  source 1..91: mol_type = other DNA
actggcacttctaatctgattactctgagtagccatcaccagcgactatgtcgtagtgggtaaagctccctcttcggagggagcatcagag

SEQ ID NO: 9689 - DNA, 89 bp, synthetic construct
  misc_feature 1..89: note = engineered ribonucleic acid scaffold (ERS) sequence
  source 1..89: mol_type = other DNA
actggcacttctactgattactctgagtagccatcaccagcgactatgtcgtagtgggtaaagctccctcttcggagggagcatcagag

SEQ ID NO: 9690 - DNA, 90 bp, synthetic construct
  misc_feature 1..90: note = engineered ribonucleic acid scaffold (ERS) sequence
  source 1..90: mol_type = other DNA
actggcacttctaactgattactctgagtagccatcaccagcgactatgtcgtagtgggtaaagctccctcttcggagggagcatcagag

SEQ ID NO: 9691 - DNA, 90 bp, synthetic construct
  misc_feature 1..90: note = engineered ribonucleic acid scaffold (ERS) sequence
  source 1..90: mol_type = other DNA
actggcacttctacctgattactctgagtagccatcaccagcgactatgtcgtagtgggtaaagctccctcttcggagggagcatcagag

SEQ ID NO: 9692 - DNA, 90 bp, synthetic construct
  misc_feature 1..90: note = engineered ribonucleic acid scaffold (ERS) sequence
  source 1..90: mol_type = other DNA
actggcacttctagctgattactctgagtagccatcaccagcgactatgtcgtagtgggtaaagctccctcttcggagggagcatcagag

SEQ ID NO: 9693 - DNA, 92 bp, synthetic construct
  misc_feature 1..92: note = engineered ribonucleic acid scaffold (ERS) sequence
  source 1..92: mol_type = other DNA
actggcacttctattactgattactctgagtagccatcaccagcgactatgtcgtagtgggtaaagctccctcttcggagggagcatcagag

SEQ ID NO: 9694 - DNA, 90 bp, synthetic construct
  misc_feature 1..90: note = engineered ribonucleic acid scaffold (ERS) sequence
  source 1..90: mol_type = other DNA
actggcacttctatatgattactctgagtagccatcaccagcgactatgtcgtagtgggtaaagctccctcttcggagggagcatcagag

SEQ ID NO: 9695 - DNA, 90 bp, synthetic construct
  misc_feature 1..90: note = engineered ribonucleic acid scaffold (ERS) sequence
  source 1..90: mol_type = other DNA
actggcacttctatgtgattactctgagtagccatcaccagcgactatgtcgtagtgggtaaagctccctcttcggagggagcatcagag

SEQ ID NO: 9696 - DNA, 90 bp, synthetic construct
  misc_feature 1..90: note = engineered ribonucleic acid scaffold (ERS) sequence
  source 1..90: mol_type = other DNA
actggcacttctatttgattactctgagtagccatcaccagcgactatgtcgtagtgggtaaagctccctcttcggagggagcatcagag

SEQ ID NO: 9697 - DNA, 91 bp, synthetic construct
  misc_feature 1..91: note = engineered ribonucleic acid scaffold (ERS) sequence
  source 1..91: mol_type = other DNA
actggcacttctatcttgattactctgagtagccatcaccagcgactatgtcgtagtgggtaaagctccctcttcggagggagcatcagag

SEQ ID NO: 9698 - DNA, 90 bp, synthetic construct
  misc_feature 1..90: note = engineered ribonucleic acid scaffold (ERS) sequence
  source 1..90: mol_type = other DNA
actggcacttctatcagattactctgagtagccatcaccagcgactatgtcgtagtgggtaaagctccctcttcggagggagcatcagag

SEQ ID NO: 9699 - DNA, 90 bp, synthetic construct
  misc_feature 1..90: note = engineered ribonucleic acid scaffold (ERS) sequence
  source 1..90: mol_type = other DNA
actggcacttctatcggattactctgagtagccatcaccagcgactatgtcgtagtgggtaaagctccctcttcggagggagcatcagag

SEQ ID NO: 9700 - DNA, 91 bp, synthetic construct
  misc_feature 1..91: note = engineered ribonucleic acid scaffold (ERS) sequence
  source 1..91: mol_type = other DNA
actggcacttctatctgaattactctgagtagccatcaccagcgactatgtcgtagtgggtaaagctccctcttcggagggagcatcagag

SEQ ID NO: 9701 - DNA, 91 bp, synthetic construct
  misc_feature 1..91: note = engineered ribonucleic acid scaffold (ERS) sequence
  source 1..91: mol_type = other DNA
actggcacttctatctgtattactctgagtagccatcaccagcgactatgtcgtagtgggtaaagctccctcttcggagggagcatcagag

SEQ ID NO: 9702 - DNA, 90 bp, synthetic construct
  misc_feature 1..90: note = engineered ribonucleic acid scaffold (ERS) sequence
  source 1..90: mol_type = other DNA
actggcacttctatctggttactctgagtagccatcaccagcgactatgtcgtagtgggtaaagctccctcttcggagggagcatcagag

SEQ ID NO: 9703 - DNA, 90 bp, synthetic construct
  misc_feature 1..90: note = engineered ribonucleic acid scaffold (ERS) sequence
  source 1..90: mol_type = other DNA
actggcacttctatctgtttactctgagtagccatcaccagcgactatgtcgtagtgggtaaagctccctcttcggagggagcatcagag

SEQ ID NO: 9704 - DNA, 91 bp, synthetic construct
  misc_feature 1..91: note = engineered ribonucleic acid scaffold (ERS) sequence
  source 1..91: mol_type = other DNA
actggcacttctatctgatttactctgagtagccatcaccagcgactatgtcgtagtgggtaaagctccctcttcggagggagcatcagag

SEQ ID NO: 9705 - DNA, 90 bp, synthetic construct
  misc_feature 1..90: note = engineered ribonucleic acid scaffold (ERS) sequence
  source 1..90: mol_type = other DNA
actggcacttctatctgattgctctgagtagccatcaccagcgactatgtcgtagtgggtaaagctccctcttcggagggagcatcagag

SEQ ID NO: 9706 - DNA, 92 bp, synthetic construct
  misc_feature 1..92: note = engineered ribonucleic acid scaffold (ERS) sequence
  source 1..92: mol_type = other DNA
actggcgcttctatatctgattactctgagtagccatcaccagcgactatgtcgtagtgggtaaagctccctcttcggagggagcatcagag

SEQ ID NO: 9707 - DNA, 91 bp, synthetic construct
  misc_feature 1..91: note = engineered ribonucleic acid scaffold (ERS) sequence
  source 1..91: mol_type = other DNA
actggcgcttctaatctgattactctgagtagccatcaccagcgactatgtcgtagtgggtaaagctccctcttcggagggagcatcagag

SEQ ID NO: 9708 - DNA, 89 bp, synthetic construct
  misc_feature 1..89: note = engineered ribonucleic acid scaffold (ERS) sequence
  source 1..89: mol_type = other DNA
actggcgcttctactgattactctgagtagccatcaccagcgactatgtcgtagtgggtaaagctccctcttcggagggagcatcagag

SEQ ID NO: 9709 - DNA, 90 bp, synthetic construct
  misc_feature 1..90: note = engineered ribonucleic acid scaffold (ERS) sequence
  source 1..90: mol_type = other DNA
actggcgcttctaactgattactctgagtagccatcaccagcgactatgtcgtagtgggtaaagctccctcttcggagggagcatcagag

SEQ ID NO: 9710 - DNA, 90 bp, synthetic construct
  misc_feature 1..90: note = engineered ribonucleic acid scaffold (ERS) sequence
  source 1..90: mol_type = other DNA
actggcgcttctacctgattactctgagtagccatcaccagcgactatgtcgtagtgggtaaagctccctcttcggagggagcatcagag

SEQ ID NO: 9711 - DNA, 90 bp, synthetic construct
  misc_feature 1..90: note = engineered ribonucleic acid scaffold (ERS) sequence
  source 1..90: mol_type = other DNA
actggcgcttctagctgattactctgagtagccatcaccagcgactatgtcgtagtgggtaaagctccctcttcggagggagcatcagag

SEQ ID NO: 9712 - DNA, 92 bp, synthetic construct
  misc_feature 1..92: note = engineered ribonucleic acid scaffold (ERS) sequence
  source 1..92: mol_type = other DNA
actggcgcttctattactgattactctgagtagccatcaccagcgactatgtcgtagtgggtaaagctccctcttcggagggagcatcagag

SEQ ID NO: 9713 - DNA, 90 bp, synthetic construct
  misc_feature 1..90: note = engineered ribonucleic acid scaffold (ERS) sequence
  source 1..90: mol_type = other DNA
actggcgcttctatatgattactctgagtagccatcaccagcgactatgtcgtagtgggtaaagctccctcttcggagggagcatcagag

SEQ ID NO: 9714 - DNA, 90 bp, synthetic construct
  misc_feature 1..90: note = engineered ribonucleic acid scaffold (ERS) sequence
  source 1..90: mol_type = other DNA
actggcgcttctatgtgattactctgagtagccatcaccagcgactatgtcgtagtgggtaaagctccctcttcggagggagcatcagag

SEQ ID NO: 9715 - DNA, 90 bp, synthetic construct
  misc_feature 1..90: note = engineered ribonucleic acid scaffold (ERS) sequence
  source 1..90: mol_type = other DNA
actggcgcttctatttgattactctgagtagccatcaccagcgactatgtcgtagtgggtaaagctccctcttcggagggagcatcagag

SEQ ID NO: 9716 - DNA, 91 bp, synthetic construct
  misc_feature 1..91: note = engineered ribonucleic acid scaffold (ERS) sequence
  source 1..91: mol_type = other DNA
actggcgcttctatcttgattactctgagtagccatcaccagcgactatgtcgtagtgggtaaagctccctcttcggagggagcatcagag

SEQ ID NO: 9717 - DNA, 90 bp, synthetic construct
  misc_feature 1..90: note = engineered ribonucleic acid scaffold (ERS) sequence
  source 1..90: mol_type = other DNA
actggcgcttctatcagattactctgagtagccatcaccagcgactatgtcgtagtgggtaaagctccctcttcggagggagcatcagag

SEQ ID NO: 9718 - DNA, 90 bp, synthetic construct
  misc_feature 1..90: note = engineered ribonucleic acid scaffold (ERS) sequence
  source 1..90: mol_type = other DNA
actggcgcttctatcggattactctgagtagccatcaccagcgactatgtcgtagtgggtaaagctccctcttcggagggagcatcagag

SEQ ID NO: 9719 - DNA, 91 bp, synthetic construct
  misc_feature 1..91: note = engineered ribonucleic acid scaffold (ERS) sequence
  source 1..91: mol_type = other DNA
actggcgcttctatctgaattactctgagtagccatcaccagcgactatgtcgtagtgggtaaagctccctcttcggagggagcatcagag

SEQ ID NO: 9720 - DNA, 91 bp, synthetic construct
  misc_feature 1..91: note = engineered ribonucleic acid scaffold (ERS) sequence
  source 1..91: mol_type = other DNA
actggcgcttctatctgtattactctgagtagccatcaccagcgactatgtcgtagtgggtaaagctccctcttcggagggagcatcagag

SEQ ID NO: 9721 - DNA, 90 bp, synthetic construct
  misc_feature 1..90: note = engineered ribonucleic acid scaffold (ERS) sequence
  source 1..90: mol_type = other DNA
actggcgcttctatctggttactctgagtagccatcaccagcgactatgtcgtagtgggtaaagctccctcttcggagggagcatcagag

SEQ ID NO: 9722 - DNA, 90 bp, synthetic construct
  misc_feature 1..90: note = engineered ribonucleic acid scaffold (ERS) sequence
  source 1..90: mol_type = other DNA
actggcgcttctatctgtttactctgagtagccatcaccagcgactatgtcgtagtgggtaaagctccctcttcggagggagcatcagag

SEQ ID NO: 9723 - DNA, 91 bp, synthetic construct
  misc_feature 1..91: note = engineered ribonucleic acid scaffold (ERS) sequence
  source 1..91: mol_type = other DNA
actggcgcttctatctgatttactctgagtagccatcaccagcgactatgtcgtagtgggtaaagctccctcttcggagggagcatcagag

SEQ ID NO: 9724 - DNA, 90 bp, synthetic construct
  misc_feature 1..90: note = engineered ribonucleic acid scaffold (ERS) sequence
  source 1..90: mol_type = other DNA
actggcgcttctatctgattgctctgagtagccatcaccagcgactatgtcgtagtgggtaaagctccctcttcggagggagcatcagag

SEQ ID NO: 9725 - DNA, 91 bp, synthetic construct
  misc_feature 1..91: note = engineered ribonucleic acid scaffold (ERS) sequence
  source 1..91: mol_type = other DNA
actggcacttctatatctgattactctgagcgccatcaccagcgactatgtcgtagtgggtaaagctccctcttcggagggagcatcagag

SEQ ID NO: 9726 - DNA, 90 bp, synthetic construct
  misc_feature 1..90: note = engineered ribonucleic acid scaffold (ERS) sequence
  source 1..90: mol_type = other DNA
actggcacttctaatctgattactctgagcgccatcaccagcgactatgtcgtagtgggtaaagctccctcttcggagggagcatcagag

SEQ ID NO: 9727 - DNA, 88 bp, synthetic construct
  misc_feature 1..88: note = engineered ribonucleic acid scaffold (ERS) sequence
  source 1..88: mol_type = other DNA
actggcacttctactgattactctgagcgccatcaccagcgactatgtcgtagtgggtaaagctccctcttcggagggagcatcagag

SEQ ID NO: 9728 - DNA, 89 bp, synthetic construct
  misc_feature 1..89: note = engineered ribonucleic acid scaffold (ERS) sequence
  source 1..89: mol_type = other DNA
actggcacttctaactgattactctgagcgccatcaccagcgactatgtcgtagtgggtaaagctccctcttcggagggagcatcagag

SEQ ID NO: 9729 - DNA, 89 bp, synthetic construct
  misc_feature 1..89: note = engineered ribonucleic acid scaffold (ERS) sequence
  source 1..89: mol_type = other DNA
actggcacttctacctgattactctgagcgccatcaccagcgactatgtcgtagtgggtaaagctccctcttcggagggagcatcagag

SEQ ID NO: 9730 - DNA, 89 bp, synthetic construct
  misc_feature 1..89: note = engineered ribonucleic acid scaffold (ERS) sequence
  source 1..89: mol_type = other DNA
actggcacttctagctgattactctgagcgccatcaccagcgactatgtcgtagtgggtaaagctccctcttcggagggagcatcagag

SEQ ID NO: 9731 - DNA, 91 bp, synthetic construct
  misc_feature 1..91: note = engineered ribonucleic acid scaffold (ERS) sequence
  source 1..91: mol_type = other DNA
actggcacttctattactgattactctgagcgccatcaccagcgactatgtcgtagtgggtaaagctccctcttcggagggagcatcagag

SEQ ID NO: 9732 - DNA, 89 bp, synthetic construct
  misc_feature 1..89: note = engineered ribonucleic acid scaffold (ERS) sequence
  source 1..89: mol_type = other DNA
actggcacttctatatgattactctgagcgccatcaccagcgactatgtcgtagtgggtaaagctccctcttcggagggagcatcagag

SEQ ID NO: 9733 - DNA, 89 bp, synthetic construct
  misc_feature 1..89: note = engineered ribonucleic acid scaffold (ERS) sequence
  source 1..89: mol_type = other DNA
actggcacttctatgtgattactctgagcgccatcaccagcgactatgtcgtagtgggtaaagctccctcttcggagggagcatcagag

SEQ ID NO: 9734 - DNA, 89 bp, synthetic construct
  misc_feature 1..89: note = engineered ribonucleic acid scaffold (ERS) sequence
  source 1..89: mol_type = other DNA
actggcacttctatttgattactctgagcgccatcaccagcgactatgtcgtagtgggtaaagctccctcttcggagggagcatcagag

SEQ ID NO: 9735 - DNA, 90 bp, synthetic construct
  misc_feature 1..90: note = engineered ribonucleic acid scaffold (ERS) sequence
  source 1..90: mol_type = other DNA
actggcacttctatcttgattactctgagcgccatcaccagcgactatgtcgtagtgggtaaagctccctcttcggagggagcatcagag

SEQ ID NO: 9736 - DNA, 89 bp, synthetic construct
  misc_feature 1..89: note = engineered ribonucleic acid scaffold (ERS) sequence
  source 1..89: mol_type = other DNA
actggcacttctatcagattactctgagcgccatcaccagcgactatgtcgtagtgggtaaagctccctcttcggagggagcatcagag

SEQ ID NO: 9737 - DNA, 89 bp, synthetic construct
  misc_feature 1..89: note = engineered ribonucleic acid scaffold (ERS) sequence
  source 1..89: mol_type = other DNA
actggcacttctatcggattactctgagcgccatcaccagcgactatgtcgtagtgggtaaagctccctcttcggagggagcatcagag

SEQ ID NO: 9738 - DNA, 90 bp, synthetic construct
  misc_feature 1..90: note = engineered ribonucleic acid scaffold (ERS) sequence
  source 1..90: mol_type = other DNA
actggcacttctatctgaattactctgagcgccatcaccagcgactatgtcgtagtgggtaaagctccctcttcggagggagcatcagag

SEQ ID NO: 9739 - DNA, 90 bp, synthetic construct
  misc_feature 1..90: note = engineered ribonucleic acid scaffold (ERS) sequence
  source 1..90: mol_type = other DNA
actggcacttctatctgtattactctgagcgccatcaccagcgactatgtcgtagtgggtaaagctccctcttcggagggagcatcagag

SEQ ID NO: 9740 - DNA, 89 bp, synthetic construct
  misc_feature 1..89: note = engineered ribonucleic acid scaffold (ERS) sequence
  source 1..89: mol_type = other DNA
actggcacttctatctggttactctgagcgccatcaccagcgactatgtcgtagtgggtaaagctccctcttcggagggagcatcagag

SEQ ID NO: 9741 - DNA, 89 bp, synthetic construct
  misc_feature 1..89: note = engineered ribonucleic acid scaffold (ERS) sequence
  source 1..89: mol_type = other DNA
actggcacttctatctgtttactctgagcgccatcaccagcgactatgtcgtagtgggtaaagctccctcttcggagggagcatcagag

SEQ ID NO: 9742 - DNA, 90 bp, synthetic construct
  misc_feature 1..90: note = engineered ribonucleic acid scaffold (ERS) sequence
  source 1..90: mol_type = other DNA
actggcacttctatctgatttactctgagcgccatcaccagcgactatgtcgtagtgggtaaagctccctcttcggagggagcatcagag

SEQ ID NO: 9743 - DNA, 89 bp, synthetic construct
  misc_feature 1..89: note = engineered ribonucleic acid scaffold (ERS) sequence
  source 1..89: mol_type = other DNA
actggcacttctatctgattgctctgagcgccatcaccagcgactatgtcgtagtgggtaaagctccctcttcggagggagcatcagag

SEQ ID NO: 9744 - DNA, 91 bp, synthetic construct
  misc_feature 1..91: note = engineered ribonucleic acid scaffold (ERS) sequence
  source 1..91: mol_type = other DNA
actggcgcttctatatctgattactctgagcaccatcaccagcgactatgtcgtagtgggtaaagctccctcttcggagggagcatcagag

SEQ ID NO: 9745 - DNA, 90 bp, synthetic construct
  misc_feature 1..90: note = engineered ribonucleic acid scaffold (ERS) sequence
  source 1..90: mol_type = other DNA
actggcgcttctaatctgattactctgagcaccatcaccagcgactatgtcgtagtgggtaaagctccctcttcggagggagcatcagag

SEQ ID NO: 9746 - DNA, 88 bp, synthetic construct
  misc_feature 1..88: note = engineered ribonucleic acid scaffold (ERS) sequence
  source 1..88: mol_type = other DNA
actggcgcttctactgattactctgagcaccatcaccagcgactatgtcgtagtgggtaaagctccctcttcggagggagcatcagag

SEQ ID NO: 9747 - DNA, 89 bp, synthetic construct
  misc_feature 1..89: note = engineered ribonucleic acid scaffold (ERS) sequence
  source 1..89: mol_type = other DNA
actggcgcttctaactgattactctgagcaccatcaccagcgactatgtcgtagtgggtaaagctccctcttcggagggagcatcagag

SEQ ID NO: 9748 - DNA, 89 bp, synthetic construct
  misc_feature 1..89: note = engineered ribonucleic acid scaffold (ERS) sequence
  source 1..89: mol_type = other DNA
actggcgcttctacctgattactctgagcaccatcaccagcgactatgtcgtagtgggtaaagctccctcttcggagggagcatcagag

SEQ ID NO: 9749 - DNA, 89 bp, synthetic construct
  misc_feature 1..89: note = engineered ribonucleic acid scaffold (ERS) sequence
  source 1..89: mol_type = other DNA
actggcgcttctagctgattactctgagcaccatcaccagcgactatgtcgtagtgggtaaagctccctcttcggagggagcatcagag

SEQ ID NO: 9750 - DNA, 91 bp, synthetic construct
  misc_feature 1..91: note = engineered ribonucleic acid scaffold (ERS) sequence
  source 1..91: mol_type = other DNA
actggcgcttctattactgattactctgagcaccatcaccagcgactatgtcgtagtgggtaaagctccctcttcggagggagcatcagag

SEQ ID NO: 9751 - DNA, 89 bp, synthetic construct
  misc_feature 1..89: note = engineered ribonucleic acid scaffold (ERS) sequence
  source 1..89: mol_type = other DNA
actggcgcttctatatgattactctgagcaccatcaccagcgactatgtcgtagtgggtaaagctccctcttcggagggagcatcagag

SEQ ID NO: 9752 - DNA, 89 bp, synthetic construct
  misc_feature 1..89: note = engineered ribonucleic acid scaffold (ERS) sequence
  source 1..89: mol_type = other DNA
actggcgcttctatgtgattactctgagcaccatcaccagcgactatgtcgtagtgggtaaagctccctcttcggagggagcatcagag

SEQ ID NO: 9753 - DNA, 89 bp, synthetic construct
  misc_feature 1..89: note = engineered ribonucleic acid scaffold (ERS) sequence
  source 1..89: mol_type = other DNA
actggcgcttctatttgattactctgagcaccatcaccagcgactatgtcgtagtgggtaaagctccctcttcggagggagcatcagag

SEQ ID NO: 9754 - DNA, 90 bp, synthetic construct
  misc_feature 1..90: note = engineered ribonucleic acid scaffold (ERS) sequence
  source 1..90: mol_type = other DNA
actggcgcttctatcttgattactctgagcaccatcaccagcgactatgtcgtagtgggtaaagctccctcttcggagggagcatcagag

SEQ ID NO: 9755 - DNA, 89 bp, synthetic construct
  misc_feature 1..89: note = engineered ribonucleic acid scaffold (ERS) sequence
  source 1..89: mol_type = other DNA
actggcgcttctatcagattactctgagcaccatcaccagcgactatgtcgtagtgggtaaagctccctcttcggagggagcatcagag

SEQ ID NO: 9756 - DNA, 89 bp, synthetic construct
  misc_feature 1..89: note = engineered ribonucleic acid scaffold (ERS) sequence
  source 1..89: mol_type = other DNA
actggcgcttctatcggattactctgagcaccatcaccagcgactatgtcgtagtgggtaaagctccctcttcggagggagcatcagag

SEQ ID NO: 9757 - DNA, 90 bp, synthetic construct
  misc_feature 1..90: note = engineered ribonucleic acid scaffold (ERS) sequence
  source 1..90: mol_type = other DNA
actggcgcttctatctgaattactctgagcaccatcaccagcgactatgtcgtagtgggtaaagctccctcttcggagggagcatcagag

SEQ ID NO: 9758 - DNA, 90 bp, synthetic construct
  misc_feature 1..90: note = engineered ribonucleic acid scaffold (ERS) sequence
  source 1..90: mol_type = other DNA
actggcgcttctatctgtattactctgagcaccatcaccagcgactatgtcgtagtgggtaaagctccctcttcggagggagcatcagag

SEQ ID NO: 9759 - DNA, 89 bp, synthetic construct
  misc_feature 1..89: note = engineered ribonucleic acid scaffold (ERS) sequence
  source 1..89: mol_type = other DNA
actggcgcttctatctggttactctgagcaccatcaccagcgactatgtcgtagtgggtaaagctccctcttcggagggagcatcagag

SEQ ID NO: 9760 - DNA, 89 bp, synthetic construct
  misc_feature 1..89: note = engineered ribonucleic acid scaffold (ERS) sequence
  source 1..89: mol_type = other DNA
actggcgcttctatctgtttactctgagcaccatcaccagcgactatgtcgtagtgggtaaagctccctcttcggagggagcatcagag

SEQ ID NO: 9761 - DNA, 90 bp, synthetic construct
  misc_feature 1..90: note = engineered ribonucleic acid scaffold (ERS) sequence
  source 1..90: mol_type = other DNA
actggcgcttctatctgatttactctgagcaccatcaccagcgactatgtcgtagtgggtaaagctccctcttcggagggagcatcagag

SEQ ID NO: 9762 - DNA, 89 bp, synthetic construct
  misc_feature 1..89: note = engineered ribonucleic acid scaffold (ERS) sequence
  source 1..89: mol_type = other DNA
actggcgcttctatctgattgctctgagcaccatcaccagcgactatgtcgtagtgggtaaagctccctcttcggagggagcatcagag

SEQ ID NO: 9763 - DNA, 91 bp, synthetic construct
  misc_feature 1..91: note = engineered ribonucleic acid scaffold (ERS) sequence
  source 1..91: mol_type = other DNA
actggcgcttctatatctgattactctgagggccatcaccagcgactatgtcgtagtgggtaaagctccctcttcggagggagcatcagag

SEQ ID NO: 9764 - DNA, 90 bp, synthetic construct
  misc_feature 1..90: note = engineered ribonucleic acid scaffold (ERS) sequence
  source 1..90: mol_type = other DNA
actggcgcttctaatctgattactctgagggccatcaccagcgactatgtcgtagtgggtaaagctccctcttcggagggagcatcagag

SEQ ID NO: 9765 - DNA, 88 bp, synthetic construct
  misc_feature 1..88: note = engineered ribonucleic acid scaffold (ERS) sequence
  source 1..88: mol_type = other DNA
actggcgcttctactgattactctgagggccatcaccagcgactatgtcgtagtgggtaaagctccctcttcggagggagcatcagag

SEQ ID NO: 9766 - DNA, 89 bp, synthetic construct
  misc_feature 1..89: note = engineered ribonucleic acid scaffold (ERS) sequence
  source 1..89: mol_type = other DNA
actggcgcttctaactgattactctgagggccatcaccagcgactatgtcgtagtgggtaaagctccctcttcggagggagcatcagag

SEQ ID NO: 9767 - DNA, 89 bp, synthetic construct
  misc_feature 1..89: note = engineered ribonucleic acid scaffold (ERS) sequence
  source 1..89: mol_type = other DNA
actggcgcttctacctgattactctgagggccatcaccagcgactatgtcgtagtgggtaaagctccctcttcggagggagcatcagag

SEQ ID NO: 9768 - DNA, 89 bp, synthetic construct
  misc_feature 1..89: note = engineered ribonucleic acid scaffold (ERS) sequence
  source 1..89: mol_type = other DNA
actggcgcttctagctgattactctgagggccatcaccagcgactatgtcgtagtgggtaaagctccctcttcggagggagcatcagag

SEQ ID NO: 9769 - DNA, 91 bp, synthetic construct
  misc_feature 1..91: note = engineered ribonucleic acid scaffold (ERS) sequence
  source 1..91: mol_type = other DNA
actggcgcttctattactgattactctgagggccatcaccagcgactatgtcgtagtgggtaaagctccctcttcggagggagcatcagag

SEQ ID NO: 9770 - DNA, 89 bp, synthetic construct
  misc_feature 1..89: note = engineered ribonucleic acid scaffold (ERS) sequence
  source 1..89: mol_type = other DNA
actggcgcttctatatgattactctgagggccatcaccagcgactatgtcgtagtgggtaaagctccctcttcggagggagcatcagag

SEQ ID NO: 9771 - DNA, 89 bp, synthetic construct
  misc_feature 1..89: note = engineered ribonucleic acid scaffold (ERS) sequence
  source 1..89: mol_type = other DNA
actggcgcttctatgtgattactctgagggccatcaccagcgactatgtcgtagtgggtaaagctccctcttcggagggagcatcagag

SEQ ID NO: 9772 - DNA, 89 bp, synthetic construct
  misc_feature 1..89: note = engineered ribonucleic acid scaffold (ERS) sequence
  source 1..89: mol_type = other DNA
actggcgcttctatttgattactctgagggccatcaccagcgactatgtcgtagtgggtaaagctccctcttcggagggagcatcagag

SEQ ID NO: 9773 - DNA, 90 bp, synthetic construct
  misc_feature 1..90: note = engineered ribonucleic acid scaffold (ERS) sequence
  source 1..90: mol_type = other DNA
actggcgcttctatcttgattactctgagggccatcaccagcgactatgtcgtagtgggtaaagctccctcttcggagggagcatcagag

SEQ ID NO: 9774 - DNA, 89 bp, synthetic construct
  misc_feature 1..89: note = engineered ribonucleic acid scaffold (ERS) sequence
  source 1..89: mol_type = other DNA
actggcgcttctatcagattactctgagggccatcaccagcgactatgtcgtagtgggtaaagctccctcttcggagggagcatcagag

SEQ ID NO: 9775 - DNA, 89 bp, synthetic construct
  misc_feature 1..89: note = engineered ribonucleic acid scaffold (ERS) sequence
  source 1..89: mol_type = other DNA
actggcgcttctatcggattactctgagggccatcaccagcgactatgtcgtagtgggtaaagctccctcttcggagggagcatcagag

SEQ ID NO: 9776 - DNA, 90 bp, synthetic construct
  misc_feature 1..90: note = engineered ribonucleic acid scaffold (ERS) sequence
  source 1..90: mol_type = other DNA
actggcgcttctatctgaattactctgagggccatcaccagcgactatgtcgtagtgggtaaagctccctcttcggagggagcatcagag

SEQ ID NO: 9777 - DNA, 90 bp, synthetic construct
  misc_feature 1..90: note = engineered ribonucleic acid scaffold (ERS) sequence
  source 1..90: mol_type = other DNA
actggcgcttctatctgtattactctgagggccatcaccagcgactatgtcgtagtgggtaaagctccctcttcggagggagcatcagag

SEQ ID NO: 9778 - DNA, 89 bp, synthetic construct
  misc_feature 1..89: note = engineered ribonucleic acid scaffold (ERS) sequence
  source 1..89: mol_type = other DNA
actggcgcttctatctggttactctgagggccatcaccagcgactatgtcgtagtgggtaaagctccctcttcggagggagcatcagag

SEQ ID NO: 9779 - DNA, 89 bp, synthetic construct
  misc_feature 1..89: note = engineered ribonucleic acid scaffold (ERS) sequence
  source 1..89: mol_type = other DNA
actggcgcttctatctgtttactctgagggccatcaccagcgactatgtcgtagtgggtaaagctccctcttcggagggagcatcagag

SEQ ID NO: 9780 - DNA, 90 bp, synthetic construct
  misc_feature 1..90: note = engineered ribonucleic acid scaffold (ERS) sequence
  source 1..90: mol_type = other DNA
actggcgcttctatctgatttactctgagggccatcaccagcgactatgtcgtagtgggtaaagctccctcttcggagggagcatcagag

SEQ ID NO: 9781 - DNA, 89 bp, synthetic construct
  misc_feature 1..89: note = engineered ribonucleic acid scaffold (ERS) sequence
  source 1..89: mol_type = other DNA
actggcgcttctatctgattgctctgagggccatcaccagcgactatgtcgtagtgggtaaagctccctcttcggagggagcatcagag

SEQ ID NO: 9782 - DNA, 91 bp, synthetic construct
  misc_feature 1..91: note = engineered ribonucleic acid scaffold (ERS) sequence
  source 1..91: mol_type = other DNA
actggcacttctatatctgattactctgagtgccatcaccagcgactatgtcgtagtgggtaaagctccctcttcggagggagcatcagag

SEQ ID NO: 9783 - DNA, 90 bp, synthetic construct
  misc_feature 1..90: note = engineered ribonucleic acid scaffold (ERS) sequence
  source 1..90: mol_type = other DNA
actggcacttctaatctgattactctgagtgccatcaccagcgactatgtcgtagtgggtaaagctccctcttcggagggagcatcagag

SEQ ID NO: 9784 - DNA, 88 bp, synthetic construct
  misc_feature 1..88: note = engineered ribonucleic acid scaffold (ERS) sequence
  source 1..88: mol_type = other DNA
actggcacttctactgattactctgagtgccatcaccagcgactatgtcgtagtgggtaaagctccctcttcggagggagcatcagag

SEQ ID NO: 9785 - DNA, 89 bp, synthetic construct
  misc_feature 1..89: note = engineered ribonucleic acid scaffold (ERS) sequence
  source 1..89: mol_type = other DNA
actggcacttctaactgattactctgagtgccatcaccagcgactatgtcgtagtgggtaaagctccctcttcggagggagcatcagag

SEQ ID NO: 9786 - DNA, 89 bp, synthetic construct
  misc_feature 1..89: note = engineered ribonucleic acid scaffold (ERS) sequence
  source 1..89: mol_type = other DNA
actggcacttctacctgattactctgagtgccatcaccagcgactatgtcgtagtgggtaaagctccctcttcggagggagcatcagag

SEQ ID NO: 9787 - DNA, 89 bp, synthetic construct
  misc_feature 1..89: note = engineered ribonucleic acid scaffold (ERS) sequence
  source 1..89: mol_type = other DNA
actggcacttctagctgattactctgagtgccatcaccagcgactatgtcgtagtgggtaaagctccctcttcggagggagcatcagag

SEQ ID NO: 9788 - DNA, 91 bp, synthetic construct
  misc_feature 1..91: note = engineered ribonucleic acid scaffold (ERS) sequence
  source 1..91: mol_type = other DNA
actggcacttctattactgattactctgagtgccatcaccagcgactatgtcgtagtgggtaaagctccctcttcggagggagcatcagag

SEQ ID NO: 9789 - DNA, 89 bp, synthetic construct
  misc_feature 1..89: note = engineered ribonucleic acid scaffold (ERS) sequence
  source 1..89: mol_type = other DNA
actggcacttctatatgattactctgagtgccatcaccagcgactatgtcgtagtgggtaaagctccctcttcggagggagcatcagag

SEQ ID NO: 9790 - DNA, 89 bp, synthetic construct
  misc_feature 1..89: note = engineered ribonucleic acid scaffold (ERS) sequence
  source 1..89: mol_type = other DNA
actggcacttctatgtgattactctgagtgccatcaccagcgactatgtcgtagtgggtaaagctccctcttcggagggagcatcagag

SEQ ID NO: 9791 - DNA, 89 bp, synthetic construct
  misc_feature 1..89: note = engineered ribonucleic acid scaffold (ERS) sequence
  source 1..89: mol_type = other DNA
actggcacttctatttgattactctgagtgccatcaccagcgactatgtcgtagtgggtaaagctccctcttcggagggagcatcagag

SEQ ID NO: 9792 - DNA, 90 bp, synthetic construct
  misc_feature 1..90: note = engineered ribonucleic acid scaffold (ERS) sequence
  source 1..90: mol_type = other DNA
actggcacttctatcttgattactctgagtgccatcaccagcgactatgtcgtagtgggtaaagctccctcttcggagggagcatcagag

SEQ ID NO: 9793 - DNA, 89 bp, synthetic construct
  misc_feature 1..89: note = engineered ribonucleic acid scaffold (ERS) sequence
  source 1..89: mol_type = other DNA
actggcacttctatcagattactctgagtgccatcaccagcgactatgtcgtagtgggtaaagctccctcttcggagggagcatcagag

SEQ ID NO: 9794 - DNA, 89 bp, synthetic construct
  misc_feature 1..89: note = engineered ribonucleic acid scaffold (ERS) sequence
  source 1..89: mol_type = other DNA
actggcacttctatcggattactctgagtgccatcaccagcgactatgtcgtagtgggtaaagctccctcttcggagggagcatcagag

SEQ ID NO: 9795 - DNA, 90 bp, synthetic construct
  misc_feature 1..90: note = engineered ribonucleic acid scaffold (ERS) sequence
  source 1..90: mol_type = other DNA
actggcacttctatctgaattactctgagtgccatcaccagcgactatgtcgtagtgggtaaagctccctcttcggagggagcatcagag

SEQ ID NO: 9796 - DNA, 90 bp, synthetic construct
  misc_feature 1..90: note = engineered ribonucleic acid scaffold (ERS) sequence
  source 1..90: mol_type = other DNA
actggcacttctatctgtattactctgagtgccatcaccagcgactatgtcgtagtgggtaaagctccctcttcggagggagcatcagag

SEQ ID NO: 9797 - DNA, 89 bp, synthetic construct
  misc_feature 1..89: note = engineered ribonucleic acid scaffold (ERS) sequence
  source 1..89: mol_type = other DNA
actggcacttctatctggttactctgagtgccatcaccagcgactatgtcgtagtgggtaaagctccctcttcggagggagcatcagag

SEQ ID NO: 9798 - DNA, 89 bp, synthetic construct
  misc_feature 1..89: note = engineered ribonucleic acid scaffold (ERS) sequence
  source 1..89: mol_type = other DNA
actggcacttctatctgtttactctgagtgccatcaccagcgactatgtcgtagtgggtaaagctccctcttcggagggagcatcagag

SEQ ID NO: 9799 - DNA, 90 bp, synthetic construct
  misc_feature 1..90: note = engineered ribonucleic acid scaffold (ERS) sequence
  source 1..90: mol_type = other DNA
actggcacttctatctgatttactctgagtgccatcaccagcgactatgtcgtagtgggtaaagctccctcttcggagggagcatcagag

SEQ ID NO: 9800 - DNA, 89 bp, synthetic construct
  misc_feature 1..89: note = engineered ribonucleic acid scaffold (ERS) sequence
  source 1..89: mol_type = other DNA
actggcacttctatctgattgctctgagtgccatcaccagcgactatgtcgtagtgggtaaagctccctcttcggagggagcatcagag

SEQ ID NO: 9801 - DNA, 91 bp, synthetic construct
  misc_feature 1..91: note = engineered ribonucleic acid scaffold (ERS) sequence
  source 1..91: mol_type = other DNA
actggcgcttctatatctgattactctgagtgccgtcaccagcgactatgtcgtagtgggtaaagctccctcttcggagggagcatcagag

SEQ ID NO: 9802 - DNA, 90 bp, synthetic construct
  misc_feature 1..90: note = engineered ribonucleic acid scaffold (ERS) sequence
  source 1..90: mol_type = other DNA
actggcgcttctaatctgattactctgagtgccgtcaccagcgactatgtcgtagtgggtaaagctccctcttcggagggagcatcagag

SEQ ID NO: 9803 - DNA, 88 bp, synthetic construct
  misc_feature 1..88: note = engineered ribonucleic acid scaffold (ERS) sequence
  source 1..88: mol_type = other DNA
actggcgcttctactgattactctgagtgccgtcaccagcgactatgtcgtagtgggtaaagctccctcttcggagggagcatcagag

SEQ ID NO: 9804 - DNA, 89 bp, synthetic construct
  misc_feature 1..89: note = engineered ribonucleic acid scaffold (ERS) sequence
  source 1..89: mol_type = other DNA
actggcgcttctaactgattactctgagtgccgtcaccagcgactatgtcgtagtgggtaaagctccctcttcggagggagcatcagag

SEQ ID NO: 9805 - DNA, 89 bp, synthetic construct
  misc_feature 1..89: note = engineered ribonucleic acid scaffold (ERS) sequence
  source 1..89: mol_type = other DNA
actggcgcttctacctgattactctgagtgccgtcaccagcgactatgtcgtagtgggtaaagctccctcttcggagggagcatcagag

SEQ ID NO: 9806 - DNA, 89 bp, synthetic construct
  misc_feature 1..89: note = engineered ribonucleic acid scaffold (ERS) sequence
  source 1..89: mol_type = other DNA
actggcgcttctagctgattactctgagtgccgtcaccagcgactatgtcgtagtgggtaaagctccctcttcggagggagcatcagag

SEQ ID NO: 9807 - DNA, 91 bp, synthetic construct
  misc_feature 1..91: note = engineered ribonucleic acid scaffold (ERS) sequence
  source 1..91: mol_type = other DNA
actggcgcttctattactgattactctgagtgccgtcaccagcgactatgtcgtagtgggtaaagctccctcttcggagggagcatcagag

SEQ ID NO: 9808 - DNA, 89 bp, synthetic construct
  misc_feature 1..89: note = engineered ribonucleic acid scaffold (ERS) sequence
  source 1..89: mol_type = other DNA
actggcgcttctatatgattactctgagtgccgtcaccagcgactatgtcgtagtgggtaaagctccctcttcggagggagcatcagag

SEQ ID NO: 9809 - DNA, 89 bp, synthetic construct
  misc_feature 1..89: note = engineered ribonucleic acid scaffold (ERS) sequence
  source 1..89: mol_type = other DNA
actggcgcttctatgtgattactctgagtgccgtcaccagcgactatgtcgtagtgggtaaagctccctcttcggagggagcatcagag

SEQ ID NO: 9810 - DNA, 89 bp, synthetic construct
  misc_feature 1..89: note = engineered ribonucleic acid scaffold (ERS) sequence
  source 1..89: mol_type = other DNA
actggcgcttctatttgattactctgagtgccgtcaccagcgactatgtcgtagtgggtaaagctccctcttcggagggagcatcagag

SEQ ID NO: 9811 - DNA, 90 bp, synthetic construct
  misc_feature 1..90: note = engineered ribonucleic acid scaffold (ERS) sequence
  source 1..90: mol_type = other DNA
actggcgcttctatcttgattactctgagtgccgtcaccagcgactatgtcgtagtgggtaaagctccctcttcggagggagcatcagag

SEQ ID NO: 9812 - DNA, 89 bp, synthetic construct
  misc_feature 1..89: note = engineered ribonucleic acid scaffold (ERS) sequence
  source 1..89: mol_type = other DNA
actggcgcttctatcagattactctgagtgccgtcaccagcgactatgtcgtagtgggtaaagctccctcttcggagggagcatcagag

SEQ ID NO: 9813 - DNA, 89 bp, synthetic construct
  misc_feature 1..89: note = engineered ribonucleic acid scaffold (ERS) sequence
  source 1..89: mol_type = other DNA
actggcgcttctatcggattactctgagtgccgtcaccagcgactatgtcgtagtgggtaaagctccctcttcggagggagcatcagag

SEQ ID NO: 9814 - DNA, 90 bp, synthetic construct
  misc_feature 1..90: note = engineered ribonucleic acid scaffold (ERS) sequence
  source 1..90: mol_type = other DNA
actggcgcttctatctgaattactctgagtgccgtcaccagcgactatgtcgtagtgggtaaagctccctcttcggagggagcatcagag

SEQ ID NO: 9815 - DNA, 90 bp, synthetic construct
  misc_feature 1..90: note = engineered ribonucleic acid scaffold (ERS) sequence
  source 1..90: mol_type = other DNA
actggcgcttctatctgtattactctgagtgccgtcaccagcgactatgtcgtagtgggtaaagctccctcttcggagggagcatcagag

SEQ ID NO: 9816 - DNA, 89 bp, synthetic construct
  misc_feature 1..89: note = engineered ribonucleic acid scaffold (ERS) sequence
  source 1..89: mol_type = other DNA
actggcgcttctatctggttactctgagtgccgtcaccagcgactatgtcgtagtgggtaaagctccctcttcggagggagcatcagag

SEQ ID NO: 9817 - DNA, 89 bp, synthetic construct
  misc_feature 1..89: note = engineered ribonucleic acid scaffold (ERS) sequence
  source 1..89: mol_type = other DNA
actggcgcttctatctgtttactctgagtgccgtcaccagcgactatgtcgtagtgggtaaagctccctcttcggagggagcatcagag

SEQ ID NO: 9818 - DNA, 90 bp, synthetic construct
  misc_feature 1..90: note = engineered ribonucleic acid scaffold (ERS) sequence
  source 1..90: mol_type = other DNA
actggcgcttctatctgatttactctgagtgccgtcaccagcgactatgtcgtagtgggtaaagctccctcttcggagggagcatcagag

SEQ ID NO: 9819 - DNA, 89 bp, synthetic construct
  misc_feature 1..89: note = engineered ribonucleic acid scaffold (ERS) sequence
  source 1..89: mol_type = other DNA
actggcgcttctatctgattgctctgagtgccgtcaccagcgactatgtcgtagtgggtaaagctccctcttcggagggagcatcagag

SEQ ID NO: 9820 - DNA, 91 bp, synthetic construct
  misc_feature 1..91: note = engineered ribonucleic acid scaffold (ERS) sequence
  source 1..91: mol_type = other DNA
actggcgcttctatatctgattactctgagaaccatcaccagcgactatgtcgtagtgggtaaagctccctcttcggagggagcatcagag

SEQ ID NO: 9821 - DNA, 90 bp, synthetic construct
  misc_feature 1..90: note = engineered ribonucleic acid scaffold (ERS) sequence
  source 1..90: mol_type = other DNA
actggcgcttctaatctgattactctgagaaccatcaccagcgactatgtcgtagtgggtaaagctccctcttcggagggagcatcagag

SEQ ID NO: 9822 - DNA, 88 bp, synthetic construct
  misc_feature 1..88: note = engineered ribonucleic acid scaffold (ERS) sequence
  source 1..88: mol_type = other DNA
actggcgcttctactgattactctgagaaccatcaccagcgactatgtcgtagtgggtaaagctccctcttcggagggagcatcagag

SEQ ID NO: 9823 - DNA, 89 bp, synthetic construct
  misc_feature 1..89: note = engineered ribonucleic acid scaffold (ERS) sequence
  source 1..89: mol_type = other DNA
actggcgcttctaactgattactctgagaaccatcaccagcgactatgtcgtagtgggtaaagctccctcttcggagggagcatcagag

SEQ ID NO: 9824 - DNA, 89 bp, synthetic construct
  misc_feature 1..89: note = engineered ribonucleic acid scaffold (ERS) sequence
  source 1..89: mol_type = other DNA
actggcgcttctacctgattactctgagaaccatcaccagcgactatgtcgtagtgggtaaagctccctcttcggagggagcatcagag

SEQ ID NO: 9825 - DNA, 89 bp, synthetic construct
  misc_feature 1..89: note = engineered ribonucleic acid scaffold (ERS) sequence
  source 1..89: mol_type = other DNA
actggcgcttctagctgattactctgagaaccatcaccagcgactatgtcgtagtgggtaaagctccctcttcggagggagcatcagag

SEQ ID NO: 9826 - DNA, 91 bp, synthetic construct
  misc_feature 1..91: note = engineered ribonucleic acid scaffold (ERS) sequence
  source 1..91: mol_type = other DNA
actggcgcttctattactgattactctgagaaccatcaccagcgactatgtcgtagtgggtaaagctccctcttcggagggagcatcagag

SEQ ID NO: 9827 - DNA, 89 bp, synthetic construct
  misc_feature 1..89: note = engineered ribonucleic acid scaffold (ERS) sequence
  source 1..89: mol_type = other DNA
actggcgcttctatatgattactctgagaaccatcaccagcgactatgtcgtagtgggtaaagctccctcttcggagggagcatcagag

SEQ ID NO: 9828 - DNA, 89 bp, synthetic construct
  misc_feature 1..89: note = engineered ribonucleic acid scaffold (ERS) sequence
  source 1..89: mol_type = other DNA
actggcgcttctatgtgattactctgagaaccatcaccagcgactatgtcgtagtgggtaaagctccctcttcggagggagcatcagag

SEQ ID NO: 9829 - DNA, 89 bp, synthetic construct
  misc_feature 1..89: note = engineered ribonucleic acid scaffold (ERS) sequence
  source 1..89: mol_type = other DNA
actggcgcttctatttgattactctgagaaccatcaccagcgactatgtcgtagtgggtaaagctccctcttcggagggagcatcagag

SEQ ID NO: 9830 - DNA, 90 bp, synthetic construct
  misc_feature 1..90: note = engineered ribonucleic acid scaffold (ERS) sequence
  source 1..90: mol_type = other DNA
actggcgcttctatcttgattactctgagaaccatcaccagcgactatgtcgtagtgggtaaagctccctcttcggagggagcatcagag

SEQ ID NO: 9831 - DNA, 89 bp, synthetic construct
  misc_feature 1..89: note = engineered ribonucleic acid scaffold (ERS) sequence
  source 1..89: mol_type = other DNA
actggcgcttctatcagattactctgagaaccatcaccagcgactatgtcgtagtgggtaaagctccctcttcggagggagcatcagag

SEQ ID NO: 9832 - DNA, 89 bp, synthetic construct
  misc_feature 1..89: note = engineered ribonucleic acid scaffold (ERS) sequence
  source 1..89: mol_type = other DNA
actggcgcttctatcggattactctgagaaccatcaccagcgactatgtcgtagtgggtaaagctccctcttcggagggagcatcagag

SEQ ID NO: 9833 - DNA, 90 bp, synthetic construct
  misc_feature 1..90: note = engineered ribonucleic acid scaffold (ERS) sequence
  source 1..90: mol_type = other DNA
actggcgcttctatctgaattactctgagaaccatcaccagcgactatgtcgtagtgggtaaagctccctcttcggagggagcatcagag

SEQ ID NO: 9834 - DNA, 90 bp, synthetic construct
  misc_feature 1..90: note = engineered ribonucleic acid scaffold (ERS) sequence
  source 1..90: mol_type = other DNA
actggcgcttctatctgtattactctgagaaccatcaccagcgactatgtcgtagtgggtaaagctccctcttcggagggagcatcagag

SEQ ID NO: 9835 - DNA, 89 bp, synthetic construct
  misc_feature 1..89: note = engineered ribonucleic acid scaffold (ERS) sequence
  source 1..89: mol_type = other DNA
actggcgcttctatctggttactctgagaaccatcaccagcgactatgtcgtagtgggtaaagctccctcttcggagggagcatcagag

SEQ ID NO: 9836 - DNA, 89 bp, synthetic construct
  misc_feature 1..89: note = engineered ribonucleic acid scaffold (ERS) sequence
  source 1..89: mol_type = other DNA
actggcgcttctatctgtttactctgagaaccatcaccagcgactatgtcgtagtgggtaaagctccctcttcggagggagcatcagag

SEQ ID NO: 9837 - DNA, 90 bp, synthetic construct
  misc_feature 1..90: note = engineered ribonucleic acid scaffold (ERS) sequence
  source 1..90: mol_type = other DNA
actggcgcttctatctgatttactctgagaaccatcaccagcgactatgtcgtagtgggtaaagctccctcttcggagggagcatcagag

SEQ ID NO: 9838 - DNA, 89 bp, synthetic construct
  misc_feature 1..89: note = engineered ribonucleic acid scaffold (ERS) sequence
  source 1..89: mol_type = other DNA
actggcgcttctatctgattgctctgagaaccatcaccagcgactatgtcgtagtgggtaaagctccctcttcggagggagcatcagag

SEQ ID NO: 9839 - DNA, 91 bp, synthetic construct
  misc_feature 1..91: note = engineered ribonucleic acid scaffold (ERS) sequence
  source 1..91: mol_type = other DNA
actggcgcttctatatctgattactctgagagccgtcaccagcgactatgtcgtagtgggtaaagctccctcttcggagggagcatcagag

SEQ ID NO: 9840 - DNA, 90 bp, synthetic construct
  misc_feature 1..90: note = engineered ribonucleic acid scaffold (ERS) sequence
  source 1..90: mol_type = other DNA
actggcgcttctaatctgattactctgagagccgtcaccagcgactatgtcgtagtgggtaaagctccctcttcggagggagcatcagag

SEQ ID NO: 9841 - DNA, 88 bp, synthetic construct
  misc_feature 1..88: note = engineered ribonucleic acid scaffold (ERS) sequence
  source 1..88: mol_type = other DNA
actggcgcttctactgattactctgagagccgtcaccagcgactatgtcgtagtgggtaaagctccctcttcggagggagcatcagag

SEQ ID NO: 9842 - DNA, 89 bp, synthetic construct
  misc_feature 1..89: note = engineered ribonucleic acid scaffold (ERS) sequence
  source 1..89: mol_type = other DNA
actggcgcttctaactgattactctgagagccgtcaccagcgactatgtcgtagtgggtaaagctccctcttcggagggagcatcagag

SEQ ID NO: 9843 - DNA, 89 bp, synthetic construct
  misc_feature 1..89: note = engineered ribonucleic acid scaffold (ERS) sequence
  source 1..89: mol_type = other DNA
actggcgcttctacctgattactctgagagccgtcaccagcgactatgtcgtagtgggtaaagctccctcttcggagggagcatcagag

SEQ ID NO: 9844 - DNA, 89 bp, synthetic construct
  misc_feature 1..89: note = engineered ribonucleic acid scaffold (ERS) sequence
  source 1..89: mol_type = other DNA
actggcgcttctagctgattactctgagagccgtcaccagcgactatgtcgtagtgggtaaagctccctcttcggagggagcatcagag

SEQ ID NO: 9845 - DNA, 91 bp, synthetic construct
  misc_feature 1..91: note = engineered ribonucleic acid scaffold (ERS) sequence
  source 1..91: mol_type = other DNA
actggcgcttctattactgattactctgagagccgtcaccagcgactatgtcgtagtgggtaaagctccctcttcggagggagcatcagag

SEQ ID NO: 9846 - DNA, 89 bp, synthetic construct
  misc_feature 1..89: note = engineered ribonucleic acid scaffold (ERS) sequence
  source 1..89: mol_type = other DNA
actggcgcttctatatgattactctgagagccgtcaccagcgactatgtcgtagtgggtaaagctccctcttcggagggagcatcagag

SEQ ID NO: 9847 - DNA, 89 bp, synthetic construct
  misc_feature 1..89: note = engineered ribonucleic acid scaffold (ERS) sequence
  source 1..89: mol_type = other DNA
actggcgcttctatgtgattactctgagagccgtcaccagcgactatgtcgtagtgggtaaagctccctcttcggagggagcatcagag

SEQ ID NO: 9848 - DNA, 89 bp, synthetic construct
  misc_feature 1..89: note = engineered ribonucleic acid scaffold (ERS) sequence
  source 1..89: mol_type = other DNA
actggcgcttctatttgattactctgagagccgtcaccagcgactatgtcgtagtgggtaaagctccctcttcggagggagcatcagag

SEQ ID NO: 9849 - DNA, 90 bp, synthetic construct
  misc_feature 1..90: note = engineered ribonucleic acid scaffold (ERS) sequence
  source 1..90: mol_type = other DNA
actggcgcttctatcttgattactctgagagccgtcaccagcgactatgtcgtagtgggtaaagctccctcttcggagggagcatcagag

SEQ ID NO: 9850 - DNA, 89 bp, synthetic construct
  misc_feature 1..89: note = engineered ribonucleic acid scaffold (ERS) sequence
  source 1..89: mol_type = other DNA
actggcgcttctatcagattactctgagagccgtcaccagcgactatgtcgtagtgggtaaagctccctcttcggagggagcatcagag

SEQ ID NO: 9851 - DNA, 89 bp, synthetic construct
  misc_feature 1..89: note = engineered ribonucleic acid scaffold (ERS) sequence
  source 1..89: mol_type = other DNA
actggcgcttctatcggattactctgagagccgtcaccagcgactatgtcgtagtgggtaaagctccctcttcggagggagcatcagag

SEQ ID NO: 9852 - DNA, 90 bp, synthetic construct
  misc_feature 1..90: note = engineered ribonucleic acid scaffold (ERS) sequence
  source 1..90: mol_type = other DNA
actggcgcttctatctgaattactctgagagccgtcaccagcgactatgtcgtagtgggtaaagctccctcttcggagggagcatcagag

SEQ ID NO: 9853 - DNA, 90 bp, synthetic construct
  misc_feature 1..90: note = engineered ribonucleic acid scaffold (ERS) sequence
  source 1..90: mol_type = other DNA
actggcgcttctatctgtattactctgagagccgtcaccagcgactatgtcgtagtgggtaaagctccctcttcggagggagcatcagag

SEQ ID NO: 9854 - DNA, 89 bp, synthetic construct
  misc_feature 1..89: note = engineered ribonucleic acid scaffold (ERS) sequence
  source 1..89: mol_type = other DNA
actggcgcttctatctggttactctgagagccgtcaccagcgactatgtcgtagtgggtaaagctccctcttcggagggagcatcagag

SEQ ID NO: 9855 - DNA, 89 bp, synthetic construct
  misc_feature 1..89: note = engineered ribonucleic acid scaffold (ERS) sequence
  source 1..89: mol_type = other DNA
actggcgcttctatctgtttactctgagagccgtcaccagcgactatgtcgtagtgggtaaagctccctcttcggagggagcatcagag

SEQ ID NO: 9856 - DNA, 90 bp, synthetic construct
  misc_feature 1..90: note = engineered ribonucleic acid scaffold (ERS) sequence
  source 1..90: mol_type = other DNA
actggcgcttctatctgatttactctgagagccgtcaccagcgactatgtcgtagtgggtaaagctccctcttcggagggagcatcagag

SEQ ID NO: 9857 - DNA, 89 bp, synthetic construct
  misc_feature 1..89: note = engineered ribonucleic acid scaffold (ERS) sequence
  source 1..89: mol_type = other DNA
actggcgcttctatctgattgctctgagagccgtcaccagcgactatgtcgtagtgggtaaagctccctcttcggagggagcatcagag

SEQ ID NO: 9858 - DNA, 91 bp, synthetic construct
  misc_feature 1..91: note = engineered ribonucleic acid scaffold (ERS) sequence
  source 1..91: mol_type = other DNA
actggcgcttctatatctgattactctgagagccttcaccagcgactatgtcgtagtgggtaaagctccctcttcggagggagcatcagag

SEQ ID NO: 9859 - DNA, 90 bp, synthetic construct
  misc_feature 1..90: note = engineered ribonucleic acid scaffold (ERS) sequence
  source 1..90: mol_type = other DNA
actggcgcttctaatctgattactctgagagccttcaccagcgactatgtcgtagtgggtaaagctccctcttcggagggagcatcagag

SEQ ID NO: 9860 - DNA, 88 bp, synthetic construct
  misc_feature 1..88: note = engineered ribonucleic acid scaffold (ERS) sequence
  source 1..88: mol_type = other DNA
actggcgcttctactgattactctgagagccttcaccagcgactatgtcgtagtgggtaaagctccctcttcggagggagcatcagag

SEQ ID NO: 9861 - DNA, 89 bp, synthetic construct
  misc_feature 1..89: note = engineered ribonucleic acid scaffold (ERS) sequence
  source 1..89: mol_type = other DNA
actggcgcttctaactgattactctgagagccttcaccagcgactatgtcgtagtgggtaaagctccctcttcggagggagcatcagag

SEQ ID NO: 9862 - DNA, 89 bp, synthetic construct
  misc_feature 1..89: note = engineered ribonucleic acid scaffold (ERS) sequence
  source 1..89: mol_type = other DNA
actggcgcttctacctgattactctgagagccttcaccagcgactatgtcgtagtgggtaaagctccctcttcggagggagcatcagag

SEQ ID NO: 9863 - DNA, 89 bp, synthetic construct
  misc_feature 1..89: note = engineered ribonucleic acid scaffold (ERS) sequence
  source 1..89: mol_type = other DNA
actggcgcttctagctgattactctgagagccttcaccagcgactatgtcgtagtgggtaaagctccctcttcggagggagcatcagag

SEQ ID NO: 9864 - DNA, 91 bp, synthetic construct
  misc_feature 1..91: note = engineered ribonucleic acid scaffold (ERS) sequence
  source 1..91: mol_type = other DNA
actggcgcttctattactgattactctgagagccttcaccagcgactatgtcgtagtgggtaaagctccctcttcggagggagcatcagag

SEQ ID NO: 9865 - DNA, 89 bp, synthetic construct
  misc_feature 1..89: note = engineered ribonucleic acid scaffold (ERS) sequence
  source 1..89: mol_type = other DNA
actggcgcttctatatgattactctgagagccttcaccagcgactatgtcgtagtgggtaaagctccctcttcggagggagcatcagag

SEQ ID NO: 9866 - DNA, 89 bp, synthetic construct
  misc_feature 1..89: note = engineered ribonucleic acid scaffold (ERS) sequence
  source 1..89: mol_type = other DNA
actggcgcttctatgtgattactctgagagccttcaccagcgactatgtcgtagtgggtaaagctccctcttcggagggagcatcagag

SEQ ID NO: 9867 - DNA, 89 bp, synthetic construct
  misc_feature 1..89: note = engineered ribonucleic acid scaffold (ERS) sequence
  source 1..89: mol_type = other DNA
actggcgcttctatttgattactctgagagccttcaccagcgactatgtcgtagtgggtaaagctccctcttcggagggagcatcagag

SEQ ID NO: 9868 - DNA, 90 bp, synthetic construct
  misc_feature 1..90: note = engineered ribonucleic acid scaffold (ERS) sequence
  source 1..90: mol_type = other DNA
actggcgcttctatcttgattactctgagagccttcaccagcgactatgtcgtagtgggtaaagctccctcttcggagggagcatcagag

SEQ ID NO: 9869 - DNA, 89 bp, synthetic construct
  misc_feature 1..89: note = engineered ribonucleic acid scaffold (ERS) sequence
  source 1..89: mol_type = other DNA
actggcgcttctatcagattactctgagagccttcaccagcgactatgtcgtagtgggtaaagctccctcttcggagggagcatcagag

SEQ ID NO: 9870 - DNA, 89 bp, synthetic construct
  misc_feature 1..89: note = engineered ribonucleic acid scaffold (ERS) sequence
  source 1..89: mol_type = other DNA
actggcgcttctatcggattactctgagagccttcaccagcgactatgtcgtagtgggtaaagctccctcttcggagggagcatcagag

SEQ ID NO: 9871 - DNA, 90 bp, synthetic construct
  misc_feature 1..90: note = engineered ribonucleic acid scaffold (ERS) sequence
  source 1..90: mol_type = other DNA
actggcgcttctatctgaattactctgagagccttcaccagcgactatgtcgtagtgggtaaagctccctcttcggagggagcatcagag

SEQ ID NO: 9872 - DNA, 90 bp, synthetic construct
  misc_feature 1..90: note = engineered ribonucleic acid scaffold (ERS) sequence
  source 1..90: mol_type = other DNA
actggcgcttctatctgtattactctgagagccttcaccagcgactatgtcgtagtgggtaaagctccctcttcggagggagcatcagag

SEQ ID NO: 9873 - DNA, 89 bp, synthetic construct
  misc_feature 1..89: note = engineered ribonucleic acid scaffold (ERS) sequence
  source 1..89: mol_type = other DNA
actggcgcttctatctggttactctgagagccttcaccagcgactatgtcgtagtgggtaaagctccctcttcggagggagcatcagag

SEQ ID NO: 9874 - DNA, 89 bp, synthetic construct
  misc_feature 1..89: note = engineered ribonucleic acid scaffold (ERS) sequence
  source 1..89: mol_type = other DNA
actggcgcttctatctgtttactctgagagccttcaccagcgactatgtcgtagtgggtaaagctccctcttcggagggagcatcagag

SEQ ID NO: 9875 - DNA, 90 bp, synthetic construct
  misc_feature 1..90: note = engineered ribonucleic acid scaffold (ERS) sequence
  source 1..90: mol_type = other DNA
actggcgcttctatctgatttactctgagagccttcaccagcgactatgtcgtagtgggtaaagctccctcttcggagggagcatcagag

SEQ ID NO: 9876 - DNA, 89 bp, synthetic construct
  misc_feature 1..89: note = engineered ribonucleic acid scaffold (ERS) sequence
  source 1..89: mol_type = other DNA
actggcgcttctatctgattgctctgagagccttcaccagcgactatgtcgtagtgggtaaagctccctcttcggagggagcatcagag

SEQ ID NO: 9877 - DNA, 91 bp, synthetic construct
  misc_feature 1..91: note = engineered ribonucleic acid scaffold (ERS) sequence
  source 1..91: mol_type = other DNA
actggggcttctatatctgattactctgagacccatcaccagcgactatgtcgtagtgggtaaagctccctcttcggagggagcatcagag

SEQ ID NO: 9878 - DNA, 90 bp, synthetic construct
  misc_feature 1..90: note = engineered ribonucleic acid scaffold (ERS) sequence
  source 1..90: mol_type = other DNA
actggggcttctaatctgattactctgagacccatcaccagcgactatgtcgtagtgggtaaagctccctcttcggagggagcatcagag

SEQ ID NO: 9879 - DNA, 88 bp, synthetic construct
  misc_feature 1..88: note = engineered ribonucleic acid scaffold (ERS) sequence
  source 1..88: mol_type = other DNA
actggggcttctactgattactctgagacccatcaccagcgactatgtcgtagtgggtaaagctccctcttcggagggagcatcagag

SEQ ID NO: 9880 - DNA, 89 bp, synthetic construct
  misc_feature 1..89: note = engineered ribonucleic acid scaffold (ERS) sequence
  source 1..89: mol_type = other DNA
actggggcttctaactgattactctgagacccatcaccagcgactatgtcgtagtgggtaaagctccctcttcggagggagcatcagag

SEQ ID NO: 9881 - DNA, 89 bp, synthetic construct
  misc_feature 1..89: note = engineered ribonucleic acid scaffold (ERS) sequence
  source 1..89: mol_type = other DNA
actggggcttctacctgattactctgagacccatcaccagcgactatgtcgtagtgggtaaagctccctcttcggagggagcatcagag

SEQ ID NO: 9882 - DNA, 89 bp, synthetic construct
  misc_feature 1..89: note = engineered ribonucleic acid scaffold (ERS) sequence
  source 1..89: mol_type = other DNA
actggggcttctagctgattactctgagacccatcaccagcgactatgtcgtagtgggtaaagctccctcttcggagggagcatcagag

SEQ ID NO: 9883 - DNA, 91 bp, synthetic construct
  misc_feature 1..91: note = engineered ribonucleic acid scaffold (ERS) sequence
  source 1..91: mol_type = other DNA
actggggcttctattactgattactctgagacccatcaccagcgactatgtcgtagtgggtaaagctccctcttcggagggagcatcagag

SEQ ID NO: 9884 - DNA, 89 bp, synthetic construct
  misc_feature 1..89: note = engineered ribonucleic acid scaffold (ERS) sequence
  source 1..89: mol_type = other DNA
actggggcttctatatgattactctgagacccatcaccagcgactatgtcgtagtgggtaaagctccctcttcggagggagcatcagag

SEQ ID NO: 9885 - DNA, 89 bp, synthetic construct
  misc_feature 1..89: note = engineered ribonucleic acid scaffold (ERS) sequence
  source 1..89: mol_type = other DNA
actggggcttctatgtgattactctgagacccatcaccagcgactatgtcgtagtgggtaaagctccctcttcggagggagcatcagag

SEQ ID NO: 9886 - DNA, 89 bp, synthetic construct
  misc_feature 1..89: note = engineered ribonucleic acid scaffold (ERS) sequence
  source 1..89: mol_type = other DNA
actggggcttctatttgattactctgagacccatcaccagcgactatgtcgtagtgggtaaagctccctcttcggagggagcatcagag

SEQ ID NO: 9887 - DNA, 90 bp, synthetic construct
  misc_feature 1..90: note = engineered ribonucleic acid scaffold (ERS) sequence
  source 1..90: mol_type = other DNA
actggggcttctatcttgattactctgagacccatcaccagcgactatgtcgtagtgggtaaagctccctcttcggagggagcatcagag

SEQ ID NO: 9888 - DNA, 89 bp, synthetic construct
  misc_feature 1..89: note = engineered ribonucleic acid scaffold (ERS) sequence
  source 1..89: mol_type = other DNA
actggggcttctatcagattactctgagacccatcaccagcgactatgtcgtagtgggtaaagctccctcttcggagggagcatcagag

SEQ ID NO: 9889 - DNA, 89 bp, synthetic construct
  misc_feature 1..89: note = engineered ribonucleic acid scaffold (ERS) sequence
  source 1..89: mol_type = other DNA
actggggcttctatcggattactctgagacccatcaccagcgactatgtcgtagtgggtaaagctccctcttcggagggagcatcagag

SEQ ID NO: 9890 - DNA, 90 bp, synthetic construct
  misc_feature 1..90: note = engineered ribonucleic acid scaffold (ERS) sequence
  source 1..90: mol_type = other DNA
actggggcttctatctgaattactctgagacccatcaccagcgactatgtcgtagtgggtaaagctccctcttcggagggagcatcagag

SEQ ID NO: 9891 - DNA, 90 bp, synthetic construct
  misc_feature 1..90: note = engineered ribonucleic acid scaffold (ERS) sequence
  source 1..90: mol_type = other DNA
actggggcttctatctgtattactctgagacccatcaccagcgactatgtcgtagtgggtaaagctccctcttcggagggagcatcagag

SEQ ID NO: 9892 - DNA, 89 bp, synthetic construct
  misc_feature 1..89: note = engineered ribonucleic acid scaffold (ERS) sequence
  source 1..89: mol_type = other DNA
actggggcttctatctggttactctgagacccatcaccagcgactatgtcgtagtgggtaaagctccctcttcggagggagcatcagag

SEQ ID NO: 9893 - DNA, 89 bp, synthetic construct
  misc_feature 1..89: note = engineered ribonucleic acid scaffold (ERS) sequence
  source 1..89: mol_type = other DNA
actggggcttctatctgtttactctgagacccatcaccagcgactatgtcgtagtgggtaaagctccctcttcggagggagcatcagag

SEQ ID NO: 9894 - DNA, 90 bp, synthetic construct
  misc_feature 1..90: note = engineered ribonucleic acid scaffold (ERS) sequence
  source 1..90: mol_type = other DNA
actggggcttctatctgatttactctgagacccatcaccagcgactatgtcgtagtgggtaaagctccctcttcggagggagcatcagag

SEQ ID NO: 9895 - DNA, 89 bp, synthetic construct
  misc_feature 1..89: note = engineered ribonucleic acid scaffold (ERS) sequence
  source 1..89: mol_type = other DNA
actggggcttctatctgattgctctgagacccatcaccagcgactatgtcgtagtgggtaaagctccctcttcggagggagcatcagag

SEQ ID NO: 9896 - DNA, 91 bp, synthetic construct
  misc_feature 1..91: note = engineered ribonucleic acid scaffold (ERS) sequence
  source 1..91: mol_type = other DNA
actggtgcttctatatctgattactctgagagccatcaccagcgactatgtcgtagtgggtaaagctccctcttcggagggagcatcagag

SEQ ID NO: 9897 - DNA, 90 bp, synthetic construct
  misc_feature 1..90: note = engineered ribonucleic acid scaffold (ERS) sequence
  source 1..90: mol_type = other DNA
actggtgcttctaatctgattactctgagagccatcaccagcgactatgtcgtagtgggtaaagctccctcttcggagggagcatcagag

SEQ ID NO: 9898 - DNA, 88 bp, synthetic construct
  misc_feature 1..88: note = engineered ribonucleic acid scaffold (ERS) sequence
  source 1..88: mol_type = other DNA
actggtgcttctactgattactctgagagccatcaccagcgactatgtcgtagtgggtaaagctccctcttcggagggagcatcagag

SEQ ID NO: 9899 - DNA, 89 bp, synthetic construct
  misc_feature 1..89: note = engineered ribonucleic acid scaffold (ERS) sequence
  source 1..89: mol_type = other DNA
actggtgcttctaactgattactctgagagccatcaccagcgactatgtcgtagtgggtaaagctccctcttcggagggagcatcagag

SEQ ID NO: 9900 - DNA, 89 bp, synthetic construct
  misc_feature 1..89: note = engineered ribonucleic acid scaffold (ERS) sequence
  source 1..89: mol_type = other DNA
actggtgcttctacctgattactctgagagccatcaccagcgactatgtcgtagtgggtaaagctccctcttcggagggagcatcagag

SEQ ID NO: 9901 - DNA, 89 bp, synthetic construct
  misc_feature 1..89: note = engineered ribonucleic acid scaffold (ERS) sequence
  source 1..89: mol_type = other DNA
actggtgcttctagctgattactctgagagccatcaccagcgactatgtcgtagtgggtaaagctccctcttcggagggagcatcagag

SEQ ID NO: 9902 - DNA, 91 bp, synthetic construct
  misc_feature 1..91: note = engineered ribonucleic acid scaffold (ERS) sequence
  source 1..91: mol_type = other DNA
actggtgcttctattactgattactctgagagccatcaccagcgactatgtcgtagtgggtaaagctccctcttcggagggagcatcagag

SEQ ID NO: 9903 - DNA, 89 bp, synthetic construct
  misc_feature 1..89: note = engineered ribonucleic acid scaffold (ERS) sequence
  source 1..89: mol_type = other DNA
actggtgcttctatatgattactctgagagccatcaccagcgactatgtcgtagtgggtaaagctccctcttcggagggagcatcagag

SEQ ID NO: 9904 - DNA, 89 bp, synthetic construct
  misc_feature 1..89: note = engineered ribonucleic acid scaffold (ERS) sequence
  source 1..89: mol_type = other DNA
actggtgcttctatgtgattactctgagagccatcaccagcgactatgtcgtagtgggtaaagctccctcttcggagggagcatcagag

SEQ ID NO: 9905 - DNA, 89 bp, synthetic construct
  misc_feature 1..89: note = engineered ribonucleic acid scaffold (ERS) sequence
  source 1..89: mol_type = other DNA
actggtgcttctatttgattactctgagagccatcaccagcgactatgtcgtagtgggtaaagctccctcttcggagggagcatcagag

SEQ ID NO: 9906 - DNA, 90 bp, synthetic construct
  misc_feature 1..90: note = engineered ribonucleic acid scaffold (ERS) sequence
  source 1..90: mol_type = other DNA
actggtgcttctatcttgattactctgagagccatcaccagcgactatgtcgtagtgggtaaagctccctcttcggagggagcatcagag

SEQ ID NO: 9907 - DNA, 89 bp, synthetic construct
  misc_feature 1..89: note = engineered ribonucleic acid scaffold (ERS) sequence
  source 1..89: mol_type = other DNA
actggtgcttctatcagattactctgagagccatcaccagcgactatgtcgtagtgggtaaagctccctcttcggagggagcatcagag

SEQ ID NO: 9908 - DNA, 89 bp, synthetic construct
  misc_feature 1..89: note = engineered ribonucleic acid scaffold (ERS) sequence
  source 1..89: mol_type = other DNA
actggtgcttctatcggattactctgagagccatcaccagcgactatgtcgtagtgggtaaagctccctcttcggagggagcatcagag

SEQ ID NO: 9909 - DNA, 90 bp, synthetic construct
  misc_feature 1..90: note = engineered ribonucleic acid scaffold (ERS) sequence
  source 1..90: mol_type = other DNA
actggtgcttctatctgaattactctgagagccatcaccagcgactatgtcgtagtgggtaaagctccctcttcggagggagcatcagag

SEQ ID NO: 9910 - DNA, 90 bp, synthetic construct
  misc_feature 1..90: note = engineered ribonucleic acid scaffold (ERS) sequence
  source 1..90: mol_type = other DNA
actggtgcttctatctgtattactctgagagccatcaccagcgactatgtcgtagtgggtaaagctccctcttcggagggagcatcagag

SEQ ID NO: 9911 - DNA, 89 bp, synthetic construct
  misc_feature 1..89: note = engineered ribonucleic acid scaffold (ERS) sequence
  source 1..89: mol_type = other DNA
actggtgcttctatctggttactctgagagccatcaccagcgactatgtcgtagtgggtaaagctccctcttcggagggagcatcagag

SEQ ID NO: 9912 - DNA, 89 bp, synthetic construct
  misc_feature 1..89: note = engineered ribonucleic acid scaffold (ERS) sequence
  source 1..89: mol_type = other DNA
actggtgcttctatctgtttactctgagagccatcaccagcgactatgtcgtagtgggtaaagctccctcttcggagggagcatcagag

SEQ ID NO: 9913 - DNA, 90 bp, synthetic construct
  misc_feature 1..90: note = engineered ribonucleic acid scaffold (ERS) sequence
  source 1..90: mol_type = other DNA
actggtgcttctatctgatttactctgagagccatcaccagcgactatgtcgtagtgggtaaagctccctcttcggagggagcatcagag

SEQ ID NO: 9914 - DNA, 89 bp, synthetic construct
  misc_feature 1..89: note = engineered ribonucleic acid scaffold (ERS) sequence
  source 1..89: mol_type = other DNA
actggtgcttctatctgattgctctgagagccatcaccagcgactatgtcgtagtgggtaaagctccctcttcggagggagcatcagag

SEQ ID NO: 9915 - DNA, 91 bp, synthetic construct
  misc_feature 1..91: note = engineered ribonucleic acid scaffold (ERS) sequence
  source 1..91: mol_type = other DNA
actgggccttctatatctgattactctgaggcccatcaccagcgactatgtcgtagtgggtaaagctccctcttcggagggagcatcagag

SEQ ID NO: 9916 - DNA, 90 bp, synthetic construct
  misc_feature 1..90: note = engineered ribonucleic acid scaffold (ERS) sequence
  source 1..90: mol_type = other DNA
actgggccttctaatctgattactctgaggcccatcaccagcgactatgtcgtagtgggtaaagctccctcttcggagggagcatcagag

SEQ ID NO: 9917 - DNA, 88 bp, synthetic construct
  misc_feature 1..88: note = engineered ribonucleic acid scaffold (ERS) sequence
  source 1..88: mol_type = other DNA
actgggccttctactgattactctgaggcccatcaccagcgactatgtcgtagtgggtaaagctccctcttcggagggagcatcagag

SEQ ID NO: 9918 - DNA, 89 bp, synthetic construct
  misc_feature 1..89: note = engineered ribonucleic acid scaffold (ERS) sequence
  source 1..89: mol_type = other DNA
actgggccttctaactgattactctgaggcccatcaccagcgactatgtcgtagtgggtaaagctccctcttcggagggagcatcagag

SEQ ID NO: 9919 - DNA, 89 bp, synthetic construct
  misc_feature 1..89: note = engineered ribonucleic acid scaffold (ERS) sequence
  source 1..89: mol_type = other DNA
actgggccttctacctgattactctgaggcccatcaccagcgactatgtcgtagtgggtaaagctccctcttcggagggagcatcagag

SEQ ID NO: 9920 - DNA, 89 bp, synthetic construct
  misc_feature 1..89: note = engineered ribonucleic acid scaffold (ERS) sequence
  source 1..89: mol_type = other DNA
actgggccttctagctgattactctgaggcccatcaccagcgactatgtcgtagtgggtaaagctccctcttcggagggagcatcagag

SEQ ID NO: 9921 - DNA, 91 bp, synthetic construct
  misc_feature 1..91: note = engineered ribonucleic acid scaffold (ERS) sequence
  source 1..91: mol_type = other DNA
actgggccttctattactgattactctgaggcccatcaccagcgactatgtcgtagtgggtaaagctccctcttcggagggagcatcagag

SEQ ID NO: 9922 - DNA, 89 bp, synthetic construct
  misc_feature 1..89: note = engineered ribonucleic acid scaffold (ERS) sequence
  source 1..89: mol_type = other DNA
actgggccttctatatgattactctgaggcccatcaccagcgactatgtcgtagtgggtaaagctccctcttcggagggagcatcagag

SEQ ID NO: 9923 - DNA, 89 bp, synthetic construct
  misc_feature 1..89: note = engineered ribonucleic acid scaffold (ERS) sequence
  source 1..89: mol_type = other DNA
actgggccttctatgtgattactctgaggcccatcaccagcgactatgtcgtagtgggtaaagctccctcttcggagggagcatcagag

SEQ ID NO: 9924 - DNA, 89 bp, synthetic construct
  misc_feature 1..89: note = engineered ribonucleic acid scaffold (ERS) sequence
  source 1..89: mol_type = other DNA
actgggccttctatttgattactctgaggcccatcaccagcgactatgtcgtagtgggtaaagctccctcttcggagggagcatcagag

SEQ ID NO: 9925 - DNA, 90 bp, synthetic construct
  misc_feature 1..90: note = engineered ribonucleic acid scaffold (ERS) sequence
  source 1..90: mol_type = other DNA
actgggccttctatcttgattactctgaggcccatcaccagcgactatgtcgtagtgggtaaagctccctcttcggagggagcatcagag

SEQ ID NO: 9926 - DNA, 89 bp, synthetic construct
  misc_feature 1..89: note = engineered ribonucleic acid scaffold (ERS) sequence
  source 1..89: mol_type = other DNA
actgggccttctatcagattactctgaggcccatcaccagcgactatgtcgtagtgggtaaagctccctcttcggagggagcatcagag

SEQ ID NO: 9927 - DNA, 89 bp, synthetic construct
  misc_feature 1..89: note = engineered ribonucleic acid scaffold (ERS) sequence
  source 1..89: mol_type = other DNA
actgggccttctatcggattactctgaggcccatcaccagcgactatgtcgtagtgggtaaagctccctcttcggagggagcatcagag

SEQ ID NO: 9928 - DNA, 90 bp, synthetic construct
  misc_feature 1..90: note = engineered ribonucleic acid scaffold (ERS) sequence
  source 1..90: mol_type = other DNA
actgggccttctatctgaattactctgaggcccatcaccagcgactatgtcgtagtgggtaaagctccctcttcggagggagcatcagag

SEQ ID NO: 9929 - DNA, 90 bp, synthetic construct
  misc_feature 1..90: note = engineered ribonucleic acid scaffold (ERS) sequence
  source 1..90: mol_type = other DNA
actgggccttctatctgtattactctgaggcccatcaccagcgactatgtcgtagtgggtaaagctccctcttcggagggagcatcagag

SEQ ID NO: 9930 - DNA, 89 bp, synthetic construct
  misc_feature 1..89: note = engineered ribonucleic acid scaffold (ERS) sequence
  source 1..89: mol_type = other DNA
actgggccttctatctggttactctgaggcccatcaccagcgactatgtcgtagtgggtaaagctccctcttcggagggagcatcagag

SEQ ID NO: 9931 - DNA, 89 bp, synthetic construct
  misc_feature 1..89: note = engineered ribonucleic acid scaffold (ERS) sequence
  source 1..89: mol_type = other DNA
actgggccttctatctgtttactctgaggcccatcaccagcgactatgtcgtagtgggtaaagctccctcttcggagggagcatcagag

SEQ ID NO: 9932 - DNA, 90 bp, synthetic construct
  misc_feature 1..90: note = engineered ribonucleic acid scaffold (ERS) sequence
  source 1..90: mol_type = other DNA
actgggccttctatctgatttactctgaggcccatcaccagcgactatgtcgtagtgggtaaagctccctcttcggagggagcatcagag

SEQ ID NO: 9933 - DNA, 89 bp, synthetic construct
  misc_feature 1..89: note = engineered ribonucleic acid scaffold (ERS) sequence
  source 1..89: mol_type = other DNA
actgggccttctatctgattgctctgaggcccatcaccagcgactatgtcgtagtgggtaaagctccctcttcggagggagcatcagag

SEQ ID NO: 9934 - DNA, 91 bp, synthetic construct
  misc_feature 1..91: note = engineered ribonucleic acid scaffold (ERS) sequence
  source 1..91: mol_type = other DNA
actggcccttctatatctgattactctgagagccatcaccagcgactatgtcgtagtgggtaaagctccctcttcggagggagcatcagag

SEQ ID NO: 9935 - DNA, 90 bp, synthetic construct
  misc_feature 1..90: note = engineered ribonucleic acid scaffold (ERS) sequence
  source 1..90: mol_type = other DNA
actggcccttctaatctgattactctgagagccatcaccagcgactatgtcgtagtgggtaaagctccctcttcggagggagcatcagag

SEQ ID NO: 9936 - DNA, 88 bp, synthetic construct
  misc_feature 1..88: note = engineered ribonucleic acid scaffold (ERS) sequence
  source 1..88: mol_type = other DNA
actggcccttctactgattactctgagagccatcaccagcgactatgtcgtagtgggtaaagctccctcttcggagggagcatcagag

SEQ ID NO: 9937 - DNA, 89 bp, synthetic construct
  misc_feature 1..89: note = engineered ribonucleic acid scaffold (ERS) sequence
  source 1..89: mol_type = other DNA
actggcccttctaactgattactctgagagccatcaccagcgactatgtcgtagtgggtaaagctccctcttcggagggagcatcagag

SEQ ID NO: 9938 - DNA, 89 bp, synthetic construct
  misc_feature 1..89: note = engineered ribonucleic acid scaffold (ERS) sequence
  source 1..89: mol_type = other DNA
actggcccttctacctgattactctgagagccatcaccagcgactatgtcgtagtgggtaaagctccctcttcggagggagcatcagag

SEQ ID NO: 9939 - DNA, 89 bp, synthetic construct
  misc_feature 1..89: note = engineered ribonucleic acid scaffold (ERS) sequence
  source 1..89: mol_type = other DNA
actggcccttctagctgattactctgagagccatcaccagcgactatgtcgtagtgggtaaagctccctcttcggagggagcatcagag

SEQ ID NO: 9940 - DNA, 91 bp, synthetic construct
  misc_feature 1..91: note = engineered ribonucleic acid scaffold (ERS) sequence
  source 1..91: mol_type = other DNA
actggcccttctattactgattactctgagagccatcaccagcgactatgtcgtagtgggtaaagctccctcttcggagggagcatcagag

SEQ ID NO: 9941 - DNA, 89 bp, synthetic construct
  misc_feature 1..89: note = engineered ribonucleic acid scaffold (ERS) sequence
  source 1..89: mol_type = other DNA
actggcccttctatatgattactctgagagccatcaccagcgactatgtcgtagtgggtaaagctccctcttcggagggagcatcagag

SEQ ID NO: 9942 - DNA, 89 bp, synthetic construct
  misc_feature 1..89: note = engineered ribonucleic acid scaffold (ERS) sequence
  source 1..89: mol_type = other DNA
actggcccttctatgtgattactctgagagccatcaccagcgactatgtcgtagtgggtaaagctccctcttcggagggagcatcagag

SEQ ID NO: 9943 - DNA, 89 bp, synthetic construct
  misc_feature 1..89: note = engineered ribonucleic acid scaffold (ERS) sequence
  source 1..89: mol_type = other DNA
actggcccttctatttgattactctgagagccatcaccagcgactatgtcgtagtgggtaaagctccctcttcggagggagcatcagag

SEQ ID NO: 9944 - DNA, 90 bp, synthetic construct
  misc_feature 1..90: note = engineered ribonucleic acid scaffold (ERS) sequence
  source 1..90: mol_type = other DNA
actggcccttctatcttgattactctgagagccatcaccagcgactatgtcgtagtgggtaaagctccctcttcggagggagcatcagag

SEQ ID NO: 9945 - DNA, 89 bp, synthetic construct
  misc_feature 1..89: note = engineered ribonucleic acid scaffold (ERS) sequence
  source 1..89: mol_type = other DNA
actggcccttctatcagattactctgagagccatcaccagcgactatgtcgtagtgggtaaagctccctcttcggagggagcatcagag

SEQ ID NO: 9946 - DNA, 89 bp, synthetic construct
  misc_feature 1..89: note = engineered ribonucleic acid scaffold (ERS) sequence
  source 1..89: mol_type = other DNA
actggcccttctatcggattactctgagagccatcaccagcgactatgtcgtagtgggtaaagctccctcttcggagggagcatcagag

SEQ ID NO: 9947 - DNA, 90 bp, synthetic construct
  misc_feature 1..90: note = engineered ribonucleic acid scaffold (ERS) sequence
  source 1..90: mol_type = other DNA
actggcccttctatctgaattactctgagagccatcaccagcgactatgtcgtagtgggtaaagctccctcttcggagggagcatcagag

SEQ ID NO: 9948 - DNA, 90 bp, synthetic construct
  misc_feature 1..90: note = engineered ribonucleic acid scaffold (ERS) sequence
  source 1..90: mol_type = other DNA
actggcccttctatctgtattactctgagagccatcaccagcgactatgtcgtagtgggtaaagctccctcttcggagggagcatcagag

SEQ ID NO: 9949 - DNA, 89 bp, synthetic construct
  misc_feature 1..89: note = engineered ribonucleic acid scaffold (ERS) sequence
  source 1..89: mol_type = other DNA
actggcccttctatctggttactctgagagccatcaccagcgactatgtcgtagtgggtaaagctccctcttcggagggagcatcagag

SEQ ID NO: 9950 - DNA, 89 bp, synthetic construct
  misc_feature 1..89: note = engineered ribonucleic acid scaffold (ERS) sequence
  source 1..89: mol_type = other DNA
actggcccttctatctgtttactctgagagccatcaccagcgactatgtcgtagtgggtaaagctccctcttcggagggagcatcagag

SEQ ID NO: 9951 - DNA, 90 bp, synthetic construct
  misc_feature 1..90: note = engineered ribonucleic acid scaffold (ERS) sequence
  source 1..90: mol_type = other DNA
actggcccttctatctgatttactctgagagccatcaccagcgactatgtcgtagtgggtaaagctccctcttcggagggagcatcagag

SEQ ID NO: 9952 - DNA, 89 bp, synthetic construct
  misc_feature 1..89: note = engineered ribonucleic acid scaffold (ERS) sequence
  source 1..89: mol_type = other DNA
actggcccttctatctgattgctctgagagccatcaccagcgactatgtcgtagtgggtaaagctccctcttcggagggagcatcagag

SEQ ID NO: 9953 - DNA, 92 bp, synthetic construct
  misc_feature 1..92: note = engineered ribonucleic acid scaffold (ERS) sequence
  source 1..92: mol_type = other DNA
actggcccttctatatctgattactctgaggagccatcaccagcgactatgtcgtagtgggtaaagctccctcttcggagggagcatcagag

SEQ ID NO: 9954 - DNA, 91 bp, synthetic construct
  misc_feature 1..91: note = engineered ribonucleic acid scaffold (ERS) sequence
  source 1..91: mol_type = other DNA
actggcccttctaatctgattactctgaggagccatcaccagcgactatgtcgtagtgggtaaagctccctcttcggagggagcatcagag

SEQ ID NO: 9955 - DNA, 89 bp, synthetic construct
  misc_feature 1..89: note = engineered ribonucleic acid scaffold (ERS) sequence
  source 1..89: mol_type = other DNA
actggcccttctactgattactctgaggagccatcaccagcgactatgtcgtagtgggtaaagctccctcttcggagggagcatcagag

SEQ ID NO: 9956 - DNA, 90 bp, synthetic construct
  misc_feature 1..90: note = engineered ribonucleic acid scaffold (ERS) sequence
  source 1..90: mol_type = other DNA
actggcccttctaactgattactctgaggagccatcaccagcgactatgtcgtagtgggtaaagctccctcttcggagggagcatcagag

SEQ ID NO: 9957 - DNA, 90 bp, synthetic construct
  misc_feature 1..90: note = engineered ribonucleic acid scaffold (ERS) sequence
  source 1..90: mol_type = other DNA
actggcccttctacctgattactctgaggagccatcaccagcgactatgtcgtagtgggtaaagctccctcttcggagggagcatcagag

SEQ ID NO: 9958 - DNA, 90 bp, synthetic construct
  misc_feature 1..90: note = engineered ribonucleic acid scaffold (ERS) sequence
  source 1..90: mol_type = other DNA
actggcccttctagctgattactctgaggagccatcaccagcgactatgtcgtagtgggtaaagctccctcttcggagggagcatcagag

SEQ ID NO: 9959 - DNA, 92 bp, synthetic construct
  misc_feature 1..92: note = engineered ribonucleic acid scaffold (ERS) sequence
  source 1..92: mol_type = other DNA
actggcccttctattactgattactctgaggagccatcaccagcgactatgtcgtagtgggtaaagctccctcttcggagggagcatcagag

SEQ ID NO: 9960 - DNA, 90 bp, synthetic construct
  misc_feature 1..90: note = engineered ribonucleic acid scaffold (ERS) sequence
  source 1..90: mol_type = other DNA
actggcccttctatatgattactctgaggagccatcaccagcgactatgtcgtagtgggtaaagctccctcttcggagggagcatcagag

SEQ ID NO: 9961 - DNA, 90 bp, synthetic construct
  misc_feature 1..90: note = engineered ribonucleic acid scaffold (ERS) sequence
  source 1..90: mol_type = other DNA
actggcccttctatgtgattactctgaggagccatcaccagcgactatgtcgtagtgggtaaagctccctcttcggagggagcatcagag

SEQ ID NO: 9962 - DNA, 90 bp, synthetic construct
  misc_feature 1..90: note = engineered ribonucleic acid scaffold (ERS) sequence
  source 1..90: mol_type = other DNA
actggcccttctatttgattactctgaggagccatcaccagcgactatgtcgtagtgggtaaagctccctcttcggagggagcatcagag

SEQ ID NO: 9963 - DNA, 91 bp, synthetic construct
  misc_feature 1..91: note = engineered ribonucleic acid scaffold (ERS) sequence
  source 1..91: mol_type = other DNA
actggcccttctatcttgattactctgaggagccatcaccagcgactatgtcgtagtgggtaaagctccctcttcggagggagcatcagag

SEQ ID NO: 9964 - DNA, 90 bp, synthetic construct
  misc_feature 1..90: note = engineered ribonucleic acid scaffold (ERS) sequence
  source 1..90: mol_type = other DNA
actggcccttctatcagattactctgaggagccatcaccagcgactatgtcgtagtgggtaaagctccctcttcggagggagcatcagag

SEQ ID NO: 9965 - DNA, 90 bp, synthetic construct
  misc_feature 1..90: note = engineered ribonucleic acid scaffold (ERS) sequence
  source 1..90: mol_type = other DNA
actggcccttctatcggattactctgaggagccatcaccagcgactatgtcgtagtgggtaaagctccctcttcggagggagcatcagag

SEQ ID NO: 9966 - DNA, 91 bp, synthetic construct
  misc_feature 1..91: note = engineered ribonucleic acid scaffold (ERS) sequence
  source 1..91: mol_type = other DNA
actggcccttctatctgaattactctgaggagccatcaccagcgactatgtcgtagtgggtaaagctccctcttcggagggagcatcagag

SEQ ID NO: 9967 - DNA, 91 bp, synthetic construct
  misc_feature 1..91: note = engineered ribonucleic acid scaffold (ERS) sequence
  source 1..91: mol_type = other DNA
actggcccttctatctgtattactctgaggagccatcaccagcgactatgtcgtagtgggtaaagctccctcttcggagggagcatcagag

SEQ ID NO: 9968 - DNA, 90 bp, synthetic construct
  misc_feature 1..90: note = engineered ribonucleic acid scaffold (ERS) sequence
  source 1..90: mol_type = other DNA
actggcccttctatctggttactctgaggagccatcaccagcgactatgtcgtagtgggtaaagctccctcttcggagggagcatcagag

SEQ ID NO: 9969 - DNA, 90 bp, synthetic construct
  misc_feature 1..90: note = engineered ribonucleic acid scaffold (ERS) sequence
  source 1..90: mol_type = other DNA
actggcccttctatctgtttactctgaggagccatcaccagcgactatgtcgtagtgggtaaagctccctcttcggagggagcatcagag

SEQ ID NO: 9970 - DNA, 91 bp, synthetic construct
  misc_feature 1..91: note = engineered ribonucleic acid scaffold (ERS) sequence
  source 1..91: mol_type = other DNA
actggcccttctatctgatttactctgaggagccatcaccagcgactatgtcgtagtgggtaaagctccctcttcggagggagcatcagag

SEQ ID NO: 9971 - DNA, 90 bp, synthetic construct
  misc_feature 1..90: note = engineered ribonucleic acid scaffold (ERS) sequence
  source 1..90: mol_type = other DNA
actggcccttctatctgattgctctgaggagccatcaccagcgactatgtcgtagtgggtaaagctccctcttcggagggagcatcagag

SEQ ID NO: 9972 - DNA, 91 bp, synthetic construct
  misc_feature 1..91: note = engineered ribonucleic acid scaffold (ERS) sequence
  source 1..91: mol_type = other DNA
actggcccttctatatctgattactctgagggccatcaccagcgactatgtcgtagtgggtaaagctccctcttcggagggagcatcagag

SEQ ID NO: 9973 - DNA, 90 bp, synthetic construct
  misc_feature 1..90: note = engineered ribonucleic acid scaffold (ERS) sequence
  source 1..90: mol_type = other DNA
actggcccttctaatctgattactctgagggccatcaccagcgactatgtcgtagtgggtaaagctccctcttcggagggagcatcagag

SEQ ID NO: 9974 - DNA, 88 bp, synthetic construct
  misc_feature 1..88: note = engineered ribonucleic acid scaffold (ERS) sequence
  source 1..88: mol_type = other DNA
actggcccttctactgattactctgagggccatcaccagcgactatgtcgtagtgggtaaagctccctcttcggagggagcatcagag

SEQ ID NO: 9975 - DNA, 89 bp, synthetic construct
  misc_feature 1..89: note = engineered ribonucleic acid scaffold (ERS) sequence
  source 1..89: mol_type = other DNA
actggcccttctaactgattactctgagggccatcaccagcgactatgtcgtagtgggtaaagctccctcttcggagggagcatcagag

SEQ ID NO: 9976 - DNA, 89 bp, synthetic construct
  misc_feature 1..89: note = engineered ribonucleic acid scaffold (ERS) sequence
  source 1..89: mol_type = other DNA
actggcccttctacctgattactctgagggccatcaccagcgactatgtcgtagtgggtaaagctccctcttcggagggagcatcagag

SEQ ID NO: 9977 - DNA, 89 bp, synthetic construct
  misc_feature 1..89: note = engineered ribonucleic acid scaffold (ERS) sequence
  source 1..89: mol_type = other DNA
actggcccttctagctgattactctgagggccatcaccagcgactatgtcgtagtgggtaaagctccctcttcggagggagcatcagag

SEQ ID NO: 9978 - DNA, 91 bp, synthetic construct
  misc_feature 1..91: note = engineered ribonucleic acid scaffold (ERS) sequence
  source 1..91: mol_type = other DNA
actggcccttctattactgattactctgagggccatcaccagcgactatgtcgtagtgggtaaagctccctcttcggagggagcatcagag

SEQ ID NO: 9979 - DNA, 89 bp, synthetic construct
  misc_feature 1..89: note = engineered ribonucleic acid scaffold (ERS) sequence
  source 1..89: mol_type = other DNA
actggcccttctatatgattactctgagggccatcaccagcgactatgtcgtagtgggtaaagctccctcttcggagggagcatcagag

SEQ ID NO: 9980 - DNA, 89 bp, synthetic construct
  misc_feature 1..89: note = engineered ribonucleic acid scaffold (ERS) sequence
  source 1..89: mol_type = other DNA
actggcccttctatgtgattactctgagggccatcaccagcgactatgtcgtagtgggtaaagctccctcttcggagggagcatcagag

SEQ ID NO: 9981 - DNA, 89 bp, synthetic construct
  misc_feature 1..89: note = engineered ribonucleic acid scaffold (ERS) sequence
  source 1..89: mol_type = other DNA
actggcccttctatttgattactctgagggccatcaccagcgactatgtcgtagtgggtaaagctccctcttcggagggagcatcagag

SEQ ID NO: 9982 - DNA, 90 bp, synthetic construct
  misc_feature 1..90: note = engineered ribonucleic acid scaffold (ERS) sequence
  source 1..90: mol_type = other DNA
actggcccttctatcttgattactctgagggccatcaccagcgactatgtcgtagtgggtaaagctccctcttcggagggagcatcagag

SEQ ID NO: 9983 - DNA, 89 bp, synthetic construct
  misc_feature 1..89: note = engineered ribonucleic acid scaffold (ERS) sequence
  source 1..89: mol_type = other DNA
actggcccttctatcagattactctgagggccatcaccagcgactatgtcgtagtgggtaaagctccctcttcggagggagcatcagag

SEQ ID NO: 9984 - DNA, 89 bp, synthetic construct
  misc_feature 1..89: note = engineered ribonucleic acid scaffold (ERS) sequence
  source 1..89: mol_type = other DNA
actggcccttctatcggattactctgagggccatcaccagcgactatgtcgtagtgggtaaagctccctcttcggagggagcatcagag

SEQ ID NO: 9985 - DNA, 90 bp, synthetic construct
  misc_feature 1..90: note = engineered ribonucleic acid scaffold (ERS) sequence
  source 1..90: mol_type = other DNA
actggcccttctatctgaattactctgagggccatcaccagcgactatgtcgtagtgggtaaagctccctcttcggagggagcatcagag

SEQ ID NO: 9986 - DNA, 90 bp, synthetic construct
  misc_feature 1..90: note = engineered ribonucleic acid scaffold (ERS) sequence
  source 1..90: mol_type = other DNA
actggcccttctatctgtattactctgagggccatcaccagcgactatgtcgtagtgggtaaagctccctcttcggagggagcatcagag

SEQ ID NO: 9987 - DNA, 89 bp, synthetic construct
  misc_feature 1..89: note = engineered ribonucleic acid scaffold (ERS) sequence
  source 1..89: mol_type = other DNA
actggcccttctatctggttactctgagggccatcaccagcgactatgtcgtagtgggtaaagctccctcttcggagggagcatcagag

SEQ ID NO: 9988 - DNA, 89 bp, synthetic construct
  misc_feature 1..89: note = engineered ribonucleic acid scaffold (ERS) sequence
  source 1..89: mol_type = other DNA
actggcccttctatctgtttactctgagggccatcaccagcgactatgtcgtagtgggtaaagctccctcttcggagggagcatcagag

SEQ ID NO: 9989 - DNA, 90 bp, synthetic construct
  misc_feature 1..90: note = engineered ribonucleic acid scaffold (ERS) sequence
  source 1..90: mol_type = other DNA
actggcccttctatctgatttactctgagggccatcaccagcgactatgtcgtagtgggtaaagctccctcttcggagggagcatcagag

SEQ ID NO: 9990 - DNA, 89 bp, synthetic construct
  misc_feature 1..89: note = engineered ribonucleic acid scaffold (ERS) sequence
  source 1..89: mol_type = other DNA
actggcccttctatctgattgctctgagggccatcaccagcgactatgtcgtagtgggtaaagctccctcttcggagggagcatcagag

SEQ ID NO: 9991 - DNA, 91 bp, synthetic construct
  misc_feature 1..91: note = engineered ribonucleic acid scaffold (ERS) sequence
  source 1..91: mol_type = other DNA
actggcccttctatatctgattactctgagtgccatcaccagcgactatgtcgtagtgggtaaagctccctcttcggagggagcatcagag

SEQ ID NO: 9992 - DNA, 90 bp, synthetic construct
  misc_feature 1..90: note = engineered ribonucleic acid scaffold (ERS) sequence
  source 1..90: mol_type = other DNA
actggcccttctaatctgattactctgagtgccatcaccagcgactatgtcgtagtgggtaaagctccctcttcggagggagcatcagag

SEQ ID NO: 9993 - DNA, 88 bp, synthetic construct
  misc_feature 1..88: note = engineered ribonucleic acid scaffold (ERS) sequence
  source 1..88: mol_type = other DNA
actggcccttctactgattactctgagtgccatcaccagcgactatgtcgtagtgggtaaagctccctcttcggagggagcatcagag

SEQ ID NO: 9994 - DNA, 89 bp, synthetic construct
  misc_feature 1..89: note = engineered ribonucleic acid scaffold (ERS) sequence
  source 1..89: mol_type = other DNA
actggcccttctaactgattactctgagtgccatcaccagcgactatgtcgtagtgggtaaagctccctcttcggagggagcatcagag

SEQ ID NO: 9995 - DNA, 89 bp, synthetic construct
  misc_feature 1..89: note = engineered ribonucleic acid scaffold (ERS) sequence
  source 1..89: mol_type = other DNA
actggcccttctacctgattactctgagtgccatcaccagcgactatgtcgtagtgggtaaagctccctcttcggagggagcatcagag

SEQ ID NO: 9996 - DNA, 89 bp, synthetic construct
  misc_feature 1..89: note = engineered ribonucleic acid scaffold (ERS) sequence
  source 1..89: mol_type = other DNA
actggcccttctagctgattactctgagtgccatcaccagcgactatgtcgtagtgggtaaagctccctcttcggagggagcatcagag

SEQ ID NO: 9997 - DNA, 91 bp, synthetic construct
  misc_feature 1..91: note = engineered ribonucleic acid scaffold (ERS) sequence
  source 1..91: mol_type = other DNA
actggcccttctattactgattactctgagtgccatcaccagcgactatgtcgtagtgggtaaagctccctcttcggagggagcatcagag

SEQ ID NO: 9998 - DNA, 89 bp, synthetic construct
  misc_feature 1..89: note = engineered ribonucleic acid scaffold (ERS) sequence
  source 1..89: mol_type = other DNA
actggcccttctatatgattactctgagtgccatcaccagcgactatgtcgtagtgggtaaagctccctcttcggagggagcatcagag

SEQ ID NO: 9999 - DNA, 89 bp, synthetic construct
  misc_feature 1..89: note = engineered ribonucleic acid scaffold (ERS) sequence
  source 1..89: mol_type = other DNA
actggcccttctatgtgattactctgagtgccatcaccagcgactatgtcgtagtgggtaaagctccctcttcggagggagcatcagag

SEQ ID NO: 10000 - DNA, 89 bp, synthetic construct
  misc_feature 1..89: note = engineered ribonucleic acid scaffold (ERS) sequence
  source 1..89: mol_type = other DNA
actggcccttctatttgattactctgagtgccatcaccagcgactatgtcgtagtgggtaaagctccctcttcggagggagcatcagag

SEQ ID NO: 10001 - DNA, 90 bp, synthetic construct
  misc_feature 1..90: note = engineered ribonucleic acid scaffold (ERS) sequence
  source 1..90: mol_type = other DNA
actggcccttctatcttgattactctgagtgccatcaccagcgactatgtcgtagtgggtaaagctccctcttcggagggagcatcagag

SEQ ID NO: 10002 - DNA, 89 bp, synthetic construct
  misc_feature 1..89: note = engineered ribonucleic acid scaffold (ERS) sequence
  source 1..89: mol_type = other DNA
actggcccttctatcagattactctgagtgccatcaccagcgactatgtcgtagtgggtaaagctccctcttcggagggagcatcagag

SEQ ID NO: 10003 - DNA, 89 bp, synthetic construct
  misc_feature 1..89: note = engineered ribonucleic acid scaffold (ERS) sequence
  source 1..89: mol_type = other DNA
actggcccttctatcggattactctgagtgccatcaccagcgactatgtcgtagtgggtaaagctccctcttcggagggagcatcagag

SEQ ID NO: 10004 - DNA, 90 bp, synthetic construct
  misc_feature 1..90: note = engineered ribonucleic acid scaffold (ERS) sequence
  source 1..90: mol_type = other DNA
actggcccttctatctgaattactctgagtgccatcaccagcgactatgtcgtagtgggtaaagctccctcttcggagggagcatcagag

SEQ ID NO: 10005 - DNA, 90 bp, synthetic construct
  misc_feature 1..90: note = engineered ribonucleic acid scaffold (ERS) sequence
  source 1..90: mol_type = other DNA
actggcccttctatctgtattactctgagtgccatcaccagcgactatgtcgtagtgggtaaagctccctcttcggagggagcatcagag

SEQ ID NO: 10006 - DNA, 89 bp, synthetic construct
  misc_feature 1..89: note = engineered ribonucleic acid scaffold (ERS) sequence
  source 1..89: mol_type = other DNA
actggcccttctatctggttactctgagtgccatcaccagcgactatgtcgtagtgggtaaagctccctcttcggagggagcatcagag

SEQ ID NO: 10007 - DNA, 89 bp, synthetic construct
  misc_feature 1..89: note = engineered ribonucleic acid scaffold (ERS) sequence
  source 1..89: mol_type = other DNA
actggcccttctatctgtttactctgagtgccatcaccagcgactatgtcgtagtgggtaaagctccctcttcggagggagcatcagag

SEQ ID NO: 10008 - DNA, 90 bp, synthetic construct
  misc_feature 1..90: note = engineered ribonucleic acid scaffold (ERS) sequence
  source 1..90: mol_type = other DNA
actggcccttctatctgatttactctgagtgccatcaccagcgactatgtcgtagtgggtaaagctccctcttcggagggagcatcagag

SEQ ID NO: 10009 - DNA, 89 bp, synthetic construct
  misc_feature 1..89: note = engineered ribonucleic acid scaffold (ERS) sequence
  source 1..89: mol_type = other DNA
actggcccttctatctgattgctctgagtgccatcaccagcgactatgtcgtagtgggtaaagctccctcttcggagggagcatcagag

SEQ ID NO: 10010 - DNA, 91 bp, synthetic construct
  misc_feature 1..91: note = engineered ribonucleic acid scaffold (ERS) sequence
  source 1..91: mol_type = other DNA
actggcgcttctatatctgattactctgagagccatcaccagcgactatgtcgtagtgggtaaagctccctcttcggagggagcatcagag

SEQ ID NO: 10011 - DNA, 90 bp, synthetic construct
  misc_feature 1..90: note = engineered ribonucleic acid scaffold (ERS) sequence
  source 1..90: mol_type = other DNA
actggcgcttctaatctgattactctgagagccatcaccagcgactatgtcgtagtgggtaaagctccctcttcggagggagcatcagag

SEQ ID NO: 10012 - DNA, 88 bp, synthetic construct
  misc_feature 1..88: note = engineered ribonucleic acid scaffold (ERS) sequence
  source 1..88: mol_type = other DNA
actggcgcttctactgattactctgagagccatcaccagcgactatgtcgtagtgggtaaagctccctcttcggagggagcatcagag

SEQ ID NO: 10013 - DNA, 89 bp, synthetic construct
  misc_feature 1..89: note = engineered ribonucleic acid scaffold (ERS) sequence
  source 1..89: mol_type = other DNA
actggcgcttctaactgattactctgagagccatcaccagcgactatgtcgtagtgggtaaagctccctcttcggagggagcatcagag

SEQ ID NO: 10014 - DNA, 89 bp, synthetic construct
  misc_feature 1..89: note = engineered ribonucleic acid scaffold (ERS) sequence
  source 1..89: mol_type = other DNA
actggcgcttctacctgattactctgagagccatcaccagcgactatgtcgtagtgggtaaagctccctcttcggagggagcatcagag

SEQ ID NO: 10015 - DNA, 89 bp, synthetic construct
  misc_feature 1..89: note = engineered ribonucleic acid scaffold (ERS) sequence
  source 1..89: mol_type = other DNA
actggcgcttctagctgattactctgagagccatcaccagcgactatgtcgtagtgggtaaagctccctcttcggagggagcatcagag

SEQ ID NO: 10016 - DNA, 91 bp, synthetic construct
  misc_feature 1..91: note = engineered ribonucleic acid scaffold (ERS) sequence
  source 1..91: mol_type = other DNA
actggcgcttctattactgattactctgagagccatcaccagcgactatgtcgtagtgggtaaagctccctcttcggagggagcatcagag

SEQ ID NO: 10017 - DNA, 89 bp, synthetic construct
  misc_feature 1..89: note = engineered ribonucleic acid scaffold (ERS) sequence
  source 1..89: mol_type = other DNA
actggcgcttctatatgattactctgagagccatcaccagcgactatgtcgtagtgggtaaagctccctcttcggagggagcatcagag

SEQ ID NO: 10018 - DNA, 89 bp, synthetic construct
  misc_feature 1..89: note = engineered ribonucleic acid scaffold (ERS) sequence
  source 1..89: mol_type = other DNA
actggcgcttctatgtgattactctgagagccatcaccagcgactatgtcgtagtgggtaaagctccctcttcggagggagcatcagag

SEQ ID NO: 10019 - DNA, 89 bp, synthetic construct
  misc_feature 1..89: note = engineered ribonucleic acid scaffold (ERS) sequence
  source 1..89: mol_type = other DNA
actggcgcttctatttgattactctgagagccatcaccagcgactatgtcgtagtgggtaaagctccctcttcggagggagcatcagag

SEQ ID NO: 10020 - DNA, 90 bp, synthetic construct
  misc_feature 1..90: note = engineered ribonucleic acid scaffold (ERS) sequence
  source 1..90: mol_type = other DNA
actggcgcttctatcttgattactctgagagccatcaccagcgactatgtcgtagtgggtaaagctccctcttcggagggagcatcagag

SEQ ID NO: 10021 - DNA, 89 bp, synthetic construct
  misc_feature 1..89: note = engineered ribonucleic acid scaffold (ERS) sequence
  source 1..89: mol_type = other DNA
actggcgcttctatcagattactctgagagccatcaccagcgactatgtcgtagtgggtaaagctccctcttcggagggagcatcagag

SEQ ID NO: 10022 - DNA, 89 bp, synthetic construct
  misc_feature 1..89: note = engineered ribonucleic acid scaffold (ERS) sequence
  source 1..89: mol_type = other DNA
actggcgcttctatcggattactctgagagccatcaccagcgactatgtcgtagtgggtaaagctccctcttcggagggagcatcagag

SEQ ID NO: 10023 - DNA, 90 bp, synthetic construct
  misc_feature 1..90: note = engineered ribonucleic acid scaffold (ERS) sequence
  source 1..90: mol_type = other DNA
actggcgcttctatctgaattactctgagagccatcaccagcgactatgtcgtagtgggtaaagctccctcttcggagggagcatcagag

SEQ ID NO: 10024 - DNA, 90 bp, synthetic construct
  misc_feature 1..90: note = engineered ribonucleic acid scaffold (ERS) sequence
  source 1..90: mol_type = other DNA
actggcgcttctatctgtattactctgagagccatcaccagcgactatgtcgtagtgggtaaagctccctcttcggagggagcatcagag

SEQ ID NO: 10025 - DNA, 89 bp, synthetic construct
  misc_feature 1..89: note = engineered ribonucleic acid scaffold (ERS) sequence
  source 1..89: mol_type = other DNA
actggcgcttctatctggttactctgagagccatcaccagcgactatgtcgtagtgggtaaagctccctcttcggagggagcatcagag

SEQ ID NO: 10026 - DNA, 89 bp, synthetic construct
  misc_feature 1..89: note = engineered ribonucleic acid scaffold (ERS) sequence
  source 1..89: mol_type = other DNA
actggcgcttctatctgtttactctgagagccatcaccagcgactatgtcgtagtgggtaaagctccctcttcggagggagcatcagag

SEQ ID NO: 10027 - DNA, 90 bp, synthetic construct
  misc_feature 1..90: note = engineered ribonucleic acid scaffold (ERS) sequence
  source 1..90: mol_type = other DNA
actggcgcttctatctgatttactctgagagccatcaccagcgactatgtcgtagtgggtaaagctccctcttcggagggagcatcagag

SEQ ID NO: 10028 - DNA, 89 bp, synthetic construct
  misc_feature 1..89: note = engineered ribonucleic acid scaffold (ERS) sequence
  source 1..89: mol_type = other DNA
actggcgcttctatctgattgctctgagagccatcaccagcgactatgtcgtagtgggtaaagctccctcttcggagggagcatcagag

SEQ ID NO: 10029 - DNA, 92 bp, synthetic construct
  misc_feature 1..92: note = engineered ribonucleic acid scaffold (ERS) sequence
  source 1..92: mol_type = other DNA
actggcgcttctatatctgattactctgagcagccatcaccagcgactatgtcgtagtgggtaaagctccctcttcggagggagcatcagag

SEQ ID NO: 10030 - DNA, 91 bp, synthetic construct
  misc_feature 1..91: note = engineered ribonucleic acid scaffold (ERS) sequence
  source 1..91: mol_type = other DNA
actggcgcttctaatctgattactctgagcagccatcaccagcgactatgtcgtagtgggtaaagctccctcttcggagggagcatcagag

SEQ ID NO: 10031 - DNA, 89 bp, synthetic construct
  misc_feature 1..89: note = engineered ribonucleic acid scaffold (ERS) sequence
  source 1..89: mol_type = other DNA
actggcgcttctactgattactctgagcagccatcaccagcgactatgtcgtagtgggtaaagctccctcttcggagggagcatcagag

SEQ ID NO: 10032 - DNA, 90 bp, synthetic construct
  misc_feature 1..90: note = engineered ribonucleic acid scaffold (ERS) sequence
  source 1..90: mol_type = other DNA
actggcgcttctaactgattactctgagcagccatcaccagcgactatgtcgtagtgggtaaagctccctcttcggagggagcatcagag

SEQ ID NO: 10033 - DNA, 90 bp, synthetic construct
  misc_feature 1..90: note = engineered ribonucleic acid scaffold (ERS) sequence
  source 1..90: mol_type = other DNA
actggcgcttctacctgattactctgagcagccatcaccagcgactatgtcgtagtgggtaaagctccctcttcggagggagcatcagag

SEQ ID NO: 10034 - DNA, 90 bp, synthetic construct
  misc_feature 1..90: note = engineered ribonucleic acid scaffold (ERS) sequence
  source 1..90: mol_type = other DNA
actggcgcttctagctgattactctgagcagccatcaccagcgactatgtcgtagtgggtaaagctccctcttcggagggagcatcagag

SEQ ID NO: 10035 - DNA, 92 bp, synthetic construct
  misc_feature 1..92: note = engineered ribonucleic acid scaffold (ERS) sequence
  source 1..92: mol_type = other DNA
actggcgcttctattactgattactctgagcagccatcaccagcgactatgtcgtagtgggtaaagctccctcttcggagggagcatcagag

SEQ ID NO: 10036 - DNA, 90 bp, synthetic construct
  misc_feature 1..90: note = engineered ribonucleic acid scaffold (ERS) sequence
  source 1..90: mol_type = other DNA
actggcgcttctatatgattactctgagcagccatcaccagcgactatgtcgtagtgggtaaagctccctcttcggagggagcatcagag

SEQ ID NO: 10037 - DNA, 90 bp, synthetic construct
  misc_feature 1..90: note = engineered ribonucleic acid scaffold (ERS) sequence
  source 1..90: mol_type = other DNA
actggcgcttctatgtgattactctgagcagccatcaccagcgactatgtcgtagtgggtaaagctccctcttcggagggagcatcagag

SEQ ID NO: 10038 - DNA, 90 bp, synthetic construct
  misc_feature 1..90: note = engineered ribonucleic acid scaffold (ERS) sequence
  source 1..90: mol_type = other DNA
actggcgcttctatttgattactctgagcagccatcaccagcgactatgtcgtagtgggtaaagctccctcttcggagggagcatcagag

SEQ ID NO: 10039 - DNA, 91 bp, synthetic construct
  misc_feature 1..91: note = engineered ribonucleic acid scaffold (ERS) sequence
  source 1..91: mol_type = other DNA
actggcgcttctatcttgattactctgagcagccatcaccagcgactatgtcgtagtgggtaaagctccctcttcggagggagcatcagag

SEQ ID NO: 10040 - DNA, 90 bp, synthetic construct
  misc_feature 1..90: note = engineered ribonucleic acid scaffold (ERS) sequence
  source 1..90: mol_type = other DNA
actggcgcttctatcagattactctgagcagccatcaccagcgactatgtcgtagtgggtaaagctccctcttcggagggagcatcagag

SEQ ID NO: 10041 - DNA, 90 bp, synthetic construct
  misc_feature 1..90: note = engineered ribonucleic acid scaffold (ERS) sequence
  source 1..90: mol_type = other DNA
actggcgcttctatcggattactctgagcagccatcaccagcgactatgtcgtagtgggtaaagctccctcttcggagggagcatcagag

SEQ ID NO: 10042 - DNA, 91 bp, synthetic construct
  misc_feature 1..91: note = engineered ribonucleic acid scaffold (ERS) sequence
  source 1..91: mol_type = other DNA
actggcgcttctatctgaattactctgagcagccatcaccagcgactatgtcgtagtgggtaaagctccctcttcggagggagcatcagag

SEQ ID NO: 10043 - DNA, 91 bp, synthetic construct
  misc_feature 1..91: note = engineered ribonucleic acid scaffold (ERS) sequence
  source 1..91: mol_type = other DNA
actggcgcttctatctgtattactctgagcagccatcaccagcgactatgtcgtagtgggtaaagctccctcttcggagggagcatcagag

SEQ ID NO: 10044 - DNA, 90 bp, synthetic construct
  misc_feature 1..90: note = engineered ribonucleic acid scaffold (ERS) sequence
  source 1..90: mol_type = other DNA
actggcgcttctatctggttactctgagcagccatcaccagcgactatgtcgtagtgggtaaagctccctcttcggagggagcatcagag

SEQ ID NO: 10045 - DNA, 90 bp, synthetic construct
  misc_feature 1..90: note = engineered ribonucleic acid scaffold (ERS) sequence
  source 1..90: mol_type = other DNA
actggcgcttctatctgtttactctgagcagccatcaccagcgactatgtcgtagtgggtaaagctccctcttcggagggagcatcagag

SEQ ID NO: 10046 - DNA, 91 bp, synthetic construct
  misc_feature 1..91: note = engineered ribonucleic acid scaffold (ERS) sequence
  source 1..91: mol_type = other DNA
actggcgcttctatctgatttactctgagcagccatcaccagcgactatgtcgtagtgggtaaagctccctcttcggagggagcatcagag

SEQ ID NO: 10047 - DNA, 90 bp, synthetic construct
  misc_feature 1..90: note = engineered ribonucleic acid scaffold (ERS) sequence
  source 1..90: mol_type = other DNA
actggcgcttctatctgattgctctgagcagccatcaccagcgactatgtcgtagtgggtaaagctccctcttcggagggagcatcagag

SEQ ID NO: 10048 - DNA, 91 bp, synthetic construct
  misc_feature 1..91: note = engineered ribonucleic acid scaffold (ERS) sequence
  source 1..91: mol_type = other DNA
actggcgcttctatatctgattactctgagtgccatcaccagcgactatgtcgtagtgggtaaagctccctcttcggagggagcatcagag

SEQ ID NO: 10049 - DNA, 90 bp, synthetic construct
  misc_feature 1..90: note = engineered ribonucleic acid scaffold (ERS) sequence
  source 1..90: mol_type = other DNA
actggcgcttctaatctgattactctgagtgccatcaccagcgactatgtcgtagtgggtaaagctccctcttcggagggagcatcagag

SEQ ID NO: 10050 - DNA, 88 bp, synthetic construct
  misc_feature 1..88: note = engineered ribonucleic acid scaffold (ERS) sequence
  source 1..88: mol_type = other DNA
actggcgcttctactgattactctgagtgccatcaccagcgactatgtcgtagtgggtaaagctccctcttcggagggagcatcagag

SEQ ID NO: 10051 - DNA, 89 bp, synthetic construct
  misc_feature 1..89: note = engineered ribonucleic acid scaffold (ERS) sequence
  source 1..89: mol_type = other DNA
actggcgcttctaactgattactctgagtgccatcaccagcgactatgtcgtagtgggtaaagctccctcttcggagggagcatcagag

SEQ ID NO: 10052 - DNA, 89 bp, synthetic construct
  misc_feature 1..89: note = engineered ribonucleic acid scaffold (ERS) sequence
  source 1..89: mol_type = other DNA
actggcgcttctacctgattactctgagtgccatcaccagcgactatgtcgtagtgggtaaagctccctcttcggagggagcatcagag

SEQ ID NO: 10053 - DNA, 89 bp, synthetic construct
  misc_feature 1..89: note = engineered ribonucleic acid scaffold (ERS) sequence
  source 1..89: mol_type = other DNA
actggcgcttctagctgattactctgagtgccatcaccagcgactatgtcgtagtgggtaaagctccctcttcggagggagcatcagag

SEQ ID NO: 10054 - DNA, 91 bp, synthetic construct
  misc_feature 1..91: note = engineered ribonucleic acid scaffold (ERS) sequence
  source 1..91: mol_type = other DNA
actggcgcttctattactgattactctgagtgccatcaccagcgactatgtcgtagtgggtaaagctccctcttcggagggagcatcagag

SEQ ID NO: 10055 - DNA, 89 bp, synthetic construct
  misc_feature 1..89: note = engineered ribonucleic acid scaffold (ERS) sequence
  source 1..89: mol_type = other DNA
actggcgcttctatatgattactctgagtgccatcaccagcgactatgtcgtagtgggtaaagctccctcttcggagggagcatcagag

SEQ ID NO: 10056 - DNA, 89 bp, synthetic construct
  misc_feature 1..89: note = engineered ribonucleic acid scaffold (ERS) sequence
  source 1..89: mol_type = other DNA
actggcgcttctatgtgattactctgagtgccatcaccagcgactatgtcgtagtgggtaaagctccctcttcggagggagcatcagag

SEQ ID NO: 10057 - DNA, 89 bp, synthetic construct
  misc_feature 1..89: note = engineered ribonucleic acid scaffold (ERS) sequence
  source 1..89: mol_type = other DNA
actggcgcttctatttgattactctgagtgccatcaccagcgactatgtcgtagtgggtaaagctccctcttcggagggagcatcagag

SEQ ID NO: 10058 - DNA, 90 bp, synthetic construct
  misc_feature 1..90: note = engineered ribonucleic acid scaffold (ERS) sequence
  source 1..90: mol_type = other DNA
actggcgcttctatcttgattactctgagtgccatcaccagcgactatgtcgtagtgggtaaagctccctcttcggagggagcatcagag

SEQ ID NO: 10059 - DNA, 89 bp, synthetic construct
  misc_feature 1..89: note = engineered ribonucleic acid scaffold (ERS) sequence
  source 1..89: mol_type = other DNA
actggcgcttctatcagattactctgagtgccatcaccagcgactatgtcgtagtgggtaaagctccctcttcggagggagcatcagag

SEQ ID NO: 10060 - DNA, 89 bp, synthetic construct
  misc_feature 1..89: note = engineered ribonucleic acid scaffold (ERS) sequence
  source 1..89: mol_type = other DNA
actggcgcttctatcggattactctgagtgccatcaccagcgactatgtcgtagtgggtaaagctccctcttcggagggagcatcagag

SEQ ID NO: 10061 - DNA, 90 bp, synthetic construct
  misc_feature 1..90: note = engineered ribonucleic acid scaffold (ERS) sequence
  source 1..90: mol_type = other DNA
actggcgcttctatctgaattactctgagtgccatcaccagcgactatgtcgtagtgggtaaagctccctcttcggagggagcatcagag

SEQ ID NO: 10062 - DNA, 90 bp, synthetic construct
  misc_feature 1..90: note = engineered ribonucleic acid scaffold (ERS) sequence
  source 1..90: mol_type = other DNA
actggcgcttctatctgtattactctgagtgccatcaccagcgactatgtcgtagtgggtaaagctccctcttcggagggagcatcagag

SEQ ID NO: 10063 - DNA, 89 bp, synthetic construct
  misc_feature 1..89: note = engineered ribonucleic acid scaffold (ERS) sequence
  source 1..89: mol_type = other DNA
actggcgcttctatctggttactctgagtgccatcaccagcgactatgtcgtagtgggtaaagctccctcttcggagggagcatcagag

SEQ ID NO: 10064 - DNA, 89 bp, synthetic construct
  misc_feature 1..89: note = engineered ribonucleic acid scaffold (ERS) sequence
  source 1..89: mol_type = other DNA
actggcgcttctatctgtttactctgagtgccatcaccagcgactatgtcgtagtgggtaaagctccctcttcggagggagcatcagag

SEQ ID NO: 10065 - DNA, 90 bp, synthetic construct
  misc_feature 1..90: note = engineered ribonucleic acid scaffold (ERS) sequence
  source 1..90: mol_type = other DNA
actggcgcttctatctgatttactctgagtgccatcaccagcgactatgtcgtagtgggtaaagctccctcttcggagggagcatcagag

SEQ ID NO: 10066 - DNA, 89 bp, synthetic construct
  misc_feature 1..89: note = engineered ribonucleic acid scaffold (ERS) sequence
  source 1..89: mol_type = other DNA
actggcgcttctatctgattgctctgagtgccatcaccagcgactatgtcgtagtgggtaaagctccctcttcggagggagcatcagag

SEQ ID NO: 10067 - DNA, 91 bp, synthetic construct
  misc_feature 1..91: note = engineered ribonucleic acid scaffold (ERS) sequence
  source 1..91: mol_type = other DNA
actggctcttctatatctgattactctgagagccatcaccagcgactatgtcgtagtgggtaaagctccctcttcggagggagcatcagag

SEQ ID NO: 10068 - DNA, 90 bp, synthetic construct
  misc_feature 1..90: note = engineered ribonucleic acid scaffold (ERS) sequence
  source 1..90: mol_type = other DNA
actggctcttctaatctgattactctgagagccatcaccagcgactatgtcgtagtgggtaaagctccctcttcggagggagcatcagag

SEQ ID NO: 10069 - DNA, 88 bp, synthetic construct
  misc_feature 1..88: note = engineered ribonucleic acid scaffold (ERS) sequence
  source 1..88: mol_type = other DNA
actggctcttctactgattactctgagagccatcaccagcgactatgtcgtagtgggtaaagctccctcttcggagggagcatcagag

SEQ ID NO: 10070 - DNA, 89 bp, synthetic construct
  misc_feature 1..89: note = engineered ribonucleic acid scaffold (ERS) sequence
  source 1..89: mol_type = other DNA
actggctcttctaactgattactctgagagccatcaccagcgactatgtcgtagtgggtaaagctccctcttcggagggagcatcagag

SEQ ID NO: 10071 - DNA, 89 bp, synthetic construct
  misc_feature 1..89: note = engineered ribonucleic acid scaffold (ERS) sequence
  source 1..89: mol_type = other DNA
actggctcttctacctgattactctgagagccatcaccagcgactatgtcgtagtgggtaaagctccctcttcggagggagcatcagag

SEQ ID NO: 10072 - DNA, 89 bp, synthetic construct
  misc_feature 1..89: note = engineered ribonucleic acid scaffold (ERS) sequence
  source 1..89: mol_type = other DNA
actggctcttctagctgattactctgagagccatcaccagcgactatgtcgtagtgggtaaagctccctcttcggagggagcatcagag

SEQ ID NO: 10073 - DNA, 91 bp, synthetic construct
  misc_feature 1..91: note = engineered ribonucleic acid scaffold (ERS) sequence
  source 1..91: mol_type = other DNA
actggctcttctattactgattactctgagagccatcaccagcgactatgtcgtagtgggtaaagctccctcttcggagggagcatcagag

SEQ ID NO: 10074 - DNA, 89 bp, synthetic construct
  misc_feature 1..89: note = engineered ribonucleic acid scaffold (ERS) sequence
  source 1..89: mol_type = other DNA
actggctcttctatatgattactctgagagccatcaccagcgactatgtcgtagtgggtaaagctccctcttcggagggagcatcagag

SEQ ID NO: 10075 - DNA, 89 bp, synthetic construct
  misc_feature 1..89: note = engineered ribonucleic acid scaffold (ERS) sequence
  source 1..89: mol_type = other DNA
actggctcttctatgtgattactctgagagccatcaccagcgactatgtcgtagtgggtaaagctccctcttcggagggagcatcagag

SEQ ID NO: 10076 - DNA, 89 bp, synthetic construct
  misc_feature 1..89: note = engineered ribonucleic acid scaffold (ERS) sequence
  source 1..89: mol_type = other DNA
actggctcttctatttgattactctgagagccatcaccagcgactatgtcgtagtgggtaaagctccctcttcggagggagcatcagag

SEQ ID NO: 10077 - DNA, 90 bp, synthetic construct
  misc_feature 1..90: note = engineered ribonucleic acid scaffold (ERS) sequence
  source 1..90: mol_type = other DNA
actggctcttctatcttgattactctgagagccatcaccagcgactatgtcgtagtgggtaaagctccctcttcggagggagcatcagag

SEQ ID NO: 10078 - DNA, 89 bp, synthetic construct
  misc_feature 1..89: note = engineered ribonucleic acid scaffold (ERS) sequence
  source 1..89: mol_type = other DNA
actggctcttctatcagattactctgagagccatcaccagcgactatgtcgtagtgggtaaagctccctcttcggagggagcatcagag

SEQ ID NO: 10079 - DNA, 89 bp, synthetic construct
  misc_feature 1..89: note = engineered ribonucleic acid scaffold (ERS) sequence
  source 1..89: mol_type = other DNA
actggctcttctatcggattactctgagagccatcaccagcgactatgtcgtagtgggtaaagctccctcttcggagggagcatcagag

SEQ ID NO: 10080 - DNA, 90 bp, synthetic construct
  misc_feature 1..90: note = engineered ribonucleic acid scaffold (ERS) sequence
  source 1..90: mol_type = other DNA
actggctcttctatctgaattactctgagagccatcaccagcgactatgtcgtagtgggtaaagctccctcttcggagggagcatcagag

SEQ ID NO: 10081 - DNA, 90 bp, synthetic construct
  misc_feature 1..90: note = engineered ribonucleic acid scaffold (ERS) sequence
  source 1..90: mol_type = other DNA
actggctcttctatctgtattactctgagagccatcaccagcgactatgtcgtagtgggtaaagctccctcttcggagggagcatcagag

SEQ ID NO: 10082 - DNA, 89 bp, synthetic construct
  misc_feature 1..89: note = engineered ribonucleic acid scaffold (ERS) sequence
  source 1..89: mol_type = other DNA
actggctcttctatctggttactctgagagccatcaccagcgactatgtcgtagtgggtaaagctccctcttcggagggagcatcagag

SEQ ID NO: 10083 - DNA, 89 bp, synthetic construct
  misc_feature 1..89: note = engineered ribonucleic acid scaffold (ERS) sequence
  source 1..89: mol_type = other DNA
actggctcttctatctgtttactctgagagccatcaccagcgactatgtcgtagtgggtaaagctccctcttcggagggagcatcagag

SEQ ID NO: 10084 - DNA, 90 bp, synthetic construct
  misc_feature 1..90: note = engineered ribonucleic acid scaffold (ERS) sequence
  source 1..90: mol_type = other DNA
actggctcttctatctgatttactctgagagccatcaccagcgactatgtcgtagtgggtaaagctccctcttcggagggagcatcagag

SEQ ID NO: 10085 - DNA, 89 bp, synthetic construct
  misc_feature 1..89: note = engineered ribonucleic acid scaffold (ERS) sequence
  source 1..89: mol_type = other DNA
actggctcttctatctgattgctctgagagccatcaccagcgactatgtcgtagtgggtaaagctccctcttcggagggagcatcagag

SEQ ID NO: 10086 - DNA, 91 bp, synthetic construct
  misc_feature 1..91: note = engineered ribonucleic acid scaffold (ERS) sequence
  source 1..91: mol_type = other DNA
actggctcttctatatctgattactctgagcgccatcaccagcgactatgtcgtagtgggtaaagctccctcttcggagggagcatcagag

SEQ ID NO: 10087 - DNA, 90 bp, synthetic construct
  misc_feature 1..90: note = engineered ribonucleic acid scaffold (ERS) sequence
  source 1..90: mol_type = other DNA
actggctcttctaatctgattactctgagcgccatcaccagcgactatgtcgtagtgggtaaagctccctcttcggagggagcatcagag

SEQ ID NO: 10088 - DNA, 88 bp, synthetic construct
  misc_feature 1..88: note = engineered ribonucleic acid scaffold (ERS) sequence
  source 1..88: mol_type = other DNA
actggctcttctactgattactctgagcgccatcaccagcgactatgtcgtagtgggtaaagctccctcttcggagggagcatcagag

SEQ ID NO: 10089 - DNA, 89 bp, synthetic construct
  misc_feature 1..89: note = engineered ribonucleic acid scaffold (ERS) sequence
  source 1..89: mol_type = other DNA
actggctcttctaactgattactctgagcgccatcaccagcgactatgtcgtagtgggtaaagctccctcttcggagggagcatcagag

SEQ ID NO: 10090 - DNA, 89 bp, synthetic construct
  misc_feature 1..89: note = engineered ribonucleic acid scaffold (ERS) sequence
  source 1..89: mol_type = other DNA
actggctcttctacctgattactctgagcgccatcaccagcgactatgtcgtagtgggtaaagctccctcttcggagggagcatcagag

SEQ ID NO: 10091 - DNA, 89 bp, synthetic construct
  misc_feature 1..89: note = engineered ribonucleic acid scaffold (ERS) sequence
  source 1..89: mol_type = other DNA
actggctcttctagctgattactctgagcgccatcaccagcgactatgtcgtagtgggtaaagctccctcttcggagggagcatcagag

SEQ ID NO: 10092 - DNA, 91 bp, synthetic construct
  misc_feature 1..91: note = engineered ribonucleic acid scaffold (ERS) sequence
  source 1..91: mol_type = other DNA
actggctcttctattactgattactctgagcgccatcaccagcgactatgtcgtagtgggtaaagctccctcttcggagggagcatcagag

SEQ ID NO: 10093 - DNA, 89 bp, synthetic construct
  misc_feature 1..89: note = engineered ribonucleic acid scaffold (ERS) sequence
  source 1..89: mol_type = other DNA
actggctcttctatatgattactctgagcgccatcaccagcgactatgtcgtagtgggtaaagctccctcttcggagggagcatcagag

SEQ ID NO: 10094 - DNA, 89 bp, synthetic construct
  misc_feature 1..89: note = engineered ribonucleic acid scaffold (ERS) sequence
  source 1..89: mol_type = other DNA
actggctcttctatgtgattactctgagcgccatcaccagcgactatgtcgtagtgggtaaagctccctcttcggagggagcatcagag

SEQ ID NO: 10095 - DNA, 89 bp, synthetic construct
  misc_feature 1..89: note = engineered ribonucleic acid scaffold (ERS) sequence
  source 1..89: mol_type = other DNA
actggctcttctatttgattactctgagcgccatcaccagcgactatgtcgtagtgggtaaagctccctcttcggagggagcatcagag

SEQ ID NO: 10096 - DNA, 90 bp, synthetic construct
  misc_feature 1..90: note = engineered ribonucleic acid scaffold (ERS) sequence
  source 1..90: mol_type = other DNA
actggctcttctatcttgattactctgagcgccatcaccagcgactatgtcgtagtgggtaaagctccctcttcggagggagcatcagag

SEQ ID NO: 10097 - DNA, 89 bp, synthetic construct
  misc_feature 1..89: note = engineered ribonucleic acid scaffold (ERS) sequence
  source 1..89: mol_type = other DNA
actggctcttctatcagattactctgagcgccatcaccagcgactatgtcgtagtgggtaaagctccctcttcggagggagcatcagag

SEQ ID NO: 10098 - DNA, 89 bp, synthetic construct
  misc_feature 1..89: note = engineered ribonucleic acid scaffold (ERS) sequence
  source 1..89: mol_type = other DNA
actggctcttctatcggattactctgagcgccatcaccagcgactatgtcgtagtgggtaaagctccctcttcggagggagcatcagag

SEQ ID NO: 10099 - DNA, 90 bp, synthetic construct
  misc_feature 1..90: note = engineered ribonucleic acid scaffold (ERS) sequence
  source 1..90: mol_type = other DNA
actggctcttctatctgaattactctgagcgccatcaccagcgactatgtcgtagtgggtaaagctccctcttcggagggagcatcagag

SEQ ID NO: 10100 - DNA, 90 bp, synthetic construct
  misc_feature 1..90: note = engineered ribonucleic acid scaffold (ERS) sequence
  source 1..90: mol_type = other DNA
actggctcttctatctgtattactctgagcgccatcaccagcgactatgtcgtagtgggtaaagctccctcttcggagggagcatcagag

SEQ ID NO: 10101 - DNA, 89 bp, synthetic construct
  misc_feature 1..89: note = engineered ribonucleic acid scaffold (ERS) sequence
  source 1..89: mol_type = other DNA
actggctcttctatctggttactctgagcgccatcaccagcgactatgtcgtagtgggtaaagctccctcttcggagggagcatcagag

SEQ ID NO: 10102 - DNA, 89 bp, synthetic construct
  misc_feature 1..89: note = engineered ribonucleic acid scaffold (ERS) sequence
  source 1..89: mol_type = other DNA
actggctcttctatctgtttactctgagcgccatcaccagcgactatgtcgtagtgggtaaagctccctcttcggagggagcatcagag

SEQ ID NO: 10103 - DNA, 90 bp, synthetic construct
  misc_feature 1..90: note = engineered ribonucleic acid scaffold (ERS) sequence
  source 1..90: mol_type = other DNA
actggctcttctatctgatttactctgagcgccatcaccagcgactatgtcgtagtgggtaaagctccctcttcggagggagcatcagag

SEQ ID NO: 10104 - DNA, 89 bp, synthetic construct
  misc_feature 1..89: note = engineered ribonucleic acid scaffold (ERS) sequence
  source 1..89: mol_type = other DNA
actggctcttctatctgattgctctgagcgccatcaccagcgactatgtcgtagtgggtaaagctccctcttcggagggagcatcagag

SEQ ID NO: 10105 - DNA, 91 bp, synthetic construct
  misc_feature 1..91: note = engineered ribonucleic acid scaffold (ERS) sequence
  source 1..91: mol_type = other DNA
actggctcttctatatctgattactctgagggccatcaccagcgactatgtcgtagtgggtaaagctccctcttcggagggagcatcagag

SEQ ID NO: 10106 - DNA, 90 bp, synthetic construct
  misc_feature 1..90: note = engineered ribonucleic acid scaffold (ERS) sequence
  source 1..90: mol_type = other DNA
actggctcttctaatctgattactctgagggccatcaccagcgactatgtcgtagtgggtaaagctccctcttcggagggagcatcagag

SEQ ID NO: 10107 - DNA, 88 bp, synthetic construct
  misc_feature 1..88: note = engineered ribonucleic acid scaffold (ERS) sequence
  source 1..88: mol_type = other DNA
actggctcttctactgattactctgagggccatcaccagcgactatgtcgtagtgggtaaagctccctcttcggagggagcatcagag

SEQ ID NO: 10108 - DNA, 89 bp, synthetic construct
  misc_feature 1..89: note = engineered ribonucleic acid scaffold (ERS) sequence
  source 1..89: mol_type = other DNA
actggctcttctaactgattactctgagggccatcaccagcgactatgtcgtagtgggtaaagctccctcttcggagggagcatcagag

SEQ ID NO: 10109 - DNA, 89 bp, synthetic construct
  misc_feature 1..89: note = engineered ribonucleic acid scaffold (ERS) sequence
  source 1..89: mol_type = other DNA
actggctcttctacctgattactctgagggccatcaccagcgactatgtcgtagtgggtaaagctccctcttcggagggagcatcagag

SEQ ID NO: 10110 - DNA, 89 bp, synthetic construct
  misc_feature 1..89: note = engineered ribonucleic acid scaffold (ERS) sequence
  source 1..89: mol_type = other DNA
actggctcttctagctgattactctgagggccatcaccagcgactatgtcgtagtgggtaaagctccctcttcggagggagcatcagag

SEQ ID NO: 10111 - DNA, 91 bp, synthetic construct
  misc_feature 1..91: note = engineered ribonucleic acid scaffold (ERS) sequence
  source 1..91: mol_type = other DNA
actggctcttctattactgattactctgagggccatcaccagcgactatgtcgtagtgggtaaagctccctcttcggagggagcatcagag

SEQ ID NO: 10112 - DNA, 89 bp, synthetic construct
  misc_feature 1..89: note = engineered ribonucleic acid scaffold (ERS) sequence
  source 1..89: mol_type = other DNA
actggctcttctatatgattactctgagggccatcaccagcgactatgtcgtagtgggtaaagctccctcttcggagggagcatcagag

SEQ ID NO: 10113 - DNA, 89 bp, synthetic construct
  misc_feature 1..89: note = engineered ribonucleic acid scaffold (ERS) sequence
  source 1..89: mol_type = other DNA
actggctcttctatgtgattactctgagggccatcaccagcgactatgtcgtagtgggtaaagctccctcttcggagggagcatcagag

SEQ ID NO: 10114 - DNA, 89 bp, synthetic construct
  misc_feature 1..89: note = engineered ribonucleic acid scaffold (ERS) sequence
  source 1..89: mol_type = other DNA
actggctcttctatttgattactctgagggccatcaccagcgactatgtcgtagtgggtaaagctccctcttcggagggagcatcagag

SEQ ID NO: 10115 - DNA, 90 bp, synthetic construct
  misc_feature 1..90: note = engineered ribonucleic acid scaffold (ERS) sequence
  source 1..90: mol_type = other DNA
actggctcttctatcttgattactctgagggccatcaccagcgactatgtcgtagtgggtaaagctccctcttcggagggagcatcagag

SEQ ID NO: 10116 - DNA, 89 bp, synthetic construct
  misc_feature 1..89: note = engineered ribonucleic acid scaffold (ERS) sequence
  source 1..89: mol_type = other DNA
actggctcttctatcagattactctgagggccatcaccagcgactatgtcgtagtgggtaaagctccctcttcggagggagcatcagag

SEQ ID NO: 10117 - DNA, 89 bp, synthetic construct
  misc_feature 1..89: note = engineered ribonucleic acid scaffold (ERS) sequence
  source 1..89: mol_type = other DNA
actggctcttctatcggattactctgagggccatcaccagcgactatgtcgtagtgggtaaagctccctcttcggagggagcatcagag

SEQ ID NO: 10118 - DNA, 90 bp, synthetic construct
  misc_feature 1..90: note = engineered ribonucleic acid scaffold (ERS) sequence
  source 1..90: mol_type = other DNA
actggctcttctatctgaattactctgagggccatcaccagcgactatgtcgtagtgggtaaagctccctcttcggagggagcatcagag

SEQ ID NO: 10119 - DNA, 90 bp, synthetic construct
  misc_feature 1..90: note = engineered ribonucleic acid scaffold (ERS) sequence
  source 1..90: mol_type = other DNA
actggctcttctatctgtattactctgagggccatcaccagcgactatgtcgtagtgggtaaagctccctcttcggagggagcatcagag

SEQ ID NO: 10120 - DNA, 89 bp, synthetic construct
  misc_feature 1..89: note = engineered ribonucleic acid scaffold (ERS) sequence
  source 1..89: mol_type = other DNA
actggctcttctatctggttactctgagggccatcaccagcgactatgtcgtagtgggtaaagctccctcttcggagggagcatcagag

SEQ ID NO: 10121 - DNA, 89 bp, synthetic construct
  misc_feature 1..89: note = engineered ribonucleic acid scaffold (ERS) sequence
  source 1..89: mol_type = other DNA
actggctcttctatctgtttactctgagggccatcaccagcgactatgtcgtagtgggtaaagctccctcttcggagggagcatcagag

SEQ ID NO: 10122 - DNA, 90 bp, synthetic construct
  misc_feature 1..90: note = engineered ribonucleic acid scaffold (ERS) sequence
  source 1..90: mol_type = other DNA
actggctcttctatctgatttactctgagggccatcaccagcgactatgtcgtagtgggtaaagctccctcttcggagggagcatcagag

SEQ ID NO: 10123 - DNA, 89 bp, synthetic construct
  misc_feature 1..89: note = engineered ribonucleic acid scaffold (ERS) sequence
  source 1..89: mol_type = other DNA
actggctcttctatctgattgctctgagggccatcaccagcgactatgtcgtagtgggtaaagctccctcttcggagggagcatcagag

SEQ ID NO: 10124 - DNA, 91 bp, synthetic construct
  misc_feature 1..91: note = engineered ribonucleic acid scaffold (ERS) sequence
  source 1..91: mol_type = other DNA
actggctcttctatatctgattactctgagtgccatcaccagcgactatgtcgtagtgggtaaagctccctcttcggagggagcatcagag

SEQ ID NO: 10125 - DNA, 90 bp, synthetic construct
  misc_feature 1..90: note = engineered ribonucleic acid scaffold (ERS) sequence
  source 1..90: mol_type = other DNA
actggctcttctaatctgattactctgagtgccatcaccagcgactatgtcgtagtgggtaaagctccctcttcggagggagcatcagag

SEQ ID NO: 10126 - DNA, 88 bp, synthetic construct
  misc_feature 1..88: note = engineered ribonucleic acid scaffold (ERS) sequence
  source 1..88: mol_type = other DNA
actggctcttctactgattactctgagtgccatcaccagcgactatgtcgtagtgggtaaagctccctcttcggagggagcatcagag

SEQ ID NO: 10127 - DNA, 89 bp, synthetic construct
  misc_feature 1..89: note = engineered ribonucleic acid scaffold (ERS) sequence
  source 1..89: mol_type = other DNA
actggctcttctaactgattactctgagtgccatcaccagcgactatgtcgtagtgggtaaagctccctcttcggagggagcatcagag

SEQ ID NO: 10128 - DNA, 89 bp, synthetic construct
  misc_feature 1..89: note = engineered ribonucleic acid scaffold (ERS) sequence
  source 1..89: mol_type = other DNA
actggctcttctacctgattactctgagtgccatcaccagcgactatgtcgtagtgggtaaagctccctcttcggagggagcatcagag

SEQ ID NO: 10129 - DNA, 89 bp, synthetic construct
  misc_feature 1..89: note = engineered ribonucleic acid scaffold (ERS) sequence
  source 1..89: mol_type = other DNA
actggctcttctagctgattactctgagtgccatcaccagcgactatgtcgtagtgggtaaagctccctcttcggagggagcatcagag

SEQ ID NO: 10130 - DNA, 91 bp, synthetic construct
  misc_feature 1..91: note = engineered ribonucleic acid scaffold (ERS) sequence
  source 1..91: mol_type = other DNA
actggctcttctattactgattactctgagtgccatcaccagcgactatgtcgtagtgggtaaagctccctcttcggagggagcatcagag

SEQ ID NO: 10131 - DNA, 89 bp, synthetic construct
  misc_feature 1..89: note = engineered ribonucleic acid scaffold (ERS) sequence
  source 1..89: mol_type = other DNA
actggctcttctatatgattactctgagtgccatcaccagcgactatgtcgtagtgggtaaagctccctcttcggagggagcatcagag

SEQ ID NO: 10132 - DNA, 89 bp, synthetic construct
  misc_feature 1..89: note = engineered ribonucleic acid scaffold (ERS) sequence
  source 1..89: mol_type = other DNA
actggctcttctatgtgattactctgagtgccatcaccagcgactatgtcgtagtgggtaaagctccctcttcggagggagcatcagag

SEQ ID NO: 10133 - DNA, 89 bp, synthetic construct
  misc_feature 1..89: note = engineered ribonucleic acid scaffold (ERS) sequence
  source 1..89: mol_type = other DNA
actggctcttctatttgattactctgagtgccatcaccagcgactatgtcgtagtgggtaaagctccctcttcggagggagcatcagag

SEQ ID NO: 10134 - DNA, 90 bp, synthetic construct
  misc_feature 1..90: note = engineered ribonucleic acid scaffold (ERS) sequence
  source 1..90: mol_type = other DNA
actggctcttctatcttgattactctgagtgccatcaccagcgactatgtcgtagtgggtaaagctccctcttcggagggagcatcagag

SEQ ID NO: 10135 - DNA, 89 bp, synthetic construct
  misc_feature 1..89: note = engineered ribonucleic acid scaffold (ERS) sequence
  source 1..89: mol_type = other DNA
actggctcttctatcagattactctgagtgccatcaccagcgactatgtcgtagtgggtaaagctccctcttcggagggagcatcagag

SEQ ID NO: 10136 - DNA, 89 bp, synthetic construct
  misc_feature 1..89: note = engineered ribonucleic acid scaffold (ERS) sequence
  source 1..89: mol_type = other DNA
actggctcttctatcggattactctgagtgccatcaccagcgactatgtcgtagtgggtaaagctccctcttcggagggagcatcagag

SEQ ID NO: 10137 - DNA, 90 bp, synthetic construct
  misc_feature 1..90: note = engineered ribonucleic acid scaffold (ERS) sequence
  source 1..90: mol_type = other DNA
actggctcttctatctgaattactctgagtgccatcaccagcgactatgtcgtagtgggtaaagctccctcttcggagggagcatcagag

SEQ ID NO: 10138 - DNA, 90 bp, synthetic construct
  misc_feature 1..90: note = engineered ribonucleic acid scaffold (ERS) sequence
  source 1..90: mol_type = other DNA
actggctcttctatctgtattactctgagtgccatcaccagcgactatgtcgtagtgggtaaagctccctcttcggagggagcatcagag

SEQ ID NO: 10139 - DNA, 89 bp, synthetic construct
  misc_feature 1..89: note = engineered ribonucleic acid scaffold (ERS) sequence
  source 1..89: mol_type = other DNA
actggctcttctatctggttactctgagtgccatcaccagcgactatgtcgtagtgggtaaagctccctcttcggagggagcatcagag

SEQ ID NO: 10140 - DNA, 89 bp, synthetic construct
  misc_feature 1..89: note = engineered ribonucleic acid scaffold (ERS) sequence
  source 1..89: mol_type = other DNA
actggctcttctatctgtttactctgagtgccatcaccagcgactatgtcgtagtgggtaaagctccctcttcggagggagcatcagag

SEQ ID NO: 10141 - DNA, 90 bp, synthetic construct
  misc_feature 1..90: note = engineered ribonucleic acid scaffold (ERS) sequence
  source 1..90: mol_type = other DNA
actggctcttctatctgatttactctgagtgccatcaccagcgactatgtcgtagtgggtaaagctccctcttcggagggagcatcagag

SEQ ID NO: 10142 - DNA, 89 bp, synthetic construct
  misc_feature 1..89: note = engineered ribonucleic acid scaffold (ERS) sequence
  source 1..89: mol_type = other DNA
actggctcttctatctgattgctctgagtgccatcaccagcgactatgtcgtagtgggtaaagctccctcttcggagggagcatcagag

SEQ ID NO: 10143 - DNA, 91 bp, synthetic construct
  misc_feature 1..91: note = engineered ribonucleic acid scaffold (ERS) sequence
  source 1..91: mol_type = other DNA
actggcggttctatatctgattactctgagcgccatcaccagcgactatgtcgtagtgggtaaagctccctcttcggagggagcatcagag

SEQ ID NO: 10144 - DNA, 90 bp, synthetic construct
  misc_feature 1..90: note = engineered ribonucleic acid scaffold (ERS) sequence
  source 1..90: mol_type = other DNA
actggcggttctaatctgattactctgagcgccatcaccagcgactatgtcgtagtgggtaaagctccctcttcggagggagcatcagag

SEQ ID NO: 10145 - DNA, 88 bp, synthetic construct
  misc_feature 1..88: note = engineered ribonucleic acid scaffold (ERS) sequence
  source 1..88: mol_type = other DNA
actggcggttctactgattactctgagcgccatcaccagcgactatgtcgtagtgggtaaagctccctcttcggagggagcatcagag

SEQ ID NO: 10146 - DNA, 89 bp, synthetic construct
  misc_feature 1..89: note = engineered ribonucleic acid scaffold (ERS) sequence
  source 1..89: mol_type = other DNA
actggcggttctaactgattactctgagcgccatcaccagcgactatgtcgtagtgggtaaagctccctcttcggagggagcatcagag

SEQ ID NO: 10147 - DNA, 89 bp, synthetic construct
  misc_feature 1..89: note = engineered ribonucleic acid scaffold (ERS) sequence
  source 1..89: mol_type = other DNA
actggcggttctacctgattactctgagcgccatcaccagcgactatgtcgtagtgggtaaagctccctcttcggagggagcatcagag

SEQ ID NO: 10148 - DNA, 89 bp, synthetic construct
  misc_feature 1..89: note = engineered ribonucleic acid scaffold (ERS) sequence
  source 1..89: mol_type = other DNA
actggcggttctagctgattactctgagcgccatcaccagcgactatgtcgtagtgggtaaagctccctcttcggagggagcatcagag

SEQ ID NO: 10149 - DNA, 91 bp, synthetic construct
  misc_feature 1..91: note = engineered ribonucleic acid scaffold (ERS) sequence
  source 1..91: mol_type = other DNA
actggcggttctattactgattactctgagcgccatcaccagcgactatgtcgtagtgggtaaagctccctcttcggagggagcatcagag

SEQ ID NO: 10150 - DNA, 89 bp, synthetic construct
  misc_feature 1..89: note = engineered ribonucleic acid scaffold (ERS) sequence
  source 1..89: mol_type = other DNA
actggcggttctatatgattactctgagcgccatcaccagcgactatgtcgtagtgggtaaagctccctcttcggagggagcatcagag

SEQ ID NO: 10151 - DNA, 89 bp, synthetic construct
  misc_feature 1..89: note = engineered ribonucleic acid scaffold (ERS) sequence
  source 1..89: mol_type = other DNA
actggcggttctatgtgattactctgagcgccatcaccagcgactatgtcgtagtgggtaaagctccctcttcggagggagcatcagag

SEQ ID NO: 10152 - DNA, 89 bp, synthetic construct
  misc_feature 1..89: note = engineered ribonucleic acid scaffold (ERS) sequence
  source 1..89: mol_type = other DNA
actggcggttctatttgattactctgagcgccatcaccagcgactatgtcgtagtgggtaaagctccctcttcggagggagcatcagag

SEQ ID NO: 10153 - DNA, 90 bp, synthetic construct
  misc_feature 1..90: note = engineered ribonucleic acid scaffold (ERS) sequence
  source 1..90: mol_type = other DNA
actggcggttctatcttgattactctgagcgccatcaccagcgactatgtcgtagtgggtaaagctccctcttcggagggagcatcagag

SEQ ID NO: 10154 - DNA, 89 bp, synthetic construct
  misc_feature 1..89: note = engineered ribonucleic acid scaffold (ERS) sequence
  source 1..89: mol_type = other DNA
actggcggttctatcagattactctgagcgccatcaccagcgactatgtcgtagtgggtaaagctccctcttcggagggagcatcagag

SEQ ID NO: 10155 - DNA, 89 bp, synthetic construct
  misc_feature 1..89: note = engineered ribonucleic acid scaffold (ERS) sequence
  source 1..89: mol_type = other DNA
actggcggttctatcggattactctgagcgccatcaccagcgactatgtcgtagtgggtaaagctccctcttcggagggagcatcagag

SEQ ID NO: 10156 - DNA, 90 bp, synthetic construct
  misc_feature 1..90: note = engineered ribonucleic acid scaffold (ERS) sequence
  source 1..90: mol_type = other DNA
actggcggttctatctgaattactctgagcgccatcaccagcgactatgtcgtagtgggtaaagctccctcttcggagggagcatcagag

SEQ ID NO: 10157 - DNA, 90 bp, synthetic construct
  misc_feature 1..90: note = engineered ribonucleic acid scaffold (ERS) sequence
  source 1..90: mol_type = other DNA
actggcggttctatctgtattactctgagcgccatcaccagcgactatgtcgtagtgggtaaagctccctcttcggagggagcatcagag

SEQ ID NO: 10158 - DNA, 89 bp, synthetic construct
  misc_feature 1..89: note = engineered ribonucleic acid scaffold (ERS) sequence
  source 1..89: mol_type = other DNA
actggcggttctatctggttactctgagcgccatcaccagcgactatgtcgtagtgggtaaagctccctcttcggagggagcatcagag

SEQ ID NO: 10159 - DNA, 89 bp, synthetic construct
  misc_feature 1..89: note = engineered ribonucleic acid scaffold (ERS) sequence
  source 1..89: mol_type = other DNA
actggcggttctatctgtttactctgagcgccatcaccagcgactatgtcgtagtgggtaaagctccctcttcggagggagcatcagag

SEQ ID NO: 10160 - DNA, 90 bp, synthetic construct
  misc_feature 1..90: note = engineered ribonucleic acid scaffold (ERS) sequence
  source 1..90: mol_type = other DNA
actggcggttctatctgatttactctgagcgccatcaccagcgactatgtcgtagtgggtaaagctccctcttcggagggagcatcagag

SEQ ID NO: 10161 - DNA, 89 bp, synthetic construct
  misc_feature 1..89: note = engineered ribonucleic acid scaffold (ERS) sequence
  source 1..89: mol_type = other DNA
actggcggttctatctgattgctctgagcgccatcaccagcgactatgtcgtagtgggtaaagctccctcttcggagggagcatcagag

SEQ ID NO: 10162 - DNA, 91 bp, synthetic construct
  misc_feature 1..91: note = engineered ribonucleic acid scaffold (ERS) sequence
  source 1..91: mol_type = other DNA
actggcggttctatatctgattactctgagagccatcaccagcgactatgtcgtagtgggtaaagctccctcttcggagggagcatcagag

SEQ ID NO: 10163 - DNA, 90 bp, synthetic construct
  misc_feature 1..90: note = engineered ribonucleic acid scaffold (ERS) sequence
  source 1..90: mol_type = other DNA
actggcggttctaatctgattactctgagagccatcaccagcgactatgtcgtagtgggtaaagctccctcttcggagggagcatcagag

SEQ ID NO: 10164 - DNA, 88 bp, synthetic construct
  misc_feature 1..88: note = engineered ribonucleic acid scaffold (ERS) sequence
  source 1..88: mol_type = other DNA
actggcggttctactgattactctgagagccatcaccagcgactatgtcgtagtgggtaaagctccctcttcggagggagcatcagag

SEQ ID NO: 10165 - DNA, 89 bp, synthetic construct
  misc_feature 1..89: note = engineered ribonucleic acid scaffold (ERS) sequence
  source 1..89: mol_type = other DNA
actggcggttctaactgattactctgagagccatcaccagcgactatgtcgtagtgggtaaagctccctcttcggagggagcatcagag

SEQ ID NO: 10166 - DNA, 89 bp, synthetic construct
  misc_feature 1..89: note = engineered ribonucleic acid scaffold (ERS) sequence
  source 1..89: mol_type = other DNA
actggcggttctacctgattactctgagagccatcaccagcgactatgtcgtagtgggtaaagctccctcttcggagggagcatcagag

SEQ ID NO: 10167 - DNA, 89 bp, synthetic construct
  misc_feature 1..89: note = engineered ribonucleic acid scaffold (ERS) sequence
  source 1..89: mol_type = other DNA
actggcggttctagctgattactctgagagccatcaccagcgactatgtcgtagtgggtaaagctccctcttcggagggagcatcagag

SEQ ID NO: 10168 - DNA, 91 bp, synthetic construct
  misc_feature 1..91: note = engineered ribonucleic acid scaffold (ERS) sequence
  source 1..91: mol_type = other DNA
actggcggttctattactgattactctgagagccatcaccagcgactatgtcgtagtgggtaaagctccctcttcggagggagcatcagag

SEQ ID NO: 10169 - DNA, 89 bp, synthetic construct
  misc_feature 1..89: note = engineered ribonucleic acid scaffold (ERS) sequence
  source 1..89: mol_type = other DNA
actggcggttctatatgattactctgagagccatcaccagcgactatgtcgtagtgggtaaagctccctcttcggagggagcatcagag

SEQ ID NO: 10170 - DNA, 89 bp, synthetic construct
  misc_feature 1..89: note = engineered ribonucleic acid scaffold (ERS) sequence
  source 1..89: mol_type = other DNA
actggcggttctatgtgattactctgagagccatcaccagcgactatgtcgtagtgggtaaagctccctcttcggagggagcatcagag

SEQ ID NO: 10171 - DNA, 89 bp, synthetic construct
  misc_feature 1..89: note = engineered ribonucleic acid scaffold (ERS) sequence
  source 1..89: mol_type = other DNA
actggcggttctatttgattactctgagagccatcaccagcgactatgtcgtagtgggtaaagctccctcttcggagggagcatcagag

SEQ ID NO: 10172 - DNA, 90 bp, synthetic construct
  misc_feature 1..90: note = engineered ribonucleic acid scaffold (ERS) sequence
  source 1..90: mol_type = other DNA
actggcggttctatcttgattactctgagagccatcaccagcgactatgtcgtagtgggtaaagctccctcttcggagggagcatcagag

SEQ ID NO: 10173 - DNA, 89 bp, synthetic construct
  misc_feature 1..89: note = engineered ribonucleic acid scaffold (ERS) sequence
  source 1..89: mol_type = other DNA
actggcggttctatcagattactctgagagccatcaccagcgactatgtcgtagtgggtaaagctccctcttcggagggagcatcagag

SEQ ID NO: 10174 - DNA, 89 bp, synthetic construct
  misc_feature 1..89: note = engineered ribonucleic acid scaffold (ERS) sequence
  source 1..89: mol_type = other DNA
actggcggttctatcggattactctgagagccatcaccagcgactatgtcgtagtgggtaaagctccctcttcggagggagcatcagag

SEQ ID NO: 10175 - DNA, 90 bp, synthetic construct
  misc_feature 1..90: note = engineered ribonucleic acid scaffold (ERS) sequence
  source 1..90: mol_type = other DNA
actggcggttctatctgaattactctgagagccatcaccagcgactatgtcgtagtgggtaaagctccctcttcggagggagcatcagag

SEQ ID NO: 10176 - DNA, 90 bp, synthetic construct
  misc_feature 1..90: note = engineered ribonucleic acid scaffold (ERS) sequence
  source 1..90: mol_type = other DNA
actggcggttctatctgtattactctgagagccatcaccagcgactatgtcgtagtgggtaaagctccctcttcggagggagcatcagag

SEQ ID NO: 10177 - DNA, 89 bp, synthetic construct
  misc_feature 1..89: note = engineered ribonucleic acid scaffold (ERS) sequence
  source 1..89: mol_type = other DNA
actggcggttctatctggttactctgagagccatcaccagcgactatgtcgtagtgggtaaagctccctcttcggagggagcatcagag

SEQ ID NO: 10178 - DNA, 89 bp, synthetic construct
  misc_feature 1..89: note = engineered ribonucleic acid scaffold (ERS) sequence
  source 1..89: mol_type = other DNA
actggcggttctatctgtttactctgagagccatcaccagcgactatgtcgtagtgggtaaagctccctcttcggagggagcatcagag

SEQ ID NO: 10179 - DNA, 90 bp, synthetic construct
  misc_feature 1..90: note = engineered ribonucleic acid scaffold (ERS) sequence
  source 1..90: mol_type = other DNA
actggcggttctatctgatttactctgagagccatcaccagcgactatgtcgtagtgggtaaagctccctcttcggagggagcatcagag

SEQ ID NO: 10180 - DNA, 89 bp, synthetic construct
  misc_feature 1..89: note = engineered ribonucleic acid scaffold (ERS) sequence
  source 1..89: mol_type = other DNA
actggcggttctatctgattgctctgagagccatcaccagcgactatgtcgtagtgggtaaagctccctcttcggagggagcatcagag

SEQ ID NO: 10181 - DNA, 88 bp, synthetic construct
  misc_feature 1..88: note = engineered ribonucleic acid scaffold (ERS) sequence
  source 1..88: mol_type = other DNA
actggcgcttctatctgattactctcagcgccaacaccagcgactatgtcgtatgggtaaagctccctcttcggagggagcatcagac

SEQ ID NO: 10182 - DNA, 88 bp, synthetic construct
  misc_feature 1..88: note = engineered ribonucleic acid scaffold (ERS) sequence
  source 1..88: mol_type = other DNA
actggcgcttctatctgattactttgagcgccaacaccagcgactatgtcgtatgggtaaagctccctcttcggagggagcatcagag

SEQ ID NO: 10183 - DNA, 88 bp, synthetic construct
  misc_feature 1..88: note = engineered ribonucleic acid scaffold (ERS) sequence
  source 1..88: mol_type = other DNA
actggcgcttctatctgattactttgagcgccaacaccagcgactatgtcgtatgggtaaagctccctcttcggagggagcatcaaag

SEQ ID NO: 10184 - DNA, 88 bp, synthetic construct
  misc_feature 1..88: note = engineered ribonucleic acid scaffold (ERS) sequence
  source 1..88: mol_type = other DNA
actggcgcttctatctgattagtctcagcgccaacaccagcgactatgtcgtatgggtaaagctccctcttcggagggagcatgagac

SEQ ID NO: 10185 - DNA, 88 bp, synthetic construct
  misc_feature 1..88: note = engineered ribonucleic acid scaffold (ERS) sequence
  source 1..88: mol_type = other DNA
actggcgcttctatctgattagtctgagcgccaacaccagcgactatgtcgtatgggtaaagctccctcttcggagggagcatcagac

SEQ ID NO: 10186 - DNA, 88 bp, synthetic construct
  misc_feature 1..88: note = engineered ribonucleic acid scaffold (ERS) sequence
  source 1..88: mol_type = other DNA
actggcgcttctatctgattactctcagcgccaacaccagcgactatgtcgtatgggtaaagctccctcttcggagggagcatgagag

SEQ ID NO: 10187 - DNA, 88 bp, synthetic construct
  misc_feature 1..88: note = engineered ribonucleic acid scaffold (ERS) sequence
  source 1..88: mol_type = other DNA
actggcgctcccatctgattaccccgagcgccaacaccagcgactatgtcgtatgggtaaagctccctcttcggagggagcatcgggg

SEQ ID NO: 10188 - DNA, 88 bp, synthetic construct
  misc_feature 1..88: note = engineered ribonucleic acid scaffold (ERS) sequence
  source 1..88: mol_type = other DNA
actggcgctcctatctgattactccgagcgccaacaccagcgactatgtcgtatgggtaaagctccctcttcggagggagcatcggag

SEQ ID NO: 10189 - DNA, 88 bp, synthetic construct
  misc_feature 1..88: note = engineered ribonucleic acid scaffold (ERS) sequence
  source 1..88: mol_type = other DNA
actggcgctgggatctgattaccccgagcgccaacaccagcgactatgtcgtatgggtaaagctccctcttcggagggagcatcgggg

SEQ ID NO: 10190 - DNA, 88 bp, synthetic construct
  misc_feature 1..88: note = engineered ribonucleic acid scaffold (ERS) sequence
  source 1..88: mol_type = other DNA
actggcgctggtatctgattactccgagcgccaacaccagcgactatgtcgtatgggtaaagctccctcttcggagggagcatcggag

SEQ ID NO: 10191 - DNA, 88 bp, synthetic construct
  misc_feature 1..88: note = engineered ribonucleic acid scaffold (ERS) sequence
  source 1..88: mol_type = other DNA
actggcgcttccatctgattaccctgagcgccaacaccagcgactatgtcgtatgggtaaagctccctcttcggagggagcatcaggg

SEQ ID NO: 10192 - DNA, 88 bp, synthetic construct
  misc_feature 1..88: note = engineered ribonucleic acid scaffold (ERS) sequence
  source 1..88: mol_type = other DNA
actggcgcttggatctgattaccctgagcgccaacaccagcgactatgtcgtatgggtaaagctccctcttcggagggagcatcaggg

SEQ ID NO: 10193 - DNA, 88 bp, synthetic construct
  misc_feature 1..88: note = engineered ribonucleic acid scaffold (ERS) sequence
  source 1..88: mol_type = other DNA
actggcgcttgtatctgattactctgagcgccaacaccagcgactatgtcgtatgggtaaagctccctcttcggagggagcatcagag

SEQ ID NO: 10194 - DNA, 88 bp, synthetic construct
  misc_feature 1..88: note = engineered ribonucleic acid scaffold (ERS) sequence
  source 1..88: mol_type = other DNA
actggcgcttttatctgattactttgagcgccaacaccagcgactatgtcgtatgggtaaagctccctcttcggagggagcatcagag

SEQ ID NO: 10195 - DNA, 88 bp, synthetic construct
  misc_feature 1..88: note = engineered ribonucleic acid scaffold (ERS) sequence
  source 1..88: mol_type = other DNA
actggcgcttttatctgattactctgagcgccaacaccagcgactatgtcgtatgggtaaagctccctcttcggagggagcatcagag

SEQ ID NO: 10196 - DNA, 88 bp, synthetic construct
  misc_feature 1..88: note = engineered ribonucleic acid scaffold (ERS) sequence
  source 1..88: mol_type = other DNA
actggcgcttttatctgattactctgagcgccaacaccagcgactatgtcgtatgggtaaagctccctcttcggagggagcatcaaag

SEQ ID NO: 10197 - DNA, 88 bp, synthetic construct
  misc_feature 1..88: note = engineered ribonucleic acid scaffold (ERS) sequence
  source 1..88: mol_type = other DNA
actggcgcttctatctgattactctgagcgccaacaccagcgactatgtcgtatgggtaaagctccctcttcggagggagcctcagag

SEQ ID NO: 10198 - DNA, 88 bp, synthetic construct
  misc_feature 1..88: note = engineered ribonucleic acid scaffold (ERS) sequence
  source 1..88: mol_type = other DNA
actggcgcttctatctgattactctgagcgccaacaccagcgactatgtcgtatgggtaaagctccctcttcggagggagcgtcagag

SEQ ID NO: 10199 - DNA, 88 bp, synthetic construct
  misc_feature 1..88: note = engineered ribonucleic acid scaffold (ERS) sequence
  source 1..88: mol_type = other DNA
actggcgcttctatctgattactctgagcgccaacaccagcgactatgtcgtatgggtaaagctccctcttcggagggagcatcaaag

SEQ ID NO: 10200 - DNA, 88 bp, synthetic construct
  misc_feature 1..88: note = engineered ribonucleic acid scaffold (ERS) sequence
  source 1..88: mol_type = other DNA
actggcgcttctatctgattactctcagcgccagcaccagcgactatgtcgtatgggtaaagctccctcttcggagggagcatcagac

SEQ ID NO: 10201 - DNA, 88 bp, synthetic construct
  misc_feature 1..88: note = engineered ribonucleic acid scaffold (ERS) sequence
  source 1..88: mol_type = other DNA
actggcgcttctatctgattactttgagcgccagcaccagcgactatgtcgtatgggtaaagctccctcttcggagggagcatcagag

SEQ ID NO: 10202 - DNA, 88 bp, synthetic construct
  misc_feature 1..88: note = engineered ribonucleic acid scaffold (ERS) sequence
  source 1..88: mol_type = other DNA
actggcgcttctatctgattactttgagcgccagcaccagcgactatgtcgtatgggtaaagctccctcttcggagggagcatcaaag

SEQ ID NO: 10203 - DNA, 88 bp, synthetic construct
  misc_feature 1..88: note = engineered ribonucleic acid scaffold (ERS) sequence
  source 1..88: mol_type = other DNA
actggcgcttctatctgattagtctcagcgccagcaccagcgactatgtcgtatgggtaaagctccctcttcggagggagcatgagac

SEQ ID NO: 10204 - DNA, 88 bp, synthetic construct
  misc_feature 1..88: note = engineered ribonucleic acid scaffold (ERS) sequence
  source 1..88: mol_type = other DNA
actggcgcttctatctgattagtctgagcgccagcaccagcgactatgtcgtatgggtaaagctccctcttcggagggagcatcagac

SEQ ID NO: 10205 - DNA, 88 bp, synthetic construct
  misc_feature 1..88: note = engineered ribonucleic acid scaffold (ERS) sequence
  source 1..88: mol_type = other DNA
actggcgcttctatctgattactctcagcgccagcaccagcgactatgtcgtatgggtaaagctccctcttcggagggagcatgagag

SEQ ID NO: 10206 - DNA, 88 bp, synthetic construct
  misc_feature 1..88: note = engineered ribonucleic acid scaffold (ERS) sequence
  source 1..88: mol_type = other DNA
actggcgctcccatctgattaccccgagcgccagcaccagcgactatgtcgtatgggtaaagctccctcttcggagggagcatcgggg

SEQ ID NO: 10207 - DNA, 88 bp, synthetic construct
  misc_feature 1..88: note = engineered ribonucleic acid scaffold (ERS) sequence
  source 1..88: mol_type = other DNA
actggcgctcctatctgattactccgagcgccagcaccagcgactatgtcgtatgggtaaagctccctcttcggagggagcatcggag

SEQ ID NO: 10208 - DNA, 88 bp, synthetic construct
  misc_feature 1..88: note = engineered ribonucleic acid scaffold (ERS) sequence
  source 1..88: mol_type = other DNA
actggcgctgggatctgattaccccgagcgccagcaccagcgactatgtcgtatgggtaaagctccctcttcggagggagcatcgggg

SEQ ID NO: 10209 - DNA, 88 bp, synthetic construct
  misc_feature 1..88: note = engineered ribonucleic acid scaffold (ERS) sequence
  source 1..88: mol_type = other DNA
actggcgctggtatctgattactccgagcgccagcaccagcgactatgtcgtatgggtaaagctccctcttcggagggagcatcggag

SEQ ID NO: 10210 - DNA, 88 bp, synthetic construct
  misc_feature 1..88: note = engineered ribonucleic acid scaffold (ERS) sequence
  source 1..88: mol_type = other DNA
actggcgcttccatctgattaccctgagcgccagcaccagcgactatgtcgtatgggtaaagctccctcttcggagggagcatcaggg

SEQ ID NO: 10211 - DNA, 88 bp, synthetic construct
  misc_feature 1..88: note = engineered ribonucleic acid scaffold (ERS) sequence
  source 1..88: mol_type = other DNA
actggcgcttggatctgattaccctgagcgccagcaccagcgactatgtcgtatgggtaaagctccctcttcggagggagcatcaggg

SEQ ID NO: 10212 - DNA, 88 bp, synthetic construct
  misc_feature 1..88: note = engineered ribonucleic acid scaffold (ERS) sequence
  source 1..88: mol_type = other DNA
actggcgcttgtatctgattactctgagcgccagcaccagcgactatgtcgtatgggtaaagctccctcttcggagggagcatcagag

SEQ ID NO: 10213 - DNA, 88 bp, synthetic construct
  misc_feature 1..88: note = engineered ribonucleic acid scaffold (ERS) sequence
  source 1..88: mol_type = other DNA
actggcgcttttatctgattactttgagcgccagcaccagcgactatgtcgtatgggtaaagctccctcttcggagggagcatcagag

SEQ ID NO: 10214 - DNA, 88 bp, synthetic construct
  misc_feature 1..88: note = engineered ribonucleic acid scaffold (ERS) sequence
  source 1..88: mol_type = other DNA
actggcgcttttatctgattactctgagcgccagcaccagcgactatgtcgtatgggtaaagctccctcttcggagggagcatcagag

SEQ ID NO: 10215 - DNA, 88 bp, synthetic construct
  misc_feature 1..88: note = engineered ribonucleic acid scaffold (ERS) sequence
  source 1..88: mol_type = other DNA
actggcgcttttatctgattactctgagcgccagcaccagcgactatgtcgtatgggtaaagctccctcttcggagggagcatcaaag

SEQ ID NO: 10216 - DNA, 88 bp, synthetic construct
  misc_feature 1..88: note = engineered ribonucleic acid scaffold (ERS) sequence
  source 1..88: mol_type = other DNA
actggcgcttctatctgattactctgagcgccagcaccagcgactatgtcgtatgggtaaagctccctcttcggagggagcctcagag

SEQ ID NO: 10217 - DNA, 88 bp, synthetic construct
  misc_feature 1..88: note = engineered ribonucleic acid scaffold (ERS) sequence
  source 1..88: mol_type = other DNA
actggcgcttctatctgattactctgagcgccagcaccagcgactatgtcgtatgggtaaagctccctcttcggagggagcgtcagag

SEQ ID NO: 10218 - DNA, 88 bp, synthetic construct
  misc_feature 1..88: note = engineered ribonucleic acid scaffold (ERS) sequence
  source 1..88: mol_type = other DNA
actggcgcttctatctgattactctgagcgccagcaccagcgactatgtcgtatgggtaaagctccctcttcggagggagcatcaaag

SEQ ID NO: 10219 - DNA, 88 bp, synthetic construct
  misc_feature 1..88: note = engineered ribonucleic acid scaffold (ERS) sequence
  source 1..88: mol_type = other DNA
actggcgcttctatctgattactctcagcgccatgaccagcgactatgtcgtatgggtaaagctccctcttcggagggagcatcagac

SEQ ID NO: 10220 - DNA, 88 bp, synthetic construct
  misc_feature 1..88: note = engineered ribonucleic acid scaffold (ERS) sequence
  source 1..88: mol_type = other DNA
actggcgcttctatctgattactttgagcgccatgaccagcgactatgtcgtatgggtaaagctccctcttcggagggagcatcagag

SEQ ID NO: 10221 - DNA, 88 bp, synthetic construct
  misc_feature 1..88: note = engineered ribonucleic acid scaffold (ERS) sequence
  source 1..88: mol_type = other DNA
actggcgcttctatctgattactttgagcgccatgaccagcgactatgtcgtatgggtaaagctccctcttcggagggagcatcaaag

SEQ ID NO: 10222 - DNA, 88 bp, synthetic construct
  misc_feature 1..88: note = engineered ribonucleic acid scaffold (ERS) sequence
  source 1..88: mol_type = other DNA
actggcgcttctatctgattagtctcagcgccatgaccagcgactatgtcgtatgggtaaagctccctcttcggagggagcatgagac

SEQ ID NO: 10223 - DNA, 88 bp, synthetic construct
  misc_feature 1..88: note = engineered ribonucleic acid scaffold (ERS) sequence
  source 1..88: mol_type = other DNA
actggcgcttctatctgattagtctgagcgccatgaccagcgactatgtcgtatgggtaaagctccctcttcggagggagcatcagac

SEQ ID NO: 10224 - DNA, 88 bp, synthetic construct
  misc_feature 1..88: note = engineered ribonucleic acid scaffold (ERS) sequence
  source 1..88: mol_type = other DNA
actggcgcttctatctgattactctcagcgccatgaccagcgactatgtcgtatgggtaaagctccctcttcggagggagcatgagag

SEQ ID NO: 10225 - DNA, 88 bp, synthetic construct
  misc_feature 1..88: note = engineered ribonucleic acid scaffold (ERS) sequence
  source 1..88: mol_type = other DNA
actggcgcttctatctgattactctcagcgccatgaccagcgactatgtcgtatggctaaagctccctcttcggagggagcatcagac

SEQ ID NO: 10226 - DNA, 88 bp, synthetic construct
  misc_feature 1..88: note = engineered ribonucleic acid scaffold (ERS) sequence
  source 1..88: mol_type = other DNA
actggcgcttctatctgattactttgagcgccatgaccagcgactatgtcgtatggctaaagctccctcttcggagggagcatcagag

SEQ ID NO: 10227 - DNA, 88 bp, synthetic construct
  misc_feature 1..88: note = engineered ribonucleic acid scaffold (ERS) sequence
  source 1..88: mol_type = other DNA
actggcgcttctatctgattactttgagcgccatgaccagcgactatgtcgtatggctaaagctccctcttcggagggagcatcaaag

SEQ ID NO: 10228 - DNA, 88 bp, synthetic construct
  misc_feature 1..88: note = engineered ribonucleic acid scaffold (ERS) sequence
  source 1..88: mol_type = other DNA
actggcgcttctatctgattagtctcagcgccatgaccagcgactatgtcgtatggctaaagctccctcttcggagggagcatgagac

SEQ ID NO: 10229 - DNA, 88 bp, synthetic construct
  misc_feature 1..88: note = engineered ribonucleic acid scaffold (ERS) sequence
  source 1..88: mol_type = other DNA
actggcgcttctatctgattagtctgagcgccatgaccagcgactatgtcgtatggctaaagctccctcttcggagggagcatcagac

SEQ ID NO: 10230 - DNA, 88 bp, synthetic construct
  misc_feature 1..88: note = engineered ribonucleic acid scaffold (ERS) sequence
  source 1..88: mol_type = other DNA
actggcgcttctatctgattactctcagcgccatgaccagcgactatgtcgtatggctaaagctccctcttcggagggagcatgagag

SEQ ID NO: 10231 - DNA, 88 bp, synthetic construct
  misc_feature 1..88: note = engineered ribonucleic acid scaffold (ERS) sequence
  source 1..88: mol_type = other DNA
actggcgctcccatctgattaccccgagcgccatgaccagcgactatgtcgtatggctaaagctccctcttcggagggagcatcgggg

SEQ ID NO: 10232 - DNA, 88 bp, synthetic construct
  misc_feature 1..88: note = engineered ribonucleic acid scaffold (ERS) sequence
  source 1..88: mol_type = other DNA
actggcgctcctatctgattactccgagcgccatgaccagcgactatgtcgtatggctaaagctccctcttcggagggagcatcggag

SEQ ID NO: 10233 - DNA, 88 bp, synthetic construct
  misc_feature 1..88: note = engineered ribonucleic acid scaffold (ERS) sequence
  source 1..88: mol_type = other DNA
actggcgctgggatctgattaccccgagcgccatgaccagcgactatgtcgtatggctaaagctccctcttcggagggagcatcgggg

SEQ ID NO: 10234 - DNA, 88 bp, synthetic construct
  misc_feature 1..88: note = engineered ribonucleic acid scaffold (ERS) sequence
  source 1..88: mol_type = other DNA
actggcgctggtatctgattactccgagcgccatgaccagcgactatgtcgtatggctaaagctccctcttcggagggagcatcggag

SEQ ID NO: 10235 - DNA, 88 bp, synthetic construct
  misc_feature 1..88: note = engineered ribonucleic acid scaffold (ERS) sequence
  source 1..88: mol_type = other DNA
actggcgcttccatctgattaccctgagcgccatgaccagcgactatgtcgtatggctaaagctccctcttcggagggagcatcaggg

SEQ ID NO: 10236 - DNA, 88 bp, synthetic construct
  misc_feature 1..88: note = engineered ribonucleic acid scaffold (ERS) sequence
  source 1..88: mol_type = other DNA
actggcgcttggatctgattaccctgagcgccatgaccagcgactatgtcgtatggctaaagctccctcttcggagggagcatcaggg

SEQ ID NO: 10237 - DNA, 88 bp, synthetic construct
  misc_feature 1..88: note = engineered ribonucleic acid scaffold (ERS) sequence
  source 1..88: mol_type = other DNA
actggcgcttgtatctgattactctgagcgccatgaccagcgactatgtcgtatggctaaagctccctcttcggagggagcatcagag

SEQ ID NO: 10238 - DNA, 88 bp, synthetic construct
  misc_feature 1..88: note = engineered ribonucleic acid scaffold (ERS) sequence
  source 1..88: mol_type = other DNA
actggcgcttttatctgattactttgagcgccatgaccagcgactatgtcgtatggctaaagctccctcttcggagggagcatcagag

SEQ ID NO: 10239 - DNA, 88 bp, synthetic construct
  misc_feature 1..88: note = engineered ribonucleic acid scaffold (ERS) sequence
  source 1..88: mol_type = other DNA
actggcgcttttatctgattactctgagcgccatgaccagcgactatgtcgtatggctaaagctccctcttcggagggagcatcagag

SEQ ID NO: 10240 - DNA, 88 bp, synthetic construct
  misc_feature 1..88: note = engineered ribonucleic acid scaffold (ERS) sequence
  source 1..88: mol_type = other DNA
actggcgcttttatctgattactctgagcgccatgaccagcgactatgtcgtatggctaaagctccctcttcggagggagcatcaaag

SEQ ID NO: 10241 - DNA, 88 bp, synthetic construct
  misc_feature 1..88: note = engineered ribonucleic acid scaffold (ERS) sequence
  source 1..88: mol_type = other DNA
actggcgcttctatctgattactctgagcgccatgaccagcgactatgtcgtatggctaaagctccctcttcggagggagcctcagag

SEQ ID NO: 10242 - DNA, 88 bp, synthetic construct
  misc_feature 1..88: note = engineered ribonucleic acid scaffold (ERS) sequence
  source 1..88: mol_type = other DNA
actggcgcttctatctgattactctgagcgccatgaccagcgactatgtcgtatggctaaagctccctcttcggagggagcgtcagag

SEQ ID NO: 10243 - DNA, 88 bp, synthetic construct
  misc_feature 1..88: note = engineered ribonucleic acid scaffold (ERS) sequence
  source 1..88: mol_type = other DNA
actggcgcttctatctgattactctgagcgccatgaccagcgactatgtcgtatggctaaagctccctcttcggagggagcatcaaag

SEQ ID NO: 10244 - DNA, 89 bp, synthetic construct
  misc_feature 1..89: note = engineered ribonucleic acid scaffold (ERS) sequence
  source 1..89: mol_type = other DNA
actggcgcttctatctgattactctcagcgccatgaccagcgactatgtcgtatgggctaaagctccctcttcggagggagcatcagac

SEQ ID NO: 10245 - DNA, 89 bp, synthetic construct
  misc_feature 1..89: note = engineered ribonucleic acid scaffold (ERS) sequence
  source 1..89: mol_type = other DNA
actggcgcttctatctgattactttgagcgccatgaccagcgactatgtcgtatgggctaaagctccctcttcggagggagcatcagag

SEQ ID NO: 10246 - DNA, 89 bp, synthetic construct
  misc_feature 1..89: note = engineered ribonucleic acid scaffold (ERS) sequence
  source 1..89: mol_type = other DNA
actggcgcttctatctgattactttgagcgccatgaccagcgactatgtcgtatgggctaaagctccctcttcggagggagcatcaaag

SEQ ID NO: 10247 - DNA, 89 bp, synthetic construct
  misc_feature 1..89: note = engineered ribonucleic acid scaffold (ERS) sequence
  source 1..89: mol_type = other DNA
actggcgcttctatctgattagtctcagcgccatgaccagcgactatgtcgtatgggctaaagctccctcttcggagggagcatgagac

SEQ ID NO: 10248 - DNA, 89 bp, synthetic construct
  misc_feature 1..89: note = engineered ribonucleic acid scaffold (ERS) sequence
  source 1..89: mol_type = other DNA
actggcgcttctatctgattagtctgagcgccatgaccagcgactatgtcgtatgggctaaagctccctcttcggagggagcatcagac

SEQ ID NO: 10249 - DNA, 89 bp, synthetic construct
  misc_feature 1..89: note = engineered ribonucleic acid scaffold (ERS) sequence
  source 1..89: mol_type = other DNA
actggcgcttctatctgattactctcagcgccatgaccagcgactatgtcgtatgggctaaagctccctcttcggagggagcatgagag

SEQ ID NO: 10250 - DNA, 89 bp, synthetic construct
  misc_feature 1..89: note = engineered ribonucleic acid scaffold (ERS) sequence
  source 1..89: mol_type = other DNA
actggcgctcccatctgattaccccgagcgccatgaccagcgactatgtcgtatgggctaaagctccctcttcggagggagcatcgggg

SEQ ID NO: 10251 - DNA, 89 bp, synthetic construct
  misc_feature 1..89: note = engineered ribonucleic acid scaffold (ERS) sequence
  source 1..89: mol_type = other DNA
actggcgctcctatctgattactccgagcgccatgaccagcgactatgtcgtatgggctaaagctccctcttcggagggagcatcggag

SEQ ID NO: 10252 - DNA, 89 bp, synthetic construct
  misc_feature 1..89: note = engineered ribonucleic acid scaffold (ERS) sequence
  source 1..89: mol_type = other DNA
actggcgctgggatctgattaccccgagcgccatgaccagcgactatgtcgtatgggctaaagctccctcttcggagggagcatcgggg

SEQ ID NO: 10253 - DNA, 89 bp, synthetic construct
  misc_feature 1..89: note = engineered ribonucleic acid scaffold (ERS) sequence
  source 1..89: mol_type = other DNA
actggcgctggtatctgattactccgagcgccatgaccagcgactatgtcgtatgggctaaagctccctcttcggagggagcatcggag

SEQ ID NO: 10254 - DNA, 89 bp, synthetic construct
  misc_feature 1..89: note = engineered ribonucleic acid scaffold (ERS) sequence
  source 1..89: mol_type = other DNA
actggcgcttccatctgattaccctgagcgccatgaccagcgactatgtcgtatgggctaaagctccctcttcggagggagcatcaggg

SEQ ID NO: 10255 - DNA, 89 bp, synthetic construct
  misc_feature 1..89: note = engineered ribonucleic acid scaffold (ERS) sequence
  source 1..89: mol_type = other DNA
actggcgcttggatctgattaccctgagcgccatgaccagcgactatgtcgtatgggctaaagctccctcttcggagggagcatcaggg

SEQ ID NO: 10256 - DNA, 89 bp, synthetic construct
  misc_feature 1..89: note = engineered ribonucleic acid scaffold (ERS) sequence
  source 1..89: mol_type = other DNA
actggcgcttgtatctgattactctgagcgccatgaccagcgactatgtcgtatgggctaaagctccctcttcggagggagcatcagag

SEQ ID NO: 10257 - DNA, 89 bp, synthetic construct
  misc_feature 1..89: note = engineered ribonucleic acid scaffold (ERS) sequence
  source 1..89: mol_type = other DNA
actggcgcttttatctgattactttgagcgccatgaccagcgactatgtcgtatgggctaaagctccctcttcggagggagcatcagag

SEQ ID NO: 10258 - DNA, 89 bp, synthetic construct
  misc_feature 1..89: note = engineered ribonucleic acid scaffold (ERS) sequence
  source 1..89: mol_type = other DNA
actggcgcttttatctgattactctgagcgccatgaccagcgactatgtcgtatgggctaaagctccctcttcggagggagcatcagag

SEQ ID NO: 10259 - DNA, 89 bp, synthetic construct
  misc_feature 1..89: note = engineered ribonucleic acid scaffold (ERS) sequence
  source 1..89: mol_type = other DNA
actggcgcttttatctgattactctgagcgccatgaccagcgactatgtcgtatgggctaaagctccctcttcggagggagcatcaaag

SEQ ID NO: 10260 - DNA, 89 bp, synthetic construct
  misc_feature 1..89: note = engineered ribonucleic acid scaffold (ERS) sequence
  source 1..89: mol_type = other DNA
actggcgcttctatctgattactctgagcgccatgaccagcgactatgtcgtatgggctaaagctccctcttcggagggagcctcagag

SEQ ID NO: 10261 - DNA, 89 bp, synthetic construct
  misc_feature 1..89: note = engineered ribonucleic acid scaffold (ERS) sequence
  source 1..89: mol_type = other DNA
actggcgcttctatctgattactctgagcgccatgaccagcgactatgtcgtatgggctaaagctccctcttcggagggagcgtcagag

SEQ ID NO: 10262 - DNA, 89 bp, synthetic construct
  misc_feature 1..89: note = engineered ribonucleic acid scaffold (ERS) sequence
  source 1..89: mol_type = other DNA
actggcgcttctatctgattactctgagcgccatgaccagcgactatgtcgtatgggctaaagctccctcttcggagggagcatcaaag

SEQ ID NO: 10263 - DNA, 88 bp, synthetic construct
  misc_feature 1..88: note = engineered ribonucleic acid scaffold (ERS) sequence
  source 1..88: mol_type = other DNA
actggcgctcccatctgattaccccgagcgccatgaccagcgactatgtcgtatgggtaaagctccctcttcggagggagcatcgggg

SEQ ID NO: 10264 - DNA, 88 bp, synthetic construct
  misc_feature 1..88: note = engineered ribonucleic acid scaffold (ERS) sequence
  source 1..88: mol_type = other DNA
actggcgctcctatctgattactccgagcgccatgaccagcgactatgtcgtatgggtaaagctccctcttcggagggagcatcggag

SEQ ID NO: 10265 - DNA, 88 bp, synthetic construct
  misc_feature 1..88: note = engineered ribonucleic acid scaffold (ERS) sequence
  source 1..88: mol_type = other DNA
actggcgctgggatctgattaccccgagcgccatgaccagcgactatgtcgtatgggtaaagctccctcttcggagggagcatcgggg

SEQ ID NO: 10266 - DNA, 88 bp, synthetic construct
  misc_feature 1..88: note = engineered ribonucleic acid scaffold (ERS) sequence
  source 1..88: mol_type = other DNA
actggcgctggtatctgattactccgagcgccatgaccagcgactatgtcgtatgggtaaagctccctcttcggagggagcatcggag

SEQ ID NO: 10267 - DNA, 88 bp, synthetic construct
  misc_feature 1..88: note = engineered ribonucleic acid scaffold (ERS) sequence
  source 1..88: mol_type = other DNA
actggcgcttccatctgattaccctgagcgccatgaccagcgactatgtcgtatgggtaaagctccctcttcggagggagcatcaggg

SEQ ID NO: 10268 - DNA, 88 bp, synthetic construct
  misc_feature 1..88: note = engineered ribonucleic acid scaffold (ERS) sequence
  source 1..88: mol_type = other DNA
actggcgcttggatctgattaccctgagcgccatgaccagcgactatgtcgtatgggtaaagctccctcttcggagggagcatcaggg

SEQ ID NO: 10269 - DNA, 88 bp, synthetic construct
  misc_feature 1..88: note = engineered ribonucleic acid scaffold (ERS) sequence
  source 1..88: mol_type = other DNA
actggcgcttgtatctgattactctgagcgccatgaccagcgactatgtcgtatgggtaaagctccctcttcggagggagcatcagag

SEQ ID NO: 10270 - DNA, 88 bp, synthetic construct
  misc_feature 1..88: note = engineered ribonucleic acid scaffold (ERS) sequence
  source 1..88: mol_type = other DNA
actggcgcttttatctgattactttgagcgccatgaccagcgactatgtcgtatgggtaaagctccctcttcggagggagcatcagag

SEQ ID NO: 10271 - DNA, 88 bp, synthetic construct
  misc_feature 1..88: note = engineered ribonucleic acid scaffold (ERS) sequence
  source 1..88: mol_type = other DNA
actggcgcttttatctgattactctgagcgccatgaccagcgactatgtcgtatgggtaaagctccctcttcggagggagcatcagag

SEQ ID NO: 10272 - DNA, 88 bp, synthetic construct
  misc_feature 1..88: note = engineered ribonucleic acid scaffold (ERS) sequence
  source 1..88: mol_type = other DNA
actggcgcttttatctgattactctgagcgccatgaccagcgactatgtcgtatgggtaaagctccctcttcggagggagcatcaaag

SEQ ID NO: 10273 - DNA, 88 bp, synthetic construct
  misc_feature 1..88: note = engineered ribonucleic acid scaffold (ERS) sequence
  source 1..88: mol_type = other DNA
actggcgcttctatctgattactctgagcgccatgaccagcgactatgtcgtatgggtaaagctccctcttcggagggagcctcagag

SEQ ID NO: 10274 - DNA, 88 bp, synthetic construct
  misc_feature 1..88: note = engineered ribonucleic acid scaffold (ERS) sequence
  source 1..88: mol_type = other DNA
actggcgcttctatctgattactctgagcgccatgaccagcgactatgtcgtatgggtaaagctccctcttcggagggagcgtcagag

SEQ ID NO: 10275 - DNA, 88 bp, synthetic construct
  misc_feature 1..88: note = engineered ribonucleic acid scaffold (ERS) sequence
  source 1..88: mol_type = other DNA
actggcgcttctatctgattactctgagcgccatgaccagcgactatgtcgtatgggtaaagctccctcttcggagggagcatcaaag

SEQ ID NO: 10276 - DNA, 88 bp, synthetic construct
  misc_feature 1..88: note = engineered ribonucleic acid scaffold (ERS) sequence
  source 1..88: mol_type = other DNA
actggcgcttctatctgattactctcagcgccatccccagcgactatgtcgtatgggtaaagctccctcttcggagggagcatcagac

SEQ ID NO: 10277 - DNA, 88 bp, synthetic construct
  misc_feature 1..88: note = engineered ribonucleic acid scaffold (ERS) sequence
  source 1..88: mol_type = other DNA
actggcgcttctatctgattactttgagcgccatccccagcgactatgtcgtatgggtaaagctccctcttcggagggagcatcagag

SEQ ID NO: 10278 - DNA, 88 bp, synthetic construct
  misc_feature 1..88: note = engineered ribonucleic acid scaffold (ERS) sequence
  source 1..88: mol_type = other DNA
actggcgcttctatctgattactttgagcgccatccccagcgactatgtcgtatgggtaaagctccctcttcggagggagcatcaaag

SEQ ID NO: 10279 - DNA, 88 bp, synthetic construct
  misc_feature 1..88: note = engineered ribonucleic acid scaffold (ERS) sequence
  source 1..88: mol_type = other DNA
actggcgcttctatctgattagtctcagcgccatccccagcgactatgtcgtatgggtaaagctccctcttcggagggagcatgagac

SEQ ID NO: 10280 - DNA, 88 bp, synthetic construct
  misc_feature 1..88: note = engineered ribonucleic acid scaffold (ERS) sequence
  source 1..88: mol_type = other DNA
actggcgcttctatctgattagtctgagcgccatccccagcgactatgtcgtatgggtaaagctccctcttcggagggagcatcagac

SEQ ID NO: 10281 - DNA, 88 bp, synthetic construct
  misc_feature 1..88: note = engineered ribonucleic acid scaffold (ERS) sequence
  source 1..88: mol_type = other DNA
actggcgcttctatctgattactctcagcgccatccccagcgactatgtcgtatgggtaaagctccctcttcggagggagcatgagag

SEQ ID NO: 10282 - DNA, 88 bp, synthetic construct
  misc_feature 1..88: note = engineered ribonucleic acid scaffold (ERS) sequence
  source 1..88: mol_type = other DNA
actggcgctcccatctgattaccccgagcgccatccccagcgactatgtcgtatgggtaaagctccctcttcggagggagcatcgggg

SEQ ID NO: 10283 - DNA, 88 bp, synthetic construct
  misc_feature 1..88: note = engineered ribonucleic acid scaffold (ERS) sequence
  source 1..88: mol_type = other DNA
actggcgctcctatctgattactccgagcgccatccccagcgactatgtcgtatgggtaaagctccctcttcggagggagcatcggag

SEQ ID NO: 10284 - DNA, 88 bp, synthetic construct
  misc_feature 1..88: note = engineered ribonucleic acid scaffold (ERS) sequence
  source 1..88: mol_type = other DNA
actggcgctgggatctgattaccccgagcgccatccccagcgactatgtcgtatgggtaaagctccctcttcggagggagcatcgggg

SEQ ID NO: 10285 - DNA, 88 bp, synthetic construct
  misc_feature 1..88: note = engineered ribonucleic acid scaffold (ERS) sequence
  source 1..88: mol_type = other DNA
actggcgctggtatctgattactccgagcgccatccccagcgactatgtcgtatgggtaaagctccctcttcggagggagcatcggag

SEQ ID NO: 10286 - DNA, 88 bp, synthetic construct
  misc_feature 1..88: note = engineered ribonucleic acid scaffold (ERS) sequence
  source 1..88: mol_type = other DNA
actggcgcttccatctgattaccctgagcgccatccccagcgactatgtcgtatgggtaaagctccctcttcggagggagcatcaggg

SEQ ID NO: 10287 - DNA, 88 bp, synthetic construct
  misc_feature 1..88: note = engineered ribonucleic acid scaffold (ERS) sequence
  source 1..88: mol_type = other DNA
actggcgcttggatctgattaccctgagcgccatccccagcgactatgtcgtatgggtaaagctccctcttcggagggagcatcaggg

SEQ ID NO: 10288 - DNA, 88 bp, synthetic construct
  misc_feature 1..88: note = engineered ribonucleic acid scaffold (ERS) sequence
  source 1..88: mol_type = other DNA
actggcgcttgtatctgattactctgagcgccatccccagcgactatgtcgtatgggtaaagctccctcttcggagggagcatcagag

SEQ ID NO: 10289 - DNA, 88 bp, synthetic construct
  misc_feature 1..88: note = engineered ribonucleic acid scaffold (ERS) sequence
  source 1..88: mol_type = other DNA
actggcgcttttatctgattactttgagcgccatccccagcgactatgtcgtatgggtaaagctccctcttcggagggagcatcagag

SEQ ID NO: 10290 - DNA, 88 bp, synthetic construct
  misc_feature 1..88: note = engineered ribonucleic acid scaffold (ERS) sequence
  source 1..88: mol_type = other DNA
actggcgcttttatctgattactctgagcgccatccccagcgactatgtcgtatgggtaaagctccctcttcggagggagcatcagag

SEQ ID NO: 10291 - DNA, 88 bp, synthetic construct
  misc_feature 1..88: note = engineered ribonucleic acid scaffold (ERS) sequence
  source 1..88: mol_type = other DNA
actggcgcttttatctgattactctgagcgccatccccagcgactatgtcgtatgggtaaagctccctcttcggagggagcatcaaag

SEQ ID NO: 10292 - DNA, 88 bp, synthetic construct
  misc_feature 1..88: note = engineered ribonucleic acid scaffold (ERS) sequence
  source 1..88: mol_type = other DNA
actggcgcttctatctgattactctgagcgccatccccagcgactatgtcgtatgggtaaagctccctcttcggagggagcctcagag

SEQ ID NO: 10293 - DNA, 88 bp, synthetic construct
  misc_feature 1..88: note = engineered ribonucleic acid scaffold (ERS) sequence
  source 1..88: mol_type = other DNA
actggcgcttctatctgattactctgagcgccatccccagcgactatgtcgtatgggtaaagctccctcttcggagggagcgtcagag

SEQ ID NO: 10294 - DNA, 88 bp, synthetic construct
  misc_feature 1..88: note = engineered ribonucleic acid scaffold (ERS) sequence
  source 1..88: mol_type = other DNA
actggcgcttctatctgattactctgagcgccatccccagcgactatgtcgtatgggtaaagctccctcttcggagggagcatcaaag

SEQ ID NO: 10295 - DNA, 88 bp, synthetic construct
  misc_feature 1..88: note = engineered ribonucleic acid scaffold (ERS) sequence
  source 1..88: mol_type = other DNA
actggcgcttctatctgattactctcagcgccatcgccagcgactatgtcgtatgggtaaagctccctcttcggagggagcatcagac

SEQ ID NO: 10296 - DNA, 88 bp, synthetic construct
  misc_feature 1..88: note = engineered ribonucleic acid scaffold (ERS) sequence
  source 1..88: mol_type = other DNA
actggcgcttctatctgattactttgagcgccatcgccagcgactatgtcgtatgggtaaagctccctcttcggagggagcatcagag

SEQ ID NO: 10297 - DNA, 88 bp, synthetic construct
  misc_feature 1..88: note = engineered ribonucleic acid scaffold (ERS) sequence
  source 1..88: mol_type = other DNA
actggcgcttctatctgattactttgagcgccatcgccagcgactatgtcgtatgggtaaagctccctcttcggagggagcatcaaag

SEQ ID NO: 10298 - DNA, 88 bp, synthetic construct
  misc_feature 1..88: note = engineered ribonucleic acid scaffold (ERS) sequence
  source 1..88: mol_type = other DNA
actggcgcttctatctgattagtctcagcgccatcgccagcgactatgtcgtatgggtaaagctccctcttcggagggagcatgagac

SEQ ID NO: 10299 - DNA, 88 bp, synthetic construct
  misc_feature 1..88: note = engineered ribonucleic acid scaffold (ERS) sequence
  source 1..88: mol_type = other DNA
actggcgcttctatctgattagtctgagcgccatcgccagcgactatgtcgtatgggtaaagctccctcttcggagggagcatcagac

SEQ ID NO: 10300 - DNA, 88 bp, synthetic construct
  misc_feature 1..88: note = engineered ribonucleic acid scaffold (ERS) sequence
  source 1..88: mol_type = other DNA
actggcgcttctatctgattactctcagcgccatcgccagcgactatgtcgtatgggtaaagctccctcttcggagggagcatgagag

SEQ ID NO: 10301 - DNA, 89 bp, synthetic construct
  misc_feature 1..89: note = engineered ribonucleic acid scaffold (ERS) sequence
  source 1..89: mol_type = other DNA
actggcgcttctatctgattactctcagcgccatcgccagcgactatgtcgtatggcgtaaagctccctcttcggagggagcatcagac

SEQ ID NO: 10302 - DNA, 89 bp, synthetic construct
  misc_feature 1..89: note = engineered ribonucleic acid scaffold (ERS) sequence
  source 1..89: mol_type = other DNA
actggcgcttctatctgattactttgagcgccatcgccagcgactatgtcgtatggcgtaaagctccctcttcggagggagcatcagag

SEQ ID NO: 10303 - DNA, 89 bp, synthetic construct
  misc_feature 1..89: note = engineered ribonucleic acid scaffold (ERS) sequence
  source 1..89: mol_type = other DNA
actggcgcttctatctgattactttgagcgccatcgccagcgactatgtcgtatggcgtaaagctccctcttcggagggagcatcaaag

SEQ ID NO: 10304 - DNA, 89 bp, synthetic construct
  misc_feature 1..89: note = engineered ribonucleic acid scaffold (ERS) sequence
  source 1..89: mol_type = other DNA
actggcgcttctatctgattagtctcagcgccatcgccagcgactatgtcgtatggcgtaaagctccctcttcggagggagcatgagac

SEQ ID NO: 10305 - DNA, 89 bp, synthetic construct
  misc_feature 1..89: note = engineered ribonucleic acid scaffold (ERS) sequence
  source 1..89: mol_type = other DNA
actggcgcttctatctgattagtctgagcgccatcgccagcgactatgtcgtatggcgtaaagctccctcttcggagggagcatcagac

SEQ ID NO: 10306 - DNA, 89 bp, synthetic construct
  misc_feature 1..89: note = engineered ribonucleic acid scaffold (ERS) sequence
  source 1..89: mol_type = other DNA
actggcgcttctatctgattactctcagcgccatcgccagcgactatgtcgtatggcgtaaagctccctcttcggagggagcatgagag

SEQ ID NO: 10307 - DNA, 89 bp, synthetic construct
  misc_feature 1..89: note = engineered ribonucleic acid scaffold (ERS) sequence
  source 1..89: mol_type = other DNA
actggcgctcccatctgattaccccgagcgccatcgccagcgactatgtcgtatggcgtaaagctccctcttcggagggagcatcgggg

SEQ ID NO: 10308 - DNA, 89 bp, synthetic construct
  misc_feature 1..89: note = engineered ribonucleic acid scaffold (ERS) sequence
  source 1..89: mol_type = other DNA
actggcgctcctatctgattactccgagcgccatcgccagcgactatgtcgtatggcgtaaagctccctcttcggagggagcatcggag

SEQ ID NO: 10309 - DNA, 89 bp, synthetic construct
  misc_feature 1..89: note = engineered ribonucleic acid scaffold (ERS) sequence
  source 1..89: mol_type = other DNA
actggcgctgggatctgattaccccgagcgccatcgccagcgactatgtcgtatggcgtaaagctccctcttcggagggagcatcgggg

SEQ ID NO: 10310 - DNA, 89 bp, synthetic construct
  misc_feature 1..89: note = engineered ribonucleic acid scaffold (ERS) sequence
  source 1..89: mol_type = other DNA
actggcgctggtatctgattactccgagcgccatcgccagcgactatgtcgtatggcgtaaagctccctcttcggagggagcatcggag

SEQ ID NO: 10311 - DNA, 89 bp, synthetic construct
  misc_feature 1..89: note = engineered ribonucleic acid scaffold (ERS) sequence
  source 1..89: mol_type = other DNA
actggcgcttccatctgattaccctgagcgccatcgccagcgactatgtcgtatggcgtaaagctccctcttcggagggagcatcaggg

SEQ ID NO: 10312 - DNA, 89 bp, synthetic construct
  misc_feature 1..89: note = engineered ribonucleic acid scaffold (ERS) sequence
  source 1..89: mol_type = other DNA
actggcgcttggatctgattaccctgagcgccatcgccagcgactatgtcgtatggcgtaaagctccctcttcggagggagcatcaggg

SEQ ID NO: 10313 - DNA, 89 bp, synthetic construct
  misc_feature 1..89: note = engineered ribonucleic acid scaffold (ERS) sequence
  source 1..89: mol_type = other DNA
actggcgcttgtatctgattactctgagcgccatcgccagcgactatgtcgtatggcgtaaagctccctcttcggagggagcatcagag

SEQ ID NO: 10314 - DNA, 89 bp, synthetic construct
  misc_feature 1..89: note = engineered ribonucleic acid scaffold (ERS) sequence
  source 1..89: mol_type = other DNA
actggcgcttttatctgattactttgagcgccatcgccagcgactatgtcgtatggcgtaaagctccctcttcggagggagcatcagag

SEQ ID NO: 10315 - DNA, 89 bp, synthetic construct
  misc_feature 1..89: note = engineered ribonucleic acid scaffold (ERS) sequence
  source 1..89: mol_type = other DNA
actggcgcttttatctgattactctgagcgccatcgccagcgactatgtcgtatggcgtaaagctccctcttcggagggagcatcagag

SEQ ID NO: 10316 - DNA, 89 bp, synthetic construct
  misc_feature 1..89: note = engineered ribonucleic acid scaffold (ERS) sequence
  source 1..89: mol_type = other DNA
actggcgcttttatctgattactctgagcgccatcgccagcgactatgtcgtatggcgtaaagctccctcttcggagggagcatcaaag

SEQ ID NO: 10317 - DNA, 89 bp, synthetic construct
  misc_feature 1..89: note = engineered ribonucleic acid scaffold (ERS) sequence
  source 1..89: mol_type = other DNA
actggcgcttctatctgattactctgagcgccatcgccagcgactatgtcgtatggcgtaaagctccctcttcggagggagcctcagag

SEQ ID NO: 10318 - DNA, 89 bp, synthetic construct
  misc_feature 1..89: note = engineered ribonucleic acid scaffold (ERS) sequence
  source 1..89: mol_type = other DNA
actggcgcttctatctgattactctgagcgccatcgccagcgactatgtcgtatggcgtaaagctccctcttcggagggagcgtcagag

SEQ ID NO: 10319 - DNA, 89 bp, synthetic construct
  misc_feature 1..89: note = engineered ribonucleic acid scaffold (ERS) sequence
  source 1..89: mol_type = other DNA
actggcgcttctatctgattactctgagcgccatcgccagcgactatgtcgtatggcgtaaagctccctcttcggagggagcatcaaag

SEQ ID NO: 10320 - DNA, 88 bp, synthetic construct
  misc_feature 1..88: note = engineered ribonucleic acid scaffold (ERS) sequence
  source 1..88: mol_type = other DNA
actggcgctcccatctgattaccccgagcgccatcgccagcgactatgtcgtatgggtaaagctccctcttcggagggagcatcgggg

SEQ ID NO: 10321 - DNA, 88 bp, synthetic construct
  misc_feature 1..88: note = engineered ribonucleic acid scaffold (ERS) sequence
  source 1..88: mol_type = other DNA
actggcgctcctatctgattactccgagcgccatcgccagcgactatgtcgtatgggtaaagctccctcttcggagggagcatcggag

SEQ ID NO: 10322 - DNA, 88 bp, synthetic construct
  misc_feature 1..88: note = engineered ribonucleic acid scaffold (ERS) sequence
  source 1..88: mol_type = other DNA
actggcgctgggatctgattaccccgagcgccatcgccagcgactatgtcgtatgggtaaagctccctcttcggagggagcatcgggg

SEQ ID NO: 10323 - DNA, 88 bp, synthetic construct
  misc_feature 1..88: note = engineered ribonucleic acid scaffold (ERS) sequence
  source 1..88: mol_type = other DNA
actggcgctggtatctgattactccgagcgccatcgccagcgactatgtcgtatgggtaaagctccctcttcggagggagcatcggag

SEQ ID NO: 10324 - DNA, 88 bp, synthetic construct
  misc_feature 1..88: note = engineered ribonucleic acid scaffold (ERS) sequence
  source 1..88: mol_type = other DNA
actggcgcttccatctgattaccctgagcgccatcgccagcgactatgtcgtatgggtaaagctccctcttcggagggagcatcaggg

SEQ ID NO: 10325 - DNA, 88 bp, synthetic construct
  misc_feature 1..88: note = engineered ribonucleic acid scaffold (ERS) sequence
  source 1..88: mol_type = other DNA
actggcgcttggatctgattaccctgagcgccatcgccagcgactatgtcgtatgggtaaagctccctcttcggagggagcatcaggg

SEQ ID NO: 10326 - DNA, 88 bp, synthetic construct
  misc_feature 1..88: note = engineered ribonucleic acid scaffold (ERS) sequence
  source 1..88: mol_type = other DNA
actggcgcttgtatctgattactctgagcgccatcgccagcgactatgtcgtatgggtaaagctccctcttcggagggagcatcagag

SEQ ID NO: 10327 - DNA, 88 bp, synthetic construct
  misc_feature 1..88: note = engineered ribonucleic acid scaffold (ERS) sequence
  source 1..88: mol_type = other DNA
actggcgcttttatctgattactttgagcgccatcgccagcgactatgtcgtatgggtaaagctccctcttcggagggagcatcagag

SEQ ID NO: 10328 - DNA, 88 bp, synthetic construct
  misc_feature 1..88: note = engineered ribonucleic acid scaffold (ERS) sequence
  source 1..88: mol_type = other DNA
actggcgcttttatctgattactctgagcgccatcgccagcgactatgtcgtatgggtaaagctccctcttcggagggagcatcagag

SEQ ID NO: 10329 - DNA, 88 bp, synthetic construct
  misc_feature 1..88: note = engineered ribonucleic acid scaffold (ERS) sequence
  source 1..88: mol_type = other DNA
actggcgcttttatctgattactctgagcgccatcgccagcgactatgtcgtatgggtaaagctccctcttcggagggagcatcaaag

SEQ ID NO: 10330 - DNA, 88 bp, synthetic construct
  misc_feature 1..88: note = engineered ribonucleic acid scaffold (ERS) sequence
  source 1..88: mol_type = other DNA
actggcgcttctatctgattactctgagcgccatcgccagcgactatgtcgtatgggtaaagctccctcttcggagggagcctcagag

SEQ ID NO: 10331 - DNA, 88 bp, synthetic construct
  misc_feature 1..88: note = engineered ribonucleic acid scaffold (ERS) sequence
  source 1..88: mol_type = other DNA
actggcgcttctatctgattactctgagcgccatcgccagcgactatgtcgtatgggtaaagctccctcttcggagggagcgtcagag

SEQ ID NO: 10332 - DNA, 88 bp, synthetic construct
  misc_feature 1..88: note = engineered ribonucleic acid scaffold (ERS) sequence
  source 1..88: mol_type = other DNA
actggcgcttctatctgattactctgagcgccatcgccagcgactatgtcgtatgggtaaagctccctcttcggagggagcatcaaag

SEQ ID NO: 10333 - DNA, 88 bp, synthetic construct
  misc_feature 1..88: note = engineered ribonucleic acid scaffold (ERS) sequence
  source 1..88: mol_type = other DNA
actggcgcttctatctgattactctcagcgccatctccagcgactatgtcgtatgggtaaagctccctcttcggagggagcatcagac

SEQ ID NO: 10334 - DNA, 88 bp, synthetic construct
  misc_feature 1..88: note = engineered ribonucleic acid scaffold (ERS) sequence
  source 1..88: mol_type = other DNA
actggcgcttctatctgattactttgagcgccatctccagcgactatgtcgtatgggtaaagctccctcttcggagggagcatcagag

SEQ ID NO: 10335 - DNA, 88 bp, synthetic construct
  misc_feature 1..88: note = engineered ribonucleic acid scaffold (ERS) sequence
  source 1..88: mol_type = other DNA
actggcgcttctatctgattactttgagcgccatctccagcgactatgtcgtatgggtaaagctccctcttcggagggagcatcaaag

SEQ ID NO: 10336 - DNA, 88 bp, synthetic construct
  misc_feature 1..88: note = engineered ribonucleic acid scaffold (ERS) sequence
  source 1..88: mol_type = other DNA
actggcgcttctatctgattagtctcagcgccatctccagcgactatgtcgtatgggtaaagctccctcttcggagggagcatgagac

SEQ ID NO: 10337 - DNA, 88 bp, synthetic construct
  misc_feature 1..88: note = engineered ribonucleic acid scaffold (ERS) sequence
  source 1..88: mol_type = other DNA
actggcgcttctatctgattagtctgagcgccatctccagcgactatgtcgtatgggtaaagctccctcttcggagggagcatcagac

SEQ ID NO: 10338 - DNA, 88 bp, synthetic construct
  misc_feature 1..88: note = engineered ribonucleic acid scaffold (ERS) sequence
  source 1..88: mol_type = other DNA
actggcgcttctatctgattactctcagcgccatctccagcgactatgtcgtatgggtaaagctccctcttcggagggagcatgagag

SEQ ID NO: 10339 - DNA, 88 bp, synthetic construct
  misc_feature 1..88: note = engineered ribonucleic acid scaffold (ERS) sequence
  source 1..88: mol_type = other DNA
actggcgctcccatctgattaccccgagcgccatctccagcgactatgtcgtatgggtaaagctccctcttcggagggagcatcgggg

SEQ ID NO: 10340 - DNA, 88 bp, synthetic construct
  misc_feature 1..88: note = engineered ribonucleic acid scaffold (ERS) sequence
  source 1..88: mol_type = other DNA
actggcgctcctatctgattactccgagcgccatctccagcgactatgtcgtatgggtaaagctccctcttcggagggagcatcggag

SEQ ID NO: 10341 - DNA, 88 bp, synthetic construct
  misc_feature 1..88: note = engineered ribonucleic acid scaffold (ERS) sequence
  source 1..88: mol_type = other DNA
actggcgctgggatctgattaccccgagcgccatctccagcgactatgtcgtatgggtaaagctccctcttcggagggagcatcgggg

SEQ ID NO: 10342 - DNA, 88 bp, synthetic construct
  misc_feature 1..88: note = engineered ribonucleic acid scaffold (ERS) sequence
  source 1..88: mol_type = other DNA
actggcgctggtatctgattactccgagcgccatctccagcgactatgtcgtatgggtaaagctccctcttcggagggagcatcggag

SEQ ID NO: 10343 - DNA, 88 bp, synthetic construct
  misc_feature 1..88: note = engineered ribonucleic acid scaffold (ERS) sequence
  source 1..88: mol_type = other DNA
actggcgcttccatctgattaccctgagcgccatctccagcgactatgtcgtatgggtaaagctccctcttcggagggagcatcaggg

SEQ ID NO: 10344 - DNA, 88 bp, synthetic construct
  misc_feature 1..88: note = engineered ribonucleic acid scaffold (ERS) sequence
  source 1..88: mol_type = other DNA
actggcgcttggatctgattaccctgagcgccatctccagcgactatgtcgtatgggtaaagctccctcttcggagggagcatcaggg

SEQ ID NO: 10345 - DNA, 88 bp, synthetic construct
  misc_feature 1..88: note = engineered ribonucleic acid scaffold (ERS) sequence
  source 1..88: mol_type = other DNA
actggcgcttgtatctgattactctgagcgccatctccagcgactatgtcgtatgggtaaagctccctcttcggagggagcatcagag

SEQ ID NO: 10346 - DNA, 88 bp, synthetic construct
  misc_feature 1..88: note = engineered ribonucleic acid scaffold (ERS) sequence
  source 1..88: mol_type = other DNA
actggcgcttttatctgattactttgagcgccatctccagcgactatgtcgtatgggtaaagctccctcttcggagggagcatcagag

SEQ ID NO: 10347 - DNA, 88 bp, synthetic construct
  misc_feature 1..88: note = engineered ribonucleic acid scaffold (ERS) sequence
  source 1..88: mol_type = other DNA
actggcgcttttatctgattactctgagcgccatctccagcgactatgtcgtatgggtaaagctccctcttcggagggagcatcagag

SEQ ID NO: 10348 - DNA, 88 bp, synthetic construct
  misc_feature 1..88: note = engineered ribonucleic acid scaffold (ERS) sequence
  source 1..88: mol_type = other DNA
actggcgcttttatctgattactctgagcgccatctccagcgactatgtcgtatgggtaaagctccctcttcggagggagcatcaaag

SEQ ID NO: 10349 - DNA, 88 bp, synthetic construct
  misc_feature 1..88: note = engineered ribonucleic acid scaffold (ERS) sequence
  source 1..88: mol_type = other DNA
actggcgcttctatctgattactctgagcgccatctccagcgactatgtcgtatgggtaaagctccctcttcggagggagcctcagag

SEQ ID NO: 10350 - DNA, 88 bp, synthetic construct
  misc_feature 1..88: note = engineered ribonucleic acid scaffold (ERS) sequence
  source 1..88: mol_type = other DNA
actggcgcttctatctgattactctgagcgccatctccagcgactatgtcgtatgggtaaagctccctcttcggagggagcgtcagag

SEQ ID NO: 10351 - DNA, 88 bp, synthetic construct
  misc_feature 1..88: note = engineered ribonucleic acid scaffold (ERS) sequence
  source 1..88: mol_type = other DNA
actggcgcttctatctgattactctgagcgccatctccagcgactatgtcgtatgggtaaagctccctcttcggagggagcatcaaag

SEQ ID NO: 10352 - DNA, 88 bp, synthetic construct
  misc_feature 1..88: note = engineered ribonucleic acid scaffold (ERS) sequence
  source 1..88: mol_type = other DNA
actggcgcttctatctgattactctcagcgccatcacctgcgactatgtcgtaagggtaaagctccctcttcggagggagcatcagac

SEQ ID NO: 10353 - DNA, 88 bp, synthetic construct
  misc_feature 1..88: note = engineered ribonucleic acid scaffold (ERS) sequence
  source 1..88: mol_type = other DNA
actggcgcttctatctgattactttgagcgccatcacctgcgactatgtcgtaagggtaaagctccctcttcggagggagcatcagag

SEQ ID NO: 10354 - DNA, 88 bp, synthetic construct
  misc_feature 1..88: note = engineered ribonucleic acid scaffold (ERS) sequence
  source 1..88: mol_type = other DNA
actggcgcttctatctgattactttgagcgccatcacctgcgactatgtcgtaagggtaaagctccctcttcggagggagcatcaaag

SEQ ID NO: 10355 - DNA, 88 bp, synthetic construct
  misc_feature 1..88: note = engineered ribonucleic acid scaffold (ERS) sequence
  source 1..88: mol_type = other DNA
actggcgcttctatctgattagtctcagcgccatcacctgcgactatgtcgtaagggtaaagctccctcttcggagggagcatgagac

SEQ ID NO: 10356 - DNA, 88 bp, synthetic construct
  misc_feature 1..88: note = engineered ribonucleic acid scaffold (ERS) sequence
  source 1..88: mol_type = other DNA
actggcgcttctatctgattagtctgagcgccatcacctgcgactatgtcgtaagggtaaagctccctcttcggagggagcatcagac

SEQ ID NO: 10357 - DNA, 88 bp, synthetic construct
  misc_feature 1..88: note = engineered ribonucleic acid scaffold (ERS) sequence
  source 1..88: mol_type = other DNA
actggcgcttctatctgattactctcagcgccatcacctgcgactatgtcgtaagggtaaagctccctcttcggagggagcatgagag

SEQ ID NO: 10358 - DNA, 88 bp, synthetic construct
  misc_feature 1..88: note = engineered ribonucleic acid scaffold (ERS) sequence
  source 1..88: mol_type = other DNA
actggcgctcccatctgattaccccgagcgccatcacctgcgactatgtcgtaagggtaaagctccctcttcggagggagcatcgggg

SEQ ID NO: 10359 - DNA, 88 bp, synthetic construct
  misc_feature 1..88: note = engineered ribonucleic acid scaffold (ERS) sequence
  source 1..88: mol_type = other DNA
actggcgctcctatctgattactccgagcgccatcacctgcgactatgtcgtaagggtaaagctccctcttcggagggagcatcggag

SEQ ID NO: 10360 - DNA, 88 bp, synthetic construct
  misc_feature 1..88: note = engineered ribonucleic acid scaffold (ERS) sequence
  source 1..88: mol_type = other DNA
actggcgctgggatctgattaccccgagcgccatcacctgcgactatgtcgtaagggtaaagctccctcttcggagggagcatcgggg

SEQ ID NO: 10361 - DNA, 88 bp, synthetic construct
  misc_feature 1..88: note = engineered ribonucleic acid scaffold (ERS) sequence
  source 1..88: mol_type = other DNA
actggcgctggtatctgattactccgagcgccatcacctgcgactatgtcgtaagggtaaagctccctcttcggagggagcatcggag

SEQ ID NO: 10362 - DNA, 88 bp, synthetic construct
  misc_feature 1..88: note = engineered ribonucleic acid scaffold (ERS) sequence
  source 1..88: mol_type = other DNA
actggcgcttccatctgattaccctgagcgccatcacctgcgactatgtcgtaagggtaaagctccctcttcggagggagcatcaggg

SEQ ID NO: 10363 - DNA, 88 bp, synthetic construct
  misc_feature 1..88: note = engineered ribonucleic acid scaffold (ERS) sequence
  source 1..88: mol_type = other DNA
actggcgcttggatctgattaccctgagcgccatcacctgcgactatgtcgtaagggtaaagctccctcttcggagggagcatcaggg

SEQ ID NO: 10364 - DNA, 88 bp, synthetic construct
  misc_feature 1..88: note = engineered ribonucleic acid scaffold (ERS) sequence
  source 1..88: mol_type = other DNA
actggcgcttgtatctgattactctgagcgccatcacctgcgactatgtcgtaagggtaaagctccctcttcggagggagcatcagag

SEQ ID NO: 10365 - DNA, 88 bp, synthetic construct
  misc_feature 1..88: note = engineered ribonucleic acid scaffold (ERS) sequence
  source 1..88: mol_type = other DNA
actggcgcttttatctgattactttgagcgccatcacctgcgactatgtcgtaagggtaaagctccctcttcggagggagcatcagag

SEQ ID NO: 10366 - DNA, 88 bp, synthetic construct
  misc_feature 1..88: note = engineered ribonucleic acid scaffold (ERS) sequence
  source 1..88: mol_type = other DNA
actggcgcttttatctgattactctgagcgccatcacctgcgactatgtcgtaagggtaaagctccctcttcggagggagcatcagag

SEQ ID NO: 10367 - DNA, 88 bp, synthetic construct
  misc_feature 1..88: note = engineered ribonucleic acid scaffold (ERS) sequence
  source 1..88: mol_type = other DNA
actggcgcttttatctgattactctgagcgccatcacctgcgactatgtcgtaagggtaaagctccctcttcggagggagcatcaaag

SEQ ID NO: 10368 - DNA, 88 bp, synthetic construct
  misc_feature 1..88: note = engineered ribonucleic acid scaffold (ERS) sequence
  source 1..88: mol_type = other DNA
actggcgcttctatctgattactctgagcgccatcacctgcgactatgtcgtaagggtaaagctccctcttcggagggagcctcagag

SEQ ID NO: 10369 - DNA, 88 bp, synthetic construct
  misc_feature 1..88: note = engineered ribonucleic acid scaffold (ERS) sequence
  source 1..88: mol_type = other DNA
actggcgcttctatctgattactctgagcgccatcacctgcgactatgtcgtaagggtaaagctccctcttcggagggagcgtcagag

SEQ ID NO: 10370 - DNA, 88 bp, synthetic construct
  misc_feature 1..88: note = engineered ribonucleic acid scaffold (ERS) sequence
  source 1..88: mol_type = other DNA
actggcgcttctatctgattactctgagcgccatcacctgcgactatgtcgtaagggtaaagctccctcttcggagggagcatcaaag

SEQ ID NO: 10371 - DNA, 88 bp, synthetic construct
  misc_feature 1..88: note = engineered ribonucleic acid scaffold (ERS) sequence
  source 1..88: mol_type = other DNA
actggcgcttctatctgattactctcagcgccatcaccagagactatgtcttatgggtaaagctccctcttcggagggagcatcagac

SEQ ID NO: 10372 - DNA, 88 bp, synthetic construct
  misc_feature 1..88: note = engineered ribonucleic acid scaffold (ERS) sequence
  source 1..88: mol_type = other DNA
actggcgcttctatctgattactttgagcgccatcaccagagactatgtcttatgggtaaagctccctcttcggagggagcatcagag

SEQ ID NO: 10373 - DNA, 88 bp, synthetic construct
  misc_feature 1..88: note = engineered ribonucleic acid scaffold (ERS) sequence
  source 1..88: mol_type = other DNA
actggcgcttctatctgattactttgagcgccatcaccagagactatgtcttatgggtaaagctccctcttcggagggagcatcaaag

SEQ ID NO: 10374 - DNA, 88 bp, synthetic construct
  misc_feature 1..88: note = engineered ribonucleic acid scaffold (ERS) sequence
  source 1..88: mol_type = other DNA
actggcgcttctatctgattagtctcagcgccatcaccagagactatgtcttatgggtaaagctccctcttcggagggagcatgagac

SEQ ID NO: 10375 - DNA, 88 bp, synthetic construct
  misc_feature 1..88: note = engineered ribonucleic acid scaffold (ERS) sequence
  source 1..88: mol_type = other DNA
actggcgcttctatctgattagtctgagcgccatcaccagagactatgtcttatgggtaaagctccctcttcggagggagcatcagac

SEQ ID NO: 10376 - DNA, 88 bp, synthetic construct
  misc_feature 1..88: note = engineered ribonucleic acid scaffold (ERS) sequence
  source 1..88: mol_type = other DNA
actggcgcttctatctgattactctcagcgccatcaccagagactatgtcttatgggtaaagctccctcttcggagggagcatgagag

SEQ ID NO: 10377 - DNA, 88 bp, synthetic construct
  misc_feature 1..88: note = engineered ribonucleic acid scaffold (ERS) sequence
  source 1..88: mol_type = other DNA
actggcgctcccatctgattaccccgagcgccatcaccagagactatgtcttatgggtaaagctccctcttcggagggagcatcgggg

SEQ ID NO: 10378 - DNA, 88 bp, synthetic construct
  misc_feature 1..88: note = engineered ribonucleic acid scaffold (ERS) sequence
  source 1..88: mol_type = other DNA
actggcgctcctatctgattactccgagcgccatcaccagagactatgtcttatgggtaaagctccctcttcggagggagcatcggag

SEQ ID NO: 10379 - DNA, 88 bp, synthetic construct
  misc_feature 1..88: note = engineered ribonucleic acid scaffold (ERS) sequence
  source 1..88: mol_type = other DNA
actggcgctgggatctgattaccccgagcgccatcaccagagactatgtcttatgggtaaagctccctcttcggagggagcatcgggg

SEQ ID NO: 10380 - DNA, 88 bp, synthetic construct
  misc_feature 1..88: note = engineered ribonucleic acid scaffold (ERS) sequence
  source 1..88: mol_type = other DNA
actggcgctggtatctgattactccgagcgccatcaccagagactatgtcttatgggtaaagctccctcttcggagggagcatcggag

SEQ ID NO: 10381 - DNA, 88 bp, synthetic construct
  misc_feature 1..88: note = engineered ribonucleic acid scaffold (ERS) sequence
  source 1..88: mol_type = other DNA
actggcgcttccatctgattaccctgagcgccatcaccagagactatgtcttatgggtaaagctccctcttcggagggagcatcaggg

SEQ ID NO: 10382 - DNA, 88 bp, synthetic construct
  misc_feature 1..88: note = engineered ribonucleic acid scaffold (ERS) sequence
  source 1..88: mol_type = other DNA
actggcgcttggatctgattaccctgagcgccatcaccagagactatgtcttatgggtaaagctccctcttcggagggagcatcaggg

SEQ ID NO: 10383 - DNA, 88 bp, synthetic construct
  misc_feature 1..88: note = engineered ribonucleic acid scaffold (ERS) sequence
  source 1..88: mol_type = other DNA
actggcgcttgtatctgattactctgagcgccatcaccagagactatgtcttatgggtaaagctccctcttcggagggagcatcagag

SEQ ID NO: 10384 - DNA, 88 bp, synthetic construct
  misc_feature 1..88: note = engineered ribonucleic acid scaffold (ERS) sequence
  source 1..88: mol_type = other DNA
actggcgcttttatctgattactttgagcgccatcaccagagactatgtcttatgggtaaagctccctcttcggagggagcatcagag

SEQ ID NO: 10385 - DNA, 88 bp, synthetic construct
  misc_feature 1..88: note = engineered ribonucleic acid scaffold (ERS) sequence
  source 1..88: mol_type = other DNA
actggcgcttttatctgattactctgagcgccatcaccagagactatgtcttatgggtaaagctccctcttcggagggagcatcagag

SEQ ID NO: 10386 - DNA, 88 bp, synthetic construct
  misc_feature 1..88: note = engineered ribonucleic acid scaffold (ERS) sequence
  source 1..88: mol_type = other DNA
actggcgcttttatctgattactctgagcgccatcaccagagactatgtcttatgggtaaagctccctcttcggagggagcatcaaag

SEQ ID NO: 10387 - DNA, 88 bp, synthetic construct
  misc_feature 1..88: note = engineered ribonucleic acid scaffold (ERS) sequence
  source 1..88: mol_type = other DNA
actggcgcttctatctgattactctgagcgccatcaccagagactatgtcttatgggtaaagctccctcttcggagggagcctcagag

SEQ ID NO: 10388 - DNA, 88 bp, synthetic construct
  misc_feature 1..88: note = engineered ribonucleic acid scaffold (ERS) sequence
  source 1..88: mol_type = other DNA
actggcgcttctatctgattactctgagcgccatcaccagagactatgtcttatgggtaaagctccctcttcggagggagcgtcagag

SEQ ID NO: 10389 - DNA, 88 bp, synthetic construct
  misc_feature 1..88: note = engineered ribonucleic acid scaffold (ERS) sequence
  source 1..88: mol_type = other DNA
actggcgcttctatctgattactctgagcgccatcaccagagactatgtcttatgggtaaagctccctcttcggagggagcatcaaag

SEQ ID NO: 10390 - DNA, 88 bp, synthetic construct
  misc_feature 1..88: note = engineered ribonucleic acid scaffold (ERS) sequence
  source 1..88: mol_type = other DNA
actggcgcttctatctgattactctcagcgccatcaccagggactatgtcctatgggtaaagctccctcttcggagggagcatcagac

SEQ ID NO: 10391 - DNA, 88 bp, synthetic construct
  misc_feature 1..88: note = engineered ribonucleic acid scaffold (ERS) sequence
  source 1..88: mol_type = other DNA
actggcgcttctatctgattactttgagcgccatcaccagggactatgtcctatgggtaaagctccctcttcggagggagcatcagag

SEQ ID NO: 10392 - DNA, 88 bp, synthetic construct
  misc_feature 1..88: note = engineered ribonucleic acid scaffold (ERS) sequence
  source 1..88: mol_type = other DNA
actggcgcttctatctgattactttgagcgccatcaccagggactatgtcctatgggtaaagctccctcttcggagggagcatcaaag

SEQ ID NO: 10393 - DNA, 88 bp, synthetic construct
  misc_feature 1..88: note = engineered ribonucleic acid scaffold (ERS) sequence
  source 1..88: mol_type = other DNA
actggcgcttctatctgattagtctcagcgccatcaccagggactatgtcctatgggtaaagctccctcttcggagggagcatgagac

SEQ ID NO: 10394 - DNA, 88 bp, synthetic construct
  misc_feature 1..88: note = engineered ribonucleic acid scaffold (ERS) sequence
  source 1..88: mol_type = other DNA
actggcgcttctatctgattagtctgagcgccatcaccagggactatgtcctatgggtaaagctccctcttcggagggagcatcagac

SEQ ID NO: 10395 - DNA, 88 bp, synthetic construct
  misc_feature 1..88: note = engineered ribonucleic acid scaffold (ERS) sequence
  source 1..88: mol_type = other DNA
actggcgcttctatctgattactctcagcgccatcaccagggactatgtcctatgggtaaagctccctcttcggagggagcatgagag

SEQ ID NO: 10396 - DNA, 88 bp, synthetic construct
  misc_feature 1..88: note = engineered ribonucleic acid scaffold (ERS) sequence
  source 1..88: mol_type = other DNA
actggcgctcccatctgattaccccgagcgccatcaccagggactatgtcctatgggtaaagctccctcttcggagggagcatcgggg

SEQ ID NO: 10397 - DNA, 88 bp, synthetic construct
  misc_feature 1..88: note = engineered ribonucleic acid scaffold (ERS) sequence
  source 1..88: mol_type = other DNA
actggcgctcctatctgattactccgagcgccatcaccagggactatgtcctatgggtaaagctccctcttcggagggagcatcggag

SEQ ID NO: 10398 - DNA, 88 bp, synthetic construct
  misc_feature 1..88: note = engineered ribonucleic acid scaffold (ERS) sequence
  source 1..88: mol_type = other DNA
actggcgctgggatctgattaccccgagcgccatcaccagggactatgtcctatgggtaaagctccctcttcggagggagcatcgggg

SEQ ID NO: 10399 - DNA, 88 bp, synthetic construct
  misc_feature 1..88: note = engineered ribonucleic acid scaffold (ERS) sequence
  source 1..88: mol_type = other DNA
actggcgctggtatctgattactccgagcgccatcaccagggactatgtcctatgggtaaagctccctcttcggagggagcatcggag

SEQ ID NO: 10400 - DNA, 88 bp, synthetic construct
  misc_feature 1..88: note = engineered ribonucleic acid scaffold (ERS) sequence
  source 1..88: mol_type = other DNA
actggcgcttccatctgattaccctgagcgccatcaccagggactatgtcctatgggtaaagctccctcttcggagggagcatcaggg

SEQ ID NO: 10401 - DNA, 88 bp, synthetic construct
  misc_feature 1..88: note = engineered ribonucleic acid scaffold (ERS) sequence
  source 1..88: mol_type = other DNA
actggcgcttggatctgattaccctgagcgccatcaccagggactatgtcctatgggtaaagctccctcttcggagggagcatcaggg

SEQ ID NO: 10402 - DNA, 88 bp, synthetic construct
  misc_feature 1..88: note = engineered ribonucleic acid scaffold (ERS) sequence
  source 1..88: mol_type = other DNA
actggcgcttgtatctgattactctgagcgccatcaccagggactatgtcctatgggtaaagctccctcttcggagggagcatcagag

SEQ ID NO: 10403 - DNA, 88 bp, synthetic construct
  misc_feature 1..88: note = engineered ribonucleic acid scaffold (ERS) sequence
  source 1..88: mol_type = other DNA
actggcgcttttatctgattactttgagcgccatcaccagggactatgtcctatgggtaaagctccctcttcggagggagcatcagag

SEQ ID NO: 10404 - DNA, 88 bp, synthetic construct
  misc_feature 1..88: note = engineered ribonucleic acid scaffold (ERS) sequence
  source 1..88: mol_type = other DNA
actggcgcttttatctgattactctgagcgccatcaccagggactatgtcctatgggtaaagctccctcttcggagggagcatcagag

SEQ ID NO: 10405 - DNA, 88 bp, synthetic construct
  misc_feature 1..88: note = engineered ribonucleic acid scaffold (ERS) sequence
  source 1..88: mol_type = other DNA
actggcgcttttatctgattactctgagcgccatcaccagggactatgtcctatgggtaaagctccctcttcggagggagcatcaaag

SEQ ID NO: 10406 - DNA, 88 bp, synthetic construct
  misc_feature 1..88: note = engineered ribonucleic acid scaffold (ERS) sequence
  source 1..88: mol_type = other DNA
actggcgcttctatctgattactctgagcgccatcaccagggactatgtcctatgggtaaagctccctcttcggagggagcctcagag

SEQ ID NO: 10407 - DNA, 88 bp, synthetic construct
  misc_feature 1..88: note = engineered ribonucleic acid scaffold (ERS) sequence
  source 1..88: mol_type = other DNA
actggcgcttctatctgattactctgagcgccatcaccagggactatgtcctatgggtaaagctccctcttcggagggagcgtcagag

SEQ ID NO: 10408 - DNA, 88 bp, synthetic construct
  misc_feature 1..88: note = engineered ribonucleic acid scaffold (ERS) sequence
  source 1..88: mol_type = other DNA
actggcgcttctatctgattactctgagcgccatcaccagggactatgtcctatgggtaaagctccctcttcggagggagcatcaaag

SEQ ID NO: 10409 - DNA, 89 bp, synthetic construct
  misc_feature 1..89: note = engineered ribonucleic acid scaffold (ERS) sequence
  source 1..89: mol_type = other DNA
actggcgcttctatctgattactctcagcgccatcaccaggcactatgtgctattgggtaaagctccctcttcggagggagcatcagac

SEQ ID NO: 10410 - DNA, 89 bp, synthetic construct
  misc_feature 1..89: note = engineered ribonucleic acid scaffold (ERS) sequence
  source 1..89: mol_type = other DNA
actggcgcttctatctgattactttgagcgccatcaccaggcactatgtgctattgggtaaagctccctcttcggagggagcatcagag

SEQ ID NO: 10411 - DNA, 89 bp, synthetic construct
  misc_feature 1..89: note = engineered ribonucleic acid scaffold (ERS) sequence
  source 1..89: mol_type = other DNA
actggcgcttctatctgattactttgagcgccatcaccaggcactatgtgctattgggtaaagctccctcttcggagggagcatcaaag

SEQ ID NO: 10412 - DNA, 89 bp, synthetic construct
  misc_feature 1..89: note = engineered ribonucleic acid scaffold (ERS) sequence
  source 1..89: mol_type = other DNA
actggcgcttctatctgattagtctcagcgccatcaccaggcactatgtgctattgggtaaagctccctcttcggagggagcatgagac

SEQ ID NO: 10413 - DNA, 89 bp, synthetic construct
  misc_feature 1..89: note = engineered ribonucleic acid scaffold (ERS) sequence
  source 1..89: mol_type = other DNA
actggcgcttctatctgattagtctgagcgccatcaccaggcactatgtgctattgggtaaagctccctcttcggagggagcatcagac

SEQ ID NO: 10414 - DNA, 89 bp, synthetic construct
  misc_feature 1..89: note = engineered ribonucleic acid scaffold (ERS) sequence
  source 1..89: mol_type = other DNA
actggcgcttctatctgattactctcagcgccatcaccaggcactatgtgctattgggtaaagctccctcttcggagggagcatgagag

SEQ ID NO: 10415 - DNA, 89 bp, synthetic construct
  misc_feature 1..89: note = engineered ribonucleic acid scaffold (ERS) sequence
  source 1..89: mol_type = other DNA
actggcgctcccatctgattaccccgagcgccatcaccaggcactatgtgctattgggtaaagctccctcttcggagggagcatcgggg

SEQ ID NO: 10416 - DNA, 89 bp, synthetic construct
  misc_feature 1..89: note = engineered ribonucleic acid scaffold (ERS) sequence
  source 1..89: mol_type = other DNA
actggcgctcctatctgattactccgagcgccatcaccaggcactatgtgctattgggtaaagctccctcttcggagggagcatcggag

SEQ ID NO: 10417 - DNA, 89 bp, synthetic construct
  misc_feature 1..89: note = engineered ribonucleic acid scaffold (ERS) sequence
  source 1..89: mol_type = other DNA
actggcgctgggatctgattaccccgagcgccatcaccaggcactatgtgctattgggtaaagctccctcttcggagggagcatcgggg

SEQ ID NO: 10418 - DNA, 89 bp, synthetic construct
  misc_feature 1..89: note = engineered ribonucleic acid scaffold (ERS) sequence
  source 1..89: mol_type = other DNA
actggcgctggtatctgattactccgagcgccatcaccaggcactatgtgctattgggtaaagctccctcttcggagggagcatcggag

SEQ ID NO: 10419 - DNA, 89 bp, synthetic construct
  misc_feature 1..89: note = engineered ribonucleic acid scaffold (ERS) sequence
  source 1..89: mol_type = other DNA
actggcgcttccatctgattaccctgagcgccatcaccaggcactatgtgctattgggtaaagctccctcttcggagggagcatcaggg

SEQ ID NO: 10420 - DNA, 89 bp, synthetic construct
  misc_feature 1..89: note = engineered ribonucleic acid scaffold (ERS) sequence
  source 1..89: mol_type = other DNA
actggcgcttggatctgattaccctgagcgccatcaccaggcactatgtgctattgggtaaagctccctcttcggagggagcatcaggg

SEQ ID NO: 10421 - DNA, 89 bp, synthetic construct
  misc_feature 1..89: note = engineered ribonucleic acid scaffold (ERS) sequence
  source 1..89: mol_type = other DNA
actggcgcttgtatctgattactctgagcgccatcaccaggcactatgtgctattgggtaaagctccctcttcggagggagcatcagag

SEQ ID NO: 10422 - DNA, 89 bp, synthetic construct
  misc_feature 1..89: note = engineered ribonucleic acid scaffold (ERS) sequence
  source 1..89: mol_type = other DNA
actggcgcttttatctgattactttgagcgccatcaccaggcactatgtgctattgggtaaagctccctcttcggagggagcatcagag

SEQ ID NO: 10423 - DNA, 89 bp, synthetic construct
  misc_feature 1..89: note = engineered ribonucleic acid scaffold (ERS) sequence
  source 1..89: mol_type = other DNA
actggcgcttttatctgattactctgagcgccatcaccaggcactatgtgctattgggtaaagctccctcttcggagggagcatcagag

SEQ ID NO: 10424 - DNA, 89 bp, synthetic construct
  misc_feature 1..89: note = engineered ribonucleic acid scaffold (ERS) sequence
  source 1..89: mol_type = other DNA
actggcgcttttatctgattactctgagcgccatcaccaggcactatgtgctattgggtaaagctccctcttcggagggagcatcaaag

SEQ ID NO: 10425 - DNA, 89 bp, synthetic construct
  misc_feature 1..89: note = engineered ribonucleic acid scaffold (ERS) sequence
  source 1..89: mol_type = other DNA
actggcgcttctatctgattactctgagcgccatcaccaggcactatgtgctattgggtaaagctccctcttcggagggagcctcagag

SEQ ID NO: 10426 - DNA, 89 bp, synthetic construct
  misc_feature 1..89: note = engineered ribonucleic acid scaffold (ERS) sequence
  source 1..89: mol_type = other DNA
actggcgcttctatctgattactctgagcgccatcaccaggcactatgtgctattgggtaaagctccctcttcggagggagcgtcagag

SEQ ID NO: 10427 - DNA, 89 bp, synthetic construct
  misc_feature 1..89: note = engineered ribonucleic acid scaffold (ERS) sequence
  source 1..89: mol_type = other DNA
actggcgcttctatctgattactctgagcgccatcaccaggcactatgtgctattgggtaaagctccctcttcggagggagcatcaaag

SEQ ID NO: 10428 - DNA, 88 bp, synthetic construct
  misc_feature 1..88: note = engineered ribonucleic acid scaffold (ERS) sequence
  source 1..88: mol_type = other DNA
actggcgcttctatctgattactctcagcgccatcaccagccactatgtggtatgggtaaagctccctcttcggagggagcatcagac

SEQ ID NO: 10429 - DNA, 88 bp, synthetic construct
  misc_feature 1..88: note = engineered ribonucleic acid scaffold (ERS) sequence
  source 1..88: mol_type = other DNA
actggcgcttctatctgattactttgagcgccatcaccagccactatgtggtatgggtaaagctccctcttcggagggagcatcagag

SEQ ID NO: 10430 - DNA, 88 bp, synthetic construct
  misc_feature 1..88: note = engineered ribonucleic acid scaffold (ERS) sequence
  source 1..88: mol_type = other DNA
actggcgcttctatctgattactttgagcgccatcaccagccactatgtggtatgggtaaagctccctcttcggagggagcatcaaag

SEQ ID NO: 10431 - DNA, 88 bp, synthetic construct
  misc_feature 1..88: note = engineered ribonucleic acid scaffold (ERS) sequence
  source 1..88: mol_type = other DNA
actggcgcttctatctgattagtctcagcgccatcaccagccactatgtggtatgggtaaagctccctcttcggagggagcatgagac

SEQ ID NO: 10432 - DNA, 88 bp, synthetic construct
  misc_feature 1..88: note = engineered ribonucleic acid scaffold (ERS) sequence
  source 1..88: mol_type = other DNA
actggcgcttctatctgattagtctgagcgccatcaccagccactatgtggtatgggtaaagctccctcttcggagggagcatcagac

SEQ ID NO: 10433 - DNA, 88 bp, synthetic construct
  misc_feature 1..88: note = engineered ribonucleic acid scaffold (ERS) sequence
  source 1..88: mol_type = other DNA
actggcgcttctatctgattactctcagcgccatcaccagccactatgtggtatgggtaaagctccctcttcggagggagcatgagag

SEQ ID NO: 10434 - DNA, 88 bp, synthetic construct
  misc_feature 1..88: note = engineered ribonucleic acid scaffold (ERS) sequence
  source 1..88: mol_type = other DNA
actggcgctcccatctgattaccccgagcgccatcaccagccactatgtggtatgggtaaagctccctcttcggagggagcatcgggg

SEQ ID NO: 10435 - DNA, 88 bp, synthetic construct
  misc_feature 1..88: note = engineered ribonucleic acid scaffold (ERS) sequence
  source 1..88: mol_type = other DNA
actggcgctcctatctgattactccgagcgccatcaccagccactatgtggtatgggtaaagctccctcttcggagggagcatcggag

SEQ ID NO: 10436 - DNA, 88 bp, synthetic construct
  misc_feature 1..88: note = engineered ribonucleic acid scaffold (ERS) sequence
  source 1..88: mol_type = other DNA
actggcgctgggatctgattaccccgagcgccatcaccagccactatgtggtatgggtaaagctccctcttcggagggagcatcgggg

SEQ ID NO: 10437 - DNA, 88 bp, synthetic construct
  misc_feature 1..88: note = engineered ribonucleic acid scaffold (ERS) sequence
  source 1..88: mol_type = other DNA
actggcgctggtatctgattactccgagcgccatcaccagccactatgtggtatgggtaaagctccctcttcggagggagcatcggag

SEQ ID NO: 10438 - DNA, 88 bp, synthetic construct
  misc_feature 1..88: note = engineered ribonucleic acid scaffold (ERS) sequence
  source 1..88: mol_type = other DNA
actggcgcttccatctgattaccctgagcgccatcaccagccactatgtggtatgggtaaagctccctcttcggagggagcatcaggg

SEQ ID NO: 10439 - DNA, 88 bp, synthetic construct
  misc_feature 1..88: note = engineered ribonucleic acid scaffold (ERS) sequence
  source 1..88: mol_type = other DNA
actggcgcttggatctgattaccctgagcgccatcaccagccactatgtggtatgggtaaagctccctcttcggagggagcatcaggg

SEQ ID NO: 10440 - DNA, 88 bp, synthetic construct
  misc_feature 1..88: note = engineered ribonucleic acid scaffold (ERS) sequence
  source 1..88: mol_type = other DNA
actggcgcttgtatctgattactctgagcgccatcaccagccactatgtggtatgggtaaagctccctcttcggagggagcatcagag

SEQ ID NO: 10441 - DNA, 88 bp, synthetic construct
  misc_feature 1..88: note = engineered ribonucleic acid scaffold (ERS) sequence
  source 1..88: mol_type = other DNA
actggcgcttttatctgattactttgagcgccatcaccagccactatgtggtatgggtaaagctccctcttcggagggagcatcagag

SEQ ID NO: 10442 - DNA, 88 bp, synthetic construct
  misc_feature 1..88: note = engineered ribonucleic acid scaffold (ERS) sequence
  source 1..88: mol_type = other DNA
actggcgcttttatctgattactctgagcgccatcaccagccactatgtggtatgggtaaagctccctcttcggagggagcatcagag

SEQ ID NO: 10443 - DNA, 88 bp, synthetic construct
  misc_feature 1..88: note = engineered ribonucleic acid scaffold (ERS) sequence
  source 1..88: mol_type = other DNA
actggcgcttttatctgattactctgagcgccatcaccagccactatgtggtatgggtaaagctccctcttcggagggagcatcaaag

SEQ ID NO: 10444 - DNA, 88 bp, synthetic construct
  misc_feature 1..88: note = engineered ribonucleic acid scaffold (ERS) sequence
  source 1..88: mol_type = other DNA
actggcgcttctatctgattactctgagcgccatcaccagccactatgtggtatgggtaaagctccctcttcggagggagcctcagag

SEQ ID NO: 10445 - DNA, 88 bp, synthetic construct
  misc_feature 1..88: note = engineered ribonucleic acid scaffold (ERS) sequence
  source 1..88: mol_type = other DNA
actggcgcttctatctgattactctgagcgccatcaccagccactatgtggtatgggtaaagctccctcttcggagggagcgtcagag

SEQ ID NO: 10446 - DNA, 88 bp, synthetic construct
  misc_feature 1..88: note = engineered ribonucleic acid scaffold (ERS) sequence
  source 1..88: mol_type = other DNA
actggcgcttctatctgattactctgagcgccatcaccagccactatgtggtatgggtaaagctccctcttcggagggagcatcaaag

SEQ ID NO: 10447 - DNA, 88 bp, synthetic construct
  misc_feature 1..88: note = engineered ribonucleic acid scaffold (ERS) sequence
  source 1..88: mol_type = other DNA
actggcgcttctatctgattactctcagcgccatcaccagctactatgtagtatgggtaaagctccctcttcggagggagcatcagac

SEQ ID NO: 10448 - DNA, 88 bp, synthetic construct
  misc_feature 1..88: note = engineered ribonucleic acid scaffold (ERS) sequence
  source 1..88: mol_type = other DNA
actggcgcttctatctgattactttgagcgccatcaccagctactatgtagtatgggtaaagctccctcttcggagggagcatcagag

SEQ ID NO: 10449 - DNA, 88 bp, synthetic construct
  misc_feature 1..88: note = engineered ribonucleic acid scaffold (ERS) sequence
  source 1..88: mol_type = other DNA
actggcgcttctatctgattactttgagcgccatcaccagctactatgtagtatgggtaaagctccctcttcggagggagcatcaaag

SEQ ID NO: 10450 - DNA, 88 bp, synthetic construct
  misc_feature 1..88: note = engineered ribonucleic acid scaffold (ERS) sequence
  source 1..88: mol_type = other DNA
actggcgcttctatctgattagtctcagcgccatcaccagctactatgtagtatgggtaaagctccctcttcggagggagcatgagac

SEQ ID NO: 10451 - DNA, 88 bp, synthetic construct
  misc_feature 1..88: note = engineered ribonucleic acid scaffold (ERS) sequence
  source 1..88: mol_type = other DNA
actggcgcttctatctgattagtctgagcgccatcaccagctactatgtagtatgggtaaagctccctcttcggagggagcatcagac

SEQ ID NO: 10452 - DNA, 88 bp, synthetic construct
  misc_feature 1..88: note = engineered ribonucleic acid scaffold (ERS) sequence
  source 1..88: mol_type = other DNA
actggcgcttctatctgattactctcagcgccatcaccagctactatgtagtatgggtaaagctccctcttcggagggagcatgagag

SEQ ID NO: 10453 - DNA, 88 bp, synthetic construct
  misc_feature 1..88: note = engineered ribonucleic acid scaffold (ERS) sequence
  source 1..88: mol_type = other DNA
actggcgctcccatctgattaccccgagcgccatcaccagctactatgtagtatgggtaaagctccctcttcggagggagcatcgggg

SEQ ID NO: 10454 - DNA, 88 bp, synthetic construct
  misc_feature 1..88: note = engineered ribonucleic acid scaffold (ERS) sequence
  source 1..88: mol_type = other DNA
actggcgctcctatctgattactccgagcgccatcaccagctactatgtagtatgggtaaagctccctcttcggagggagcatcggag

SEQ ID NO: 10455 - DNA, 88 bp, synthetic construct
  misc_feature 1..88: note = engineered ribonucleic acid scaffold (ERS) sequence
  source 1..88: mol_type = other DNA
actggcgctgggatctgattaccccgagcgccatcaccagctactatgtagtatgggtaaagctccctcttcggagggagcatcgggg

SEQ ID NO: 10456 - DNA, 88 bp, synthetic construct
  misc_feature 1..88: note = engineered ribonucleic acid scaffold (ERS) sequence
  source 1..88: mol_type = other DNA
actggcgctggtatctgattactccgagcgccatcaccagctactatgtagtatgggtaaagctccctcttcggagggagcatcggag

SEQ ID NO: 10457 - DNA, 88 bp, synthetic construct
  misc_feature 1..88: note = engineered ribonucleic acid scaffold (ERS) sequence
  source 1..88: mol_type = other DNA
actggcgcttccatctgattaccctgagcgccatcaccagctactatgtagtatgggtaaagctccctcttcggagggagcatcaggg

SEQ ID NO: 10458 - DNA, 88 bp, synthetic construct
  misc_feature 1..88: note = engineered ribonucleic acid scaffold (ERS) sequence
  source 1..88: mol_type = other DNA
actggcgcttggatctgattaccctgagcgccatcaccagctactatgtagtatgggtaaagctccctcttcggagggagcatcaggg

SEQ ID NO: 10459 - DNA, 88 bp, synthetic construct
  misc_feature 1..88: note = engineered ribonucleic acid scaffold (ERS) sequence
  source 1..88: mol_type = other DNA
actggcgcttgtatctgattactctgagcgccatcaccagctactatgtagtatgggtaaagctccctcttcggagggagcatcagag

SEQ ID NO: 10460 - DNA, 88 bp, synthetic construct
  misc_feature 1..88: note = engineered ribonucleic acid scaffold (ERS) sequence
  source 1..88: mol_type = other DNA
actggcgcttttatctgattactttgagcgccatcaccagctactatgtagtatgggtaaagctccctcttcggagggagcatcagag

SEQ ID NO: 10461 - DNA, 88 bp, synthetic construct
  misc_feature 1..88: note = engineered ribonucleic acid scaffold (ERS) sequence
  source 1..88: mol_type = other DNA
actggcgcttttatctgattactctgagcgccatcaccagctactatgtagtatgggtaaagctccctcttcggagggagcatcagag

SEQ ID NO: 10462 - DNA, 88 bp, synthetic construct
  misc_feature 1..88: note = engineered ribonucleic acid scaffold (ERS) sequence
  source 1..88: mol_type = other DNA
actggcgcttttatctgattactctgagcgccatcaccagctactatgtagtatgggtaaagctccctcttcggagggagcatcaaag

SEQ ID NO: 10463 - DNA, 88 bp, synthetic construct
  misc_feature 1..88: note = engineered ribonucleic acid scaffold (ERS) sequence
  source 1..88: mol_type = other DNA
actggcgcttctatctgattactctgagcgccatcaccagctactatgtagtatgggtaaagctccctcttcggagggagcctcagag

SEQ ID NO: 10464 - DNA, 88 bp, synthetic construct
  misc_feature 1..88: note = engineered ribonucleic acid scaffold (ERS) sequence
  source 1..88: mol_type = other DNA
actggcgcttctatctgattactctgagcgccatcaccagctactatgtagtatgggtaaagctccctcttcggagggagcgtcagag

SEQ ID NO: 10465 - DNA, 88 bp, synthetic construct
  misc_feature 1..88: note = engineered ribonucleic acid scaffold (ERS) sequence
  source 1..88: mol_type = other DNA
actggcgcttctatctgattactctgagcgccatcaccagctactatgtagtatgggtaaagctccctcttcggagggagcatcaaag

SEQ ID NO: 10466 - DNA, 88 bp, synthetic construct
  misc_feature 1..88: note = engineered ribonucleic acid scaffold (ERS) sequence
  source 1..88: mol_type = other DNA
actggcgcttctatctgattactctcagcgccatcaccagcgattatgtcgtatgggtaaagctccctcttcggagggagcatcagac

SEQ ID NO: 10467 - DNA, 88 bp, synthetic construct
  misc_feature 1..88: note = engineered ribonucleic acid scaffold (ERS) sequence
  source 1..88: mol_type = other DNA
actggcgcttctatctgattactttgagcgccatcaccagcgattatgtcgtatgggtaaagctccctcttcggagggagcatcagag

SEQ ID NO: 10468 - DNA, 88 bp, synthetic construct
  misc_feature 1..88: note = engineered ribonucleic acid scaffold (ERS) sequence
  source 1..88: mol_type = other DNA
actggcgcttctatctgattactttgagcgccatcaccagcgattatgtcgtatgggtaaagctccctcttcggagggagcatcaaag

SEQ ID NO: 10469 - DNA, 88 bp, synthetic construct
  misc_feature 1..88: note = engineered ribonucleic acid scaffold (ERS) sequence
  source 1..88: mol_type = other DNA
actggcgcttctatctgattagtctcagcgccatcaccagcgattatgtcgtatgggtaaagctccctcttcggagggagcatgagac

SEQ ID NO: 10470 - DNA, 88 bp, synthetic construct
  misc_feature 1..88: note = engineered ribonucleic acid scaffold (ERS) sequence
  source 1..88: mol_type = other DNA
actggcgcttctatctgattagtctgagcgccatcaccagcgattatgtcgtatgggtaaagctccctcttcggagggagcatcagac

SEQ ID NO: 10471 - DNA, 88 bp, synthetic construct
  misc_feature 1..88: note = engineered ribonucleic acid scaffold (ERS) sequence
  source 1..88: mol_type = other DNA
actggcgcttctatctgattactctcagcgccatcaccagcgattatgtcgtatgggtaaagctccctcttcggagggagcatgagag

SEQ ID NO: 10472 - DNA, 88 bp, synthetic construct
  misc_feature 1..88: note = engineered ribonucleic acid scaffold (ERS) sequence
  source 1..88: mol_type = other DNA
actggcgctcccatctgattaccccgagcgccatcaccagcgattatgtcgtatgggtaaagctccctcttcggagggagcatcgggg

SEQ ID NO: 10473 - DNA, 88 bp, synthetic construct
  misc_feature 1..88: note = engineered ribonucleic acid scaffold (ERS) sequence
  source 1..88: mol_type = other DNA
actggcgctcctatctgattactccgagcgccatcaccagcgattatgtcgtatgggtaaagctccctcttcggagggagcatcggag

SEQ ID NO: 10474 - DNA, 88 bp, synthetic construct
  misc_feature 1..88: note = engineered ribonucleic acid scaffold (ERS) sequence
  source 1..88: mol_type = other DNA
actggcgctgggatctgattaccccgagcgccatcaccagcgattatgtcgtatgggtaaagctccctcttcggagggagcatcgggg

SEQ ID NO: 10475 - DNA, 88 bp, synthetic construct
  misc_feature 1..88: note = engineered ribonucleic acid scaffold (ERS) sequence
  source 1..88: mol_type = other DNA
actggcgctggtatctgattactccgagcgccatcaccagcgattatgtcgtatgggtaaagctccctcttcggagggagcatcggag

SEQ ID NO: 10476 - DNA, 88 bp, synthetic construct
  misc_feature 1..88: note = engineered ribonucleic acid scaffold (ERS) sequence
  source 1..88: mol_type = other DNA
actggcgcttccatctgattaccctgagcgccatcaccagcgattatgtcgtatgggtaaagctccctcttcggagggagcatcaggg

SEQ ID NO: 10477 - DNA, 88 bp, synthetic construct
  misc_feature 1..88: note = engineered ribonucleic acid scaffold (ERS) sequence
  source 1..88: mol_type = other DNA
actggcgcttggatctgattaccctgagcgccatcaccagcgattatgtcgtatgggtaaagctccctcttcggagggagcatcaggg

SEQ ID NO: 10478 - DNA, 88 bp, synthetic construct
  misc_feature 1..88: note = engineered ribonucleic acid scaffold (ERS) sequence
  source 1..88: mol_type = other DNA
actggcgcttgtatctgattactctgagcgccatcaccagcgattatgtcgtatgggtaaagctccctcttcggagggagcatcagag

SEQ ID NO: 10479 - DNA, 88 bp, synthetic construct
  misc_feature 1..88: note = engineered ribonucleic acid scaffold (ERS) sequence
  source 1..88: mol_type = other DNA
actggcgcttttatctgattactttgagcgccatcaccagcgattatgtcgtatgggtaaagctccctcttcggagggagcatcagag

SEQ ID NO: 10480 - DNA, 88 bp, synthetic construct
  misc_feature 1..88: note = engineered ribonucleic acid scaffold (ERS) sequence
  source 1..88: mol_type = other DNA
actggcgcttttatctgattactctgagcgccatcaccagcgattatgtcgtatgggtaaagctccctcttcggagggagcatcagag

SEQ ID NO: 10481 - DNA, 88 bp, synthetic construct
  misc_feature 1..88: note = engineered ribonucleic acid scaffold (ERS) sequence
  source 1..88: mol_type = other DNA
actggcgcttttatctgattactctgagcgccatcaccagcgattatgtcgtatgggtaaagctccctcttcggagggagcatcaaag

SEQ ID NO: 10482 - DNA, 88 bp, synthetic construct
  misc_feature 1..88: note = engineered ribonucleic acid scaffold (ERS) sequence
  source 1..88: mol_type = other DNA
actggcgcttctatctgattactctgagcgccatcaccagcgattatgtcgtatgggtaaagctccctcttcggagggagcctcagag

SEQ ID NO: 10483 - DNA, 88 bp, synthetic construct
  misc_feature 1..88: note = engineered ribonucleic acid scaffold (ERS) sequence
  source 1..88: mol_type = other DNA
actggcgcttctatctgattactctgagcgccatcaccagcgattatgtcgtatgggtaaagctccctcttcggagggagcgtcagag

SEQ ID NO: 10484 - DNA, 88 bp, synthetic construct
  misc_feature 1..88: note = engineered ribonucleic acid scaffold (ERS) sequence
  source 1..88: mol_type = other DNA
actggcgcttctatctgattactctgagcgccatcaccagcgattatgtcgtatgggtaaagctccctcttcggagggagcatcaaag

SEQ ID NO: 10485 - DNA, 88 bp, synthetic construct
  misc_feature 1..88: note = engineered ribonucleic acid scaffold (ERS) sequence
  source 1..88: mol_type = other DNA
actggcgcttctatctgattactctcagcgccatcaccagcgacgatgtcgtatgggtaaagctccctcttcggagggagcatcagac

SEQ ID NO: 10486 - DNA, 88 bp, synthetic construct
  misc_feature 1..88: note = engineered ribonucleic acid scaffold (ERS) sequence
  source 1..88: mol_type = other DNA
actggcgcttctatctgattactttgagcgccatcaccagcgacgatgtcgtatgggtaaagctccctcttcggagggagcatcagag

SEQ ID NO: 10487 - DNA, 88 bp, synthetic construct
  misc_feature 1..88: note = engineered ribonucleic acid scaffold (ERS) sequence
  source 1..88: mol_type = other DNA
actggcgcttctatctgattactttgagcgccatcaccagcgacgatgtcgtatgggtaaagctccctcttcggagggagcatcaaag

SEQ ID NO: 10488 - DNA, 88 bp, synthetic construct
  misc_feature 1..88: note = engineered ribonucleic acid scaffold (ERS) sequence
  source 1..88: mol_type = other DNA
actggcgcttctatctgattagtctcagcgccatcaccagcgacgatgtcgtatgggtaaagctccctcttcggagggagcatgagac

SEQ ID NO: 10489 - DNA, 88 bp, synthetic construct
  misc_feature 1..88: note = engineered ribonucleic acid scaffold (ERS) sequence
  source 1..88: mol_type = other DNA
actggcgcttctatctgattagtctgagcgccatcaccagcgacgatgtcgtatgggtaaagctccctcttcggagggagcatcagac

SEQ ID NO: 10490 - DNA, 88 bp, synthetic construct
  misc_feature 1..88: note = engineered ribonucleic acid scaffold (ERS) sequence
  source 1..88: mol_type = other DNA
actggcgcttctatctgattactctcagcgccatcaccagcgacgatgtcgtatgggtaaagctccctcttcggagggagcatgagag

SEQ ID NO: 10491 - DNA, 88 bp, synthetic construct
  misc_feature 1..88: note = engineered ribonucleic acid scaffold (ERS) sequence
  source 1..88: mol_type = other DNA
actggcgctcccatctgattaccccgagcgccatcaccagcgacgatgtcgtatgggtaaagctccctcttcggagggagcatcgggg

SEQ ID NO: 10492 - DNA, 88 bp, synthetic construct
  misc_feature 1..88: note = engineered ribonucleic acid scaffold (ERS) sequence
  source 1..88: mol_type = other DNA
actggcgctcctatctgattactccgagcgccatcaccagcgacgatgtcgtatgggtaaagctccctcttcggagggagcatcggag

SEQ ID NO: 10493 - DNA, 88 bp, synthetic construct
  misc_feature 1..88: note = engineered ribonucleic acid scaffold (ERS) sequence
  source 1..88: mol_type = other DNA
actggcgctgggatctgattaccccgagcgccatcaccagcgacgatgtcgtatgggtaaagctccctcttcggagggagcatcgggg

SEQ ID NO: 10494 - DNA, 88 bp, synthetic construct
  misc_feature 1..88: note = engineered ribonucleic acid scaffold (ERS) sequence
  source 1..88: mol_type = other DNA
actggcgctggtatctgattactccgagcgccatcaccagcgacgatgtcgtatgggtaaagctccctcttcggagggagcatcggag

SEQ ID NO: 10495 - DNA, 88 bp, synthetic construct
  misc_feature 1..88: note = engineered ribonucleic acid scaffold (ERS) sequence
  source 1..88: mol_type = other DNA
actggcgcttccatctgattaccctgagcgccatcaccagcgacgatgtcgtatgggtaaagctccctcttcggagggagcatcaggg

SEQ ID NO: 10496 - DNA, 88 bp, synthetic construct
  misc_feature 1..88: note = engineered ribonucleic acid scaffold (ERS) sequence
  source 1..88: mol_type = other DNA
actggcgcttggatctgattaccctgagcgccatcaccagcgacgatgtcgtatgggtaaagctccctcttcggagggagcatcaggg

SEQ ID NO: 10497 - DNA, 88 bp, synthetic construct
  misc_feature 1..88: note = engineered ribonucleic acid scaffold (ERS) sequence
  source 1..88: mol_type = other DNA
actggcgcttgtatctgattactctgagcgccatcaccagcgacgatgtcgtatgggtaaagctccctcttcggagggagcatcagag

SEQ ID NO: 10498 - DNA, 88 bp, synthetic construct
  misc_feature 1..88: note = engineered ribonucleic acid scaffold (ERS) sequence
  source 1..88: mol_type = other DNA
actggcgcttttatctgattactttgagcgccatcaccagcgacgatgtcgtatgggtaaagctccctcttcggagggagcatcagag

SEQ ID NO: 10499 - DNA, 88 bp, synthetic construct
  misc_feature 1..88: note = engineered ribonucleic acid scaffold (ERS) sequence
  source 1..88: mol_type = other DNA
actggcgcttttatctgattactctgagcgccatcaccagcgacgatgtcgtatgggtaaagctccctcttcggagggagcatcagag

SEQ ID NO: 10500 - DNA, 88 bp, synthetic construct
  misc_feature 1..88: note = engineered ribonucleic acid scaffold (ERS) sequence
  source 1..88: mol_type = other DNA
actggcgcttttatctgattactctgagcgccatcaccagcgacgatgtcgtatgggtaaagctccctcttcggagggagcatcaaag

SEQ ID NO: 10501 - DNA, 88 bp, synthetic construct
  misc_feature 1..88: note = engineered ribonucleic acid scaffold (ERS) sequence
  source 1..88: mol_type = other DNA
actggcgcttctatctgattactctgagcgccatcaccagcgacgatgtcgtatgggtaaagctccctcttcggagggagcctcagag

SEQ ID NO: 10502 - DNA, 88 bp, synthetic construct
  misc_feature 1..88: note = engineered ribonucleic acid scaffold (ERS) sequence
  source 1..88: mol_type = other DNA
actggcgcttctatctgattactctgagcgccatcaccagcgacgatgtcgtatgggtaaagctccctcttcggagggagcgtcagag

SEQ ID NO: 10503 - DNA, 88 bp, synthetic construct
  misc_feature 1..88: note = engineered ribonucleic acid scaffold (ERS) sequence
  source 1..88: mol_type = other DNA
actggcgcttctatctgattactctgagcgccatcaccagcgacgatgtcgtatgggtaaagctccctcttcggagggagcatcaaag

SEQ ID NO: 10504 - DNA, 88 bp, synthetic construct
  misc_feature 1..88: note = engineered ribonucleic acid scaffold (ERS) sequence
  source 1..88: mol_type = other DNA
actggcgcttctatctgattactctcagcgccatcaccagcgactctgtcgtatgggtaaagctccctcttcggagggagcatcagac

SEQ ID NO: 10505 - DNA, 88 bp, synthetic construct
  misc_feature 1..88: note = engineered ribonucleic acid scaffold (ERS) sequence
  source 1..88: mol_type = other DNA
actggcgcttctatctgattactttgagcgccatcaccagcgactctgtcgtatgggtaaagctccctcttcggagggagcatcagag

SEQ ID NO: 10506 - DNA, 88 bp, synthetic construct
  misc_feature 1..88: note = engineered ribonucleic acid scaffold (ERS) sequence
  source 1..88: mol_type = other DNA
actggcgcttctatctgattactttgagcgccatcaccagcgactctgtcgtatgggtaaagctccctcttcggagggagcatcaaag

SEQ ID NO: 10507 - DNA, 88 bp, synthetic construct
  misc_feature 1..88: note = engineered ribonucleic acid scaffold (ERS) sequence
  source 1..88: mol_type = other DNA
actggcgcttctatctgattagtctcagcgccatcaccagcgactctgtcgtatgggtaaagctccctcttcggagggagcatgagac

SEQ ID NO: 10508 - DNA, 88 bp, synthetic construct
  misc_feature 1..88: note = engineered ribonucleic acid scaffold (ERS) sequence
  source 1..88: mol_type = other DNA
actggcgcttctatctgattagtctgagcgccatcaccagcgactctgtcgtatgggtaaagctccctcttcggagggagcatcagac

SEQ ID NO: 10509 - DNA, 88 bp, synthetic construct
  misc_feature 1..88: note = engineered ribonucleic acid scaffold (ERS) sequence
  source 1..88: mol_type = other DNA
actggcgcttctatctgattactctcagcgccatcaccagcgactctgtcgtatgggtaaagctccctcttcggagggagcatgagag

SEQ ID NO: 10510 - DNA, 88 bp, synthetic construct
  misc_feature 1..88: note = engineered ribonucleic acid scaffold (ERS) sequence
  source 1..88: mol_type = other DNA
actggcgctcccatctgattaccccgagcgccatcaccagcgactctgtcgtatgggtaaagctccctcttcggagggagcatcgggg

SEQ ID NO: 10511 - DNA, 88 bp, synthetic construct
  misc_feature 1..88: note = engineered ribonucleic acid scaffold (ERS) sequence
  source 1..88: mol_type = other DNA
actggcgctcctatctgattactccgagcgccatcaccagcgactctgtcgtatgggtaaagctccctcttcggagggagcatcggag

SEQ ID NO: 10512 - DNA, 88 bp, synthetic construct
  misc_feature 1..88: note = engineered ribonucleic acid scaffold (ERS) sequence
  source 1..88: mol_type = other DNA
actggcgctgggatctgattaccccgagcgccatcaccagcgactctgtcgtatgggtaaagctccctcttcggagggagcatcgggg

SEQ ID NO: 10513 - DNA, 88 bp, synthetic construct
  misc_feature 1..88: note = engineered ribonucleic acid scaffold (ERS) sequence
  source 1..88: mol_type = other DNA
actggcgctggtatctgattactccgagcgccatcaccagcgactctgtcgtatgggtaaagctccctcttcggagggagcatcggag

SEQ ID NO: 10514 - DNA, 88 bp, synthetic construct
  misc_feature 1..88: note = engineered ribonucleic acid scaffold (ERS) sequence
  source 1..88: mol_type = other DNA
actggcgcttccatctgattaccctgagcgccatcaccagcgactctgtcgtatgggtaaagctccctcttcggagggagcatcaggg

SEQ ID NO: 10515 - DNA, 88 bp, synthetic construct
  misc_feature 1..88: note = engineered ribonucleic acid scaffold (ERS) sequence
  source 1..88: mol_type = other DNA
actggcgcttggatctgattaccctgagcgccatcaccagcgactctgtcgtatgggtaaagctccctcttcggagggagcatcaggg

SEQ ID NO: 10516 - DNA, 88 bp, synthetic construct
  misc_feature 1..88: note = engineered ribonucleic acid scaffold (ERS) sequence
  source 1..88: mol_type = other DNA
actggcgcttgtatctgattactctgagcgccatcaccagcgactctgtcgtatgggtaaagctccctcttcggagggagcatcagag

SEQ ID NO: 10517 - DNA, 88 bp, synthetic construct
  misc_feature 1..88: note = engineered ribonucleic acid scaffold (ERS) sequence
  source 1..88: mol_type = other DNA
actggcgcttttatctgattactttgagcgccatcaccagcgactctgtcgtatgggtaaagctccctcttcggagggagcatcagag

SEQ ID NO: 10518 - DNA, 88 bp, synthetic construct
  misc_feature 1..88: note = engineered ribonucleic acid scaffold (ERS) sequence
  source 1..88: mol_type = other DNA
actggcgcttttatctgattactctgagcgccatcaccagcgactctgtcgtatgggtaaagctccctcttcggagggagcatcagag

SEQ ID NO: 10519 - DNA, 88 bp, synthetic construct
  misc_feature 1..88: note = engineered ribonucleic acid scaffold (ERS) sequence
  source 1..88: mol_type = other DNA
actggcgcttttatctgattactctgagcgccatcaccagcgactctgtcgtatgggtaaagctccctcttcggagggagcatcaaag

SEQ ID NO: 10520 - DNA, 88 bp, synthetic construct
  misc_feature 1..88: note = engineered ribonucleic acid scaffold (ERS) sequence
  source 1..88: mol_type = other DNA
actggcgcttctatctgattactctgagcgccatcaccagcgactctgtcgtatgggtaaagctccctcttcggagggagcctcagag

SEQ ID NO: 10521 - DNA, 88 bp, synthetic construct
  misc_feature 1..88: note = engineered ribonucleic acid scaffold (ERS) sequence
  source 1..88: mol_type = other DNA
actggcgcttctatctgattactctgagcgccatcaccagcgactctgtcgtatgggtaaagctccctcttcggagggagcgtcagag

SEQ ID NO: 10522 - DNA, 88 bp, synthetic construct
  misc_feature 1..88: note = engineered ribonucleic acid scaffold (ERS) sequence
  source 1..88: mol_type = other DNA
actggcgcttctatctgattactctgagcgccatcaccagcgactctgtcgtatgggtaaagctccctcttcggagggagcatcaaag

SEQ ID NO: 10523 - DNA, 88 bp, synthetic construct
  misc_feature 1..88: note = engineered ribonucleic acid scaffold (ERS) sequence
  source 1..88: mol_type = other DNA
actggcgcttctatctgattactctcagcgccatcaccagcgactatgtcgtgtgggtaaagctccctcttcggagggagcatcagac

SEQ ID NO: 10524 - DNA, 88 bp, synthetic construct
  misc_feature 1..88: note = engineered ribonucleic acid scaffold (ERS) sequence
  source 1..88: mol_type = other DNA
actggcgcttctatctgattactttgagcgccatcaccagcgactatgtcgtgtgggtaaagctccctcttcggagggagcatcagag

SEQ ID NO: 10525 - DNA, 88 bp, synthetic construct
  misc_feature 1..88: note = engineered ribonucleic acid scaffold (ERS) sequence
  source 1..88: mol_type = other DNA
actggcgcttctatctgattactttgagcgccatcaccagcgactatgtcgtgtgggtaaagctccctcttcggagggagcatcaaag

SEQ ID NO: 10526 - DNA, 88 bp, synthetic construct
  misc_feature 1..88: note = engineered ribonucleic acid scaffold (ERS) sequence
  source 1..88: mol_type = other DNA
actggcgcttctatctgattagtctcagcgccatcaccagcgactatgtcgtgtgggtaaagctccctcttcggagggagcatgagac

SEQ ID NO: 10527 - DNA, 88 bp, synthetic construct
  misc_feature 1..88: note = engineered ribonucleic acid scaffold (ERS) sequence
  source 1..88: mol_type = other DNA
actggcgcttctatctgattagtctgagcgccatcaccagcgactatgtcgtgtgggtaaagctccctcttcggagggagcatcagac

SEQ ID NO: 10528 - DNA, 88 bp, synthetic construct
  misc_feature 1..88: note = engineered ribonucleic acid scaffold (ERS) sequence
  source 1..88: mol_type = other DNA
actggcgcttctatctgattactctcagcgccatcaccagcgactatgtcgtgtgggtaaagctccctcttcggagggagcatgagag

SEQ ID NO: 10529 - DNA, 88 bp, synthetic construct
  misc_feature 1..88: note = engineered ribonucleic acid scaffold (ERS) sequence
  source 1..88: mol_type = other DNA
actggcgctcccatctgattaccccgagcgccatcaccagcgactatgtcgtgtgggtaaagctccctcttcggagggagcatcgggg

SEQ ID NO: 10530 - DNA, 88 bp, synthetic construct
  misc_feature 1..88: note = engineered ribonucleic acid scaffold (ERS) sequence
  source 1..88: mol_type = other DNA
actggcgctcctatctgattactccgagcgccatcaccagcgactatgtcgtgtgggtaaagctccctcttcggagggagcatcggag

SEQ ID NO: 10531 - DNA, 88 bp, synthetic construct
  misc_feature 1..88: note = engineered ribonucleic acid scaffold (ERS) sequence
  source 1..88: mol_type = other DNA
actggcgctgggatctgattaccccgagcgccatcaccagcgactatgtcgtgtgggtaaagctccctcttcggagggagcatcgggg

SEQ ID NO: 10532 - DNA, 88 bp, synthetic construct
  misc_feature 1..88: note = engineered ribonucleic acid scaffold (ERS) sequence
  source 1..88: mol_type = other DNA
actggcgctggtatctgattactccgagcgccatcaccagcgactatgtcgtgtgggtaaagctccctcttcggagggagcatcggag

SEQ ID NO: 10533 - DNA, 88 bp, synthetic construct
  misc_feature 1..88: note = engineered ribonucleic acid scaffold (ERS) sequence
  source 1..88: mol_type = other DNA
actggcgcttccatctgattaccctgagcgccatcaccagcgactatgtcgtgtgggtaaagctccctcttcggagggagcatcaggg

SEQ ID NO: 10534 - DNA, 88 bp, synthetic construct
  misc_feature 1..88: note = engineered ribonucleic acid scaffold (ERS) sequence
  source 1..88: mol_type = other DNA
actggcgcttggatctgattaccctgagcgccatcaccagcgactatgtcgtgtgggtaaagctccctcttcggagggagcatcaggg

SEQ ID NO: 10535 - DNA, 88 bp, synthetic construct
  misc_feature 1..88: note = engineered ribonucleic acid scaffold (ERS) sequence
  source 1..88: mol_type = other DNA
actggcgcttgtatctgattactctgagcgccatcaccagcgactatgtcgtgtgggtaaagctccctcttcggagggagcatcagag

SEQ ID NO: 10536 - DNA, 88 bp, synthetic construct
  misc_feature 1..88: note = engineered ribonucleic acid scaffold (ERS) sequence
  source 1..88: mol_type = other DNA
actggcgcttttatctgattactttgagcgccatcaccagcgactatgtcgtgtgggtaaagctccctcttcggagggagcatcagag

SEQ ID NO: 10537 - DNA, 88 bp, synthetic construct
  misc_feature 1..88: note = engineered ribonucleic acid scaffold (ERS) sequence
  source 1..88: mol_type = other DNA
actggcgcttttatctgattactctgagcgccatcaccagcgactatgtcgtgtgggtaaagctccctcttcggagggagcatcagag

SEQ ID NO: 10538 - DNA, 88 bp, synthetic construct
  misc_feature 1..88: note = engineered ribonucleic acid scaffold (ERS) sequence
  source 1..88: mol_type = other DNA
actggcgcttttatctgattactctgagcgccatcaccagcgactatgtcgtgtgggtaaagctccctcttcggagggagcatcaaag

SEQ ID NO: 10539 - DNA, 88 bp, synthetic construct
  misc_feature 1..88: note = engineered ribonucleic acid scaffold (ERS) sequence
  source 1..88: mol_type = other DNA
actggcgcttctatctgattactctgagcgccatcaccagcgactatgtcgtgtgggtaaagctccctcttcggagggagcctcagag

SEQ ID NO: 10540 - DNA, 88 bp, synthetic construct
  misc_feature 1..88: note = engineered ribonucleic acid scaffold (ERS) sequence
  source 1..88: mol_type = other DNA
actggcgcttctatctgattactctgagcgccatcaccagcgactatgtcgtgtgggtaaagctccctcttcggagggagcgtcagag

SEQ ID NO: 10541 - DNA, 88 bp, synthetic construct
  misc_feature 1..88: note = engineered ribonucleic acid scaffold (ERS) sequence
  source 1..88: mol_type = other DNA
actggcgcttctatctgattactctgagcgccatcaccagcgactatgtcgtgtgggtaaagctccctcttcggagggagcatcaaag

SEQ ID NO: 10542 - DNA, 89 bp, synthetic construct
  misc_feature 1..89: note = engineered ribonucleic acid scaffold (ERS) sequence
  source 1..89: mol_type = other DNA
actggcgcttctatctgattactctcagcgccatcaccagcgactatgtcgtattgggtaaagctccctcttcggagggagcatcagac

SEQ ID NO: 10543 - DNA, 89 bp, synthetic construct
  misc_feature 1..89: note = engineered ribonucleic acid scaffold (ERS) sequence
  source 1..89: mol_type = other DNA
actggcgcttctatctgattactttgagcgccatcaccagcgactatgtcgtattgggtaaagctccctcttcggagggagcatcagag

SEQ ID NO: 10544 - DNA, 89 bp, synthetic construct
  misc_feature 1..89: note = engineered ribonucleic acid scaffold (ERS) sequence
  source 1..89: mol_type = other DNA
actggcgcttctatctgattactttgagcgccatcaccagcgactatgtcgtattgggtaaagctccctcttcggagggagcatcaaag

SEQ ID NO: 10545 - DNA, 89 bp, synthetic construct
  misc_feature 1..89: note = engineered ribonucleic acid scaffold (ERS) sequence
  source 1..89: mol_type = other DNA
actggcgcttctatctgattagtctcagcgccatcaccagcgactatgtcgtattgggtaaagctccctcttcggagggagcatgagac

SEQ ID NO: 10546 - DNA, 89 bp, synthetic construct
  misc_feature 1..89: note = engineered ribonucleic acid scaffold (ERS) sequence
  source 1..89: mol_type = other DNA
actggcgcttctatctgattagtctgagcgccatcaccagcgactatgtcgtattgggtaaagctccctcttcggagggagcatcagac

SEQ ID NO: 10547 - DNA, 89 bp, synthetic construct
  misc_feature 1..89: note = engineered ribonucleic acid scaffold (ERS) sequence
  source 1..89: mol_type = other DNA
actggcgcttctatctgattactctcagcgccatcaccagcgactatgtcgtattgggtaaagctccctcttcggagggagcatgagag

SEQ ID NO: 10548 - DNA, 89 bp, synthetic construct
  misc_feature 1..89: note = engineered ribonucleic acid scaffold (ERS) sequence
  source 1..89: mol_type = other DNA
actggcgctcccatctgattaccccgagcgccatcaccagcgactatgtcgtattgggtaaagctccctcttcggagggagcatcgggg

SEQ ID NO: 10549 - DNA, 89 bp, synthetic construct
  misc_feature 1..89: note = engineered ribonucleic acid scaffold (ERS) sequence
  source 1..89: mol_type = other DNA
actggcgctcctatctgattactccgagcgccatcaccagcgactatgtcgtattgggtaaagctccctcttcggagggagcatcggag

SEQ ID NO: 10550 - DNA, 89 bp, synthetic construct
  misc_feature 1..89: note = engineered ribonucleic acid scaffold (ERS) sequence
  source 1..89: mol_type = other DNA
actggcgctgggatctgattaccccgagcgccatcaccagcgactatgtcgtattgggtaaagctccctcttcggagggagcatcgggg

SEQ ID NO: 10551 - DNA, 89 bp, synthetic construct
  misc_feature 1..89: note = engineered ribonucleic acid scaffold (ERS) sequence
  source 1..89: mol_type = other DNA
actggcgctggtatctgattactccgagcgccatcaccagcgactatgtcgtattgggtaaagctccctcttcggagggagcatcggag

SEQ ID NO: 10552 - DNA, 89 bp, synthetic construct
  misc_feature 1..89: note = engineered ribonucleic acid scaffold (ERS) sequence
  source 1..89: mol_type = other DNA
actggcgcttccatctgattaccctgagcgccatcaccagcgactatgtcgtattgggtaaagctccctcttcggagggagcatcaggg

SEQ ID NO: 10553 - DNA, 89 bp, synthetic construct
  misc_feature 1..89: note = engineered ribonucleic acid scaffold (ERS) sequence
  source 1..89: mol_type = other DNA
actggcgcttggatctgattaccctgagcgccatcaccagcgactatgtcgtattgggtaaagctccctcttcggagggagcatcaggg

SEQ ID NO: 10554 - DNA, 89 bp, synthetic construct
  misc_feature 1..89: note = engineered ribonucleic acid scaffold (ERS) sequence
  source 1..89: mol_type = other DNA
actggcgcttgtatctgattactctgagcgccatcaccagcgactatgtcgtattgggtaaagctccctcttcggagggagcatcagag

SEQ ID NO: 10555 - DNA, 89 bp, synthetic construct
  misc_feature 1..89: note = engineered ribonucleic acid scaffold (ERS) sequence
  source 1..89: mol_type = other DNA
actggcgcttttatctgattactttgagcgccatcaccagcgactatgtcgtattgggtaaagctccctcttcggagggagcatcagag

SEQ ID NO: 10556 - DNA, 89 bp, synthetic construct
  misc_feature 1..89: note = engineered ribonucleic acid scaffold (ERS) sequence
  source 1..89: mol_type = other DNA
actggcgcttttatctgattactctgagcgccatcaccagcgactatgtcgtattgggtaaagctccctcttcggagggagcatcagag

SEQ ID NO: 10557 - DNA, 89 bp, synthetic construct
  misc_feature 1..89: note = engineered ribonucleic acid scaffold (ERS) sequence
  source 1..89: mol_type = other DNA
actggcgcttttatctgattactctgagcgccatcaccagcgactatgtcgtattgggtaaagctccctcttcggagggagcatcaaag

SEQ ID NO: 10558 - DNA, 89 bp, synthetic construct
  misc_feature 1..89: note = engineered ribonucleic acid scaffold (ERS) sequence
  source 1..89: mol_type = other DNA
actggcgcttctatctgattactctgagcgccatcaccagcgactatgtcgtattgggtaaagctccctcttcggagggagcctcagag

SEQ ID NO: 10559 - DNA, 89 bp, synthetic construct
  misc_feature 1..89: note = engineered ribonucleic acid scaffold (ERS) sequence
  source 1..89: mol_type = other DNA
actggcgcttctatctgattactctgagcgccatcaccagcgactatgtcgtattgggtaaagctccctcttcggagggagcgtcagag

SEQ ID NO: 10560 - DNA, 89 bp, synthetic construct
  misc_feature 1..89: note = engineered ribonucleic acid scaffold (ERS) sequence
  source 1..89: mol_type = other DNA
actggcgcttctatctgattactctgagcgccatcaccagcgactatgtcgtattgggtaaagctccctcttcggagggagcatcaaag

SEQ ID NO: 10561 - DNA, 89 bp, synthetic construct
  misc_feature 1..89: note = engineered ribonucleic acid scaffold (ERS) sequence
  source 1..89: mol_type = other DNA
actggcgcttctatctgattactctcagcgccatcaccagcgactatgtcgtatggagtaaagctccctcttcggagggagcatcagac

SEQ ID NO: 10562 - DNA, 89 bp, synthetic construct
  misc_feature 1..89: note = engineered ribonucleic acid scaffold (ERS) sequence
  source 1..89: mol_type = other DNA
actggcgcttctatctgattactttgagcgccatcaccagcgactatgtcgtatggagtaaagctccctcttcggagggagcatcagag

SEQ ID NO: 10563 - DNA, 89 bp, synthetic construct
  misc_feature 1..89: note = engineered ribonucleic acid scaffold (ERS) sequence
  source 1..89: mol_type = other DNA
actggcgcttctatctgattactttgagcgccatcaccagcgactatgtcgtatggagtaaagctccctcttcggagggagcatcaaag

SEQ ID NO: 10564 - DNA, 89 bp, synthetic construct
  misc_feature 1..89: note = engineered ribonucleic acid scaffold (ERS) sequence
  source 1..89: mol_type = other DNA
actggcgcttctatctgattagtctcagcgccatcaccagcgactatgtcgtatggagtaaagctccctcttcggagggagcatgagac

SEQ ID NO: 10565 - DNA, 89 bp, synthetic construct
  misc_feature 1..89: note = engineered ribonucleic acid scaffold (ERS) sequence
  source 1..89: mol_type = other DNA
actggcgcttctatctgattagtctgagcgccatcaccagcgactatgtcgtatggagtaaagctccctcttcggagggagcatcagac

SEQ ID NO: 10566 - DNA, 89 bp, synthetic construct
  misc_feature 1..89: note = engineered ribonucleic acid scaffold (ERS) sequence
  source 1..89: mol_type = other DNA
actggcgcttctatctgattactctcagcgccatcaccagcgactatgtcgtatggagtaaagctccctcttcggagggagcatgagag

SEQ ID NO: 10567 - DNA, 89 bp, synthetic construct
  misc_feature 1..89: note = engineered ribonucleic acid scaffold (ERS) sequence
  source 1..89: mol_type = other DNA
actggcgctcccatctgattaccccgagcgccatcaccagcgactatgtcgtatggagtaaagctccctcttcggagggagcatcgggg

SEQ ID NO: 10568 - DNA, 89 bp, synthetic construct
  misc_feature 1..89: note = engineered ribonucleic acid scaffold (ERS) sequence
  source 1..89: mol_type = other DNA
actggcgctcctatctgattactccgagcgccatcaccagcgactatgtcgtatggagtaaagctccctcttcggagggagcatcggag

SEQ ID NO: 10569 - DNA, 89 bp, synthetic construct
  misc_feature 1..89: note = engineered ribonucleic acid scaffold (ERS) sequence
  source 1..89: mol_type = other DNA
actggcgctgggatctgattaccccgagcgccatcaccagcgactatgtcgtatggagtaaagctccctcttcggagggagcatcgggg

SEQ ID NO: 10570 - DNA, 89 bp, synthetic construct
  misc_feature 1..89: note = engineered ribonucleic acid scaffold (ERS) sequence
  source 1..89: mol_type = other DNA
actggcgctggtatctgattactccgagcgccatcaccagcgactatgtcgtatggagtaaagctccctcttcggagggagcatcggag

SEQ ID NO: 10571 - DNA, 89 bp, synthetic construct
  misc_feature 1..89: note = engineered ribonucleic acid scaffold (ERS) sequence
  source 1..89: mol_type = other DNA
actggcgcttccatctgattaccctgagcgccatcaccagcgactatgtcgtatggagtaaagctccctcttcggagggagcatcaggg

SEQ ID NO: 10572 - DNA, 89 bp, synthetic construct
  misc_feature 1..89: note = engineered ribonucleic acid scaffold (ERS) sequence
  source 1..89: mol_type = other DNA
actggcgcttggatctgattaccctgagcgccatcaccagcgactatgtcgtatggagtaaagctccctcttcggagggagcatcaggg

SEQ ID NO: 10573 - DNA, 89 bp, synthetic construct
  misc_feature 1..89: note = engineered ribonucleic acid scaffold (ERS) sequence
  source 1..89: mol_type = other DNA
actggcgcttgtatctgattactctgagcgccatcaccagcgactatgtcgtatggagtaaagctccctcttcggagggagcatcagag

SEQ ID NO: 10574 - DNA, 89 bp, synthetic construct
  misc_feature 1..89: note = engineered ribonucleic acid scaffold (ERS) sequence
  source 1..89: mol_type = other DNA
actggcgcttttatctgattactttgagcgccatcaccagcgactatgtcgtatggagtaaagctccctcttcggagggagcatcagag

SEQ ID NO: 10575 - DNA, 89 bp, synthetic construct
  misc_feature 1..89: note = engineered ribonucleic acid scaffold (ERS) sequence
  source 1..89: mol_type = other DNA
actggcgcttttatctgattactctgagcgccatcaccagcgactatgtcgtatggagtaaagctccctcttcggagggagcatcagag

SEQ ID NO: 10576 - DNA, 89 bp, synthetic construct
  misc_feature 1..89: note = engineered ribonucleic acid scaffold (ERS) sequence
  source 1..89: mol_type = other DNA
actggcgcttttatctgattactctgagcgccatcaccagcgactatgtcgtatggagtaaagctccctcttcggagggagcatcaaag

SEQ ID NO: 10577 - DNA, 89 bp, synthetic construct
  misc_feature 1..89: note = engineered ribonucleic acid scaffold (ERS) sequence
  source 1..89: mol_type = other DNA
actggcgcttctatctgattactctgagcgccatcaccagcgactatgtcgtatggagtaaagctccctcttcggagggagcctcagag

SEQ ID NO: 10578 - DNA, 89 bp, synthetic construct
  misc_feature 1..89: note = engineered ribonucleic acid scaffold (ERS) sequence
  source 1..89: mol_type = other DNA
actggcgcttctatctgattactctgagcgccatcaccagcgactatgtcgtatggagtaaagctccctcttcggagggagcgtcagag

SEQ ID NO: 10579 - DNA, 89 bp, synthetic construct
  misc_feature 1..89: note = engineered ribonucleic acid scaffold (ERS) sequence
  source 1..89: mol_type = other DNA
actggcgcttctatctgattactctgagcgccatcaccagcgactatgtcgtatggagtaaagctccctcttcggagggagcatcaaag

SEQ ID NO: 10580 - DNA, 89 bp, synthetic construct
  misc_feature 1..89: note = engineered ribonucleic acid scaffold (ERS) sequence
  source 1..89: mol_type = other DNA
actggcgcttctatctgattactctcagcgccatcaccagcgactatgtcgtatggcgtaaagctccctcttcggagggagcatcagac

SEQ ID NO: 10581 - DNA, 89 bp, synthetic construct
  misc_feature 1..89: note = engineered ribonucleic acid scaffold (ERS) sequence
  source 1..89: mol_type = other DNA
actggcgcttctatctgattactttgagcgccatcaccagcgactatgtcgtatggcgtaaagctccctcttcggagggagcatcagag

SEQ ID NO: 10582 - DNA, 89 bp, synthetic construct
  misc_feature 1..89: note = engineered ribonucleic acid scaffold (ERS) sequence
  source 1..89: mol_type = other DNA
actggcgcttctatctgattactttgagcgccatcaccagcgactatgtcgtatggcgtaaagctccctcttcggagggagcatcaaag

SEQ ID NO: 10583 - DNA, 89 bp, synthetic construct
  misc_feature 1..89: note = engineered ribonucleic acid scaffold (ERS) sequence
  source 1..89: mol_type = other DNA
actggcgcttctatctgattagtctcagcgccatcaccagcgactatgtcgtatggcgtaaagctccctcttcggagggagcatgagac

SEQ ID NO: 10584 - DNA, 89 bp, synthetic construct
  misc_feature 1..89: note = engineered ribonucleic acid scaffold (ERS) sequence
  source 1..89: mol_type = other DNA
actggcgcttctatctgattagtctgagcgccatcaccagcgactatgtcgtatggcgtaaagctccctcttcggagggagcatcagac

SEQ ID NO: 10585 - DNA, 89 bp, synthetic construct
  misc_feature 1..89: note = engineered ribonucleic acid scaffold (ERS) sequence
  source 1..89: mol_type = other DNA
actggcgcttctatctgattactctcagcgccatcaccagcgactatgtcgtatggcgtaaagctccctcttcggagggagcatgagag

SEQ ID NO: 10586 - DNA, 89 bp, synthetic construct
  misc_feature 1..89: note = engineered ribonucleic acid scaffold (ERS) sequence
  source 1..89: mol_type = other DNA
actggcgctcccatctgattaccccgagcgccatcaccagcgactatgtcgtatggcgtaaagctccctcttcggagggagcatcgggg

SEQ ID NO: 10587 - DNA, 89 bp, synthetic construct
  misc_feature 1..89: note = engineered ribonucleic acid scaffold (ERS) sequence
  source 1..89: mol_type = other DNA
actggcgctcctatctgattactccgagcgccatcaccagcgactatgtcgtatggcgtaaagctccctcttcggagggagcatcggag

SEQ ID NO: 10588 - DNA, 89 bp, synthetic construct
  misc_feature 1..89: note = engineered ribonucleic acid scaffold (ERS) sequence
  source 1..89: mol_type = other DNA
actggcgctgggatctgattaccccgagcgccatcaccagcgactatgtcgtatggcgtaaagctccctcttcggagggagcatcgggg

SEQ ID NO: 10589 - DNA, 89 bp, synthetic construct
  misc_feature 1..89: note = engineered ribonucleic acid scaffold (ERS) sequence
  source 1..89: mol_type = other DNA
actggcgctggtatctgattactccgagcgccatcaccagcgactatgtcgtatggcgtaaagctccctcttcggagggagcatcggag

SEQ ID NO: 10590 - DNA, 89 bp, synthetic construct
  misc_feature 1..89: note = engineered ribonucleic acid scaffold (ERS) sequence
  source 1..89: mol_type = other DNA
actggcgcttccatctgattaccctgagcgccatcaccagcgactatgtcgtatggcgtaaagctccctcttcggagggagcatcaggg

SEQ ID NO: 10591 - DNA, 89 bp, synthetic construct
  misc_feature 1..89: note = engineered ribonucleic acid scaffold (ERS) sequence
  source 1..89: mol_type = other DNA
actggcgcttggatctgattaccctgagcgccatcaccagcgactatgtcgtatggcgtaaagctccctcttcggagggagcatcaggg

SEQ ID NO: 10592 - DNA, 89 bp, synthetic construct
  misc_feature 1..89: note = engineered ribonucleic acid scaffold (ERS) sequence
  source 1..89: mol_type = other DNA
actggcgcttgtatctgattactctgagcgccatcaccagcgactatgtcgtatggcgtaaagctccctcttcggagggagcatcagag

SEQ ID NO: 10593 - DNA, 89 bp, synthetic construct
  misc_feature 1..89: note = engineered ribonucleic acid scaffold (ERS) sequence
  source 1..89: mol_type = other DNA
actggcgcttttatctgattactttgagcgccatcaccagcgactatgtcgtatggcgtaaagctccctcttcggagggagcatcagag

SEQ ID NO: 10594 - DNA, 89 bp, synthetic construct
  misc_feature 1..89: note = engineered ribonucleic acid scaffold (ERS) sequence
  source 1..89: mol_type = other DNA
actggcgcttttatctgattactctgagcgccatcaccagcgactatgtcgtatggcgtaaagctccctcttcggagggagcatcagag

SEQ ID NO: 10595 - DNA, 89 bp, synthetic construct
  misc_feature 1..89: note = engineered ribonucleic acid scaffold (ERS) sequence
  source 1..89: mol_type = other DNA
actggcgcttttatctgattactctgagcgccatcaccagcgactatgtcgtatggcgtaaagctccctcttcggagggagcatcaaag

SEQ ID NO: 10596 - DNA, 89 bp, synthetic construct
  misc_feature 1..89: note = engineered ribonucleic acid scaffold (ERS) sequence
  source 1..89: mol_type = other DNA
actggcgcttctatctgattactctgagcgccatcaccagcgactatgtcgtatggcgtaaagctccctcttcggagggagcctcagag

SEQ ID NO: 10597 - DNA, 89 bp, synthetic construct
  misc_feature 1..89: note = engineered ribonucleic acid scaffold (ERS) sequence
  source 1..89: mol_type = other DNA
actggcgcttctatctgattactctgagcgccatcaccagcgactatgtcgtatggcgtaaagctccctcttcggagggagcgtcagag

SEQ ID NO: 10598 - DNA, 89 bp, synthetic construct
  misc_feature 1..89: note = engineered ribonucleic acid scaffold (ERS) sequence
  source 1..89: mol_type = other DNA
actggcgcttctatctgattactctgagcgccatcaccagcgactatgtcgtatggcgtaaagctccctcttcggagggagcatcaaag

SEQ ID NO: 10599 - DNA, 89 bp, synthetic construct
  misc_feature 1..89: note = engineered ribonucleic acid scaffold (ERS) sequence
  source 1..89: mol_type = other DNA
actggcgcttctatctgattactctcagcgccatcaccagcgactatgtcgtatggtgtaaagctccctcttcggagggagcatcagac

SEQ ID NO: 10600 - DNA, 89 bp, synthetic construct
  misc_feature 1..89: note = engineered ribonucleic acid scaffold (ERS) sequence
  source 1..89: mol_type = other DNA
actggcgcttctatctgattactttgagcgccatcaccagcgactatgtcgtatggtgtaaagctccctcttcggagggagcatcagag

SEQ ID NO: 10601 - DNA, 89 bp, synthetic construct
  misc_feature 1..89: note = engineered ribonucleic acid scaffold (ERS) sequence
  source 1..89: mol_type = other DNA
actggcgcttctatctgattactttgagcgccatcaccagcgactatgtcgtatggtgtaaagctccctcttcggagggagcatcaaag

SEQ ID NO: 10602 - DNA, 89 bp, synthetic construct
  misc_feature 1..89: note = engineered ribonucleic acid scaffold (ERS) sequence
  source 1..89: mol_type = other DNA
actggcgcttctatctgattagtctcagcgccatcaccagcgactatgtcgtatggtgtaaagctccctcttcggagggagcatgagac

SEQ ID NO: 10603 - DNA, 89 bp, synthetic construct
  misc_feature 1..89: note = engineered ribonucleic acid scaffold (ERS) sequence
  source 1..89: mol_type = other DNA
actggcgcttctatctgattagtctgagcgccatcaccagcgactatgtcgtatggtgtaaagctccctcttcggagggagcatcagac

SEQ ID NO: 10604 - DNA, 89 bp, synthetic construct
  misc_feature 1..89: note = engineered ribonucleic acid scaffold (ERS) sequence
  source 1..89: mol_type = other DNA
actggcgcttctatctgattactctcagcgccatcaccagcgactatgtcgtatggtgtaaagctccctcttcggagggagcatgagag

SEQ ID NO: 10605 - DNA, 89 bp, synthetic construct
  misc_feature 1..89: note = engineered ribonucleic acid scaffold (ERS) sequence
  source 1..89: mol_type = other DNA
actggcgctcccatctgattaccccgagcgccatcaccagcgactatgtcgtatggtgtaaagctccctcttcggagggagcatcgggg

SEQ ID NO: 10606 - DNA, 89 bp, synthetic construct
  misc_feature 1..89: note = engineered ribonucleic acid scaffold (ERS) sequence
  source 1..89: mol_type = other DNA
actggcgctcctatctgattactccgagcgccatcaccagcgactatgtcgtatggtgtaaagctccctcttcggagggagcatcggag

SEQ ID NO: 10607 - DNA, 89 bp, synthetic construct
  misc_feature 1..89: note = engineered ribonucleic acid scaffold (ERS) sequence
  source 1..89: mol_type = other DNA
actggcgctgggatctgattaccccgagcgccatcaccagcgactatgtcgtatggtgtaaagctccctcttcggagggagcatcgggg

SEQ ID NO: 10608 - DNA, 89 bp, synthetic construct
  misc_feature 1..89: note = engineered ribonucleic acid scaffold (ERS) sequence
  source 1..89: mol_type = other DNA
actggcgctggtatctgattactccgagcgccatcaccagcgactatgtcgtatggtgtaaagctccctcttcggagggagcatcggag

SEQ ID NO: 10609 - DNA, 89 bp, synthetic construct
  misc_feature 1..89: note = engineered ribonucleic acid scaffold (ERS) sequence
  source 1..89: mol_type = other DNA
actggcgcttccatctgattaccctgagcgccatcaccagcgactatgtcgtatggtgtaaagctccctcttcggagggagcatcaggg

SEQ ID NO: 10610 - DNA, 89 bp, synthetic construct
  misc_feature 1..89: note = engineered ribonucleic acid scaffold (ERS) sequence
  source 1..89: mol_type = other DNA
actggcgcttggatctgattaccctgagcgccatcaccagcgactatgtcgtatggtgtaaagctccctcttcggagggagcatcaggg

SEQ ID NO: 10611 - DNA, 89 bp, synthetic construct
  misc_feature 1..89: note = engineered ribonucleic acid scaffold (ERS) sequence
  source 1..89: mol_type = other DNA
actggcgcttgtatctgattactctgagcgccatcaccagcgactatgtcgtatggtgtaaagctccctcttcggagggagcatcagag

SEQ ID NO: 10612 - DNA, 89 bp, synthetic construct
  misc_feature 1..89: note = engineered ribonucleic acid scaffold (ERS) sequence
  source 1..89: mol_type = other DNA
actggcgcttttatctgattactttgagcgccatcaccagcgactatgtcgtatggtgtaaagctccctcttcggagggagcatcagag

SEQ ID NO: 10613 - DNA, 89 bp, synthetic construct
  misc_feature 1..89: note = engineered ribonucleic acid scaffold (ERS) sequence
  source 1..89: mol_type = other DNA
actggcgcttttatctgattactctgagcgccatcaccagcgactatgtcgtatggtgtaaagctccctcttcggagggagcatcagag

SEQ ID NO: 10614 - DNA, 89 bp, synthetic construct
  misc_feature 1..89: note = engineered ribonucleic acid scaffold (ERS) sequence
  source 1..89: mol_type = other DNA
actggcgcttttatctgattactctgagcgccatcaccagcgactatgtcgtatggtgtaaagctccctcttcggagggagcatcaaag

SEQ ID NO: 10615 - DNA, 89 bp, synthetic construct
  misc_feature 1..89: note = engineered ribonucleic acid scaffold (ERS) sequence
  source 1..89: mol_type = other DNA
actggcgcttctatctgattactctgagcgccatcaccagcgactatgtcgtatggtgtaaagctccctcttcggagggagcctcagag

SEQ ID NO: 10616 - DNA, 89 bp, synthetic construct
  misc_feature 1..89: note = engineered ribonucleic acid scaffold (ERS) sequence
  source 1..89: mol_type = other DNA
actggcgcttctatctgattactctgagcgccatcaccagcgactatgtcgtatggtgtaaagctccctcttcggagggagcgtcagag

SEQ ID NO: 10617 - DNA, 89 bp, synthetic construct
  misc_feature 1..89: note = engineered ribonucleic acid scaffold (ERS) sequence
  source 1..89: mol_type = other DNA
actggcgcttctatctgattactctgagcgccatcaccagcgactatgtcgtatggtgtaaagctccctcttcggagggagcatcaaag

SEQ ID NO: 10618 - DNA, 89 bp, synthetic construct
  misc_feature 1..89: note = engineered ribonucleic acid scaffold (ERS) sequence
  source 1..89: mol_type = other DNA
actggcgcttctatctgattactctcagcgccatcaccagcgactatgtcgtatgggctaaagctccctcttcggagggagcatcagac

SEQ ID NO: 10619 - DNA, 89 bp, synthetic construct
  misc_feature 1..89: note = engineered ribonucleic acid scaffold (ERS) sequence
  source 1..89: mol_type = other DNA
actggcgcttctatctgattactttgagcgccatcaccagcgactatgtcgtatgggctaaagctccctcttcggagggagcatcagag

SEQ ID NO: 10620 - DNA, 89 bp, synthetic construct
  misc_feature 1..89: note = engineered ribonucleic acid scaffold (ERS) sequence
  source 1..89: mol_type = other DNA
actggcgcttctatctgattactttgagcgccatcaccagcgactatgtcgtatgggctaaagctccctcttcggagggagcatcaaag

SEQ ID NO: 10621 - DNA, 89 bp, synthetic construct
  misc_feature 1..89: note = engineered ribonucleic acid scaffold (ERS) sequence
  source 1..89: mol_type = other DNA
actggcgcttctatctgattagtctcagcgccatcaccagcgactatgtcgtatgggctaaagctccctcttcggagggagcatgagac

SEQ ID NO: 10622 - DNA, 89 bp, synthetic construct
  misc_feature 1..89: note = engineered ribonucleic acid scaffold (ERS) sequence
  source 1..89: mol_type = other DNA
actggcgcttctatctgattagtctgagcgccatcaccagcgactatgtcgtatgggctaaagctccctcttcggagggagcatcagac

SEQ ID NO: 10623 - DNA, 89 bp, synthetic construct
  misc_feature 1..89: note = engineered ribonucleic acid scaffold (ERS) sequence
  source 1..89: mol_type = other DNA
actggcgcttctatctgattactctcagcgccatcaccagcgactatgtcgtatgggctaaagctccctcttcggagggagcatgagag

SEQ ID NO: 10624 - DNA, 89 bp, synthetic construct
  misc_feature 1..89: note = engineered ribonucleic acid scaffold (ERS) sequence
  source 1..89: mol_type = other DNA
actggcgctcccatctgattaccccgagcgccatcaccagcgactatgtcgtatgggctaaagctccctcttcggagggagcatcgggg

SEQ ID NO: 10625 - DNA, 89 bp, synthetic construct
  misc_feature 1..89: note = engineered ribonucleic acid scaffold (ERS) sequence
  source 1..89: mol_type = other DNA
actggcgctcctatctgattactccgagcgccatcaccagcgactatgtcgtatgggctaaagctccctcttcggagggagcatcggag

SEQ ID NO: 10626 - DNA, 89 bp, synthetic construct
  misc_feature 1..89: note = engineered ribonucleic acid scaffold (ERS) sequence
  source 1..89: mol_type = other DNA
actggcgctgggatctgattaccccgagcgccatcaccagcgactatgtcgtatgggctaaagctccctcttcggagggagcatcgggg

SEQ ID NO: 10627 - DNA, 89 bp, synthetic construct
  misc_feature 1..89: note = engineered ribonucleic acid scaffold (ERS) sequence
  source 1..89: mol_type = other DNA
actggcgctggtatctgattactccgagcgccatcaccagcgactatgtcgtatgggctaaagctccctcttcggagggagcatcggag

SEQ ID NO: 10628 - DNA, 89 bp, synthetic construct
  misc_feature 1..89: note = engineered ribonucleic acid scaffold (ERS) sequence
  source 1..89: mol_type = other DNA
actggcgcttccatctgattaccctgagcgccatcaccagcgactatgtcgtatgggctaaagctccctcttcggagggagcatcaggg

SEQ ID NO: 10629 - DNA, 89 bp, synthetic construct
  misc_feature 1..89: note = engineered ribonucleic acid scaffold (ERS) sequence
  source 1..89: mol_type = other DNA
actggcgcttggatctgattaccctgagcgccatcaccagcgactatgtcgtatgggctaaagctccctcttcggagggagcatcaggg

SEQ ID NO: 10630 - DNA, 89 bp, synthetic construct
  misc_feature 1..89: note = engineered ribonucleic acid scaffold (ERS) sequence
  source 1..89: mol_type = other DNA
actggcgcttgtatctgattactctgagcgccatcaccagcgactatgtcgtatgggctaaagctccctcttcggagggagcatcagag

SEQ ID NO: 10631 - DNA, 89 bp, synthetic construct
  misc_feature 1..89: note = engineered ribonucleic acid scaffold (ERS) sequence
  source 1..89: mol_type = other DNA
actggcgcttttatctgattactttgagcgccatcaccagcgactatgtcgtatgggctaaagctccctcttcggagggagcatcagag

SEQ ID NO: 10632 - DNA, 89 bp, synthetic construct
  misc_feature 1..89: note = engineered ribonucleic acid scaffold (ERS) sequence
  source 1..89: mol_type = other DNA
actggcgcttttatctgattactctgagcgccatcaccagcgactatgtcgtatgggctaaagctccctcttcggagggagcatcagag

SEQ ID NO: 10633 - DNA, 89 bp, synthetic construct
  misc_feature 1..89: note = engineered ribonucleic acid scaffold (ERS) sequence
  source 1..89: mol_type = other DNA
actggcgcttttatctgattactctgagcgccatcaccagcgactatgtcgtatgggctaaagctccctcttcggagggagcatcaaag

SEQ ID NO: 10634 - DNA, 89 bp, synthetic construct
  misc_feature 1..89: note = engineered ribonucleic acid scaffold (ERS) sequence
  source 1..89: mol_type = other DNA
actggcgcttctatctgattactctgagcgccatcaccagcgactatgtcgtatgggctaaagctccctcttcggagggagcctcagag

SEQ ID NO: 10635 - DNA, 89 bp, synthetic construct
  misc_feature 1..89: note = engineered ribonucleic acid scaffold (ERS) sequence
  source 1..89: mol_type = other DNA
actggcgcttctatctgattactctgagcgccatcaccagcgactatgtcgtatgggctaaagctccctcttcggagggagcgtcagag

SEQ ID NO: 10636 - DNA, 89 bp, synthetic construct
  misc_feature 1..89: note = engineered ribonucleic acid scaffold (ERS) sequence
  source 1..89: mol_type = other DNA
actggcgcttctatctgattactctgagcgccatcaccagcgactatgtcgtatgggctaaagctccctcttcggagggagcatcaaag

SEQ ID NO: 10637 - DNA, 86 bp, synthetic construct
  misc_feature 1..86: note = engineered ribonucleic acid scaffold (ERS) sequence
  source 1..86: mol_type = other DNA
actggcgcttctatctgattactctcagcgccatcaccagcgactatgtcgtatgggtagctccctcttcggagggagcatcagac

SEQ ID NO: 10638 - DNA, 86 bp, synthetic construct
  misc_feature 1..86: note = engineered ribonucleic acid scaffold (ERS) sequence
  source 1..86: mol_type = other DNA
actggcgcttctatctgattactttgagcgccatcaccagcgactatgtcgtatgggtagctccctcttcggagggagcatcagag

SEQ ID NO: 10639 - DNA, 86 bp, synthetic construct
  misc_feature 1..86: note = engineered ribonucleic acid scaffold (ERS) sequence
  source 1..86: mol_type = other DNA
actggcgcttctatctgattactttgagcgccatcaccagcgactatgtcgtatgggtagctccctcttcggagggagcatcaaag

SEQ ID NO: 10640 - DNA, 86 bp, synthetic construct
  misc_feature 1..86: note = engineered ribonucleic acid scaffold (ERS) sequence
  source 1..86: mol_type = other DNA
actggcgcttctatctgattagtctcagcgccatcaccagcgactatgtcgtatgggtagctccctcttcggagggagcatgagac

SEQ ID NO: 10641 - DNA, 86 bp, synthetic construct
  misc_feature 1..86: note = engineered ribonucleic acid scaffold (ERS) sequence
  source 1..86: mol_type = other DNA
actggcgcttctatctgattagtctgagcgccatcaccagcgactatgtcgtatgggtagctccctcttcggagggagcatcagac

SEQ ID NO: 10642 - DNA, 86 bp, synthetic construct
  misc_feature 1..86: note = engineered ribonucleic acid scaffold (ERS) sequence
  source 1..86: mol_type = other DNA
actggcgcttctatctgattactctcagcgccatcaccagcgactatgtcgtatgggtagctccctcttcggagggagcatgagag

SEQ ID NO: 10643 - DNA, 86 bp, synthetic construct
  misc_feature 1..86: note = engineered ribonucleic acid scaffold (ERS) sequence
  source 1..86: mol_type = other DNA
actggcgctcccatctgattaccccgagcgccatcaccagcgactatgtcgtatgggtagctccctcttcggagggagcatcgggg

SEQ ID NO: 10644 - DNA, 86 bp, synthetic construct
  misc_feature 1..86: note = engineered ribonucleic acid scaffold (ERS) sequence
  source 1..86: mol_type = other DNA
actggcgctcctatctgattactccgagcgccatcaccagcgactatgtcgtatgggtagctccctcttcggagggagcatcggag

SEQ ID NO: 10645 - DNA, 86 bp, synthetic construct
  misc_feature 1..86: note = engineered ribonucleic acid scaffold (ERS) sequence
  source 1..86: mol_type = other DNA
actggcgctgggatctgattaccccgagcgccatcaccagcgactatgtcgtatgggtagctccctcttcggagggagcatcgggg

SEQ ID NO: 10646 - DNA, 86 bp, synthetic construct
  misc_feature 1..86: note = engineered ribonucleic acid scaffold (ERS) sequence
  source 1..86: mol_type = other DNA
actggcgctggtatctgattactccgagcgccatcaccagcgactatgtcgtatgggtagctccctcttcggagggagcatcggag

SEQ ID NO: 10647 - DNA, 86 bp, synthetic construct
  misc_feature 1..86: note = engineered ribonucleic acid scaffold (ERS) sequence
  source 1..86: mol_type = other DNA
actggcgcttccatctgattaccctgagcgccatcaccagcgactatgtcgtatgggtagctccctcttcggagggagcatcaggg

SEQ ID NO: 10648 - DNA, 86 bp, synthetic construct
  misc_feature 1..86: note = engineered ribonucleic acid scaffold (ERS) sequence
  source 1..86: mol_type = other DNA
actggcgcttggatctgattaccctgagcgccatcaccagcgactatgtcgtatgggtagctccctcttcggagggagcatcaggg

SEQ ID NO: 10649 - DNA, 86 bp, synthetic construct
  misc_feature 1..86: note = engineered ribonucleic acid scaffold (ERS) sequence
  source 1..86: mol_type = other DNA
actggcgcttgtatctgattactctgagcgccatcaccagcgactatgtcgtatgggtagctccctcttcggagggagcatcagag

SEQ ID NO: 10650 - DNA, 86 bp, synthetic construct
  misc_feature 1..86: note = engineered ribonucleic acid scaffold (ERS) sequence
  source 1..86: mol_type = other DNA
actggcgcttttatctgattactttgagcgccatcaccagcgactatgtcgtatgggtagctccctcttcggagggagcatcagag

SEQ ID NO: 10651 - DNA, 86 bp, synthetic construct
  misc_feature 1..86: note = engineered ribonucleic acid scaffold (ERS) sequence
  source 1..86: mol_type = other DNA
actggcgcttttatctgattactctgagcgccatcaccagcgactatgtcgtatgggtagctccctcttcggagggagcatcagag

SEQ ID NO: 10652 - DNA, 86 bp, synthetic construct
  misc_feature 1..86: note = engineered ribonucleic acid scaffold (ERS) sequence
  source 1..86: mol_type = other DNA
actggcgcttttatctgattactctgagcgccatcaccagcgactatgtcgtatgggtagctccctcttcggagggagcatcaaag

SEQ ID NO: 10653 - DNA, 86 bp, synthetic construct
  misc_feature 1..86: note = engineered ribonucleic acid scaffold (ERS) sequence
  source 1..86: mol_type = other DNA
actggcgcttctatctgattactctgagcgccatcaccagcgactatgtcgtatgggtagctccctcttcggagggagcctcagag

SEQ ID NO: 10654 - DNA, 86 bp, synthetic construct
  misc_feature 1..86: note = engineered ribonucleic acid scaffold (ERS) sequence
  source 1..86: mol_type = other DNA
actggcgcttctatctgattactctgagcgccatcaccagcgactatgtcgtatgggtagctccctcttcggagggagcgtcagag

SEQ ID NO: 10655 - DNA, 86 bp, synthetic construct
  misc_feature 1..86: note = engineered ribonucleic acid scaffold (ERS) sequence
  source 1..86: mol_type = other DNA
actggcgcttctatctgattactctgagcgccatcaccagcgactatgtcgtatgggtagctccctcttcggagggagcatcaaag

SEQ ID NO: 10656 - DNA, 88 bp, synthetic construct
  misc_feature 1..88: note = engineered ribonucleic acid scaffold (ERS) sequence
  source 1..88: mol_type = other DNA
actggcgcttctatctgattactctcagcgccatcaccagcgactatgtcgtatgggtgaagctccctcttcggagggagcatcagac

SEQ ID NO: 10657 - DNA, 88 bp, synthetic construct
  misc_feature 1..88: note = engineered ribonucleic acid scaffold (ERS) sequence
  source 1..88: mol_type = other DNA
actggcgcttctatctgattactttgagcgccatcaccagcgactatgtcgtatgggtgaagctccctcttcggagggagcatcagag

SEQ ID NO: 10658 - DNA, 88 bp, synthetic construct
  misc_feature 1..88: note = engineered ribonucleic acid scaffold (ERS) sequence
  source 1..88: mol_type = other DNA
actggcgcttctatctgattactttgagcgccatcaccagcgactatgtcgtatgggtgaagctccctcttcggagggagcatcaaag

SEQ ID NO: 10659 - DNA, 88 bp, synthetic construct
  misc_feature 1..88: note = engineered ribonucleic acid scaffold (ERS) sequence
  source 1..88: mol_type = other DNA
actggcgcttctatctgattagtctcagcgccatcaccagcgactatgtcgtatgggtgaagctccctcttcggagggagcatgagac

SEQ ID NO: 10660 - DNA, 88 bp, synthetic construct
  misc_feature 1..88: note = engineered ribonucleic acid scaffold (ERS) sequence
  source 1..88: mol_type = other DNA
actggcgcttctatctgattagtctgagcgccatcaccagcgactatgtcgtatgggtgaagctccctcttcggagggagcatcagac

SEQ ID NO: 10661 - DNA, 88 bp, synthetic construct
  misc_feature 1..88: note = engineered ribonucleic acid scaffold (ERS) sequence
  source 1..88: mol_type = other DNA
actggcgcttctatctgattactctcagcgccatcaccagcgactatgtcgtatgggtgaagctccctcttcggagggagcatgagag

SEQ ID NO: 10662 - DNA, 88 bp, synthetic construct
  misc_feature 1..88: note = engineered ribonucleic acid scaffold (ERS) sequence
  source 1..88: mol_type = other DNA
actggcgctcccatctgattaccccgagcgccatcaccagcgactatgtcgtatgggtgaagctccctcttcggagggagcatcgggg

SEQ ID NO: 10663 - DNA, 88 bp, synthetic construct
  misc_feature 1..88: note = engineered ribonucleic acid scaffold (ERS) sequence
  source 1..88: mol_type = other DNA
actggcgctcctatctgattactccgagcgccatcaccagcgactatgtcgtatgggtgaagctccctcttcggagggagcatcggag

SEQ ID NO: 10664 - DNA, 88 bp, synthetic construct
  misc_feature 1..88: note = engineered ribonucleic acid scaffold (ERS) sequence
  source 1..88: mol_type = other DNA
actggcgctgggatctgattaccccgagcgccatcaccagcgactatgtcgtatgggtgaagctccctcttcggagggagcatcgggg

SEQ ID NO: 10665 - DNA, 88 bp, synthetic construct
  misc_feature 1..88: note = engineered ribonucleic acid scaffold (ERS) sequence
  source 1..88: mol_type = other DNA
actggcgctggtatctgattactccgagcgccatcaccagcgactatgtcgtatgggtgaagctccctcttcggagggagcatcggag

SEQ ID NO: 10666 - DNA, 88 bp, synthetic construct
  misc_feature 1..88: note = engineered ribonucleic acid scaffold (ERS) sequence
  source 1..88: mol_type = other DNA
actggcgcttccatctgattaccctgagcgccatcaccagcgactatgtcgtatgggtgaagctccctcttcggagggagcatcaggg

SEQ ID NO: 10667 - DNA, 88 bp, synthetic construct
  misc_feature 1..88: note = engineered ribonucleic acid scaffold (ERS) sequence
  source 1..88: mol_type = other DNA
actggcgcttggatctgattaccctgagcgccatcaccagcgactatgtcgtatgggtgaagctccctcttcggagggagcatcaggg

SEQ ID NO: 10668 - DNA, 88 bp, synthetic construct
  misc_feature 1..88: note = engineered ribonucleic acid scaffold (ERS) sequence
  source 1..88: mol_type = other DNA
actggcgcttgtatctgattactctgagcgccatcaccagcgactatgtcgtatgggtgaagctccctcttcggagggagcatcagag

SEQ ID NO: 10669 - DNA, 88 bp, synthetic construct
  misc_feature 1..88: note = engineered ribonucleic acid scaffold (ERS) sequence
  source 1..88: mol_type = other DNA
actggcgcttttatctgattactttgagcgccatcaccagcgactatgtcgtatgggtgaagctccctcttcggagggagcatcagag

SEQ ID NO: 10670 - DNA, 88 bp, synthetic construct
  misc_feature 1..88: note = engineered ribonucleic acid scaffold (ERS) sequence
  source 1..88: mol_type = other DNA
actggcgcttttatctgattactctgagcgccatcaccagcgactatgtcgtatgggtgaagctccctcttcggagggagcatcagag

SEQ ID NO: 10671 - DNA, 88 bp, synthetic construct
  misc_feature 1..88: note = engineered ribonucleic acid scaffold (ERS) sequence
  source 1..88: mol_type = other DNA
actggcgcttttatctgattactctgagcgccatcaccagcgactatgtcgtatgggtgaagctccctcttcggagggagcatcaaag

SEQ ID NO: 10672 - DNA, 88 bp, synthetic construct
  misc_feature 1..88: note = engineered ribonucleic acid scaffold (ERS) sequence
  source 1..88: mol_type = other DNA
actggcgcttctatctgattactctgagcgccatcaccagcgactatgtcgtatgggtgaagctccctcttcggagggagcctcagag

SEQ ID NO: 10673 - DNA, 88 bp, synthetic construct
  misc_feature 1..88: note = engineered ribonucleic acid scaffold (ERS) sequence
  source 1..88: mol_type = other DNA
actggcgcttctatctgattactctgagcgccatcaccagcgactatgtcgtatgggtgaagctccctcttcggagggagcgtcagag

SEQ ID NO: 10674 - DNA, 88 bp, synthetic construct
  misc_feature 1..88: note = engineered ribonucleic acid scaffold (ERS) sequence
  source 1..88: mol_type = other DNA
actggcgcttctatctgattactctgagcgccatcaccagcgactatgtcgtatgggtgaagctccctcttcggagggagcatcaaag

SEQ ID NO: 10675 - DNA, 88 bp, synthetic construct
  misc_feature 1..88: note = engineered ribonucleic acid scaffold (ERS) sequence
  source 1..88: mol_type = other DNA
actggcgcttctatctgattactctcagcgccatcaccagcgactatgtcgtatgggtagagctccctcttcggagggagcatcagac

SEQ ID NO: 10676 - DNA, 88 bp, synthetic construct
  misc_feature 1..88: note = engineered ribonucleic acid scaffold (ERS) sequence
  source 1..88: mol_type = other DNA
actggcgcttctatctgattactttgagcgccatcaccagcgactatgtcgtatgggtagagctccctcttcggagggagcatcagag

SEQ ID NO: 10677 - DNA, 88 bp, synthetic construct
  misc_feature 1..88: note = engineered ribonucleic acid scaffold (ERS) sequence
  source 1..88: mol_type = other DNA
actggcgcttctatctgattactttgagcgccatcaccagcgactatgtcgtatgggtagagctccctcttcggagggagcatcaaag

SEQ ID NO: 10678 - DNA, 88 bp, synthetic construct
  misc_feature 1..88: note = engineered ribonucleic acid scaffold (ERS) sequence
  source 1..88: mol_type = other DNA
actggcgcttctatctgattagtctcagcgccatcaccagcgactatgtcgtatgggtagagctccctcttcggagggagcatgagac

SEQ ID NO: 10679 - DNA, 88 bp, synthetic construct
  misc_feature 1..88: note = engineered ribonucleic acid scaffold (ERS) sequence
  source 1..88: mol_type = other DNA
actggcgcttctatctgattagtctgagcgccatcaccagcgactatgtcgtatgggtagagctccctcttcggagggagcatcagac

SEQ ID NO: 10680 - DNA, 88 bp, synthetic construct
  misc_feature 1..88: note = engineered ribonucleic acid scaffold (ERS) sequence
  source 1..88: mol_type = other DNA
actggcgcttctatctgattactctcagcgccatcaccagcgactatgtcgtatgggtagagctccctcttcggagggagcatgagag

SEQ ID NO: 10681 - DNA, 88 bp, synthetic construct
  misc_feature 1..88: note = engineered ribonucleic acid scaffold (ERS) sequence
  source 1..88: mol_type = other DNA
actggcgctcccatctgattaccccgagcgccatcaccagcgactatgtcgtatgggtagagctccctcttcggagggagcatcgggg

SEQ ID NO: 10682 - DNA, 88 bp, synthetic construct
  misc_feature 1..88: note = engineered ribonucleic acid scaffold (ERS) sequence
  source 1..88: mol_type = other DNA
actggcgctcctatctgattactccgagcgccatcaccagcgactatgtcgtatgggtagagctccctcttcggagggagcatcggag

SEQ ID NO: 10683 - DNA, 88 bp, synthetic construct
  misc_feature 1..88: note = engineered ribonucleic acid scaffold (ERS) sequence
  source 1..88: mol_type = other DNA
actggcgctgggatctgattaccccgagcgccatcaccagcgactatgtcgtatgggtagagctccctcttcggagggagcatcgggg

SEQ ID NO: 10684 - DNA, 88 bp, synthetic construct
  misc_feature 1..88: note = engineered ribonucleic acid scaffold (ERS) sequence
  source 1..88: mol_type = other DNA
actggcgctggtatctgattactccgagcgccatcaccagcgactatgtcgtatgggtagagctccctcttcggagggagcatcggag

SEQ ID NO: 10685 - DNA, 88 bp, synthetic construct
  misc_feature 1..88: note = engineered ribonucleic acid scaffold (ERS) sequence
  source 1..88: mol_type = other DNA
actggcgcttccatctgattaccctgagcgccatcaccagcgactatgtcgtatgggtagagctccctcttcggagggagcatcaggg

SEQ ID NO: 10686 - DNA, 88 bp, synthetic construct
  misc_feature 1..88: note = engineered ribonucleic acid scaffold (ERS) sequence
  source 1..88: mol_type = other DNA
actggcgcttggatctgattaccctgagcgccatcaccagcgactatgtcgtatgggtagagctccctcttcggagggagcatcaggg

SEQ ID NO: 10687 - DNA, 88 bp, synthetic construct
  misc_feature 1..88: note = engineered ribonucleic acid scaffold (ERS) sequence
  source 1..88: mol_type = other DNA
actggcgcttgtatctgattactctgagcgccatcaccagcgactatgtcgtatgggtagagctccctcttcggagggagcatcagag

SEQ ID NO: 10688 - DNA, 88 bp, synthetic construct
  misc_feature 1..88: note = engineered ribonucleic acid scaffold (ERS) sequence
  source 1..88: mol_type = other DNA
actggcgcttttatctgattactttgagcgccatcaccagcgactatgtcgtatgggtagagctccctcttcggagggagcatcagag

SEQ ID NO: 10689 - DNA, 88 bp, synthetic construct
  misc_feature 1..88: note = engineered ribonucleic acid scaffold (ERS) sequence
  source 1..88: mol_type = other DNA
actggcgcttttatctgattactctgagcgccatcaccagcgactatgtcgtatgggtagagctccctcttcggagggagcatcagag

SEQ ID NO: 10690 - DNA, 88 bp, synthetic construct
  misc_feature 1..88: note = engineered ribonucleic acid scaffold (ERS) sequence
  source 1..88: mol_type = other DNA
actggcgcttttatctgattactctgagcgccatcaccagcgactatgtcgtatgggtagagctccctcttcggagggagcatcaaag

SEQ ID NO: 10691 - DNA, 88 bp, synthetic construct
  misc_feature 1..88: note = engineered ribonucleic acid scaffold (ERS) sequence
  source 1..88: mol_type = other DNA
actggcgcttctatctgattactctgagcgccatcaccagcgactatgtcgtatgggtagagctccctcttcggagggagcctcagag

SEQ ID NO: 10692 - DNA, 88 bp, synthetic construct
  misc_feature 1..88: note = engineered ribonucleic acid scaffold (ERS) sequence
  source 1..88: mol_type = other DNA
actggcgcttctatctgattactctgagcgccatcaccagcgactatgtcgtatgggtagagctccctcttcggagggagcgtcagag

SEQ ID NO: 10693 - DNA, 88 bp, synthetic construct
  misc_feature 1..88: note = engineered ribonucleic acid scaffold (ERS) sequence
  source 1..88: mol_type = other DNA
actggcgcttctatctgattactctgagcgccatcaccagcgactatgtcgtatgggtagagctccctcttcggagggagcatcaaag

SEQ ID NO: 10694 - DNA, 90 bp, synthetic construct
  misc_feature 1..90: note = engineered ribonucleic acid scaffold (ERS) sequence
  source 1..90: mol_type = other DNA
actggcgcttctatatctgattactctgagcgccaacaccagcgactatgtcgtatgggtaaagctccctcttcggagggagcatcagag

SEQ ID NO: 10695 - DNA, 89 bp, synthetic construct
  misc_feature 1..89: note = engineered ribonucleic acid scaffold (ERS) sequence
  source 1..89: mol_type = other DNA
actggcgcttctaatctgattactctgagcgccaacaccagcgactatgtcgtatgggtaaagctccctcttcggagggagcatcagag

SEQ ID NO: 10696 - DNA, 87 bp, synthetic construct
  misc_feature 1..87: note = engineered ribonucleic acid scaffold (ERS) sequence
  source 1..87: mol_type = other DNA
actggcgcttctactgattactctgagcgccaacaccagcgactatgtcgtatgggtaaagctccctcttcggagggagcatcagag

SEQ ID NO: 10697 - DNA, 88 bp, synthetic construct
  misc_feature 1..88: note = engineered ribonucleic acid scaffold (ERS) sequence
  source 1..88: mol_type = other DNA
actggcgcttctaactgattactctgagcgccaacaccagcgactatgtcgtatgggtaaagctccctcttcggagggagcatcagag

SEQ ID NO: 10698 - DNA, 88 bp, synthetic construct
  misc_feature 1..88: note = engineered ribonucleic acid scaffold (ERS) sequence
  source 1..88: mol_type = other DNA
actggcgcttctacctgattactctgagcgccaacaccagcgactatgtcgtatgggtaaagctccctcttcggagggagcatcagag

SEQ ID NO: 10699 - DNA, 88 bp, synthetic construct
  misc_feature 1..88: note = engineered ribonucleic acid scaffold (ERS) sequence
  source 1..88: mol_type = other DNA
actggcgcttctagctgattactctgagcgccaacaccagcgactatgtcgtatgggtaaagctccctcttcggagggagcatcagag

SEQ ID NO: 10700 - DNA, 90 bp, synthetic construct
  misc_feature 1..90: note = engineered ribonucleic acid scaffold (ERS) sequence
  source 1..90: mol_type = other DNA
actggcgcttctattactgattactctgagcgccaacaccagcgactatgtcgtatgggtaaagctccctcttcggagggagcatcagag

SEQ ID NO: 10701 - DNA, 88 bp, synthetic construct
  misc_feature 1..88: note = engineered ribonucleic acid scaffold (ERS) sequence
  source 1..88: mol_type = other DNA
actggcgcttctatatgattactctgagcgccaacaccagcgactatgtcgtatgggtaaagctccctcttcggagggagcatcagag

SEQ ID NO: 10702 - DNA, 88 bp, synthetic construct
  misc_feature 1..88: note = engineered ribonucleic acid scaffold (ERS) sequence
  source 1..88: mol_type = other DNA
actggcgcttctatgtgattactctgagcgccaacaccagcgactatgtcgtatgggtaaagctccctcttcggagggagcatcagag

SEQ ID NO: 10703 - DNA, 88 bp, synthetic construct
  misc_feature 1..88: note = engineered ribonucleic acid scaffold (ERS) sequence
  source 1..88: mol_type = other DNA
actggcgcttctatttgattactctgagcgccaacaccagcgactatgtcgtatgggtaaagctccctcttcggagggagcatcagag

SEQ ID NO: 10704 - DNA, 89 bp, synthetic construct
  misc_feature 1..89: note = engineered ribonucleic acid scaffold (ERS) sequence
  source 1..89: mol_type = other DNA
actggcgcttctatcttgattactctgagcgccaacaccagcgactatgtcgtatgggtaaagctccctcttcggagggagcatcagag

SEQ ID NO: 10705 - DNA, 88 bp, synthetic construct
  misc_feature 1..88: note = engineered ribonucleic acid scaffold (ERS) sequence
  source 1..88: mol_type = other DNA
actggcgcttctatcagattactctgagcgccaacaccagcgactatgtcgtatgggtaaagctccctcttcggagggagcatcagag

SEQ ID NO: 10706 - DNA, 88 bp, synthetic construct
  misc_feature 1..88: note = engineered ribonucleic acid scaffold (ERS) sequence
  source 1..88: mol_type = other DNA
actggcgcttctatcggattactctgagcgccaacaccagcgactatgtcgtatgggtaaagctccctcttcggagggagcatcagag

SEQ ID NO: 10707 - DNA, 89 bp, synthetic construct
  misc_feature 1..89: note = engineered ribonucleic acid scaffold (ERS) sequence
  source 1..89: mol_type = other DNA
actggcgcttctatctgaattactctgagcgccaacaccagcgactatgtcgtatgggtaaagctccctcttcggagggagcatcagag

SEQ ID NO: 10708 - DNA, 89 bp, synthetic construct
  misc_feature 1..89: note = engineered ribonucleic acid scaffold (ERS) sequence
  source 1..89: mol_type = other DNA
actggcgcttctatctgtattactctgagcgccaacaccagcgactatgtcgtatgggtaaagctccctcttcggagggagcatcagag

SEQ ID NO: 10709 - DNA, 88 bp, synthetic construct
  misc_feature 1..88: note = engineered ribonucleic acid scaffold (ERS) sequence
  source 1..88: mol_type = other DNA
actggcgcttctatctggttactctgagcgccaacaccagcgactatgtcgtatgggtaaagctccctcttcggagggagcatcagag

SEQ ID NO: 10710 - DNA, 88 bp, synthetic construct
  misc_feature 1..88: note = engineered ribonucleic acid scaffold (ERS) sequence
  source 1..88: mol_type = other DNA
actggcgcttctatctgtttactctgagcgccaacaccagcgactatgtcgtatgggtaaagctccctcttcggagggagcatcagag

SEQ ID NO: 10711 - DNA, 89 bp, synthetic construct
  misc_feature 1..89: note = engineered ribonucleic acid scaffold (ERS) sequence
  source 1..89: mol_type = other DNA
actggcgcttctatctgatttactctgagcgccaacaccagcgactatgtcgtatgggtaaagctccctcttcggagggagcatcagag

SEQ ID NO: 10712 - DNA, 88 bp, synthetic construct
  misc_feature 1..88: note = engineered ribonucleic acid scaffold (ERS) sequence
  source 1..88: mol_type = other DNA
actggcgcttctatctgattgctctgagcgccaacaccagcgactatgtcgtatgggtaaagctccctcttcggagggagcatcagag

SEQ ID NO: 10713 - DNA, 90 bp, synthetic construct
  misc_feature 1..90: note = engineered ribonucleic acid scaffold (ERS) sequence
  source 1..90: mol_type = other DNA
actggcgcttctatatctgattactctgagcgccagcaccagcgactatgtcgtatgggtaaagctccctcttcggagggagcatcagag

SEQ ID NO: 10714 - DNA, 89 bp, synthetic construct
  misc_feature 1..89: note = engineered ribonucleic acid scaffold (ERS) sequence
  source 1..89: mol_type = other DNA
actggcgcttctaatctgattactctgagcgccagcaccagcgactatgtcgtatgggtaaagctccctcttcggagggagcatcagag

SEQ ID NO: 10715 - DNA, 87 bp, synthetic construct
  misc_feature 1..87: note = engineered ribonucleic acid scaffold (ERS) sequence
  source 1..87: mol_type = other DNA
actggcgcttctactgattactctgagcgccagcaccagcgactatgtcgtatgggtaaagctccctcttcggagggagcatcagag

SEQ ID NO: 10716 - DNA, 88 bp, synthetic construct
  misc_feature 1..88: note = engineered ribonucleic acid scaffold (ERS) sequence
  source 1..88: mol_type = other DNA
actggcgcttctaactgattactctgagcgccagcaccagcgactatgtcgtatgggtaaagctccctcttcggagggagcatcagag

SEQ ID NO: 10717 - DNA, 88 bp, synthetic construct
  misc_feature 1..88: note = engineered ribonucleic acid scaffold (ERS) sequence
  source 1..88: mol_type = other DNA
actggcgcttctacctgattactctgagcgccagcaccagcgactatgtcgtatgggtaaagctccctcttcggagggagcatcagag

SEQ ID NO: 10718 - DNA, 88 bp, synthetic construct
  misc_feature 1..88: note = engineered ribonucleic acid scaffold (ERS) sequence
  source 1..88: mol_type = other DNA
actggcgcttctagctgattactctgagcgccagcaccagcgactatgtcgtatgggtaaagctccctcttcggagggagcatcagag

SEQ ID NO: 10719 - DNA, 90 bp, synthetic construct
  misc_feature 1..90: note = engineered ribonucleic acid scaffold (ERS) sequence
  source 1..90: mol_type = other DNA
actggcgcttctattactgattactctgagcgccagcaccagcgactatgtcgtatgggtaaagctccctcttcggagggagcatcagag

SEQ ID NO: 10720 - DNA, 88 bp, synthetic construct
  misc_feature 1..88: note = engineered ribonucleic acid scaffold (ERS) sequence
  source 1..88: mol_type = other DNA
actggcgcttctatatgattactctgagcgccagcaccagcgactatgtcgtatgggtaaagctccctcttcggagggagcatcagag

SEQ ID NO: 10721 - DNA, 88 bp, synthetic construct
  misc_feature 1..88: note = engineered ribonucleic acid scaffold (ERS) sequence
  source 1..88: mol_type = other DNA
actggcgcttctatgtgattactctgagcgccagcaccagcgactatgtcgtatgggtaaagctccctcttcggagggagcatcagag

SEQ ID NO: 10722 - DNA, 88 bp, synthetic construct
  misc_feature 1..88: note = engineered ribonucleic acid scaffold (ERS) sequence
  source 1..88: mol_type = other DNA
actggcgcttctatttgattactctgagcgccagcaccagcgactatgtcgtatgggtaaagctccctcttcggagggagcatcagag

SEQ ID NO: 10723 - DNA, 89 bp, synthetic construct
  misc_feature 1..89: note = engineered ribonucleic acid scaffold (ERS) sequence
  source 1..89: mol_type = other DNA
actggcgcttctatcttgattactctgagcgccagcaccagcgactatgtcgtatgggtaaagctccctcttcggagggagcatcagag

SEQ ID NO: 10724 - DNA, 88 bp, synthetic construct
  misc_feature 1..88: note = engineered ribonucleic acid scaffold (ERS) sequence
  source 1..88: mol_type = other DNA
actggcgcttctatcagattactctgagcgccagcaccagcgactatgtcgtatgggtaaagctccctcttcggagggagcatcagag

SEQ ID NO: 10725 - DNA, 88 bp, synthetic construct
  misc_feature 1..88: note = engineered ribonucleic acid scaffold (ERS) sequence
  source 1..88: mol_type = other DNA
actggcgcttctatcggattactctgagcgccagcaccagcgactatgtcgtatgggtaaagctccctcttcggagggagcatcagag

SEQ ID NO: 10726 - DNA, 89 bp, synthetic construct
  misc_feature 1..89: note = engineered ribonucleic acid scaffold (ERS) sequence
  source 1..89: mol_type = other DNA
actggcgcttctatctgaattactctgagcgccagcaccagcgactatgtcgtatgggtaaagctccctcttcggagggagcatcagag

SEQ ID NO: 10727 - DNA, 89 bp, synthetic construct
  misc_feature 1..89: note = engineered ribonucleic acid scaffold (ERS) sequence
  source 1..89: mol_type = other DNA
actggcgcttctatctgtattactctgagcgccagcaccagcgactatgtcgtatgggtaaagctccctcttcggagggagcatcagag

SEQ ID NO: 10728 - DNA, 88 bp, synthetic construct
  misc_feature 1..88: note = engineered ribonucleic acid scaffold (ERS) sequence
  source 1..88: mol_type = other DNA
actggcgcttctatctggttactctgagcgccagcaccagcgactatgtcgtatgggtaaagctccctcttcggagggagcatcagag

SEQ ID NO: 10729 - DNA, 88 bp, synthetic construct
  misc_feature 1..88: note = engineered ribonucleic acid scaffold (ERS) sequence
  source 1..88: mol_type = other DNA
actggcgcttctatctgtttactctgagcgccagcaccagcgactatgtcgtatgggtaaagctccctcttcggagggagcatcagag

SEQ ID NO: 10730 - DNA, 89 bp, synthetic construct
  misc_feature 1..89: note = engineered ribonucleic acid scaffold (ERS) sequence
  source 1..89: mol_type = other DNA
actggcgcttctatctgatttactctgagcgccagcaccagcgactatgtcgtatgggtaaagctccctcttcggagggagcatcagag

SEQ ID NO: 10731 - DNA, 88 bp, synthetic construct
  misc_feature 1..88: note = engineered ribonucleic acid scaffold (ERS) sequence
  source 1..88: mol_type = other DNA
actggcgcttctatctgattgctctgagcgccagcaccagcgactatgtcgtatgggtaaagctccctcttcggagggagcatcagag

SEQ ID NO: 10732 - DNA, 90 bp, synthetic construct
  misc_feature 1..90: note = engineered ribonucleic acid scaffold (ERS) sequence
  source 1..90: mol_type = other DNA
actggcgcttctatatctgattactctgagcgccatgaccagcgactatgtcgtatgggtaaagctccctcttcggagggagcatcagag

SEQ ID NO: 10733 - DNA, 89 bp, synthetic construct
  misc_feature 1..89: note = engineered ribonucleic acid scaffold (ERS) sequence
  source 1..89: mol_type = other DNA
actggcgcttctaatctgattactctgagcgccatgaccagcgactatgtcgtatgggtaaagctccctcttcggagggagcatcagag

SEQ ID NO: 10734 - DNA, 87 bp, synthetic construct
  misc_feature 1..87: note = engineered ribonucleic acid scaffold (ERS) sequence
  source 1..87: mol_type = other DNA
actggcgcttctactgattactctgagcgccatgaccagcgactatgtcgtatgggtaaagctccctcttcggagggagcatcagag

SEQ ID NO: 10735 - DNA, 88 bp, synthetic construct
  misc_feature 1..88: note = engineered ribonucleic acid scaffold (ERS) sequence
  source 1..88: mol_type = other DNA
actggcgcttctaactgattactctgagcgccatgaccagcgactatgtcgtatgggtaaagctccctcttcggagggagcatcagag

SEQ ID NO: 10736 - DNA, 88 bp, synthetic construct
  misc_feature 1..88: note = engineered ribonucleic acid scaffold (ERS) sequence
  source 1..88: mol_type = other DNA
actggcgcttctacctgattactctgagcgccatgaccagcgactatgtcgtatgggtaaagctccctcttcggagggagcatcagag

SEQ ID NO: 10737 - DNA, 88 bp, synthetic construct
  misc_feature 1..88: note = engineered ribonucleic acid scaffold (ERS) sequence
  source 1..88: mol_type = other DNA
actggcgcttctagctgattactctgagcgccatgaccagcgactatgtcgtatgggtaaagctccctcttcggagggagcatcagag

SEQ ID NO: 10738 - DNA, 90 bp, synthetic construct
  misc_feature 1..90: note = engineered ribonucleic acid scaffold (ERS) sequence
  source 1..90: mol_type = other DNA
actggcgcttctattactgattactctgagcgccatgaccagcgactatgtcgtatgggtaaagctccctcttcggagggagcatcagag

SEQ ID NO: 10739 - DNA, 88 bp, synthetic construct
  misc_feature 1..88: note = engineered ribonucleic acid scaffold (ERS) sequence
  source 1..88: mol_type = other DNA
actggcgcttctatatgattactctgagcgccatgaccagcgactatgtcgtatgggtaaagctccctcttcggagggagcatcagag

SEQ ID NO: 10740 - DNA, 88 bp, synthetic construct
  misc_feature 1..88: note = engineered ribonucleic acid scaffold (ERS) sequence
  source 1..88: mol_type = other DNA
actggcgcttctatgtgattactctgagcgccatgaccagcgactatgtcgtatgggtaaagctccctcttcggagggagcatcagag

SEQ ID NO: 10741 - DNA, 88 bp, synthetic construct
  misc_feature 1..88: note = engineered ribonucleic acid scaffold (ERS) sequence
  source 1..88: mol_type = other DNA
actggcgcttctatttgattactctgagcgccatgaccagcgactatgtcgtatgggtaaagctccctcttcggagggagcatcagag

SEQ ID NO: 10742 - DNA, 89 bp, synthetic construct
  misc_feature 1..89: note = engineered ribonucleic acid scaffold (ERS) sequence
  source 1..89: mol_type = other DNA
actggcgcttctatcttgattactctgagcgccatgaccagcgactatgtcgtatgggtaaagctccctcttcggagggagcatcagag

SEQ ID NO: 10743 - DNA, 88 bp, synthetic construct
  misc_feature 1..88: note = engineered ribonucleic acid scaffold (ERS) sequence
  source 1..88: mol_type = other DNA
actggcgcttctatcagattactctgagcgccatgaccagcgactatgtcgtatgggtaaagctccctcttcggagggagcatcagag

SEQ ID NO: 10744 - DNA, 88 bp, synthetic construct
  misc_feature 1..88: note = engineered ribonucleic acid scaffold (ERS) sequence
  source 1..88: mol_type = other DNA
actggcgcttctatcggattactctgagcgccatgaccagcgactatgtcgtatgggtaaagctccctcttcggagggagcatcagag

SEQ ID NO: 10745 - DNA, 89 bp, synthetic construct
  misc_feature 1..89: note = engineered ribonucleic acid scaffold (ERS) sequence
  source 1..89: mol_type = other DNA
actggcgcttctatctgaattactctgagcgccatgaccagcgactatgtcgtatgggtaaagctccctcttcggagggagcatcagag

SEQ ID NO: 10746 - DNA, 89 bp, synthetic construct
  misc_feature 1..89: note = engineered ribonucleic acid scaffold (ERS) sequence
  source 1..89: mol_type = other DNA
actggcgcttctatctgtattactctgagcgccatgaccagcgactatgtcgtatgggtaaagctccctcttcggagggagcatcagag

SEQ ID NO: 10747 - DNA, 88 bp, synthetic construct
  misc_feature 1..88: note = engineered ribonucleic acid scaffold (ERS) sequence
  source 1..88: mol_type = other DNA
actggcgcttctatctggttactctgagcgccatgaccagcgactatgtcgtatgggtaaagctccctcttcggagggagcatcagag

SEQ ID NO: 10748 - DNA, 88 bp, synthetic construct
  misc_feature 1..88: note = engineered ribonucleic acid scaffold (ERS) sequence
  source 1..88: mol_type = other DNA
actggcgcttctatctgtttactctgagcgccatgaccagcgactatgtcgtatgggtaaagctccctcttcggagggagcatcagag

SEQ ID NO: 10749 - DNA, 89 bp, synthetic construct
  misc_feature 1..89: note = engineered ribonucleic acid scaffold (ERS) sequence
  source 1..89: mol_type = other DNA
actggcgcttctatctgatttactctgagcgccatgaccagcgactatgtcgtatgggtaaagctccctcttcggagggagcatcagag

SEQ ID NO: 10750 - DNA, 88 bp, synthetic construct
  misc_feature 1..88: note = engineered ribonucleic acid scaffold (ERS) sequence
  source 1..88: mol_type = other DNA
actggcgcttctatctgattgctctgagcgccatgaccagcgactatgtcgtatgggtaaagctccctcttcggagggagcatcagag

SEQ ID NO: 10751 - DNA, 90 bp, synthetic construct
  misc_feature 1..90: note = engineered ribonucleic acid scaffold (ERS) sequence
  source 1..90: mol_type = other DNA
actggcgcttctatatctgattactctgagcgccatgaccagcgactatgtcgtatggctaaagctccctcttcggagggagcatcagag

SEQ ID NO: 10752 - DNA, 89 bp, synthetic construct
  misc_feature 1..89: note = engineered ribonucleic acid scaffold (ERS) sequence
  source 1..89: mol_type = other DNA
actggcgcttctaatctgattactctgagcgccatgaccagcgactatgtcgtatggctaaagctccctcttcggagggagcatcagag

SEQ ID NO: 10753 - DNA, 87 bp, synthetic construct
  misc_feature 1..87: note = engineered ribonucleic acid scaffold (ERS) sequence
  source 1..87: mol_type = other DNA
actggcgcttctactgattactctgagcgccatgaccagcgactatgtcgtatggctaaagctccctcttcggagggagcatcagag

SEQ ID NO: 10754 - DNA, 88 bp, synthetic construct
  misc_feature 1..88: note = engineered ribonucleic acid scaffold (ERS) sequence
  source 1..88: mol_type = other DNA
actggcgcttctaactgattactctgagcgccatgaccagcgactatgtcgtatggctaaagctccctcttcggagggagcatcagag

SEQ ID NO: 10755 - DNA, 88 bp, synthetic construct
  misc_feature 1..88: note = engineered ribonucleic acid scaffold (ERS) sequence
  source 1..88: mol_type = other DNA
actggcgcttctacctgattactctgagcgccatgaccagcgactatgtcgtatggctaaagctccctcttcggagggagcatcagag

SEQ ID NO: 10756 - DNA, 88 bp, synthetic construct
  misc_feature 1..88: note = engineered ribonucleic acid scaffold (ERS) sequence
  source 1..88: mol_type = other DNA
actggcgcttctagctgattactctgagcgccatgaccagcgactatgtcgtatggctaaagctccctcttcggagggagcatcagag

SEQ ID NO: 10757 - DNA, 90 bp, synthetic construct
  misc_feature 1..90: note = engineered ribonucleic acid scaffold (ERS) sequence
  source 1..90: mol_type = other DNA
actggcgcttctattactgattactctgagcgccatgaccagcgactatgtcgtatggctaaagctccctcttcggagggagcatcagag

SEQ ID NO: 10758 - DNA, 88 bp, synthetic construct
  misc_feature 1..88: note = engineered ribonucleic acid scaffold (ERS) sequence
  source 1..88: mol_type = other DNA
actggcgcttctatatgattactctgagcgccatgaccagcgactatgtcgtatggctaaagctccctcttcggagggagcatcagag

SEQ ID NO: 10759 - DNA, 88 bp, synthetic construct
  misc_feature 1..88: note = engineered ribonucleic acid scaffold (ERS) sequence
  source 1..88: mol_type = other DNA
actggcgcttctatgtgattactctgagcgccatgaccagcgactatgtcgtatggctaaagctccctcttcggagggagcatcagag

SEQ ID NO: 10760 - DNA, 88 bp, synthetic construct
  misc_feature 1..88: note = engineered ribonucleic acid scaffold (ERS) sequence
  source 1..88: mol_type = other DNA
actggcgcttctatttgattactctgagcgccatgaccagcgactatgtcgtatggctaaagctccctcttcggagggagcatcagag

SEQ ID NO: 10761 - DNA, 89 bp, synthetic construct
  misc_feature 1..89: note = engineered ribonucleic acid scaffold (ERS) sequence
  source 1..89: mol_type = other DNA
actggcgcttctatcttgattactctgagcgccatgaccagcgactatgtcgtatggctaaagctccctcttcggagggagcatcagag

SEQ ID NO: 10762 - DNA, 88 bp, synthetic construct
  misc_feature 1..88: note = engineered ribonucleic acid scaffold (ERS) sequence
  source 1..88: mol_type = other DNA
actggcgcttctatcagattactctgagcgccatgaccagcgactatgtcgtatggctaaagctccctcttcggagggagcatcagag

SEQ ID NO: 10763 - DNA, 88 bp, synthetic construct
  misc_feature 1..88: note = engineered ribonucleic acid scaffold (ERS) sequence
  source 1..88: mol_type = other DNA
actggcgcttctatcggattactctgagcgccatgaccagcgactatgtcgtatggctaaagctccctcttcggagggagcatcagag

SEQ ID NO: 10764 - DNA, 89 bp, synthetic construct
  misc_feature 1..89: note = engineered ribonucleic acid scaffold (ERS) sequence
  source 1..89: mol_type = other DNA
actggcgcttctatctgaattactctgagcgccatgaccagcgactatgtcgtatggctaaagctccctcttcggagggagcatcagag

SEQ ID NO: 10765 - DNA, 89 bp, synthetic construct
  misc_feature 1..89: note = engineered ribonucleic acid scaffold (ERS) sequence
  source 1..89: mol_type = other DNA
actggcgcttctatctgtattactctgagcgccatgaccagcgactatgtcgtatggctaaagctccctcttcggagggagcatcagag

SEQ ID NO: 10766 - DNA, 88 bp, synthetic construct
  misc_feature 1..88: note = engineered ribonucleic acid scaffold (ERS) sequence
  source 1..88: mol_type = other DNA
actggcgcttctatctggttactctgagcgccatgaccagcgactatgtcgtatggctaaagctccctcttcggagggagcatcagag

SEQ ID NO: 10767 - DNA, 88 bp, synthetic construct
  misc_feature 1..88: note = engineered ribonucleic acid scaffold (ERS) sequence
  source 1..88: mol_type = other DNA
actggcgcttctatctgtttactctgagcgccatgaccagcgactatgtcgtatggctaaagctccctcttcggagggagcatcagag

SEQ ID NO: 10768 - DNA, 89 bp, synthetic construct
  misc_feature 1..89: note = engineered ribonucleic acid scaffold (ERS) sequence
  source 1..89: mol_type = other DNA
actggcgcttctatctgatttactctgagcgccatgaccagcgactatgtcgtatggctaaagctccctcttcggagggagcatcagag

SEQ ID NO: 10769 - DNA, 88 bp, synthetic construct
  misc_feature 1..88: note = engineered ribonucleic acid scaffold (ERS) sequence
  source 1..88: mol_type = other DNA
actggcgcttctatctgattgctctgagcgccatgaccagcgactatgtcgtatggctaaagctccctcttcggagggagcatcagag

SEQ ID NO: 10770 - DNA, 91 bp, synthetic construct
  misc_feature 1..91: note = engineered ribonucleic acid scaffold (ERS) sequence
  source 1..91: mol_type = other DNA
actggcgcttctatatctgattactctgagcgccatgaccagcgactatgtcgtatgggctaaagctccctcttcggagggagcatcagag

SEQ ID NO: 10771 - DNA, 90 bp, synthetic construct
  misc_feature 1..90: note = engineered ribonucleic acid scaffold (ERS) sequence
  source 1..90: mol_type = other DNA
actggcgcttctaatctgattactctgagcgccatgaccagcgactatgtcgtatgggctaaagctccctcttcggagggagcatcagag

SEQ ID NO: 10772 - DNA, 88 bp, synthetic construct
  misc_feature 1..88: note = engineered ribonucleic acid scaffold (ERS) sequence
  source 1..88: mol_type = other DNA
actggcgcttctactgattactctgagcgccatgaccagcgactatgtcgtatgggctaaagctccctcttcggagggagcatcagag

SEQ ID NO: 10773 - DNA, 89 bp, synthetic construct
  misc_feature 1..89: note = engineered ribonucleic acid scaffold (ERS) sequence
  source 1..89: mol_type = other DNA
actggcgcttctaactgattactctgagcgccatgaccagcgactatgtcgtatgggctaaagctccctcttcggagggagcatcagag

SEQ ID NO: 10774 - DNA, 89 bp, synthetic construct
  misc_feature 1..89: note = engineered ribonucleic acid scaffold (ERS) sequence
  source 1..89: mol_type = other DNA
actggcgcttctacctgattactctgagcgccatgaccagcgactatgtcgtatgggctaaagctccctcttcggagggagcatcagag

SEQ ID NO: 10775 - DNA, 89 bp, synthetic construct
  misc_feature 1..89: note = engineered ribonucleic acid scaffold (ERS) sequence
  source 1..89: mol_type = other DNA
actggcgcttctagctgattactctgagcgccatgaccagcgactatgtcgtatgggctaaagctccctcttcggagggagcatcagag

SEQ ID NO: 10776 - DNA, 91 bp, synthetic construct
  misc_feature 1..91: note = engineered ribonucleic acid scaffold (ERS) sequence
  source 1..91: mol_type = other DNA
actggcgcttctattactgattactctgagcgccatgaccagcgactatgtcgtatgggctaaagctccctcttcggagggagcatcagag

SEQ ID NO: 10777 - DNA, 89 bp, synthetic construct
  misc_feature 1..89: note = engineered ribonucleic acid scaffold (ERS) sequence
  source 1..89: mol_type = other DNA
actggcgcttctatatgattactctgagcgccatgaccagcgactatgtcgtatgggctaaagctccctcttcggagggagcatcagag

SEQ ID NO: 10778 - DNA, 89 bp, synthetic construct
  misc_feature 1..89: note = engineered ribonucleic acid scaffold (ERS) sequence
  source 1..89: mol_type = other DNA
actggcgcttctatgtgattactctgagcgccatgaccagcgactatgtcgtatgggctaaagctccctcttcggagggagcatcagag

SEQ ID NO: 10779 - DNA, 89 bp, synthetic construct
  misc_feature 1..89: note = engineered ribonucleic acid scaffold (ERS) sequence
  source 1..89: mol_type = other DNA
actggcgcttctatttgattactctgagcgccatgaccagcgactatgtcgtatgggctaaagctccctcttcggagggagcatcagag

SEQ ID NO: 10780 - DNA, 90 bp, synthetic construct
  misc_feature 1..90: note = engineered ribonucleic acid scaffold (ERS) sequence
  source 1..90: mol_type = other DNA
actggcgcttctatcttgattactctgagcgccatgaccagcgactatgtcgtatgggctaaagctccctcttcggagggagcatcagag

SEQ ID NO: 10781 - DNA, 89 bp, synthetic construct
  misc_feature 1..89: note = engineered ribonucleic acid scaffold (ERS) sequence
  source 1..89: mol_type = other DNA
actggcgcttctatcagattactctgagcgccatgaccagcgactatgtcgtatgggctaaagctccctcttcggagggagcatcagag

SEQ ID NO: 10782 - DNA, 89 bp, synthetic construct
  misc_feature 1..89: note = engineered ribonucleic acid scaffold (ERS) sequence
  source 1..89: mol_type = other DNA
actggcgcttctatcggattactctgagcgccatgaccagcgactatgtcgtatgggctaaagctccctcttcggagggagcatcagag

SEQ ID NO: 10783 - DNA, 90 bp, synthetic construct
  misc_feature 1..90: note = engineered ribonucleic acid scaffold (ERS) sequence
  source 1..90: mol_type = other DNA
actggcgcttctatctgaattactctgagcgccatgaccagcgactatgtcgtatgggctaaagctccctcttcggagggagcatcagag

SEQ ID NO: 10784 - DNA, 90 bp, synthetic construct
  misc_feature 1..90: note = engineered ribonucleic acid scaffold (ERS) sequence
  source 1..90: mol_type = other DNA
actggcgcttctatctgtattactctgagcgccatgaccagcgactatgtcgtatgggctaaagctccctcttcggagggagcatcagag

SEQ ID NO: 10785 - DNA, 89 bp, synthetic construct
  misc_feature 1..89: note = engineered ribonucleic acid scaffold (ERS) sequence
  source 1..89: mol_type = other DNA
actggcgcttctatctggttactctgagcgccatgaccagcgactatgtcgtatgggctaaagctccctcttcggagggagcatcagag

SEQ ID NO: 10786 - DNA, 89 bp, synthetic construct
  misc_feature 1..89: note = engineered ribonucleic acid scaffold (ERS) sequence
  source 1..89: mol_type = other DNA
actggcgcttctatctgtttactctgagcgccatgaccagcgactatgtcgtatgggctaaagctccctcttcggagggagcatcagag

SEQ ID NO: 10787 - DNA, 90 bp, synthetic construct
  misc_feature 1..90: note = engineered ribonucleic acid scaffold (ERS) sequence
  source 1..90: mol_type = other DNA
actggcgcttctatctgatttactctgagcgccatgaccagcgactatgtcgtatgggctaaagctccctcttcggagggagcatcagag

SEQ ID NO: 10788 - DNA, 89 bp, synthetic construct
  misc_feature 1..89: note = engineered ribonucleic acid scaffold (ERS) sequence
  source 1..89: mol_type = other DNA
actggcgcttctatctgattgctctgagcgccatgaccagcgactatgtcgtatgggctaaagctccctcttcggagggagcatcagag

SEQ ID NO: 10789 - DNA, 90 bp, synthetic construct
  misc_feature 1..90: note = engineered ribonucleic acid scaffold (ERS) sequence
  source 1..90: mol_type = other DNA
actggcgcttctatatctgattactctgagcgccatccccagcgactatgtcgtatgggtaaagctccctcttcggagggagcatcagag

SEQ ID NO: 10790 - DNA, 89 bp, synthetic construct
  misc_feature 1..89: note = engineered ribonucleic acid scaffold (ERS) sequence
  source 1..89: mol_type = other DNA
actggcgcttctaatctgattactctgagcgccatccccagcgactatgtcgtatgggtaaagctccctcttcggagggagcatcagag

SEQ ID NO: 10791 - DNA, 87 bp, synthetic construct
  misc_feature 1..87: note = engineered ribonucleic acid scaffold (ERS) sequence
  source 1..87: mol_type = other DNA
actggcgcttctactgattactctgagcgccatccccagcgactatgtcgtatgggtaaagctccctcttcggagggagcatcagag

SEQ ID NO: 10792 - DNA, 88 bp, synthetic construct
  misc_feature 1..88: note = engineered ribonucleic acid scaffold (ERS) sequence
  source 1..88: mol_type = other DNA
actggcgcttctaactgattactctgagcgccatccccagcgactatgtcgtatgggtaaagctccctcttcggagggagcatcagag

SEQ ID NO: 10793 - DNA, 88 bp, synthetic construct
  misc_feature 1..88: note = engineered ribonucleic acid scaffold (ERS) sequence
  source 1..88: mol_type = other DNA
actggcgcttctacctgattactctgagcgccatccccagcgactatgtcgtatgggtaaagctccctcttcggagggagcatcagag

SEQ ID NO: 10794 - DNA, 88 bp, synthetic construct
  misc_feature 1..88: note = engineered ribonucleic acid scaffold (ERS) sequence
  source 1..88: mol_type = other DNA
actggcgcttctagctgattactctgagcgccatccccagcgactatgtcgtatgggtaaagctccctcttcggagggagcatcagag

SEQ ID NO: 10795 - DNA, 90 bp, synthetic construct
  misc_feature 1..90: note = engineered ribonucleic acid scaffold (ERS) sequence
  source 1..90: mol_type = other DNA
actggcgcttctattactgattactctgagcgccatccccagcgactatgtcgtatgggtaaagctccctcttcggagggagcatcagag

SEQ ID NO: 10796 - DNA, 88 bp, synthetic construct
  misc_feature 1..88: note = engineered ribonucleic acid scaffold (ERS) sequence
  source 1..88: mol_type = other DNA
actggcgcttctatatgattactctgagcgccatccccagcgactatgtcgtatgggtaaagctccctcttcggagggagcatcagag

SEQ ID NO: 10797 - DNA, 88 bp, synthetic construct
  misc_feature 1..88: note = engineered ribonucleic acid scaffold (ERS) sequence
  source 1..88: mol_type = other DNA
actggcgcttctatgtgattactctgagcgccatccccagcgactatgtcgtatgggtaaagctccctcttcggagggagcatcagag

SEQ ID NO: 10798 - DNA, 88 bp, synthetic construct
  misc_feature 1..88: note = engineered ribonucleic acid scaffold (ERS) sequence
  source 1..88: mol_type = other DNA
actggcgcttctatttgattactctgagcgccatccccagcgactatgtcgtatgggtaaagctccctcttcggagggagcatcagag

SEQ ID NO: 10799 - DNA, 89 bp, synthetic construct
  misc_feature 1..89: note = engineered ribonucleic acid scaffold (ERS) sequence
  source 1..89: mol_type = other DNA
actggcgcttctatcttgattactctgagcgccatccccagcgactatgtcgtatgggtaaagctccctcttcggagggagcatcagag

SEQ ID NO: 10800 - DNA, 88 bp, synthetic construct
  misc_feature 1..88: note = engineered ribonucleic acid scaffold (ERS) sequence
  source 1..88: mol_type = other DNA
actggcgcttctatcagattactctgagcgccatccccagcgactatgtcgtatgggtaaagctccctcttcggagggagcatcagag

SEQ ID NO: 10801 - DNA, 88 bp, synthetic construct
  misc_feature 1..88: note = engineered ribonucleic acid scaffold (ERS) sequence
  source 1..88: mol_type = other DNA
actggcgcttctatcggattactctgagcgccatccccagcgactatgtcgtatgggtaaagctccctcttcggagggagcatcagag

SEQ ID NO: 10802 - DNA, 89 bp, synthetic construct
  misc_feature 1..89: note = engineered ribonucleic acid scaffold (ERS) sequence
  source 1..89: mol_type = other DNA
actggcgcttctatctgaattactctgagcgccatccccagcgactatgtcgtatgggtaaagctccctcttcggagggagcatcagag

SEQ ID NO: 10803 - DNA, 89 bp, synthetic construct
  misc_feature 1..89: note = engineered ribonucleic acid scaffold (ERS) sequence
  source 1..89: mol_type = other DNA
actggcgcttctatctgtattactctgagcgccatccccagcgactatgtcgtatgggtaaagctccctcttcggagggagcatcagag

SEQ ID NO: 10804 - DNA, 88 bp, synthetic construct
  misc_feature 1..88: note = engineered ribonucleic acid scaffold (ERS) sequence
  source 1..88: mol_type = other DNA
actggcgcttctatctggttactctgagcgccatccccagcgactatgtcgtatgggtaaagctccctcttcggagggagcatcagag

SEQ ID NO: 10805 - DNA, 88 bp, synthetic construct
  misc_feature 1..88: note = engineered ribonucleic acid scaffold (ERS) sequence
  source 1..88: mol_type = other DNA
actggcgcttctatctgtttactctgagcgccatccccagcgactatgtcgtatgggtaaagctccctcttcggagggagcatcagag

SEQ ID NO: 10806 - DNA, 89 bp, synthetic construct
  misc_feature 1..89: note = engineered ribonucleic acid scaffold (ERS) sequence
  source 1..89: mol_type = other DNA
actggcgcttctatctgatttactctgagcgccatccccagcgactatgtcgtatgggtaaagctccctcttcggagggagcatcagag

SEQ ID NO: 10807 - DNA, 88 bp, synthetic construct
  misc_feature 1..88: note = engineered ribonucleic acid scaffold (ERS) sequence
  source 1..88: mol_type = other DNA
actggcgcttctatctgattgctctgagcgccatccccagcgactatgtcgtatgggtaaagctccctcttcggagggagcatcagag

SEQ ID NO: 10808 - DNA, 90 bp, synthetic construct
  misc_feature 1..90: note = engineered ribonucleic acid scaffold (ERS) sequence
  source 1..90: mol_type = other DNA
actggcgcttctatatctgattactctgagcgccatcgccagcgactatgtcgtatgggtaaagctccctcttcggagggagcatcagag

SEQ ID NO: 10809 - DNA, 89 bp, synthetic construct
  misc_feature 1..89: note = engineered ribonucleic acid scaffold (ERS) sequence
  source 1..89: mol_type = other DNA
actggcgcttctaatctgattactctgagcgccatcgccagcgactatgtcgtatgggtaaagctccctcttcggagggagcatcagag

SEQ ID NO: 10810 - DNA, 87 bp, synthetic construct
  misc_feature 1..87: note = engineered ribonucleic acid scaffold (ERS) sequence
  source 1..87: mol_type = other DNA
actggcgcttctactgattactctgagcgccatcgccagcgactatgtcgtatgggtaaagctccctcttcggagggagcatcagag

SEQ ID NO: 10811 - DNA, 88 bp, synthetic construct
  misc_feature 1..88: note = engineered ribonucleic acid scaffold (ERS) sequence
  source 1..88: mol_type = other DNA
actggcgcttctaactgattactctgagcgccatcgccagcgactatgtcgtatgggtaaagctccctcttcggagggagcatcagag

SEQ ID NO: 10812 - DNA, 88 bp, synthetic construct
  misc_feature 1..88: note = engineered ribonucleic acid scaffold (ERS) sequence
  source 1..88: mol_type = other DNA
actggcgcttctacctgattactctgagcgccatcgccagcgactatgtcgtatgggtaaagctccctcttcggagggagcatcagag

SEQ ID NO: 10813 - DNA, 88 bp, synthetic construct
  misc_feature 1..88: note = engineered ribonucleic acid scaffold (ERS) sequence
  source 1..88: mol_type = other DNA
actggcgcttctagctgattactctgagcgccatcgccagcgactatgtcgtatgggtaaagctccctcttcggagggagcatcagag

SEQ ID NO: 10814 - DNA, 90 bp, synthetic construct
  misc_feature 1..90: note = engineered ribonucleic acid scaffold (ERS) sequence
  source 1..90: mol_type = other DNA
actggcgcttctattactgattactctgagcgccatcgccagcgactatgtcgtatgggtaaagctccctcttcggagggagcatcagag

SEQ ID NO: 10815 - DNA, 88 bp, synthetic construct
  misc_feature 1..88: note = engineered ribonucleic acid scaffold (ERS) sequence
  source 1..88: mol_type = other DNA
actggcgcttctatatgattactctgagcgccatcgccagcgactatgtcgtatgggtaaagctccctcttcggagggagcatcagag

SEQ ID NO: 10816 - DNA, 88 bp, synthetic construct
  misc_feature 1..88: note = engineered ribonucleic acid scaffold (ERS) sequence
  source 1..88: mol_type = other DNA
actggcgcttctatgtgattactctgagcgccatcgccagcgactatgtcgtatgggtaaagctccctcttcggagggagcatcagag

SEQ ID NO: 10817 - DNA, 88 bp, synthetic construct
  misc_feature 1..88: note = engineered ribonucleic acid scaffold (ERS) sequence
  source 1..88: mol_type = other DNA
actggcgcttctatttgattactctgagcgccatcgccagcgactatgtcgtatgggtaaagctccctcttcggagggagcatcagag

SEQ ID NO: 10818 - DNA, 89 bp, synthetic construct
  misc_feature 1..89: note = engineered ribonucleic acid scaffold (ERS) sequence
  source 1..89: mol_type = other DNA
actggcgcttctatcttgattactctgagcgccatcgccagcgactatgtcgtatgggtaaagctccctcttcggagggagcatcagag

SEQ ID NO: 10819 - DNA, 88 bp, synthetic construct
  misc_feature 1..88: note = engineered ribonucleic acid scaffold (ERS) sequence
  source 1..88: mol_type = other DNA
actggcgcttctatcagattactctgagcgccatcgccagcgactatgtcgtatgggtaaagctccctcttcggagggagcatcagag

SEQ ID NO: 10820 - DNA, 88 bp, synthetic construct
  misc_feature 1..88: note = engineered ribonucleic acid scaffold (ERS) sequence
  source 1..88: mol_type = other DNA
actggcgcttctatcggattactctgagcgccatcgccagcgactatgtcgtatgggtaaagctccctcttcggagggagcatcagag

SEQ ID NO: 10821 - DNA, 89 bp, synthetic construct
  misc_feature 1..89: note = engineered ribonucleic acid scaffold (ERS) sequence
  source 1..89: mol_type = other DNA
actggcgcttctatctgaattactctgagcgccatcgccagcgactatgtcgtatgggtaaagctccctcttcggagggagcatcagag

SEQ ID NO: 10822 - DNA, 89 bp, synthetic construct
  misc_feature 1..89: note = engineered ribonucleic acid scaffold (ERS) sequence
  source 1..89: mol_type = other DNA
actggcgcttctatctgtattactctgagcgccatcgccagcgactatgtcgtatgggtaaagctccctcttcggagggagcatcagag

SEQ ID NO: 10823 - DNA, 88 bp, synthetic construct
  misc_feature 1..88: note = engineered ribonucleic acid scaffold (ERS) sequence
  source 1..88: mol_type = other DNA
actggcgcttctatctggttactctgagcgccatcgccagcgactatgtcgtatgggtaaagctccctcttcggagggagcatcagag

SEQ ID NO: 10824 - DNA, 88 bp, synthetic construct
  misc_feature 1..88: note = engineered ribonucleic acid scaffold (ERS) sequence
  source 1..88: mol_type = other DNA
actggcgcttctatctgtttactctgagcgccatcgccagcgactatgtcgtatgggtaaagctccctcttcggagggagcatcagag

SEQ ID NO: 10825 - DNA, 89 bp, synthetic construct
  misc_feature 1..89: note = engineered ribonucleic acid scaffold (ERS) sequence
  source 1..89: mol_type = other DNA
actggcgcttctatctgatttactctgagcgccatcgccagcgactatgtcgtatgggtaaagctccctcttcggagggagcatcagag

SEQ ID NO: 10826 - DNA, 88 bp, synthetic construct
  misc_feature 1..88: note = engineered ribonucleic acid scaffold (ERS) sequence
  source 1..88: mol_type = other DNA
actggcgcttctatctgattgctctgagcgccatcgccagcgactatgtcgtatgggtaaagctccctcttcggagggagcatcagag

SEQ ID NO: 10827 - DNA, 91 bp, synthetic construct
  misc_feature 1..91: note = engineered ribonucleic acid scaffold (ERS) sequence
  source 1..91: mol_type = other DNA
actggcgcttctatatctgattactctgagcgccatcgccagcgactatgtcgtatggcgtaaagctccctcttcggagggagcatcagag

SEQ ID NO: 10828 - DNA, 90 bp, synthetic construct
  misc_feature 1..90: note = engineered ribonucleic acid scaffold (ERS) sequence
  source 1..90: mol_type = other DNA
actggcgcttctaatctgattactctgagcgccatcgccagcgactatgtcgtatggcgtaaagctccctcttcggagggagcatcagag

SEQ ID NO: 10829 - DNA, 88 bp, synthetic construct
  misc_feature 1..88: note = engineered ribonucleic acid scaffold (ERS) sequence
  source 1..88: mol_type = other DNA
actggcgcttctactgattactctgagcgccatcgccagcgactatgtcgtatggcgtaaagctccctcttcggagggagcatcagag

SEQ ID NO: 10830 - DNA, 89 bp, synthetic construct
  misc_feature 1..89: note = engineered ribonucleic acid scaffold (ERS) sequence
  source 1..89: mol_type = other DNA
actggcgcttctaactgattactctgagcgccatcgccagcgactatgtcgtatggcgtaaagctccctcttcggagggagcatcagag

SEQ ID NO: 10831 - DNA, 89 bp, synthetic construct
  misc_feature 1..89: note = engineered ribonucleic acid scaffold (ERS) sequence
  source 1..89: mol_type = other DNA
actggcgcttctacctgattactctgagcgccatcgccagcgactatgtcgtatggcgtaaagctccctcttcggagggagcatcagag

SEQ ID NO: 10832 - DNA, 89 bp, synthetic construct
  misc_feature 1..89: note = engineered ribonucleic acid scaffold (ERS) sequence
  source 1..89: mol_type = other DNA
actggcgcttctagctgattactctgagcgccatcgccagcgactatgtcgtatggcgtaaagctccctcttcggagggagcatcagag

SEQ ID NO: 10833 - DNA, 91 bp, synthetic construct
  misc_feature 1..91: note = engineered ribonucleic acid scaffold (ERS) sequence
  source 1..91: mol_type = other DNA
actggcgcttctattactgattactctgagcgccatcgccagcgactatgtcgtatggcgtaaagctccctcttcggagggagcatcagag

SEQ ID NO: 10834 - DNA, 89 bp, synthetic construct
  misc_feature 1..89: note = engineered ribonucleic acid scaffold (ERS) sequence
  source 1..89: mol_type = other DNA
actggcgcttctatatgattactctgagcgccatcgccagcgactatgtcgtatggcgtaaagctccctcttcggagggagcatcagag

SEQ ID NO: 10835 - DNA, 89 bp, synthetic construct
  misc_feature 1..89: note = engineered ribonucleic acid scaffold (ERS) sequence
  source 1..89: mol_type = other DNA
actggcgcttctatgtgattactctgagcgccatcgccagcgactatgtcgtatggcgtaaagctccctcttcggagggagcatcagag

SEQ ID NO: 10836 - DNA, 89 bp, synthetic construct
  misc_feature 1..89: note = engineered ribonucleic acid scaffold (ERS) sequence
  source 1..89: mol_type = other DNA
actggcgcttctatttgattactctgagcgccatcgccagcgactatgtcgtatggcgtaaagctccctcttcggagggagcatcagag

SEQ ID NO: 10837 - DNA, 90 bp, synthetic construct
  misc_feature 1..90: note = engineered ribonucleic acid scaffold (ERS) sequence
  source 1..90: mol_type = other DNA
actggcgcttctatcttgattactctgagcgccatcgccagcgactatgtcgtatggcgtaaagctccctcttcggagggagcatcagag

SEQ ID NO: 10838 - DNA, 89 bp, synthetic construct
  misc_feature 1..89: note = engineered ribonucleic acid scaffold (ERS) sequence
  source 1..89: mol_type = other DNA
actggcgcttctatcagattactctgagcgccatcgccagcgactatgtcgtatggcgtaaagctccctcttcggagggagcatcagag

SEQ ID NO: 10839 - DNA, 89 bp, synthetic construct
  misc_feature 1..89: note = engineered ribonucleic acid scaffold (ERS) sequence
  source 1..89: mol_type = other DNA
actggcgcttctatcggattactctgagcgccatcgccagcgactatgtcgtatggcgtaaagctccctcttcggagggagcatcagag

SEQ ID NO: 10840 - DNA, 90 bp, synthetic construct
  misc_feature 1..90: note = engineered ribonucleic acid scaffold (ERS) sequence
  source 1..90: mol_type = other DNA
actggcgcttctatctgaattactctgagcgccatcgccagcgactatgtcgtatggcgtaaagctccctcttcggagggagcatcagag

SEQ ID NO: 10841 - DNA, 90 bp, synthetic construct
  misc_feature 1..90: note = engineered ribonucleic acid scaffold (ERS) sequence
  source 1..90: mol_type = other DNA
actggcgcttctatctgtattactctgagcgccatcgccagcgactatgtcgtatggcgtaaagctccctcttcggagggagcatcagag

SEQ ID NO: 10842 - DNA, 89 bp, synthetic construct
  misc_feature 1..89: note = engineered ribonucleic acid scaffold (ERS) sequence
  source 1..89: mol_type = other DNA
actggcgcttctatctggttactctgagcgccatcgccagcgactatgtcgtatggcgtaaagctccctcttcggagggagcatcagag

SEQ ID NO: 10843 - DNA, 89 bp, synthetic construct
  misc_feature 1..89: note = engineered ribonucleic acid scaffold (ERS) sequence
  source 1..89: mol_type = other DNA
actggcgcttctatctgtttactctgagcgccatcgccagcgactatgtcgtatggcgtaaagctccctcttcggagggagcatcagag

SEQ ID NO: 10844 - DNA, 90 bp, synthetic construct
  misc_feature 1..90: note = engineered ribonucleic acid scaffold (ERS) sequence
  source 1..90: mol_type = other DNA
actggcgcttctatctgatttactctgagcgccatcgccagcgactatgtcgtatggcgtaaagctccctcttcggagggagcatcagag

SEQ ID NO: 10845 - DNA, 89 bp, synthetic construct
  misc_feature 1..89: note = engineered ribonucleic acid scaffold (ERS) sequence
  source 1..89: mol_type = other DNA
actggcgcttctatctgattgctctgagcgccatcgccagcgactatgtcgtatggcgtaaagctccctcttcggagggagcatcagag

SEQ ID NO: 10846 - DNA, 90 bp, synthetic construct
  misc_feature 1..90: note = engineered ribonucleic acid scaffold (ERS) sequence
  source 1..90: mol_type = other DNA
actggcgcttctatatctgattactctgagcgccatctccagcgactatgtcgtatgggtaaagctccctcttcggagggagcatcagag

SEQ ID NO: 10847 - DNA, 89 bp, synthetic construct
  misc_feature 1..89: note = engineered ribonucleic acid scaffold (ERS) sequence
  source 1..89: mol_type = other DNA
actggcgcttctaatctgattactctgagcgccatctccagcgactatgtcgtatgggtaaagctccctcttcggagggagcatcagag

SEQ ID NO: 10848 - DNA, 87 bp, synthetic construct
  misc_feature 1..87: note = engineered ribonucleic acid scaffold (ERS) sequence
  source 1..87: mol_type = other DNA
actggcgcttctactgattactctgagcgccatctccagcgactatgtcgtatgggtaaagctccctcttcggagggagcatcagag

SEQ ID NO: 10849 - DNA, 88 bp, synthetic construct
  misc_feature 1..88: note = engineered ribonucleic acid scaffold (ERS) sequence
  source 1..88: mol_type = other DNA
actggcgcttctaactgattactctgagcgccatctccagcgactatgtcgtatgggtaaagctccctcttcggagggagcatcagag

SEQ ID NO: 10850 - DNA, 88 bp, synthetic construct
  misc_feature 1..88: note = engineered ribonucleic acid scaffold (ERS) sequence
  source 1..88: mol_type = other DNA
actggcgcttctacctgattactctgagcgccatctccagcgactatgtcgtatgggtaaagctccctcttcggagggagcatcagag

SEQ ID NO: 10851 - DNA, 88 bp, synthetic construct
  misc_feature 1..88: note = engineered ribonucleic acid scaffold (ERS) sequence
  source 1..88: mol_type = other DNA
actggcgcttctagctgattactctgagcgccatctccagcgactatgtcgtatgggtaaagctccctcttcggagggagcatcagag

SEQ ID NO: 10852 - DNA, 90 bp, synthetic construct
  misc_feature 1..90: note = engineered ribonucleic acid scaffold (ERS) sequence
  source 1..90: mol_type = other DNA
actggcgcttctattactgattactctgagcgccatctccagcgactatgtcgtatgggtaaagctccctcttcggagggagcatcagag

SEQ ID NO: 10853 - DNA, 88 bp, synthetic construct
  misc_feature 1..88: note = engineered ribonucleic acid scaffold (ERS) sequence
  source 1..88: mol_type = other DNA
actggcgcttctatatgattactctgagcgccatctccagcgactatgtcgtatgggtaaagctccctcttcggagggagcatcagag

SEQ ID NO: 10854 - DNA, 88 bp, synthetic construct
  misc_feature 1..88: note = engineered ribonucleic acid scaffold (ERS) sequence
  source 1..88: mol_type = other DNA
actggcgcttctatgtgattactctgagcgccatctccagcgactatgtcgtatgggtaaagctccctcttcggagggagcatcagag

SEQ ID NO: 10855 - DNA, 88 bp, synthetic construct
  misc_feature 1..88: note = engineered ribonucleic acid scaffold (ERS) sequence
  source 1..88: mol_type = other DNA
actggcgcttctatttgattactctgagcgccatctccagcgactatgtcgtatgggtaaagctccctcttcggagggagcatcagag

SEQ ID NO: 10856 - DNA, 89 bp, synthetic construct
  misc_feature 1..89: note = engineered ribonucleic acid scaffold (ERS) sequence
  source 1..89: mol_type = other DNA
actggcgcttctatcttgattactctgagcgccatctccagcgactatgtcgtatgggtaaagctccctcttcggagggagcatcagag

SEQ ID NO: 10857 - DNA, 88 bp, synthetic construct
  misc_feature 1..88: note = engineered ribonucleic acid scaffold (ERS) sequence
  source 1..88: mol_type = other DNA
actggcgcttctatcagattactctgagcgccatctccagcgactatgtcgtatgggtaaagctccctcttcggagggagcatcagag

SEQ ID NO: 10858 - DNA, 88 bp, synthetic construct
  misc_feature 1..88: note = engineered ribonucleic acid scaffold (ERS) sequence
  source 1..88: mol_type = other DNA
actggcgcttctatcggattactctgagcgccatctccagcgactatgtcgtatgggtaaagctccctcttcggagggagcatcagag

SEQ ID NO: 10859 - DNA, 89 bp, synthetic construct
  misc_feature 1..89: note = engineered ribonucleic acid scaffold (ERS) sequence
  source 1..89: mol_type = other DNA
actggcgcttctatctgaattactctgagcgccatctccagcgactatgtcgtatgggtaaagctccctcttcggagggagcatcagag

SEQ ID NO: 10860 - DNA, 89 bp, synthetic construct
  misc_feature 1..89: note = engineered ribonucleic acid scaffold (ERS) sequence
  source 1..89: mol_type = other DNA
actggcgcttctatctgtattactctgagcgccatctccagcgactatgtcgtatgggtaaagctccctcttcggagggagcatcagag

SEQ ID NO: 10861 - DNA, 88 bp, synthetic construct
  misc_feature 1..88: note = engineered ribonucleic acid scaffold (ERS) sequence
  source 1..88: mol_type = other DNA
actggcgcttctatctggttactctgagcgccatctccagcgactatgtcgtatgggtaaagctccctcttcggagggagcatcagag

SEQ ID NO: 10862 - DNA, 88 bp, synthetic construct
  misc_feature 1..88: note = engineered ribonucleic acid scaffold (ERS) sequence
  source 1..88: mol_type = other DNA
actggcgcttctatctgtttactctgagcgccatctccagcgactatgtcgtatgggtaaagctccctcttcggagggagcatcagag

SEQ ID NO: 10863 - DNA, 89 bp, synthetic construct
  misc_feature 1..89: note = engineered ribonucleic acid scaffold (ERS) sequence
  source 1..89: mol_type = other DNA
actggcgcttctatctgatttactctgagcgccatctccagcgactatgtcgtatgggtaaagctccctcttcggagggagcatcagag

SEQ ID NO: 10864 - DNA, 88 bp, synthetic construct
  misc_feature 1..88: note = engineered ribonucleic acid scaffold (ERS) sequence
  source 1..88: mol_type = other DNA
actggcgcttctatctgattgctctgagcgccatctccagcgactatgtcgtatgggtaaagctccctcttcggagggagcatcagag

SEQ ID NO: 10865 - DNA, 90 bp, synthetic construct
  misc_feature 1..90: note = engineered ribonucleic acid scaffold (ERS) sequence
  source 1..90: mol_type = other DNA
actggcgcttctatatctgattactctgagcgccatcacctgcgactatgtcgtaagggtaaagctccctcttcggagggagcatcagag

SEQ ID NO: 10866 - DNA, 89 bp, synthetic construct
  misc_feature 1..89: note = engineered ribonucleic acid scaffold (ERS) sequence
  source 1..89: mol_type = other DNA
actggcgcttctaatctgattactctgagcgccatcacctgcgactatgtcgtaagggtaaagctccctcttcggagggagcatcagag

SEQ ID NO: 10867 - DNA, 87 bp, synthetic construct
  misc_feature 1..87: note = engineered ribonucleic acid scaffold (ERS) sequence
  source 1..87: mol_type = other DNA
actggcgcttctactgattactctgagcgccatcacctgcgactatgtcgtaagggtaaagctccctcttcggagggagcatcagag

SEQ ID NO: 10868 - DNA, 88 bp, synthetic construct
  misc_feature 1..88: note = engineered ribonucleic acid scaffold (ERS) sequence
  source 1..88: mol_type = other DNA
actggcgcttctaactgattactctgagcgccatcacctgcgactatgtcgtaagggtaaagctccctcttcggagggagcatcagag

SEQ ID NO: 10869 - DNA, 88 bp, synthetic construct
  misc_feature 1..88: note = engineered ribonucleic acid scaffold (ERS) sequence
  source 1..88: mol_type = other DNA
actggcgcttctacctgattactctgagcgccatcacctgcgactatgtcgtaagggtaaagctccctcttcggagggagcatcagag

SEQ ID NO: 10870 - DNA, 88 bp, synthetic construct
  misc_feature 1..88: note = engineered ribonucleic acid scaffold (ERS) sequence
  source 1..88: mol_type = other DNA
actggcgcttctagctgattactctgagcgccatcacctgcgactatgtcgtaagggtaaagctccctcttcggagggagcatcagag

SEQ ID NO: 10871 - DNA, 90 bp, synthetic construct
  misc_feature 1..90: note = engineered ribonucleic acid scaffold (ERS) sequence
  source 1..90: mol_type = other DNA
actggcgcttctattactgattactctgagcgccatcacctgcgactatgtcgtaagggtaaagctccctcttcggagggagcatcagag

SEQ ID NO: 10872 - DNA, 88 bp, synthetic construct
  misc_feature 1..88: note = engineered ribonucleic acid scaffold (ERS) sequence
  source 1..88: mol_type = other DNA
actggcgcttctatatgattactctgagcgccatcacctgcgactatgtcgtaagggtaaagctccctcttcggagggagcatcagag

SEQ ID NO: 10873 - DNA, 88 bp, synthetic construct
  misc_feature 1..88: note = engineered ribonucleic acid scaffold (ERS) sequence
  source 1..88: mol_type = other DNA
actggcgcttctatgtgattactctgagcgccatcacctgcgactatgtcgtaagggtaaagctccctcttcggagggagcatcagag

SEQ ID NO: 10874 - DNA, 88 bp, synthetic construct
  misc_feature 1..88: note = engineered ribonucleic acid scaffold (ERS) sequence
  source 1..88: mol_type = other DNA
actggcgcttctatttgattactctgagcgccatcacctgcgactatgtcgtaagggtaaagctccctcttcggagggagcatcagag

SEQ ID NO: 10875 - DNA, 89 bp, synthetic construct
  misc_feature 1..89: note = engineered ribonucleic acid scaffold (ERS) sequence
  source 1..89: mol_type = other DNA
actggcgcttctatcttgattactctgagcgccatcacctgcgactatgtcgtaagggtaaagctccctcttcggagggagcatcagag

SEQ ID NO: 10876 - DNA, 88 bp, synthetic construct
  misc_feature 1..88: note = engineered ribonucleic acid scaffold (ERS) sequence
  source 1..88: mol_type = other DNA
actggcgcttctatcagattactctgagcgccatcacctgcgactatgtcgtaagggtaaagctccctcttcggagggagcatcagag

SEQ ID NO: 10877 - DNA, 88 bp, synthetic construct
  misc_feature 1..88: note = engineered ribonucleic acid scaffold (ERS) sequence
  source 1..88: mol_type = other DNA
actggcgcttctatcggattactctgagcgccatcacctgcgactatgtcgtaagggtaaagctccctcttcggagggagcatcagag

SEQ ID NO: 10878 - DNA, 89 bp, synthetic construct
  misc_feature 1..89: note = engineered ribonucleic acid scaffold (ERS) sequence
  source 1..89: mol_type = other DNA
actggcgcttctatctgaattactctgagcgccatcacctgcgactatgtcgtaagggtaaagctccctcttcggagggagcatcagag

SEQ ID NO: 10879 - DNA, 89 bp, synthetic construct
  misc_feature 1..89: note = engineered ribonucleic acid scaffold (ERS) sequence
  source 1..89: mol_type = other DNA
actggcgcttctatctgtattactctgagcgccatcacctgcgactatgtcgtaagggtaaagctccctcttcggagggagcatcagag

SEQ ID NO: 10880 - DNA, 88 bp, synthetic construct
  misc_feature 1..88: note = engineered ribonucleic acid scaffold (ERS) sequence
  source 1..88: mol_type = other DNA
actggcgcttctatctggttactctgagcgccatcacctgcgactatgtcgtaagggtaaagctccctcttcggagggagcatcagag

SEQ ID NO: 10881 - DNA, 88 bp, synthetic construct
  misc_feature 1..88: note = engineered ribonucleic acid scaffold (ERS) sequence
  source 1..88: mol_type = other DNA
actggcgcttctatctgtttactctgagcgccatcacctgcgactatgtcgtaagggtaaagctccctcttcggagggagcatcagag

SEQ ID NO: 10882 - DNA, 89 bp, synthetic construct
  misc_feature 1..89: note = engineered ribonucleic acid scaffold (ERS) sequence
  source 1..89: mol_type = other DNA
actggcgcttctatctgatttactctgagcgccatcacctgcgactatgtcgtaagggtaaagctccctcttcggagggagcatcagag

SEQ ID NO: 10883 - DNA, 88 bp, synthetic construct
  misc_feature 1..88: note = engineered ribonucleic acid scaffold (ERS) sequence
  source 1..88: mol_type = other DNA
actggcgcttctatctgattgctctgagcgccatcacctgcgactatgtcgtaagggtaaagctccctcttcggagggagcatcagag

SEQ ID NO: 10884 - DNA, 90 bp, synthetic construct
  misc_feature 1..90: note = engineered ribonucleic acid scaffold (ERS) sequence
  source 1..90: mol_type = other DNA
actggcgcttctatatctgattactctgagcgccatcaccagagactatgtcttatgggtaaagctccctcttcggagggagcatcagag

SEQ ID NO: 10885 - DNA, 89 bp, synthetic construct
  misc_feature 1..89: note = engineered ribonucleic acid scaffold (ERS) sequence
  source 1..89: mol_type = other DNA
actggcgcttctaatctgattactctgagcgccatcaccagagactatgtcttatgggtaaagctccctcttcggagggagcatcagag

SEQ ID NO: 10886 - DNA, 87 bp, synthetic construct
  misc_feature 1..87: note = engineered ribonucleic acid scaffold (ERS) sequence
  source 1..87: mol_type = other DNA
actggcgcttctactgattactctgagcgccatcaccagagactatgtcttatgggtaaagctccctcttcggagggagcatcagag

SEQ ID NO: 10887 - DNA, 88 bp, synthetic construct
  misc_feature 1..88: note = engineered ribonucleic acid scaffold (ERS) sequence
  source 1..88: mol_type = other DNA
actggcgcttctaactgattactctgagcgccatcaccagagactatgtcttatgggtaaagctccctcttcggagggagcatcagag

SEQ ID NO: 10888 - DNA, 88 bp, synthetic construct
  misc_feature 1..88: note = engineered ribonucleic acid scaffold (ERS) sequence
  source 1..88: mol_type = other DNA
actggcgcttctacctgattactctgagcgccatcaccagagactatgtcttatgggtaaagctccctcttcggagggagcatcagag

SEQ ID NO: 10889 - DNA, 88 bp, synthetic construct
  misc_feature 1..88: note = engineered ribonucleic acid scaffold (ERS) sequence
  source 1..88: mol_type = other DNA
actggcgcttctagctgattactctgagcgccatcaccagagactatgtcttatgggtaaagctccctcttcggagggagcatcagag

SEQ ID NO: 10890 - DNA, 90 bp, synthetic construct
  misc_feature 1..90: note = engineered ribonucleic acid scaffold (ERS) sequence
  source 1..90: mol_type = other DNA
actggcgcttctattactgattactctgagcgccatcaccagagactatgtcttatgggtaaagctccctcttcggagggagcatcagag

SEQ ID NO: 10891 - DNA, 88 bp, synthetic construct
  misc_feature 1..88: note = engineered ribonucleic acid scaffold (ERS) sequence
  source 1..88: mol_type = other DNA
actggcgcttctatatgattactctgagcgccatcaccagagactatgtcttatgggtaaagctccctcttcggagggagcatcagag

SEQ ID NO: 10892 - DNA, 88 bp, synthetic construct
  misc_feature 1..88: note = engineered ribonucleic acid scaffold (ERS) sequence
  source 1..88: mol_type = other DNA
actggcgcttctatgtgattactctgagcgccatcaccagagactatgtcttatgggtaaagctccctcttcggagggagcatcagag

SEQ ID NO: 10893 - DNA, 88 bp, synthetic construct
  misc_feature 1..88: note = engineered ribonucleic acid scaffold (ERS) sequence
  source 1..88: mol_type = other DNA
actggcgcttctatttgattactctgagcgccatcaccagagactatgtcttatgggtaaagctccctcttcggagggagcatcagag

SEQ ID NO: 10894 - DNA, 89 bp, synthetic construct
  misc_feature 1..89: note = engineered ribonucleic acid scaffold (ERS) sequence
  source 1..89: mol_type = other DNA
actggcgcttctatcttgattactctgagcgccatcaccagagactatgtcttatgggtaaagctccctcttcggagggagcatcagag

SEQ ID NO: 10895 - DNA, 88 bp, synthetic construct
  misc_feature 1..88: note = engineered ribonucleic acid scaffold (ERS) sequence
  source 1..88: mol_type = other DNA
actggcgcttctatcagattactctgagcgccatcaccagagactatgtcttatgggtaaagctccctcttcggagggagcatcagag

SEQ ID NO: 10896 - DNA, 88 bp, synthetic construct
  misc_feature 1..88: note = engineered ribonucleic acid scaffold (ERS) sequence
  source 1..88: mol_type = other DNA
actggcgcttctatcggattactctgagcgccatcaccagagactatgtcttatgggtaaagctccctcttcggagggagcatcagag

SEQ ID NO: 10897 - DNA, 89 bp, synthetic construct
  misc_feature 1..89: note = engineered ribonucleic acid scaffold (ERS) sequence
  source 1..89: mol_type = other DNA
actggcgcttctatctgaattactctgagcgccatcaccagagactatgtcttatgggtaaagctccctcttcggagggagcatcagag

SEQ ID NO: 10898 - DNA, 89 bp, synthetic construct
  misc_feature 1..89: note = engineered ribonucleic acid scaffold (ERS) sequence
  source 1..89: mol_type = other DNA
actggcgcttctatctgtattactctgagcgccatcaccagagactatgtcttatgggtaaagctccctcttcggagggagcatcagag

SEQ ID NO: 10899 - DNA, 88 bp, synthetic construct
  misc_feature 1..88: note = engineered ribonucleic acid scaffold (ERS) sequence
  source 1..88: mol_type = other DNA
actggcgcttctatctggttactctgagcgccatcaccagagactatgtcttatgggtaaagctccctcttcggagggagcatcagag

SEQ ID NO: 10900 - DNA, 88 bp, synthetic construct
  misc_feature 1..88: note = engineered ribonucleic acid scaffold (ERS) sequence
  source 1..88: mol_type = other DNA
actggcgcttctatctgtttactctgagcgccatcaccagagactatgtcttatgggtaaagctccctcttcggagggagcatcagag

SEQ ID NO: 10901 - DNA, 89 bp, synthetic construct
  misc_feature 1..89: note = engineered ribonucleic acid scaffold (ERS) sequence
  source 1..89: mol_type = other DNA
actggcgcttctatctgatttactctgagcgccatcaccagagactatgtcttatgggtaaagctccctcttcggagggagcatcagag

SEQ ID NO: 10902 - DNA, 88 bp, synthetic construct
  misc_feature 1..88: note = engineered ribonucleic acid scaffold (ERS) sequence
  source 1..88: mol_type = other DNA
actggcgcttctatctgattgctctgagcgccatcaccagagactatgtcttatgggtaaagctccctcttcggagggagcatcagag

SEQ ID NO: 10903 - DNA, 90 bp, synthetic construct
  misc_feature 1..90: note = engineered ribonucleic acid scaffold (ERS) sequence
  source 1..90: mol_type = other DNA
actggcgcttctatatctgattactctgagcgccatcaccagggactatgtcctatgggtaaagctccctcttcggagggagcatcagag

SEQ ID NO: 10904 - DNA, 89 bp, synthetic construct
  misc_feature 1..89: note = engineered ribonucleic acid scaffold (ERS) sequence
  source 1..89: mol_type = other DNA
actggcgcttctaatctgattactctgagcgccatcaccagggactatgtcctatgggtaaagctccctcttcggagggagcatcagag

SEQ ID NO: 10905 - DNA, 87 bp, synthetic construct
  misc_feature 1..87: note = engineered ribonucleic acid scaffold (ERS) sequence
  source 1..87: mol_type = other DNA
actggcgcttctactgattactctgagcgccatcaccagggactatgtcctatgggtaaagctccctcttcggagggagcatcagag

SEQ ID NO: 10906 - DNA, 88 bp, synthetic construct
  misc_feature 1..88: note = engineered ribonucleic acid scaffold (ERS) sequence
  source 1..88: mol_type = other DNA
actggcgcttctaactgattactctgagcgccatcaccagggactatgtcctatgggtaaagctccctcttcggagggagcatcagag

SEQ ID NO: 10907 - DNA, 88 bp, synthetic construct
  misc_feature 1..88: note = engineered ribonucleic acid scaffold (ERS) sequence
  source 1..88: mol_type = other DNA
actggcgcttctacctgattactctgagcgccatcaccagggactatgtcctatgggtaaagctccctcttcggagggagcatcagag

SEQ ID NO: 10908 - DNA, 88 bp, synthetic construct
  misc_feature 1..88: note = engineered ribonucleic acid scaffold (ERS) sequence
  source 1..88: mol_type = other DNA
actggcgcttctagctgattactctgagcgccatcaccagggactatgtcctatgggtaaagctccctcttcggagggagcatcagag

SEQ ID NO: 10909 - DNA, 90 bp, synthetic construct
  misc_feature 1..90: note = engineered ribonucleic acid scaffold (ERS) sequence
  source 1..90: mol_type = other DNA
actggcgcttctattactgattactctgagcgccatcaccagggactatgtcctatgggtaaagctccctcttcggagggagcatcagag

SEQ ID NO: 10910 - DNA, 88 bp, synthetic construct
  misc_feature 1..88: note = engineered ribonucleic acid scaffold (ERS) sequence
  source 1..88: mol_type = other DNA
actggcgcttctatatgattactctgagcgccatcaccagggactatgtcctatgggtaaagctccctcttcggagggagcatcagag

SEQ ID NO: 10911 - DNA, 88 bp, synthetic construct
  misc_feature 1..88: note = engineered ribonucleic acid scaffold (ERS) sequence
  source 1..88: mol_type = other DNA
actggcgcttctatgtgattactctgagcgccatcaccagggactatgtcctatgggtaaagctccctcttcggagggagcatcagag

SEQ ID NO: 10912 - DNA, 88 bp, synthetic construct
  misc_feature 1..88: note = engineered ribonucleic acid scaffold (ERS) sequence
  source 1..88: mol_type = other DNA
actggcgcttctatttgattactctgagcgccatcaccagggactatgtcctatgggtaaagctccctcttcggagggagcatcagag

SEQ ID NO: 10913 - DNA, 89 bp, synthetic construct
  misc_feature 1..89: note = engineered ribonucleic acid scaffold (ERS) sequence
  source 1..89: mol_type = other DNA
actggcgcttctatcttgattactctgagcgccatcaccagggactatgtcctatgggtaaagctccctcttcggagggagcatcagag

SEQ ID NO: 10914 - DNA, 88 bp, synthetic construct
  misc_feature 1..88: note = engineered ribonucleic acid scaffold (ERS) sequence
  source 1..88: mol_type = other DNA
actggcgcttctatcagattactctgagcgccatcaccagggactatgtcctatgggtaaagctccctcttcggagggagcatcagag

SEQ ID NO: 10915 - DNA, 88 bp, synthetic construct
  misc_feature 1..88: note = engineered ribonucleic acid scaffold (ERS) sequence
  source 1..88: mol_type = other DNA
actggcgcttctatcggattactctgagcgccatcaccagggactatgtcctatgggtaaagctccctcttcggagggagcatcagag

SEQ ID NO: 10916 - DNA, 89 bp, synthetic construct
  misc_feature 1..89: note = engineered ribonucleic acid scaffold (ERS) sequence
  source 1..89: mol_type = other DNA
actggcgcttctatctgaattactctgagcgccatcaccagggactatgtcctatgggtaaagctccctcttcggagggagcatcagag

SEQ ID NO: 10917 - DNA, 89 bp, synthetic construct
  misc_feature 1..89: note = engineered ribonucleic acid scaffold (ERS) sequence
  source 1..89: mol_type = other DNA
actggcgcttctatctgtattactctgagcgccatcaccagggactatgtcctatgggtaaagctccctcttcggagggagcatcagag

SEQ ID NO: 10918 - DNA, 88 bp, synthetic construct
  misc_feature 1..88: note = engineered ribonucleic acid scaffold (ERS) sequence
  source 1..88: mol_type = other DNA
actggcgcttctatctggttactctgagcgccatcaccagggactatgtcctatgggtaaagctccctcttcggagggagcatcagag

SEQ ID NO: 10919 - DNA, 88 bp, synthetic construct
  misc_feature 1..88: note = engineered ribonucleic acid scaffold (ERS) sequence
  source 1..88: mol_type = other DNA
actggcgcttctatctgtttactctgagcgccatcaccagggactatgtcctatgggtaaagctccctcttcggagggagcatcagag

SEQ ID NO: 10920 - DNA, 89 bp, synthetic construct
  misc_feature 1..89: note = engineered ribonucleic acid scaffold (ERS) sequence
  source 1..89: mol_type = other DNA
actggcgcttctatctgatttactctgagcgccatcaccagggactatgtcctatgggtaaagctccctcttcggagggagcatcagag

SEQ ID NO: 10921 - DNA, 88 bp, synthetic construct
  misc_feature 1..88: note = engineered ribonucleic acid scaffold (ERS) sequence
  source 1..88: mol_type = other DNA
actggcgcttctatctgattgctctgagcgccatcaccagggactatgtcctatgggtaaagctccctcttcggagggagcatcagag

SEQ ID NO: 10922 - DNA, 91 bp, synthetic construct
  misc_feature 1..91: note = engineered ribonucleic acid scaffold (ERS) sequence
  source 1..91: mol_type = other DNA
actggcgcttctatatctgattactctgagcgccatcaccaggcactatgtgctattgggtaaagctccctcttcggagggagcatcagag

SEQ ID NO: 10923 - DNA, 90 bp, synthetic construct
  misc_feature 1..90: note = engineered ribonucleic acid scaffold (ERS) sequence
  source 1..90: mol_type = other DNA
actggcgcttctaatctgattactctgagcgccatcaccaggcactatgtgctattgggtaaagctccctcttcggagggagcatcagag

SEQ ID NO: 10924 - DNA, 88 bp, synthetic construct
  misc_feature 1..88: note = engineered ribonucleic acid scaffold (ERS) sequence
  source 1..88: mol_type = other DNA
actggcgcttctactgattactctgagcgccatcaccaggcactatgtgctattgggtaaagctccctcttcggagggagcatcagag

(The sequence listing continues in the following parts.)
